United States Patent Application Publication US 2011/0183924 A1 - sequence listing, part 220

SEQ ID NO: 562445 - DNA, 2074 bp, Homo sapiens
  misc_feature (1309)..(1309): n is a, c, g, or t
ggcaagcgttgtcgtgcggagcttagcacaccgtccgagtcctaacaatggcgtgcagatatgcgtacctatacggactcaatattagacgacttcgtacgctccctttggtacccatagattgcgcggcaaggtgcagcgcagcgtacgtgggcctagtcatgaatcgtaagtagagagttgcgagtggacgactccgaggacaaggaagccagttagacataacatttggacgaatagggagggctagctgtggactgagaaccgggctcgcttcatacgtactagccttgggatcattctgcgtaaattgacttgcactaagcgttgaagccgctcgaagcgataggtttactcgtaacgcaagtattgcagtaattcttcacgtctagatcgccagacaataaatcggagggagcgccagggctacagggtaccgtagttggtcggaactttaattccactatgtaatagccgaccacaaatgcgggagggacttacgaaagcaccattaaaatatttctatacgcaaatagcttatttgtaattttgagccattgggagagaaggaaatatttctaaggtgtgcgttggaaagcatagggtaaacgttgagtacaccagtggagctatcggttttgggcatagatggtgggattggcgttaagggttggaaaatttttaagcaaaagacggtagggagttatgtcttacacgggatcggaatataggggtgtgcgcaaccgccacgcgccgttcaacgccaatgccgaagttgaccaccacgctaggcttttgtgtgctgggtctgaagtcagcaggacatatgggcgggtttgtttgtaagcaaacgggaagcccaatagagcattttggggtcacggacgtgattggttttgcaaacttggacacgaccagatggtggcaataatctcctgacacaggtggtgaagaaccggaacaccgcacgtaaagtgaggggccgcagtgggaaaaagacacaacgaacttatcttagtaatcgcgcgacgccacaggttgtggattctggacccttggtcggcagatccgaattcccccggttccaagtgtggttcaaccaccaatgtacaaaccggaaacaaacgcagtatttggtgggtctataaacacaacccctctgcggtataaactcccaccgccataaaggacaccaatgtataaaggggtatgatccgcaaggcagtttcaacgataggggcattagtggtaaacaatgtgcggatgtaacataaacacaatataacggataggaagtgcccccatatgngatgagacctatataggcgagactgaggcccaatcgggggggtgtcccaccaggggagccgagctgggcaacataagatgtttaacctggccattatgaaagtgtgactgtgtgagctacaagtgtggtcccaagcagagcttaccctccagcgcttgtgctactgataaaggtgctcgatcgtagcaacacgtagaagattgctctattaacagaccatgagtactcattcgcgacatagtgttagcaaccagcgatctcgatgatgggcccgtcgagtgatatatgacacgaggagaaagtggctcagcccacaacaacagagagcaggcgcgagatcatgagcgacacggtgctccacagagagagaggccacgccagtggtcgaaccgaggcggatgtctacacaagaccacacggagacacggggcgtgacaccgcatctcaagcagcgaggcaccgacacccacccagccggagcctagcaaccagcggtgtcggccgacacgagacacaaaacaccgcggcgcacgtagcaagcgcctacactgcgggagagagagcagagatgtagacagcaaaagacagactagatgagacagagcagagagcaaccgacagcaggagacacaccgcgacagcaagagagcagacggagcactaaccggcacgctacaccagcagaaaccgacagacaaggagaggagagcagaagcgagagaaggaagaaacgaagcaggagcacacgcgcagcgaagagagcac

SEQ ID NO: 562446 - DNA, 279 bp, Homo sapiens
ctcatagtccctgggacatccattcaattaccaagacaagatggcacaatttcaaacactattactccaagttcaaaatatgatatttagaaaagaaattgtaggctatgtcaaaacggcaacagtctttagaaaaactccgtcttctaaagagattctatccaaacaaaaaggtagtaactgaatcatattttctcatccattaaaccccaagccagagaacttgccctactaatttattcatattgctggaattttctccaacagtataaatgctgg

SEQ ID NO: 562447 - DNA, 152 bp, Homo sapiens
  misc_feature (122)..(122): n is a, c, g, or t
tctggtcctcctaggagcggccgcctgcgcgcgccgccccgtggtcggatcctgggcggcagagaggccgaggcgcacggcggccctacatggcgtcggtgcagcacgtgctcttgccagtnctggaccgcgccacctgcaaccggcgcacg

SEQ ID NO: 562448 - DNA, 241 bp, Homo sapiens
  misc_feature (39)..(39): n is a, c, g, or t
ccacgcatggccagccaatgccgcatgcaggtcccagcntttcccggcagcaagcaggtccatcgcatccttcatggtggccagtccctcccttgcaagcaggttgctgcatgcatgttgctgcccgagggcaacccaattgttcttgagcactgcggtggtcaaagcagtcagtgtgctggagccacagcagtcaagcgtctcgtggcacaggtcttcaccacagccttggcgttgttgg

SEQ ID NO: 562449 - DNA, 436 bp, Homo sapiens
agaggatccccagattgtgaaataggtaggtatatatgaggtaaatgaaatattctgatacagacatgcaatgagttaacaatcacatcagggtaaatggcatatgcatccccttaagcatttattctttgtattacaaacaatccaattatactctattagttatttttaatgtacaataaattattgttgactgtagtcaccttgtgctatcaaatattagatcttattcattccatctaattatacttttgtacccattaaccatccccacttctgccctgtccttaccccctctgccactattcttctcagcctctgataaccatctttctactctgtatctccatgagctcaattgttttaatttcgagctcccacaaacaagtaagaacatgcaaaatttgtctttctgtacctacctatttcacaatcg

SEQ ID NO: 562450 - DNA, 491 bp, Homo sapiens
caatccgaatcagaagagctgacaattgctggaatgaccttaataactttgatgtttggagcggaacgagaaagacagtcgcgtttgaaaatatatctcccagcatttagtgggattgtatttatggtggactgtgcagatcattctcgactcgtggaatacaaagttgagcttaatgctttatcgactgatgaaaaatataccaatgtgcaaatacttatcttgggtaacaaaattgacagaacagatgcaatcagtgaagaaaaaaatccgtgagatatttgggctttatggacagaccaaaggaaaggggaatgtgacactgaaggagctgaatgctcgcaacatggaagtgttcatgtgaagtgtgctaaagaggcaaggttacggcgagggtttacgctggatatacaagtatattgactgatgtttggacggtgaaaataaaagagttttacttctctggactgatcctaaaaataataaaatta

SEQ ID NO: 562451 - DNA, 670 bp, Homo sapiens
tgagcgggccggagctgcggctgctgtatttgtcctagccggtgctggggcggcggggtggcggagcggcgggcgggcgggagggctggcggggcgaacgtctgggagacgtctgaatggaccaacgagactttgtgagaccatgagactgcgcgctggggggacctggcggctatggcgtgcgtgctgagatttcccttgcgattcggctgggagctcggcgcacgggatcgtcccagtggccgtgggctcggagaccgcgtacccttggcggggctctccgggattttgctaccgtttttggctccctgctcgatcgaaactgcctcttctcacgtggctgtcggcattcaatctggagcgtcgactgggtgccttggcgcagaggaggggcgcagccatggcttgccctctgtcgcgcgttctcgtgtgtgccgctgtcacgcgtgcagtttcgccatgccccgagaccccgaggatgctgtgctgactggtgaggtgctccctcaggctccttggctcttccttgggcagcaggcgaatccggactgtgaggcctcttcgcgttgcccattgacgcctggaggacgactgacctgctacagcagtgggacatcgacacagggacgctgatatgcaaacgcgaaagcaaggagaaccagtggttgag

SEQ ID NO: 562452 - DNA, 281 bp, Homo sapiens
tctcttggtgaaacggcggtcctttgccaggggggttttttttcttagatttttactgttgggaaaccccttcaaaagggcaaaaacttccttggggccctccaaatgttttttcccccgggggggaataaaaaaaaaaccccccccttttttaaagggggggattttggcccccgggggggccccatcccccggcttttttaaaaaaataaataagggggttccccccatttttttttttaacggggtgggttattaaccggccccgctttcccatttta

SEQ ID NO: 562453 - DNA, 161 bp, Homo sapiens
cctcactgccaccacctgacatcagcaccagtgacaggctggtcagagggcggggctggtagggtttgtcctaagaggaccaccgccagctctgtccctttagtcacctcccgttggcggaggatcctttccctgggttaagaactcccagcccgttttat

SEQ ID NO: 562454 - DNA, 405 bp, Homo sapiens
  misc_feature (112)..(112): n is a, c, g, or t
  misc_feature (155)..(155): n is a, c, g, or t
  misc_feature (172)..(172): n is a, c, g, or t
  misc_feature (174)..(174): n is a, c, g, or t
  misc_feature (195)..(198): n is a, c, g, or t
  misc_feature (205)..(207): n is a, c, g, or t
  misc_feature (241)..(241): n is a, c, g, or t
  misc_feature (277)..(277): n is a, c, g, or t
  misc_feature (286)..(286): n is a, c, g, or t
  misc_feature (288)..(288): n is a, c, g, or t
  misc_feature (294)..(294): n is a, c, g, or t
  misc_feature (338)..(338): n is a, c, g, or t
  misc_feature (349)..(349): n is a, c, g, or t
  misc_feature (366)..(366): n is a, c, g, or t
  misc_feature (386)..(386): n is a, c, g, or t
agagggacactttgccaccatcaccttgaccttcatcgcaagacggagagactgagctgtgcatggaaggtcgaggcatccctgctcctgaggaagagcggacacgacaggnctggcagcggtactactttgagggcattaaacagacctttggntatggcgcacgcttatntnagggccagcgcaggggactcnnnnctgctgnnnacttcagtccagctctctcctgactggggcttgngactcacaggattgcatcgtcccagctgctaacttngggccgggncnccaccnttccacatataccttgggtttttgcatgtttttctgcttgggtngggtttcagangggcaatttctcttttnatgtgttacatatggttaantaaacataattttaaaaaa

SEQ ID NO: 562455 - DNA, 579 bp, Homo sapiens
  misc_feature (551)..(551): n is a, c, g, or t
aggaagatgccccagactcactgctcccactctgggcaccaggaacccagataacaaaacctaggccgagtccccgagagcacaaaagaatggaagatatagaattgtgggtaagagacagaggaaacagtgagagaggctaagactcatataattgggattcccgagtaagatgtgagaaatgaaggcaaaggaatatttaaagacgtctaagcacttactaaaactgattcaaagacacgccacaaacttgaaaagtcctacaaaccaaaggagatgactaaaaagaaaaccatatttaggcacaaaaaaagaagggagggatagaggaaacagcaacaacaacaaaaaagttttttttaacatgaaactatttttttctaatttttttccccgtggtacagccccaggcaatcctgagaacgtgtgccacaaaagcattttttctttcttttcaatttcaacttttattttagatacaggggctacatgtgcaggttacatgggtatactgcacccaggcagggagaacagtacccagtaggtagttnttcaacccacgtcctcccccatctagtc

SEQ ID NO: 562456 - DNA, 657 bp, Homo sapiens
gggcattaccgctgcctttctgcagaaaacggatagactacggctcagcaagaaccagcgcccagccagagccaaggtcacagagcacgtccgtggcacgcgtccaaaggctcctcgcacctaccccagcaactcaaattcagcacgctcaggacttccgtgcgacgcgcgatcaaaagacgaatatcacggtactgcaatgctcgagtaccacagcctcaacgctcgaattgtgacaatgtgggccatgtgagaagtcgagagatgccgcgtcacgtatgtgatgtactacgagatgtcctacggcttgaattcatcgagatgcacaatacaggctgagatcgtcgagaagaggctgaacgggattatgtgccgcaggtcctgccctacctctcccgatgagcaccagcagcaggtcttgggagccattgagagggccaagcaggtcaccgttcccgagctgaactctatcatccgacagcatgctccaatgtccatcctagctgtctccgagctcgcgtggccctggccctgtccccttgtacctccactacccgtggggcttgcagcctgccttcgctgccggcggttcagcgctaggctcgcggtctccatctcgacttgtccgcgtctgggttcccaggcccagctctccag

SEQ ID NO: 562457 - DNA, 182 bp, Homo sapiens
tctcctcgtgactatctacagcgcgtcccactcgtccaccgtttgacgcttgggcccgcttgccctcaacgcccactttgtcccgctcctttcctggtatgacaccgcatttggctccagcaccagggtggtggacctcattgcccacatggcctccaaggagtaagaaccctaaagcacca

SEQ ID NO: 562458 - DNA, 102 bp, Homo sapiens
tgtaaaccaccctattcctccccacactcattgcttaccacgctactcctacctatctccccatatctaacaacgtaaaaataaaatgacagtttgaacata

SEQ ID NO: 562459 - DNA, 383 bp, Homo sapiens
ccaaaagaaagttctttcttgataacctcaccaacgcaggtgtggcaccctgccttttccgagcctgatatcttgctttcagccaaggtctctccgcccaccctggcatatagttctcagctgtgtgtcttgtgaacccagtcttgaatgaaggtccctttcacaaacaccccatattaacccacagcatagttgttatcaaagtataagatcccgttggcatccgaggtctcttcttccagtttgtgaacggcaaactcttcgcccgattcacaatagcaggtgtcttgttggtatttacacatgagagcacaaaatgtgtgctcattcagtctggtgtgcccccacacaggactctgcggtgtattcttctccgctggccc

SEQ ID NO: 562460 - DNA, 577 bp, Homo sapiens
  misc_feature (147)..(147): n is a, c, g, or t
gacaaggtgagatttaattatatgttttggattatgtgctgggtgtttacattatatgggtttttgttggtgatgtttgttgaaaaaaactaccaggtcctgttcttggaatatgagggaaaacttgtaaaacacataagtgagctngacagaacacccactaatattgttttgcccatttcaaagtctttcacagttttttctcacaatgggcgataccagctattctgtaacatgttggcagtattacatgttgatcgtatttttaaaattacttctgttattctaatttccttgcttggcatcagaattatttttccccatttttatagtctgtgaaatcaggtgtttttggacccactggaccaggtcacctttaaaatcacttccagttttgagatcctatagttctgtgaagtctgtcctgtgtcttactaatcctagtatactgtacaagtaaccttcttagccctgatactagaaattataaatgcatacaccttaacatacatgttcacacacagatatgtatgtctatatgcagtgccctcttggtcatcttggctcaattaggcgg

SEQ ID NO: 562461 - DNA, 345 bp, Homo sapiens
ggagagacagaactagtctcgaggtgtccccgtgtcttgtatcatgcttattgtatatggcagatgctatatgcaaacaatctctaatgatggggcgccgagggggctgaaacttcttgatgtagtccatcctgcagcagaagacattgggtagacattgaccaaatcccaagatgctgaggtgggtgatggcagcccaccgtcatgtgaccttgctggactgcagagtttctgaagcaggtgaaaccctatgtggaggaaggttacacccccagatcaatcatcgcactttaacggcaggcacccacgctggcagttaacaccgatcaaagagattgctggacc

SEQ ID NO: 562462 - DNA, 553 bp, Homo sapiens
  misc_feature (251)..(251): n is a, c, g, or t
caagtaatcagcaatgctggaggcagacccaccagtgcgacccacctccagagtactagtgggggaggtgaagcagatagtgtctccactgctgggggaccattatgtgcagctgccagcaacctacatgaacttgggccccagcacctcgcatgaaatgaatgtgcgtccagaacagccgcagttttcacccatgccagggaatgtacgccggccccggccactttcaaagcctcctcggcccacttganttagtttttgggctggacctgtttagctcccttgagctaaccccaagctgcctttgggccatgccaggccaaagggcagtggccctcccccttgttcctgccctttaactttcaaaggcaataggtaaatggggcccattaggtccctccctccccaaagtgagccagtaagggcagtcctccaacatgtatttatggagtgcctcctgtggacccttttttttgggcccagtggactcaccagtgccccccccacccctgccccttgaaccaataaaggaacaaatgtcttttaaagccca

SEQ ID NO: 562463 - DNA, 1719 bp, Homo sapiens
  misc_feature (275)..(275): n is a, c, g, or t
  misc_feature (486)..(486): n is a, c, g, or t
  misc_feature (934)..(934): n is a, c, g, or t
  misc_feature (1718)..(1718): n is a, c, g, or t
tggggctctctgaccagcaccatgggcgggttgggcaaagaacaaggccgcctttacagaaagggcgggcaaaaaggggacgccaaagaaagaaaggtggtgtgactccattttctcataaagaaaagattgggtattgattgtgaaacgccaccgtgcatagtgtccaattataagaaacatttgtgtggaaagacacgcctcgtctccaccgaggacacccgagaggagacacccaaaaagtgtgcccttcctgagagtggctcctcagaggngtctcaggtgtgtgtttgagaaaaggtggagtctctgtggcgtgaaaattgtgcgagaaagtggagtgaacagtgtgtgccttatttgagacacaatatctccagagccgtgatattcacgtgaaaagatatgtctctcgacgggtctaaaacacacacgtggcgcgtgaaacttaaaacttctcccagagtgagccgtgtgggatatctntttcaaccgcgtgtgacacaaaagtgtggtgtctctcccgagggggctcacaacacaatggtggacacgaacacacactgtgcatgtgtagagagcgctctccacgcgtgttgagaatgtgttcttcagagagacactataccgcggagtgtgggatacacacgtgtgcagctctccgactctgtgatcacggtggggagtgggaggtttctcaccataacaaaaaacgcggcaaccaacttcagagatatgacgcggaaaaggaaaccctcttttgaagtcgttccgagaacaaccccaaaagcgagggttccccggacccaaaaattcgcggggaaagagaaaacgtatcgtcacgtggggaaccaactccatgtggcaacccgccgaaagaagaggtgggtgcgcgcacgcacaccacaacgacgttgacatctttctgctaacnacaacacagtggtgggtcttccacaaactaacatgttgcgggagttctcctccaggaaacacgacgtcttgtgcgtggcaaacaccaagcactcttttagaacagcggggggttgtgccccaaattcctatttttatatccccttcttcccaagatagaaagtgctcgttccggtgtgacaacacagagcgtttcaaaacattctgctatgataagaaaggcacccaagttttgcgcacattggtgggaaacggtctcaatgtgagaacctaccaatggggataaaagcggccacgatatctctcggtgggaagcaaggccgcctctgtgctggcggcacaacaacggtgcgtccctgatcgttgtggaccacgacagtctgtgttggtgttattgacatccccgcccagtctccaaagattgttcgtgctctaataggttcagcacaccttcgaacatgtggtggcgccaatgacaaggtcgtctcttcttgttggtaacacacaaaacaacaaaccctacggacgctctatttcggggcgggaacaacaggtgctttaagtggccatggtctactagtgttctcacaccaacttttcatcagggaggaaaccggcgcccatgggaggactaatacagtccagcaactcatctacagtaacgactaacttcgctagtcaggcacagcttgttgactcgtctaaatgactaggagtagagacagctcacctacgtctcatgactcaactgtatactcatcgactactactcctgctatcgagtna

SEQ ID NO: 562464 - DNA, 119 bp, Homo sapiens
tgcatggcagaagactctacgtggcgacgaggccagagcaagcgtggatcctgcacctgaagtagccattgagcatggcatcgtcaccaactgtgacgacatgggcagtgagccagggt

SEQ ID NO: 562465 - DNA, 341 bp, Homo sapiens
gtacatggaagatggtgggggtagattttctattaatgctgcctggctggagtcatagcctgggccccagggaaagttgaattcctaagtaagtcatcatggagatggagagttgggccttggagggggagaccctataccctttgatagcgagaaagtttaagagagcagtggccgtgtgagtttgagagtcttttagagaggggctgcaaagaagaaggtcgtccacatattgaagatgactgggagacaggtttaaggaagtgaggtttcgggctagagcttgtccaaagaaatgagggctatccctgaagccctgagggaggacagtccatgtgagt

SEQ ID NO: 562466 - DNA, 512 bp, Homo sapiens
ccgcatactccagaggctgagatctgagtatcgaccatgtcaagatgcagtgtgccagcctgtacgctgccattgctgactgctgatcacgtccgtggggacgatggcactcatggatgctatagaacaagctggtcaagggctggcaggatgcccctgtgataagggcacagcaggactctggtccggcttgcttgaaggagataccatggagcttgatgaatgtcaagctgggccttggcatgtggagatcggcagctactcgcaagctgctggagggctaggagtgcaggctgaatggcgaacgcgttggacaagtcaacgtcatctgtagctacatgtccacgcatcgtccagtggctatagcggtgccagcggtgtcggcagtggcattaggcctgggtggaggaagcaggtactcctatggcagatggatctaaggccacttggagggttggctttcaggtatccagctatgttgtgcagagcccattgggagagttggcctccaa

SEQ ID NO: 562467 - DNA, 235 bp, Homo sapiens
cggagacttgtccctcagcgtcacgtgccgtctatatgctcaaaggtggactgtctaggcagacgaagctctatgacggtagtcagtatgtcactgggctcccaagcctgattcaaacaggactgtcggtctcctctcaccccttaatactgtgcagaccaaactcctaggactcttgaaccatctgcaccagtttagtgctttgcagccacttttagacaaaaatggctccatt

SEQ ID NO: 562468 - DNA, 1129 bp, Homo sapiens
  misc_feature (59)..(59): n is a, c, g, or t
ggcccgggctgtttcggcgtctgcaggcgccaccgctgcctctttccggactgtgaccnctcctcgaccgccagccgcttcagctgctgtccttccgaactcccctgcgcctgcctgagaccatgtgcatccctgctccggttgcggccgcacctgcccatccgctggctgcccccatggggatccagcagagcgcaggtcgtccatatggtggaaagcgaagccagatgacaccttggcaatcattcaccactcccacaattcccgatttattccaacaattccattatgggggcaacccaattccattggcttggaaacccgcgccattggccccattataccccaagttcgtagacattcacccaaactttcagagatcccattcgattgaatcttacgttccggaacggaggaacaaccctttacgggaggccccgatattcccagcccaagaataaaagcccgacaaaaggccaccactatggctagcatacagcgctgcgcaacaaagtttttccacccaaaatctggcgagggcgttacctcaatgcgtaccccagagaaaacagatttcccgaaacgcggacaacctttcatgcgagcttcgcaaaaacagatgggattctccctcgcacacgcagggccccccagtatcccgaaactttgtggaaaccagtatgacagcttgcaatttccctacgggataaggcacaatatccggtacctgatttacgaccaccacccagaaatttacgaggacgaccacatttttagcggcccaagaatttcaccatgagtgggaattcaccaccccatatcggcacgacgcgtccgcgacaacttttacggaccccgttaagtttccccgaaaacggcgccagcaccactaatttggaacgaccaacgacaacgaacgacagatgcagcgaaagcccggagccacaccccacacaggaggagcgcgagacaaacccacacgggaaggtcgcaccacccccaactactgagcccggcgcacacaaagcgccgacacccacataaagataccaaacccggggcagcaacaaacaagacaacagtggcggccccaccaaaaagcgaggcgcacgcccagatctacccccac

SEQ ID NO: 562469 - DNA, 187 bp, Homo sapiens
  misc_feature (5)..(5): n is a, c, g, or t
  misc_feature (13)..(13): n is a, c, g, or t
aaccngagtcctnctcctgtcccgtggcagaaggtgctctgaagaggcggctgatgccagaagtcagcatgcctctctgagagaggtggaggccttagagttagcatccccctcagcggaagtctgtggagagctttagttagatccgaggctgcttcagattgatctccgaggtgaggtgagagga

SEQ ID NO: 562470 - DNA, 492 bp, Homo sapiens
tttggtgcacatgtgcaaaactaaagttgtgtcatgagaatgtaagtcttttttctactttaaacatttagtaggttcactgagtaactacaatttagcaaacctgtgtttgcatattttatggagtgcagaatattgtcattactgtcataagtgatttggagctttggtcaacaagggcaccagcagcagcacaggcagtccacctggcagtctatataagtattttttcaacatcactctcagcaacttagccactatagtgttcattgattcagtgcaggagccagtacgaaaccatctgggtataacggaaacaagtggtcattgttacattcatctgctgaacttaacaaaactgttcatcctgaaacaggcacaggtgatgcatactcctgctgttgcttctcagtgctctctttccaatatagatgtggtcatgtttgacttgtacagaatgttcatcatacagagaatccttgatggcattcg

SEQ ID NO: 562471 - DNA, 144 bp, Homo sapiens
ctctacctgctggatattaattaccctgggaaagtacagagtagcttaggaaagcaggggttttttttttttcggactttataaaacttaatttgacttcttcttcacaaggcgggagctttagttgctgttttttttttgaga

SEQ ID NO: 562472 - DNA, 429 bp, Homo sapiens
catttcttgtcttacttacttcttactactatctaactagttactaacgtttctattcgtttctctctctctctctttctttcttctttctctctctccctttctttctttccttctctctctctctctctctgtctctctctaaatcagagcatggggtctcactactgttgaccaggctgaagtgcagtggctagatctgggttcactgcagtctccacctcacaggcccaagcaatcctcccatctcagactcctgagtagctgaaactaccggcacatgtcaccacgctcagctacatattggattgcgcggtcgagacagggactcgctatattgcccaggctggtctagaactcctgggctcaagcaattcacgtgcctcggtctcccagagtgctgggattacaggcgtgagcaaacacacc

SEQ ID NO: 562473 - DNA, 889 bp, Homo sapiens
  misc_feature (40)..(40): n is a, c, g, or t
  misc_feature (105)..(107): n is a, c, g, or t
  misc_feature (165)..(165): n is a, c, g, or t
  misc_feature (177)..(177): n is a, c, g, or t
  misc_feature (180)..(180): n is a, c, g, or t
  misc_feature (189)..(189): n is a, c, g, or t
  misc_feature (226)..(226): n is a, c, g, or t
  misc_feature (275)..(275): n is a, c, g, or t
  misc_feature (378)..(380): n is a, c, g, or t
  misc_feature (415)..(415): n is a, c, g, or t
  misc_feature (454)..(454): n is a, c, g, or t
  misc_feature (469)..(469): n is a, c, g, or t
  misc_feature (476)..(476): n is a, c, g, or t
  misc_feature (533)..(533): n is a, c, g, or t
  misc_feature (595)..(595): n is a, c, g, or t
  misc_feature (611)..(613): n is a, c, g, or t
  misc_feature (615)..(615): n is a, c, g, or t
  misc_feature (622)..(622): n is a, c, g, or t
  misc_feature (627)..(627): n is a, c, g, or t
  misc_feature (631)..(631): n is a, c, g, or t
  misc_feature (633)..(633): n is a, c, g, or t
  misc_feature (644)..(644): n is a, c, g, or t
  misc_feature (648)..(648): n is a, c, g, or t
  misc_feature (650)..(651): n is a, c, g, or t
  misc_feature (653)..(653): n is a, c, g, or t
  misc_feature (665)..(665): n is a, c, g, or t
  misc_feature (691)..(691): n is a, c, g, or t
  misc_feature (695)..(695): n is a, c, g, or t
  misc_feature (698)..(698): n is a, c, g, or t
  misc_feature (708)..(708): n is a, c, g, or t
  misc_feature (710)..(710): n is a, c, g, or t
  misc_feature (720)..(720): n is a, c, g, or t
  misc_feature (722)..(722): n is a, c, g, or t
  misc_feature (724)..(724): n is a, c, g, or t
  misc_feature (732)..(732): n is a, c, g, or t
  misc_feature (742)..(742): n is a, c, g, or t
  misc_feature (744)..(744): n is a, c, g, or t
  misc_feature (791)..(791): n is a, c, g, or t
  misc_feature (887)..(887): n is a, c, g, or t
gcccagagcttggttttccaccggatccaccacgtgaganaaaaagagtctgtcacttcttcttgccagggttgagggccttttctagaccttggatgtgttttnnngggagctgatactcttcaagcaatagccagccgaggtggtggacctggtttccctggntctgcacctganggntgtaccttngccccaggggcaggattgacggtggtgctagcctggnatcgctgctgaaggatggcagccactgagtatgggtccagaccatatgnctccaagttccggaccacggtcacctttttattagacagctctttgtgctagggtgatgtcaattggacagattctccctattcttcacaatgggctcttgtnnnggaagggtcacttgataggcaggctgtaatttttncaaacacctggtcagaagactgtcccatggaagcttcangaatgtatgctgttnatttttntctccgatgccgtcacctcggctgggctcacctctcccccgctttttgttgtttggntccccccggttatttttcttggagtcgttaatgagctagttcggaacatcactgacctcagnacgctccccttcttgnnnanagcctcntggcngagnanggacatgctgnctgngnncngtcgaggggttntatatctggagggtgatcgggctgtncccngcncccctcctgnanagtctgggcngncngggcgggntcgggtctgncnaccgatgtcctcctcgggtgtttcccgtcccccgcccccctgctctncacacctttgctcagctccttcacctgtataatctgctcctgctgcatttgctgcaggaacttagagagctttttgtagcttgacttctttatgtnca

SEQ ID NO: 562474 - DNA, 390 bp, Homo sapiens
gcgtggatggaggagccctatctgcaaggaatccactacgaggatgggtgctcccctcaaactcaattgtgagctctgtggccgggtggacttcgcgctatagttcaagcagttctcaagcgcattctgattccgagtggattgctgcagataggacggtacaagagtgggatgctacctagaacgggtgggacgtttatccatatcatgaccggagcaagagcttgcaagaagcgcatggacgcatggaacctcataaacgacgttcgagtcaagcaagagcagtctgcatgcacttgcgaaggatagccaatgagcagacaacatgcactgtgccccttccggttagtgcatgttttgcgagctaacactacatgtcacgggaagact

SEQ ID NO: 562475 - DNA, 278 bp, Homo sapiens
aggtcggcgagaaatccacctgctactagatacagtatatactgttcgtgtattaaaaacattggacaatacctttctagtatatccttactatccctctctaataatgaactaatccctatctctgcaaatttccccaacaacattttggtcaagtgtgatgggctacattgtcttggttaactacaacgtttcattgaccttacatacgtctcttgggaagttggactactgggacgtgcttccactgacgctacccttttgtggccctgacattt

SEQ ID NO: 562476 - DNA, 683 bp, Homo sapiens
ctgttgtcccccagtatcagtgccctcaattccaaccaagaagagggttgaagatccatggcacttccctttcccgaagggtaaagggctcaagaataaggcgcaaataaatttgtggcctccacgtcccatcttctcttggacttgatcacctttttgacgaagtatcatagtggtcatatgactagagcttctgatatcattgagcgcttaaagtgggtgcccctgaacagggaaagtgtggaagagagagtggtgctttcaagaaatttcagtaatgaaatcaggcgcaacctttcacaagtgcttcttgccaccatgaacatcttgttcacacagtttaagaggctcaaggggacaagtccatcctcgtcatccaggccccagcgagtcatcgaggaccgcgactctcaactcggaagtcaagcccgcactctgattacctttgttggaatgatacccataccgaaccgttttgggccccccaattccaaggttggtgcagatggaggtcctcatgaattaagtgccatgctttgtgggagtctgggtcggcacactgtcagtacatcaggcacatgggcccactaggctgcgtctcctggcctcgtttctgttgatgttttgccgtggtttctgtataatgttcttttgtcaaccccctttgatttgtttgatttgta

SEQ ID NO: 562477 - DNA, 131 bp, Homo sapiens
gggtggactaatttcctcgcttaacgagaacttgtgtccagccgactagacccattctaactcttccccctctgactctcctgcgcagggtctgttcctggtttcccagtatgcataacaggaagacatat

SEQ ID NO: 562478 - DNA, 262 bp, Homo sapiens
agatctttcctttgcactccagcccgggcaacaagagcaactccacctcaaaaacaacagaatggctgggattacaggtgtgagccacagggccaatcctaaaattttttgtataggtggggatctcactatgttgcccaggctggtcttgaactcaggatttgaaattacaggcacacgtgactcacgcccagctaattgctggtattacagacataaggggttgcaccatgtcggaaaggctggtctcaaattcccgacc

SEQ ID NO: 562479 - DNA, 1007 bp, Homo sapiens
  misc_feature (205)..(205): n is a, c, g, or t
  misc_feature (531)..(531): n is a, c, g, or t
ccccactcactacttttacgtcgctccgtccgtctaagtattgtttgcggtcgccgctcctctggtgctcctcctcgtgtgttgcgccgtatagccgtgtgttatctcctggacgacacgaggactgtagtattggcgccacactgtcacttagctgttgcgagagggcggggtggcccccgtggtttttgacggggggcccccnttgccacacgcagcccgttccttgtagtgcttttctgcctgcggtcgcgcctccctgtccgcccagtgtaggcgcgggctggttgcttccgccgaaccaaccacggggagtagtgcctgcgccgcttttcgtggggccgaaacaatcaatagtttgtcgtgatacaatgaattctctctggcagttagtttttgttctctcgcgcggcgagtgacactccaccaggaatgggtgcgggtctccttgccactatattaagtggttttcctcgcaacagagggttgtgggggtgctacccaggtatgcccgggttctctttgcttatntttttaaagagagttaattgttcgggggcccctccgccgcccccccccaaaaagacgaggggttttcccaaaaaggttgatttggatatataattagcttgcgaggagaaatacagcgagagatctttggtggcagcactcctcctgaggtcgtcctgagtcgcccgctcctctagaaaagcgggtcatattgttcagttagaattttctccgaacgcatctgggagcatctataataaatacttgataaacaatgggtacacacccccccgtacttatcagggagttctgtcagcgacccaaacggccgctgcccatcggaagatagatggctatgactctattctgaggggcgccccccgccgcggctcttttgtaggctccgcccaagaacatgatgtggcccaccgctgtaacaccgtaacccccccgtcaatcaaactttttcccgcaacccaattttaaaaaacaaaaca

SEQ ID NO: 562480 - DNA, 864 bp, Homo sapiens
  misc_feature (602)..(602): n is a, c, g, or t
  misc_feature (668)..(668): n is a, c, g, or t
  misc_feature (706)..(706): n is a, c, g, or t
  misc_feature (752)..(752): n is a, c, g, or t
ctgcaacgccgagcggaggaggcaggaacctggagcgcgagcagtagctgggtgggcaccagtggctggtgatctaccacctatctgagtgcggtgaagccgcaagatccgaggttcgtgcagcgagcagggcaagatgatgcgagagtgagctgagcctgacgcgcactccgagcgcacgaagcttgagcggcagacaagtgcgtggccgcggtgaagcagtgcttgagcgctgacgtgtgtgcctaccttgaaacctgtaaggcatccatgcatgggttgacacgacagacgcgtggagcctgtgcatcatgtgatgctgccttgtgccacttggcccgtgtcaaaaaggcttggcacagaaacggcttgacagacaaggcttggcttgaactgacggacgcttgaggacagaacgggtagctgacaccgcgccttagcttgacacaaaccctgggagccctttacacacacgcacttgacacggacacgcagacttgtgagacctcgcaagggacagagtcacagaacgtccaagtaggacaacgctttacatggcagccatttttggccgaggcaccagcacaggtgcgaggcacttnatgtgccacacgcttactgtgcacacggcaacgggttgtagccttccgcgtaaacggttatggcgntcgcacctccgacttttggcacacgggcacagcacctnttggggaaaatcttgccaagcacaggaaggcggaaatctcggaagnacattgcaacagccttgggcccaacggcacggtatcgcccagggtatttgaccccaggaaggagacggaacttggggacgttgcaaggccaaggaatgttaaacgaaacggt

SEQ ID NO: 562481 - DNA, 420 bp, Homo sapiens
tttccgcgaagaaagatgggttcccccaagagcccaagatttcgcgggacacagagctcccaatataaacctagatttcttgtttgacccacagctatacctattgagtataaacttctgtataaggaaaggtttcccccacctatataaacttatgaacaccccacgcctcgtggttcttctgaagaagacctcgaaagaatttcgaaggctcccctcgggccacagggcagccctttacggagctccttatgtataaggagcttatccaaactggtttccaagcaccacgaagctcacagtatatttacaccccgagaatacccaagggtggagagaatgctccacagctgctggtgaagaagcatgaataggtcccacccgctgtacatttgggaaaattaaactttatttaatcca

SEQ ID NO: 562482 - DNA, 820 bp, Homo sapiens
agcctgttgttgagctcagtatgtcagtgggaatccggggctgggccaggtctagtgttcccaggtgatgtgatctcgtgtgtgatgtgcgtggtacggaaaggtgcgttaaagtggaaagggtcgttgccactctcgtgccacggcatctgtggtcgcctgtgctcagcagtggccgagtgggaccagtgtgacggtttatcttgttcttgtgacgaccataagtttgcatgcggtacgcgcttaaccgcatcactggtgtggaggagcaggtcaggcaacgaactccctctggcagtggcttctacttgctgacctgatacgctgtaagctctttgtgattgtaacttgggtgggcttggggcactgatgaacttagactgctctatggcaatggcatttggtcagggtttgtgaatcttaatctcagagaggaagacaaagttatgccaaggtcccccatcaagtgtctgggctcaaagaggttaatattccgggatttggatttgttgaccttcgccatgaagtttgacccacaagaaaatgccccatataaatgactgcgcaaaggctgctacttgtcctggaattggctccagaagacctattgtgtgctgcaattggagaaagctgggaatagacgggagttgggggagtgcaggaagggatgaggagaggtcagaggagataagacttggtgtgatgcttacagaaagaactaagcttgtgttgtgaagcgggcgattaggcgtggaagcaggggaaagggttctgaaggcggtaaaattaagcgatggttaagagtgtggatgttagagga

SEQ ID NO: 562483 - DNA, 130 bp, Homo sapiens
  misc_feature (71)..(71): n is a, c, g, or t
tcttcaagttcagtgtgacattttcccataatcaaactcacttcacagcagacgctttggtccagaatggncatgacacatcgcaaaaaacaaaacaaaaaacattacttgccttatcaaaaaccaacta

SEQ ID NO: 562484 - DNA, 780 bp, Homo sapiens
  misc_feature (219)..(219): n is a, c, g, or t
tttgcagaggtgctcggagggagcctcccacttctaggattgggccggtggatcccgccctctgtcgttgttcgccccccccccggtgggtggccaaacaccaattgggaggttcgttcaatggaccctcgcccccctcccggggcgtgtccgctttgctgacacatctcttcgttcgggggtcgaacccacaggcgtgggccatagttgtctgttgcncccgccaccttccaaggcttcctccgcttgaccttgtggcccgccttgccctctgcccccccccccctctctgttctcgtctgccagggagccgctcgcgcgggaagttctcttcatttagggttcgccccgcgctcccttcggtcctgctcttgtccccactcgcgcgcttgtcattcactcacgctccatcgctcgcgtgggctcgcccacgacgcctccctctctgttggcgtgttgtgtactcatacaagcctcggtcacactctcgcctcgccgcgtatgtagcatccaagacacctcgctccgctcgctctctcttgtgtccatgttgggatgaggactctcaccccccccccccccaccccgacgatgtgtattgttctcctgtcccgtgagacaataagagatgatcatatggactcacccttctttcatctcccccccccccccctcttcttttttctttccaccttcagccacctctgccccacctcttcttgtcacgcaaccactgacttcattccaccctccttcttgttgaccctccgtcagtgcgga

SEQ ID NO: 562485 - DNA, 300 bp, Homo sapiens
  misc_feature (78)..(78): n is a, c, g, or t
agtctaaggccaaggcgcagacgcacagtgcccaagcagccgttgacgccggcagcggctgagggggctgcggcgganccgggcccacgaggcgacgaaggaggcgggacggccttcacccagccccggacgcccgagacagggaagctgaggacaaggcaggagcgcgagacatagacccggaccagccagaggacgcgggctccgaggacgagccggaggaggggggccagcccaaggaaggcaacgcccacggggcagcccgcccgccggcacccgcccccgcccaccggcgagaaa

SEQ ID NO: 562486 - DNA, 278 bp, Homo sapiens
tggacaacacgcaccggacgctgcacggcgccttgatggacgcggagctgctggccgaggtctacatcaacatgacccgcggccaggacgcttgctgatcgacagcgacgcgtccgagagcggcgaagggcagggcacgcaggaagtcgtggcaatcgatttcagcgccttcgacctgcccgtgatcaagcccacggacgacgagaccgaggcgttcgagaaatcgctggaagccatcgacaaagccagtggcggaaaaactttgtggaaatcgattg

SEQ ID NO: 562487 - DNA, 339 bp, Homo sapiens
ctactagaggatccccgcaagctcactttcttggcacatgtatatgaaatgtttgagttattttttaccaccagcatgtattataattgtagtcagggaagaaaaaaggttttaaaaatgtctccacagctgggcgcagtggcttacatctgtaatctcagcactttgggaggccaaggtgggcggatcacgaggtcaggagatcgagaccattccggctaacacggtgaaaccccgtctccactaaaaatacaaaaaattagccgggcgtggtagtgggcgcctgtagtcccagctactcaggaggctgagacaggagaatggtgtaaacctggccag

SEQ ID NO: 562488 - DNA, 445 bp, Homo sapiens
  misc_feature (15)..(15): n is a, c, g, or t
  misc_feature (62)..(62): n is a, c, g, or t
  misc_feature (64)..(64): n is a, c, g, or t
  misc_feature (67)..(67): n is a, c, g, or t
  misc_feature (69)..(69): n is a, c, g, or t
  misc_feature (78)..(78): n is a, c, g, or t
  misc_feature (80)..(80): n is a, c, g, or t
  misc_feature (83)..(83): n is a, c, g, or t
  misc_feature (95)..(95): n is a, c, g, or t
  misc_feature (112)..(113): n is a, c, g, or t
  misc_feature (126)..(126): n is a, c, g, or t
  misc_feature (143)..(143): n is a, c, g, or t
  misc_feature (155)..(155): n is a, c, g, or t
  misc_feature (166)..(166): n is a, c, g, or t
  misc_feature (175)..(175): n is a, c, g, or t
  misc_feature (190)..(190): n is a, c, g, or t
  misc_feature (196)..(196): n is a, c, g, or t
  misc_feature (210)..(211): n is a, c, g, or t
  misc_feature (222)..(222): n is a, c, g, or t
  misc_feature (225)..(225): n is a, c, g, or t
  misc_feature (232)..(232): n is a, c, g, or t
  misc_feature (235)..(235): n is a, c, g, or t
  misc_feature (239)..(239): n is a, c, g, or t
  misc_feature (279)..(279): n is a, c, g, or t
  misc_feature (316)..(316): n is a, c, g, or t
  misc_feature (321)..(321): n is a, c, g, or t
  misc_feature (325)..(325): n is a, c, g, or t
  misc_feature (354)..(354): n is a, c, g, or t
  misc_feature (360)..(360): n is a, c, g, or t
  misc_feature (371)..(371): n is a, c, g, or t
  misc_feature (375)..(375): n is a, c, g, or t
  misc_feature (382)..(382): n is a, c, g, or t
  misc_feature (398)..(398): n is a, c, g, or t
  misc_feature (410)..(411): n is a, c, g, or t
  misc_feature (421)..(421): n is a, c, g, or t
  misc_feature (433)..(433): n is a, c, g, or t
tggagggaacaaaanctaggacctaccaacactagcccctccatgggggctcccaagttctnanaananaaccaaatntngtntgcccacgttanggttatccatgtttctnnaagtaacataaangaaacaactgcagcctnagcatgggctgnaaggggtgggnaagacttangaggggagggcaggnctgaanaggggcggggaccnncactccctgcnagnagctcancanctgntttttttattttggcaaaaataaaaataaaacctggaagnttcaagataatgaagtaaactttaggaaatggaaaanacagnaggntgtgcccaaagcctctcttagcctccaancaagtncttctcaaganctgntggtgantctcttagggttatantggcaagttttnntcacagtagntccaaccctagnccagctgaagaa

SEQ ID NO: 562489 - DNA, 1429 bp, Homo sapiens
gagcagccgtgtaccccgcagagccgccagccccgtgtgcatgttcctgatgacttctgtgtgtgaaccctgtgctccgagctcctgtggaactgtgctgtgctgtgtgtactgtgctgtgcccctgctgcatgcccctgtgcctgcagctgcatgtgcatgcccacgcatgacacgttccacgctggttgccaatgcactcaacaccactgatgtggcacgtcccggcatgcttgcagctggacttgcgctaccagccctcacttctccctggtgcgtccctagtccatgcttacgcctcagcgcccatcatgcaccctaccccctccagcttaccagcctcgcctcatcacaccccctgtgcccaggcacgctcacttccctgggggacacccatagcgccggcccccagctccttccccatcgtcgtgctgcgcttccgtgatacccgacactgtcggccccgttctggcgtctcgacacccccggcactttccaagtgcccccccgtggacgtgctggcacccccgcaaccgcgcacgcccgcgcccccggcccccggcacccgctaccccgctgccctagaccggcacaggcccgcggcacccccaacctgcgcctcaggcgcgcctataggcccggcggccccacaacaccgcctcggcccaccacggcaacaacgtccagcgcaagctggcaccaccacgtggggacatacccatttgtcacctcctgtgacgcccgtttttccgcccattgggcccgcacgcgggtcccctccggcaacgccaccccccttgtgcactcgtaccaccacccccttcggcgcgccccacactcgccaacctattgtacccgcacacccagccattccgcttgcgcggcagccccctatgtacccactctctcatggcgtatgctcaaccggcacacctctctgggccaacgcccggtcacacggcccccttttgctagctccactgcccactctgctgtccctagccgatcaaagaccgcggtcagccgctccggttacctctcctgttcagcccatacagtccgcccattgcggcgcctcagccacgccctagaagggcgatagaacgattctccctccaccacccgcgccaccccctgctcacccccctctcccccaccattccatttcgcccacacactcaccccaccaccttctcccaccctcctcgggcacacctcactccggtccaagcctcgccgccccacaccacctgcgcgccccacctatcgccggcctggctggggaaccccacgaacccatcacctccgcgccccctcaccgcggtagctacccccccccaccacggcctagtagtccgggcccctagactcacccctccccacgcaccgtcaccagtgcccgcacctactacatcccccccaccctcaa

SEQ ID NO: 562490 - DNA, 400 bp, Homo sapiens
ggaggggcagagggagactgagcccccggggttgcgggtgatggtcctcaggcagtgcctgattcagccgggagcaggcaggggaaagccacggggctcagcacagggcagggctggagggagaggagcctgaaattgacacgcgcagcctggtaagggggaggggcatggggcgggtcggggcctgagacagcgggggatcgggggtgtggccgaggctgtctgggttcagagtcaatcttgcaacagggcccccttggcaagggtcacagtgcgacgccgcgctccccttcaccaccccagcttggcccagcgagaggtgcagcacgtgcaggccgagggcggggccggcgcggagagggtggccctgcatcgtagtaggtccctcccccgcagtgct

SEQ ID NO: 562491 - DNA, 290 bp, Homo sapiens
ctggtcactctacaggatccctctgctgtactccagatgatctctggtccccagtgccccattatgacaaacgtagatcagataggacacagtataactgaaatccatgctgtctattagcatttagcattcctatatactgagaactcctactttttacctgtatcccagacacctcctttgaggagtcatactgccaactgtctgtttgcgtttctcactttactagcacacatccttcacaaacttttccatgtccttaactgctctgaattcgtcttccccagacc

SEQ ID NO: 562492 - DNA, 674 bp, Homo sapiens
ttaaaggagaccattttgaattgcagaggtggtatgacttggtgagattggaacagggcttatacttgctttgcctctgacctgggataaattactttgctcagtttaccttatctgtaaaatggaggcattttaatacttgccccccattagatgccttagaaatgtgaacaagcattttgaattcttatgaagaaggcagtgtggaaattcacagtgtgataaataaattcctaaaatgcatcatacaaccatacttgtgtttgggagactggaaccattttaaagaaaaaagtatccaaagtatcccattcttgttcaagtcaaatgctgaattgtgtagtgcacagcctatgctaccagggtaggactacatagctttacctccagggcatgggaaggtgggcagctcagtgtgatcagaggcgcagaacctgccgcatgatggccaggctcagaggagcatctttttacccatatcttgttgattccagctttccttgattagtcatttgcatgctcatttttgttctgttcctctctggcggggtctgttaattactaaacatgggagacttaacaacccaaaaaaaaccaaccaaaaaaaaaattagccaagtgtggttgtgtctacctgtagtcccaccaattgggctgaggcacggaggatgctt

SEQ ID NO: 562493 - DNA, 236 bp, Homo sapiens
tcgcagctgctgcttgcaggtcgtacgtctagcaggatcccttgatgtttgaagcaaaggagtgagagaaatctatgcagatcctggtataagagtaagtagtccggagcatgcatctcactggtgacaaatactatcagagttcaatgtagctagagtagtgagcaagccaggaggtcataggagataaggtctcagggataggaaaccactccgggaggtggggaatcattaga

SEQ ID NO: 562494 - DNA, 844 bp, Homo sapiens
ttcacacttaagattcaaaatttttcccaaatataaagaaaactaagacagactgtagatgcattttaaatatttaaatatgatcctcagacatgcagctgtgtgtggcagtattttagtaccgggttaagaaaactggcaactgggaagaagtggcctcaaaggcacttaatttgatttttattttttaaatgctgtcaaagttacagtttacgcaggacattcttgccgtattctcatgatcccagataagtgtgtgttttatactgcaacaatatgcagcaatggtaagcgtaaagttttatattttggtctatctagcaggtatagtttgaacatatccatgaaggctctttctaacgagtcctctcttgtatttacaattaccaccagaagttcgggtatgactaattgaaataccatcatcgggccaggcattgggggctaacagcctgtaatcctagcacttggggaggccaagacgggcggatcacctgaggtgaggagtccaagaccagcctgcccaacatagtgaaactccgtatctaccaatattacaaaaattagccgggcatgattggtggggcgccggtaatcccagctactggggaggctgagacaggagaatcgcttgaacccaggagacgggggttcgcagtagagcgaagatcgagccatgtggactcaagccgggcgcagcctgaccaagagtcggacgtcaaaaaaaaacacacaacaacaagagagggcgagacgaaaaaatacacaccacgggaggaccaagaataagcgtgacacaagaatacctgcaccaagtggtgcctactagagacgcaaaaaaaac

SEQ ID NO: 562495 - DNA, 211 bp, Homo sapiens
  misc_feature (110)..(110): n is a, c, g, or t
  misc_feature (188)..(188): n is a, c, g, or t
  misc_feature (200)..(200): n is a, c, g, or t
gtctgcaggggcctctgctggcctgggctggggtgtgaagtctcgggctgtcctgggactgccgggcaccccagggccctgtccgtgctgcggcctgcacagggaacccntcccagctggtgttccggctcctgctccggccacagctgcatttgggctgagctgggaagctagaaaggccatttttnctgttcagaaangcctttctggg

SEQ ID NO: 562496 - DNA, 281 bp, Homo sapiens
gattacaatttgaaaacatcttgaatcattagcgagttcgagtctatgtcctgagtctttctttccctacccccactagactagaagggacaccttgtgtatctgttttcaccaatatatctgtccctgcggtactaattatagaatagcaccataaataaaaggagagggggaggggagtaagagcacaaacggtatgtggaaatatcaggtgccaaaaaattaggttggtgttacaatttttagtatttcttttaacagtttcaagaagcaggaactgg

SEQ ID NO: 562497 - DNA, 288 bp, Homo sapiens
  misc_feature (54)..(54): n is a, c, g, or t
  misc_feature (62)..(62): n is a, c, g, or t
  misc_feature (74)..(74): n is a, c, g, or t
  misc_feature (88)..(88): n is a, c, g, or t
  misc_feature (248)..(248): n is a, c, g, or t
gccctcagccctccctgagtagctgggaactacaggtgtgccacccacccacgncccagtcnaaattttgtaantttagtagagatgnggttgcaccctgttggcccaggatgctctcaatctcttgacctcgtgatctacccacctcaccctcccaaagtgctgggattacaggcaggagccaccactcccggatacaacactattattatatataacaaacttaagtttaagtttaacatgtaatnctgaatttatatttaagttttccagattggcaaaaaaaaa

SEQ ID NO: 562498 - DNA, 487 bp, Homo sapiens
caaaatgaaggtattctataccacaaaacgtaaaactacatgctgcaacaaagttactgacttaggtaacaaatacaatgtcagaaaactggtagagtaagaccagctaatgaactacgtcattaaactaaacaattacacagaactagaaaacttgactcacgacgtaacactactaccacacactctaccacttactacacactactacaacttttggtccatggagacccctacgggccgtactttacacatacacgtaccccacgacttactttctacctttacgagtgacctacctgcacgttgtaacacactgttgaactactctactggaccgacgtgttttactttaccaccggctacctgtacttacaacacgttactactttctacgcaacacccttgactaactaggctaccaaactaccacgctcacaaacttttgaccacccacaacaaccaaaccactttttcttgtacgttt

SEQ ID NO: 562499 - DNA, 358 bp, Homo sapiens
ctggccgcctcggggcaactcctctcctagcgccaaatacatcaagaaaatactagacagcgtgggcatcgaagcggacgatgatcggctcaacaaggtcatcagtgagctgaatggaaagaacattgaggatgtcatcgctcagggtgttggcaagctggccagtgtgcctgctggtggggctgtggctgtttctgctgccccaggctcctcagcacctgctgctggttctgcccccgctgcagcagaggagaagaaagatgagaagaaggaggagtccgaggagtcggatgacgacatgggatttggcttgtttgattaaattcctgctcccctgcaaataaagtctttttatgta

SEQ ID NO: 562500 - DNA, 395 bp, Homo sapiens
gctcgacaaaaaagtataggaatttgggagttggtaatgagtaaatgggattaaaaaaatagactatattttagagcagttttaggttcacagcaaaattgagcagaaagtacagagttctggctgggcacagtggtttatgcctgtaatcccagcactttgggaggctgaggtggaaggattgcttgagcccaggagtttgagaccagcctggacaccattgcaagaccctgtctctacaaaagataaaacaaattagctggggtagggggtggcttgcacctgtagtcctagctacttgggaggctgaggtgggaggatcgcatgagcccaggagtttgaggctacagtgagccatgattatgccactgcatggcagcttgggtcacagggtc

SEQ ID NO: 562501 - DNA, 122 bp, Homo sapiens
tagctggaccgagatcgctctgagtctccagcatgtctcacatgctcatgccacccgctctccacaagcctagtcatcctgcctgagctccagcccccagcccgcactgtgcccagacatgt

SEQ ID NO: 562502 - DNA, 375 bp, Homo sapiens
  misc_feature (101)..(101): n is a, c, g, or t
ttgcagtggggagttggagggagccaaactgggaagcagaggagtctgggaggccagtcacctggctctgtgatcaagaggtgaaattgggttgggtgcangcgtaacgcctgtaatcccagcactttgggaggccgaggtgggtgggtcacttgaggccaggagttcgagaccagcctggccaacatggtgaaactccccctctgttaaaaatgcaaaaattagctgggcgtagtggcgcacacttgtagtcccagctacttgggaggctgaggcacgagaattgcttgaacacaggaagcagaggtagcagtgaaccaagatcatgccactgcaccacagtctggacaatagagtgagaatctgaaaaaaaaa

SEQ ID NO: 562503 - DNA, 395 bp, Homo sapiens
  misc_feature (82)..(82): n is a, c, g, or t
gtgatatagacaaccactgcggggggggtttcaaaccaggggcaaaagggtgtggaggggggcaggttcccagtttgccccnaaagccgagagggtttattgattttttccctatatccccgccccccacttttttaaaggtggggagaacgggttcaaaccgtgttggttccattgggccctttaggtttggaggaaaagggggggttatggaaaccaaggctgggtaaaccctccaaagggaagggggatggtttgtgggcccccttgggttttttttttggggggggggggttttaggtatttggtttttaaaacggggcttttttaaggggaccccctggcccaaaatttgggcccgggtttttgggcccctttaaaaaggttaatgggga

SEQ ID NO: 562504 - DNA, 759 bp, Homo sapiens
agcggcggagacggttagaaatggcggttggggcggagcagggggctggcgcgggaagcggggctgtctggctcggttacgcccccacctcgccaggaatctaggagtcggtttgttttccgaacccatctccttccgctctcccgcccctgcaggctgtgtgccgagcttggaagaaagtgtgacccgttcgacggaacaaaggacatgacagcccggccccgtgcggccactgcggagcgttaggaacatttccccttaaaaattggttgttccccaggcgtcgaaggcgggaggggcgggcgtggggcgggacggggagggggcggcagcgggcttctgttccggacccggggtgcaggcgggtgagtcgcggatatcctcatggcgccgcggagcccgtgagccgagagagaagattgtgacaactgaaagtcccacaaacctccacttgttactcttatgatgtgttggccaatgaaaatgtcataggcttgggtgaaactgactttgctccatctgcacatttatagctctagtcccgacgttcgagtcctagcctagatttaatgtgaaatctccctggccgctcctatgtatggtatagatcgtgggtgcttgacatttgtcctgtagatagagatcagggtgagtggaggtattgtgatgggagtggcatgtggttattgcaggagaatcggatagacgaagataagagtcttcgagccactgacgaaaaaccacgcacagccttgtgat

SEQ ID NO: 562505 - DNA, 367 bp, Homo sapiens
aactgtaccatgatcactctctaacagaaataaattgacaagaaaaattactcaagaataggctgggtatggtggctcatgcctgtaatcccagcactttgggtgttcgaggcaggcggattgcctgaggtgaggagttcgagaccaggctgaccaacatgctaaaaccccgtctctactaaaaatacaaaaattagccaggcatggtggcgggtgcctgtaatcccagctactcaggaggctgaggcaggagaatcgcttcaacctcggaggtggaggttgcagtgagctgagactgggccattgcactccagcctgggcaacaagagcgaaactacgtctgaaaaaaataaaaaaagttggaatt

SEQ ID NO: 562506 - DNA, 1473 bp, Homo sapiens
ctgtagtcggccagagtcttgtaggtgcgcatgataattgcggtcgacgaggggggggtcccctggtgggtggataagactgtttttgttcggctgcgcacagaggtgtgcgggcgcacagagttgtggtgccccacgtttgtgattaaccgctgtggcgtgggatggtggccagagggggggagtatgagtcgcgtgctccacggggtatgtatccttggtgcccatcacgagggggggcgtgggttggggctgggtgaaaggtttgttggtacgttgctgtgggtgcgcacttcggtgggggggacgcgaacgcgggctgcccccggtgttggtgctggggggccaccgcccttgtgtcacgacgtggcggctggggggagcgccgctgtgcgtccgtttagtccgcctcggattttcccctggtggtctctggcgcgccttgtgccccgcgggtggatgctccatctggggggcgtttgctcttggtgtggggggttgttattcctgggtagtgctctccccctcagtggggtccgtgtggaggcgcccgctaccgcctggccgggaggtttgttcgcgcgcggggaggggcgccgatttctgtgtatatggggtgttgcgacccgggtttcccctggtgagccccccggttgtggcgcgcgttgtggggtggttgttcaccccacgccgagggggttgtgtctcgtcccttctggtgtcgcgcggttattgtgtggttgggggcccagtggcgcgcactgtcgccctacgttggctcgcttctcacccaccagagggggaggtcgtggcgacgctcgccacagtgggggggtgttgtgagatatgttttgggttgtgagatattctctgggtctctctgggagagatagtgttgcttgggccccaactatggcgcgtgggcggcccgcacctgtgtggccccctgtgagaccacactcgcacttggagagagggtatcactttgccctgttatgtctcgtatgactcttcgttcccacagagagagtcccctcggagagagagagagttttgtaaatataagagaagaggccacgggctcgcctcgcctcgaagagatgccacagtgggtcacacaagtgagggagatatgtctcacgcggtggtaaattggagcttgtcttccccctctcctgcgaagtttcctctcgctatactccacgcctctcgagggtgtgccacagacactgtggtgtctcgaagaggtggacacacggtgcccttctgtgcctatgtcacccacagttcgcctactgtaagacctggaagcgcctcacgcctgccaccgcgaagactggttctccacgctccccctggctctcacggcccctgaatgggtaggacccacccctgactggttttaacctgctttttgcataggcttttaagccgcctggaaaaatggttgatggaaaattaacccccgtttct

SEQ ID NO: 562507 - DNA, 545 bp, Homo sapiens
  misc_feature (4)..(4): n is a, c, g, or t
cggncatcaaaagacagatcactgaggtaatatcatttaattgctatgattcgactattcctttttttttgaaaaggacagattctcactctgtaacccaggcggaagtgcagtggcatgatctcgggtaactgcaaccttaacctccggggtccaagtgattcacatgtctcagtttcccaagtagctgggactaagggcatgcacaccaccatgcctgggtgattactgactattcaattattaaccagcaagcataacaacaaaacccctcatatactctatattgggtaatctcactgtcctaatagaataatgaatattattacactaagaaaaagttgaaaaggctacctcagaagaacatatttcagacataagtgcattaacacgtttcgctctagaaaacagctgttaacaaaatcaccagtgttaacacagatccaaatagctcgaccatcaggaaaacaagagctatggaacttactccatcagaaattgtgctaagtgattttccatggattatcctacctgaagctgcataa

SEQ ID NO: 562508 - DNA, 320 bp, Homo sapiens
caggttgggtttttttggcccacccctgattaatgggccctttatttttggggtcccctaggagggtccagttgttttattgctgtattttgttattgcaggacttaataaaaattgttgatagggccccaacccctccagaaattttatgtctggtaaaaacccccaaaggccttggacttgtgtgaatggccagggtttttttagtagtaattttaaatttaaatgttttaagtgatcaccagggttcctttttacttataaagttggatttttttttagaatttgtaataaataaaaactgctgctttccccctgta

SEQ ID NO: 562509 - DNA, 603 bp, Homo sapiens
ccccgggctgtaggattcggtacgaggggagagagagctagactcgagtgtttgtttatgttttttgagttagagagtcactctgttgcccaggctggagtacagcggtgcgatcttggctcaatggagactctgccacctgggtttaagttcaagcgattctactggcttagccaggccagtagctggggttacacgaggcttacacaccacgcccaggtcatttttggatttttagtagagatggagtttcaccatgttggccaggcagctcttaaactcctgaccacccggtttggcctgccagatgagctgtgattacaggcataaaccaccacgcccagactcctataatttttattatagtatgttgttgtcattgttctagtttattaatagcgtatattgtgaatctcttactatggctaaggtaaaaacttcattaccggtacatatgcataggggcatggcttttatagggtatagtactggtcggattttaggccttcactggggggttttagaaagtgttctctgtggttaacagagggcttctcgtttacaaacctgtctctctctttactcaattcggcgcgctttttc

SEQ ID NO: 562510 - DNA, 538 bp, Homo sapiens
atgaccgtcattcatcatataacttcctcgtactggtactaccccttcacctcctctggtaagctgcgaggctcgtggtatagctccataaaggatagaccatgtctgtgttgttcaccatgatgcctaacacagagcctgtctgtgcttgataaagtaggtgaaatggatgctgcagccaggcacggtggctcacgcctgttaatcttagcactttgggaggccgaggcaggtggattgcctgagctcaggagttcgagaccagcctgggcaacacggtgaaacccagtctctaccaaaatttaaaaaaaaattagacgggtgtggcagcatgcgcctgtaatcacagctactcgggaggctgaggcaggagaattgctagaacccaggaggcggaggctgcagtgagccgagatcgccccattgcactccagcctgggcaacagagcgagactccgtctctaaaaaaaaaagaagaagaaaaagaaaagaacaaacgagaaatggatgctgcaaaggatgtctgcattcacgatgc

SEQ ID NO: 562511 - DNA, 251 bp, Homo sapiens
ggccagtatttctctgtctccttcagtttctgtattgcttcttcagtggtggcccagcagatctcagatgccatttctcggctccccgagtagctgggactacgggcgcgtgccaccacaaccagctaatttttttttttttttttttttttttttttttttttttttcccccttcccatttttttttccctttttttgggggggggcgagggggcccaaagagcggggcgaaacgccagcacggggccgg

SEQ ID NO: 562512 - DNA, 1073 bp, Homo sapiens
ggccgaggctgcagtgagctacgattgtgctcctgtactccagcctgggccacagggtcacaccctgtctcaaaaaaaaaaaaaatgcaatttccacaggcgcatgggccaggttgccagtgcttgtgggccttgtggtggatgaggtgcgcaaatcttgatgaaccggggaataggttccgtcactgcaagataaccagttttcctgggactgcctcgtggtccatgactggtgtggcagtgacagaggttgctattgcagagtgcctgaccagtctgtgatcatgccatgttggttgtaagagcaaccggaggggtcgctcatccatcaggtcggggcccctctggtggggggggtccggtttcctccactagcaattgcctcccctttatgggggaggcccaggttgcacgcccaagggtggctctcttcttgtcccctcgcttggccccctttttcttaacgtcttcgtccgagtcttgccaaccagaaaaatcttctatagactggtaagttgtcctagcaagaaagatcaccggatgaaaacaaactttgtactttccacgagcggaaaagtaatacggtgtccatgtgaaacgagaccaactcggggggcctaccagagatgacccgcactgtgttacctgaggcccccagggggggtcacacctgggtgtttctggaaaagggagtccagggccagattcaggcccttattgtattgacgcccctggaagtgtgaccaaatgcccagatcgtgcccccatcgcagagtgtccccagaatgggtttcctgggagtccctgcaagcagagcttgtagggaacgtggcatgcatgacttgcctcttgatccctggaaagtacatcgggattcgctgtacacgcacagctcgtcacctaaagctgtgtgggccaataggcctggactcacagaggagggtaccatataggtaaccgggttcggacaacaggaatctggtgcgagcctgatcgtagctgaagagccatgtgaagtaataaggatgaaagcatattgctatcggtgattagaggaaaatgtagactaacac

SEQ ID NO: 562513 - DNA, 695 bp, Homo sapiens
aaatgggatccccaccattgtaggtcggtccccagtttatcttctaaatctccaacctccccttctgccattgccattaaaaatcaactaagtgcttttaagtctttccatggtcagggtcaaccttgttaataaccaggtgcccgtcttaatggtgtaaagatttccaatactcctttaaaaacccagtgcgggttattttatgtcttggacgagcataaccctggtatcgtaacgaaattcttttttgccaccacaagaatttgtttcaatttcttaacgttcaaacacatgtcagtgttgtcacgtgtgcatgtgatagccacagcacaagtattcttcaggagcatatgtcctccagccttaaatggacccttgtccagctcctgtgaaaatcttaatatttgagaaagacattcaatggtacttgttttcggtacgcttcatgagtagttaagattttcttgtattaaggttaatcactaaaacggtgtttacttgggtttcgtaaactaagccccctaaagatgttttccattttattgttaaacacttggtgttagcaagggtcagcgctataaaaggcccaatggcaagagtttctgcaaactctgtaaagctgactgaattcatttgtcatgtaatacattgctgagtggcgcttcaatatggtaacaggcaataatattttctta

SEQ ID NO: 562514 - DNA, 236 bp, Homo sapiens
gatttgagggcgcacactgccagatgcagtatctcgagcactttttcgctgctccatcaagggactttcctttgccgtgtctcatccttgttgttgaattgttgtcccaaaaagatacagtcacctggtcaacagcccgcaagctcttccgactcacggggctaaaaaacacagagaaatggtcctggaggctcaatggtctccacatggagcctgccctaggacacgaatgttca

SEQ ID NO: 562515 - DNA, 959 bp, Homo sapiens
agcgggctgtcggcgcccgggccgtcgcaggcccggctccgtgggcgcggagcgcggtgcgcacggtggtgcccgagggccgcgggctgggcaggcgggagcgcggtgggtgttgcccgggccgttggacggggtatggtcggagccgacgcgcagctgcagctggcaacactcgaaggaacgatcgcgtgctccggtgctacgcgtggactgctgtgtctggagcagcggcggcggcaagacccacgcgaccgagaaagatacgggcgcgacagtgtttacgacgacgtgtggcatgggattgccctacggtatgaaacaaaggactcattcggaccttgcgacggcactacaagtcggttggagacctgggcagcagggactacaggactgctggcgaccggccgggaggcacgacgggctggggtcgcgtggccacgacccgacaggctcccggaggtcgtgcccgaagggtggcgcagtggaagtgtccacgcggtatgtgaacgacaggctcaggccgaagcgatagaggtccgaagctccctacgggggtcctacccgaaagggtacaggacgtctgcctcgggcattcaagctgacgatcggagacggagccgccggccgcaacggtcgtagccgccgattcgcgcgcagcccacccgccgcctactcggggaaccatggacctcgcttcggaggccggttggaaccaaaaatagggcccgaagaagattgaacaccgtagtttcccttcccattcgaagaacggagtgggatcgggaatttcaattccaaaccggatggaaccccaatatttcgccctttctaattcgacttagacccggtttgttagccatagagtatgcgcaattggggaaccgtttgtgttccatagagcaaaggattacgggtacagaacgaaaaccgtttaaaaaatgccggtgtgcccttgcggt

SEQ ID NO: 562516 - DNA, 206 bp, Homo sapiens
tcccacctcagcctcctgaatagctgggactataggcatgtgccaccatgtctggctaatttttaaaaatatttgtagagaagcgatctcactgtgttgccctagagggaaaagattaattatgtcttttgctaatgaagaaactgtgtaaacaccaggcacggtggctcacacctataatcccactttgggaggctaaggtggga

SEQ ID NO: 562517 - DNA, 273 bp, Homo sapiens
tgggccctctttggtataagaggaatattgcagcaactgaacatacagctcgctgtgtcttttttgtgtagaatgatttatattcctttgggtatatacccagtaatggcattgctgggttgaacggtagttcagttttgagttcttagaggtatttccaaactgctttccacagtggctgaactaatttacattcccaccaacagggtataagcattcccctttcttcacaacctcaccagcatctggtattttttgactattatttatatt

SEQ ID NO: 562518 - DNA, 676 bp, Homo sapiens
  misc_feature (352)..(352): n is a, c, g, or t
tggaaactttaaaatccctcaaaaactggtttattatacaagggagtttggagtcacgaggggcttatcggtaggatttctggtagcgagctgcgggcacctagggcctccaaacacttttgggcactccgcagcgacgcagggtcagctaaccagcagggtccgggtcataactgggcatagaggatgtctttggatctcctttctgtggaagccttcatccacaattatttctggggtcaatacaggcccaccaaggggctttggggcagaatgggactggacggtgtataagctataacatatctggggcgccacgtgtggtaccaaccaacgcctttataacaaacgnggaccactgtgtatgtgtcttaaaccaccctagacataaaatcgcggctccctttgccgcggtggaagataaacggcgcagaaaacgactcggtggggggcctccccgaaggagcaacgactgctgtgtgataacgccgttgggaataagcgccgtagtgtgcagggcgggtggatcttacaagactatccaattgtttccgccgagggggggggtgcgcgacgacagcagtgttatacacaccctgttgtgatgatgttgcacgacaacccaccatgttgtgggctcctgggctgagtaattctgggtactacgttgttgtcc

SEQ ID NO: 562519 - DNA, 189 bp, Homo sapiens
  misc_feature (23)..(23): n is a, c, g, or t
gttgggttttggccacccccctnccccccggagagccctttcctttttcccggttttttttttggtggggggggccgcccccccccccccgggttttttgggtgggccggggggttttggggggttcccggttttttttttttcccggcccccccctgggggtttgggccccccccccgcccctgggga

SEQ ID NO: 562520 - DNA, 318 bp, Homo sapiens
gaagtgacttaagggagaaaaaaaaatagccagcgctcacgctgtaatcccagtactttgggaggccaggtggacggatcacctgagatcaggagatcaagaccagcctgaccaacatggtgaaaccccatctctactaaaaatcaagttagccagatttggtggtgtgcgcctgtggtcccagcaatacaggaggctgaggcaggagggctgcttgagcccaggaggtcaagactgcggtgagctgtgttcgtgccactgtactccaacctaggtgacagagcgagatcctgtctcaacgaatggggttaatcctga

SEQ ID NO: 562521 - DNA, 83 bp, Homo sapiens
acaatacagaggacaaagacccctcacagaatgcttttcaaccaacttcaacttttgcacactttttcaacggtcccaccaca

SEQ ID NO: 562522 - DNA, 974 bp, Homo sapiens
ttctcttcttcataacaattgtgtgtgcctgggcccttgttaagtcctctttgcattatctctggctgtgactagcacaacatgtgctctccttccactttcagcctggaagatccaacttctgagccctgaatgacagaccagcttcataatgggaagctgacaccaggctggcttcaagggctatgacctgtgcagttgcagaaagccttgatctcagaagggttgtgcgcttagtttacaatgctctgctgttgcatcttgaaattcttaattttttatcaaggatccctatattttcattttgcgctgggtcctactaactatgtagctcatcctgccaacatcattggcttccctgagtatgagagttcagaagaaacttagatgctattgtctgattcagtcatggcagcttacaaaaaggaactgtggggagcagtcactgggtgactagcctgaggttactcaggaagttagaggcagagctgcaatcaggaccacttctctttactgctagctgtatgctctttctactgcaccctggtcattaaaacatctcccaagccaggaacaagttctacctcgtagggtgggcacagtagcgtgatcactctctcagtcattctgtactcctcctttgcttgaccaaaagagataggaagggacccttttgcccacataaaaacctctcaaaggcttggcaacaacagataattgacgcacgtggttggctaagaccaatggttcaaaccatggatggtcaagaccaataatttgcggtccagcagaggaaaggctagatcagcaagctgggcctacatacctaagtaatccaacatcgcgggcacctggcgaacgcatctgggtacaacggcccaacacggacagaaaggcacacggagtacaaaggaccctagtgcaacacatgcgcaccacggatcggatggcagactggagaggacacggacgct

SEQ ID NO: 562523 - DNA, 449 bp, Homo sapiens
tttgtgcctatcaacccgtcatcgaggttcaagccctgtatgcattagatattcgtgtaattgtctcgctccctggctccactcactctcgagagagcccagtatatgatgtccccctccctgtgatccatgtgttctcatggttcagactctcacttatgagtgagaacatgtagtgttgggttttcggttcctgtggttagtgttgctgagaatgagggtcttccagaggaagctggtattatcctgagctgaaactggaagccagctgaaggttatagaggtggggaggtgacataataggatttgtgactgtagaagatggctctggatactacgtggacagtggttaggaggggccaagtgtggttggggagatcagtgaggaggccatgaggtgactcaggcaaagatggcggagggtgggaccagggagggtgagcagagaa

SEQ ID NO: 562524 - DNA, 368 bp, Homo sapiens
gtgagatcctgtctctaaaaaagaagaaaaaaaggaatgaaaaatagttaagcttctttgggaaggcagttttgggagaatttatcaaaaattggaaatatacataggtttttcattcattgattatgctttaagatttgattctagccaggtgcagtggctcatgcctatattcccagcactttgggagggcaaagcaggaggattgcttgagcccagtagttcagtcagcctggcacatgacacactcccatctctacataaatacaaatattagccagcaatggtggtgcacactttagtccagctactgggaggctgaggcaggaggattgattcagttcgggtggctcaggccacaaaagccg

SEQ ID NO: 562525 - DNA, 296 bp, Homo sapiens
tacatggtgaagctagcagaagagacagataggataataagtctaccaatagaccagtaccgggacctagtgcggaggagtctagagaagtgaagcaatcatcagagacgcctgctgccttggctagtgggaaacctcttcatggtactgatgacccactgggcgaaaggcccaccctagataaatacaaagaagccagcaggacaagggtaactaaggctcagcatccttccaggggctaagcagaacatggtaaacagcagcaggggagcgaagaggaaaaaggtagtggtggc

SEQ ID NO: 562526 - DNA, 271 bp, Homo sapiens
tggcgacgcttccatcaatcgggggccagttgcatctaccctggtgaatccaacactcagaaagcatgactcaggcccagacatctcttgccagaaaagcacatgggctacatttaaatggcattggcccctcatccctgtgaatgaggtgctctaaggggcacccccggtccctgtccacaaaaaagggccccagccacctgaggcactctgccatgttcacaggcccgctacctttctgtccactgaggtagatggaagcgtcgcgcat

SEQ ID NO: 562527 - DNA, 426 bp, Homo sapiens
cacgaggggccgaggggcgcgcgctgacggtcaagcaggcgctcgagcgtgaaggcaaggtgcccgaggcgcgcctgttcctgaccgcgccgaagctcgataccgacggcatcaaggacaagggctcgccgaaccgcgtcgacttcacgatccggcagtagcggcgccggtgcgccgatgcaccagccgcacgtcgcgaatcaccatgcgatcgcgcggcagcgcgggcaggcgggcgaagtccagcgtcagatcctgctccggcacggtgtagcgcaggccgcgcagcaggaacacgaccgcctgcttcatcagcgccacggtgatcccctcgccgggacagcgatgatgatcggcggcctgcgcaccgccctgcgggatgaagtcgaagggcgtgggcgcgcgggccaggaagcgctccggtag

SEQ ID NO: 562528 - DNA, 1176 bp, Homo sapiens
agatttggtttataaattgattttaaaatcactttatcagcacaatttcagtcacagcagttcaaagcacaacagcactttttttcccctccatcgtcatgtcacatcgtcgtcagctcatgcattcatcaatcgtacacacaccagcctctcattccagctgtctcaagacatgcagttcgtcaaaacccgaccacaagacacatacatcccatttcaactagcaaattccatctcatgcctattatctcaactcttactggcacaacatcaccatttctgcatcctcttttcatcaaagcagctctagtgctatggcccttattcattactgcatattatctatcacatgactacaacatcaactgcactcatctcttacggcgaccatgtacatcttttacatatgtctcttccctacagggtcctcaggcacttctgcatgccacactcttcatctcggcatcatccactctgcacgcacactctcatacactgcacactacacaacactggcaaaacaccatatacggtcaaacagtactgccgctatctggcacctcgtggagaccgatcgcgcaatcagctaccctcacaagcacaaaagaacacacgacacagatcgacaaagacatgatcccaacacagccctacaccaacactcagagacccacccatacacacgaacacaaccacatcctgccatccaaaacacccaaaagaatcacggcaaataatcacgacgctacaacagtgacacatcagcccaccaccacacccacactacacagacacacaccaggaaccaccacagagcaaccggcaatactcaaccacaaaaggacaacccgcggcacgcgacagggcacgagcgtgcccctcccgctccctccaccaacctggacacagacacacaacactcacgccacccgcgcacacccggccctctcccggcggaaaagaacaggcacaccccaaaccacaactcaataacacgaaaccgccagggcgctcgcgaacaaataaaccgcgaaaaagaaagcaccgggcaccgagcaaatcaaccacttaacgagacaccaaaacaagtcgacaaaacgcaacacgaaaatcagcccaaaaaaccacacacacgcacaagctacactcgcaacgccaacgagcacacagcacaca

SEQ ID NO: 562529 - DNA, 298 bp, Homo sapiens
agccttgacggctcaaccacatgttagtggcatactggtggacaccatggatcttgggcggctggacaggtttttgtgatgtgagggacacgcatggtgcacatggtaagcttggcaagggctccagtgaactgctgacgaagggttaaaggacccccacccccatgcctgtaccagggctggactccagagcgggtagaggacagagcagctgtgggcttttcattctgaggtcttggaccccctggccaccgcaagggactctttgcttgtcagggcttgcaaaaaccaaccttcg

SEQ ID NO: 562530 - DNA, 927 bp, Homo sapiens
ggtcgctgcagcgggcctctgcgtgggcggcggggaatccgcggacatcgggtcgggtctaggctcccgagttccgcgactcctgggcgggagcccttgtctgggtctcgcgtggggctgccagatgcgtagagccacactgactagttcccttcttgtccgcttttctccagcaaatggctggatgacgccgcgtgtcagcggggtgggcccgggggtccccgtggtgtgccctggtgatgcgggaaccgcggtggctttccgcggagggcttttcggctaagtggcgatcgggggccggggttcgcggccgatggacgggcgccggggccgaggcgccagcggaagtctcgcggaggcagaggccgagggactgcggagtggattgcccggtcacccgaaggtttgggcgccggctctgggtcccatgggccgtgaggggatctaagtcccgtggaggacgatcgtaatcgtcgtatcctaccgcatgcgccattaatggagtctagagatcattgatttcttcctgagcggcctctctcaacggtattgagcgttgccgaaggattattgccagtgcagaagccatgacccgttgtcgggccagggcaccaggttcaaggcatttcgtagctaatcgggggactactagatggccatcgtcggtctgggtgttaagtgctccaagggaggtggcaccgggcatccggtggggcatcatcctgggcaagctctccatcgtcccccgtgacgcagaagggtacgtgggggaccaggatcggcgagtcgcacaatggtccgttccacggtgtccgggcgtgcggctctgtgtgggtagccctatccctgtacccgggcgctggcttgttccggcctgtgctaaagatgccataaaggcgtttccttatggtgacccaccggggggct

SEQ ID NO: 562531 - DNA, 139 bp, Homo sapiens
tgctaggtcgatctctagcagcatcccctcagcaatggtgggctggctgagcgcgcggcacgcgacttgctaacggtttacaggggcgcggccgccgcctgaaccgtccgacgtccggcagtcatttttccaaggagag

SEQ ID NO: 562532 - DNA, 161 bp, Homo sapiens
  misc_feature (33)..(33): n is a, c, g, or t
  misc_feature (87)..(87): n is a, c, g, or t
  misc_feature (128)..(128): n is a, c, g, or t
cagcctagtggaaggtgctgagggggcctgagnaggaccgcctcctgaccctggtaggagggtcacatcacttggtgccaggtgccnttggtgaccacttcttctggagcgtcctgcctagagctcanccacaggactgcttcaggccgtgcacaggtagc

SEQ ID NO: 562533 - DNA, 877 bp, Homo sapiens
ataatatcatgaagtacatatatattgtgccctatactctacatgtttaaaactataaatatgcccaatattctgttatttgccctactttaagtatgtgtagttgtgttcgttcattgcacgttaccttgttatctactcttgtataagacttcgaggaattctgaaatggtgaaaattgtactcttcttctttctctttgtgtcgtgaatcattatgtttttatttaatagcacttatgagcatatagaatataatttggcatatgatgcatattactatatgtattcggttaatttttcatatagtttatatgcttacatgattgtgactcttggccagatgaggttgatagatattcaagtgctttatttgctggtgtaggtatctctcttactcgctatggtggattcctccttctctagagacctcgccgtgtggccttttcagttgactggtgactgctttgccctcgtctacctctggtacaatcgggtgttcttggggagcgatctctcctagtcttgtgctaatagatgattgtgatcgtgtcctatgtgtgatcttgttggctctatcaggtataaattgtttctcctttcctttattgtgggttatgttgagctctcctttgatgtcacccgttgctcgttccttttttgtcctacctagatgaccagtgctatactgttgagaagcgtctgggtctgccggacttttgtgcctctaaattctcgtttctgctattaggtcggagaacgccttgtgtggggataaccctggtctttggtcctacttcccctccggttcccccttgaacatcgcgcgccgacggttatccaccccgactggctttggcacgcacccctgggctcgg

SEQ ID NO: 562534 - DNA, 304 bp, Homo sapiens
aaaaatacaaaaaattagctgggtgtggtggtgctcacctgtaatcccagctacttgggagtctgaggtgggaggattgcttgaaccccagaggtagaggttgcagttagcccagatcgtgccacttcactccagcctgggcaacaagagtaaactccgtctcgaaaaaacaaacaaacaacaaacaaacagaaacaggttcagagggaggacagttctctcttctactagaggggtgtcaggattcgtcgacgcatttaaactcctcagcggcatggagccacagcacagttctgccaagacg

SEQ ID NO: 562535 - DNA, 242 bp, Homo sapiens
caggataactttattttaatgggcatgggcttgtctaaacccaaaggtatgtatattttcattataaaaaaccagtttaaaatttttttttattttaattgtttgaaatttttctagagccaaagaagctctttaaaaaagttgttttttccaaagaacaaagccaggttaatgacattcaattttaaatgaaacattggaattgggccttttttccccccctggattaaataaacttgtca

SEQ ID NO: 562536 - DNA, 120 bp, Homo sapiens
cctcctccttggctttaaggcgctcttcacggcgcatgcgtgctccttgtgtcttagacctgcgggcctcagcctggtcagccaggaagcacgcaaggcgctgtgaagagcgcctccagg

SEQ ID NO: 562537 - DNA, 324 bp, Homo sapiens
  misc_feature (67)..(67): n is a, c, g, or t
  misc_feature (106)..(106): n is a, c, g, or t
  misc_feature (118)..(118): n is a, c, g, or t
  misc_feature (136)..(136): n is a, c, g, or t
cgcatccctatatctactttgtgtatccctatgactgttgcaccaatgcctcgtatcacggatgttntgaaataccctgcaccatgtgaatgttcatttcttcctnctcgatctaatncattaaaaatcagcttgnagtttgcttgtctctatattcttccatataaattgttgattcaaccatcaggttgcaggaaaaagcctgttagtattttcattggacttacatggaatttgtagattttgaaaaaacagatatttttatgagtcttcctattcataaaaatagtatgtctccatttacttatgtctttaagtgtattt

SEQ ID NO: 562538 - DNA, 117 bp, Homo sapiens
gaagagaacaggtaggctcatctgcctgggcaggttctgagccttgggggacagttcacctacatcccaggcttctgttgtccttgcctgcctgtaaggaataaagttgctttgctt

SEQ ID NO: 562539 - DNA, 2077 bp, Homo sapiens
agctcaaaggcaaaggtcccttgccgatggaggccattgagaagatggccagcctgtgcatgagagacccggatgaggatgaggaggaggggacggatgaggacgacttggaggctgatgatgacctgctggcggagctaaatgaggtccttggagaggagcagaaggcttcagagaccccacctcctgtggcccagccgaagcctgaggcccctcatccggggctggagaccaccttgcaggagaggctggcgctctatcagacagcaattgaaagcgccagacaagctggagacagcgccaagatgcggcgctacgatcgggggcttaaaacactggaaaacctgctcgcctccatccgtaagggcaatgccattgacgaagcggacatcccgccgccagtggccataggaaaaggcccggcgtccactcaaaccaattcacccagctgggcaacatcactgaaaccaccaagtttgaaaagttggcggaggactgtaagcggagcatggacattctgaagcaagccttcgtccggggtctccccacgcccaccgcccgctttgagcaaaggaccttcagcgtcatcaagatcttccctgacctcagcagcaacgacatgctcctcttcatcgtgaagggcatcaacttgcccacacccccaggactgtcccctggcgatctggatgtctttgttcggtttgacttcccctatcccaacgtggaagaagctcagaaagacaagaccagtgtgatcaagaacgcagactcccctgagttcaaggagcagttcaaactctgcatcaaccgcagccaccctggccctctggcccagttgcagagccgccagcgcgactacaagctggctgccctccacgccaagcagcagggagataccactgctgccgctagacacttccgcgtggctaagagctttgatgctgtcttggaggccctgagccggggtgagcccgtggacctctcctgcctgccccctccacccgaccagctgcccccagacccaccgtcaccaccgtcgcagcctccgacccccgctacggcgccctccacaacagaggtgcccccacccccgaggaccctgctggaggcgctggagcagcggatggagcggtaccaggtggccgcagcccaggccaagagcaagggggaccagcggaaagctcgaatgcacgagcgcatcgtcaagcaataccaagatgccatccgagcccacaaggctggccgagccgtggatgtcgctgaattgcccgtgcccccaggcttccccccaatccagggcctggaggccaccaagcccacccagcagagtctggtgggtgtcctggagactgccatgaagctggccaaccaggatgaaggcccagaggatgaagaggatgaggtgcctaagaagcagaacagccctgtggcccccacagcccagcccaaagccccaccctcaagaactccccagtcgggatcagccccaacagccaaagcgccccccaaagccacatccaccagagcccagcagcagctggccttcctagagggccgcaagaagcagctcctgcaggccgcactgcgagccaagcagaaaaacgacgtggagggtgccaagatgcacctgcgccaagccaagggactggagcctatgctggaggcctcgcgcaatgggctgcctgtggacatcaccaaggtgccgcctgcccctgtcaacaaggacgactttgccctggtccagcggcctggcccgggtctgtctcaggaggccgcccggcgctatggtgaactcaccaagctcatacggcagcagcacgagatgtgcctgaaccactcaaaccaattcacccagctgggcaacatcactgaaaccatcctggctaacatggtgaaaccctgtttctactaaaatacaaaaaaattagccaggcatggtggcgggcgcctgtagtcccagctactcgggaggctgaggcaggagaatggcgtaagtaaacccaggaggcggagcttgcagtgagcccagattgcaccactgcactccagcctggacaacagagcgagactctatctc

SEQ ID NO: 562540 - DNA, 111 bp, Homo sapiens
  misc_feature (95)..(95): n is a, c, g, or t
ctgtctggaataataatttaatgctcactgtggccctgactgaaagtcaagctcaggcacaaatagggccatggccgtgcttcgcttttgagganacaggcaggcaaggag

SEQ ID NO: 562541 - DNA, 566 bp, Homo sapiens
  misc_feature (361)..(361): n is a, c, g, or t
gcagctgtggcaggcctgttgggcctggaccttatttaggttgtgagtgggccccggccttgtagtgccttttgcccacgctacctacatttgggtgaaaactacctcatccgctatatgccttttgccccagccattcaaacgttccatcacctaaagtggaccttttgggaccgttttaaggtaccaactgggcagccttaaaggaccctggagttgctgctgggtcattttcaggaacagcccgggtttagggttaggatccttctgcccggctcaaccctgctttattcggccggatggttcccttaaaaacaggcccagcccctgcccctcagggtggcaaaactggtttaacaantgacaggccaggcccctgcttctgggcaacgggtgttggtgctaaaacttaactgttagggtggcgacgagggccctgcctttccccctttgccctattagctgtggcaaggcagcccccctgtcccctaggtcaatggagccccgggttcccagccctgccttgttagccccccgtaggccctccattaatgcttgtttaagga

SEQ ID NO: 562542 - DNA, 252 bp, Homo sapiens
accgtattcctaagtacggaaatgtgattctgtgtatgtattaccagatgtagtacttgagtatcccgtacgtggcgcattggttcacgaatccaactaggaaccatgaggctgccggtacgatccctggccttgatctgtgggttaaggactccggcgttgccgtgtgactgtggtgtaggtcgtatacgcggctccgatcccacgtggctgtggctgtggcataagccgatggctgcgtaattcgggtta

SEQ ID NO: 562543 - DNA, 393 bp, Homo sapiens
actctagaggacccccatatcgtggcagctgggggctgaggaggatgggggaactgggcagtgaaagctatgggtgtagcttttcttgtgggtgatgacaattttctgaaattatagtagtgacagctgcaccactctggtaacatagtaaaaatcactgatttggccgggtgtggtgggctcacgcctgtaatcccaccactttgggaggccaaggcgggcggattgcttaaggtcaggaggcctgcaccatgtagcccagccaatttattagatatttttatagagatagggtctccccatgttaccaaggctgatctcgaactccaggcttcagttgtcctcccacctcagactcccaaagtgctgggattacaagcgtcagacaccaca

SEQ ID NO: 562544 - DNA, 114 bp, Homo sapiens
gtcagtgtcactgcgatgaggggagataaactggggttcagatctcaggaggctcggggctagttagactcttccacctggaactcttttacaatattccccaccactgcctcg

SEQ ID NO: 562545 - DNA, 581 bp, Homo sapiens
  misc_feature (391)..(391): n is a, c, g, or t
cttctcaatgctcttataggtcttgaagtcatacatctactgtctggatctatactcgtgtcggatatcatcttagtcttcgtctactgactccatgaggacagccactgaaagtagcactgctgacatagaactttagaactttagtcgattcacagcggaacaggcgagatagagaaggagacataggtgttaaaacaaaaagaaaactttttaattttgcattcacaccactactaacaccaaatgtctggagtatctatacaggaagcatatctccaatgttcctaacaccaaccgggtatgttacgaatttaattcaattctgacatgatctacctgaagttgtggtcagatcccacaagttaaggggtcaatttcattagactgnccccatttcggatgtcaatcacaaatctgggcttccagtacttttgaccaactggctgtaaattgcggatttccatgatcccttcccttgggtttaataattcgctggaatacttcacagaattaaaaaaaaaacttacatttactagtttattaccactgaggaaatgcccatttaacagatgctaagc

SEQ ID NO: 562546 - DNA, 106 bp, Homo sapiens
gattttgggggggggggccccccctccggtttttaaagggggttgcccgccccccttgggttttttttttaaacccctgggggggcctttaagggtggccttttca

SEQ ID NO: 562547 - DNA, 264 bp, Homo sapiens
gatcgagctcggtccggctgagcagctggcagatctcaccttggtgtttggcactgctccaggctgtcagatgctcgcctggggttgtgggcgctgctccagactctctgatgttcacctgtggttgtgggtgctgctccagaccatcagatgctcaactgggggtgtgggtgctgctccaggctgtcggatgctcacctgggtgtgcagggtgctgttccaggctgtcagagactcacctgagggtgtgggtgcagctccagg

SEQ ID NO: 562548 - DNA, 302 bp, Homo sapiens
tttttggggggggggccccccaaaaaacccgggggttggggggaaattctggtaaaaacctcctttaaacccgtttttttcccccctgaaataaaaaccctgggggggttttatttaaaaccgggcccccccctgggggcttttggggttttcccccttccccctggggggttttcggggttcctttttccccccccttttttttgggttttagggggttggggttaacctgattggggggggggaagggaattttttgggttttttttttttttttttttttaacgggggcctttttttca

SEQ ID NO: 562549 - DNA, 370 bp, Homo sapiens
aacacatacccaccccatgtctgtcttttctcaaactaaaggagaaactaagggatggttgcgcatctcgcgggcctggggggataagagatgatggctggggaccaccggggcagagtcaggttgtctgcactggctgagcgcttcctcgcggatcttcttaggtccttgtacttgtcctcgcagaggcgagagatggcctcaagcttgtgagccctctccctgctcaggggctccaagggaaagctcaggttgttcgcttctgccagagaacgaagatcaaaataatacttggcatagacactggaaggaacattgatgttgaactgcagcaattcaagaaactgtcgctctagctcgttcatgtcct

SEQ ID NO: 562550 - DNA, 271 bp, Homo sapiens
gctcttgcccttttagctttctgcctgctgttgtgtttacctggaggtcccttgggccctcccctttttcaaattgaacccatcctcatccagcctgttcctcttactgtttcccttgtttccccaaagggggggttagccccttgcaacctgtcagaattgagggggcctcctgggtttttccctttttccccctaggatccttttcatcctacttcctgggacctgttccctccctcccttttgcaacggaatactcaattgggcctta

SEQ ID NO: 562551 - DNA, 206 bp, Homo sapiens
ccccaatgtttagccacaggcatgtatcaacacgtcagtccagcctgtggctttggaataaagatgagtgtctcccacgtggtacatgggcaggcagcaggaaggcgggaggggccatggtgcccggactcagacccaggctcttagcataggagggagcctgggcatcgctgcgtgcacccagaagctgggcacacattatggag

SEQ ID NO: 562552 - DNA, 317 bp, Homo sapiens
cgcctgggaatcctagggggctccatgaccccttccccgccagacccagacttgggccgttgttttgacatggacccagccaggccaagctgctcagacctacttccttgggagggggtgccggaaccagccctgtgtggagcccagcttcaaggagcggaaggctggcttgaggccccccagctggggcggggacttttgtctgcctgtgctccatgggggggcggctccccccagcctgggcccctgggttttttttttaaggggcttccagagaaaacggccccccaatcaataaagaactgggcagaacccca

SEQ ID NO: 562553 - DNA, 373 bp, Homo sapiens
ctgagacagcaggcccacggatgtccattcagcaagaggctaaggcttgggggtcaggtgaagaatgttgagagacacaaaaattgttctagtatagtcatgacttagaaccataaagaatcattgccgagtctcttagcgaatccatgtaattggtgtttattgcggagatatgaatgactttcagtaacagagtctccgaatcatgataggtatggaggtggaaattctattattaagattgatgattaccggaatattttcatgattcctcagatccatttgtggagtggccttatgcttcaccagatgatgtttattattaaagttgatttttagcgagtgttcattaataaaaaatggtgttaaccac

SEQ ID NO: 562554 - DNA, 421 bp, Homo sapiens
  misc_feature (148)..(148): n is a, c, g, or t
  misc_feature (303)..(304): n is a, c, g, or t
  misc_feature (329)..(330): n is a, c, g, or t
  misc_feature (346)..(346): n is a, c, g, or t
  misc_feature (356)..(357): n is a, c, g, or t
  misc_feature (397)..(398): n is a, c, g, or t
ttccactgatatgactaaactgtgaaaaacataatgtgaaaagtatactagtacacttaacgtatgagttccgttgaaacactgcacttatgtagacgtgttacatcgtcaactcgtgtgtaaaagtatctgaacacagaggtggaangatgagacgtcggtttctagcatacaaattgcaattacgtgtatgatctcgaagagtacttaaacatggcctcctacccacactatgatgtcatctctgtatgtggcatgatacataattagagaagcgaatgctgttattgcagtttaatatannatgcaatttttaactccctgtgttnncaaaaatggagttcantcatgggctnntaacacatgaaaatggcggtggcacaggatccacttgcanngaacccaaagattttacacaatc

SEQ ID NO: 562555 - DNA, 1081 bp, Homo sapiens
tctgtggaaagtgggcggcggagccagtgtccctggaatggctggagactctgtcaggcctagggtgattctggagcggcgggcgcggtggctctgagcgtccgacttcgatctagattaccgtgtgacgcggcagcctcagcgacctgcgagatgcatcgactctgcagggcggcacgctggacggaacacggaatgtggactcggagcggcagacaaagaggcgtaataggatgggcagccggctgaccgaaaggccaatctgaccgcagtgcacagcgtgggtcaatccatgcacgaacacatttgcagaataaacacgtcccgaagggcggacaaaccaagacaacaccagtgcagacaggaagagatccaaaggacacaaagggcgacagcaacagcaccaagaagcgcacacgaagcgagctggctgcgcaagagatacaccggagcagatgggacagggaagcaaaccttccatggcaggcacattggccaccagcgtgcagcgccacacatagggaaagaaccgcagaatctaggacgagagaagacatggacacagcggaccgactgcgacaccagatcacacgcggggcagtagaccagaggaagggatgccaacgggcaagagacaaaagacccaaagagacaggcagaggggagtcaaaaatgcgggaaaacacgacgcgaccgaaacagaagaccatcaagggcaggctgagacagcaaacgaaaaccgagaagcggagcacgtacccaaagaagtatcgagcgaccagtcccgacagaggaatggaaagaatcaccgaccgagtggtatacgggagttacaagtaaagaagaagagggaagagaagaccggcacgtacgcatgtagccacagaccacgcaggcgagagaagccacatattagagcagaggaggccaggcgcattagcctcgaagtagcaggacaggacgaagccacgacagcgcgagagacacgacagagctgaacgtcatacagagagcaagagagcacgacacagcagcatacaaactgaagcattaagtcgtactagcaaacacacaggacgag

SEQ ID NO: 562556 - DNA, 375 bp, Homo sapiens
  misc_feature (132)..(132): n is a, c, g, or t
  misc_feature (325)..(325): n is a, c, g, or t
tgagatggaaggatcacctggactcaggagttcgagtccagtcttgccaatatagtgagaccctgtctctaaaattgaaaaaaaaatggacaggctgggcgcagtggctcatgcctgtaatcccagcacttngggaggctgaggcaggcggatcagatgaagccgggagttcgagaccagcctgggcaacatggcaaaaccccatctctactaaaaaatacaaaaattagcaggcacgatggcgggccctgtaatcccagctacttgggaggcttgaggcaggagaatcgcttgaaccccgggaggccggagttttgcagttaanccgagattgcgccacttcactctaagctttgggcaacacagcaagaatcc

SEQ ID NO: 562557 - DNA, 502 bp, Homo sapiens
  misc_feature (11)..(11): n is a, c, g, or t
  misc_feature (15)..(15): n is a, c, g, or t
  misc_feature (97)..(97): n is a, c, g, or t
  misc_feature (298)..(298): n is a, c, g, or t
  misc_feature (355)..(355): n is a, c, g, or t
gaaaacgccantccntgtctcgctgcccttagatttaaccctttctgggatgggcagggagaaagaaagaccttccccaagaatgctgaccaggcanttgtgtttgtggggagagccttcctgacagcaaagaaggaagaactaacttcctttgccatgaacaactcagaatccggggggtttttgctgctgttttctggctgttttttggccttgctctgttgttcactgcaacctcgactcctgggctcaaggaattctcctgcctcggcctcccaagcagctgggactacaggtntgcacatcacatccggctaactttgaagtattttgtagcgatggggatctcactatnttgcccagacagtctcaaactcctggcccaatcagtccttctgcctcaatctcccaaatgctgagattacaagtatgtgccaccacaccaggctttagaatcctgttctaaaagttctttcttatttgaccaccatagcttcttatg

SEQ ID NO: 562558 - DNA, 274 bp, Homo sapiens
tgtagaaattttaaaataagttttatgaaacggtggaataatagggatgattttaagtattgccatttttgtaatttgggttattagggtgatggtatcaccattttttgaaagtgggtgaggtttggttattttgtatggggaaaaaatattggttggaaaagactaccagttagtgttggaaaaaccgggtggtgtttacaatgttgctaatcattgcaaaacattttaaatgggagcgttgataatgaatatgaaatgcaaaacgttttta

SEQ ID NO: 562559 - DNA, 797 bp, Homo sapiens
  misc_feature (26)..(26): n is a, c, g, or t
  misc_feature (85)..(85): n is a, c, g, or t
  misc_feature (92)..(92): n is a, c, g, or t
  misc_feature (153)..(153): n is a, c, g, or t
  misc_feature (167)..(167): n is a, c, g, or t
  misc_feature (237)..(237): n is a, c, g, or t
  misc_feature (255)..(255): n is a, c, g, or t
  misc_feature (308)..(308): n is a, c, g, or t
  misc_feature (314)..(314): n is a, c, g, or t
  misc_feature (317)..(317): n is a, c, g, or t
  misc_feature (319)..(319): n is a, c, g, or t
  misc_feature (332)..(332): n is a, c, g, or t
  misc_feature (337)..(337): n is a, c, g, or t
  misc_feature (353)..(353): n is a, c, g, or t
  misc_feature (355)..(355): n is a, c, g, or t
  misc_feature (374)..(374): n is a, c, g, or t
  misc_feature (389)..(389): n is a, c, g, or t
  misc_feature (401)..(401): n is a, c, g, or t
  misc_feature (447)..(447): n is a, c, g, or t
  misc_feature (462)..(462): n is a, c, g, or t
  misc_feature (476)..(476): n is a, c, g, or t
  misc_feature (489)..(490): n is a, c, g, or t
  misc_feature (504)..(504): n is a, c, g, or t
  misc_feature (519)..(519): n is a, c, g, or t
  misc_feature (521)..(521): n is a, c, g, or t
  misc_feature (545)..(545): n is a, c, g, or t
  misc_feature (553)..(553): n is a, c, g, or t
  misc_feature (567)..(567): n is a, c, g, or t
  misc_feature (569)..(569): n is a, c, g, or t
  misc_feature (588)..(588): n is a, c, g, or t
  misc_feature (603)..(603): n is a, c, g, or t
  misc_feature (615)..(615): n is a, c, g, or t
  misc_feature (626)..(626): n is a, c, g, or t
  misc_feature (630)..(631): n is a, c, g, or t
  misc_feature (644)..(644): n is a, c, g, or t
  misc_feature (687)..(687): n is a, c, g, or t
  misc_feature (775)..(775): n is a, c, g, or t
gcatacaaagaatctagtgtgctcanggcttggtacaatgagctgaattagatggccttatgaaactctttctaacctcttaccnaacctgnttctccttggttaaaattatacttgaaggcccagaacactcatggcacatttgtttaatantgcttatagttagnttaaggtaattttgcttctacagtattttggaaggtctgaaaacttgcacagggtcatctttgtaattanataaccccaaactaagangcacaatgtctccttcaggtgatcacacacagtggacgagtatgtgcaaacanggacanaananttcacttacaaangtganttgatgttaacactananaatgatgactgtagaacanttgagcaagtaaaanagtaaagcacanagtgagtgtatgtccatctaactggtacattgataatttagtttgngcacataaaaggaanatttatatggcttncaaatgcagagtnncatctattcgtganttctctgagtattanancccgttcctttttcatcttaaaanaatgaatnttactgttgcacanangggcttaatataaggacanaacactgcttctaantttgatatatgnaaatgtgctgnattnncagaaatactggnatccttttatgggtaaaacaaaagtgaacattgcatgcatgtnatgtgatgaatttgtaatttaggagttctttggggcttctgtgacttgggaaatgcttacattcaggccttaatgttgcattagctancatgttttccctctgatgtata

SEQ ID NO: 562560 - DNA, 582 bp, Homo sapiens
aaaaccccagcaactttaggacacaatacgagagtgtacaagtggctcccccagaatgacctccttggtcatccaaaaacaaaagcctttgtaactcatggtggggccaatggtgtctatgaggtgatctatcatggaatccctatgattggcattcctttgtttggagaacaacatgataatattgcccatatggtggccaaaggagcagctgttacattgaatatcagaacaatgtcaagatcagatgtactcaatgcactggaggaagtcatagacaatcctttctataaaaagaatgctatatggttgtcaaccattcaccacgaccagccttaccgaagcccctggacagggcttgtcttctggggttgagtttgtcatgcgccacaaaagggctaagcacctgagatcacttgggacataaccttacctggcaccagtaccactttcctagatgtgatcggcttcctactctcttggtgttgcagtcactatagttcctactgtaagtgcccttggtcattaccgattcctttggtaaagaaagaaaagaaattaagatgagtagagctctttgcc

SEQ ID NO: 562561 - DNA, 706 bp, Homo sapiens
tcgccctaaaaagagaaaggttcccccagtcccaatccttccataggaaagtggggtccctaagctgttgaggccccttcgcggtttgggctctggattttttccggattttagtcctggacaaacctcctataaattttttttgccctcaccaagggccgaagccttagtttttctataaggtctctgcccaaggcatggtcctatatattttgcccacataatttcctttcgctgaaggtccagccatcatttagtctgtaactatcaggagctttcaccctcttccacaatctcctacaaagatgtatgccttagcctgtttgttcaagtccgctatgatgtacaagccacagtattggtcccaaaagctgcaatgcgccaaatacacaataggcctttttttgatcattcatacgacatttctggtttaggtgtatgtagttgggccatgttacttgtccagaggtagagactaaagatataagaataatttcttagtccacaatgctgttttgctcactttaagtcaacatatttacccgtgtcaaattctaactacagcactgtgcaattatggataaagttttttcatttatttgaagttagactagatatacgtttttaaattcaacatctggctggtcagtgctttatcaactcaattaatgtgtctccttagtcttgtgctaataaatattgatgc

SEQ ID NO: 562562 - DNA, 714 bp, Homo sapiens
  misc_feature (26)..(26): n is a, c, g, or t
  misc_feature (85)..(85): n is a, c, g, or t
  misc_feature (92)..(92): n is a, c, g, or t
  misc_feature (153)..(153): n is a, c, g, or t
  misc_feature (167)..(167): n is a, c, g, or t
  misc_feature (237)..(237): n is a, c, g, or t
  misc_feature (255)..(255): n is a, c, g, or t
  misc_feature (308)..(308): n is a, c, g, or t
  misc_feature (314)..(314): n is a, c, g, or t
  misc_feature (317)..(317): n is a, c, g, or t
  misc_feature (319)..(319): n is a, c, g, or t
  misc_feature (332)..(332): n is a, c, g, or t
  misc_feature (337)..(337): n is a, c, g, or t
  misc_feature (353)..(353): n is a, c, g, or t
  misc_feature (355)..(355): n is a, c, g, or t
  misc_feature (374)..(374): n is a, c, g, or t
  misc_feature (389)..(389): n is a, c, g, or t
  misc_feature (401)..(401): n is a, c, g, or t
  misc_feature (447)..(447): n is a, c, g, or t
  misc_feature (462)..(462): n is a, c, g, or t
  misc_feature (476)..(476): n is a, c, g, or t
  misc_feature (489)..(490): n is a, c, g, or t
  misc_feature (504)..(504): n is a, c, g, or t
  misc_feature (519)..(519): n is a, c, g, or t
  misc_feature (521)..(521): n is a, c, g, or t
  misc_feature (545)..(545): n is a, c, g, or t
  misc_feature (553)..(553): n is a, c, g, or t
  misc_feature (567)..(567): n is a, c, g, or t
  misc_feature (569)..(569): n is a, c, g, or t
  misc_feature (588)..(588): n is a, c, g, or t
  misc_feature (603)..(603): n is a, c, g, or t
  misc_feature (615)..(615): n is a, c, g, or t
  misc_feature (626)..(626): n is a, c, g, or t
  misc_feature (630)..(631): n is a, c, g, or t
  misc_feature (644)..(644): n is a, c, g, or t
gcatacaaagaatctagtgtgctcanggcttggtacaatgagctgaattagatggccttatgaaactctttctaacctcttaccnaacctgnttctccttggttaaaattatacttgaaggcccagaacactcatggcacatttgtttaatantgcttatagttagnttaaggtaattttgcttctacagtattttggaaggtctgaaaacttgcacagggtcatctttgtaattanataaccccaaactaagangcacaatgtctccttcaggtgatcacacacagtggacgagtatgtgcaaacanggacanaananttcacttacaaangtganttgatgttaacactananaatgatgactgtagaacanttgagcaagtaaaanagtaaagcacanagtgagtgtatgtccatctaactggtacattgataatttagtttgngcacataaaaggaanatttatatggcttncaaatgcagagtnncatctattcgtganttctctgagtattanancccgttcctttttcatcttaaaanaatgaatnttactgttgcacanangggcttaatataaggacanaacactgcttctaantttgatatatgnaaatgtgctgnattnncagaaatactggnatcctttatgctgctttgggacttggaaagcttaccataagccttatggtgcataacttgcaggcttcct

SEQ ID NO: 562563 - DNA, 1038 bp, Homo sapiens
cccactgcgtccgctccatgcgtccgccgctggctgtctgccggagacgccttgttgtacgatgatcacgcatcgcacctgtacctcccttgtgacggcccataagtaccgcttgggagctccatgtaggcgatggtggccccctggacagacggaggctggtcgatggtgctattgacatgctgtgaccctcgaaaggcctcgtcgttattgactgtatagtttcgcaacatagtggtgcgcgaaccctccgagcgagacgggtctggttctacgcgctttggacggaggcttcctcggggcgtgggtcttccactggtcctgaaggtcaggatcatgtgggcgccagctactgacccctgggaagaaggaggaccgtctacctggaagccaatccatagaacaagtcttgatgagtggggcgtgtacgtggaggcccatcgaggtatgtgcctggtgggagacattgtgggcctcgtgggcgctggaccagttacctggttgaagcactgggtcaccatcgaccaccttcagagtcacgcgtcacaacatgcggtgtgatgaacgttcacgctgtacagcccttgttgtcatgagtggccgtggagggcaagaacccggcttggacctgcccaagcgtggtgcgaggtgctgaagcggctgcccgagtccgacccccatggtgcagggcatcctccgaggaggtcgaggagagcacttgatcgcgggcgaccgggaacctgcagctggaggaatcttgcttgatgggactggtggggagcgacctccggcttggattcccatgacaaagtctggaccagagcgtcctaaccaggagacagtagtggaaactagaggggcccacgactcgaataccccagatacacccgtagatttaggaggggataccacgagacgcgaggacaacagaagtggcgagagcacaagagtccagtcaacaataatgtgcgacatcgtcgccgcccgatctcatctcattctcagcatatcgctcccaccacacaaaacgagagaagc

SEQ ID NO: 562564 - DNA, 147 bp, Homo sapiens
  misc_feature (11)..(12): n is a, c, g, or t
  misc_feature (118)..(118): n is a, c, g, or t
ctcggactgcnncaagggtgcggtgaagaggtgacggagggcgtggctatgggcggccggcggggtggggaacgagcgccgggttccgtccaagccagccctccgtcactcttcacgnacctcggacctgcccataaggccccccgg

SEQ ID NO: 562565 - DNA, 192 bp, Homo sapiens
aaaccacgctcagtcaggttccggcagcagctgcagcatctcatcttctgcgactctcggtgccctctccttccgatttccggaaacatggcctccgatgtggctgtctctgacgacgtcatcaaggtgttcaacgacatgaaggcgcacaagtcttcaacgccagaggaggtgaagaggcgcaagcagata

SEQ ID NO: 562566 - DNA, 652 bp, Homo sapiens
ggcgggcgcgaccctgggtggtcagcgccccttgcccctcggtggtctcgctggggaccgtgtgggaccttggatgagaagtgcgatgctggccgatgcgccccagtgtgcccagtgcctggagacccttcctggtgagagcggggtgcctgatttttgctccgctggctcttatgtcgcttccgaggtgggtgatggaatggagtcgggttgcacagtttcacatttcggacccgagtgcgcattcctgagagggagtgctttcccttgcggctgcaatagacgggccctgtcctgcgtgggacccgcatccttgcgccgccggggaccctgagccggtcgccgacggccttgacggacgctgcactcttcctgatccgcgctggcctggtgtcgggactgggccgtggctactctacctgctctcccgggtccgggactcttacccagttggtttaccggcgcttgctattccccgtcccgacatccaagacatccttgagcgcctgcactaatcgccaggccaatcgactcgactcgggaacacctctgggtggtctcgcctcccacagacccaggctcgtgtcttcccaaggcgcaaccgtctccaccagccaggcccccgcgcccaattcctcgagcctgggccccg

SEQ ID NO: 562567 - DNA, 693 bp, Homo sapiens
tacccagggtgctaccttttatggggggtgtcttaggaaaaaaaaaagggtaaaaaagggaaaaaccttaaataaaaagaaggccgaggccccttaggggggcccagaacgccatatctccacggggcccaaaaccgccctatcacccacccgaggccgtggacacaaagagggagaggtggctctgcgtggggaggaggaatatccctgaggcgcgcggtggcgccctctagaacctccacgtgtcctgcggcgggcgcctgagaaaaagtgaggtgcgggagagagaggggaccaggtgtgtggcctctgggcccaataagagaggagagagaggtgtgtagagagagagagactcgtggtgggagagagagagagagagttcgccccagccggagagagagagagagagtagtgagagcgcgagagtcgtctctagtgtgcgcgcacactgtgtgtgtcgtcccctgtagaagagtcgcgcgtcgcgctctcacacaacagagagcgcgcaacaagcgtcgtccccagtgtgtcgcccacacactatcgagtgcgctctctacacagagagatgagacataaagcgctcatataagagtgagagagacagtagagtggcgccacggcgaggagagatcatatagtagaagaacagaagagaaacacacaccactgtagagaagagagagt

SEQ ID NO: 562568 - DNA, 121 bp, Homo sapiens
ggtgatctggccggcctgggcctctagaatgaggttatttttatgatatagtgtaaagtcaggatctaacttttttccccaataaatagtttttaaacactggtttataggaaaatttggt

SEQ ID NO: 562569 - DNA, 302 bp, Homo sapiens
  misc_feature (86)..(86): n is a, c, g, or t
  misc_feature (91)..(91): n is a, c, g, or t
  misc_feature (126)..(126): n is a, c, g, or t
gcatatcccccagaatagggggaccaaggtacattaacaaaaaatcaggattgagaaaggatatgggtacatatgaagattgtttngtttngtttttgagactgagtctcgctatagtcacccaanctggagtgcagtggcacaatctcggctcaatgcaacctctgcctcctgggttcaagcgattcttgtgcttcagcctcctgagttagctgggattataggtgcccgccaccacgcccagctcatttttctatttttactagagacggtgtttcaccatgttggccaggctggtctgg

SEQ ID NO: 562570 - DNA, 615 bp, Homo sapiens
tccgtaaatgagatgatatcattaacggggaaaggcgctttgtgaagtaggccttatttctcttgtccttccgtacagggaggaaattgggaagttacatagaaacccgaccgtggattacctccggtcgtgaaactcgagaatccacgttaggacacttaaaactcgttggaaacaaacgaaacctttaatagcggccgtgccccatgtgggaatgtccgtgaatccacacatcgaaggtccgtaaacccctaattggttccgattatggcacttctaaaaataggattggcgctggttaatcccctaagggtcaactcttcgttccccgtagggtccaacgtacatctggagatccacatctcgacgtatcacgtcacgtcaccgtcttttcgacttggtagaaacgctcctcgaccccccagtgatacccgtggcctccgcggcaggatcagcgcgctcaccgctgactcccagaagcgaaccgccccccaaaccgcggacaaccacttccaaacagtgacacagcgcttgacggccacgccctcaacgcagacccgtgagagcgggaccaccgcgcccagggcaacccgggctacgcgcacctccaacaaa

SEQ ID NO: 562571 - DNA, 710 bp, Homo sapiens
gtacgcagttcaatttcaaaatgctaaaatgtgttgagctttagactataacattgttgtaataatgctaggtagaagttcaacatgtaaaaaaagggggcatggatttacagtgcaaaaggtgtccacagtgtattagtgacattctttcattgacagcttgacataattcattgagtgaaatattttaagccagaaaaaaattcccttttttaataaaagggggtttaaatactgttggcattttgatggttcctttaaagtgccctgagctattcccagaggggttgtatatgggtgggtatatttgggtattgattattcttattgtgttctctttcttctatcttatcgtttttcatttgagtcttagctcccatttaagttatgcttctgacctatgtatggtctgtagagcttgcaccagaaataagaccacggttttgaactaccgtcgaaatagtataaaatgaatattttaatggctacaatctttcctgtggctgtggagtctctgttgaaatgaatcaggattcgagctctaggatgagacagaaagatgaaagcagtgtggttgtgccgaggacacgtgtgggttatatggatgtgtaacaaagttgatttggaacactggactctcattctgtatactggttagttattaggtagaggatacttttgtaaagggcatgagctagtccagaaaggtt

SEQ ID NO: 562572 - DNA, 911 bp, Homo sapiens
gaacggactgggtatgggggggcagcagaattactttgggctatgggtggagtgtggatcatgggaaatggacacagcagagtccagatgcccacggtgcaccacgtacaagagcccgcaactgctcggcatcaggagaagcgttccagttctgagtaagactggacggtgtgggcggtctggagatccctcagaggagcatggttgggcatagggcgaacagaggagtcgatcgcgtgagatgtcgtgactgctgcaggcccgaggccactgtctggagatcacgtgggcattcgcgcctgagctgaagggttccgggaagtcccaggacgatgactgaggagggctgtctgatgccttctctggatgccaggaactggcataccgtctggagtagagggcaactgctcgtgtcagctcgcgcgtcttccgcgtccacacatgggtgttaactggagtgagcgtaccgcacggtgtcacagtcgaggctatgtccgcacgagtgtgccagagacatacgcccgtcttgagagccagtgtacgtagactctatgtggtggatctcggcgaggaagatagatgttttgacaaagtattatctattgtttcacccttaccaggggtcacgcctcagggatctcgtccagagaatagtcgtatgttgtccataaatttaggtaagcttcacgtcgttataccttgggtgactctatgtttgagccgaacgacaattcactagagcatgctgaagacctttccagaagccccgactggacatttaggggaaattcccgctgggcattagggcaattccggtgggcattagggagattccggtgggcattaagggacttccggtgggatcaggggaattccggtggcgataagggaattccgttggataaagggaa

SEQ ID NO: 562573 - DNA, 145 bp, Homo sapiens
gtggaactgcaagcattaggccccccgcctggttaatttttaatttgttatgtggggacgggctctcgctatgttgcccagtttgctcccaggaccccgggcaacggcgggtgttgggccgggctgcccggcagggttgcctcca

SEQ ID NO: 562574 - DNA, 415 bp, Homo sapiens
tgccacagtcaagaaagggaaaccagagcgtacaaagaaggtacagctaacacgtggtgataggtcaacgaaagtcacagcgtagaaaagatggagtgtatcggtattgtgaagagaatgcaggagtcatagtgaacaagaaaggcgagatgaaaggagatggcaggagaggaccagtagcaaaggagtgtgcaaacgggtgaacagagaatgcatagaaagggtgagacagtagaggagtctacagtatatgtgtaaaaaataaaaaggaactaaacgcatagaaaaaagaaaaagaaagaaaaacacgagaagagatctctacgctcactctctctctcactctctctctctctctctctctctctctctctctctctctctctctctctctctctctcacactctctctctc

SEQ ID NO: 562575 - DNA, 520 bp, Homo sapiens
tgcgggactagacgggctcagacatgggctccaggaacagtgtcccaatcgagggcaatgtatagtacgtcaataatggaaattcaaaatgctgtcaacggggtgaaacagataataggactctcatagagacaacgcaaacgacagagcgcaagacactgctcagacacctcatagaagaagtcaagcaagaggacagaggatgccctaaactgagaccaaggtactcacgaggcaaatgctgaagggatgctccctaggagtgtgcaagatgagatccatgcactggtacctttgggaacggagtgtcaagccctgcctgtgaagagtacctgaatagacgttctagcgcgagcgctgtctgcatgagagtgggtcacgccgtggtttggacgccagtcgttgagtgagttcctgagaccgagagctcgccacttctactatctggatgaattggtgacctgcatcgactccactgctggaagaacgaactggcagcagaagcacatgctggatgtca

SEQ ID NO: 562576 - DNA, 724 bp, Homo sapiens
ggtcgacactgtctgtgtatcggaaagcaagcgtaacccgctcatctagttcctgattgactcctcttgtcctcctacatccactacctccactatacttgacgctagtgagtctccaaccacgtggagcaccattgtctgcgctgtccaggatatgaacattgccctactgcgagtagtctctacatgcacttgaaaacactggctatccccacccgagtagactatgtactctctcagggtgaactaaagaacccactaggtggcgtatcgtagaattgcaaccttgcgtatcaagcaatcctgtctatttaaagtagaccatgaagcgacgactcgcgttcgaaacttggcaccggggctgatggtagcgtgaacttggacaactcatccctcaattcgctcagagaaatcgtacctcgtgacttagcgacagactacgtgtcctctgctgtgacacaatacgttgacatcgtcataagaatagaattgcgggcaacctatatgcatgacacctcgtaggtccattaacagccatatcgatggaaggcatcatctcatatgcctccgtctgctgataggatcctcgcaatgcagttggagctaggcttgggatcgtgggctctctggatctctcgacgtgctttcgtgtggggttatgccgaaccaagtgtttgttggagggcgaactggctactggagtataccatccctatgcccatgg

SEQ ID NO: 562577 - DNA, 716 bp, Homo sapiens
  misc_feature (431)..(431): n is a, c, g, or t
tagttaaaggtatttaaatagcaaacttacaggaacagcacaaaaaacagacaacattaaaaacatgtacttgcatgtaggacaactcagttaaaaaagtatagtgaatggatggaatctacggtatgataaaaatgctacaaacacccatttagttgtgccactcaataagaaaattatcactggtgtttttcaaaacaaactccaaagtgcgtggctatgtgctccagaaaaaatttacacgaggttatatttataaattattataagagttggaaccggcgtgaaaaactggtgtctccacgtgaacaccatttataaactgggcattaagtgctattacgttcctccgccattcattactatttaagacaattttcacaccacacaatgtgacaaagtgggaaaaaaactgtgcgcaattaccgtgnaatttttcgtggtcccccatattttttctccacctcggcaagtcgaataatacttgtaggggtacccttttggacccccagtgggaacaaaaaatctatctacaggcgtttccagaaaacttacccaatttaaccgaggaaagacaacgagaaacaatttttttaattttttttgttgtggggacgaaaatgtgacagagtggtgtctcccaatttcaatatgaaggggtggatcccccacacggcgctccgcgggaaatatagttctctaaaacactcggcaaa

SEQ ID NO: 562578 - DNA, 320 bp, Homo sapiens
tacgccgtacaccaatcaaaggtgtcatatgacgatcccctcctcaccctgtttgtggccagatctaaacttgcatgaccatacggaggacaacattaacacgtgaatgtcttttccacgctattggtcacttccaggcggccttctggctggtctccggactctgagtcacagcgctttttcgaattggctacgcccttcatcgaaataccacgtgtaggatgcgtgcccgctgtatcaacagcttactcgagactgcgtcactcgcctgggttattagaccaggcattcacatatatacgcttcttactgctttggcc

SEQ ID NO: 562579 - DNA, 438 bp, Homo sapiens
tggtctctttggtgctaaaggtcagttcagccttgatgttgttgttgtcgttgttgtttttgagacggagtctcgctttgtctcccaggctggagtgcagtggcgcgatctcggctcactgcaagtccgcctcctgggttcacgccattctcctgcctcagcctcccgagtagctgggactacatgcgcttgccacgcccagcactttgggagactgaggtgggtggatcatatgaggaggctaggagttcgaggtcagcctggccagcatagcgaaaacttgtctctactaaaaatacaaaaattagtcaggcatggtggtgcacgtctgtaataccagcttctcaggaggctgaggcacgaggatcacttgaacccaggaggaggaggttgcagtgagctgagatcatgccagggcaacagaatgagactttgttt

SEQ ID NO: 562580 - DNA, 410 bp, Homo sapiens
ctcgcagtacagtcatggccatttggcaacaacccttagacgctttaccaccccagaccagaggggccaggaggccatcttattctcaatatacattttattacccaatccactcccagcattgcaaaaaggtccaaaaatcagattccggccctcaaaccccacaacaggacttaattaacctcgccttcaaggtgtacaataatagagaagagttgcaattacttgcctctgctgtgagagaaaccccagacacatctccagcacaaaagaacttcaaaacgcctaagccatagcggtcaggtattccttcgggacctcatcccccaggatcttgcttcaagtgctggaaatctggccactgggccaaggaatgcctgcagcccaggattcctcctaagccatgtccc

SEQ ID NO: 562581 - DNA, 304 bp, Homo sapiens
ccccctccccgggaaaccatcattctactttgtttctgtaagttggactacttcagatatcccatataaggggaattatgcagtatttgcctttctggggctgttttatttcacttagcacaatgttttcaaggtttatctatgttgtagcatttggcacaattttcttctttaaggctgaataatattccattttatatatataccccattttctttatccattcatctgtccgtggatattacactgcctctacttcttggttgttgagaatcacaccgaaatgaacacaggtgtaaccgta

SEQ ID NO: 562582 - DNA, 377 bp, Homo sapiens
gcagcatggatgaatcaatccgcagcatgggtgaatcaatccgtgcacttgctcttgtgtgtagccaaattcaacgagccggcagcaatgcgcgtacagcgcgttgtttcgtcctccctcgtgcatcggaatcggaaacggtcgttgcgctttatcaatttttttcgatcgttcgaaatagatcggcatcggcgaaagttccccgtctgcaatatgtacccattcgcgcccgcctgtattttcgcttggaagaactacttgaccgcgcccggaaagacgatagtcgccgacgaaaccgccagccataagcactgtcgcgtcttgtcctttgatttttccggtcgaacgaaagaaaaattgaaatcctcgtattgttc

SEQ ID NO: 562583 - DNA, 921 bp, Homo sapiens
ggtcaccacagtaggtccctcgggctcagtcggtccagcccggctctcagtcctccccaaccccgataagcgccacgacgagctctgagacgcaggtcccggcggacggagagcaggcaagcatgcaggaaatcatgctcgcaaccctccagcgcatggagaagaacctggagcgctagggtctcctctgagtcgatcgttcactcggatcatggccactctgcggtccgaatgtcgcagcgtatcaaggataccaggttcggtgacgagcgacgcccgacggaccgaaggatggaacgcaagaaggacggacgcgacagatacgatgcgacggacaggagcgacatgacccgtgaatggaggctcaggctggcataggctgtgacgacggacggacaacccgcccgccccgtcgcacgtgccgaaagagcgctccatgattgacacattctgagtccgctgaaatgggcgcgagcgcaccccccttgacctaaaactgtgtgcgcgcaagaattcgacatacccaagggcctcttgactgaccaccacgtgtgggaggcgatcactgaagggggctcgggccttgcccctcgtgtcgcacgcacgcagaagtgcgtgggacactcggtgtgcatgctgtacatctggcgtgaagcaacgaccttggtcttggcggctgcgccagaacttgggagcagtcgcaacatccagccgcaggtgcagcagcccgagggtcgattgaatcgccttgtcccagagccagaggacggccagtgcgcgcgtaactcaccagtaatgccacgctgccagtggaccaggaacgacaaccatgagtgaccagggccaccaagcccgatgcaacaccccacaaacaccacctgccatcaaagacacaggggggaaagccagcaggaagaagac

SEQ ID NO: 562584 - DNA, 235 bp, Homo sapiens
  misc_feature (167)..(167): n is a, c, g, or t
cgtacgtggtgtaccgccatggcttggaacactgagacatcttatgaaatggggtgaaacagccaaatctcaaatatttagttcttgtccaaacatttaccaaaaaaaagttctcatgactttctttcacacaggggactaggaagtgaaggtgcatgttttatgangagcttataataaaagaaacttatttagactataggataggggtagccttccccatagaagtgatgat

SEQ ID NO: 562585 - DNA, 399 bp, Homo sapiens
  misc_feature (383)..(383): n is a, c, g, or t
  misc_feature (394)..(394): n is a, c, g, or t
actatgcctggctaatttttgtatttttagagacggggtttctccaagttggccaggctggtcttgaactcctgacatcaagtgatccgcccaccccacaaagtactgggataacaggcatgagccactgcgcctggctccccaccttctgtatatcttacttttgtattacgtgtgtgttgtttattgtttgaccctcccactggaaaataaactccacatggacatggatctatgttttgatcacaatatgtcccaaatacctaggcacagggcctgagcacagggtagggtatggcaatatatatttgttgaatgttcagtgggatgggatggggttggatgagtggggtaggatgggatgaatgggatagtttcatgtnaatggcccttnatttc

SEQ ID NO: 562586 - DNA, 130 bp, Homo sapiens
gagtccttcgccataagcaaggcaagcaacatgtttcattcaggagggtttttttcatccagtgccacagctcagggactccggaaaaaaaagaagagcctgatcctttgcaagacaatctattagtcct

SEQ ID NO: 562587 - DNA, 921 bp, Homo sapiens
  misc_feature (176)..(176): n is a, c, g, or t
ggtctcgagtttttctttgttttttgagggaactggcaagcatattttatttataaaaagggtaactaagctgctttccaaagaaaacaaaaagatggcaaacccagcacccagctcgtgaaagagtctatttaaaccagcaagacaaacggactttcagcgtggggcacccacangcaacataattccgggctccagaaagagacaggggaaaaacggggggcgttggggaggaagcaagcccatttcccccataatacgggggtcatattcgtgcctccagccgtgagttccgagtccaagatagttagtggctcacaaggagaagtagtgcgccgtggagggacgaagggaacgacaagcaaacccatatgcagggaagcataccgagatctcgcggattccgggaatacaagtgcgccaaattccacatctgggggaagaaccgtgcgtgggccagaaggggtatcttgggtcccagtggtatacccagacaggttgacggtgggctgaaagtcagtattcaagattcgcgggtaccgaggtccccggtcgaatggccacaaagtacaccggtctggaacaccggctggaatgtctgggtggtggagacgggtgggcaagtgacaagccggaaccccaagtgacagatggtgccagcgaatacacctcttggtgaggggcaccagggtcatacatcagacagtcttaccgagatatttcccgtctatttatcacctgggacagaagacttgggggccagtatgtatacccccagctcttcataaccggacaggcttggcaagcctggcatcaactttcgaaaagtccccggagcaagaccaggccttaatgccctgggggcacacatatggcttggacagcacaagacttcctctaaagggaggggaggcccaaagg

SEQ ID NO: 562588 - DNA, 255 bp, Homo sapiens
gcacctcgagcttaaaccaattgaagattgggcaaactgcttgaccaaggagcctttgaaagggtctacctctgttatcatgttgatacagtaagagaattggctgttaagcaagttcaatttgaccccgatagtcctgagaccagcaaggtaaaaatcactgcacaaattactttgtcacattataagaaactttattcattattattttttaacattaagccccttccattctaaataagaagcttttttttc

SEQ ID NO: 562589 - DNA, 496 bp, Homo sapiens
tcggcctacgcctatcctttaagatcaacaggctagaaaagagttttacagagtcggctataggtgactgaccagactatcaggatgaaatcagtctgctagctcaacaagggaagtaaggaagagtatatatggaatagagaagatccattagggcatttttttagtattaccatgccctgtgattagggtcaaagggaaactacaacagcccaatccaggcaggactacaaatgacacagacacttcaggaacgaagggtaagggtcacaccaccaggaagaaaaccacgacctgctgaggtgctatgctgaaggcaaagggaatatagaaagggtagtaagaagaaggtagtcatcaataccagctacaaccatgtgaccagctacagaaacaaggactgtaattgtcatgagtatttccttattcttttgtgcaaaacatgttagtgcatgtatacactcatatgaagaaaatatcttccttttatttcctt

SEQ ID NO: 562590 - DNA, 340 bp, Homo sapiens
  misc_feature (226)..(226): n is a, c, g, or t
ggaagttacttaaacatgaatcttttactatcaaaatctaatattatttgatactttcctcctctcctggatactctgttgagctcatttttattcacattgtcattattgcattgttttaattctgtctgtattttatcttgacaggtttaatttgtattttcaatagccatttagatttacccacaaaatttatccttttcatttcctaactagatactttggngggccccccccccctctgcataaagaacaccctttatgcttcccaccttttgtgtaacttctagtagtgaatttcctatgttagtctagacatgcctcaaattgatcttccttt

SEQ ID NO: 562591 - DNA, 220 bp, Homo sapiens
cacgaggggacccactagtgccatcttcaacgcctttgatattatcattgtcatgctggtctggagtacaggggctcatgtccaaatggtaagggatatgtcacccaactcacctgaggggtccatcacgaatgctggcattccacactccatcattaattgtgtcaaacagatcagcgtggccaggttggagaatctctctcagtccccccccaagggc

SEQ ID NO: 562592 - DNA, 1460 bp, Homo sapiens
ggcaggtattcgctaccatgacctgctctacaccggggtctatgtcgcagttcgaggccgctgcgcggccttgcgcatgggaggtggcagatcatgggcctgagctagagaaaggtatggatgggtggtgaccggttgcgagcacgctggcatggacggagctcaacgtgccaagaggctcctgtctgatacgggtcaaggtccgccagatgttccgagtgcacaggagacctcgacaccgtgtatcaggtcgccagtaaccaagtcacgtgcgtcggcgcttcggctcggaatcgctatggtcctcgtatgcgcgcaagggacaccaaactgagggatggcctagtccgttgcgtgggacgggtggtggacatttggaccgagcggttggattgcagcttactgtctggcaaattacagtctctccgatcatttcctaccattcaacctgattcagggttggagacgccggcattgtatctcattggtcgagagcgttaggtggccacgggagccacgcctggaatcctcgtaaggggtagacccgtggggtggtaaccctggagcctagcgggagggcagatgaagcctggcaatctgaagctgcagcaatcatgaattctgctcgttacgcctggatgtacttcatccgtgccgtgagacctcggcctgggcgtgagtcggcgattggatgggttcactaagtccagcgtgggcatgtggcctgcggaatgtggctgtcacggccttgcgtcctatcaacggggcctatgtggattgggggcggatttcaactccaagagtgtcccgagagagaccaatatccagtcgaaaggtaggtattccgtggggactttccaccgtggaagcgtaccgttggaaggccgtcactcaatttaaatcggggccagagagggggacacaaacgttgcacgggcggttgagtgctgtaataattccgtgcatccgggggcaatttgtgctacgtctctagcccccttaacgtaaaccatccccagcaatcccgatggtatgtaaggcctggttagtgaatcacgggcatggcaaccgtatcatcacgccccagtaggaccaggggtccttgtctgtttaccttaccccgccttttgaaccatggagggactgcgtgtgtcgtgcatcgcaagtgaaggtgcccatctcgcgggaggcccataggatgtcgtaaacatcctgtttcactcggtccaccgtgcgactttcttggccgtagcaccttttatacggatgccagctgagaataatgtgcctattccgaggtttctcgttctaacattcatcttagcgatatgtatgcatcctctttcggtgattattaccacaacgccgaaaacggtattatagacagcagcgctctcacaactaatactagacgcagcataaatgtcatatcccttaccgcgcacgacatgactacttcg

SEQ ID NO: 562593 - DNA, 1286 bp, Homo sapiens
  misc_feature (263)..(263): n is a, c, g, or t
  misc_feature (377)..(377): n is a, c, g, or t
  misc_feature (758)..(758): n is a, c, g, or t
gcagcgctggaggccggctgaaacctcatagacgttctgcgtgtacgctatgtggattccgtccagcaaatgaggatcgagttggccttctggagaggccatctagctaaatctggtataagtaatctctcagtggagcttcagaatcttgctcgcgtgagacatgctgggctaggatggatccgagacagggcgctactcgatgggcatcttgcagtccaagcgtctcgtgcaagatctgcagcgtagcaaaggagatattncacgctcgaatcgaatagtaggcaggtaggtgcttatggcaagccaagttgcgacgcggtggttccacggtcgtgcatgagctcgcggttcggaggaggctgactctcgctagntcaacactgacggagactgcaggcacacatagcccgatggaacagtgggaacctgatccaacggtgcagctgagtttgggagttcagtcgagcctgtggagacactccagtggaaggcttctcgtcgacaccatgggcgatgtacgtctggtacgagagcccactgggtcagggagatacgcgaagtccttctcacctgagccttagcggttgtggcactcgcacgtgggccctcgccgggcaccgtttgcctccatcccgcggctcccggtcgtcatgtcgctcggacatttttcatctcgtcggcatgttccatgcatccgttggcactggcagttcggcagatgccaggagcccgtccagccccgactcccacctagntgccccagcactggagctctccagtgccagcgtgggaacggttgatgtggactgtctttttcattgttggtctctctggagccccctcctcccccggctgggcctcccttctttccagttgtccaagaagtggaagcctggactgaggccttgtgtgtcaggccctctgactgcactccctgggcctgtgccgtcgtgtgctgagacctgttcaagaaccgatttcggggaaggcttgccgggcattgcacacgggtggttcctcttgcctctgtgcttgcccgggctgggcgtcgcactcggccatttcctcaagtgccagggacagtgctgaattgggggggaaaacagggggggcttaagacaaacaagcttgtgacccggccagggcgcactccaaagacacacagcacgaggcataccttcacacaggatccctacccgacgaacgcttctccctcctgagagtacggaatctcgcgacaagtcgtcttccaggtggaccgatgagagaacctcccaaaagaa

SEQ ID NO: 562594 - DNA, 368 bp, Homo sapiens
  misc_feature (9)..(9): n is a, c, g, or t
  misc_feature (14)..(14): n is a, c, g, or t
  misc_feature (72)..(72): n is a, c, g, or t
  misc_feature (113)..(113): n is a, c, g, or t
  misc_feature (158)..(158): n is a, c, g, or t
atttggagnatggnaatggaagtggtcctccctaccctttacctggaagggtgttaggaacccccattaaanggtaaccatacaagaacatattttttatgaaaatgaaactnggaccaattttaatattttttaaatgtgatctgtttccaatttanggtttcttttcccaagttgggtgagaaacatttcttctgatagagtgcctagtaaagtggtggctgaccaagcttcacagaaacgactacttgtttgctaagattctttgacaaattacttacatatttgtgtttttttcttcaagcaatgaaaaccatttttggtctgccacctgtcagaacattgccattctcatcaaggtcattatg

SEQ ID NO: 562595 - DNA, 262 bp, Homo sapiens
ccccccccccccccccccccggggggcccctttttggggggggggggccccctttccctttgggcctttaggggggggggggccccttttcccccggggggggccccaatgtggaaaaaaaaccccccctttttcccgtccggggttgtggggggcctccccccccccgggaaaattttttttttcccgggggggggggggttttaaaaaaggggcccctttttttttttttttttttggaaaaaagggtttttccccccca

SEQ ID NO: 562596 - DNA, 156 bp, Homo sapiens
gctttctgagcccatggaggacacagctaatcagtaaaggcatatattcttttttttttgagacacagtctcactccatcacccaggctggagtgcagtgagctgagatcgcgccactgcactccagcgtgggggacaaaagcgaaactctgtctc

SEQ ID NO: 562597 - DNA, 157 bp, Homo sapiens
ctgcagctttgtctactctcagctcatcaggctctcgcctgggggcggtcgtcctgactcctgcggctgtctggcggctgggtgccggctcctgcaggctgggaacttggttggcggccttgggcaagcacccttcgggggtaagcaaggtaactcc

SEQ ID NO: 562598 - DNA, 308 bp, Homo sapiens
  misc_feature (17)..(17): n is a, c, g, or t
  misc_feature (177)..(177): n is a, c, g, or t
  misc_feature (231)..(231): n is a, c, g, or t
catatattgagtatctnttctctgttaggaaacacaacaaacgtaaataagacagtgtatcctgcctcacaagttcacagtgcaatcagcactaccccaggagtgaacaaaatgatttaggcatataaaggaaagggtaattaactgcctaggcttcacagaggaatgatagttganttgcttcttgaaggataagtagaagtttgccagagaggatggttttcccataanttgattatggctggagcatagagcctggagtaaagttgtaggcgagattaaactggagaatatgaaaggacatagac

SEQ ID NO: 562599 - DNA, 204 bp, Homo sapiens
tacttcaagggggccccctgtaagaaaagccaaactccaagaccaagtaagttaaaggagttttgattttttagacttccctggggagttttggaccccctttgccctgatgaatttgaatgggtttgatttgcaaatttggatttacccccattgttttggaagcacatcagctgaaaaaagttgaggtttattttttttaga

SEQ ID NO: 562600 - DNA, 901 bp, Homo sapiens
  misc_feature (35)..(35): n is a, c, g, or t
  misc_feature (69)..(69): n is a, c, g, or t
  misc_feature (103)..(103): n is a, c, g, or t
  misc_feature (124)..(124): n is a, c, g, or t
  misc_feature (129)..(130): n is a, c, g, or t
  misc_feature (145)..(145): n is a, c, g, or t
  misc_feature (148)..(148): n is a, c, g, or t
  misc_feature (165)..(165): n is a, c, g, or t
  misc_feature (173)..(173): n is a, c, g, or t
  misc_feature (180)..(180): n is a, c, g, or t
  misc_feature (194)..(194): n is a, c, g, or t
  misc_feature (196)..(196): n is a, c, g, or t
  misc_feature (206)..(206): n is a, c, g, or t
  misc_feature (212)..(212): n is a, c, g, or t
  misc_feature (219)..(219): n is a, c, g, or t
  misc_feature (226)..(226): n is a, c, g, or t
  misc_feature (231)..(231): n is a, c, g, or t
  misc_feature (240)..(240): n is a, c, g, or t
  misc_feature (245)..(245): n is a, c, g, or t
  misc_feature (261)..(261): n is a, c, g, or t
  misc_feature (276)..(276): n is a, c, g, or t
  misc_feature (299)..(299): n is a, c, g, or t
  misc_feature (311)..(311): n is a, c, g, or t
  misc_feature (327)..(327): n is a, c, g, or t
  misc_feature (332)..(332): n is a, c, g, or t
  misc_feature (354)..(354): n is a, c, g, or t
  misc_feature (357)..(357): n is a, c, g, or t
  misc_feature (372)..(372): n is a, c, g, or t
  misc_feature (379)..(379): n is a, c, g, or t
  misc_feature (383)..(383): n is a, c, g, or t
  misc_feature (390)..(391): n is a, c, g, or t
  misc_feature (396)..(396): n is a, c, g, or t
  misc_feature (401)..(401): n is a, c, g, or t
  misc_feature (428)..(428): n is a, c, g, or t
  misc_feature (455)..(455): n is a, c, g, or t
  misc_feature (478)..(478): n is a, c, g, or t
  misc_feature (485)..(485): n is a, c, g, or t
  misc_feature (492)..(492): n is a, c, g, or t
  misc_feature (530)..(531): n is a, c, g, or t
  misc_feature (616)..(616): n is a, c, g, or t
  misc_feature (672)..(672): n is a, c, g, or t
  misc_feature (770)..(770): n is a, c, g, or t
  misc_feature (802)..(802): n is a, c, g, or t
  misc_feature (805)..(805): n is a, c, g, or t
  misc_feature (828)..(829): n is a, c, g, or t
agaaaaacgagaatgattaaaattaatttcgagcnttctatgtgtcctgcatcacccagtaggtatttnacatatgctatatgttttttattacaaaaataanactgcagagagcccataactnttttnnaggaatcctgaattnaanatttagtaatgctacanatacttantttgganatcagcaatctaantnccggctttgnaaactnattcttnaagaggnaagtnattcttggnaacancgtcctcaggaatgangctcctgcagttgangttcagtgaacgctgggtcaggnatgtgggcagangtgtgggacccaatgngagtncttggtgtgcagggacgcgggntgntcacatagtaaaaantcgagtncatngggaagnncaggnaaggntttaaaatgaggatcaggtgggatctnttaggggcaaatgggggggatcaaagnttcccctcgaggtttattaactntggagtnggttctntaggtgtgggaagaattgggagataacgatgtgtctgnnagaagaggcgttttctaaggagacacacaaagggagtgggaccctccaacctcactctgtgagaggtacaccgcacagcagtgtnggggctcgaacaccccaagagcggcagagcgcggttcagaaaacatgacccttganatgcacacaaagcctaacaacgtgtcctccgcggaagaaaacagcttgaaaaggtcggctttgaagtgacccagcggaaaggaatcaccctggaaganacacgcagcagccccggggcaatgcgcgggcnggnggagcagcgagcgcggggtgcgnngggcccttcggagagggcgctccaccggccctgcgctccgtacctgtgccgccacgcccaccggtcccctgc

SEQ ID NO: 562601 - DNA, 155 bp, Homo sapiens
agacgggcatgagcggtccggtcagctgggtggccagtttcagttcttcagcataactgtctcccttcttggtgggcctgagtggcttcctggggaagaggatgagtttggagcggtactccttcaatcgctgtcacgttggccattcaacgcct

SEQ ID NO: 562602 - DNA, 990 bp, Homo sapiens
cccagctccacattaccatggccgcggctacccctgccgtcccctcttcgactccctgcacgccgggtctctcagtgctcttcaggatccaagtcagtattgccctttaaggggtctagttgccgtttgcgaggcccgtgggactttggtccctatgacagcgtggggatccggatggcttccgtgcggatcctgagaggccaaggagggagactgtggagatatcctgaggctgattcgaggtgaagactgcaggccggtaacccgggggtcagcagtggcgcggacagagacggggtcgtaggagtgcggggcgcagggggaggggctcgccttgggaaacctgctcggggagcagcaggggcccttcgtgctctaatctagcttccgtacccacgccttagtgagctagccgaattcgaaaaactctcggatcaggtgaacgatcagtgaagaaggtgcggggactcaagcgcccaggttctggcggatggctgtgtgaggaaattgagggactgggttcgccatggccgacaggcttccaggctggagcattacacccaccgatccatcttttctctatcatctattgctcacaacatccaatacatcgcgacatgcccttgatgaggcagaaatggccttttgggcagacacatcactttacgtaatccactggtactgggtatatcaagaagagtatcatttcacaggggcaccggggacagctaactgggggtaaagagccagcctggccccgttagacacgttccgaccatattgcacagaccgggcacatcaaggagggatctcacgccagaaaggtcctttccaaggaaatcccgcatgaaattccgcccgtagttacattcatcttattcagggggcccatggcggtgggtggggatatatatggcgaataattacgttatcacgaatactaacagtgtaacatggcaaggggaacgcagacacacttcttgtgtggga

SEQ ID NO: 562603 - DNA, 719 bp, Homo sapiens
ggtgttcgactgctagagccgagcgaagcgatgcctaaatgacaggaacttgttacttcaagctcttctggcgagtgattctgacagtgaggttgagaaaaaagttaagagaggaaaaagcaggttgctcgcgagaaaaacctgtaatataaagaaaagacaggtgagacattctggagagcccgtgtcatcttctaaaccagagctagcagcaagctagagtatgaataacatgtttcagatttgggaaaaatgaggctacgtaaggtgtgtcggcgatttgttaaagggcgaacaggtgctaaattgcatattgagagacatcattggatggtatccgtgacagggtgcaaagtgagagacgcagggaaagaagagaggctgatctgtcgttgtaaaagtcgcagcagacaattgggagctcgagtctgaagggtagacaagactgttctgaatcgattgcattgaagtgccaaagctacagaagaatacttggtaacacgattcggaagccaatagtaaagtagaatagccgtggtagctgtctctaaggttagttttaactgctgtcgttcttgtacatttgggcttatgggtcttcgtagaatgttcgtccgaagctattgtagtgtctgggattgcagaagaactttgtaagatgcaatacgtttttttttaagtgtgcatttattacacgcactattgaggtgaacgctaat

SEQ ID NO: 562604 - DNA, 573 bp, Homo sapiens
ttttccatgagatcgaaaaagagacaatatgtttggaatacattttaagtaggtctgtttccttatgagtccctgttgtggcagaattccattaacaaggcccagttgctgcaatgttggaatagctgatatgtcagttttgggcaggctacatggaactccaggactggtattaaatgaattccgtagaacatcagtacaggttgcagaaactgttttaacttgtgatgcaaactgactgttgccatcagtttgaacttcagaatgaacctttggagggcagggtggccgctgaagtgaccagactggggtggaggtacataagccataactagaatgaggagttgcctgagaattcagaatgagagggagcatggcatggtacagcaggaattccattagggatgttctttgaagtcaagtcattcatcagtgacatctgagtctgcacgtgcctcccagagggcttggtatattatgggtgaatacattctataatgatcttgcaatgaacagttttgctctaggtctgatgtgtctctttcatttctagcagaaggttattaggtatct

SEQ ID NO: 562605 - DNA, 124 bp, Homo sapiens
aggatcctgtgcgagttggagcatctctcttgcgtctgctcagcgtatggatgtgtctgtgcctctgtcagcctttgactttgacatttgtgtgttcatcctgccaggctccttcatacgagtg

SEQ ID NO: 562606 - DNA, 223 bp, Homo sapiens
ttatatccggaacagatagttactgtaaggaggagagtccactagactaatatcgcaaaagggactaccaataagtactgtactttagtcaactacacagttgttttccacgagggtactcgttaacaattctgatactgctaaacaagtgtattggaattgaacaattaagtaaatgggtggcagatgggaaaagccaagtttctcactgtggaatggaaat

SEQ ID NO: 562607 - DNA, 265 bp, Homo sapiens
tgccccgaggaaacaatgggtaaattttaaaattttttaaaaacaattttttaaaacaaatttgttaaaattgcccttaaaagtaaaaaactttaataaaacggttaaagcaggtacccaaaaattcaatcctaggatataggacctagtattatagggactataaaccctaattttttttatttaaggacattttgctttttaaaggtgatttttttttaatggttttaaaaaaaataaaaaaactggccaagaaatccttgga

SEQ ID NO: 562608 - DNA, 670 bp, Homo sapiens
  misc_feature (623)..(623): n is a, c, g, or t
  misc_feature (625)..(625): n is a, c, g, or t
gttagcttgttattgcaatgacttgtttgtctggttgctttatagtgtcactggtcttcatatgtaaatgtgtttttgtattggctgatagcattcttccttctatatttaatgctcctttcaagatctcttgtaaggcaggtctggtggaatgaattccctcaacatttgcttatctgaaaatgatcttatctctccttcacttaggaaacttagtttggctggatataaaattcttggttggagatatttttctttaataatattgaatataggttccccaactcttctagcttgtagggtttcagctgagatgtcttctcttagcctgatggggttccctttgtaggtgacctgccctttctctctagctgcctttagtgttctttctttaatttcaaccttggaaaatctgatgattatatttctggggaatgatcttcttgtgtagaatctagcaggagttctctgtatttccctttcactgttggcctttctagcaaggttagggaagttttcacagattatatccttatgttttctatgttgctggctttctcctcttccttttcagagatgctgatgattcatagatttggcttctttatatttccatacatccngnaggtttttgtcattctgctttctttatttttggctgctggcttct

SEQ ID NO: 562609 - DNA, 105 bp, Homo sapiens
acgtaatatgtaacccccacctttttgttcgtttgtttgtttgctacgagtcacattcctgttgtaatccttggattcgccggttttctgtttcagtaaagtctc

SEQ ID NO: 562610 - DNA, 666 bp, Homo sapiens
  misc_feature (455)..(455): n is a, c, g, or t
  misc_feature (644)..(644): n is a, c, g, or t
tggggtgcaggacccagggctctcaattaacttccatgaactcagcagcggggtggggagctggaggctggggaggcgggtggcgccagaaatgacccggtccggtggccagcagggcgtttgcgccaggttccgtggcgttgggataaaaagaggacatataggcgtgccttgggaacctcgattcgtgattctcctcattgtgaccgaggggtaagacgcgtgttgtgctcatctcagaagtatagtgtgccacagtgtgggcgcggcgtgtcttccgtgtgtgtgtgcacagggacaaaatgtgtgtgtggtgtataaggtgctcacatctcacgcgcacatgtgctccccccatatatatgtgggtgtgtgagaaaaaccccgcgcgaagtgagaggtctcatatatatgtgtgttgctcacgacgcgctctcgcgcgagatatctcgganaacatctctatatctctgtgtgtgcgcgctgtgtgagatgtgaccacaacaaacctctccgcagagagacagagatctccacgagagtgctctcgcggggagatatagagaaacaacactctcacgagcgagaagggggtgtgttctcacaagcgctatctcctctctctgcgagagagaagacaaaanctctgtgggcgtgtgataagaa

SEQ ID NO: 562611 - DNA, 89 bp, Homo sapiens
gcctgcgccgagcacaagacaatgatgaacattctaaaaaaaaagaatgacgcacattttaataaagcacagcacaaactgttctttcc

SEQ ID NO: 562612 - DNA, 352 bp, Homo sapiens
atccaccatgcttaatgttgatgcatctcgtgacccagaaggtcccatctgtcatatctcgcaatatgtcatttatctcctccctttgaaatatccctccagtaccattctgcatcctgaatagtaacacatgaactgtccttcattccatttggaattgctgaattcatatggcttacgtggctttggtgtatgagctggaggatccatttcacatataatatatcagttctgtcgaatagggcatcatcacctccctccagtctgcgtcatcgctgttccctgtttaaaacgtattgtacatcgcgctgtcaggggcaggtcgcccggagatatatagaaggcatatatt

SEQ ID NO: 562613 - DNA, 343 bp, Homo sapiens
ggaccgggcggcactatagcgagactctgtatcatcaactttataaacttagctaggcatggcagcacagacctgtagtcccagttactcaggaagccaaagcaagaggatcactggagcccaggagttcaaagctgcagttagctatgaccacaccgctgcactccagcatggacaacagagcgagactctgcttaaaaaaaaaaaaggaaagatggtttatacttcggtttggagaaatattcaaaatacctattttatgtacctaaatattggcccattggtgctactttaccacacagagatgtactggtttggtgaggtatggatatatattgggccg

SEQ ID NO: 562614 - DNA, 437 bp, Homo sapiens
  misc_feature (25)..(25): n is a, c, g, or t
  misc_feature (29)..(29): n is a, c, g, or t
  misc_feature (31)..(31): n is a, c, g, or t
  misc_feature (174)..(174): n is a, c, g, or t
  misc_feature (177)..(177): n is a, c, g, or t
  misc_feature (313)..(313): n is a, c, g, or t
tcccaagtaaggtacctgccgtcgnagtntnggagctttcttcttggagacctaatacccacagtcctccaggcacttaggctctggtagattgcaaatgacctgctttctttctgttcccgggtggcatcgacccgtcggagagtaaatcccaagtaaggtacctgccgttgnaantcttgagctttcttcttggacacctaatacccacagtcctccagtaaatcccaagcaaggtacctgccgtcagcagactttgagctttcttcttggacacctaatacccacagtcctccatgaaaaacaaacaaangacatggatttactgtgcatattagcagatccatactgggaaaatgcatggaggtttcatatacaccacttacaggtttccaaagccacaatttccttcatatgttcaaactcttcaggatgca

SEQ ID NO: 562615 - DNA, 427 bp, Homo sapiens
gagtagctgctgcaacctcagcaaagaaggtggtcgtttcccaacaaaaaaggttgcagttgcacaccagccaaagaaagcagctgtcactccaggcaaaaggcagcagcaacaccttgcaagaagacagttacaccagccaaagcagtttaccacaccctgtcaagaagggagccacaccaagggcaaagcattggtaggcaactcctggtaagaaagggtgctgccaatcccagccaagggggcaaagaatggcaagaatgccacggaggacagacggtgatgaagaggaagatgatgacagtgaggaggatgaggaggactgacgaggacgaggatgaggatgacgatgaaattgaaccagcagcgatgaaagcagcagctgcttgccctgactcagaggatgaggacgatgaggatgacgaag

SEQ ID NO: 562616 - DNA, 516 bp, Homo sapiens
  misc_feature (98)..(98): n is a, c, g, or t
  misc_feature (128)..(128): n is a, c, g, or t
  misc_feature (219)..(220): n is a, c, g, or t
  misc_feature (226)..(226): n is a, c, g, or t
gagacagcactcaatgctaaggcctacaagcgcagcaagcgccagtccctgccgaggcccgcatcactgagaagctgagaagcagcagaagatcgagncaggcgcaagcgccggcagaagcaccaggnatacctcaatagcattctccagcatgccaaggatttcaaggaatatcacagatccgtcacaggcaaaatccagaagctgaccaaggcagtnncacgtnccatgccaacacgagcgggagcagaagaaagagaacgagcggatcgagaaggagcgcatgcggaggctcatggctgaagatgaggaggggtaccgcaagctcatcgaccagaagaaggacaagcgcctggcctacctcttgcagcagacagacgagtacgtggctaacctcttgcagcagacagacgagtacgtggctaacctcacggagctggtgtccgagcacaaggctgcccaggtcgccaaggagaaaaagaagaaaaagaaaaagaagaaggcaaaaaaaaaaaa

SEQ ID NO: 562617 - DNA, 286 bp, Homo sapiens
cgcgaatggtgttcaacgttattgcccgaaaccaggacgatcacaccaagaacatcagctttctgctggatacagatggcacttggtacctgtcgcctgcctatgacatgacttggtcgtacatgcctggcaatttctgggtcgatagccatcagatgagcattaacggcaagcgcgacaattttgtgctggaggacctgctcagcattgcaaatcaaatcaaggggctcaaggcacgcgagattatccgggaggtgcatgaggccgtcgttcaatggcctggtat

SEQ ID NO: 562618 - DNA, 179 bp, Homo sapiens
ttactgttagctttctctcctattatactccaccctaggccatgtcgtcaaactacatcttatcatgtactcatatgctgaaattcatatgatgtatcgcttccttatattgcttgaggtactgagccagccccttgttggtttttcttatatggcttacctgggcacacattatggag

SEQ ID NO: 562619 - DNA, 110 bp, Homo sapiens
cgagctcagtaccctcgataagggcaaaaaaaacatagcctcatcatccccaccatcatatgccaccatcaccctccttaagcctctacttctaccttggccttatcgag

SEQ ID NO: 562620 - DNA, 186 bp, Homo sapiens
agatcccccctttccatcccttctccgccaggcacaggaaaagtttggaaaggacaacgtcaccgagaattccagcatcttgtggcatcctcctaggtggcgcatgaagagatcctgctagttcataggacttctgcctattggtgttttctgagcggtgcccctcgaggtatagattcgtgggac

SEQ ID NO: 562621 - DNA, 282 bp, Homo sapiens
ggtgaaacatctactgccgactggcggcctgatgtgctctgttacatgacacggacggaggggctgacgtttcagcgaggatggatggctctgtggacttctaatcgggactgggccgcatacaagcagggcttcggcagtcagctgcgggagttctggctgttttaacgacaacatccacgccctgaactgcccagggaagcagcgagctccgtgtagaacctggtggactttgaaggggcaacacccagtttgctaagtacaaatcattcaacggtggct

SEQ ID NO: 562622 - DNA, 330 bp, Homo sapiens
  misc_feature (31)..(31): n is a, c, g, or t
  misc_feature (68)..(68): n is a, c, g, or t
  misc_feature (80)..(80): n is a, c, g, or t
  misc_feature (83)..(83): n is a, c, g, or t
  misc_feature (85)..(85): n is a, c, g, or t
  misc_feature (90)..(90): n is a, c, g, or t
  misc_feature (98)..(98): n is a, c, g, or t
  misc_feature (100)..(100): n is a, c, g, or t
  misc_feature (116)..(116): n is a, c, g, or t
  misc_feature (129)..(129): n is a, c, g, or t
  misc_feature (137)..(137): n is a, c, g, or t
  misc_feature (167)..(167): n is a, c, g, or t
  misc_feature (170)..(170): n is a, c, g, or t
  misc_feature (180)..(180): n is a, c, g, or t
  misc_feature (186)..(186): n is a, c, g, or t
  misc_feature (204)..(204): n is a, c, g, or t
  misc_feature (221)..(221): n is a, c, g, or t
  misc_feature (303)..(303): n is a, c, g, or t
ccatacaataggttattataaactatagtcnccctactgatttatcattatcaaactgtatatttctntccctcaatcanccncncttcntccccccncncctctccccttctcancctctggtaaccnccaatctnctctctgtcttcatggggtcagtgctgggnttncttgcttgtnccactntgccccgccaggttttcnttcttttttatggctgnataatattccattgcatatcaatcacattttctttaaccattcatccactgatgggcacttaggttgattccatattttggntatttcaacagggcttcaataaacatg

SEQ ID NO: 562623 - DNA, 207 bp, Homo sapiens
taaacggtagttctattttgggctcttggaggaatggcctcactgttttccacaaggggtgaactagtttacactcccaccaacagtgcataagcgttcccttttctccacaatctcggaatctgtcaagaaagggtatctcactctggtttggacttgcctttctctaatgatctgtgatgtgggccttagtccaacatccggggt

SEQ ID NO: 562624 - DNA, 857 bp, Homo sapiens
  misc_feature (54)..(58): n is a, c, g, or t
  misc_feature (120)..(120): n is a, c, g, or t
  misc_feature (226)..(226): n is a, c, g, or t
  misc_feature (229)..(229): n is a, c, g, or t
  misc_feature (289)..(289): n is a, c, g, or t
  misc_feature (302)..(302): n is a, c, g, or t
  misc_feature (323)..(323): n is a, c, g, or t
  misc_feature (332)..(332): n is a, c, g, or t
  misc_feature (334)..(334): n is a, c, g, or t
  misc_feature (336)..(336): n is a, c, g, or t
  misc_feature (339)..(339): n is a, c, g, or t
  misc_feature (356)..(356): n is a, c, g, or t
  misc_feature (370)..(370): n is a, c, g, or t
  misc_feature (377)..(377): n is a, c, g, or t
  misc_feature (380)..(380): n is a, c, g, or t
  misc_feature (385)..(385): n is a, c, g, or t
  misc_feature (394)..(394): n is a, c, g, or t
  misc_feature (397)..(397): n is a, c, g, or t
  misc_feature (401)..(401): n is a, c, g, or t
  misc_feature (407)..(407): n is a, c, g, or t
  misc_feature (411)..(411): n is a, c, g, or t
  misc_feature (414)..(414): n is a, c, g, or t
  misc_feature (423)..(423): n is a, c, g, or t
  misc_feature (425)..(425): n is a, c, g, or t
  misc_feature (427)..(427): n is a, c, g, or t
  misc_feature (430)..(430): n is a, c, g, or t
  misc_feature (436)..(436): n is a, c, g, or t
  misc_feature (448)..(448): n is a, c, g, or t
  misc_feature (457)..(457): n is a, c, g, or t
  misc_feature (460)..(460): n is a, c, g, or t
  misc_feature (466)..(466): n is a, c, g, or t
  misc_feature (490)..(490): n is a, c, g, or t
  misc_feature (498)..(498): n is a, c, g, or t
  misc_feature (501)..(501): n is a, c, g, or t
  misc_feature (506)..(506): n is a, c, g, or t
  misc_feature (508)..(508): n is a, c, g, or t
  misc_feature (512)..(512): n is a, c, g, or t
  misc_feature (527)..(527): n is a, c, g, or t
tccaaggtgtactctaattcccatttgcaaaatttccagtaacttgtcacaacnnnnnacattatcgggagcaggtcttccataatgtataaagaacaaggtagttttacctaccacagngtctgtatcggagacagtgatctccatatgttacactaagggtgtaagtaattatcgggaacaggtttcccataattttcttcatgcaatgacatcttcaaagctngangatcgttagtatctaacatgtatcccaactcctataattccctatcttttagttttagtngcagaaacatttngtggtcattaagcatggggtngggtaaatncnancantgtaaaatgaaattacnacaaaatttgaatntagctgnggntttgntacctttanggnttcnaccagntccnctncttaatgananantancatacnttataatgttgntatgacaantcntttaanttatcacattattgcagttccccnaaaactantgngaaantntaanccaaatgactttgantaagaaggggactttgtatagaaggttgcggctgtgagacaaggagagtccccatggaaggttctgaacacggtgtggcctaaccatgcggggcggtccactaacatctaggccgaactaaagtcgaagcccggggtgaaccacataataccgggagaccaaggggctaggaagggaacggctcatagggaaagcacgggcccagtcaagggcatacaattacgacatggatgtgcacaccaggctacaaagacacaccccacggacagagacaggaagcaacacgggggcacccataacgggcgccacaagggggctacctgacacggc

SEQ ID NO: 562625 - DNA, 329 bp, Homo sapiens
aggaatacggataactatgtactgatgacatgggacttggaaacacagtacaggtaatatcatattctaggactagcagtatacgcataaaacagggaactcgtagaggatatatgaaaataatcatgccagagtaaataactacagaagtatagaaaacacgaacccctatacaactacagcacaaaaagatgtacttaatacgttgctcctactttctgtcctctacaactaggaaggcttgctatggacacctaggggaatataaccagagtcactagttttacataggaaacagcaaacagcataaatgaaatacactatcgtgt

SEQ ID NO: 562626 - DNA, 197 bp, Homo sapiens
gttcgatgtagctataggtgtctaggatcactgtaatgcacaggagtcactacggctccgctgctatatatatcgaatatgatcttatatatagcagaatgctactcatgctttccgttctctggatatatgacagatgcttgttatcgagctcttactcctctactactggctatgcattatctgagacgatgtat

SEQ ID NO: 562627 - DNA, 287 bp, Homo sapiens
cagtctgactggcgcgtgtcttacactcacgacagaactatctctgtcgtaccatcttagacgctcaggcgatcgacaccgtctgccctatcctgcccgccatcctcccagtcctcatcgccctcccatccctacgcatcctttacatacacagacgaggtcaacgatccctcccttaccatcaaatcacattggccaccaatggtactgaacctacgagatacaccgactacggaggactaatcttcacctcctacatacttcccccattattcctagaaccaggc

SEQ ID NO: 562628 - DNA, 193 bp, Homo sapiens
  misc_feature (174)..(174): n is a, c, g, or t
  misc_feature (187)..(187): n is a, c, g, or t
atcacaacaccatgtatctctactaatatttaacgcgtcccggattaatgccggtctctgacaattctggccgtcattcatctattcctcttcgccctcccattcctacgcatcctttacataacagacgaggtcaacgatccctcccttaccatcaaatcaattggccaccanatggtactgaacnctacga

SEQ ID NO: 562629 - DNA, 403 bp, Homo sapiens
tatattaaaatgctttctcatcctcaaagtctatgattaaaggatggcacttatgcattctgacgcgcatgagagaattgatgacacactgccattgtgagcaaatatctactctagaagagttcaacgtaattcatgtatacaatcaacccttcaaaataacactgctgtaaccactctgcatctatttagcaacacaaataacgttcaacagccaaaatcactcatttaaattttcacagtttctctcctccatgatgtgtttaattaacgctgttacaagtccagcataattttttagcatgtgtaaccgcaccacatgctaacccagtttcagggttcagaaaactaaaatttatcattctaacatggttctccttaagccagaagtaccagaatagaa

SEQ ID NO: 562630 - DNA, 187 bp, Homo sapiens
aagctttttttttaaaggaaaaaaaacccaaagcctgctgctcccccccctttccattgctatttttttaaaggcccccggatgtgttttaaattgatttccccgtttcaggggaatcccgggccggagtttcagttttgatgggataagccaaaccaataaaacgtttataaaagttggtttttta

SEQ ID NO: 562631 - DNA, 307 bp, Homo sapiens
caagcagtccacactacacccacaaactccacccactggaacccatccacttcacattctatttctaccttcttcaaatcagtaggatccatgctctatcgtccatccctactgcagccgactcttttgtggctcccaaggtttcttttcttggtgtttttattgaagcagggtgtcactctattactcaggctggagtgcaccagcacaatcatagcttactactgcagcctcaacctcccaggctcaagctatcctcccacctcaaccttctaatttgctgggaccacaggtgcgcaccaccatg

SEQ ID NO: 562632 - DNA, 920 bp, Homo sapiens
tagtgaccataggaccgagtatgaaatatttaaaaaaccactagtagattatagctagaaataatcctaatgggtccaggtacttgggatatcatgcttccatacaaaacatgagcaaattgttatagagaatatgataacagggaaagtatggaaaactggcaaacccgtccatagtgaactccgccacttatgtgccatcgcaaagatgtatatggtgcgactaagaccctttgtgattgcggccgggttgtggagacacgtcctatcagaagaccggagtcatgaccttctaggtgcatcagtatcctcatgccgaaggaatacaccctatggtagtaatgacatgcgggaacacgccttctgtatgtgaatcagtccctcattgtcacaatccaggaggaacttccatacaggagcactaactctagatgatatgctatgaactgccggctcggattcagatatttgcattcagaagcattgtgatactgcagtagaattcacaccatggtggtacgtccctatgagtggggagaattgtgggaaatggtactacactgggaagagaccaggggtaggtctggcacgagcccgaaaggatgtacagtttgggtacgagcacaaacctagtcttgttggtgttaaatggattgtggggaatgccttgcggatcaacattcggcatgctacattagtgcagtcgggacggaactgcaatacaggggagaagcccacgcactatgcagggccaaagtcggtggccataaaagccctttggtacgaaggccaacacggattattggtgactccggagaagccctaacaggtgaagagaacgtgtgagggagaggcaggatgaatggtgcgacgggccactaaaataggagtcccagctaccaggtgataagggggaacgg

SEQ ID NO: 562633 - DNA, 114 bp, Homo sapiens
  misc_feature (82)..(82): n is a, c, g, or t
  misc_feature (85)..(85): n is a, c, g, or t
tcagcatttccagcagcggtcagcatttccattttatttttctccagagaatagcctgtcttcagtctttaagaactcagcnggntacatgggctttagtgagggttaattggg

SEQ ID NO: 562634 - DNA, 431 bp, Homo sapiens
cgcaccagccttactttttttctagttcacaaaaatgcaatcatactaataacatgcttccacaggacaacatatgcacatttcaacattgtattctgttcatgcatacaccaccgttcattcaactaagcaatccccttgccttagatttttaacaatgctaaatgaagtttcattaagtaaatcttggtacacagccttcaatgtttctttagaatgcctgaacaattactagatcaaaggctttagagacacatttccaaggatgtctcaaaatgattttgcctgtgtacatccaaaccagtaaagtgtgaacccatgtcactgtacctctctctcaatggtgtgtatgttctttaatatttttgaagcatatactgagtggtgttactagcaactgctttttttttttttttttggaggatggctca

SEQ ID NO: 562635 - DNA, 453 bp, Homo sapiens
gtgttcatgcagagataacagaacttggtggctgattggaggcagggagtgagggagagggaggagcaaagactaactgtcagttctcaagagccggctggagctctttctttccctccagtgagaacaacatgcccagaaccaacaaaaccgaattccaactggagctgccggtgaaatatgctgtctacatggtggtcaccaggtgctggcttccaggactttagctgagcctccacttctgggctggacatggctgattgtgcatctgtgtgcataagtctgtgcatgtgtgtgtgtgtgagagtctgaggatctctgtgcatgtatgtgtgcatgggtgtgtatttgggcatgggtgtgtgagtgtgatgatctatgtgcatgtttgtgtgcatggacgtgtatttgtgcatgtgtgtgtctgaggatgtatctgcatgtgtgtatgtg

SEQ ID NO: 562636 - DNA, 551 bp, Homo sapiens
  misc_feature (22)..(22): n is a, c, g, or t
  misc_feature (95)..(95): n is a, c, g, or t
  misc_feature (141)..(141): n is a, c, g, or t
aaccccaaaaggtgccatatgnatgattccatttatatgaatatccagaattaaaaagtaggttagtgattgccaggggctaagggaaggaaaancagaagtgaatggttattggacagggtttcttttggggcttgaatncaatgttctggaattagagaatggtgatggttgcacaaccttatgaatatactaaaaaccactgaattatacactttaaacatgttggattttattatatgtaaattatatatcaataaaaaatggttaggatgggaacgatagctcacgcctgtaatcccagcactttgggaggccgaggcgggcggatcatgaggtcaggagtttgagaccagcctggccaacatagtgaaaccctgtctctactgaaaatacaaaaattagctgggcatggtggcacacacctgtagtcccagctacttgggaggctgaggcaggagaatctcttgaacctgggagcagaaattatggtcagccaagattgcaccattgcactccagcctgggcaacagagcgagactccgtctcac

SEQ ID NO: 562637 - DNA, 620 bp, Homo sapiens
  misc_feature (495)..(495): n is a, c, g, or t
  misc_feature (553)..(553): n is a, c, g, or t
  misc_feature (557)..(557): n is a, c, g, or t
  misc_feature (567)..(567): n is a, c, g, or t
  misc_feature (576)..(576): n is a, c, g, or t
gtgttcatgcagagataacagaacttggtggctgattggaggcagggagtgagggagagggaggagcaaagactaactgtcagttctcaagagccggctggagctctttctttccctccagtgagaacaacatgcccagaaccaacaaaaccgaattccaactggagctgccggtgaaatatgctgtctacatggtggtcaccagccatggggtctccactaaatatctcaacttcacggcctcagagaataccagtcgggtcatgcagcatcaatatcaggtcagcaacctggggcagaggagcctccccatcagcctggtgttcttggtgcccgtccggctgaccagactgtcatatgggaccgcccccaggtcaccttctccgagaacctctcgagtacgtgccacaccaaggagcgcttgccctctcactccgactttctggctgagcttcggaaggcccccgtggtgaactgctccatcgctgtctgccngagaatccagtgtgacatcccgttctttggcatccaggaagaattcaatgctccctcnaagncaacctctcntttgactgntacatcaagacctcgcataacacctcctgatcgggagcacagct

SEQ ID NO: 562638 - DNA, 787 bp, Homo sapiens
gacaaatcggacccggaaacagtcatgaagagtagaggtacatatatccaacacagcacaacctaccctgtgcagcctcctgggaatccagtataccctcagaccttgacatcttccatcaggactccaccctataccgatgctccacctgcctactcagagctctatcgtccgagcttagtgcacccaggggactgccacagtcccacacccatgatcagaccagcgatctccatgtgagacctcatcatgtactcttcccaatgagacaccaagtctgtgagcatgtaagaggcacatattagagattccacaaaatacccacactggctatagttatccagatacgagtcaccagtctataccaccattggcctaccacagtggctcggtctgagaacgagaaggagtaatagaatagcgagagtcgaccaaggcatttcacggcagactagggagactacactagcatggagcaaagccagttcgcagatccattccaaccagtcccgtgcagaatagacccattccccacacttggcgtgcctcaagccttattggcaggatcaatggcaagggaggagcccgaacaactgatcgcgtcgcttaacctccaaggcgggcaaagcgcgagaaaaccatgtcgtatccaatcgcgcgttgcgctacgacggattggcggtaggcagtaacaacccaattcctggggcatgagaaggacgacgcaacggagacacaccatttaggtagaccgagggaaaaacgatcagttcgacgaataaccctt

SEQ ID NO: 562639 - DNA, 605 bp, Homo sapiens
  misc_feature (480)..(480): n is a, c, g, or t
  misc_feature (538)..(538): n is a, c, g, or t
  misc_feature (542)..(542): n is a, c, g, or t
  misc_feature (552)..(552): n is a, c, g, or t
  misc_feature (561)..(561): n is a, c, g, or t
accccatcttcccggaaaactcagaggtcacctttaatatcacgtttgatgtagactctaaggcttcccttggaaacaaactgctcctcaatgccaatgtgaccagtgagaacaacatgcccagaaccaacaaaaccgaattccaactggagctgccggtgaaatatgctgtctacatggtggtcaccagccatggggtctccactaaatatctcaacttcacggcctcagagaataccagtcgggtcatgcagcatcaatatcaggtcagcaacctggggcagaggagcctccccatcagcctggtgttcttggtgcccgtccggctgaccagactgtcatatgggaccgcccccaggtcaccttctccgagaacctctcgagtacgtgccacaccaaggagcgcttgccctctcactccgactttctggctgagcttcggaaggcccccgtggtgaactgctccatcgctgtctgccngagaatccagtgtgacatcccgttctttggcatccaggaagaattcaatgctccctcnaagncaacctctcntttgactgntacatcaagacctcgcataacacctcctgatcgggagcacagct

SEQ ID NO: 562640 - DNA, 1290 bp, Homo sapiens
ggtcactgccgtagagatcttctcgacaggacaacatgcctaacgtagcgcgagcctcgtagacgatggccgtatgtccccgacaaccgttggctaccagcccaactacaagccgatcgctgccttacttaccccgtccttctccttccggcgcgggctcaagcgtgcgcctgtctgtcttacctccaggggagctggcccgcgagcacagtcgtctcggcttcttcgctgaagctctggtgggtcgggcagtgatcccgtggctctgactatcgccttgcgccttccatccccgccggcttttgaaccggcatgtgcgaccaagggctggcctctttcacactacgggtcgacaccgggcgggtgactgatgcggggcaatacgaaggcacaacgaaagcaggcagcaattgccctttcaaccctggagtgatgacgcggcatcctttgatccttgagcacttcctgtcagcttccatgcgcgtcgacccgacttaaccacggctgggttgggtacaacttggcaatactcctgcggtacctacttgccactaccaacgcggcgctcgcccgtgtacacccgtatcacggagtggctcacaacccacacgttgcaacgacaggaactaggcgactcttgccaacctttcacgcctcaaacgtccaacccttcactccgccgagggcccacgtgccccctctcggggcccctcgagtggcaatcacccctgtaattagatggctcaaccctttcagcccaatgtgtcccacgggaaccattcgtcaccatcgaagcaaggcttggaaccagtccttgagatgagaaccaattggcaatgtgacccctcggaaacacttttcgagccccccgcccgtggatgtcaccgtaatcacgcgagggaaaggaattcgcaaggagagagagcctcaccacgggctcgacaagaaaaccaatcaattctagttcaatgggcgcttacatgctgccaatccccaacaacgacaacgcaggcctaagggtacagcgaactccccaaggactgcggcatccgcacaccggcgcacaacatggcctcaatgcccacaattaacgtcgccccgccagatgggcgcacaacgggctacgcgccaggggtcccgggaaaacacaggtccttccctggaacttggactacgcgatgggagagaaactccgaaggggaagaagtcacaacgaaatccacgcccaggacagccccatatctcgcgccgccgcgcaccacgagcaacacctagtaagtccgagacacc

SEQ ID NO: 562641 - DNA, 416 bp, Homo sapiens
  misc_feature (25)..(25): n is a, c, g, or t
  misc_feature (406)..(407): n is a, c, g, or t
agagcctagaacctaaacctagaancttttgtccttccttggtaactgataatgaccatatttattcccattgattcctatgacatggacgaataaaagctgccttaaggcccaggcgaggtggctcacacctgtaatcccagcactttgagaggcctaggcaggtggatcacttgaggtcaggagttcgagaccagcctggccaaccaatatggtaaaacctcgtctccactgaaaatatgaaaattagctgtgctttgttgtaggcatctataatcccagctactcgtgaggctgagagaagagaatcacttgagcccgggaggcggagtttgcagtgagctgagattgtgccactgtacacactgtacactgtaccactgtacagcctgggtgacagaataannctctgtctc

SEQ ID NO: 562642 - DNA, 178 bp, Homo sapiens
cgacgtatctttttctgtcatcctcgtccctaaacccatcaccccagctcactcagtacagaaacagcacacaaattctctaattcagcttcctctgaaatacctggcaatcctcctccaaagtgtaagggtcattaaaaacaagtctggagaaactattacagcccagaggagccgg

SEQ ID NO: 562643 - DNA, 621 bp, Homo sapiens
  misc_feature (15)..(15): n is a, c, g, or t
  misc_feature (22)..(22): n is a, c, g, or t
  misc_feature (77)..(77): n is a, c, g, or t
  misc_feature (302)..(302): n is a, c, g, or t
  misc_feature (599)..(599): n is a, c, g, or t
gcatcagctgtttcnagggtanaacgcgcgccggaaggtatatggggcatgccttatgaagcgtgtgtcgctgaatncatggcgatggggttgatattcctgagcgtaaacaatccgctttaccttgcactggccttaccgatgcacgccgttctgtacctcatcagcgccaacgatccgaaaattttcagttccatccacatgtggttgaaaacgaatggacgctgccggaattttctgtttgggagggcctcaagtttttcgcctcttgccaccaagaagttggagaaagtcaggctatngactcgcatcgtaaaatattttcgcgtccgcgaaaactaaaggagaaatatttatgggtgccgcattcaagtacgccgatgcgttgaagaatgaaaagtcgacagccttatttattccctattccagccacgtcaccaaaaatgttgtcaagctggtaaacggggactacatcgcaaccattcggatgcagggtgcggcgcacgaaagcgcagacgtacaagatattacctcgtggcacgatcagcttaatgggtttatgagaaacatcgcatcgccaacacggcggtgtggtcgcntgtggtacgagtgatatgggaa

SEQ ID NO: 562644 - DNA, 905 bp, Homo sapiens
  misc_feature (610)..(610): n is a, c, g, or t
ggaaggacctatgatagaacaacttagcaaaatgttctttactactaaggcaccgttgttatcctcatgaacggtatcacagatgtcgtaagaatctgaatcctccaaaagacagatgatgcggaggttcctgggggattcaaagagaaatgtgcctcatttgccattcgagaaaatgccatgtctggtgtattcagtaatatatagtaaagtaataatgataaaatatcttttcatatattagaatgtgtaccttttcattataatagtaattcttggatttgacagttcttcattgagagaaacctgattttcttgtgtgtctgttttctattgtagggttgtcattgatgtgcggtctccaattgaggacttttccatagtgccaaagccatagatatgcaggagaacatcagataatattacgagtcagaaattcaaggagtttatgtataaaacggggttcgtgtaggtaattcgctagacagtaggctaactgtaaggtgttctgagcatatttaagaaggctagcatcttcaatttacgaatatcttcaactgatagtaggtgtatgggatgtaacctatgataagtggagaaacatctcttngagtgcccactgggattgaagtatttgaatcatcaggcaagcattgtagtagtataagatggttattaacactgttcgtggttcgtggacgagcacttttaaatgcttggaataaagccatagggtacgaagaaaatatgtttgatgttcggaggtcttagaaataatacgggtaacataaacaagggtgattatcaagacacatacacgggggtgggttccccacaaaggaaaaaacgtcgagggggcaataatgaaaaaccgggagagcgaaaaaaaaaccgggcaaataggt

SEQ ID NO: 562645 - DNA, 134 bp, Homo sapiens
agtggagagtaacatggagctgcagacgatgattgccgccgtggacacagactccccccgagaggtctgtatccgagtggcagctgacatgtcatctgacggcaacttcacctggggccgggttgtcgcccttt

SEQ ID NO: 562646 - DNA, 751 bp, Homo sapiens
tggggtcatactaaaaacgggggtctcgctgaaactccgggcctccagggatcctccatcctcggcctcccaaagggctgggaatcacgggggtgagccaccgcacccagccctctctcttcctcaaggcactctggggttcttccggttcttccgaaacattcagctggactggtaatccagggcttccgggactccggggaccccacgtcctggcaccccgggcttctggactcatttcctaggggccccttggtggtatcataaggggtaatggattttaatagtcacatttacaaccatctggagattttaattttttttggaacgggagtctcccactggtcgcccagacggggatgtccagggggcacaatctcgggctcactggcgatcctccacctccggggttcaaggtgattctccggcttcagcctcccaagtagctggggatgacagggtgtgcgccaccacgcccaggaattttatggtagttttagtacgagacaagatttcaccatgtgggccaggcgggtctcaaactcctgaattacagggaggatccgccaacctgggcctccaaaagtgctgcggattacagggcatgagctaataggaccgcggctaaacaggggtgggagtcgaggaggggaactccgggccacatgaagatcacggctaccaaatcacacgcatatccggccagaccccaagagtgggataagggacccgtgaaccggaattttgtttg

SEQ ID NO: 562647 - DNA, 382 bp, Homo sapiens
aaatgcctcctgatctcagccaccctactatccaggtacttatcacgaacagaaaccacgctacctctgaaacccctgaccatcatttcttatccttctagctcgcctgtactctagccatgaactaccagcacattcccatatcataacagcagctctagccctaactatcactcctactacttgtgcagctcacacacgtatagccccatacattataatacttttccttataaaataactacaatattactatgtacccttatctacataaatatacctagcaaaaggtatacctatctcccaaacaaaagccatttcctacactggtagcttagggtcccaccccctctacactttcctggagactttgtatctatcg

SEQ ID NO: 562648 - DNA, 557 bp, Homo sapiens
  misc_feature (331)..(331): n is a, c, g, or t
gaatcatatataagggaaccttaggaaccctctattctaacactgtttacagatgtggaaatggaggtactgagaggtgacttggttttcttgaggccacactgtttgcagcactgtatttctgaacttgtattctaacatctcaagtagcaaaaagtggaaatgaaaaacaattgagggagctatcagtcagagatggtagaatgaatatctctaatagcccctgttttttcctcatacctcattaaatgacagtaagaaaaagcattaactcagaagaacaaaacagaactgcagaagagagaacagcaacacaattttggaaactggnaagtgggtagatgaacgattactgacttagtggcaatgggggagcaaggccgtttacactttgaaaacccagaaggctcaggagtgggtgcatcagttccctctggaaatgggggcaaaagtgggttgcaaagagaaggattcactgaaagtttaagaaaagactccagagcctccctcttcttctatgaagccaagagaatgtcctttccttaccctagcagaag

SEQ ID NO: 562649 - DNA, 1414 bp, Homo sapiens
tacttttctctttaccctttttttttaaaccttaggtttcacacaataaacactttagcgcacggtgaaaaaacaaaaaaaaaaaaaaaaaaaaagaaaaaaaaaacacaaagaacaaaaaaaaagaacaacaacaaaaaaaagacggggggggcgcgccccgcacaagctgcccccgccggggggccccgagagcgccagcggcggccgccgccactgttttggtggagagaaagggggggcgcccaaaagaggggaggaggagaatatataaatatacagcgagcgaggcgggggggggcgcggcggtgataataacaaacggagtggagagagggggagaaacacaggggcggcgaggagggggagaaacatctggagggagaggagaagaaaccacaatattttagcgcggggggggggggagaacacacaagtggagtggggcacaacaacccacccccaacaaagagagatatatataagcaggcgactgcgcaggggaggcgcatatatatataacaatacttacagggagcggtgcaatatgggggcggaaacaacacgcggagggcggagaccagacgaggcggggcgaagagagggagaggaagacaaagtggcgggcaccacgaggggaggaacaaggcgacaacagaagaaacaacacattcataacacgcgcggggggggagcaatcgccaatacaaaacatccggacgacaaaaaagacagaaacgaagaagaacacaagtgacagaaagagaggggaaagggaggaggggggagggggagggaggcgagcggaagggcgagagagcgaaagaagagcaaggaggaggagcagacgagagggagaagaaggaggagaagagagagagaggggggggggggacgaaggggagggcggaggagggaaaaagagaggagagaggggggggggagggaggggggggaagggggggggagagggcggggagacgcgggagggagagggggaaaagggcgagacagggcaggacgagagagggagaggagaggggagaggggaggaggggaagaagagaagaagggagagaggagagagggagggggcgggcagggggaggacaggggaggaaaaggaggcaggagagcgggaggaaagggaggggcgagagaagagggagagacaagagaagaaagggagaggaaaggacagaagagggacgcaggagaagagaagaggagaggccgaggagaggacagcaggaagggaagggcggcgaggagggagaagcggtggaggcacggaggacggcggggatacgtaggggggagcgggaaggaggaggagaggaaggaagaaggggggggaggagggcagacggggcgaggcgagggaggggaggggcagaggggagggacgtgagga

SEQ ID NO: 562650 - DNA, 129 bp, Homo sapiens
ctagttttactttttttctttattgcattgtagttttcagattggagaactggcaaataccctgaacaagtaaattcgagtttctaggcattaatagactatccatctccaactttcatgtactgctct

SEQ ID NO: 562651 - DNA, 494 bp, Homo sapiens
  misc_feature (146)..(146): n is a, c, g, or t
cgtcgtcgaccgtggcgtagggcgtgagatgcgccagcgcttctcgaccgacggcggatagaggcccttgtggacgcagacgatgtcgtagcccgccttcacgatcttctcgtagaagggatagaccagcttctcgtcgtccatcngccagggatggcgcgccaggtccttgttggtgttgtcgccgaccgtgtagcccttccatgaatcgggcttgagggtggcgatgcacttgtcgacctcgtccatccagccgtcgtagcccggcgtgaagatggcgtgcgacagcagccgcttggagccggccgcggcgttcaccttggcccgcgcgtcggccttcatctcgttggtcaggaaccagtcgcgcggatcttccgaggccgagccgctgatcagcgcgaccttggtgtcgctgtcgaggaagacctccttgaaccagttgggatacttcaggtcgtcgatcgtctgcggcttgtcgacgaggtcgggattcc

SEQ ID NO: 562652 - DNA, 314 bp, Homo sapiens
agctcagtgatactcctgcctcagcctgctgcgtagctgggattactggcgtgcactaccactcctggttaattttggtattttgggtagagacggggttcgccatgttggccaggctggtctcgaactcctgacctcaggtgatccacccacctcggcctctcaaaatgctgggattacaggcgtgagccaccagtgcctggacttccatctggtaactttcctgctcttgaggaggaactacccgtgcccctggcacgaggctggcggatgacaggaggagagcgatcaccttgaagcccaggggctaccga

SEQ ID NO: 562653 - DNA, 1004 bp, Homo sapiens
tgtgttttgctgtctcttaccccacacttcccgtgtcctttccaccggggcttgagaggtcacaggttcttgatgctgtggtcttgatctgcaggtgtctgacttccagcaactgctggcctgtgccatgcgtgcaacgctgagcatctggagttggagttttcctgtggagaggacccatgcctaagtgggatgggccattgttcatcttctggcccctgcttgtctgctatgtaagcgttaataaccagcaaccaggctagtacgggcaaagattggaggaaagatgagctgatgagcatcgattagcgttctctgagcaagcactagagccagctgtgatgcgtgaactgccaggcatgcccttcctccaggcatcgaagggtctccagaagacgtgcacccaaaggacgcaacggcgtgcgagcgttggatcacactcttgatgagctgtcccctatctgcttgcagagggacagggtctcgttcatgtgccatccaagaggcgtaacttctgtcccagactttacgtgtctcctggaccagtgcatatcacccggcatcccttgtcctggaatcatagctgttggtctgaatctgagccctcgtggaggtcacagcccactttggttctgccattgctgctgtgtggaagttcactcctgccttttcctttccctagcagcctccaccaccccgtagatcgcatgtctcactggcttttgtctgcccagtttcaccagaagttggcctcttcctgacaggcagtgcaccactgcctggcgctgcgcccctttcctttgctctcgcccgctggagacggtggtttgtcatgggcctggtctgcagggatcctgctacaaaggtgaaacccaggagaggtgtgggacatcccgagtgttgccaggacccggccaggcattagttgcccgtggggaaaaccggggaactcccgaaaaatggggggtcctggccatccgtgaaatctttcccggggatccccc

SEQ ID NO: 562654 - DNA, 896 bp, Homo sapiens
gaagcaaataactgaatagatgtgatttaagaagagattagacatagctaaagaaaaagttagtgaatgggaatataagacaatactctaaagtatgagaagaaaataatagaaaatagagaaaagcaaaaacaagcacaaagtatagaagaattaaatctgacacgtgtgttattgggatggtagaaggaaggaggagagtttcagagcaagtatttaaggttttcaaaatgacaatgacatgccatgctttcaaggaggctaacaaacaagaaaaccataagtaggaccagtagaagaattctgtcacagtccaaagacaagatcttagagcctaacagagaaaaaagagagggctttcaaaagagtaacactcacaccaaggaccaacttcacaataaaaacagtggaaactagaagattaagtgctcataaaaaatacactgctaaactggaatttggtatcactaaaaactgaaaaggaaagtgcagattaaataacagaaaatataaattagaaggaaaattatagtcatgatagaatacatgtgattgctgcaaatcatatagctatataatgagtcattgaaaccaaaagtttatgcagaaagcatgtcaactcagaactatataatatcatgggtctattacttaggaactgttttgttgctctggcaaaacatttcttggttccaataatttctcactctttactgggaaactttttctcattgagtgacaaagtatttccttaggctaaattacgtgatggaaatttcagggggggggggaaaaagtcacttggggtctaacaaagggttaaaggtgttatttttgagaaaaaaaaaagtggggggcgaaaaaattgggggggaaaaagtggagaaggtttaagg

SEQ ID NO: 562655 - DNA, 309 bp, Homo sapiens
actcagtatggaaacagaacatgatcatcttcttcaccacatcacaggaaaagagaacatgtcagacggccttcactcttactagaaaggcatcatattgtataggtccttttatccatatgtaaaggaataaaagaagcaatgtacaaggagaaatgtatccctcatgataggttctatcgcacattccaccataaaggctcacagttcacgaaaagactttaaattctctatgtgaacgttctgcatcagcaattgactgaatagagacagtcatctgtgcagctgctggcacttcatggcctcatg

SEQ ID NO: 562656 - DNA, 906 bp, Homo sapiens
gaaatggcggatgacgccggtgcagcgggggggcccgggggccctggtggccctggtgatggggaaccgcgtgtggcttccgcgcgaggtttcaggctagtggctatccgtgggccggagtttcgcgtgccgatggatcgtgggccggggcactgaggccgcggagctcgcggagtgcaaggccgaggcataacggagtgcgatgcccgatcacacaaagttgtgccgcttggtcaaggacatgaagatcaagtccctggaggagatctatctcttctccctgcccatttaatggaatcagtagatcattgactttcttcctggtgggcctctctcaacggatgaggttccgaaggattatgccacgtgcagaaggcagatcccgtgaccggctcagcgctaccaggtttcaaggcagtttatttcgcatatcgggtgcactacaaaagggccacgctgggtcatgggtgttaacgtgctccacacggtaggtggccatccgtcatccgtggcggtccagtcatcctgggcaagctcgtccattcgtccccgtgcgcacgacggctagtgggggaacaagatcggcaagccccaaactgtcccttgcaatggtgacaggccggtgcggcatctgtgctggtacgcctcatccctgtcacccaggggcactggcatcggtctccggacctgtgtccctaagaatgctgttcatgatggctggtatcgagtgactgtctacacctcgagccggggcttgcactggcaccctggggcagcttcgccaatgccacctttgatgccatttctaagacctacaggtacctgaaccccgacctctggaaggacgactgtattcaccaaggtctccctattcagagttcactgaccacctcgttaagaccaaag

SEQ ID NO: 562657 - DNA, 204 bp, Homo sapiens
  misc_feature (6)..(6): n is a, c, g, or t
tatcangtaattctgttatattttgaaagcccatgggagaagtcaaatggagagtatgctcatcagtggctatgcactcaacttggtgtggtgggatcccagggcatgcccaagagaatcgtaaatgcaaaaattgcttgccttgacttcagcctgcaaaaaacaaaaatgaagcttggtgtacaggtggtcattacagaccct

SEQ ID NO: 562658 - DNA, 260 bp, Homo sapiens
tcgctgaaatccgcgaggcggtgttgctgtgagccgagatcgcgcatttccagcctgggcaacaagagggaaactccgtctcaaaaaaaacaaaaaaaaagaagagaaaagaaaacataattttcccagggcaatgtcgggcgcaacttcgggcattggtggggggccacggcctttcatcatccagggcctggggtccagttgggggctcccaaccacccaggggccagtggggaatctccaattcggggaaagggagg

SEQ ID NO: 562659 - DNA, 637 bp, Homo sapiens
ctctcgtgtgaggttttgtaagcctacttaacttttaagacaggtttccttaacattcataagtgcccagaatacaggtgtgtagtacagcatataaagattgtacagctctgaggtttttccgtattgacttggaacatttgtgttgtgcctgtcgcttgccacatggccaatcaagtaatgcttcacgctttctagataattgttatcttagagattatgccacgtgaatgtatttcattgtacatatggtaaagctgagtaattcatattctgtattgtctatatagtcaaatatagacatgtccaccgaaaagattaagagtttttaagcttcgtagatgctgctggtcatgaagaattaatttgtcactggttataagagtaatttttaaggttatttctaagtgcatatctttaagtagttttcggaactgagagtcatagtggagaaacttagtggtttgttgtaaaaaagtcgtgtttttatgggctgagatacttagaatcagccatccagagggggcggttcagggaaaatacatgatactttggcagatatcgaatagtgaaagtaaaaacttgggtcataagtaatgaaccaagagttagttcctgatgtttggaacatagaatt

SEQ ID NO: 562660 - DNA, 119 bp, Homo sapiens
agaggatccccctggtcgctgtggttctgttaacatcttctagggtttacaccccaaccctaataagtcatgtgaagatcttagcagaagagctgctaacaatctaagggtcatgaata

SEQ ID NO: 562661 - DNA, 427 bp, Homo sapiens
agaggtccctgatatgcatctcatcacttctaataacttgctacatatataattttccacgggctgcgtcacttatgtctattatatctgtgtggtaaaagtactaaagaacagtaatctactggcccatctttccccaactttgtgtatagtgaaaactagttagaagcttacaattggctatggtgggagtatttataccaccaaaattgcgcaaatgctaccaattcaaagctttttccccaagaagacggggttgttaaacattttaccagcacaccattacaactaatctgttatttctcttgtaaggacttctcttgctaaagactccattctctttttttttttttttttttttgggaaacggaatatcggggaccgggccccaattcggaaaccggggcaaaaggggttcccgggggga

SEQ ID NO: 562662 - DNA, 136 bp, Homo sapiens
actactcatcattgccactcaactacccagttttcctggctggaagattgggcatctgacaaaagcctcaggaagcttccatttatggcagaaagcaaacagtagtcacagtacagaaatcacatggccactggga

SEQ ID NO: 562663 - DNA, 425 bp, Homo sapiens
tacttgcattccatggggtccaataatggtgtcatccacaggtctgcaggtgatgtttacccagtatgaatgctcatctgcaaattcagacgtgactctcaaggtgtggtctccatacttggaatgacttgagtaatcacattccgtcataggtagtattcatgcatttatcttggaatatccgataacttaggtactgagctgtgaaagtcaggttccctttggcacaagcaggtgactccctctgtagaatgttcttggaattaacaggattcaatctgtcatttccggtaggtggtaccattcccaatgctgacaccagcagtcagcctcccagccagctcccaaggctccacgccatgacagtacactgcgggttccgcggcttcctccaagctcacgacttccgccagcgtccgggacag

SEQ ID NO: 562664 - DNA, 410 bp, Homo sapiens
  misc_feature (410)..(410): n is a, c, g, or t
attgtgtctccatatctcaacgtcattcagctcgcacagatgagtgagcgacacccttatctactttgtggtgtatatctgttagagctgcaccatagtagtgcaatctacgtgtgaaaccgtaccgatgctgagtgatcctactcattacttcaagctattgatacatctgataccgacctacactgaggagttacactgatgcgggctctgagatgacattgatagcgagtactcgcaatgctaccgtgctcacagttgcactgacctgtgtctcactgtgtccaggtcgatatagcataccgcagtacttagagaagtatctgtctaccccatgtgagacaggggtactcaggacctgcttgtcccctgcccactgacatgatctgtgcctgctggacattgcgtgn

SEQ ID NO: 562665 - DNA, 847 bp, Homo sapiens
actgatgtagtattgtcgttttgctaatatatgtatctcaaaattctttaagtcagactatttatcatagtgtaaattaaagcatgaagtacattctcatcttataacttacatcttataaataaggctactaacccttagaacaccacctgcggttctgtcctctaccccagttggtgactactgtttaccactacgctggtgaattgtagtagggaaagacaatctacatattgaagaggaatggcctaataaaatatatgatgtcgtcataggatagatatattgtatggagttaaaagaaataatctagatccatattcaacctggattaggtactcggaaaacataatgctcagatgaagaatagcaagttgtagaaagttcatattacaacattatagtatatgctcacgaaatacgaagtgacctactggcattcgtctagtgcggcatagtattaatgataccggtcaagaatcgttaattgtccttaacccaccggtttcaagaacggtaagtccactacctagagagctgtcgtagaccacggcgaagattgacggggagggtcataagaatgagcaggaatttccccgggtgccaaatccaaggattcgtggcgatgggcgtgggatctacaaagcgcagactatgatgtttagagtccaggttagagccatcaaactgtacctaggaaatctctatacagtgtcttctcatcggttccactatcaggtttgacaccccctaatagcatgtcaatgcttgtcagtgccagtaaaatccattccttgatgtgcggtaccagctgccctttagcacttcttggagcgccccccttatt

SEQ ID NO: 562666 - DNA, 1151 bp, Homo sapiens
acgctgtgcagggccggcgcgggtcggggggcgcccgaggggcccgtgccgagcgggtggcgctgcagggcgggtaggcatccactcgggccgcgatcgccggctggtgcacaagcgtgccgttgagctgtgctcactcctggccggctgcctgtcctgtgttggaccccgcgcaatggtgcatgagcctcgtggaccacgatccggtgaggacccagagcagcgtgcccccccatcgatgtcctctggatcaaaggggcccagggaggtgactacttctactcctttgggggctgccaccagttacgcggcctaccagcgaacttgcagctgagagaccatccccgccaaggcttgtccatgtccactctctcagaccttaagggtgtacctgggagcattccataccagactttgcagtagcagcctcctttggcacctgttgccacctttcaagagcccagaagagacacctggccctccagccaggctgggccatgcagaacgggatcagcaggggtgcattctctttgcacctggcgagagggtctgatctgggaacccctctcaccggctacaaggccttggatcactgtacagtgtgggagcccagttcccactctgtgacaataggatcatggcttacccttgaagcattaccgagaaggagaaccagagatgggctttgaagagccacgtgctgccagagtccaaattcccaaggaccaggatccctctgcattaggtctatgtaacctcttatatggcctcacttcagcttgcaggcacggaagacctttgacttgacggtgggttaaaccgacaccagcaagcatggttttccacattagcagtgcatctgagcacaatggggggcacagggcgaatggggacaaccaaacccaccgaacggcacgagggcacgacacagaccaccaatacggacaaaaacagaggagcagaaaaaaaagggcccagaagagaggggagttaccaagaacgaaggtcgggccacgaaacgaggcgatagcaactaccagagacaacacaaagaaacgaactgtacaacaaagacgcacaggaaagaaagcacccaaatagaacgaggaagcagaacaaaagaagagaagaagcacgacaacgaagcaagc

SEQ ID NO: 562667 - DNA, 137 bp, Homo sapiens
ccccgtggcaagtcaggcggtactacagtgcagtactacaggcggtactaccaggcagtactacaggcagtactacagtgcggtactacagtgcagtactacaggcggtactcacagggcagtactacagcgccagt

SEQ ID NO: 562668 - DNA, 135 bp, Homo sapiens
gctaggataacaggcatgcacaccatgcaccgcgcctgggtgcttttcactttcttgacagtgtctgtataacttggctagggctgcataacaaaataccacagactgggtatgaactcactgggcgagctagga

SEQ ID NO: 562669 - DNA, 744 bp, Homo sapiens
tggaaccagacggtgccgatatgaggaagcgggctccatggctgccctcctgctgctgcccctgctgctgttgctacctgctgctgctgctgaagctacacctctggccgcagttgcgctggcttcctggcggacttgtgcctttgctggtgcgatgctctgtgctgcaaaatgggctcttctgatgctctgctgccctgtgcctgctggctgcctgcctgaccctggaatggtccctgagtgggtggctgcatgccattgccttggcgcctcgctggaactggcccagcatgcgctgccgcggcacacctttctcattcactggctcgcggctgctttagctactcatgaggctggagcgcgagatgtaacaggggctagcactgcgccttcctactgtgcgctagtgcttgtgactgtggaccctgacggcgggaacagcgggcaaggggaggcgctggagaagtgcgaagcgggcagctgccaggtagccgtagatgcatgctggccggaagctgcgcggacgtttgccggacggggacggtgccgccagagtgttggatggagccggcctgcccctcttgtcaccgtggatgcaactgtggagctgatcctcccctgttggccagagtttcttgtaggtctggttcggggctggccaatgccggctgcgcactgcctttgtgccatcggacctggccggtgccccttcgtgcatgcctccgcaatcggcgcgcagcgcga

SEQ ID NO: 562670 - DNA, 178 bp, Homo sapiens
aggggtcccagataattctttttttaaaaaaacccccccccctagagaagcccacctgtcaagagtctgggacccccaacttcagctttgcatcccgggtcttgtattccaagaaaatcaaagggggccaatttgtttgtttcccctatgatcctttctaaataaactctttttttta

SEQ ID NO: 562671 - DNA, 139 bp, Homo sapiens
tacgctcaaccgaacatcagcggggagaagtgtagacagtaatgagaaatcctgcgaataggcttccggctgccaggcgattataatgggcgtttagtacggtgggagtaattttcgataactgttacgtaaccggtgg

SEQ ID NO: 562672 - DNA, 181 bp, Homo sapiens
tgttcctccgggtttgggtcgggggtgggtttttggggaccctccaaaggtggaggtgggctaatggcctggctgcctggtggttaatggttttgctccccctcccttttttttttttgagtttattttgattgatttttttttttggtttttggataaccccccctttggggacaggata

SEQ ID NO: 562673 - DNA, 216 bp, Homo sapiens
  misc_feature (30)..(30): n is a, c, g, or t
  misc_feature (40)..(40): n is a, c, g, or t
  misc_feature (89)..(89): n is a, c, g, or t
  misc_feature (151)..(151): n is a, c, g, or t
  misc_feature (160)..(160): n is a, c, g, or t
  misc_feature (213)..(213): n is a, c, g, or t
tcagatatgtgacagagcatgtctttaaanctgtgaatcnttaacgtcccagtgatgactccttggttaagagttaatcaggatgtccncatggagaagcaaaattactactatactttgtcgtctttctcaaactgacctgctgatgagnaaatgcaanacaatttttgatactggaactatgctttgaaatacaccttacactcttcatanggc

SEQ ID NO: 562674 - DNA, 281 bp, Homo sapiens
cggggtgaggcgcatgagcatattctgccactgcactccagcctgggtgacacagtgagaccctgtctcaaaaaaaaacaaaaaaaaattagagataacttgcttccggtgtttctaaattgaaaaaaaaaaaaaaaaaaagggacggtgtttccagggttaaaacctctaaaaatattccaaatacccaaattaaaccgaacgtggaaaattttttcttctcctatatccatttagtggaaactgtgcgccccaccacgaagaagggaactagagttacc

SEQ ID NO: 562675 - DNA, 143 bp, Homo sapiens
tgatcgtctctagaggtatcccccgcggcgacttttttttttatgcggccgccccttttttttgcggaatcaccattgtcggtctgggacccctgtacacgtttcctgaaacactggagggccttcaagggtctcatactgct

SEQ ID NO: 562676 - DNA, 326 bp, Homo sapiens
  misc_feature (42)..(42): n is a, c, g, or t
aaagaaagcaacaacatcaacatcagcataaagaaaccctancaaaaccccatccaaaggtcaccagcctcaaagatcaaaggtagataaatccactacaatgaagaaaaaacagcacaacaatgctgaaacttccaaaaacaagaatgcctcttctcccccaagtgatcacaaatcctctccagcaagggcacaaaaatgcatgcagaatgagtttgacgaattgacagaagtaggcttcagaacgtgggtgataaaaaactcatctaagctaaagaagtgtgttctaaaccaatgcaaggaaggcgtgaagacaagattagaga

SEQ ID NO: 562677 - DNA, 619 bp, Homo sapiens
  misc_feature (27)..(27): n is a, c, g, or t
  misc_feature (134)..(134): n is a, c, g, or t
  misc_feature (147)..(147): n is a, c, g, or t
  misc_feature (155)..(155): n is a, c, g, or t
  misc_feature (157)..(157): n is a, c, g, or t
  misc_feature (168)..(168): n is a, c, g, or t
  misc_feature (179)..(179): n is a, c, g, or t
  misc_feature (183)..(183): n is a, c, g, or t
  misc_feature (198)..(198): n is a, c, g, or t
  misc_feature (229)..(229): n is a, c, g, or t
  misc_feature (238)..(238): n is a, c, g, or t
  misc_feature (265)..(266): n is a, c, g, or t
  misc_feature (279)..(279): n is a, c, g, or t
  misc_feature (298)..(298): n is a, c, g, or t
  misc_feature (344)..(344): n is a, c, g, or t
  misc_feature (431)..(431): n is a, c, g, or t
  misc_feature (433)..(433): n is a, c, g, or t
  misc_feature (445)..(446): n is a, c, g, or t
  misc_feature (558)..(558): n is a, c, g, or t
  misc_feature (605)..(605): n is a, c, g, or t
tgcgccttcctggtggctctctctcanggcgggtcaaggctgaacaagacagaaaagcacagtctaggtccaccatcacctcccactggccaccagttggccagccaggaaatcatttctgtacatcttttgtntcccccttttatntccctctntnttctccaaaanttgttgctatntatnactttcatgtaacantggacttagtgtccattaaactgcctgggangtggtttgngcctgacatattttcctgagctaaaannggcaaagtacctntgtggccttcttgccattnagatcaagtgaaagggggactagcactattgggaagggtgagggtngggaggcgttagaatcctctctccaccccgtgaaggtttctctagctgtagctcttaagggtacaagagggcaaatattctggggtnanggaggtataatnnggaaacacatttattttccccttttaaacttccctgctgccccagtttttgctttcttcttagtggatcccttgggttctggctccttgcgcttagctgaagagagtgagcnggtcaccttgaagaaatcatccaggcggccctgggtgctgccttggnggctctaactcagc

SEQ ID NO: 562678 - DNA, 451 bp, Homo sapiens
  misc_feature (9)..(9): n is a, c, g, or t
  misc_feature (181)..(181): n is a, c, g, or t
  misc_feature (201)..(201): n is a, c, g, or t
  misc_feature (228)..(228): n is a, c, g, or t
  misc_feature (244)..(245): n is a, c, g, or t
  misc_feature (255)..(255): n is a, c, g, or t
  misc_feature (274)..(274): n is a, c, g, or t
  misc_feature (318)..(318): n is a, c, g, or t
  misc_feature (331)..(331): n is a, c, g, or t
  misc_feature (334)..(335): n is a, c, g, or t
  misc_feature (339)..(340): n is a, c, g, or t
  misc_feature (357)..(357): n is a, c, g, or t
  misc_feature (364)..(364): n is a, c, g, or t
  misc_feature (424)..(424): n is a, c, g, or t
gccagggcnctcatggaggctgggcagaagcccaagagcaggctctaaagctgccaaacccggcagccctggtccccggaggctcttgccagtctgacagtgttcttggcactgctcagaggtcccagcagctggggttccccctcagcccgtgagcagccatgtccaaccccagcccccnccaccatatgaagaccgctnacccctgttcccaggccctctgcgccntgggggctatgggcanncatctgtgcngccaggagggtatcgtgcntaccctggctacccgcagcctggctacggtcaccctgctggctncccacagcccatnctnnccanncacccgatgcccattanctatggnccaggccatggctattatggggaggagagacggtgagtgatatcttcgagcctgaagagngggatgaccggaaagtgcaacacactt

SEQ ID NO: 562679 - DNA, 541 bp, Homo sapiens
cgtcgctcatacgcggtggacgaattacgcctatcctccatggcatcaacctagcagtgtgcacattccaccagaaaagaagaaggatgttgagtccaattgccgggcgcacggcatcggccttattgtttttgccgatcctctgctttcggcgtcgtacgatatattgctagccccgacgcgaaagtccccacatccagcagatgtcgaagactacctggaaaagcgtctcaaagctgccgacctagccgcactcaaatcacgcattcatgagttggagttgagcattcgatgaaaattattgtcgtgttcaacatgagagggggaattggcaagaccaccctggcagtcaccctagcagaagggctagcgcagtacggaggatcgaaggtgttactcgctgacgctgacccgcaacgcagcgcgtcgcaccggttatgcctgctcactaccgtcaacgaatgcggacagccgggaagtggacgcaatatcagtaaatatctttcggacgcgattgttcggaatagccttcccgatccca

SEQ ID NO: 562680 - DNA, 409 bp, Homo sapiens
gcgggcacgaccctataggccatttatcaagcagcattctagatgaagggcttgacgccatttgaattacagcagttgactcagcagctgcaagcagtctggccatttcggaacgcaaggttacctttcagccctgtctactgaccaataccccgactcaacttgtgtggcgcacttcagaatacagatatacctagcagtctacctgtggttcggttatataattaatcagctcgttacttaagccccatgaaaatggcatccagggctgacaggagattcagagctcaaaacaaggcgagcttgagttctgcactccagatgtgtccaaaactagtaaaacttaaaggactaacaaccttgtcagtattataatgaggcagggatactcttgtctacacactaaaca

SEQ ID NO: 562681 - DNA, 394 bp, Homo sapiens
tgtagtgagtatcacctctaaatcaccactgatcaaaagggacaatgcatcatgcactgcatgcaatgcatgctcaaaatgcttagcctagccacacccccacgggacacatgcagtgattaacctttagcaataaactgaatgtttaactaatgctatactaaccccagggttggactatatcgtgccagccaccgtggtcacacgattcacccatgtcaatagacgcctggtgtaaatgagttgtttaagatcaccccctccccaataaatgctcacaactcacctgagtatgtaaaaaactccagtttgacacacaatagactactgatattggctttaacatatctgaacaacaacaatatctaagaaccaaactgtgataagatacccc

SEQ ID NO: 562682 - DNA, 412 bp, Homo sapiens
  misc_feature (19)..(19): n is a, c, g, or t
  misc_feature (72)..(72): n is a, c, g, or t
ggtttttttcccctccccncaaaatatttttcttcccccccggggggggggggagggggggtcccccccccngggggtttccccccttccccggggggttttggggggccaggggggttttttttcccccaaaaaaaaagggtttgggggcccccccccccccccgccccgggggggggggttggggggggcccccttttgggggggggggggggccccctttttttcccccttcccccccccccttttatttttggggggggggaacaagtttgggggggggggggttttccccccctttttaggggggggaattctcccccccggggcggggggggggggggggggtccccccctttcccgggccccccttttttttttttttttttgaaaaaagggggggtttttttca

SEQ ID NO: 562683 - DNA, 208 bp, Homo sapiens
gcagaaagtagcagccactctcacagtcagcattaaggatctacccaaacattaatatctgcctacttgtattcctgggcatccttccagtccatgcccatcaaggagcacatcagaggtttacattgctagaacagaaaatcgtcaaaacagaaaatgtcataggactaaaaaaattatcttttcatatctgccagattatttacat

SEQ ID NO: 562684 - DNA, 368 bp, Homo sapiens
gttttgccttgattattaggcaatatttggatatatgtacaaaatcaaaacagagaataagtagtctagctagagaaggtagctggtgggtttgatttatgaaggggaacagtaaaaaagagaagttgaggacagaaagtagtatggggtgctctaagtgggtagattgcctcttaaataatgaaatctggatgtggttattgctagaacagtggctgaagaaaatcttgtgtttcaaagaaagtggattgaagagtactttttgtgacccagaattcaaaatttaaaacttataaagtcaataaatggaaaacaaatgagtttctgaagtgtcttcatcaaataatagaattatggccagtagtaaa

SEQ ID NO: 562685 - DNA, 293 bp, Homo sapiens
atgagatagtaacgcgatcccatgatttttccgaggggcgccattcctagcaggcatcagcacatgtaagggcagagccagtagtccgttatccgccccatctgtcagtggaccgagaaagtaacttgcctcagttcacacagctagtccgaattctcgggttgctgaggaaggatgatccatcatagtgctggacatgacctaggtcaaaactccttcaaataatggataaatgttggctcaacttcttgagaatgaacataatacatgtctatttataacactatgtaaga

SEQ ID NO: 562686 - DNA, 197 bp, Homo sapiens
ggcctgtcagatgtagcacccactctgtcatccaccatgattgaagctccctgtaggctcctcagaagccgagcagaagctgtcatgcctcttgtacagcttgcgagaaccatgagccaatttaaactcttttctgcttcaaattacccagactcaggcatttctttgtaacagtgcgaagaacggactaataccat

SEQ ID NO: 562687 - DNA, 508 bp, Homo sapiens
gtgctgtctaggtggcaagccagctaattaccatcaggttaccagtttacacagagacgtgaagcagcaaagagctgacgcagaaatgacataggaaaacagcagcaaagtccttgagtcccaagagtccagctccaagacaaacatactaaagaacaaaggcccctaatccacctcctcaatggtagggcctgagccagaccctcccttgggaccctgagccccgaagccgccaggcccgggaccaccggcaacctggtacagtccgctgatgatggggttaccagcctgatccagatccttcctcttgtgctcaaactcgtccttctcggccaaggtgttggcgtccagccacgagatgacctcttgaaacttgtccagaaccttcttcttgtccggcctcgctgatcttgcccttggagcccgtcatctccaaggcgctcttcatgtagaaggcgtaggactccagcgcgtacttggatgacaccctctcgcgctgcacctcgtc

SEQ ID NO: 562688 - DNA, 269 bp, Homo sapiens
ttttttttttttccccaaggccttctctaaaaggatggggaattttttttgccccccgggcaaaagaaaacccccgccccgggaaatccttttttccccccccccccccccccggggggtttttaataaaaggggggccgggtttttttttttttaataaaccgcccaaagcccaaaaggggggcttttgatggttccataaaagttttataagcgggggaacccgttttttttggtaaaaattaaaaggctatgatggtgccctttta

SEQ ID NO: 562689 - DNA, 862 bp, Homo sapiens
  misc_feature (1)..(1): n is a, c, g, or t
  misc_feature (9)..(9): n is a, c, g, or t
  misc_feature (14)..(14): n is a, c, g, or t
ncttttggnaactnaggatccacagcatagcatgaccgcgacagcatcataaacatgtgaggcctacatcataaatgagtctcgggtgagagagctgcatgaaataggactcgccaaaggtgcatatacgctgaaccataggccacctactcatttgttaaagggcctatgaggtgggcctgacagaatctggcacatctgatatatgcacgcaactactcgtgactgtctaaactgatattaagagggcaaagagagagcgcctaaaagacctgcacggtgactcttacgggggattagtcatttggggaagaatgatacttgatccttgcatgcatactccttgcatttggaactgagaaataggtcagatacttcggtatgaaattcagagagaatcccactgaacacatatctgtgcatatacttatgctttatgtatggatcacctagagcaagtacagtcattaacatttaaacagacatttctgagactgctcctcttgacattcggcatggaatacggattgatgaaacaggacgctgaaaaacaaagtagttacacatatcacgatcttgaaagtgcgcggggcaagcactatgaaggcccatgtaccgcgcttaatgaaaattcaaagagtataccgaaaccctaactggcctcgtgtggctaaaaggtgggaccttgctgacagtttcctttagtggggggtaattcatgagcctggctactggctcagtgggttgggcgtacatcccccgagcggataacttattaaaggcggagactggtttccaaggacacggggtaaccagaaaaactcgcggcaaagccccaaaagcggaaaccaaaaaggctctg

SEQ ID NO: 562690 - DNA, 190 bp, Homo sapiens
gggtgcacagcaaaactctgtcaaaaaaacaaaacaaaacaaaacagacaaacaagaaccaaagttggatgcagtggctcatatctgtaatcccaacaactcggaaggctcaggcaggaggattgcttgaggccaggagttcaaggccagcctgggcaacatactgagaccctcgcctctgaaaaaatta

SEQ ID NO: 562691 - DNA, 229 bp, Homo sapiens
  misc_feature (7)..(7): n is a, c, g, or t
  misc_feature (26)..(26): n is a, c, g, or t
  misc_feature (37)..(37): n is a, c, g, or t
  misc_feature (95)..(95): n is a, c, g, or t
  misc_feature (100)..(100): n is a, c, g, or t
  misc_feature (110)..(110): n is a, c, g, or t
  misc_feature (129)..(129): n is a, c, g, or t
  misc_feature (142)..(142): n is a, c, g, or t
  misc_feature (144)..(144): n is a, c, g, or t
  misc_feature (161)..(161): n is a, c, g, or t
  misc_feature (192)..(192): n is a, c, g, or t
attactngcaggccacctactccatngcacctaattnggaagcgccacccttagcaatatcaacccattaaccttccctctacacttaatcatcnttcancaaattctanttctactgactatcctagnaatcgctagtacngncttaatccaagctaacngtttcacagcttctagtaaagctcctacctngaccgcaacacataaacaaaaaaaaaatttttttttt

SEQ ID NO: 562692 - DNA, 704 bp, Homo sapiens
ggagtttgagaccagcctgaccaacatggagaaaccccgtctctactaaaagtacaaaattacccgggcgtggtggcgcatgcctgtaatcccagctactcgggaggctgaggcaggagaatcgcttgaacctgggaggcggaggttgcggtgaactgagatcgtgccattgcactccagcctgggcaacaggagctaaactccgtctcaaaaaaaaaaaatgttttccaaatataagccgggtatgggggtgtccggtagtcccagctactggggaggctgagaggggaggatcactggagcccaggagtccaaggtggcagtgacgctatgatggtgccacgggtatccagccggggctaaccagagggagacccgtcgaaaaaaaaaaaaggtgcagggcaaaagtccattccagggcctccctatggccccgcagaataaagaaacagcatggtggcatggggccgacgggaggacacaacgaccgggaaatccaccagccacttgggccaaggactgagagcagggacggaaatcaacttaggacggcccaggacgtgagaaaagccagggcgggcccagaagtggacgaaaaccccgggacatcatcacacaattacacaacaatagggatgaggacgaacaaggagcgatgccctgtgacgcccaaaacaacacgggaaggcatgaggccaggcaaa

SEQ ID NO: 562693 - DNA, 689 bp, Homo sapiens
tgtctcattttctctgctgctgccatgtaagaagtgcctttgcctcccaccgtgattctgaggcctccccagccatgtggaactgtaagtccaattaaacctctttttcttcccagtctcgggtatagtctatgatacagcagcgtgaaaacggactaatatactgaaataggtaccagtagagtggagcactgctgaagaagacagcacgaaaatgtggaagcgactttaggaagtgggtaacaggcagagggttggaacagttggagggctcagaagaagacaggaaaatgtgggaaagtttggaacttcctagaaccttattgaatggcttagccaaaatgctgataacgaatatgaacgagtaaggtccaggctgaggtggtctcagatggagatgaggaactagctgggaactgggagcaaaggtgactcttgttatgctttagcaaagagactggtgacatttggccccgcctagagattgtggaagttcgaacttgacagtcatgatttagggtatctgggtggaagaaatttctaagcagtcaaagacgcaagaaggtgacttggatactataaggaggcattcagttttataagggaaacagcataaaagttcagagaagattgagaccgatgatgcagtagaaaagaaagagccatgaatgaggaacaattcaagccag

SEQ ID NO: 562694 - DNA, 758 bp, Homo sapiens
gttgcgcttgctgaggcgggcttgctgacactgcatttccctaccctgctaaaacgcgcaaaccgaggagtccgcattctggtcatgagcggtgactagcatttgtgcagaacggcatcccatgaggagaactactcactcacagctgagcaaaacgactccagccgacgctgatcgtggtggttacaatcttcaggaaataactctgacgtcagacaaactgcaatagaccttccataaggatgcgatctccatatttcaagccatgcaaagacagctgagtcatcaccagagttatcggcaacgaagccttctcacccactcatggatcctctactaccacatactttagctgactctctctaaccagcaacaaattctagtcataccgatgcccatgaaatacttgtgagcgagactcttgattgtgatgaaaacctgcagcacgacttgcaatgtgcttgatctctcgagatgaggtgttatgacaaacatcatatccgaactgagttaatggagactcaatttccttgactggcacccaatggacttgagccaatacacagacaaacatgcaccacatttaaaacatctgagtaatcaggtccaagccacgagggagccccaaaaacctttgaaatatcctttggggaaaagataatgatgccagggttaactctctgcccccccttcccgagactttactgaaaaagcttgaagtctggagttcccccctcaaacaagggaatatgatttag

SEQ ID NO: 562695 - DNA, 262 bp, Homo sapiens
agggaaaagaaagaaagtgaagagagaaagaaaaaaggaaggaaggaaggaagaaagagagagagagagagaaaaagaaagaaagaaagaaagaaagaaagaaagaaagaaagaaagaaagaaagaaagaaagaaggaaagagtcagctggatgtggtggcatgcacctatagtcccagctactctaggagaagctgaagcaggagaaggaaggaaggaagggagaaagaaagaaagaaagagaaagaaaagaaagaaagac

SEQ ID NO: 562696 - DNA, 107 bp, Homo sapiens
tcgatcgagctcttaccggtgaagtgggaggactgcttacgcctcccaagtagctggacacaggcatgtaccactgtgctggctaatttttttttaattttttgcag

SEQ ID NO: 562697 - DNA, 556 bp, Homo sapiens
gtacgtagaggctggcgaatcggacaggtgttttcattgttcatccgccaggtctccccggtgctcgcaggccaggactgggccccggggcggtgctgctggtgctgcacctccctccccgcgccccgtcctctcccgccctacagccctacagggcaggcggagtccgtattcgtggtccttcgcggtgtcccggacccacggtgtggatggcaaagcccaagtggactggtcagctgcagacaaaaaagtcttctgataccgtcacgtctccgttgataaaatcatctcgcattcggggcgcccggaacttggtgcaagaaggcccagttgggtgatagccggctgagcccggatgtggggcacctggtgctgaccaccctctgccggcctccacgcccctggttggccggggacgggctgaaggcctttccggaaggacctcatcaccgtggcagcgcagagcagccccctggagcgtggttggaggcgtcggtgaagccaggctccagcaccgtccctgggaaccctgtatagccaggtcagcgtctaaccc

SEQ ID NO: 562698 - DNA, 1000 bp, Homo sapiens
agcggagtttcaacctgcagaggcccggagaacacaaccctcccgagaagcccaggtcaagagccaaatcccgtcactgaccccccagaccgaggcgcccagccactccccaccgctaccatgggccgaacgacgcagtacattgtcgcaatgagcctggagcgagatgcagtcgcaagggtctgaccagattggactgcatgagtcgactgcgcaaagctacccgatcgtatgactgctaactgcgttgaacggagaggtagaagatgcctggctatcatgggactttggattatgcttggagtgaacaaggagaacctaactgtgaatcggcattgacggacagggacctggactcacacatgtcatactatagggagcagtgaagacgaaagccagaatacacgaagatttgatccggtactcttacggaaagttcttgcgcaggcgtttgtgctagtgtccactgttacactaatgcttacacatgtcaaggtgacttgcttacatgagagagagccatggcggcaagtatagtcagagatcggcagtggtgtgcgcatgcaccagcccctgtctcagtgtaggtgcgactgaaacggggcagtcaagaatgaggcagtcacgtggcgcgcttctatcccgcaggtgtaacaatatgactgccgcgatgaaagatgaaactggactgagaaaccttatgatgcacgtgtgagcggcaatcatccggagaacctccagtgacattggccctggatattgggccatgagatcgataacagcagagatcgccagatctgacaggatcattggagaagggttgattccatgcaaagccgagaacttgatgaagccaacaacgtgcaacaaagatgctggcagtgggttagtgtgcccacccggttcgcctccaaatgctgcgggccagatagtcctcatgcttctcatggtaatactctaaacagtgttgacatagaacattagtcagacccatgagaat

SEQ ID NO: 562699 - DNA, 801 bp, Homo sapiens
tgagacaaggtctcactgtattgcccaggctggagtgcattggtgcaaacatggctcactgtagcctcaaccttccaggctcaagcaatcttcccacgttggcctcccaagtagctggaagtacaggtgcatgccaccatacctggctaattttttttctattttttgagagacaaggtctcactgtgttgtccggactggtctcaaactcctgggctcaggcaatcctcctgcctcagcctcccagaatgctgggattaaaggctcgagccactgaacccagcctcgacctcattttttttaatgacttcatgctatttcatcatatagatatactgtactttttgcctattcccatattgatggatatttgtttctggctcttttcctttttgatattgcaaacaaagttgtagtgaacattgttatatgtacatctttttttttttttttggaaacagaagttccgtcttgttggcccaggctggaattccagtggccggttttcggtcacaaaaactccaccttccccggtcaagtgatgcttctggctagagctccaggtagctgggatcagggcgttgcccaaacccgtgaaacattgggtttacgaaaaggggtcccccacgttagcaggcgggtctgaacctgactagataatacgctggcccccatgcggatcagctagacccgtcgcctgttgtcctcacatattctggaaggacagattcctctgaagtcattgaaattacagcgcggatgtattacagtagaccgatctcttatattcgaaaacggttg

SEQ ID NO: 562700 - DNA, 400 bp, Homo sapiens
  misc_feature (12)..(12): n is a, c, g, or t
gcccaggtatgntcagaaagcaagatcgcgcactgtttccagcctgggtggcagagcaagacgcctgtgtcacaacaagaacaaggctggtgcacagtggctgacgcctgtcatcccagcaccttgggaggcagaggcgggaggatcatgaggtcaagagatcgagaccatcctggccaacatggtgaaaccccatctctactaaaaatacaaaaattagctgggttaggtggtgcgcctgtagtcccaggttctcgggaggctgaagcaggagaatcgcttgaacctgggaggtggaagttgcagtgagcagagatcatgccactgaactgcagcctggtgacagagcgagactctgtctcaaaaaacaaagacgatgagcctaggtttcgggctccag

SEQ ID NO: 562701 - DNA, 394 bp, Homo sapiens
ctttttacgggaccatttggcttctttgcatgctttgggtttgttaccaaaatatccagtgtggtgaaggttgactgaagaagtccagggtgtccagttaaaacagaattaaattaaacttttcatcaccaaagacctgtttttgggactgccttgagtttaatcagaattattggcctagtaatccttcagaaacaccgtaattttaaataaaccttttccaatacacctttcccccataagaggtgtcttcaacactttaaagcattggaatggggattggattaagtatatatttggtggttctcaatgaagagcaaatttaaatattatgggcatttgtaaatacagtagttatgatgaagggcaggacattgcattgtaaataggattt

SEQ ID NO: 562702 - DNA, 769 bp, Homo sapiens
  misc_feature (214)..(214): n is a, c, g, or t
tggctaccgtgaactaaaatggaagcgttttgggggtcgcggtccgaatcttggggggggggtgtcctggccccaggaaagtttaacctgcattccgtccactcccgattccttcagggattccgtggctgtctgcactttacatgatgtgtccaatcactgctggacccaaaaccccatggtgtgaccggggacctcagtcctcgtgcgttanatgttcagagggctggagtgggtagatgtgcctgcagacatgctgggactcctatagcggcactccttttggctctcgtttctccggtcaaacatctcttcttcgcattatattgcagagtctcaaacaacagttacccagtgcgtgggttgccatctgtggacagaaacatacgcgtgatttttccaggtatatttgtgaacgcaagattctcgggccaaatgtggtgtgatggatcagaagagacgctttctgggagaagatgtgccaacactgctaatatgtccctaaagatggctattcacatatcatgggtctgagacacaggggggccatgtgtaaaccagccgggccgctctcagacacgaatagaacccctgtgtgttgggaaaccaccatggggatcatcgggagaagggcataaatgcctagagtagggaagaagaacgctttccctcggtatatttgttggccacttgcttatgggtggttaagcccatttaaaatgccccttttcgttttgccccctgtgtatttggtggacatcctgggctc

SEQ ID NO: 562703 - DNA, 345 bp, Homo sapiens
tctctagaggcagagtcttccttcggttgtccaggcaatggttgtgatcttggctcactgcaatctctgcctcccggattcaagcaattctcctgcctcagccccttgggtagctgggactacaggctttgtgccaccatgcctggctaatttacgtattataatgggagacagggtttcaccatgttttggccaggctggtctcgaactcttgagctcaagcattccacccgctttggactcccaaagtgctgggataagaggcatgagccaatgtgccaagcctataaaagttattcggtatcccccatgtatttttacccaggttgtttgggaccaagaggg

SEQ ID NO: 562704 - DNA, 528 bp, Homo sapiens
  misc_feature (11)..(11): n is a, c, g, or t
attgcgttggnttgatgattcttgctctacttaggaacttgtggtccaggatacaaaatagacagacacacacacacaaacacacacacacacacacacacacacacacacaaaccaagaccaggacacacaggatacagcaaagcccaaatgggaatgtgcctgtgccgtgagatttccaggcccgagtgcatgatttatggacctggtaacatgaagcctagatctatgaagtgagttctgaaaggcaaagaggaagtaagcgcattaagacagatggggcatgttataacatcctgctatttagattgtcactttcccccagactctactgtgcacgggtcactacagttgacagagatcccctcccgccatcctggtcacgctgaataacaaagggaagagaggaataagaactgtaatatctataaattctcagcatagtgaccgagagtgttcttctactttgtattcatgtctaaaaaaaagaggggacgggcccggcaccgtggctcacacctataattc

SEQ ID NO: 562705 - DNA, 392 bp, Homo sapiens
gggcacttcgtggacatggtgttggtgctgctggtggtactggtgccgtggacgcgcatcaacctgatcgacttctatgcaatccataagggcaagtacgacatcggttcgatctttcgcgtcgatggcgggatttacgggcggtacaaccctcaggcgctggtggcctatgcggtggggattgtcgtgcagattccgtttatgaatacgccgctgtatgtcgggccgatttcggacacatcaacggggcggatttgtcgtggttggtggggttggtggtgacgtcgccgttgtaattccggttggccaattcgggacagtgcgtataagcgccggttggagggggggaagttggtgggtggggtttaatagagcccggctcagtgtcgacg

SEQ ID NO: 562706 - DNA, 441 bp, Homo sapiens
atagtaggggttacaggtgtgagccactgcaccagccagggagggagggtattaaaggctcagttcattctttctaggaaaccttccctgcagatgtcccagcctgctcactctagccatggaagaagcctttatactgaaaaaagtgacagagccctggaaagctggggacccacagacagatgcagttaacattaagatggaatgggactgggagggtcttactgcagatgaaattgttactgttttgaggcagtttctagactttgtaaaatgagctaaattaggtttatgtaaaaaaattgaattctaaaagagtgttgcaacagaacgaagtaccaactataagagctttaaggattgcaaagtttaaacagataaaggctttctttcttagggaggagcaaaaaagattagaaggtcagaggggaatagcaaatg

SEQ ID NO: 562707 - DNA, 837 bp, Homo sapiens
  misc_feature (249)..(249): n is a, c, g, or t
  misc_feature (376)..(376): n is a, c, g, or t
gcccacttctaggcttggttgagccgcgcaggaagagttttgctcttcttgcccaggctggagtgcaatggcatgatgttggctcaccacaacctccacttcctgggttcaagtgattctcctgcctcagcctcctgtgtagctgggattacaggcatgctccaccacgacccgactaattttgcatttttacgtagacgacgggcatttctccactgttgttcactgcttggctttcgcaactcccanacctcagcgtgactctgccccctgcctccgcctcccaacagtgctggcgacttacacggcttgctgacgcccactactgccccggccttctcttaactctacttctctgagcagcttcttgttacantacttcctgactgctttacatcctttcagctctatactgttactttagcaattatcttttccacccaaaaggtaccagctttgcccctttttaacttcttatttacgcaactttttcgtaatttggccaattgtttggacacacacgcttacgggtgcattacttttctctggctgctcctctacttccttaaggaaaacacttacctttccctggtctccttccacgcttcccccgcacagccaattgctttcccttttttctacacgcacttttcggggccttgggtcctccacttgccttcctaaggcccaaaactccctcgcaccaccggcttggccccaaaaacacaccttctctctccgagcttacaaccttctcacacttacttttccaactgtggacacacacgcgcaccaacccgggcggcaaacaccccctttaacaccgtcacacttcag

SEQ ID NO: 562708 - DNA, 1185 bp, Homo sapiens
gctaaagtgatcctgaagccaggactaagactacgtattcacgaggagacctagcaccacatctggcaccactctgagctgatcgaagcaatggactcaacggtcgacgcgtgcacgcatcaacggactcgtgatctgtgcgctgactacgcgcaacgtaaagaatcaactgtgaagcgtggcagtcactgacacgaattcagacatttcgagacatcagtcctgggctatggaccgatctcggactacacgtcacgagcaagcggctagacagtatctgctgtagcatcgagatagcagaccatagggaacaatcagcagctgacggcaacacagactcgcactgtcaccgagcatggcgatgagtatcatcgacctccaccgacctagacaactatgagacccaggactttctcatccaaggactgagtgggagggtcagggaccatactcatgctgccaagctgccacctaaggaccaatcacatctatgtttcatcatgacgacatccaggagactggcgtacaccgtacatccttcccaagaatgtgcttaagacagttcatctgcaatatctgacgcttcgggcccaaattgcagtgatacctatatggggtggagcccaccagataaacccgcaggctgaaggagatacgctgacatgtgactggtcgccgcaatggggccactcaccagagcgtgaacctgacctgcccacctgaccaaaatgactacatcaaaggcacattggaacccttaaggatggaatcacacatcagaccaatgagtcaccgccgctatacaacccacggatgtcacccaccaaggcgaggatcatggctgcccaccctactgggcatgagagaagaacattatgacacatgcaattacagccaggctcagataaatgaaggctaaccttaaccacatggaacaattggacactaaaaacagaaagggacacatccagggcactgagcctaaaacaaaagggatccataagatcagcagcagatgaactatagactatccgcctatcgcacaaaaaggacttatcacccagtaataatcgggagcaaagtccaaatatagccctataaatcatcacagaaaaaccaataaaaagaaacaacagtcacaacgacggttgatcgtcctaaacactgacagcagtcaccgttaat

SEQ ID NO: 562709 - DNA, 181 bp, Homo sapiens
cacagagcgcaagggtgtcacacgacttggcggaggaggaggctgtggcacctggcacgcccactatgggtgccactaagaccgcggacgagatggccttctttgacgggaagacaacgcgtggcgtttacaacttctgtgcccaggacgtgccctcggaccagaagcgggtggaccggat

SEQ ID NO: 562710 - DNA, 113 bp, Homo sapiens
aagatgtgcaactgcagccaagttaacactgagattttagtcaaccacgagaacctaggaagagatctggatgtgttcttgtagggacaccagtcatattggattagaggcac

SEQ ID NO: 562711 - DNA, 696 bp, Homo sapiens
tcccaagccaaactgtttccagcttaattaaaaatacttcccataaacaatcagggttattccaggcaggacatgggcagacaatcgttaacagttatacaacaatctttacaaactcccttcttcaatgggactaccaaaaatcaaaaacgccactataaaacccaatgaagtcttcatctgatgctctgaacagggaaagtatagagtgagggtaggacatttcacattatagcatgttggttataacaacttttcacaagccagaccctggactttccaggaatgtggaaatggaaaatgggcaagaattttatctgagaagatccacaattctaagaattgggaccccactggctcttttgagacagggtggccatactacagtgggcatcactgggaaatgcccaaattggcctggacacactggtacaccgaatgcactaaggggttcaggtcctcacacagatgtcgggggctaaagagggcagtaaaagtctaatgctgaaagaatggcaagagggagaaagaggcactataaaaccacatattggttttcctataaccacagaggctttggtggccagggtggcgccatgttgtgtccaaagtcagggaaatccctcctccggggaagccaagaggaagtctctcaaaatctagaagggaaagtgtttctcccaataaatccagcta

SEQ ID NO: 562712 - DNA, 820 bp, Homo sapiens
  misc_feature (751)..(751): n is a, c, g, or t
  misc_feature (787)..(787): n is a, c, g, or t
  misc_feature (816)..(816): n is a, c, g, or t
actgtgttatgggagtagagtacttttgtccttcatcttacctcagagttagctgatcagggacaggggatatcacatctggagccaagatgtgcaggaccaccaggacagcgccattttctgtttgcaccacacaaagtcagcctgagtgtctcctccgtggatcactatgagggcatcattactcagcatctttgagtaatgagacatttgaggatgtcatgtgcagactggggtcagtctgacaaggtctaattctgctcccatttcagaggaagataagtgactcatgcagggtttgttcctcccctcacagaaagaatctccttggtttgtacccagataagaattgctccagttttctggttctttggtgaaaaatgaggaatctggagactcaaactgatcaataagctaattgcttctatttcatatgatcattagaaaaagacataaagcagtcatggtccctaccatcaaggaacttgcagtctagagcacatgaataaatgattgaattcagcatcgtgtgttcagtacaaagacagaaactgtatggagacttaagcttaatttgtgttacttcccttttattgttttgtgagttttaatgccaccatctgatcagctgttcattgacagaagagaaattgttgttattatttgtgttgtttttaccttgctaagaataaataattagcttctaatataattggtctagaaaaacataagggttttgggttaaattccntgttattgtgtgttataatgttataaaatagggggnattaggcctaaaatagggttaagggtacnggga

SEQ ID NO: 562713 - DNA, 963 bp, Homo sapiens
  misc_feature (2)..(2): n is a, c, g, or t
  misc_feature (90)..(90): n is a, c, g, or t
  misc_feature (106)..(106): n is a, c, g, or t
  misc_feature (146)..(146): n is a, c, g, or t
  misc_feature (154)..(154): n is a, c, g, or t
  misc_feature (157)..(157): n is a, c, g, or t
  misc_feature (160)..(160): n is a, c, g, or t
  misc_feature (177)..(177): n is a, c, g, or t
  misc_feature (212)..(212): n is a, c, g, or t
  misc_feature (228)..(228): n is a, c, g, or t
  misc_feature (241)..(241): n is a, c, g, or t
  misc_feature (247)..(248): n is a, c, g, or t
  misc_feature (262)..(262): n is a, c, g, or t
  misc_feature (282)..(282): n is a, c, g, or t
  misc_feature (309)..(310): n is a, c, g, or t
  misc_feature (316)..(316): n is a, c, g, or t
  misc_feature (323)..(323): n is a, c, g, or t
  misc_feature (347)..(347): n is a, c, g, or t
  misc_feature (369)..(369): n is a, c, g, or t
  misc_feature (393)..(393): n is a, c, g, or t
  misc_feature (396)..(396): n is a, c, g, or t
  misc_feature (415)..(415): n is a, c, g, or t
  misc_feature (428)..(428): n is a, c, g, or t
  misc_feature (431)..(431): n is a, c, g, or t
  misc_feature (437)..(437): n is a, c, g, or t
  misc_feature (439)..(439): n is a, c, g, or t
  misc_feature (446)..(446): n is a, c, g, or t
  misc_feature (455)..(455): n is a, c, g, or t
  misc_feature (460)..(460): n is a, c, g, or t
  misc_feature (479)..(479): n is a, c, g, or t
  misc_feature (516)..(516): n is a, c, g, or t
  misc_feature (556)..(556): n is a, c, g, or t
  misc_feature (564)..(565): n is a, c, g, or t
  misc_feature (594)..(594): n is a, c, g, or t
  misc_feature (597)..(597): n is a, c, g, or t
  misc_feature (615)..(615): n is a, c, g, or t
  misc_feature (643)..(643): n is a, c, g, or t
  misc_feature (680)..(680): n is a, c, g, or t
  misc_feature (685)..(685): n is a, c, g, or t
  misc_feature (719)..(719): n is a, c, g, or t
  misc_feature (732)..(732): n is a, c, g, or t
  misc_feature (840)..(840): n is a, c, g, or t
  misc_feature (894)..(894): n is a, c, g, or t
  misc_feature (925)..(925): n is a, c, g, or t
tnggcacgggtgtggggttttcaatttagtaacacaagttatttcttaaattccaaacattttctaaaatattattacagcaggagcctnggatattaaaacatanggggggaaatcattctctaaatagttaaatatatttgccnctgaaaanccngcncattttaattagggggnaattaaaatgtgtgctcaaatgcactaacaaactnggtagcggggcaactnacaactacaaatngggcanngggggccatttttncgtatgcatatatatgtttnttctctagataatccgtcttcttgaanntgctantaaaccntaaaactccagataaatgatttanagaaattgtaattcttcctacnacctagggggacatgtactattgngtntgtcttcatacagttactntttcaaatataanagncccgcncncttcganagaaaaaanttttngggtagtggttttaattgntttagtgagatgaaaagatagtaaagccctgtttgcnacttacgtgagaggggactttaaaaaatactcgctgcccnaaatgtannggggggggttgtgctgtgatattaatttnccncaataatgtttttcttgnctgttcgggagcaatttagggtttccgnggcaattttgttttcaaaatgccgatttgcgaaacanttgcnggcttcacgtttctgaatccctttaatagtttcnctgcgttgcagtntgtgagtttccttgtcgtgagcacagtcgataaataaagaaacccaggtgatcaatgttttcaatgcgatcagtaataaccatgtgctcatgaatcagataggactgnggcaaataggttccagccttgatgttaataagtaactccagtaggtttctgggnggcataacaatggaagtgttcagagggatcncatagcacttatccaggttaagatctaagtaggctgta

SEQ ID NO: 562714 - DNA, 1315 bp, Homo sapiens
cagcattccaaaacctggaacggttacgttcagcttatgccagctaattctggactgcatagaggttactatcaacatgaatgcgaagaaagcaatgtctcagattctgaaacttcaagccaagatgttgacatataatagtcccaagcatgcctggaccacctggaaaatgtaatgcaacaatcatgtacatgttgtttatagctatcgcttttatttataaggttgctccagacaggtaaatctgaaatgacatctatatatatatatatatatatagttttgtatgtttattatactccgtggacagagtgtgcgtatcctataattggagagttgtgtcattatagccattttacggaggatataaagtgagaaggtgagatacgtcatgtgacatagcctcttaaagagcaacaaagctgtagaacatgttaaattgtattcgttgtgatagagacagacagttatagggtgaacagtcacgtggtatatcaagagcaaagtcgtggctacagacacattttaagaaccacgctctttgaaagtggagtgggtgctggtcatacccgtgaatggatagatcgtgaatttcatatcaatgtgaccataatacacaaacggggtgataaaagcgtggcaataagagaataaattagtatggcggatcaatacgattaaataatattagaagcagggtgatataacaacatttatagtagagatacgctgcgctcacgatagcgactacaatactgtatttatacccaccgacgtgatagaaaaccgggatataatcacatgtggctcgccaaacaacaccacgagggatcgatggagtatcagaaacacgatgtggagaaaggaggattgggcaaacaacaacaaagtgggtgcggagaatcaaggagacattttaatacaaagcataacatagaggggtgactacccatccacctgggggagacagatatacagagcccgcggtggaacaaactttatcacgaggaaagagatagatgagggaaacagcgcggaaaagtccaccacgcagaagaacaagataatgcggggccccaagagggggatgaacagaacacagcagagatagggagagccagacagcactaatatctgaaaagatgaagggcaactaacaacgataagacggcaaaaagttcgcctataaataagaaacggaatatccatgcgtagtagagagcaacacatgcaggggcgcggagagaaagtagtccgacacaaagcaggggcacccaagaaacaggaggcgcccggcgagcagtatagcatagag

SEQ ID NO: 562715 - DNA, 783 bp, Homo sapiens
ggaagcgggggtatgccctctgccggcccactccgggctcaggcccccggacgccgagtcgcgccgccgtgtcggacgcagaccccaccgcagagtctgcagaggccgccccgccggcaggagcggcgccttccaactccggagcaaatttttcagaacataaaacaagaatatagtcgttatcagaggtggagacatttagaagtgtcttaatcagagtgaagcttgtgcttcggaaagtccacctcactcctcagcactcacagacacctagctctccaggttcctcatggatgaagacggaacagaccacatttaccctccgacaagtggcataatatgtgagcgcctcttaagaagactatgaagataaaattcgggaggagtatgagcaaatcctcaataccaaactagcagaacaatacctgaagtcttatcgtgaaattcacacatgatcagattatgcgacggtatgggacaaggccaacaagctatgtgtcatgacagctacgtcacatatctgggtaccaggtttgacctcacgagatggctgctgtacactccggccaacctggtcggatgtcacattctccagctccaacttcgccctcctgagaacactttaaagcgtttctgcaggtccatactatacaacttgaaagaccgaaaactttctggttgccacaagcatatctcactcgtctgctcatccataaacagctgtgccctactgtgatacatcttccaaacaaaacataccgagcagagttagccaacatatgc

SEQ ID NO: 562716 - DNA, 141 bp, Homo sapiens
cctaattcatgcttgacagtggcgattctgattttaatgatatatgaaattggaattctaaagatttgttttacatagataggcgttgtggatgcatgaagactagttaggaagtcattgcagaagtgcaggaaacaatga

SEQ ID NO: 562717 - DNA, 181 bp, Homo sapiens
tgatattgacaatgactagatcaacagcaggtaaaagcacgttccccgtctgacataatctcctctggtcccgctggtttgtcagtttatacctcccatgtaaggtatccagctccgcttcttccgaacaccaaagggcttgatgagggggctgggcttccagtcgtccatggtccgagcg

SEQ ID NO: 562718 - DNA, 240 bp, Homo sapiens
aggagatatcctggagtgctgtcatcgacgaggtcacatgctggacatcgagagcttctcttctcaaacgggcctggagagtgacatggcgctgctctgatcatggccaccaacctgtggcatcacgcgaatccggggcaacagctaccagagcctcacggatacccatagaactgctggaccggctgcttatcgtctccaacaacccctacagtgagaaagacacgaagcagatcctcc

SEQ ID NO: 562719 - DNA, 455 bp, Homo sapiens
  misc_feature (25)..(25): n is a, c, g, or t
actgaacatttcatgagctcatgtngccctttgacccacccatttcttaaggagagccagctgattgctgtccaggataaggagcatctcttcagccaggagggaggcctgttccctcctgagttagactttgcatgaagctcgaaagtattccctttggaacctcccattcttgttcaggtgacaccagctctgttgatggctctgcttctagggaacatttaatcaggagatgctctcaatgactaatttgtctaagtcttaggaaggaggttgaggaaagctggatttagacaagttcaatttagggagttctccttgtttgtggattaaaatatgacagattgcaaacagactactcttcaaatgtatctcaattgtgcagaagtgagctgtccaaaagtataagactaagtgataaactgtcttcccaccgtgggagttgttaatgagaa

SEQ ID NO: 562720 - DNA, 383 bp, Homo sapiens
tgcagaggtggaggaggatggggagcagaggatgcagaggatcagtaggatggggagcagaggatgcagaggtggaggaggatggggagcagaggatgcagaggtgcaggaggatggggagcagaggatgcggaggtggagcaggatggggagcagaggatgcagaggtggaggaggatggggagcagaggatgcacaggtgcaggaggatggggagcacaggatgcagaggtggaggaggaaggggagcagaggatggctgggtagaaggcctgacaagcttcagggcagcagtcgccctccttggaaatatcgttacagatgtgacaactagatttgtcttgtttaacgtcgacgcggccgcgaatttagtagtagtaggc

SEQ ID NO: 562721 - DNA, 311 bp, Homo sapiens
  misc_feature (20)..(20): n is a, c, g, or t
acttgacagggctccagaancaagtcaatactacgtcttccctgtttatagtcccccagttagactgctggtggtcttctcctattcatagtcccccaattaggctaacaatagaccaaagatatatttagttccttacatttttagaaagtaattccaaaaattccttttacacacactcctcgacttctgacgtattttttgcacttttctcccattggaagcatttttgcatgcttgccagaaaaaaaattgccataccaccaccaatgtataaatttgttttaattgtttttgagtttttttttatt

SEQ ID NO: 562722 - DNA, 362 bp, Homo sapiens
tggccttaggaaaagcagatggcactgtggcccacctttagggtagaagtgatgtaccatgtctggccgttagttggtggctggtacacctgctcctggcacacccttgcagaggtggctggttgctctttgagccagcttggccttgtccagcatgcacaagcttcagtgcaacaactgtgctacaaatggagccacagagaggaaacaagcagcaggctcagaaaccaggtgtgcgctgcctttggggctccagtccatgcctcaggggtcgtatggcactgcaggcttcttggttgccaagaggcagaccacaggacggggttgacacgcccgcgaatttagtagtagtagtatcgacc

SEQ ID NO: 562723 - DNA, 177 bp, Homo sapiens
gcaactccatcattacctcttcctaagagaggctggagagacagccacaaacattaagacatgccggtcctgaataagggaggtggtgtaagagcttgaaggaggatgaggtcctcaccggggtgccacctgtctctcggtctcatgtgcgcccttctggacggagctgctatgcgg

SEQ ID NO: 562724 - DNA, 1459 bp, Homo sapiens
  misc_feature (1)..(1): n is a, c, g, or t
  misc_feature (368)..(368): n is a, c, g, or t
nctctcttgtttaactggtttgattttgtgatatcttgtgttgttgattagtgatgttggtttgttgttgtgttagtatttgtcgtaacgagctgctgtgatgtacgagtagggaaatgttgtagtatccttgagattgaggttgcggacgtagacgatgcattgttacgtcgtgttttccatgtggtttgtggtctattgcttggtaagatgagtagttgtgttgctgcttgtacgcagttttgtcgatgttttttaaggacagttatgtatttgtgggttgcattgatctgttcgtttgtgtactttgcattgtttgttcccgcctgttgtgttgtctcctgtctcttgtgctttggtgtgatganctcgtgctacgtctgtgttggcgtgttatattgtgttctggccgctctgactaggtcgtcaccctgctgtggtggctcgtcgcgtgtgcgtgttgttgtgttgtggtcttctgcgtttgctccacttatctgatggggttcatgtttcctatattttgtaggctgtatcactcgcgatcgtatttcgtctcttgtttggctcccattgtgggtcaagtcctcactttatgcgtatctacatgcttgctctagctatggcgcagacctgctcgtgcgtggtgcgcctgtgcgatggtacctaattccttctggtgtttctgcgttgtgtggtgcatctctcaagtggggatgctcccattttgttcagcctgctatagtgtggctagtcgagtgttttctcgtggtgcctactgtgggcccggttgcgatgcgtgtcagactcttgttggggtctcgcgccgcgctctttgcgttgtggttagtgtatcttctgcgcctggggtgctcgctcatgcctggtcgaggtgttctctgtctacgccgttgcgcctctagcctgatctctttgtggtgcctcttctcttgtggcctcctcctatgagcccgctgccctatggtggtccctcggggcagcttgtcgggtctacccgtgctcgttctccacttctagcgtctccagttacgccggcactgatactggatatggatggatggtgccccctcgttctgttcttcttccgctcgacgccttatttgtgctcccatgaggggtttcacctcctggagtgggcacaggtggcggactggagggacaagaggggagagaaaaggggcgagacaccccacgtgacgagaatcttggccatgatggcacttgcacacgccagcgcatcagtgcacacttgacattccattgtcacccgcccacatctcgagccccctggatgtcccctgtcccccaccactctgcactccatggccaccccgtgccccccgtaggcagcctttttgctataagaaaatcgcagacgcagcagctgggacccctccccacctcaatgcctgcccatttaatccgccaaccagcccta

SEQ ID NO: 562725 - DNA, 173 bp, Homo sapiens
ggtgatctagaggatcgtcacactgggttcgagttcagtgtctcctgctgtgagaacaagtggatgtcctctccccggccctcctgctgaagtggcttgttgctctcagtgcccgtgcactgggctccaagactctggctcctcctgtcaggtcactgagctctgataggcct

SEQ ID NO: 562726 - DNA, 317 bp, Homo sapiens
cccgtactttgatcgcggagaataaagatgaggaaaagacaaaacatctctaaggattattctgtatagtatttgacgtttaacctatcttatttctgcaagccatatcccagcaagtatcattgggagtttcatccgttatgtggtgatactatgtccattttattctcaattagtatatattaccaatgtgctggctatatgctcaaggtccttttagagaagtgagttttgagcatctagataaacactacttgttaaagtataaacatacactcctataaaaatcatcaccctcattgctttagacgttttat

SEQ ID NO: 562727 - DNA, 198 bp, Homo sapiens
agtattgtcgtcttcgacgaaggacacatatactactagccagtaaccagccaaatgtccggtgacgatcccgtaccctctttcctagtctcatgtcgaatatctttatgtcaagggacttcctgacggtcttccttttgagaaggccatctacttacgtgcattcctcgcctgggacacggtagtcattactatgtc

SEQ ID NO: 562728 - DNA, 1271 bp, Homo sapiens
taattcacaggcccttttttttttgtctgaaacatcaaggcctttcctccccgtggcagtggcacaagggagggccaactctcctcaggaggcggccacgcctgccaccagcagcaggcccattggggtgtggcagggctcagtgggcggcaaaaacagcgcctctcagtttgccgtaacaggcgtggcaactcctcaggactccgtgggcttctcgataggactttgaccaagcaagcaacatttaaggaccacctttccccgttcgcagcttaaacccataaggctttgtgaataaccctcctgtgcgtggaatcttgcgtgtggccacgggcaggaccacacaaaatttgccagcattctttacccatgtgttcgtttcgcagggcggtttatctcccagagcctctcgctccagtggccgcccggaatttcctccggggcgggaaaaccgccttggattaaccctccggaaagagcaccaccctttttgttttgtctcaggcgcctacaaggcgccccggtttggggtcaaaaaggcggagaccgccaataagggcggttgtaaacgcttcataaggattcaagggagagggttaaattggaaaacatctccagagaaaataaaagcttttggccgggccgtgtgagaaccccttgtttaacccggtatatttcctgaaaaacactgtgggaggggggcctttacaaagaggcttcctaaactgcgcgatgcactccaagataaaccagggggggggccctcaggggtgtcccgaagattaattctcttcgagaacacaaccccacactattcccatttttttggcggcccaaaacccacacaccaggcaacccccctttaaaaatttcctctccggaaaatatttcccctagccgggcaaagtggccgcccacagcttatttacacgggagtaatacaacagacgatactcgtggcgtgactattctgacgaacaacacgcgcgattgaccacaactactattgttgcacccaataagaggacccttaatggggggaaaaaataccccacaaggttgatacacccccgttagtttcacaagggtgtaacaccttggggatgtaccccaaattagtttgcccccccaacaatcatatcctggtgatgcccccaccttgtggtgctatctttccccacaaaacaaacgggcaccgaaaatataagtgaaaaggcaagggaccaataaacaggagaactattcatttacaccaaagacgcttcagcaaa

SEQ ID NO: 562729 - DNA, 709 bp, Homo sapiens
aaccaacgtgatgtcacagtacagtttgcacgacatctacgtacaaacatagctcagtttttctggtcaccaaagcaaatatgtggttaggttcgtgtatgcagagaccatctagtaggagggccctataaggcaccctccacttatgcctgaggagatacaaaagcagaagtaattgtgcatctgtactatgggcacagagagggttgcagaggatccttgtgaaacactattaaaaagatgacgagtggggagaagtgcgaggaaagaaggaaattagtctgactggttttctggcctgcaccattgattcaatggagactggcgggaggaaatggaagactagggttggagatgggatgggtggggcaagggatggaaaggaaaaggcagacaactaatgcgttccatttataacaagtaatatatatcaaagacttaaaggagattaaagaccaatcagaataatttggcaactttaattcttaggaagatcaaagttccctccaaacctaatttgatgttttattactaaaagcaaagaccagtatggtacagtattactccagagaaattaaaggacaatccttagggcggcttcacccacattcattttatgaatggatacctcccctagctcagaatgcttagaggaggtactgctaccattacatggttccttattacattgaaaagtgctgacagttgg

SEQ ID NO: 562730 - DNA, 370 bp, Homo sapiens
  misc_feature (60)..(60): n is a, c, g, or t
atgtcgagatagggcacgacaaagcccctcggagccagtctttctgctgtcccatccccntttcctagcagagcatatgcgtgcatgcatgcgtgtgttaatagccacactcatggggaggatcaggtccttctgtcaccctccttcagagcttacacagctctgataagaaactatttgtcaaaacaaatgtcatttctgagaacacaattttacatgcaccgatggcctgtcacaatttttttttttttaaatggaacagtccaattttacttcatgagtaaatgcccattaaaatacagggccacctctatggcaacccaaggcagaaacttccataccggttaatttgaagcagtaagaaagacta

SEQ ID NO: 562731 - DNA, 949 bp, Homo sapiens
agcgggtggggaggaaagtgtgccatggcggagcctgtggggaagcggggccgctggtccggaggtagcggtgccggccgagggggtcggggcggctggggcggtcggggccggcgtcctcgggcccagcggtctccatcccggggcacgctggacgtagtgtctgtggacttggtcaccgacagcgatgaggaaattctggaggtcgccaccgctcgcggtgccgcggacgaggttgaggtggagcccccggagcccccggggccggtcgcgtcccgggataacagcaacagtgacagcgaaggggaggacaggcggcccgcaggacccccgcgggagccggtcaggcggcggcggcggctggtgctggatccgggggaggcgccgctggttccggtgtactcggggaaggttaaaagcagccttcgccttatcccagatgatctatccctcctgaaactctaccctccaggggatgaggaagaggcagagctggcagattcgagtggtctctaccatgagggctccccatcaccaggctctccctggaagacaaagctgaggactaaggataaagaagagaagaaaaagacagagtttctgtgagtgaggccagggcccttgggccctgggagcaggaagtgagttggaggggtaagcggaggcaggcaggactcttgggtgactcctgaaaggttaagaagaagggatagaaggactgttgagtttcatgtggggaatgaatcgcttggggaaaagaggtggcttaccccggagggtgacagtgaacccttcaggatcacccttgggagtggattctgagaccctagtaatgtgagcttaaggtatggttccaatccagcttccctgtcctctctgtgcttctctttcttcatctataaaaccccgttttatagcctgggaaacatagagagaccctgtctctaca

SEQ ID NO: 562732 - DNA, 211 bp, Homo sapiens
actaacaaggcatgtcgtattgtgtttagctcatccaaaggtgttacctggtttcaatgaacctaacctcattcttgtgtcttcagtgtggctgtattagctgatccatctgtaacacaggagtgatccttggtgaggattgtatttcagaaccaccaactgctcttgacaattgttaacccgctaggctcctttggttaggtctacctgg

SEQ ID NO: 562733 - DNA, 4093 bp, Homo sapiens
agcgggtggggaggaaagtgtgccatggcggagcctgtggggaagcggggccgctggtccggaggtagcggtgccggccgagggggtcggggcggctggggcggtcggggccggcgtcctcgggcccagcggtctccatcccggggcacgctggacgtagtgtctgtggacttggtcaccgacagcgatgaggaaattctggaggtcgccaccgctcgcggtgccgcggacgaggttgaggtggagcccccggagcccccggggccggtcgcgtcccgggataacagcaacagtgacagcgaaggggaggacaggcggcccgcaggacccccgcgggagccggtcaggcggcggcggcggctggtgctggatccgggggaggcgccgctggttccggtgtactcggggaaggttaaaagcagccttcgccttatcccagatgatctatccctcctgaaactctaccctccaggggatgaggaagaggcagagctggcagattcgagtggtctctaccatgagggctccccatcaccaggctctccctggaagacaaagctgaggactaaggataaagaagagaagaaaaagacagagtttctggatctggacaactctcctctgtccccaccttcaccaaggaccaaaagcagaacgcatactcgggcactcaagaagttaagtgaggtgaacaagcgcctccaggatctccgttcctgtctgagccccaagccacctcagggtcaagagcaacagggccaagaggatgaagtggtcttggtggaagggcccaccctcccagagaccccccgactcttcccactcaaaatccgttgccgggctgacctggtcagattgcccctcaggatgtcggagcccctgcagagtgtggtggaccacatggccacccaccttggggtgtccccaagcaggatccttttgctttttggagagacagagctatcacctactgccactcccaggaccctaaagctcggagtggctgacatcattgactgtgtggtactaacaagttctccagaggccacagagacgtcccaacagctccagctccgggtgcagggaaaggagaaacaccagacactggaagtctcactgtctcgagattcccctctaaagaccctcatgtcccactatgaggaggccatgggactgtcgggacggaagctctccttcttctttgatgggacaaagctttcaggcagggagctgccagctgacctgggcatggaatctggggacctcattgaggtctggggctgacaccccactccctgtttgacggcccagcctggacttggggagaatgactttcccttttttgccccataagggctagcataagctgaggtagaacttatctttaagctgcagcaaaatcaaggagtgacttttgtcccctctcctgttgaccctggtttagagccgttaaccacttggtgagttatgtgggtgttgttgccctgggtggcctgtggctccgtccacaagtcatgctgagttttgcagcctctgtgacttggagatgtcccttcacccctcccctttcaccaccatcctcttttcctcatggaaatgtctgctttatgaaactatgcacatattgaaagtgagttgaaacaaatgagggttgggtaggagcttccaggcctgggatttacaccacgcctagcccagcagaggccttagtcccatttggggcttgggagtgacatttgcttgaggcttatacactggtgtggttgcctggcttgcaggaaatgaccaagctcacacatgctggctgaagcgtaagcagacaactgaggtactcttttgaaggatgaaggtggtggattctcagccctgggggtcttcctcacctgaggacccttcagagccaccctttctagtttgcatttcctggtgcacacatttaaggcataacagcacattcatccctttggtttgggatctcaggaatacagtcccatgcaaagattctctggttttatggcttttttccctttctttacaccatcctctcccataagcacccatgtctttgaatatgaatgtatttgtaaaataccacgtttcatgtgtgaatatgtgcttttactgtacatagtgctattgtgcaataggtcttatgctgttttcactcaatgtgtgctaagatctagccccattgactcttctagaaatgcagtattgctttgacctgccatgtggcactccacaatgtcaattgcagtttacacacattgcctaaagtgggggacacctgggtgcccctgaccccttggcaccggatacaggccacgataaacatcctttcgtgtgttcccttctgtgcttgtgtggcatgtgtacccaggatgggcctataggtcacagaggtcagtttctctttggttttccagattttctttagaacggtgactgaccctcctacttgaggccgcccttttctccttatccttgccagcacttgtattgccagactacctaatttttgccagtctcatgggtagatagtggtgcagtgctttaacatacattcatctgatcagcattaatttggggaattttttcacttagcctttctggtttcccttcctgtgcattgcccattttctcatggagtttcttatcttttttggtttattctcaggagttgcttgtacattcttgggcaattgcagataattccaagaatgcatatttgggctgggtatggaggttcactggtaatcccagcactttgggaggcccaggcagaaggatcgctgcagcccaggagttcgagactagcctgggcaacatagcgagacctcgtctctacaaaaaaaaattaaaaagggggctttgggaggccaaggcgggcagatcatgagggcaggagattgagaccctcctggccaacatggtgaaaccccgtctctactaaaatacaaaaaattagctgggcatggtggcgcacacctgtagtcccagctactctggaggctgaggcaggggaatcgcttaaacccaggaggcggagattgcagtgagccaaggttccaccactgcactccagcctggcgacagagcaaggctccactcaaaaaaaaaatttaaaggggaaaaaattgaaattttctttgtatctaggggtatccgtcactgaacagaaattcttaattttggctaggcgtgatggctcaggtctgtaatcccagcactttcggtggccggggtgggtggatcacttgaggccaggagttcaagaccaccctgaccaacttggtgaaatcccatctctactaaaaatacaaaaattagctgggtgcagtggcgcatgcttgtaatcccagctactcaggaggcagaggcaggagaatcacttgaacccgggaggtggaggctgcagtgaacagagacagtgccactgcacatcagcctgagtgacagagagactttgtctcaaaaaaaaaaagaaaattttaattttaatgtagacagtatgaattatcttgttctgcagttggttgctttttgattgcttatttaatagagttgttaagatattttacatcttctcctgttagctgttcagcttttcctttcatattgagaacactacacagtgctgaagtccagctggtacacaccggggtgacaccttggctgcatctgttctcaacagtcagacacttcttctaattggttgatgctgggctgtactggttgctaaatattgcacatcattttaaaactatttgagatgcacttttgtactcaggaggccaaggcaggaggattgcttgagcccaggagtttgagaccagcctgggcaacacagcgagaccttgtctcttaaaaaaaaaaaaaaaaaaaaaatgagagaaatcggctgggcatggtttctcatgcctgtaatcccagaactttgggaggctgaggcaggtggatcaccggaggttaggaattcaagactgaaaccttgtctctactgaaaatacaaaaaaaaaaaaatataaacaaaatgccctgttgtgttggggcaaggcccctgtgaaaccccagtaattccgggggagggtag

SEQ ID NO: 562734 - DNA, 300 bp, Homo sapiens
ccaaagtgattacaggcatgagcacagtgtctcgcccaatagttttctgtgagtgaatataactgcatggtaaatttaatcaaagggattaaaggatttttcttcttttggaaaaaaattagggggggaatttattatatatgagatttccttccctatatgtgggtaaattgtgaaatgtagggaaggaaatgatgctctactctaaatccctatatatagagtatacgcttatatagggaaatatatctctgctgcacagcactaccacaatagcgcaatagtgttagaggcgagagc

SEQ ID NO: 562735 - DNA, 4063 bp, Homo sapiens
agcgggtggggaggaaagtgtgccatggcggagcctgtggggaagcggggccgctggtccggaggtagcggtgccggccgagggggtcggggcggctggggcggtcggggccggcgtcctcgggcccagcggtctccatcccggggcacgctggacgtagtgtctgtggacttggtcaccgacagcgatgaggaaattctggaggtcgccaccgctcgcggtgccgcggacgaggttgaggtggagcccccggagcccccggggccggtcgcgtcccgggataacagcaacagtgacagcgaaggggaggacaggcggcccgcaggacccccgcgggagccggtcaggcggcggcggcggctggtgctggatccgggggaggcgccgctggttccggtgtactcggggaaggttaaaagcagccttcgccttatcccagatgatctatccctcctgaaactctaccctccaggggatgaggaagaggcagagctggcagattcgagtggtctctaccatgagggctccccatcaccaggctctccctggaagacaaagctgaggactaaggataaagaagagaagaaaaagacagagtttctggatctggacaactctcctctgtccccaccttcaccaaggaccaaaagcagaacgcatactcgggcactcaagaagttaagtgaggtgaacaagcgcctccaggatctccgttcctgtctgagccccaagccacctcagggtcaagagcaacagggccaagaggatgaagtggtcttggtggaagggcccaccctcccagagaccccccgactcttcccactcaaaatccgttgccgggctgacctggtcagattgcccctcaggatgtcggagcccctgcagagtgtggtggaccacatggccacccaccttggggtgtccccaagcaggatccttttgctttttggagagacagagctatcacctactgccactcccaggaccctaaagctcggagtggctgacatcattgactgtgtggtactaacaagttctccagaggccacagagacgtcccaacagctccagctccgggtgcagggaaaggagaaacaccagacactggaagtctcactgtctcgagattcccctctaaagaccctcatgtcccactatgaggaggccatgggactgtcgggacggaagctctccttcttctttgatgggacaaagctttcaggcagggagctgccagctgacctgggcatggaatctggggacctcattgaggtctggggctgacaccccactccctgtttgacggcccagcctggacttggggagaatgactttcccttttttgccccataagggctagcataagctgaggtagaacttatctttaagctgcagcaaaatcaaggagtgacttttgtcccctctcctgttgaccctggtttagagccgttaaccacttggtgagttatgtgggtgttgttgccctgggtggcctgtggctccgtccacaagtcatgctgagttttgcagcctctgtgacttggagatgtcccttcacccctcccctttcaccaccatcctcttttcctcatggaaatgtctgctttatgaaactatgcacatattgaaagtgagttgaaacaaatgagggttgggtaggagcttccaggcctgggatttacaccacgcctagcccagcagaggccttagtcccatttggggcttgggagtgacatttgcttgaggcttatacactggtgtggttgcctggcttgcaggaaatgaccaagctcacacatgctggctgaagcgtaagcagacaactgaggtactcttttgaaggatgaaggtggtggattctcagccctgggggtcttcctcacctgaggacccttcagagccaccctttctagtttgcatttcctggtgcacacatttaaggcataacagcacattcatccctttggtttgggatctcaggaatacagtcccatgcaaagattctctggttttatggcttttttccctttctttacaccatcctctcccataagcacccatgtctttgaatatgaatgtatttgtaaaataccacgtttcatgtgtgaatatgtgcttttactgtacatagtgctattgtgcaataggtcttatgctgttttcactcaatgtgtgctaagatctagccccattgactcttctagaaatgcagtattgctttgacctgccatgtggcactccacaatgtcaattgcagtttacacacattgcctaaagtgggggacacctgggtgcccctgaccccttggcaccggatacaggccacgataaacatcctttcgtgtgttcccttctgtgcttgtgtggcatgtgtacccaggatgggcctataggtcacagaggtcagtttctctttggttttccagattttctttagaacggtgactgaccctcctacttgaggccgcccttttctccttatccttgccagcacttgtattgccagactacctaatttttgccagtctcatgggtagatagtggtgcagtgctttaacatacattcatctgatcagcattaatttggggaattttttcacttagcctttctggtttcccttcctgtgcattgcccattttctcatggagtttcttatcttttttggtttattctcaggagttgcttgtacattcttgggcaattgcagataattccaagaatgcatatttgggctgggtatggaggttcactggtaatcccagcactttgggaggcccaggcagaaggatcgctgcagcccaggagttcgagactagcctgggcaacatagcgagacctcgtctctacaaaaaaaaattaaaaagggggctttgggaggccaaggcgggcagatcatgagggcaggagattgagaccctcctggccaacatggtgaaaccccgtctctactaaaatacaaaaaattagctgggcatggtggcgcacacctgtagtcccagctactctggaggctgaggcaggggaatcgcttaaacccaggaggcggagattgcagtgagccaaggttccaccactgcactccagcctggcgacagagcaaggctccactcaaaaaaaaaatttaaaggggaaaaaattgaaattttctttgtatctaggggtatccgtcactgaacagaaattcttaattttggctaggcgtgatggctcaggtctgtaatcccagcactttcggtggccggggtgggtggatcacttgaggccaggagttcaagaccaccctgaccaacttggtgaaatcccatctctactaaaaatacaaaaattagctgggtgcagtggcgcatgcttgtaatcccagctactcaggaggcagaggcaggagaatcacttgaacccgggaggtggaggctgcagtgaacagagacagtgccactgcacatcagcctgagtgacagagagactttgtctcaaaaaaaaaaagaaaattttaattttaatgtagacagtatgaattatcttgttctgcagttggttgctttttgattgcttatttaatagagttgttaagatattttacatcttctcctgttagctgttcagcttttcctttcatattgagaacactacacagtgctgaagtccagctggtacacaccggggtgacaccttggctgcatctgttctcaacagtcagacacttcttctaattggttgatgctgggctgtactggttgctaaatattgcacatcattttaaaactatttgagatgcacttttgtactcaggaggccaaggcaggaggattgcttgagcccaggagtttgagaccagcctgggcaacacagcgagaccttgtctcttaaaaaaaaaaaaaaaaaaaacatgcctgtaatcccagaactttgggaggctgaggcaggtggatcaccggaggttaggaattcaagactgaaaccttgtctctactgaaaatacaaaaaaaaaaaaatataaacaaaatgccctgttgtgttggggcaaggcccctgtgaaaccccagtaattccgggggagggtag

SEQ ID NO: 562736 - DNA, 84 bp, Homo sapiens
  misc_feature (4)..(4): n is a, c, g, or t
  misc_feature (8)..(8): n is a, c, g, or t
gggnatangcatccatgactatcacagatgaaaacaaaatagaatgtcattgggtcagttatttttccccactgaggtataaaa

SEQ ID NO: 562737 - DNA, 4199 bp, Homo sapiens
agcgggtggggaggaaagtgtgccatggcggagcctgtggggaagcggggccgctggtccggaggtagcggtgccggccgagggggtcggggcggctggggcggtcggggccggcgtcctcgggcccagcggtctccatcccggggcacgctggacgtagtgtctgtggacttggtcaccgacagcgatgaggaaattctggaggtcgccaccgctcgcggtgccgcggacgaggttgaggtggagcccccggagcccccggggccggtcgcgtcccgggataacagcaacagtgacagcgaaggggaggacaggcggcccgcaggacccccgcgggagccggtcaggcggcggcggcggctggtgctggatccgggggaggcgccgctggttccggtgtactcggggaaggttaaaagcagccttcgccttatcccagatgatctatccctcctgagtagctgggactacagctgtgttctactatgcctggctaattatgtagaaatagggtctccccatcttgcccagcctggtcttggactcctgggctcgagcgatcctcctggctcagcctccaaaagtgctgggattacaggtgtgagccattgcgtccgactatgcttgattgtccaaggatctgatttctaggattgtggggccagtctctctccattgcctccgtcctgctgtctcttgcttctacagggatctggacaactctcctctgtccccaccttcaccaaggaccaaaagcagaacgcatactcgggcactcaagaagttaagtgaggtgaacaagcgcctccaggatctccgttcctgtctgagccccaagccacctcagggtcaagagcaacagggccaagaggatgaagtggtcttggtggaagggcccaccctcccagagaccccccgactcttcccactcaaaatccgttgccgggctgacctggtcagattgcccctcaggatgtcggagcccctgcagagtgtggtggaccacatggccacccaccttggggtgtccccaagcaggatccttttgctttttggagagacagagctatcacctactgccactcccaggaccctaaagctcggagtggctgacatcattgactgtgtggtactaacaagttctccagaggccacagagacgtcccaacagctccagctccgggtgcagggaaaggagaaacaccagacactggaagtctcactgtctcgagattcccctctaaagaccctcatgtcccactatgaggaggccatgggactgtcgggacggaagctctccttcttctttgatgggacaaagctttcaggcagggagctgccagctgacctgggcatggaatctggggacctcattgaggtctggggctgacaccccactccctgtttgacggcccagcctggacttggggagaatgactttcccttttttgccccataagggctagcataagctgaggtagaacttatctttaagctgcagcaaaatcaaggagtgacttttgtcccctctcctgttgaccctggtttagagccgttaaccacttggtgagttatgtgggtgttgttgccctgggtggcctgtggctccgtccacaagtcatgctgagttttgcagcctctgtgacttggagatgtcccttcacccctcccctttcaccaccatcctcttttcctcatggaaatgtctgctttatgaaactatgcacatattgaaagtgagttgaaacaaatgagggttgggtaggagcttccaggcctgggatttacaccacgcctagcccagcagaggccttagtcccatttggggcttgggagtgacatttgcttgaggcttatacactggtgtggttgcctggcttgcaggaaatgaccaagctcacacatgctggctgaagcgtaagcagacaactgaggtactcttttgaaggatgaaggtggtggattctcagccctgggggtcttcctcacctgaggacccttcagagccaccctttctagtttgcatttcctggtgcacacatttaaggcataacagcacattcatccctttggtttgggatctcaggaatacagtcccatgcaaagattctctggttttatggcttttttccctttctttacaccatcctctcccataagcacccatgtctttgaatatgaatgtatttgtaaaataccacgtttcatgtgtgaatatgtgcttttactgtacatagtgctattgtgcaataggtcttatgctgttttcactcaatgtgtgctaagatctagccccattgactcttctagaaatgcagtattgctttgacctgccatgtggcactccacaatgtcaattgcagtttacacacattgcctaaagtgggggacacctgggtgcccctgaccccttggcaccggatacaggccacgataaacatcctttcgtgtgttcccttctgtgcttgtgtggcatgtgtacccaggatgggcctataggtcacagaggtcagtttctctttggttttccagattttctttagaacggtgactgaccctcctacttgaggccgcccttttctccttatccttgccagcacttgtattgccagactacctaatttttgccagtctcatgggtagatagtggtgcagtgctttaacatacattcatctgatcagcattaatttggggaattttttcacttagcctttctggtttcccttcctgtgcattgcccattttctcatggagtttcttatcttttttggtttattctcaggagttgcttgtacattcttgggcaattgcagataattccaagaatgcatatttgggctgggtatggaggttcactggtaatcccagcactttgggaggcccaggcagaaggatcgctgcagcccaggagttcgagactagcctgggcaacatagcgagacctcgtctctacaaaaaaaaattaaaaagggggctttgggaggccaaggcgggcagatcatgagggcaggagattgagaccctcctggccaacatggtgaaaccccgtctctactaaaatacaaaaaattagctgggcatggtggcgcacacctgtagtcccagctactctggaggctgaggcaggggaatcgcttaaacccaggaggcggagattgcagtgagccaaggttccaccactgcactccagcctggcgacagagcaaggctccactcaaaaaaaaaatttaaaggggaaaaaattgaaattttctttgtatctaggggtatccgtcactgaacagaaattcttaattttggctaggcgtgatggctcaggtctgtaatcccagcactttcggtggccggggtgggtggatcacttgaggccaggagttcaagaccaccctgaccaacttggtgaaatcccatctctactaaaaatacaaaaattagctgggtgcagtggcgcatgcttgtaatcccagctactcaggaggcagaggcaggagaatcacttgaacccgggaggtggaggctgcagtgaacagagacagtgccactgcacatcagcctgagtgacagagagactttgtctcaaaaaaaaaaagaaaattttaattttaatgtagacagtatgaattatcttgttctgcagttggttgctttttgattgcttatttaatagagttgttaagatattttacatcttctcctgttagctgttcagcttttcctttcatattgagaacactacacagtgctgaagtccagctggtacacaccggggtgacaccttggctgcatctgttctcaacagtcagacacttcttctaattggttgatgctgggctgtactggttgctaaatattgcacatcattttaaaactatttgagatgcacttttgtactcaggaggccaaggcaggaggattgcttgagcccaggagtttgagaccagcctgggcaacacagcgagaccttgtctcttaaaaaaaaaaaaaaaaaaaaaatgagagaaatcggctgggcatggtttctcatgcctgtaatcccagaactttgggaggctgaggcaggtggatcaccggaggttaggaattcaagactgaaaccttgtctctactgaaaatacaaaaaaaaaaaaatataaacaaaatgccctgttgtgttggggcaaggcccctgtgaaaccccagtaattccgggggagggtag

SEQ ID NO: 562738 - DNA, 331 bp, Homo sapiens
gagctgtggtcgctgctgtgatgtgtaggaggaagagctcacgtggatatggagggagctactctcaggctgcgtgctggggcagtgcctagggctctgatgtgtctctcacagcttgaaaagcttgacacatctgacttgtgagggactgaaatgaaggattgctttacgcttcccctttgagacttcaatagcctatggcttccctttttgcataggcacctgaatgtgcttgcgaacctgttaccataatgtgaggaggtggagagacagcccacctccgtgtctaccgggaccccagtacccatgctgacttgtgtttactccccat

SEQ ID NO: 562739 - DNA, 3368 bp, Homo sapiens
ataccttgccaggtaaatatgatgaaactcacagctgaggagcttagcaagtagctaaggccagagcttgtgtttgggtggtgtggctgggggcatggatttcaaggcaggaagacctctttatgcttgttgtccccatccctagtcggagcccctgcagagtgtggtggaccacatggccacccaccttggggtgtccccaagcaggatccttttgctttttggagagacagagctatcacctactgccactcccaggaccctaaagctcggagtggctgacatcattgactgtgtggtactaacaagttctccagaggccacagagacgtcccaacagctccagctccgggtgcagggaaaggagaaacaccagacactggaagtctcactgtctcgagattcccctctaaagaccctcatgtcccactatgaggaggccatgggactgtcgggacggaagctctccttcttctttgatgggacaaagctttcaggcagggagctgccagctgacctgggcatggaatctggggacctcattgaggtctggggctgacaccccactccctgtttgacggcccagcctggacttggggagaatgactttcccttttttgccccataagggctagcataagctgaggtagaacttatctttaagctgcagcaaaatcaaggagtgacttttgtcccctctcctgttgaccctggtttagagccgttaaccacttggtgagttatgtgggtgttgttgccctgggtggcctgtggctccgtccacaagtcatgctgagttttgcagcctctgtgacttggagatgtcccttcacccctcccctttcaccaccatcctcttttcctcatggaaatgtctgctttatgaaactatgcacatattgaaagtgagttgaaacaaatgagggttgggtaggagcttccaggcctgggatttacaccacgcctagcccagcagaggccttagtcccatttggggcttgggagtgacatttgcttgaggcttatacactggtgtggttgcctggcttgcaggaaatgaccaagctcacacatgctggctgaagcgtaagcagacaactgaggtactcttttgaaggatgaaggtggtggattctcagccctgggggtcttcctcacctgaggacccttcagagccaccctttctagtttgcatttcctggtgcacacatttaaggcataacagcacattcatccctttggtttgggatctcaggaatacagtcccatgcaaagattctctggttttatggcttttttccctttctttacaccatcctctcccataagcacccatgtctttgaatatgaatgtatttgtaaaataccacgtttcatgtgtgaatatgtgcttttactgtacatagtgctattgtgcaataggtcttatgctgttttcactcaatgtgtgctaagatctagccccattgactcttctagaaatgcagtattgctttgacctgccatgtggcactccacaatgtcaattgcagtttacacacattgcctaaagtgggggacacctgggtgcccctgaccccttggcaccggatacaggccacgataaacatcctttcgtgtgttcccttctgtgcttgtgtggcatgtgtacccaggatgggcctataggtcacagaggtcagtttctctttggttttccagattttctttagaacggtgactgaccctcctacttgaggccgcccttttctccttatccttgccagcacttgtattgccagactacctaatttttgccagtctcatgggtagatagtggtgcagtgctttaacatacattcatctgatcagcattaatttggggaattttttcacttagcctttctggtttcccttcctgtgcattgcccattttctcatggagtttcttatcttttttggtttattctcaggagttgcttgtacattcttgggcaattgcagataattccaagaatgcatatttgggctgggtatggaggttcactggtaatcccagcactttgggaggcccaggcagaaggatcgctgcagcccaggagttcgagactagcctgggcaacatagcgagacctcgtctctacaaaaaaaaattaaaaagggggctttgggaggccaaggcgggcagatcatgagggcaggagattgagaccctcctggccaacatggtgaaaccccgtctctactaaaatacaaaaaattagctgggcatggtggcgcacacctgtagtcccagctactctggaggctgaggcaggggaatcgcttaaacccaggaggcggagattgcagtgagccaaggttccaccactgcactccagcctggcgacagagcaaggctccactcaaaaaaaaaatttaaaggggaaaaaattgaaattttctttgtatctaggggtatccgtcactgaacagaaattcttaattttggctaggcgtgatggctcaggtctgtaatcccagcactttcggtggccggggtgggtggatcacttgaggccaggagttcaagaccaccctgaccaacttggtgaaatcccatctctactaaaaatacaaaaattagctgggtgcagtggcgcatgcttgtaatcccagctactcaggaggcagaggcaggagaatcacttgaacccgggaggtggaggctgcagtgaacagagacagtgccactgcacatcagcctgagtgacagagagactttgtctcaaaaaaaaaaagaaaattttaattttaatgtagacagtatgaattatcttgttctgcagttggttgctttttgattgcttatttaatagagttgttaagatattttacatcttctcctgttagctgttcagcttttcctttcatattgagaacactacacagtgctgaagtccagctggtacacaccggggtgacaccttggctgcatctgttctcaacagtcagacacttcttctaattggttgatgctgggctgtactggttgctaaatattgcacatcattttaaaactatttgagatgcacttttgtactcaggaggccaaggcaggaggattgcttgagcccaggagtttgagaccagcctgggcaacacagcgagaccttgtctcttaaaaaaaaaaaaaaaaaaaaaatgagagaaatcggctgggcatggtttctcatgcctgtaatcccagaactttgggaggctgaggcaggtggatcaccggaggttaggaattcaagactgaaaccttgtctctactgaaaatacaaaaaaaaaaaaatataaacaaaatgccctgttgtgttggggcaaggcccctgtgaaaccccagtaattccgggggagggtag

SEQ ID NO: 562740 - DNA, 423 bp, Homo sapiens
  misc_feature (375)..(375): n is a, c, g, or t
gactctatgatgtatcccagctcgcttaagatgctcccgggaaagtcacttatgagaccaccagtttgccttgttggcttgaagctcctcagaggagggcgggaacagagtgaccgaggggcagccttgggctgacctaggacggtcagcttggtccctccgccgaacacccaaggataaccttcacggctgtctgctgattgacagaaatactcagcctcgtcttctgcctggactccactgatggtcagcgtgaccgttgtccctaacctggagccagaaaatcgctcagggatccctgagggcctctcaatgtctttatatatcaccgtcacaggggcctggccctggcctctgttggcaccaataaacatnagtggttgggcaaaacatctgcagagcaggttatcctggccgtctgtc

SEQ ID NO: 562741 - DNA, 3761 bp, Homo sapiens
agcgggtggggaggaaagtgtgccatggcggagcctgtggggaagcggggccgctggtccggaggtagcggtgccggccgagggggtcggggcggctggggcggtcggggccggcgtcctcgggcccagcggtctccatcccggggcacgctggacgtagtgtctgtggacttggtcaccgacagcgatgaggaaattctggaggtcgccaccgctcgcggtgccgcggacgaggttgaggtggagcccccggagcccccggggccggtcgcgtcccgggataacagcaacagtgacagcgaaggggaggacaggcggcccgcaggacccccgcgggagccggtcaggcggcggcggcggctggtgctggatccgggggaggcgccgctggttccggtgtactcggggaaggttaaaagcagccttcgccttatcccagatgatctatccctcctgaaactctaccctccaggggatgaggaagaggcagagctggcagattcgagtggtctctaccatgagggctccccatcaccaggctctccctggaagacaaagctgaggactaaggataaagaagagaagaaaaagacagagtttctggatctggacaactctcctctgtccccaccttcaccaaggaccaaaagcagaacgcatactcgggcactcaagaagttaagtgaggtgaacaagcgcctccaggatctccgttcctgtctgagccccaagccacctcagggtcaagagcaacagggccaagaggatgaagtggtcttggtggaagggcccaccctcccagagaccccccgactcttcccactcaaaatccgttgccgggctgacctggtcagattgcccctcaggatgtcggagcccctgcagagtgtggtggaccacatggccacccaccttggggtgtccccaagcaggatccttttgctttttggagagacagagctatcacctactgccactcccaggaccctaaagctcggagtggctgacatcattgactgtgtggtactaacaagttctccagaggccacagagacgtcccaacagctccagctccgggtgcagggaaaggagaaacaccagacactggaagtctcactgtctcgagattcccctctaaagaccctcatgtcccactatgaggaggccatgggactgtcgggacggaagctctccttcttctttgatgggacaaagctttcaggcagggagctgccagctgacctgggcatggaatctggggacctcattgaggtctggggctgacaccccactccctgtttgacggcccagcctggacttggggagaatgactttcccttttttgccccataagggctagcataagctgaggtagaacttatctttaagctgcagcaaaatcaaggagtgacttttgtcccctctcctgttgaccctggtttagagccgttaaccacttggtgagttatgtgggtgttgttgccctgggtggcctgtggctccgtccacaagtcatgctgagttttgcagcctctgtgacttggagatgtcccttcacccctcccctttcaccaccatcctcttttcctcatggaaatgtctgctttatgaaactatgcacatattgaaagtgagttgaaacaaatgagggttgggtaggagcttccaggcctgggatttacaccacgcctagcccagcagaggccttagtcccatttggggcttgggagtgacatttgcttgaggcttatacactggtgtggttgcctggcttgcaggaaatgaccaagctcacacatgctggctgaagcgtaagcagacaactgaggtactcttttgaaggatgaaggtggtggattctcagccctgggggtcttcctcacctgaggacccttcagagccaccctttctagtttgcatttcctggtgcacacatttaaggcataacagcacattcatccctttggtttgggatctcaggaatacagtcccatgcaaagattctctggttttatggcttttttccctttctttacaccatcctctcccataagcacccatgtctttgaatatgaatgtatttgtaaaataccacgtttcatgtgtgaatatgtgcttttactgtacatagtgctattgtgcaataggtcttatgctgttttcactcaatgtgtgctaagatctagccccattgactcttctagaaatgcagtattgctttgacctgccatgtggcactccacaatgtcaattgcagtttacacacattgcctaaagtgggggacacctgggtgcccctgaccccttggcaccggatacaggccacgataaacatcctttcgtgtgttcccttctgtgcttgtgtggcatgtgtacccaggatgggcctataggtcacagaggtcagtttctctttggttttccagattttctttagaacggtgactgaccctcctacttgaggccgcccttttctccttatccttgccagcacttgtattgccagactacctaatttttgccagtctcatgggtagatagtggtgcagtgctttaacatacattcatctgatcagcattaatttggggaattttttcacttagcctttctggtttcccttcctgtgcattgcccattttctcatggagtttcttatcttttttggtttattctcaggagttgcttgtacattcttgggcaattgcagataattccaagaatgcatatttgggctgggtatggaggttcactggtaatcccagcactttgggaggaaggcgggcagatcatgagggcaggagattgagaccctcctggccaacatggtgaaaccccgtctctactaaaatacaaaaaattagctgggcatggtgccactgccttccagcctggatgaaagagcgagactctgcctcagatctcacttgaggccaggagttcaagaccaccctgaccaacttggtgaaatcccatctctactaaaaatacaaaaattagctgggtgcagtggcgcatgcttgtaatcccagctactcaggaggcagaggcaggagaatcacttgaacccgggaggtggaggctgcagtgaacagagacagtgccactgcacatcagcctgagtgacagagagactttgtctcaaaaaaaaaaagaaaattttaattttaatgtagacagtatgaattatcttgttctgcagttggttgctttttgattgcttatttaatagagttgttaagatattttacatcttctcctgttagctgttcagcttttcctttcatattgagaacactacacagtgctgaagtccagctggtacacaccggggtgacaccttggctgcatctgttctcaacagtcagacacttcttctaattggttgatgctgggctgtactggttgctaaatattgcacatcattttaaaactatttgagatgcacttttgtactcaggaggccaaggcaggaggattgcttgagcccaggagtttgagaccagcctgggcaacacagcgagaccttgtctcttaaaaaaaaaaaaaaaaaaaaaatgagagaaatcggctgggcatggtttctcatgcctgtaatcccagaactttgggaggctgaggcaggtggatcaccggaggttaggaattcaagactgaaaccttgtctctactgaaaatacaaaaaaaaaaaaatataaacaaaatgccctgttgtgttggggcaaggcccctgtgaaaccccagtaattccgggggagggtag

SEQ ID NO: 562742 - DNA, 112 bp, Homo sapiens
  misc_feature (21)..(21): n is a, c, g, or t
  misc_feature (45)..(45): n is a, c, g, or t
  misc_feature (67)..(67): n is a, c, g, or t
  misc_feature (70)..(71): n is a, c, g, or t
  misc_feature (101)..(101): n is a, c, g, or t
  misc_feature (112)..(112): n is a, c, g, or t
acccaccctccacctttaacncgaagtaacactgcaaatcgtttnatgaaaacactctcaaaactgnatnnatgtgttgataaaacagagaaaggagaaantagtagtcctn

SEQ ID NO: 562743 - DNA, 2593 bp, Homo sapiens
tactaataaaaataaatctgcctgtaaattatcttgaagtcctttacctggaacaagcactctctttttcaccaccatcctcttttcctcatggaaatgtctgctttatgaaactatgcacatattgaaagtgagttgaaacaaatgagggttgggtaggagcttccaggcctgggatttacaccacgcctagcccagcagaggccttagtcccatttggggcttgggagtgacatttgcttgaggcttatacactggtgtggttgcctggcttgcaggaaatgaccaagctcacacatgctggctgaagcgtaagcagacaactgaggtactcttttgaaggatgaaggtggtggattctcagccctgggggtcttcctcacctgaggacccttcagagccaccctttctagtttgcatttcctggtgcacacatttaaggcataacagcacattcatccctttggtttgggatctcaggaatacagtcccatgcaaagattctctggttttatggcttttttccctttctttacaccatcctctcccataagcacccatgtctttgaatatgaatgtatttgtaaaataccacgtttcatgtgtgaatatgtgcttttactgtacatagtgctattgtgcaataggtcttatgctgttttcactcaatgtgtgctaagatctagccccattgactcttctagaaatgcagtattgctttgacctgccatgtggcactccacaatgtcaattgcagtttacacacattgcctaaagtgggggacacctgggtgcccctgaccccttggcaccggatacaggccacgataaacatcctttcgtgtgttcccttctgtgcttgtgtggcatgtgtacccaggatgggcctataggtcacagaggtcagtttctctttggttttccagattttctttagaacggtgactgaccctcctacttgaggccgcccttttctccttatccttgccagcacttgtattgccagactacctaatttttgccagtctcatgggtagatagtggtgcagtgctttaacatacattcatctgatcagcattaatttggggaattttttcacttagcctttctggtttcccttcctgtgcattgcccattttctcatggagtttcttatcttttttggtttattctcaggagttgcttgtacattcttgggcaattgcagataattccaagaatgcatatttgggctgggtatggaggttcactggtaatcccagcactttgggaggcccaggcagaaggatcgctgcagcccaggagttcgagactagcctgggcaacatagcgagacctcgtctctacaaaaaaaaattaaaaagggggctttgggaggccaaggcgggcagatcatgagggcaggagattgagaccctcctggccaacatggtgaaaccccgtctctactaaaatacaaaaaattagctgggcatggtggcgcacacctgtagtcccagctactctggaggctgaggcaggggaatcgcttaaacccaggaggcggagattgcagtgagccaaggttccaccactgcactccagcctggcgacagagcaaggctccactcaaaaaaaaaatttaaaggggaaaaaattgaaattttctttgtatctaggggtatccgtcactgaacagaaattcttaattttggctaggcgtgatggctcaggtctgtaatcccagcactttcggtggccggggtgggtggatcacttgaggccaggagttcaagaccaccctgaccaacttggtgaaatcccatctctactaaaaatacaaaaattagctgggtgcagtggcgcatgcttgtaatcccagctactcaggaggcagaggcaggagaatcacttgaacccgggaggtggaggctgcagtgaacagagacagtgccactgcacatcagcctgagtgacagagagactttgtctcaaaaaaaaaaagaaaattttaattttaatgtagacagtatgaattatcttgttctgcagttggttgctttttgattgcttatttaatagagttgttaagatattttacatcttctcctgttagctgttcagcttttcctttcatattgagaacactacacagtgctgaagtccagctggtacacaccggggtgacaccttggctgcatctgttctcaacagtcagacacttcttctaattggttgatgctgggctgtactggttgctaaatattgcacatcattttaaaactatttgagatgcacttttgtactcaggaggccaaggcaggaggattgcttgagcccaggagtttgagaccagcctgggcaacacagcgagaccttgtctcttaaaaaaaaaaaaaaaaaaaaaatgagagaaatcggctgggcatggtttctcatgcctgtaatcccagaactttgggaggctgaggcaggtggatcaccggaggttaggaattcaagactgaaaccttgtctctactgaaaatacaaaaaaaaaaaaatataaacaaaatgccctgttgtgttggggcaaggcccctgtgaaaccccagtaattccgggggagggtag

SEQ ID NO: 562744 - DNA, 193 bp, Homo sapiens
cgatgtcacgacatcagtacttcattactcatttctgtatctcagctggtagcttttgtttcatatgtagtttaaaacttgtatagacctgactgcataaattttaatgttttttgataggcagtatgttaaatatattttctcaggttttcttctactatagatggtcccctttagaatagattttactgtg

SEQ ID NO: 562745 - DNA, 2979 bp, Homo sapiens
  misc_feature (2895)..(2895): n is a, c, g, or t
  misc_feature (2917)..(2917): n is a, c, g, or t
  misc_feature (2946)..(2946): n is a, c, g, or t
  misc_feature (2958)..(2958): n is a, c, g, or t
  misc_feature (2978)..(2978): n is a, c, g, or t
agcgggtggggaggaaagtgtgccatggcggagcctgtggggaagcggggccgctggtccggaggtagcggtgccggccgagggggtcggggcggctggggcggtcggggccggcgtcctcgggcccagcggtctccatcccggggcacgctggacgtagtgtctgtggacttggtcaccgacagcgatgaggaaattctggaggtcgccaccgctcgcggtgccgcggacgaggttgaggtggagcccccggagcccccggggccggtcgcgtcccgggataacagcaacagtgacagcgaaggggaggacaggcggcccgcaggacccccgcgggagccggtcaggcggcggcggcggctggtgctggatccgggggaggcgccgctggttccggtgtactcggggaaggttaaaagcagccttcgccttatcccagatgatctatccctcctgaaactctaccctccaggggatgaggaagaggcagagctggcagattcgagtggtctctaccatgagggctccccatcaccaggctctccctggaagacaaagctgaggactaaggataaagaagagaagaaaaagacagagtttctggatctggacaactctcctctgtccccaccttcaccaaggaccaaaagcagaacgcatactcgggcactcaagaagttaagtgaggtgaacaagcgcctccaggatctccgttcctgtctgagccccaagccacctcagggtcaagagcaacagggccaagaggatgaagtggtcttggtggaagggcccaccctcccagagaccccccgactcttcccactcaaaatccgttgccgggctgacctggtcagattgcccctcaggatgtcggagcccctgcagagtgtggtggaccacatggccacccaccttggggtgtccccaagcaggatccttttgctttttggagagacagagctatcacctactgccactcccaggaccctaaagctcggagtggctgacatcattgactgtgtggtactaacaagttctccagaggccacagagacgtcccaacagctccagctccgggtgcagggaaaggagaaacaccagacactggaagtctcactgtctcgagattcccctctaaagaccctcatgtcccactatgaggaggccatgggactgtcgggacggaagctctccttcttctttgatgggacaaagctttcaggcagggagctgccagctgacctgggcatggaatctggggacctcattgaggtctggggctgacaccccactccctgtttgacggcccagcctggacttggggagaatgactttcccttttttgccccataagggctagcataagctgaggtagaacttatctttaagctgcagcaaaatcaaggagtgacttttgtcccctctcctgttgaccctggtttagagccgttaaccacttggtgagttatgtgggtgttgttgccctgggtggcctgtggctccgtccacaagtcatgctgagttttgcagcctctgtgacttggagatgtcccttcacccctcccctttcaccaccatcctcttttcctcatggaaatgtctgctttatgaaactatgcacatattgaaagtgagttgaaacaaatgagggttgggtaggagcttccaggcctgggatttacaccacgcctagcccagcagaggccttagtcccatttggggcttgggagtgacatttgcttgaggcttatacactggtgtggttgcctggcttgcaggaaatgaccaagctcacacatgctggctgaagcgtaagcagacaactgaggtactcttttgaaggatgaaggtggtggattctcagccctgggggtcttcctcacctgaggacccttcagagccaccctttctagtttgcatttcctggtgcacacatttaaggcataacagcacattcatccctttggtttgggatctcaggaatacagtcccatgcaaagattctctggttttatggcttttttccctttctttacaccatcctctcccataagcacccatgtctttgaatatgaatgtatttgtaaaataccacgtttcatgtgtgaatatgtgcttttactgtacatagtgctattgtgcaataggtcttatgctgttttcactcaatgtgtgctaagatctagccccattgactcttctagaaatgcagtattgctttgacctgccatgtggcactccacaatgtcaattgcagtttacacacattgcctaaagtgggggacacctgggtgcccctgaccccttggcaccggatacaggccacgataaacatcctttcgtgtgttcccttctgtgcttgtgtggcatgtgtacccaggatgggcctataggtcacagaggtcagtttctctttggttttccagattttctttagaacggtgactgaccctcctacttgaggccgcccttttctccttatccttgccagcacttgtattgccagactacctaatttttgccagtctcatgggtagatagtggtgcagtgctttaacatacattcatctgatcagcattaatttggggaattttttcacttagcctttctggtttcccttcctgtgcattgcccattttctcatggagtttcttatcttttttggtttattctcaggagttgcttgtacattcttgggcaattgcagataattccaagaatgcatatttgggctggtcttgaactcctgacctcgtgatccacctgccttggccacccaaagtgttgggattataggcatgagccaccgtgcctgggctgatgctggagcttttatgtgacatgggtgactcttaaaactgggggagggacgtaggagatgaggagttttcacncaccagccccatagggtggggntgtcaagacccctccggaagttttcgttnggcttaaggagnaggggcactttatttttttna

SEQ ID NO: 562746 - DNA, 3254 bp, Homo sapiens
agcgggtggggaggaaagtgtgccatggcggagcctgtggggaagcggggccgctggtccggaggtagcggtgccggccgagggggtcggggcggctggggcggtcggggccggcgtcctcgggcccagcggtctccatcccggggcacgctggacgtagtgtctgtggacttggtcaccgacagcgatgaggaaattctggaggtcgccaccgctcgcggtgccgcggacgaggttgaggtggagcccccggagcccccggggccggtcgcgtcccgggataacagcaacagtgacagcgaaggggaggacaggcggcccgcaggacccccgcgggagccggtcaggcggcggcggcggctggtgctggatccgggggaggcgccgctggttccggtgtactcggggaaggttaaaagcagccttcgccttatcccagatgatctatccctcctgaaactctaccctccaggggatgaggaagaggcagagctggcagattcgagtggtctctaccatgagggctccccatcaccaggctctccctggaagacaaagctgaggactaaggataaagaagagaagaaaaagacagagtttctggatctggacaactctcctctgtccccaccttcaccaaggaccaaaagcagaacgcatactcgggcactcaagaagttaagtgaggtgaacaagcgcctccaggatctccgttcctgtctgagccccaagccacctcagggtcaagagcaacagggccaagaggatgaagtggtcttggtggaagggcccaccctcccagagaccccccgactcttcccactcaaaatccgttgccgggctgacctggtcagattgcccctcaggatgtcggagcccctgcagagtgtggtggaccacatggccacccaccttggggtgtccccaagcaggatccttttgctttttggagagacagagctatcacctactgccactcccaggaccctaaagctcggagtggctgacatcattgactgtgtggtactaacaagttctccagaggccacagagacgtcccaacagctccagctccgggtgcagggaaaggagaaacaccagacactggaagtctcactgtctcgagattcccctctaaagaccctcatgtcccatgcaaagattctctggttttatggcttttttccctttctttacaccatcctctcccataagcacccatgtctttgaatatgaatgtatttgtaaaataccacgtttcatgtgtgaatatgtgcttttactgtacatagtgctattgtgcaataggtcttatgctgttttcactcaatgtgtgctaagatctagccccattgactcttctagaaatgcagtattgctttgacctgccatgtggcactccacaatgtcaattgcagtttacacacattgcctaaagtgggggacacctgggtgcccctgaccccttggcaccggatacaggccacgataaacatcctttcgtgtgttcccttctgtgcttgtgtggcatgtgtacccaggatgggcctataggtcacagaggtcagtttctctttggttttccagattttctttagaacggtgactgaccctcctacttgaggccgcccttttctccttatccttgccagcacttgtattgccagactacctaatttttgccagtctcatgggtagatagtggtgcagtgctttaacatacattcatctgatcagcattaatttggggaattttttcacttagcctttctggtttcccttcctgtgcattgcccattttctcatggagtttcttatcttttttggtttattctcaggagttgcttgtacattcttgggcaattgcagataattccaagaatgcatatttgggctgggtatggaggttcactggtaatcccagcactttgggaggcccaggcagaaggatcgctgcagcccaggagttcgagactagcctgggcaacatagcgagacctcgtctctacaaaaaaaaattaaaaagggggctttgggaggccaaggcgggcagatcatgagggcaggagattgagaccctcctggccaacatggtgaaaccccgtctctactaaaatacaaaaaattagctgggcatggtggcgcacacctgtagtcccagctactctggaggctgaggcaggggaatcgcttaaacccaggaggcggagattgcagtgagccaaggttccaccactgcactccagcctggcgacagagcaaggctccactcaaaaaaaaaatttaaaggggaaaaaattgaaattttctttgtatctaggggtatccgtcactgaacagaaattcttaattttggctaggcgtgatggctcaggtctgtaatcccagcactttcggtggccggggtgggtggatcacttgaggccaggagttcaagaccaccctgaccaacttggtgaaatcccatctctactaaaaatacaaaaattagctgggtgcagtggcgcatgcttgtaatcccagctactcaggaggcagaggcaggagaatcacttgaacccgggaggtggaggctgcagtgaacagagacagtgccactgcacatcagcctgagtgacagagagactttgtctcaaaaaaaaaaagaaaattttaattttaatgtagacagtatgaattatcttgttctgcagttggttgctttttgattgcttatttaatagagttgttaagatattttacatcttctcctgttagctgttcagcttttcctttcatattgagaacactacacagtgctgaagtccagctggtacacaccggggtgacaccttggctgcatctgttctcaacagtcagacacttcttctaattggttgatgctgggctgtactggttgctaaatattgcacatcattttaaaactatttgagatgcacttttgtactcaggaggccaaggcaggaggattgcttgagcccaggagtttgagaccagcctgggcaacacagcgagaccttgtctcttaaaaaaaaaaaaaaaaaaaaaatgagagaaatcggctgggcatggtttctcatgcctgtaatcccagaactttgggaggctgaggcaggtggatcaccggaggttaggaattcaagactgaaaccttgtctctactgaaaatacaaaaaaaaaaaaatataaacaaaatgccctgttgtgttggggcaaggcccctgtgaaaccccagtaattccgggggagggtag

SEQ ID NO: 562747 - DNA, 3207 bp, Homo sapiens
agcgggtggggaggaaagtgtgccatggcggagcctgtggggaagcggggccgctggtccggaggtagcggtgccggccgagggggtcggggcggctggggcggtcggggccggcgtcctcgggcccagcggtctccatcccggggcacgctggacgtagtgtctgtggacttggtcaccgacagcgatgaggaaattctggaggtcgccaccgctcgcggtgccgcggacgaggttgaggtggagcccccggagcccccggggccggtcgcgtcccgggataacagcaacagtgacagcgaaggggaggacaggcggcccgcaggacccccgcgggagccggtcaggcggcggcggcggctggtgctggatccgggggaggcgccgctggttccggtgtactcggggaaggttaaaagcagccttcgccttatcccagatgatctatccctcctgaaactctaccctccaggggatgaggaagaggcagagctggcagattcgagtggtctctaccatgagggctccccatcaccaggctctccctggaagacaaagctgaggactaaggataaagaagagaagaaaaagacagagtttctggatctggacaactctcctctgtccccaccttcaccaaggaccaaaagcagaacgcatactcgggcactcaagaagttaagtgaggtgaacaagcgcctccaggatctccgttcctgtctgagccccaagccacctcagggtcaagagcaacagggccaagaggatgaagtggtcttggtggaagggcccaccctcccagagaccccccgactcttcccactcaaaatccgttgccgggctgacctggtcagattgcccctcaggatgtcggagcccctgcagagtgtggtggaccacatggccacccaccttggggtgtccccaagcaggatccttttgctttttggagagacagagctatcacctactgccactcccaggaccctaaagctcggagtggctgacatcattgactgtgtggtactaacaagttctccagaggccacagagacgtcccaacagctccagctccgggtgcagggaaaggagaaacaccagacactggaagtctcactgtctcgagattcccctctaaagaccctcatgtcccactatgaggaggccatgggactgtcgggacggaagctctccttcttctttgatgggacaaagctttcaggcagggagctgccagctgacctgggcatggaatctggggacctcattgaggtctggggctgacaccccactccctgtttgacggcccagcctggacttggggagaatgactttcccttttttgccccataagggctagcataagctgaggtagaacttatctttaagctgcagcaaaatcaaggagtgacttttgtcccctctcctgttgaccctggtttagagccgttaaccacttggtgagttatgtgggtgttgttgccctgggtggcctgtggctccgtccacaagtcatgctgagttttgcagcctctgtgacttggagatgtcccttcacccctcccctttcaccaccatcctcttttcctcatggaaatgtctgctttatgaaactatgcacatattgaaagtgagttgaaacaaatgagggttgggtaggagcttccaggcctgggatttacaccacgcctagcccagcagaggccttagtcccatttggggcttgggagtgacatttgcttgaggcttatacactggtgtggttgcctggcttgcaggaaatgaccaagctcacacatgctggctgaagcgtaagcagacaactgaggtactcttttgaaggatgaaggtggtggattctcagccctgggggtcttcctcacctgaggacccttcagagccaccctttctagtttgcatttcctggtgcacacatttaaggcataacagcacattcatccctttggtttgggatctcaggaatacagtcccatgcaaagattctctggttttatggcttttttccctttctttacaccatcctctcccataagcacccatgtctaaaatacaaaaaattagctgggcatggtggcgcacacctgtagtcccagctactctggaggctgaggcaggggaatcgcttaaacccaggaggcggagattgcagtgagccaaggttccaccactgcactccagcctggcgacagagcaaggctccactcaaaaaaaaaatttaaaggggaaaaaattgaaattttctttgtatctaggggtatccgtcactgaacagaaattcttaattttggctaggcgtgatggctcaggtctgtaatcccagcactttcggtggccggggtgggtggatcacttgaggccaggagttcaagaccaccctgaccaacttggtgaaatcccatctctactaaaaatacaaaaattagctgggtgcagtggcgcatgcttgtaatcccagctactcaggaggcagaggcaggagaatcacttgaacccgggaggtggaggctgcagtgaacagagacagtgccactgcacatcagcctgagtgacagagagactttgtctcaaaaaaaaaaagaaaattttaattttaatgtagacagtatgaattatcttgttctgcagttggttgctttttgattgcttatttaatagagttgttaagatattttacatcttctcctgttagctgttcagcttttcctttcatattgagaacactacacagtgctgaagtccagctggtacacaccggggtgacaccttggctgcatctgttctcaacagtcagacacttcttctaattggttgatgctgggctgtactggttgctaaatattgcacatcattttaaaactatttgagatgcacttttgtactcaggaggccaaggcaggaggattgcttgagcccaggagtttgagaccagcctgggcaacacagcgagaccttgtctcttaaaaaaaaaaaaaaaaaaaaaatgagagaaatcggctgggcatggtttctcatgcctgtaatcccagaactttgggaggctgaggcaggtggatcaccggaggttaggaattcaagactgaaaccttgtctctactgaaaatacaaaaaaaaaaaaatataaacaaaatgccctgttgtgttggggcaaggcccctgtgaaaccccagtaattccgggggagggtag

SEQ ID NO: 562748 - DNA, 812 bp, Homo sapiens
gactcaggactccatcttctagtcaaatcaaggcagatcatcatctcaccatccgagaacgcagaatcttcccaactgtcacactgtattgccacagtaagcctattattcccaccgatctacctgatcgtcttgtctatgctgttctgtggctgccctggaggcatggctaagtacctgtaccatctctcatcgctcaggttaacagagagactatgttcagactgcgaatgacatcacctgatcccatgagtttcgctccatgacgctgcaagtccacccatataaggtggtatttactttttttcttgtatggcactggatgtagtgtactctgtaagtattcaccgcgctacatactttaatccgctgaaaacatacgccagtagtggagaccttccggagaccatatatcagggaatagttggagtattgcgatggtagaagaagtagacttgaataaccactgcatgatggatacagtgcgctgcctcaatcccaagcataacctgtccttgtgagggttggatgcatctaacttgttgcttgccttgtcgtgtctcatgtgtaaaagctattcagttgccacggacccaagtgacgctcgctgcctatgtgcactgtcatgagatcctactctgatgttgtgatcctgggtacatgtgataactgcatgggtctttccttggaagcgcacatgtgaatgttcgtcctactagataatgacgtgagtcagccaaactgtcggctcctatctttctcaatccatttagttttctagcttgggttgaatggccctgatcacacttttg

SEQ ID NO: 562749 - DNA, 860 bp, Homo sapiens
gcggagttcggtctctgcaatgcttgtgtcgccctgggatggattcctcctcctcttcctccgcggcggcgtttgggtgcagtgtgacccgcagttgcagcagtttcagtcgacggtagagactcaaaagcagcggcttccatgcagctggtgcaccagatgactgaacttatgtggggagaagtgcatggacaagcctgggccaaagttggacgagtcgggctgaggccgtgtgatgtgaactgcgttgagcgcttcgattgatgacaagccagttcatcttgaatcgactggaacagacccagaaatccaagccagttgtctcagaaagcctttctgactgagtctcagcataaccccatttggaacacggaccggtagttcagagacactgaagatgctgtctgatgggatgattgacgacaacagctatgatgaggattggctcccatctttagttacctcttgggacatcctgtcatctgagaatgagcacagaccaatttatgtgtgtgaagcttaagggtcatatgttggcttgtatattgtaagtgctactcttgttgaccagtacttgacagcgcgactcgaaaactctatgcagaatgctattactcgtacatgggactatgctttctcaaaggccccattaacttgtttcctaataaagtttggagtagaggggacgactatatggttaaaatgtctctcaaatggagtggacggtcattttctggataccaggtggagaacccatggggtgatccacaaaaggggcaaagttatggggccagcaaattacgtgggggcccctagttcgcgtctgtctgacaggtcgtcagcaaaatctggtcacacgt

SEQ ID NO: 562750 - DNA, 463 bp, Homo sapiens
gcttccaattagaacacagaatatcattccatttatttgtgtcttctttaacttatctcatcaatattttatagttttctatgtacaagtcctttacctccttgattaaatttattcctaagtatattatttttgctgatgctattataaatgggattattgtttggatctctttgggggatagttcgttgttagtgtatagaaacgctaccacccttggtatgatgattttgtattccataacttaaccaaatttattagctctaacagctttttggtggagtctttggggtttcttttaatatacgatcatgtcatctgcagagacaatgttacttcttcttttccaatttggatgccatctatttgtcttacccaattgctctagcaaggacctccaatactatattgaatagaagtggtgagaatgggcatccttgtcttgtaccttgtgacgaatcta

SEQ ID NO: 562751 - DNA, 154 bp, Homo sapiens
cagctatgaccaccagagatcataggataccctcaaagcaaatgcttacttctactgaatctacactattgcatgtgtactctaggggcctctaaggaatacttacatgtaagtgacagctacagaccgcggcctcagctacagaccgcggcct

SEQ ID NO: 562752 - DNA, 412 bp, Homo sapiens
  misc_feature (34)..(34): n is a, c, g, or t
  misc_feature (67)..(67): n is a, c, g, or t
  misc_feature (69)..(69): n is a, c, g, or t
  misc_feature (243)..(243): n is a, c, g, or t
  misc_feature (375)..(375): n is a, c, g, or t
gtgcagtggtgccatctcggctcactgcaacctntgccttctgggttcaagtgattctcctgcctcngnctcctaagtagctgggactacaggcgcccaccaccatgcctggctaatttttgtatttttagtagagacagggttttgccatgttggccatgctggtctcaaactcctgacctcaagtgatacgcctgcctctgcttcccaaagtgctgggattacaggcatgagccactgcgnccagcctattattttcattttgaacccatctcttttattgccaaacacggcatttacttccgtgttcatgatggcatcattatcctatttcatctcaaagctggaaaccttgcagtcaatcatttaaatggntaaaaatacatttgagtacctcttgaggcaggggact

SEQ ID NO: 562753 - DNA, 742 bp, Homo sapiens
ggagagaagaggcgggagtggaccgtggttcagcccataccccgattgagcccctagccggatccgaggtgcgggctccgtcgacagccacagccccgtgcccctgcggcggcgcggcgaggcgaggcgatgggcaaggtgtcggtgctgaacgtggcggtcctggagaatccgagccctttccacagccccttccggttcgagatcagcttcgagtgcagtgaagccctggcggacgacctggagtggaagatcatttatgttggctcggctgagagtgaggaatttgatcagatcctagactcggtgctggtgggccctgtgccaagcagggagacacatgtttgtctttcagggccgacgcccccaagccatccctcatcccagagactgatgccgtgggtgtgactgtggtcctcatcacctgcacctaccattggacaggagttcatccgagtggggctactaccgtcaaacaacgaagtaccttcaaacccttgagactggcgtgagaaaacccgcccaatgcaagccaggatttcatcccaagctccaaggcggaaaccatcttgggccgtcggaaacccaccggggtgaacccggacttccaatatcaaactggggacaacaaacatggacagggctggaaggcatagaagaccaggagccctccctgggctgcggcatccaatcaactgcactcctatcaagggcttgggggctccctgggctggaatccctg

SEQ ID NO: 562754 - DNA, 844 bp, Homo sapiens
gctgatgcaggaactgtatagcacaccagcctccaggctggactccttcgtggctcagtggctagagacccacctgggagtggaaggaagaggtgctagacgctgtgcggaccgtggaggagtttctgagtgcaggagcatttccatgggtgaaagcgtgggctggaccagtgatgtgctgtggtgctgaaggtagtcaaggtgggctccttacgggaatggacacggatctacagtgagacaccagagacggtggcagctggtggcgtacatgagctgtaaccacagacttacaggaggccagcaagcatcacaaagatgtaactgaggctgatatggaaacacatgtggacaaagacaggaccatgctggacctcgggactcgaggacctgaggatggagcagagagtccccagatgctcttgaattaagcatccagaacagggggactgcgagagaccatgaaggacaacattgtgacctgcatacagagaccctggggcctaacatcttcacaaatcccagacagcccctgaggtactatgtagagcctgaatcaaggccatgaggaaggatacatggagaaatatactgaccaataccattcagacgagactggagaagaaaatatcagatgaaaacatacggccaaaactacagcctgaaagagcgctcaccatgcggccaatgcgtcgaaagcacatgtgtacccagggaacgtaactgtagaaaagccagagagtagcacacgaggagacaaattattggcagcactcattctaatagatactatgaaccaacgtaaagcaatcttatgccatggcgaactgggatcatgaagaaa

SEQ ID NO: 562755 - DNA, 291 bp, Homo sapiens
tgtcgtggctcacatctgtaatcccagctactcaggaggctgagtaggattactgctctttccaggaatttaagaccagcatgggcaacgcagtaaaattccaactctttaaaaacttttaaaaaattagccaagtgtggtggcataaacctatagtcccaacgacttaggaggctgagaggacagaattgctggagctcaggagcctgagcctgcagtgtgccatagtgacacctgtgaatatccactgtactccagcctgggcaacaacagagtaagatcccctctctt

SEQ ID NO: 562756 - DNA, 476 bp, Homo sapiens
  misc_feature (122)..(122): n is a, c, g, or t
  misc_feature (131)..(131): n is a, c, g, or t
  misc_feature (140)..(140): n is a, c, g, or t
  misc_feature (142)..(142): n is a, c, g, or t
  misc_feature (145)..(145): n is a, c, g, or t
  misc_feature (154)..(154): n is a, c, g, or t
  misc_feature (159)..(159): n is a, c, g, or t
  misc_feature (232)..(232): n is a, c, g, or t
  misc_feature (299)..(299): n is a, c, g, or t
  misc_feature (338)..(338): n is a, c, g, or t
  misc_feature (355)..(355): n is a, c, g, or t
  misc_feature (358)..(358): n is a, c, g, or t
  misc_feature (399)..(399): n is a, c, g, or t
  misc_feature (464)..(464): n is a, c, g, or t
ctgtctgtgtgacatgatgtgaacctgacagaggtgactgcagtaatctagaaagttatcacataaacttattagttgtcatccattgtaacttttcttattaaatataaacaggaagcganagactgtcnaagtgggtntnatntaaatattncagtnaccactagcttcatcagcaaaaacttctccttgcgctccaccagtgacacacatatgctctcagcatgcatcntaagctcctacccctgaataatatgttctgtagtgttaacttgagtttctgtaattatgtcactatnatacagcacattgacatatacatgaaatatcatacctanataactatgtccacttnatnactggatctaaatatcttttacacagaatacacacaatttntctagaactttcattttcctgcccagaagatatcaaacaaaatattgcttaagtgaacccttgtntgaaaattaaac

SEQ ID NO: 562757 - DNA, 1588 bp, Homo sapiens
  misc_feature (51)..(51): n is a, c, g, or t
  misc_feature (274)..(274): n is a, c, g, or t
gcctccccccccgctctcctcgtcgcgctgtgcggtcgggtgtggctgctnttttttaattatattacaactcgacgagtctgtctctttctcttggtatgttagggtactgcatctctccttcgtgtactgtattctgctctcccgttcggtggcgatgagacgtgccacggtcatagtagaccacgaccgacgccgcagttcgtgtgtcgtggttggtgttcgctcgtccgcctccctctacttgcgtggtgaggaggactacatcctcccntcggtgcgggcgggccggttgatgtgtttctatcatcgcagctctgctctcccgtgcgcgcaggtgcttttcggattgcctgcatcgtggtggtgttaccgcccggcgcgggtgtgcctgcgggtggttgtagcactcgctcgtgtgtcttctctctccacctccaccatccgtcgggttgtagtctccgatcctcctggtttattgtttgcctcctctcctttatcgttggtggcttcctccctttgttttttgctttgcgtgtgtgtgcgggcatctccacgtcttctctggtcggtcgcccctacagccttgttgttgtttgtttcttccctcctcactaaacgatgcctatcggcgtcggctgctcgggttggtgtgtcgcgcttcgtcgctcccgctcgatattttttcctcctcgccgctggtggggtttctgtcgtgctcgtgtggctgccgctaccgcatgcgctgctttctgtccttcgcccctcgcgtttcttgttgttgtctcttattttgtcgattatattactacacactacttcagtatatgccctcgtgtgcgcagtgccgtttcttgtggttgtgcagcagatggccccgcgctgtattatatctctctccgtcgcgtctctcttctgtgtggttgagcgctcgcctgtgcccgcgcgcgagagagagttttgtccctttgtgttgctctctcgcgcgcgtcgcgcgcgagtagagacgtgtgtgtctcgtcgctctatgcgtgtgttgatagagagagttgcgcccgcgctctctctctgcgctctcttctctcgctctctcgcggcgcgcgcatacagacgcgcgctcacctctctctctgtcgtctctctctatcacacaataacacaaataacatagatagtaggagggcgctctctcgctagatagttgctcgttatatagatgcgagacaagaagatatatatattagatagaataataggtatgggtgttgttttattacaccacacaaatataatagaagataatagggagtcagcccctgtgttgttgttgtgttgttgttgttgttgttgtgttgttgttgttgttgttgttgttgttgttgttggtgttggtgggttgttttgtaaatgtaaaaatgcgttatgtattgaccaggaccacttcttagaatgataccccaactccctggagtgggagtggggaaagcccttcttacacgtacacaccacctgttcttacctgtttgaattttttaatatgagccccacaattgtataatctttttttaataaaggggagaaaaatcca

SEQ ID NO: 562758 - DNA, 227 bp, Homo sapiens
  misc_feature (27)..(27): n is a, c, g, or t
  misc_feature (78)..(78): n is a, c, g, or t
  misc_feature (191)..(191): n is a, c, g, or t
cccttttttttcttaccgctccgcggngcgtcatttactagtcattcggttgttttttttttctatactttaggccgnggctggggggggtgtgggtgggggggcagggtagggggggccggggggcgctccggggggtgggcagaccctccgggggggccccgaggtcctgcccattcttattatgaggntgacctggctcccggccatgcgtcgccccctccgct

SEQ ID NO: 562759 - DNA, 450 bp, Homo sapiens
  misc_feature (254)..(254): n is a, c, g, or t
  misc_feature (284)..(284): n is a, c, g, or t
ccatgaatttggcacgatggaacgtaagacggacttagatattgcatacaaatttggactgtggtgagctgtgaaggctatgagtcctctgaagaccagtatgtactaagaggttcttggggcttggagtataatttagattatacagaatttggcctggagaaactggaggagtctgggcagcaccggtttgcctctttctctgaatattaatataagggggccttggcggattccctgaacatgagtggatnggataccatcgtggtacttcttgggatcgnctttgtagtctataagctgttcctgagtgacgggcagtattctccttcaccgtactctgagtattcttcatttttccaccgttaccagagattcaccaactcagcaggacctcctccccaggctttgtctgagttcacaggaccacaggatacttggcatggtgct

SEQ ID NO: 562760 - DNA, 237 bp, Homo sapiens
agtgctacctcacaaacaggataccaacaaatccgtacccagcctcaaaagtatatagtacataaagccatttacaagtacatagcacagttacagtcgaatcccttctcgtccccatggatgacccccctcagattggggtcccttgagcaccatcctccgtgaaatcaatatcccggagcgaggagagtagcactcttgtgcgggaggtagcactctgtttgtggaggtagcact

SEQ ID NO: 562761 - DNA, 213 bp, Homo sapiens
  misc_feature (5)..(5): n is a, c, g, or t
ccggntagagcggtctgatcctgaacaaatcattcaactcctttgactctctctgtgatgatttgtaaagtgaaaatgaaaataataacctcattccaaaggccactgtgaggatccagtgtaatgacataccagtgatttaaaatgcaaatgaaggagttcctgttgtggctcagcagttagcaaacccaactagcgtccatgaggacatgg

SEQ ID NO: 562762 - DNA, 109 bp, Homo sapiens
cgactctagaggacccctgacacacagaaaggcacacacagcacaaaatcacatacacaccctccccgcacagagacacaccattacatacacatgacacacaatcaca

SEQ ID NO: 562763 - DNA, 820 bp, Homo sapiens
agctattatagctaacatttactcatctcacttctaggaatacgtagtatatcgctgcactaacctcatatgtctccgcatactatgcctagacggaataatactatcgctgtccacttataactactctcataaacccttcaagcaaaccaactacgccgctatcagtcgcacatgattagtcgccatgattgctcagtagcataagtcgtatttgcacgacgtagctgcaactctaacggctcgggcacatacgccctgatctagtgctacaatctcacaagacactattggcactacgaagtatcggtattagtaagcactcaaaagcacttacctctcaactgacataaaaaaaccataaaatcagatcacacaaaacaaagttgactacttgaactacccgagctggacgattgacgtatgtcctataagatagagccaccaattaaatttctggaaatcgagactatcaaacacaaacctcgacccaggtccgttagactcttatatcaatgccactctgagttctccctttccgtaaccttcactttgttttatctcaaactcctacaacacttcgagagccacaagcgaaatcccttggagtgtttaagcacctttggatttgcgcctcgacaagaattcgccctttttaatgcgcgttaacttcgtaaatcactccccccccatttataatctagattctcgctcagcgcctttcgccttcacagttagcctcaaaagcattaaacccttgaaaatcgctaccccttaaaacatctccctttcctactcaaagtgcctaatgggggccaaa

SEQ ID NO: 562764 - DNA, 297 bp, Homo sapiens
gtcgactttttgttttagtgccctgtagaatagtgcttctcaaagtttaatgtgcatacacatcacctgaagatgtaaaatcagattccgattcagctgttggggcagagttgcgggggctttggtggggtggtgtcagcatttctaacaagctctgagtggaatatcaatgctgttgaactctggatcacccttagaaaagcaggcaggtgtttttttgggaattaataatgtttggaatgaataaaccagaaatcaaaaagaaaaagcaagagtaaaacatcgtcgacgcggccg

SEQ ID NO: 562765 - DNA, 823 bp, Homo sapiens
cttgagcataataaactcactcgatagtgtttatgttattaatctgaatgcgacagaacacaaaagcacaggcatgcacacacacacaaacccaaaccactaaaaactacctaaacactgacttagtacatacgctaaacacggtacatgtcgggacttctaaaccttgaactccattagccacgcttgggatgaaaggaccatctaaaatcatgctagtctaaaccatgctcttccacacagcctgtttaaaaaaccactggcgtatgaggaatatgctagacagacaatgttaaaactacattgttggctcacacttatctctctaataaataggaccattattactaccaggaaagtcttattctattttgcctgaaaatggcttaaagaaagtctcatgacgggatgggatgggctgcgcttctcactgaactctgaggccgaaatatttgccttggattctgtggattctttaaacctgtgtgctaataattcaaacaatgttgcattcattgtatacacgggttctcgtatacttttcaaacatctgcggtgtactgatccttgttaaaccatatattctggaaagggccatagcctttctacctgtgtagcctatttacacattattgtctctacccattccaccttgcgtgacaatgttcctaaccagcgttatgaggaaggggacaggagtggaccggccggagtcacacggatttgatcctgttggcaaggaaatccctttgcttagcattcagacccatttatgcacaccatttaaacaacgctaactctccgcggacctattacccccctc

SEQ ID NO: 562766 - DNA, 584 bp, Homo sapiens
catcagatctcatgagacttattcaccatcaccagaacagtatggggaaccatccccatgattcgagtatctctacctggccccggtcttgacacatggggattattacaattcaaggtgagctttgggtggggacacagccaaaccatatcaggactgaagtcacacttgtccagtttgcaaatctatttcttgttttcacaaagctgagccttccacatgaggaagccagagaaattgccccacaggaggtcactgccttctcctgttggccagaactggaccagagctgcagtacctacagggccccacctcaggccggttctcagagtctccggaatggcctggaaatgccgactctcacactgtgtctctaaacgggctctggagtcagtgagccttggtttaaatcccctatgcactctgtaactggctgtgttaagagacactatctcttaacctcactgtgcctcagcttcctcatctgaaaatggggacaataatagtgcctgactcgggtattagtgaggactgaaaatggtgcaacatcagtgtttaataaatgttagatctcattatctgta

SEQ ID NO: 562767 - DNA, 1322 bp, Homo sapiens
ggatcctccgctctgtgggaggcagcgctggcggcggggctggggccacatgaggaaatccatccgcgccgccggcgacgccgccgccgccgccgacgcctccgccgcggaggaagacagcgccgaccgagacaccgccagcagaccccgaccgcagagatcccaccgccacaggcctcggagccagacggccaggagcatgttttcccaaggagaggagaggataaaaacgaggcaagaagaaagaaaaaaaaagagacaacgaaaagagaacataaagaacaagcaaaataagcaataccagaacgatcgttatcacaagacaggcgaaataaataatacaaccacaaaatacaataaaaacacagatatcaaaaaacataataacaacaaagacaccatcaataaccaaacagccgagacacgacaagacgcagaaacgaaagagagagacacacagcaagagaagagagcccgcacacggcagaagacgcaaacacagacgaaagcaggcggaaaacaaagacaaaaagagaacacccgcagacgatcaggaacaagcaagagaccaaagagagagcccgaggccggaagaagagcgaaaagaggaaaagagcagcgacgagcatggagagcaaagaggagcccaccgacaccggcgaagaagcagaaagaaagcaagaccaacgaaccagagcagacaaagcaagaaggagaagacgacaagaaaacggcgacaagaacacacacgagaaggacacccacagaagagcagacgcaacacgagagaaaggcggacagacaacagacacaaagacacagaaaggaaagagccacggcaaacaagcagcaaaggccggcgcacccgcagacacagagagcgcacagggaccgccacagggaaacgccacaagcccgggacgacaagagcgcagccgacaagacggacaccgcacgcgcaaccgcgccaaccacagacaaacaaccaagaacaacaaaagaagaaaaacgaaagcaaacaagagcagacaaaacaaaaagcaacaaaacgaggagaagagaaaagaacagacagagaaaaacaaccacaccaaaaccaccaccaaacgcacacagagaccaaagacaaaaaaaacaagaacaacaggaaagaagcgaaaagaaaccagaccaacaagacgacgacgaacacacaacacacgacacatagccagccacaaacagaaagagaagccgagaagggcgaaaacacagaagaagaagacagaaaaaagcacaaacgaaaagagagaagagaaagacatacaagagacgaaacaagc

SEQ ID NO: 562768 - DNA, 673 bp, Homo sapiens
ggatcctccgagcgctgggggtgcttcctccccgctctcgcactcccactcgcgggcgggcggtgggctgtgccgccatgccccagccacaggctgctcacgggcctaggcgcggcggccgagatatggggcccctgagcctccgggggaggagagaggcagcgagccggcgctccgcccctccccccgggcgcgcgcgcgctcgcgtcccagctgcgggagaaggaggaggagcagagctccgggccggcgccgccgcccgcggaatttctgatttatttgcatccttgaagagcatctgtagaagaggaagtcacacgatgggtgtgaaaacatttactcatagctcctcttcccacagccaggaaatgcttggaaagctcaaatatgctgcgaaatgatggcacatcactgtgatatcactattcgtgtccaggacaaaatcttccgggcacatcaggtggtactaccagcttgcagtgatttctttcgcaccacacttgtacggccaagccgaggatgagaacaagaatgtgtcggatctgcatcatgttacagtgaactggcttcactacctcccccagaatatgcttacacccagccactctatcaattaacaccagaaacatatcactcgctgtctagcagccagccagcctatatgaccacatgc

SEQ ID NO: 562769 - DNA, 1524 bp, Homo sapiens
  misc_feature (1080)..(1080): n is a, c, g, or t
tgcctcggcgcctgttattttgtgcgtgtctatgtgttggcgcgtcctgttgtgtcattaatttttgcgcactgggggagtcaacacactcatattttgtccgactttccctcgcgtgtacatcgcggggggggcccccgggcggcacccctgttgtggccctctggatgttggggaaaccccgccccgcgtgtgtttctcctcggaaggtttttccgggccacgtggatacattctccgggggaccccgggggtttctccggcgcccctgttgtgatagcgggaggtcacccccgggggcccacagaagagcccccccccggaggtgctgttttcctgtgaaggggcaaataactcccggcgagggattaaacgggaagttgtgattgtcccccgcgggtcccccacacaacatgtgggggcccgcccgcattttgggtgtcccaaaaggggacctcattgtgtagagagttcgaaaagttgcccctcgtgggaagggggagaattctctatgtcgttctgtttcgtcgcccgttggcccccactttttaagggaattccagtagggatccgtgtgaagtttgtcctttccctgggggggcccctcttctttcaaaggtattgaggttttttgaaagaattttatagccccaggtgtgccaggaaacccagtacccccgtggcccgggccctcagcgcgctcatacacagggttcaaagagcccaatttttgttggtgcctatatctcgggggagacatatccacatggggcccacaccgtctgggtttttgtggttgtttataaggtgcgtccccacacaggaggggtgggcccacccccgcgcacattccctgggggcgccacacatctaaatctcttgggcaccaaagcggtgcttcccaacttcgtgtccacccgtgtggccacacaagagaggcttatactcttggggggggaaacacacacagagtttctcgttgcacaagcgcacgcacacacactggtgcgcctccttgcacaaaggtgtgaaacacaggccccgctttgcgcggtctgtctctgtgtgtctctggtaacncgcccttcaacatgccccctggcacacccaccaggggggcacactggcacattgtttctcggcacacctggtgctctataagagaagctggcgtcacatgagatggcgtggtatatccgaatgagactgcgtatacacacctcacagccccggggctgcacacatgccacaccctgggcaaacttcgccaaaggccaccctttgagatgccacatttttatagagacctatcacgctatcctgagacccccgagaccttctggaaaggagagagctgtatattcaccccaagtcctccctaatcacaggagagttcacctgagccccctcgtcacagagcccacccccgaggttctccgtgcaagcggagctccggctcccagctgtggcgtaccacacataagggtttttataaccagaaaaatataagtgaatttaagccgt

SEQ ID NO: 562770 - DNA, 290 bp, Homo sapiens
gtagaagcatctgagttcagcaattctcatgctcaacctcccaagtagctgggattacaggcaggcaccaccatgcttggctaatttttgtatttttagtagagagtggttttcaccatgttgtccaggctggtgttggactcctggcctcaagtgatctgcccacctcggcttcccaaagtgctgacaggcaagagccactgtgccctgccctctcattttttttttttagattctttctactctaaatatgagtgaatttgggcaaataaactcaggatgcttcttga

SEQ ID NO: 562771 - DNA, 762 bp, Homo sapiens
tggggaccccggggaaaaacacccccgggggggggggggggggggggggggggggcgcccccgggggggccacggggggggtttattgagagagagggagggtgttctcctcacctcttttgatgggcaaaacaaactactatcgctcgcgcccgctcgggcgggaaaaaaagatgaccgaacacagggggacgagggagacagcaaaaaaaaaaaaaaaaaaaaaagaaagaaaaacaaaacaagaggccgccaaggcataaatgacgtacagcaggcgggggggcacaccaacatgaggccccacccacgcgatactcaccacagcgagggcccaccatagtaggggggcaggcatacaaatataacaaacccagggcgagggcgagggccgggacgataaaacacaaagacgaagagagtggggaaggagacacacaccaccagaagacagagaacaactagtaaggaagagagggaagacaaaaacacaaaccaaagagaagcgggagagctagtagaacaacacaaggcgcgggacacaacgaccacccaccgcacgaaaggaagcacagcagcagcagcacccctgcggcgacagaacaccacgcacgcacccccaggaccgcgggacgaagacggagcgagaacaaccgaaccgacatagcacagacgcacggcagggaacagagaggacgacgccccaaagcaacgactacaagaaaagcagaaaagaaacaatacccgcccagaggacacaac

SEQ ID NO: 562772 - DNA, 461 bp, Homo sapiens
  misc_feature (375)..(375): n is a, c, g, or t
  misc_feature (436)..(436): n is a, c, g, or t
  misc_feature (452)..(452): n is a, c, g, or t
ttagctcttgtgaataatgctgctgtgaacatgggtatatctgagttcctgctttcaattccttggacatatacctaggagtgaaattgctaggtcatacggtattgctatatttaactttatgaggaactgccaaactgtttcccacagcagctgcaccattttgcattcctaccggcatgtatgagggttccagtttctccacatcctccctgggcacttgttatcatgtctctataattatagctaccctagtgggatgtgaagcagtatttcattgtagttctaatttggcatatttttgatgggctaatgcatatttctttcctggataatttgtttttgggtaaggaaataagccgctttttcctacgntcttccacactcctgtatggaaacagtagggggagagccaacctgccaggacatggactcnaaaagtggccagaggntgtccaccc

SEQ ID NO: 562773 - DNA, 330 bp, Homo sapiens
cgtaagatcctggctctgcttgcccaggcactggagtgcggtggcgatagactcgaggctctactacagacctccgacctcctgggtctcctgtgattctcctgcctctgccgcctgagttgctcggtgtatctgctgacgccagctcatccagctagtatctgtatgtttagtagagatagggtttcaccatgttggtcaggctggtctcgaactcctgatcctttaggcgatccacctgcctcggcctcccaaagtgctcggattacaggcgtgagccaccacgcccagcgaaacaatggtttttaaggcattggtcatcaggtagtg

SEQ ID NO: 562774 - DNA, 107 bp, Homo sapiens
  misc_feature (65)..(65): n is a, c, g, or t
gactctttaggatcccctcatcgaaaccctaaatctctcattgcgtcatcggaaaccctaacccnttttcacttcggccttcaaagttctcgtttagggtttgatga

SEQ ID NO: 562775 - DNA, 258 bp, Homo sapiens
catacggattgccgcatagatgaccagcgccccgagaaccgggacgggtatgtgagacagcacgttacggccgaacaaggcgactgctgacaccatcagcgccacggtgatcgaatacagttgcgtcttgccgccgactgcccgtgccaaactcgtgcgggatgcgctggcgctgaccggaaacgcgtggaccaggcccgcagcagcatttgcgattcccagcgcgcgcaattcgctgttcgggttgacttcctgatc

SEQ ID NO: 562776 - DNA, 425 bp, Homo sapiens
  misc_feature (118)..(118): n is a, c, g, or t
  misc_feature (249)..(249): n is a, c, g, or t
  misc_feature (265)..(265): n is a, c, g, or t
  misc_feature (285)..(285): n is a, c, g, or t
  misc_feature (326)..(326): n is a, c, g, or t
  misc_feature (355)..(355): n is a, c, g, or t
  misc_feature (357)..(357): n is a, c, g, or t
  misc_feature (371)..(371): n is a, c, g, or t
  misc_feature (373)..(373): n is a, c, g, or t
  misc_feature (386)..(386): n is a, c, g, or t
  misc_feature (412)..(412): n is a, c, g, or t
ttttaaggattaaggtaccagaggcatcagtgtataaggatggagtctggtctttaattacgccaagggtattggttacattttactctttggttttcaaaaagatttgacatgctgncaaatccagctcctcccaaattttgtttgaaggacttgtgggaagtgatattccttactattaggtcacgccccttataactacatgttaacatcccagccttttttttgtttgagtaattgtagggatanaaagtgaagcccccanagttaggtgcaagtatagcncccagctgaaaggcatcatggagtttaagggccttttacanaaggggcaatcctttgggttatttttggngnacccctgttttttntncctcggtccaacncccccttttttggacaaaaaataaancaagccccagccc

SEQ ID NO: 562777 - DNA, 1129 bp, Homo sapiens
  misc_feature (950)..(950): n is a, c, g, or t
ggtgatgcatctcttcttttttccatcgctcgtccttccgcggtattcccaactcttgtaggaagactacctctttgccccgttactatgccaaagatggaagagtgaccttccaaggcgctgggatgagtgagcgacggatgaggatgcaacacttcattgttcccgtgagtgaagctggtgtatcctgtggctggtgtcagggcggtcctgggatccgctttaagtggcattacactctttggcatcagcgaattacaggaggaaggaatgcatgaatgatggtgtggggtctcagcctgatatggtgaacaatcttttagtccctccagcagagtatggtatgcaacgagttctagtgaatgggacaagcctatcaacttcccccaagccgaatggcggcgtgtcctggaatccaaaaacgccgtatgtaattcactgtcagtgaaggacgacttgagacgagaaacggtccatccttctgtattgctcgacttgggctaatctacactttccatgaatgacccgtcggatatggcttcatagatttcccgacgaacatggctttgggccttggaagccaatcactttcgatccttgggtgtctgagaggaatccgagtgacgctgtgcttcgagcgcatggttctccaaggtggcccccacggtcccttcatggtaacctctgtggagggaccgggaggggacgcagagacgtttggagggctccatgctatacgcttccaactgattggttggtcccccagaatgttcgcgttcctgatggcgcaaaggcgtaggctttattcggtgtcgggcttcacctactttggtcccgtttggcatgtattggaacaattgcttggcgtcgtgggtgccgatgtcggtgcggccggatcttgggtaggtgccccccgcaagcgacggcgaatgtggttatcctccgggggnaggacacgtgcgcgggcccttgaggggcgaaccccctatgttggccctcccgtttcatggcgtccctttgggggagccccggtgtttccgatcccggtgtggttgtgggccgtgtagcgtgggacattgtgttgtgcgccctcggggaggcgtaatgcccatgtgggctgttgttatct

SEQ ID NO: 562778 - DNA, 1278 bp, Homo sapiens
ttttatactttagggcaacattcttatactatttaaatgaaaaaggtagataatctagtttgataaggtacaaacctcaatggcactttcgagaaaaaaagtatgtattctatataccagtaaataagcaaaatgggactctgaagccctaatacttcaaaagcgattcactcctattcccataaaaacctaggtattattcaggcaacgaggtactactacgggatttcacacacacatagcaacagcaagtctcatcttccacagtggtgagttcgttgtgctcttaacattgtgtacacacgtcacccacaggttattgtctcagttctatagacaccgcgggggattccaccatgggcgtgtgactccgaatagcaaacccacgcatataggattcttataaacagaaacaatcgttgtggccacggaaacgttcattgtgacccgtgagtacttttgtccctgcacccatatggacacagaacgctctggatctccacaaagtatcggcatcgtgacatattgtgaaacacaagggtggtgtatcgtggacgtgctctacatgtggcctttcgcacaagtggtgacattatcccgaaacaaggcaatatgataatacacaaccccgtgggggctactccattattgagagggttctttctccccacgaaaacacccgcgggcacgagacaacaggaaaccccagtgaccatcccattctcgtggaaccacaattgttgggcctttgtggagcgcacttgttgtacaaacctgtgggggccgttactgcctgggcaagaggtcttatcttccaccccgacaaatcacaaaggcgtctacctgctggatgtagggttggaaactagtgggtttctcaaaccaaggggcggacacaccttactgtacagaaatcaatttccgcccacttgttttcaaagcgcacaatgaaggtcgttcctctcaccataaagtctataaacaagggggacaccccacagatacacagaaaagagtgtttcccgccaatattaactcatcactaacgcgggaaaagccgttcctaatactcccacacgttggtgggggtttagtgtttacgacagttggggcttccagcccctgtgcctatatttccgaagggcaacccgggacacatcggccatcacttttcagcgattcaccaaggggtcgttctcccgggaacacccaagcgaagtgaacacagcgacgcagctgctcgcgggaggcaacctccaaaacactactttttaacgt

SEQ ID NO: 562779 - DNA, 1323 bp, Homo sapiens
  misc_feature (443)..(443): n is a, c, g, or t
ggttgcagctacctgcactgctacattcatcttcttgtgagccctgggcttaggagtcagcatggcaactgtaacgagttcagtcatcacggatcacaccgcacataccgaatagtatccatgctgctggaccagaacagcaacgtgtcccgtcgtggaggtcgggccgaaagagctacatccgggcgacggacaatgagagcggtactgtgttgcccccagtgacgcacgtggctgagccgctccaccaccagtgatcgacctacttgcagcacgctgagaacaaacacctgtgctcctcgaggaagtgcccaggaggactcgggatagacctagctctgaatagtacagacaagggacaaggctcccagagcatgtcagaccacccgcctggaacccctacggaaggattcccgtgcctggggcgcccatggagacccctntaccgcaccgtaggtacaccacaagcgggaagggatagactggcaaagaaggggtaaccattcaagccacgcgacgccgtgtccacgggatagagcctcctacgtcagcccccaaagcgaagcatgacggcgcattcaccagtacctaggaacggcgctggcgtaggccgtctggaccccaactggccgaggactacatagggcaatgtggcacgcaccgacacaggggtgccgctgcgcgcaccgcgcacgtgcatgcgcccgtgaagaccgtctgccaccgcgcacgcgtggagaaccccagagcccacaccgcgtcggacaaaatctgccgcaccaggtccgcgccgccacgcgtgcccggcccgtgccgcatgccggcacgcgtccactgaccacagcgcccgcccccccctgtcccactccaggaggctgatgcctagacccacgccaggtccgtcaccgaagcccagacggcctacacacgcgagggcagcacccgccgcaacgagcgcaacctccggtcgcgggctaacacccatagcggcgaacccggcagctcgacacagggacaacccacgcggggcaggcacccacggcgcggaacaaagcccacaggtgggcgcctcgagtcctgcgaccaccaccacccaaccaagccgacgcggcgcgtttcaccctctcccacacccaaacgcgggcacatcgccccgtcagccggacggaacacggcatcacactccgagcacaccgccccacgggccctcgagtcacgaccgccaccgcggccccgaccgcctataacccggccgacacacacgcaccaagcggaccaaagagccaaaccactaccccggctcctacagcgcagccttaacct

SEQ ID NO: 562780 - DNA, 380 bp, Homo sapiens
  misc_feature (39)..(39): n is a, c, g, or t
  misc_feature (53)..(53): n is a, c, g, or t
  misc_feature (121)..(121): n is a, c, g, or t
  misc_feature (329)..(329): n is a, c, g, or t
caagcaagggtgggtaaatccatgttctaaccatcgccntctggtaatgaatngctaagggcacacgagggaggccaaatgtaatgttactaagatgctaagactttctggcccggcacantggttcatgcctgtatcctagcactttggtaggccaaggcaggcagatcacttggggtcaggagttcaagactgccctgggcaacgtggtgaaaccctgtctctactaaaaatacaaaaattagccagacatagtggtgcgtgcttatagtcccagctactcaggaggctgaggcaggagaatcacttgaacctgggaggcaattagnccaagattgtgccactgcactccagcctgggtgacagaaagaccctgtctc

SEQ ID NO: 562781 - DNA, 798 bp, Homo sapiens
ggtctacttttttcaaggggaaacaatactgggagtaccaagttccagcaccaagcccattcatgagggatctgaaggcagctccctgtcgtctgtgtttgaacacacttggcccatgatgcagcgggacaaactgggaggacatctttcgagacttttctttctggggccagaaccatctgcctggtacccagacagcccccagttcattacccgggactggcacggtgtgcccagggcaaatggacgcaaccactggctggccggcatttacatctcaggcatggcaccccgcccctccttggccacagaaatccaaggttttggcattctgcaaccccgctcaatggcttatcccgtttaccagcgatggccaccacgccggtggccgcacaccacgtactcccgccggccatttccgcgccacatgtggctgtccttgtttctccacgtgacggaggacgcacacttgggaggcccacacacctattgagtgactaccacggattggactggcttgtgcctgccaccctgtgaaacccactcccgagtgttttctttctttctctggagacaacagtactaccgaatcacattttcgcacacggcgagtggacactgtggaccctccctacccacgcttcatcgctcagtactggctgggctgcccagctcctggcacatctgtaggagtcagagcccacatggccgggccactctgtagctccctcctcccatttccttcccccagccccattaaggtcccttagcccacgataaaagaaaaaaaaaatccta

SEQ ID NO: 562782 - DNA, 180 bp, Homo sapiens
ccttgggaaactgattctaccaatatcttatatagagattaatgtatcaggcatttttttgcaaaacgatatatacattcctcttatttattaaatccctggctttggtgttatgtaaagatatttgtagatctcagaacagaattcaatcactgtgaaaattacagcttaaaaaaaaaa

SEQ ID NO: 562783 - DNA, 358 bp, Homo sapiens
  misc_feature (4)..(4): n is a, c, g, or t
  misc_feature (22)..(22): n is a, c, g, or t
tttntcaagttttacaataatntttgacacattgaagctgtgcatgtttatgggggcacaatttgatgtttcaatacatgtatatgttgtgtaatgagcaaatcggagtacttagcatatctatcatctcgtgcatttatcatttctttgtggcgagaacatttaaaaatcctattttctagctattttgtaatatacactaccttactgttgcgaaccatagtcaccctactgtgcaatagaacacctgaacttattcctcctatctagttgtaactttgtacccattgaccccccttcccttccttccactctcccctccccagtctctggtaaccactgttctgttccctatgag

SEQ ID NO: 562784 - DNA, 102 bp, Homo sapiens
tatgtcttatttctaacataagacatttaccagaaatgatccacgttaagttattgcttatgctatgtatgtacctatgaccccgtgaagttttgctatgtg

SEQ ID NO: 562785 - DNA, 244 bp, Homo sapiens
ctacccacacgcctgggttactcaggtctggcctgggcggatgtgtcgagtgaccattaaaaaaaaaaaaacatcacaagtctgtggattgaggcaccaacatgtccattgtaacccttggctgggccccgatatgcctgcatagcttctcgttgcccacaggaaaccttagatctccctcggatggcatcagtagcctcccttacagacagtgcacgccccattgtgaagcgggggaccctct

SEQ ID NO: 562786 - DNA, 833 bp, Homo sapiens
taatccacggaccatccctcctgccgtaacccagcttttcccccaaattatcagttatataggccgatagttaattgtgtaacctcggcgcgcaactaagaggatagtagccgcaagggatatagatgttgcagaggtatagcccaaggcattattatagcaaagggacgtataccccgttagtaccctgttgtgcagtaatggattcaccttgcgagaataaacattttgcaaaggagagcctaaagccttttgacccccccgtgtacccactacgagctacccctaagaacaagctcaaaggagcacacacccgttctattgtagcgaaatagtgggggaagagtttattagggtagaggcgacatacctaccgtagcctggtgatatgctggttgtccaagatagaatcttaggggtcacatttaaatttgcccacaggaccctcctaatccccttgtaaatttaactggtagtccaaagaggacagcttctttggacactaggaaaaaccttgtagagagagtaaaaaatttacacccatagtaggcctaaaagcagccaccaattaaggaagcgttcaagctcacacccactaccttatatcccaacatattactgaactcctcacacccaattggaccaatctatcaccctatagaagaactaatgttagtataagtacatgaaacattctcctccgcataagcctgcgtcagattaaacactgaactgacaactaacagcccaatatctacaatcaaccataacggtcagtattaccctcacttcccacagtggtgtgctgggtcgtgttgtgggcgcggcgctgg

SEQ ID NO: 562787 - DNA, 198 bp, Homo sapiens
gagctcggtcctgctgtcgtgcggatcgcggcggacacggtgtgcgctacgaactgatggaccgcatccgtccgtggagcctgtttcacagcgccatcgagcgaaagctggagcagcgcgccttcgaggagggcaggccgaacccggtccgtttcatccccaccggcttccagcagtcgccgcgcctgttgtgcgacg

SEQ ID NO: 562788 - DNA, 244 bp, Homo sapiens
cggtttttggggcccccccccctttttttccccccgggggggggggcgggggggggggaaggggggccctttcccccccccccctgggggggggggtttttcggccccccctgggggcctataccggggggggggggcccccttttttgggggggggggcccccccttttccccccccccccccccccgcgggggggggggtgggtgggggggggggcttttttaatttttggtttccctttta

SEQ ID NO: 562789 - DNA, 157 bp, Homo sapiens
tcggtgtagacagaggactgggttatctgtatcagcatcctcgagcctgtgtctctcattgggagggttggattttgtcgttatggatggaactactctaggaaattgcccttatggatagtccaactagtgtgcgggatgactaactgcccctgcc

SEQ ID NO: 562790 - DNA, 938 bp, Homo sapiens
  misc_feature (5)..(5): n is a, c, g, or t
acccncacagctgtagtgacaatgaaagcacagaagggagagaggtagcctgtcctctgctggttctctaataactgttgggtggtcactttttccagaaatttgtctcgtcatgagtattcccccactaagcacactgtttcggacaatctcgttggccccccgtgttttgacccgaacgctggggacccaccatgtacattggggcccactcttccccgaactttttgtgcgtatcacacatgagggcaccacctttgtttcacattgcggtgcctctcttaccaggcgtgtgggcgtggccttctctcgtttttttgggctgagggcggggcgtacctttttggccggtgaacccgccactccacaatttttggctgctgttaaagacgcccacccctagcttttgtggccgggtgagcactcctcccgacagtgctaacgctgggtgcttcgggacgatgtaggcagcccacggtggttgcttttgtgtatcgattccggttcggcgatacattaggttgcaatgcccctgcctgatcaccgcaggctcccctggactgtgttgctttcaagcgacccccgcgcttttggcctcccgtaggagtctaccgcgcgcgttactttccccaaggaccgcaccgaggatgcgtgatccccacagtgtgtgtggaaaacattgggcaggtgcacaacttttttgcaatatatgtgaccggcaaagagacccgtgttatcattgctggatatctgttcgaaacaatctccgctctttggacgccaccaggttctcccgccggtattttgccgcccccacacgtgcatggatcgtagagtaaaaatggtagtgctccgcgggatgatagcgacatgactcacacccccgagtttagggacccctggacaggtaacaaaaaactcccccccccgaacaaaca

SEQ ID NO: 562791 - DNA, 1246 bp, Homo sapiens
ggccatctggcatcgatcactgtggagggcaggcgaaggtggctctgatggtccatggaccacatccgaggtgttggctaagctctaacctcgtggacctggctggtcacgtccgagagagcagaacaaggcaggtccccaacacatgcgggagtgtggctagccgagaccaatccgtcgtggtaggcagagtggaggtggcgagtaggaggcagtggatggtgcgttgctgggtggcagcagtaggccatatttgcaatggctctcccataaaatctaagctactcaattgatcttggccctgaggcgaacgtcgattgcttggccctgtgccgccagcaacaaggtgaagcagccctcgactacttcgccgtatcacaaggcgcacttcgccaaaaggcagtggacgcactgagcattgggcgtccccaagtggaactaccacgttggtgtggcgggggaacattgcacgagacgtagcacaagtacgaatcgtgataggactccactagaattggggggcacaagtctttcgtccaacctaaggcgtatcgaattgcacgcaaggctggtcctttcacaacaactttgggctgacttttttggacacctaaagacggtaagtcgctaaaggcataacgatattccatagggacaccagtaagtccgccacgcgtgggttgaacatccgaaggggaccgcccaaatgggaatccacacacatggtatcggccgcgggaaaaatcttacgaaacgacagtggaggactattgctcacaggtccaagggaaaaagggtccccccacggtcgtgtgcgcatgaaagaacggcaggcggtgcggtgaaattgaccctcgtggtgggtaaacagcctgcgcttgcgccacgtctgcaaagggggccaacaggtaccggccaaagcgacctcgagaccatcgtcgccaccaagtccacacagacggagcgcggtatgaccaggccggtcacaacatgctgacgcaccttgcgggcactaacacccacattggaagacgcgaacaccccgaagtagtgaacacgtaaggacaagcggcaccatgtagaggctgcgaccaaggcaacagaaagggcaagcggccatgtcgacacagaagaaaagagccagacaccagagcacgaggcagaaaacacggaacgcgacgaagcgcccgcgaaatacccgtggcagaagttccacgcgcgtagtaacaagaaagagcgagcgaac

SEQ ID NO: 562792 - DNA, 120 bp, Homo sapiens
gaaagagctgagatcagtcaaggttgtgtaacgggtcagaatgtagatatatgtgtacaggatatgtaccagcatcatcatttcactgggctctcatcactagtatgggctcagtactct

SEQ ID NO: 562793 - DNA, 1185 bp, Homo sapiens
gagtatggttgaagaacacatatgtccatagttacacgtgcctgtctgcgctaagtacgacgtgggagaagggagcgtggtagactatgttgctgagcattattttgaatgtatgagtggatctgactcggtagttgtgatatagaattcatatgatgagtctgaggttactaggtattgcattactggagaagggtcacgcgaacggactggctttccatgagtgctaggacaagtggaataggggttgggctattgagttaaatcctctaggaaggtctccatccattgctcatggatctgtcaggtctgggcagccaggccgccgacattgtctgcctacgtctgagtcgatttgcttacgtccaggtaggatgtgattctctcggcaatttatgatggaattccagtatgcccgtcttgttctacactctagcaggaagatgcactgtctgcgaactcgttacatttacgtatagtctgcatgtgagttgggttgtgcaccatagggtattaaaacctaacaaaggtcttatcttacttaaggacttgctggacagggaaagaggataagtatgaatcgtacgcggaggttggagataatatgacggtggacgcttgaccctttgttgacagtactattatttcacgccaatgctgaaggaaaacagaggtgaaaaaatacttatgatactgcggggggtaaggactcaaataaatataatgctttaagaaagggtactccacaaatttgtaggaagaactaccgcgtcatatatatttgagaactaaggacggggagttccccaattaggcgcgaggggtagaaaatgaaaaggggggaaagggccttgaaggtttggattaagttaagtaattacaggggacagagaaacttgaggtgtagggccacggggtttaaattttgtgggggaaacattttcggaagtaattcgacagcttcattgtgttacaagggaataatacgggatgttgagtgggggacaggggaatggctgtaagaaggtaatgtggagtggtttacagaagtggtgcttttgaatggaaagttaatgatggcataaaaagtggtggtggaaatatattgctgccgttacttccaggtggttatgaatagagttttgggtatgggaaggaatagaaggtttgggagacaaatatttt

SEQ ID NO: 562794 - DNA, 128 bp, Homo sapiens
tagactctgagccacatcatagaacacacacacaatgcaatagtcaccaccaccatttggagaaagacctattgacagcagtgcgtcacaaagaccaggggacagaacgtgtagacaagggacaggat

SEQ ID NO: 562795 - DNA, 168 bp, Homo sapiens
  misc_feature (27)..(27): n is a, c, g, or t
  misc_feature (30)..(30): n is a, c, g, or t
  misc_feature (40)..(40): n is a, c, g, or t
  misc_feature (60)..(60): n is a, c, g, or t
gcgacgcggagagcacgccaataaggnccngggcacgccncgagagaacaaggaggtggngcttcctcccacccccaaaatccacacgccgcccccttatccgcaagtcgaaaactttttcgcccatacaagtcggctaagtccccgtttctttgcatcctgtatctc

SEQ ID NO: 562796 - DNA, 1235 bp, Homo sapiens
tgggtcggctaccaccaggttgctagcgcttatatcttacatgccactcgggtgaggcagccgtgcgtgcctgcgtacatcttcctcggttcagacgtcgtcgctcctcgcacgccgtgtgcgcaaagggcctcacaggagcactccgtcggcgcacagaatatcgcgtgagtggaaatcgcgtcgtcacacagtctggaccaccgtttcacagaacactgagggcgcacggcgccaggcgatgcacgggcaccgattacttgtgctgcctgagtcgcgggctcgcgtgcttgcgggcccgtgtgtgtaccgcgtgcgcccgcgcttgtggagtctggggcttgtgcgggggggcctctgggtgtgcgccgttttgttgcctctcacctggttgggggtgtttcggcgtttttgcggccgcccgggcgtggtcgcgcgcgggggttggggtcggggggctgcgctgtgtcgtctgtgtctcccttcggtctcttcggggtctcgccgggcgtgtgggtctcgcgattgcggtttctggttgcccttgctggtgcttcttgtcgttctctcgtccctcttgttcccctggtccccccttgtgtactggaggcggagcgctggtgttgggggtgcatgctcttctttgacgtctgccgctgtggtgcagggtcgcctcgggttgctacgcgcctcgttggtcgcatgtctggtgcctcggtagtgaggtgtgtctatgttgtctgttggtagcagagggggtgagtcctggagtcccgccacagtaagcgtggttctagtgcctccacggggtcctgcttcttgtttcgctggtctgtctgtgttttctttcttctttgagagctgggtctcgcgtttgttgcaccaggctggagtggagtggcgtgatcttggcttactgcagccatttgcactccaccggtctcgagcagtcctgcactcagcactccggagtagctgggactcacaggttctatcgccaccatggccgagccaaacttgttgcatgttttgtagtagtatggggtctcacagtgttgcccaggctggtctcaaaactcactgggctcaggcgatccacctgtctcagcctcccagagtgctgggattacaattgtgagccacgatcgtcacagctggaagggtcaacatcgttttacattctgcaagcacatctgcagtgtagcccgaacccttcccgctccttcgtcccgttg

SEQ ID NO: 562797 - DNA, 356 bp, Homo sapiens
  misc_feature (349)..(349): n is a, c, g, or t
cacaagtgtttttgggcttctgactcccatgacctaaaacttaccatttgaatcttgagaaagtcagataatctctaagcctcagtttcttttcccattcctttaattaaccattattgggataaaaatcccttattgtctcacaggattgatgtgaaggtaaacaaaaatcaaatgagataatgggtacaaaagtgttctgaaaaaaattcaccaaacccattcaaaggcatgtatggtgactatcatcccccaggaaagcaaagttctacccctctgagccaatttcagttttcattttccttgagtccttcttctgattggccacatgcccatagagtttgttaanttttcct

SEQ ID NO: 562798 - DNA, 339 bp, Homo sapiens
tccctaaccagcagtgtaaaagttggtctctttacaccacattccattcccacatctatcgtgtttggacttttaaattaaatgatggcattcttgaggaggaaggggggaatggcttggtggattcattggcgtatggctaatgataagcgatgttgagcattttttttcatatgtgggtgggcggttggtatatctggaaggagaatggtctattgatatccttggcccgcttttggatgtaattataattttaatttttttctggtcaatttcttcgcgacattttcttgcttgggtcattcttgaaatgcctgtaactcagcggtcggactcccg

SEQ ID NO: 562799 - DNA, 471 bp, Homo sapiens
  misc_feature (97)..(97): n is a, c, g, or t
  misc_feature (349)..(349): n is a, c, g, or t
  misc_feature (468)..(468): n is a, c, g, or t
tagccgagcttgaaccgtctcgccgatgcgaatcgaacctgcatccggcttctcctggccggtgaaaggtcttgaacagcgtcgtcttgccggcgcngttcggaccgatgacgccggacggaatcggccgcggcagccggaacgacaggttctcgatcaaaagctcgtcgccgaagcccttgttgaggccctcgacctcgatgacgacattgccgaggcgctcgctcgacgggatgacgatctgtgtgtcggtcggcttgcggttctgcgactgctcgaccaattcctcataggccttgatacgcgccttggacttggtctggcgcccttgggcgatgactggatccanctcgcgtcgcgccagatcgacttctggcgggcgttcgtctcgcggccttcctggatcaggcgcttggccttggcgtcgagatatttggtgtagttgccctcgtaggggaatgccgcggncgc

SEQ ID NO: 562800 - DNA, 1433 bp, Homo sapiens
cacctctgcgtcgttgctctcggctcgcagcccccggcgactcgcgcttagtgttgtcgtgtgtgataattgtcacgtccgagccccctcctggttctctcattgaagaccggtctcctccctctgttttttatggcccgggctgatactctttctcctaggggccagtttcccgtatgccctgttttggggccaccttgtggccgatggtgcccaaaaaaccccgggtggtatccgtctccgtatctccccggggattctgcgagcccccacggttccccggttgattttagcccctaaatctctggcgcattctacaagcgcccaccagactggggtcccccctttagccaagacagtcccccggcccttcttcagggttagaacgttgttgtgcccccgcggttgtcgtgccacaatgcgggtcccccgggaggggacaccacagttgggtccttcaaggcggattcacctcggtttcggcttgggaccccttgtcgtcccctgggttgggggccactcccaggttcccaccaaaaccctctgttgcttccgccgggaatttttctttcttattacaccggcgtgcttcccctggaaaaaggggttgggcacccacagtgtggttcttcctacccgctttgaaggtaatttttggtggaaagcccggtatattgacgtggcacagaagaagaaaaaagtggtggccaatgccccccccacgagaggggctttgtttctcccacaagttatcttcggagcttccgaaagttttgtgcgcacaaagtattgcaccacactctaaagtgggaccccaagagtggtgtctcacccactccacaagtgaagctctcttgtgtttctcgttatagggcgtggagagagagcttctgctcccacagagatatatacacactcgagaagcacacgttttaagtgagcccaattttctcttcaagccacgctcctctctctttaaggagagagggtgatacctcgtttccgagaataactcttcttggggcgctttctcgtgttctcgagaagtgtcctcgtttgccacaaagacccaagaccgcaaaggatataaggagaaataattttttgttaagggtgtccttctatttgcgaggcacaattataatctgagtgagaacactataaagcttataatcacgtgagaaaactgagatcacccttccttgcacaggcggagtctgccacattggagtcgtatttcacgttttttgggtcacaataatatgaacacaatgtgtgaaccacgaaacgtattggtatttgacatccaagctattgtcttggcaataatgtttaatgttgaataataacttgaaattcactttaaatggagaatgttaattacatcgacttcttactataaaaaattaaaagttattgtcccagtgccacca

SEQ ID NO: 562801 - DNA, 248 bp, Homo sapiens
ctcccctctttgctctctccccgttgataccattccatgcctgcatcttcggtggccctgcttgtgagcacccccctgctctgttgctggaggctcctgcccaccctctgttccaaccagcctgagtgattaggcacacgggaggcagggtcccatcactcatggaggctatgggagaaatcgttctccgtggaggtgctgcaccttgtgacccagacatagtaggactttttctcctaggacccgca

SEQ ID NO: 562802 - DNA, 946 bp, Homo sapiens
ccaggaagtgaagtgcgaccctccaccatgccgtctacactccatcggtatccatgtggtattacctactcgatgtgggggacacgtgcggggtctgatgctgtgagtgccagaaggtggctccggtgtgtgtaggtggccgtgctgggtcaggagcctgggctgtagtcgttcggctgaacagcacggcctgactgcgtcacgggcattattaatactattaaggatgtccaagagtcaccttggtttgttgaccaggtcgaggcacgtttcatgttactcccctattggacgatgataacgtcaggcgttgtgtctgattccggagaaactatcaaattcaattcagcgtgttcatgtggcgtggacgaagggtggtagtattgaccctgctggaagcgatccttgggcacttccgaggcatgtcggccgtggttgggtggggcgcacggacgacacggggtggcgattgtccccttgtgcgtgttactcagcacgtcgttggctgctattgacacatgtcaccattatgtaggatgcgttatggctgtaataataaatcgcacgaaaaccattcgagtcgcactaaattggtacacatactgcgctcaaggaagtccagttgtcggagtactccgttgtagcacacggcaaggaaatggtgcatgacccgctcggcacgtaaagacaatgaggcataattgtccgtatgcaccagggactggggaatgcgaccattgtccaagccagcgtcgctaaagtctcggtcacacccaatcggtgcggtataccgatgtgaacgccgtaggggaaggataaggtgtgcaaagcattcagcatgggataggcggacatctcgtttgttatgtgttgggccatgtatgcacgatcccggtgggaaacttgggcttgggcatctaaggggtgctcccgtggcttgtcacag

SEQ ID NO: 562803 - DNA, 311 bp, Homo sapiens
  misc_feature (83)..(83): n is a, c, g, or t
ctcggttggaatcggcagctgctcgtaggttgactcatccatgaagatgtaggtgtcgccatcctgatagaggtactgcatanggcgacgatcgacctcagccgattcaatcttgacgtcggagttgaaggtgcgatcaacgactttcccgctcagcacgtgcttgagcttggtgcgcacgacagtgttgcccttacccggcttatggtgttggaaccagatgaccgtccacagctggccgtcaaggttgagaacggtgccgttcttaatgtcattggtggaaataaccacaggtcgggccctttcggagc

SEQ ID NO: 562804 - DNA, 135 bp, Homo sapiens
tcacccctcagaggtggttgagtaccgccatggtcgtcaggcgtcaggtgactgttttcctagtgttaaaagagagttttactgacgggaggggcagtgtcctgtgtggaaggtggctgacggtgtggagggctg

SEQ ID NO: 562805 - DNA, 968 bp, Homo sapiens
ggtggcttcttggctgcttgacgaagtgtcgtgaataaacagaaaggagaccgcagaagtaaagaagtggggagtttaggtgtctgctttaggggcagagtttacatcgagaggctatgcagcagagttaggctttcctagcaactgtgcttggcagctctagtgatcttctcggacagttcaaccgtgcttcagctggatcctgatgtgcagaggatgctgctcaggaggaagcaccaatttgaaaccaaaaacgctgtatgcaggagctatacttgaagtcacgcggatgaaaacttgggcacggttccctcaagtccaagctattggtacaggcagtgatacaacccaaacgtgtacagaggacctgcaaactcacagttatgtcccgaggttcagaaccctgttattaacagctttaggggacgacaaaggggcacacatggctgcacgaacttggagcaattctcaaaacggaacacagacagtgtaaaacaaattcctggcgtgacacgttggaacgcatattaaattcttagccgaacaattctggacctaatcgctaaggaaacctttatcacactgcaattattacaagaagctaagaacactacattacagtttgggctaggtcccattggctccaggtctataacttgaggccacagaacgtactctgaaataacatcgagacaactgagcaggaatcagaccgcggacactcatacagaagatggacaaccattgaagaagagcccaaagaaaaatacaaatgctccacagcctaccgggaattgggatgaaccccactaaaaaaaacagggattgggaaaacaaccatgcgcgtaacacaatgcaaactgaaaagacgggggaacatgaggacaccaatagagtcaagaaagaagtcgcccaacaccgcggaccaaacacagacacagagcacaaagaaagagcgcacaaaaaaa

SEQ ID NO: 562806 - DNA, 1378 bp, Homo sapiens
ggcgggacctgacgaagagcgtggatgtgctcctctctccgccatggcgtgtgctcgcctccgactgatatcgagtgtaactccgataatagagtggagagttcatcttgggcaaatagatgtccaactatatgtctgcttgtcattcagaggctccttattcgatcagattattgtgaacatgtgttacacaccgaaacttgaacgctaaaataggaagctgacagtcctaatatgctgtcagtgaattgagcgaaggtcatcaagcagtacgtgcttgagtacttggggtcacttggcagagctgtggcgtcgaattcccagaagattcgatggtggatagagggaggtcacacgagtctggcacagtggatgctactttagaggaacaccattgtgctccgttggaggctcgcaatgatattgccaccaaagccaataaacgctggatgccgttggacgatcgattagagtgaacacgaaacccaagagagacgcatacagccatcatgttctgaccctggacatgccatcagcccgtaccagtcgactgtgtcaatgtctaagaggtcaatcgatatatgcaggaaaggttaacctgaaaacttacctgtatgcgtaggttgaacgataacagtagagacgggctaccaaaggacaggaccacaaggcacagcgagaaaatgcatcgcagaaagcacaacactgaaacagaccatgggcacaaggatcaatcgaacacaagagacatagtgacatcctagcagcgaaacatgaagaagcgtgggaaaaagggcacaaaacagtcagaacacgggaagcgacaacgaagatccaacgcgccagggagacacacgagagcaatccataacataaaaaaaaagaaacgacgacacacagcggaaatgacagaccacagggaaaccaaaacaaaaaaaaagcactaccgcagaggaaaacaaaccacaaggaacaaacacatgaaaagaacaaaagcatgaaaaaattaaaagcaaaacaaaaggataccacttgcgaagcgacccacatgagagagcacagatacaataggcacaaggaaaacaagggaaaagaaggaaatagaacaggaaaagagaagaaaagaaaatgagaacacaggagaaacataggaaccagataaaagagtgcagggaacacgcaaacacaagacagacaagcagaaaacagcaagcagcaagacaagcacaagaaaagcagaatacgacgaacaaacgaggaagaaagaaccacaaatgggaaaagaacacacgaaaagtgagaaccagaagcaaggaagaggaacagccgagaaaggaaaggcacaaacagaagagagaagacgacagaagaagaagac

SEQ ID NO: 562807 - DNA, 235 bp, Homo sapiens
gcactatacagtacattgttatcaactgcaatcaccgtggtatacattagctcctcagaccttattcatcttatagctgaaagcttgtaccttttactaacttctcacccatgcctaatcccctggccactacttttctatgctgtatttctatgagttcttttttttttttttaatcccactttggtgatgccatgtagcattggtctttcttgggctaagaccgctctaacgg

SEQ ID NO: 562808 - DNA, 627 bp, Homo sapiens
  misc_feature (107)..(107): n is a, c, g, or t
  misc_feature (179)..(179): n is a, c, g, or t
  misc_feature (291)..(291): n is a, c, g, or t
  misc_feature (352)..(352): n is a, c, g, or t
  misc_feature (359)..(359): n is a, c, g, or t
  misc_feature (418)..(418): n is a, c, g, or t
  misc_feature (448)..(448): n is a, c, g, or t
  misc_feature (494)..(494): n is a, c, g, or t
  misc_feature (509)..(509): n is a, c, g, or t
  misc_feature (526)..(526): n is a, c, g, or t
  misc_feature (569)..(569): n is a, c, g, or t
  misc_feature (571)..(571): n is a, c, g, or t
  misc_feature (607)..(607): n is a, c, g, or t
tacacttattatctcacaaatagaaaatggtgaaggatccaaaaatcaaccacaattggccttggaggaaacctatatttaatgttctaggaaatcctgtgaaagtnaaaaggatctctccagtttccccatcacaattatctgcttaattcctctccattctactcttgaaatatggnttatctcttagactaatataaagcagagttacattaaatctcccttggagcagttagggcagttaagcatttgggtttcaaaggaatgcagccagtaagcaaaattaacatnaaaagagaaagccagatgtcaaaatactgagtaaaatggtgctgtcaataatgaaatcagnactgcantatggagaatccccatgccaataacctcaaggtaaatttgaaaataccatggtttcagnatacaaactttcttcatcccttcatcttgnggaccctaatatttttttccttccacccacttacatccctcttttnattaaaaaggtaacnaccaaagggggaaaacnggattttttgtcaaaggtggagacttaatccaccccagcttgncntttcaaccaaggatatcattcatgacttaagctttnataatggacttcatcctttt

SEQ ID NO: 562809 - DNA, 178 bp, Homo sapiens
  misc_feature (124)..(124): n is a, c, g, or t
gacgctaggcatacttgtcttgtccagtgttagggggaacactttcaacttttgcccattcagtatgatgttggctgtgggttcgtcatacgactggctcttattattttgaggtacattccgngatgccttagttgtgagagtttttcatcatgtttgggatactggaatttttaaa

SEQ ID NO: 562810 - DNA, 482 bp, Homo sapiens
  misc_feature (39)..(39): n is a, c, g, or t
tacagtgaagtgtggtggatagtgtcaaaggtgggtttnccagcttctcccaggccacccattcagcagcaggcgctgtagtctcaaagcccagagagattgcctcactcattcggaacaaatttggcagtgcagacaacatccccaacctgaaggactctttagaggaagggcaagtggatgatgcggggaaggctttgggagtgatttcaaactttcagtctagcccaaaatatggtagtgaagaagattgttctagtgccacttcaggctcagtgggagccaacagcaccacagggggcatcgctgtaggagcatccagctccaaaacaaacaccctggacatgcagagctcaggatttgatgcactactacatgagatccaggagatccgggaaacccaggccagactagaggaatcctttgagactctcaaggaacattatcagagggactattccttaataatacagaccccatgc

SEQ ID NO: 562811 - DNA, 982 bp, Homo sapiens
ggaggagaggacagcatagaacctgcatgaagatggatgtgggcagtaaagaggtgctgatggagagccctgctcggactacatccgcagactccctcggggtccgaaattggcatttcccttgcttgcccagtgctatcgtgaaacggccgtttcgtaatcagtggacggtggtgagtgggtccgtcatcgtacgtggatgattgtagggagcccgtgctgcatgtggtctccaaaatggaggccaagaacacataaaggtacatggttctggagatgagcataggggcgccggaagccccagtaaaggctggagcctgaggtgagccatcgtggttacccatcttgctatcttctctcatcggctccactggtcgctcgaggtggtatgacctaatccaggtagctgctgatcgatctacaagtcctagcccctggcggcctgctggctacatgcgatgaagatagctccagaggaggcatcgcccagatcttgaggctctcattagaaaaagtccatgacttccagatggtcttgctctgtgtagggcaggtcgcgtaggtgccataacggtctaaagcgcggcacagggcagagggggggcgaggagtgcaggtgtcagacaacggcctccccggaaggggggaacccaagcgcctacacgtggaagcagtggacagtagacgacagcaccctgtcggcagggcgaagggtagccagaggctactagcatgcctaaggaacggccgtccgggtgaagcagggatccagggggaaaaagccccaaggggtacagggtagacggacccgggacaaacggggtcctttggacagcgctccggccagacgggcccatgaaggctgggttcagggcacgacaccaggagaggaacaaggccctggaggaatgggaggctggagtgagaaggacggacgaagggcagaggttgctgcccagggccgaggaagtcccgaccacaa

SEQ ID NO: 562812 - DNA, 423 bp, Homo sapiens
gctacatagagcggatcatcgctaaggcgtagggatagaggagatggtgcattctttttatttatctactttattattgtaagtattcgcaaagagacagaggattgctctgtcgcccaggctgaagtgcaggggcatgatcatgactcactgtcgccttgacctcttgggcttaagctatactcttgcctcagcctcccaagtagctgggactacaggtgtgcaccaccatgcctggctatttatttctatagagatggggtctcacatgttgcttatgctggtctcaaattcctggcctcaagcaatcctgccttggcctcccaaaatcctgggattatagatatgagtcactgtgtccagtacacttaaaatacgtgtgcacacacacacacacacatgtgagccatatgtctcaccact

SEQ ID NO: 562813 - DNA, 101 bp, Homo sapiens
gacgcttactagcctcgcaggtgtctagcctcgcgtatgtctagcctcgcaggtgtcctagcctcgcagtgtctagcctcgcagtgtctagcctcgccagt

SEQ ID NO: 562814 - DNA, 444 bp, Homo sapiens
  misc_feature (1)..(1): n is a, c, g, or t
ntctttggtccagtaggggtcactgagggttaggctctcaataagagaaacactaatctaagtgataaatgagctggattccttgtctattgtgacatctttgtatattcagtactatgttttttaaaatattagagcagaaacaaaaggcgtgaacttgtattaagaactttatgggcgaagcgcagtggctcatgcctgtaacccgaggcgggtggatatcacctgaggtcaggagttcgagaccagcctggccaacatggtgaaaccccgtctctaccaaaaatacaaaaattagcaagccatgggtgcatgcgcctgtaatcccagctactcaagaggctgaggcaggggagttgcttgaacctgggagacggaggttgcagtgagttgagactgagccactgcactccaacctgggcaacagagcaagacttcgactca

SEQ ID NO: 562815 - DNA, 511 bp, Homo sapiens
  misc_feature (10)..(10): n is a, c, g, or t
  misc_feature (217)..(217): n is a, c, g, or t
  misc_feature (298)..(298): n is a, c, g, or t
  misc_feature (339)..(339): n is a, c, g, or t
  misc_feature (347)..(349): n is a, c, g, or t
  misc_feature (351)..(351): n is a, c, g, or t
  misc_feature (362)..(362): n is a, c, g, or t
  misc_feature (366)..(366): n is a, c, g, or t
  misc_feature (378)..(378): n is a, c, g, or t
  misc_feature (380)..(380): n is a, c, g, or t
  misc_feature (384)..(386): n is a, c, g, or t
  misc_feature (395)..(397): n is a, c, g, or t
  misc_feature (425)..(425): n is a, c, g, or t
  misc_feature (428)..(428): n is a, c, g, or t
  misc_feature (434)..(434): n is a, c, g, or t
  misc_feature (455)..(455): n is a, c, g, or t
  misc_feature (494)..(494): n is a, c, g, or t
attggttaantcttcaaagaagagatcattttcaatgctatttaaactcttttcaggcaatgtatagataacataaaggaaacttttaaatttattctccaaaaccaacataatacaccaaaacctgacaatagcaagttcaacagaaaaaaaaaaattacagatcaatatgccttatggtgaaacacctttgtaaaatgttcagtacaatattaanataatgatatagcattgacaagtagggtttatttaactaagactatttcaaggttaataagttggttactttaattaaccncattaatgtgtcaaagagtaatatataatcctctcaatggntgccaaannncnttttgataaanctcngccatcattacngntaannncttggaaannnacccaaatcatggttatctatttctccnttntcctcnttcccattgatatcagacatngggacgcccaccaacaccacttttgtttaaccttgttcnagaagtacccaccactt

SEQ ID NO: 562816 - DNA, 570 bp, Homo sapiens
gggagcaggacctgtaccactgccatcgccaccgtggccagcctcctgctccgcatcggagaggtggggaagaagttctcaggcccgcatcaggcgaggaagcccaggactgtgccactgaggaggacgagccaccagcacccgaactgcatcaggacgcagccagggagcttcagtccccagctgcatggagacccctgaagccgaatagcaggcggagacacacacctcggaacagtcccacaggagagccaggtggtggtggaggggggcagtggcgagggacagggctcaccctctcgcaagctgcgtgtcgtgactgatgagacaccaaaagcacgacggtgtccgtgttctcctactcggtggtcagtaccgggctccctgctatgtgaagaccttgcagactgacacggtgctggtgggcggggaggcctgtcagccccatcgagcgcgcactcggacggacgaccgtgctgacatgcagactggtgtcatctcctttgagcacgatcctggcctccatcctgagcggagtccgtgctggtgaacttctttgagaagagagtg

SEQ ID NO: 562817 - DNA, 466 bp, Homo sapiens
gagtacaaccggcgtgggcaggagaacgcttgaacctaggaggcagaagttgcagtgagtcgagattgcaccaccgcatgctaggctgggtgccagagagagaccctgtctcaaaaaaaaaaaaaaaatctatttactcacactggtacctaatcggccttctggccaactaacttcagcaactggccggggtttccaaaccatccctctgtgacctgggccccagccgggctttctagccctgcttgtggctattctccaacgagtactggtagcccagttggtcctcctactacccttagcacataagtcttcgggctcacataagggtcgaaaagggtttggactggaactggcttgtatccaagtggcccccactttgcccctttgccctctccctctgtcccggctcccaggccatccgagctatggcagggacacagcaagaaggcctttcttatcctct

SEQ ID NO: 562818 - DNA, 413 bp, Homo sapiens
  misc_feature (31)..(31): n is a, c, g, or t
  misc_feature (86)..(86): n is a, c, g, or t
gaaaatgccatgttccattgttttaataatnccataataccatatattgagagaagtgaagagagcctattccctttccccatganactgttgtgaaaaaagtagttcctaggcccaggtatggtggctcatgccctgtattccccagtactttgggaggcccgaggtgggtggatcacttgagtcccaggagtttaagacccagcccgggcaatgtggcaaaactttgtctctcccaaaaaaatacaaaaactagcccaggtgtggtggcatgcacctgtagtcccagctacttgggaggctgaggtgggagaatcacttgagcccaggaggttgaggctgcagtgagctgtaattaagccactacactccagcctagacaacggtgagaccccgtctctctacaatacaaa

SEQ ID NO: 562819 - DNA, 851 bp, Homo sapiens
ccctcaacacccactccctcttagccaatatgtgcctatgccatactagtcttgccgcctgcgaagcagcggtgggcctagccctactagtctcaatctccaacacatatggcctagactacgtacataacctaaacctactccaatgctaaaactaatcgtcccaacgaattatattactaccactgagatgactttccaaaaaacacataatggaatcaacacaagcacccgacagcctaattattagcatcatccctctactattttttaaccgaatcaacaacaacctatgtagctgtgccccaagctttcctccgaccacctaacaacgccgctcctaatattaactacctgagatcctaccctcacaatcagtggcagccaacgccactgtatccagtgaaccactatcaacgaaaaaaattctacgctcttctatactaaagtctccctagaaatctccttagttataacattcacagccacagaactaatcatatgtatatctgctgcgaaacacaagtatcgcaactgggtatagtaccgagaggcaccagacagaacgcctgaacgcaggcaggtagtttctattgtacacacgtagtagggccgtccctactcatggagggttaacatcaaaactaggacataaaatacaatagtacacgcaagcagaagatcaagcgagcagagagttgacacctacaagctgaggaggacgtagggcaagatctagcggcagccacgggcagcaacggcacacaaggtggaaagcagatcccgaaggccccgatagggaaacagcgacaagcgtacaacggacgacggatagctcaccccacacggcg

SEQ ID NO: 562820 - DNA, 189 bp, Homo sapiens
ccgcgtacaatgtacattcctctgacagaggtgctgttgcttactcccttccctccttcttcctgcctcgaactgtggttctaatggcttgagtaccaaaaactactactatgactatgtggcaaccttgaggttagaagccacatgccaatgtatggcacttggatggagtaccacacacgaggcaat

SEQ ID NO: 562821 - DNA, 453 bp, Homo sapiens
  misc_feature (276)..(276): n is a, c, g, or t
caactagatttgggtggagagtgggagggattggtgtatgctactcttaagattcagggtatctttcaaactgaatctttgtttccagtattaaaaagcaaacaaccagcaacaacaacaacaaaagtgatttagatcaaatgtttatgtaaagaaaattattttcactcagtaaatctgaaaagtaaatggataatgttggccatgttttgcctttttgctttttctttgggaatctacaggatcacctgtcccctcactcccaaaagtactatntatgttttgaacaacagtggaatactatatcaaaggtttggccaaccaaccacaaagctacaaaacaagcaaatcccaaatccttcaattgatagcattcattttcactaccaacaaatttattaagaaacaagtagaaaataaatcagtggtcgacttggggaccgtaatggcttc

SEQ ID NO: 562822 - DNA, 557 bp, Homo sapiens
tgaaggtgcgtggcctataatgtggtacctgccactatgagtgccagctttgacttccgagtggcaccagatgtagacatgaaggccttcgagaagcagctgcagagatggtgccaggaagcaggagagggggtcacctttgagtttgctcagaagtttacagagcctcgaatgacacccacggatgattcagatccctggtgggcagctttcagccggagcttgcaaggcaatgaacctcactctggagccagagatctttcctgctgccactgacagccgctttatccgggcggtggggatcccagctctggcttctcgcccatgaaccgcacacctgtcctgctacatgaccataatgaacggctgcatgaggatatatttctccgtggggttgacatatatacaggcctcctctctgcacttgctagtgtgcccaccctgcctagtgaaagctgaaccccagggcttccaactcttgtactctcagtcctaccactgccaaggatctgtttcccctgcccagtaataaagccagcattggatgggatgttctt

SEQ ID NO: 562823 - DNA, 799 bp, Homo sapiens
  misc_feature (2)..(2): n is a, c, g, or t
cngcacgagagaaaatcacctgagggccacagtgttccctagccctggtgtttaggggcaggattatgggtgagatttttgagtctctaagttgacccctacggctctgaagtgtatgttgagaaattcagctgttatcatcctaggtggacttgctccctcctatcctcctacttcaaatgcagaacttcaatcgtttacaaaagaagactgaatcgtataatagaacacacccttattcattggctggcttcaccaatctcatggctgaacttgtaaaaatacaatcttagccacatacctatgaaatgtatatgtgtgtgtatatatatacatgaatttgcttctgagattatggaggctgaaattcccaagatggaaggaaagctggatacccaggaaagcatttgtttcccattaggcctcttaattctctcctggcccttgattgattgcatgaggcccacccctattaaggagggcaatctgcttcacttagtctgcccatcccaatgttaatcgtatctgaaagactctctggaacacaaccagaatcatgtttggccaaatgtcctggcaccctggtgctcggtcacagtgacaagtacaagtaactatcacacatgccctttgtcatattggtgatttccactgtttttctcccaaactgcagcttatatttgttctcttaatactgttgagcaaaaacttttaatttttataaagtcgaatttatcaatgttttctttaatggtttgtgtttattgataataaagaacactttgcctaaaaaaaaaaa

SEQ ID NO: 562824 - DNA, 118 bp, Homo sapiens
tcggtctaccttgtttctcggctctactgtctctcgcacacccatgacgcactgctcacgaactacgggctgctctactgcttcagtgaaggacatagacaagggggtaccgacgctc

SEQ ID NO: 562825 - DNA, 733 bp, Homo sapiens
  misc_feature (2)..(2): n is a, c, g, or t
  misc_feature (647)..(647): n is a, c, g, or t
  misc_feature (653)..(653): n is a, c, g, or t
  misc_feature (684)..(684): n is a, c, g, or t
cngcacgagagaaaatcacctgagggccacagtgttccctagccctggtgtttaggggcaggattatgggtgagatttttgagtctctaagttgacccctacggctctgaagtgtatgttgagaaattcagctgttatcatcctaggtggacttgctccctcctatcctcctacttcaaatgcagaacttcaatcgtttacaaaagaagactgaatcgtataatagaacacacccttattcattggctggcttcaccaatctcatggctgaacttgtaaaaatacaatcttagccacatacctatgaaatgtatatgtgtgtgtatatatatacatgaatttgcttctgagattatggaggctgaaattcccaagatggaaggaaagctggatacccaggaaagcatttgtttcccattaggcctcttaattctctcctggcccttgattgattgcatgaggcccacccctattaaggagggcaatctgcttcacttagtctgcccatcccaatgttaatcgtatctgaaagactctctggaacacaaccagaatcatgtttggccaaatgtcctggcaccctggtgctcggtcacagtgacaagtacaagtaactatcacacatgccttgatatggtgttcactgnttctcnactgagtatatgtcctagacgtgcaaactanttataagcatatatgtcttatggtggtatgtatagacctactaaaacaa

SEQ ID NO: 562826 - DNA, 745 bp, Homo sapiens
  misc_feature (2)..(2): n is a, c, g, or t
cngcacgagagaaaatcacctgagggccacagtgttccctagccctggtgtttaggggcaggattatgggtgagatttttgagtctctaagttgacccctacggctctgaagtgtatgttgagaaattcagctgttatcatcctaggtggacttgctccctcctatcctcctacttcaaatgcagaacttcaatcgtttacaaaagaagactgaatcgtataatagaacacacccttattcattggctggcttcaccaatctcatggctgaacttgtaacatgaatttgcttctgagattatggaggctgaaattcccaagatggaaggaaagctggatacccaggaaagcatttgtttcccattaggcctcttaattctctcctggcccttgattgattgcatgaggcccacccctattaaggagggcaatctgcttcacttagtctgcccatcccaatgttaatcgtatctgaaagactctctggaacacaaccagaatcatgtttggccaaatgtcctggcaccctggtgctcggtcacagtgacaagtacaagtaactatcacacatgccctttgtcatattggtgatttccactgtttttctcccaaactgcagcttatatttgttctcttaatactgttgagcaaaaacttttaatttttataaagtcgaatttatcaatgttttctttaatggtttgtgtttattgataataaagaacactttgcctaaaaaaaaaaa

SEQ ID NO: 562827 - DNA, 410 bp, Homo sapiens
catgtaagaatattgatctattcctcatattatctacttatatgatagtactctattctgtcacagacactcaatacacttcatgttctggtccatcagtctaagtctagctcatccatcgctcgagtaaggggactctgccaggtcatcgtcgtacctctgtgcgttccacggtctccttcaatgatcagccaaattacgagccacctcttgcgtacttcctatctgcctcttctgccatgtgcttcgctcctttgagttggattctctggacgtccttcttgtcttcgatcttttgtggcccggttttcgataacctttatatctttctcactctcttcagcagattttacagcttcttccagcttttgcaggcctgtggccaggcgctcctgtgctcggtcctgttc

SEQ ID NO: 562828 - DNA, 933 bp, Homo sapiens
cggttctgtaaataattgcccgccggtccagaacctctgggggcaccctggcgtggcgcccttccgggacggggtgtcccaggctatgtccaaatgggccggttcgtagaagtgctcccccccctgttgaggcgctccggcgattttttgggtaatcccccgctcgggtttagactgcgcccctccgccgggtgcgtggtcgacaacggcgcttctccgcgccggttctttttttcccctccgttggcccaagcctggcccaactcccccggcataatagcgttctgaatattctgcgcccaggggcctggcccccaatattgccggggagatctttcccgactgtgtgcgagttcccgaagtcttcgcgataatttggggggccccgtcccccgggcagagtgaaccccacaacctgtgtatagcccgcgtatgtaacaacgcttctggcccgaaggactctgtaaaaaattgtggacgtatgacgcaccgcccctctttgtcgtctagtaaacaaaattggtgtgggggggaaaacaacaacacgacaccggcggcatgggggtcacacacaccacattgggggagagaagaaatgcgctctcgaatcattttagaaggtcagagcacagtccaggccactactttcacttgttcaaaaatgtttgataacgcctctccctagctcttcattggtagagcactcctatgcttgtctaatccacccctcagggggagcagatgggacaacctctcagcccactccgccgactctttgtaatagtcggttttcgtaacataaccacagaaggaggatatctatgcgtgattgttaccctgctttaaatgagaaagccacgttgtctgctccacccccggggggcaaataacaaagataaaataaaaaaaaatcccccaatttctcaaacatac

SEQ ID NO: 562829 - DNA, 762 bp, Homo sapiens
aaaataggctagtagagctgagtattcaatcgcacgaggatgcacaacctcctgccggcttgcccagggctccaggagcaggctgcctctgtccctgcccagcctcctttacccagtctcatctggtcactatcctatggactctgctgcctgaggagtggtcgcctgcagaggacatgcccctccatccctcccaagaaaactccatttgccccggcggacatacctgttaagggcccacatcctcttccctgaagccagaccgtggcattatgtctgcacgctgcatgggttcagtccctttaccatttatagtgaccatggggttgccatcattccccatgacaccacccctctgcatgaggaagtattcccctatgacccctgtactcagactatgagataccttttacctgctagctacacacaaagcctagtggtagccagggttcgggtgccctacattgtcaactagcagagacccattccccgaacctacacatccgtgatacccttgaccttacccctacctatactcaatgatcatagaacttggacatctactgccaggaccaaaccccaaggactggaacactcctcagaccatttctccattgcggcttcctggactgtagactcaggttagaggtgaacccagaacacctgaagactagacccaggatggatgggtgctgttgaatgtgaatgacgtcccgaaagtggatccttggagtgagcaatgatcagactcctttacatcca

SEQ ID NO: 562830 - DNA, 115 bp, Homo sapiens
tcacggtagcagagagtcaccggcatctgatggcagctatgactggatctcacggcacgcccgcttctccaccagcttcaccttgtacttgcgtctgaccttggctctctctcgc

SEQ ID NO: 562831 - DNA, 127 bp, Homo sapiens
atcatggatgtacctggggtacatgcgccctcatggcgaggcaggacgtaggctcatgactgtgcatttaggcatatatgtgaccaagaagaaagagagagagggaaaacactggagagcagaaagt

SEQ ID NO: 562832 - DNA, 303 bp, Homo sapiens
  misc_feature (271)..(271): n is a, c, g, or t
cacgaggcaccttaccaccagacaaccttagccaaaccatttacccaaataaagtataggccgatagaaattgaaaccttggcgcaatagatatagtaccccaaggaaagatgaaaaattataaccaagcataatatagcaagggcttacccctataaccctctgcataatgtaatttaactaggaatgactctttcgaagggagagccaaatctaagccccccgacaccaaaacgatctatctaagagcatttaagagagcacacccttnctatgtagcaaagtagtgggagatttataggt

SEQ ID NO: 562833 - DNA, 486 bp, Homo sapiens
  misc_feature (485)..(485): n is a, c, g, or t
ctgtttgttggagaacctgtgtggacaccatacaaccggccagctgaccattttgatgcccgtgtacagtacatgagttttttggaaggaacagcatagcagtgctcctcaaagagaaaactgcactgtgtgaatctcctgctgtggtaaccgaatggaaagttgctcacttttctgcttttgtatttgaacttgaggctagactagctctctttgctaggattgtgagatcagtgtcttttaaatgaaagcctctctaaaagtgagttttacatggaagccacaaaaatgtgaaaaagtgaccttaattttccctaactgtcaagacttagaggtataggagccctggattggtatgtgcattcatgcatggccaatcttcatctcccagatctttaggtgtctgttggtgtgaagctatgcctcctgcaagagggcagttataaccagcacaactaaccagatgacgtttttctcctttgccng

SEQ ID NO: 562834 - DNA, 434 bp, Homo sapiens
  misc_feature (22)..(22): n is a, c, g, or t
catcccagaggaggaggcagantggttgggcctcacgctggaggagcccattgagaagcagagacttttggaggagaaggaccctgtacccctgttcaaagatctgtgtgccggagctgatccagcagctcagcagcaggcactgtcagagccggcggtggtgcagaagagaccagtggccagtgaccacacagctcctccatgcctgaccaacaggcccagctttccctgccaggccctttgcactgaggacacagatcccggggagctgtgagggccaccggtgggcagtgggtggatcctggtttcgtgtgctgcccatgcaccttccagcccgggccagcttggcagggatccccaggaggcctgggcccccagaggctcctctcagctgggccccgacgtttgcggcagtgttcctttggtccgtgggg

SEQ ID NO: 562835 - DNA, 111 bp, Homo sapiens
ttaaaaattacgataaatatccaacattcgattgaaacatgaacttaatcccattattttattatggaattaaaataattcatatttaaagattttttatggggttgctat

SEQ ID NO: 562836 - DNA, 712 bp, Homo sapiens
gccgccgagatgatctcttagaagtccccttaactaatcctgaccttaacctatatactgatggaagttcatttgtggagaatgggatacgaaggttagtgatgtaaccatacttgaaagcaagcctcttcccccagggaccagtgcccagttagcggaactagtggcacttacccgggccttagaactgggaaagggaaaaagaataaatgtgtatacagatagcaagtatgcttatctaatcctacatgcccatgctgcaatatggaaagagagggagttcctaacctctgtaggaacccccattaaataccacaaggaaattatagagttatgcacgcaagcaaaaacacaaagaggtgggaatcttacactgacaaagccatcagaataggaaggagaggggagaacagcagcataagcagctggcagaggcagcagaaaggcacacgaaagagacaggaagtcaaagaaagagacagagaggaagagacaagaagttagagagaaagagggaccgacacagaaagtccacacgagagggtaaaaacagagaggaagagacaaaagaagaagtcaagagagagatggaagtagtaaagaaaaaacagggtacctattcctttaaaagccaggataaatttctctctaccaagccagcatatctcttagtggtcttaacccatattgctccaagtggagaatatggacc

SEQ ID NO: 562837 - DNA, 844 bp, Homo sapiens
gctagtaaaggatatgttgctctgtccagcagttctaaaaatgctgaagtaggggccaggtcactggtagttatagtatggaatgggagaagtgaaagtgcagttatagaactttccatacgttccagagtttacgtgcaagttttctagtgcttgagagagatgctttcgtaatataagacttgatgtgtggagttgtactagagttgtactgtacatctattaaagccttagattattacattacgggttggacacccataccaagtgtacactttcaatcgtgttacgacagtcatggtgacttcacaatgtactgtagttagttacattatagaatattgacttgtttctctctgtgttacctagtgtagtgtttcatgtcctacatttattagattttcagtttgctattaacaatgagaataccagtttcagcttgatagacttgtctattcagatgtcaccaatgaatttgtcaaaatacaagaaaaagtagttttgccttcataacatactcagttttgactgacatgtagtgtccctgaatattcgtatggtgcactacgtgattcatatgtccactgtgtactattccccggtacgagtgtccgtcgtgtcaagtcctgtctaagttgtccttcaaaagaccgagcatctttcatatgggtatctactaagcattacacccatgctaggtacacagaaaatggggcatgcgagaacctggccacagccacattcggcgacaccgggcgaccgaatacaccgagcacccaacacaagggtccaccggcccgaggccaccggaccgacagacagcccacaccgcacacaacaaggg

SEQ ID NO: 562838 - DNA, 507 bp, Homo sapiens
tttgtaaaatgtaagtgctgtagaaatatctttgaattcatctggccatggcactcaccagcttaaaattcttcattggctccccagtgtcctcaagattaaggcccctgaccacgtggtccttagagccctccagccataagaatccagttccctatcctcctcacccatgcacttgcccctcaatcctacattctaaagtctggccatataggcacttctcaagtagctgggcttttattgccatttaggccttttattagcaaactgttagaacagtaacatccacacagccaaaagccctcactacactcccttaggtggatgatgccaatctctatgaggagctgggcagcaggaaccattttttacccacatcatggttttcatcatcttggcaattgtgtgtgcactatatagtggcaataaataacaaatgctttggaatcaactacaatttgataaatgtttgtttaattacattaaactacaggaatgatgcagata

SEQ ID NO: 562839 - DNA, 685 bp, Homo sapiens
ggactctcacgggatgcatttctaggatccgtctggccccgtctctctcgtgtcttaaaccttgagtaactcacgaaagtatgaatggaatgcagttcgccatccagcgcgcttaccccgatctcctttaaggtcatgctgagcaagacctctagagaccctagagactcgactttagtccttccccgccatggtcacagtgggagatacggtgtcaataggggagtgtcaacggacaggaggtaggatcctgccgctcgcgtcttagtgctttctccctcaagactattccttcatgtgtgtgttgtcttgtgcagtattttacagcccctgcttgtgtgttcttgcctcttgactttgcatcgtgacacacaccagcagttttaagggtgatgtgggtatgaactaagaaggacccttggcgcgcatcactttgcactgaattcgttatcagggactgggattggctttgagctgcacaatatgttgttggtggggatgggtacggtggacttccattctcctctacaactggagttattggtcggtaatcgtaactaagagtaacctctgggagcctggaaacctgattggagcactgagggacaagggaatgaaaaggcagactcatctgtacgtttgatgaaatggactcttgtggaattaacacgtgctattcactgtg

SEQ ID NO: 562840 - DNA, 507 bp, Homo sapiens
  misc_feature (31)..(31): n is a, c, g, or t
  misc_feature (63)..(63): n is a, c, g, or t
  misc_feature (92)..(92): n is a, c, g, or t
  misc_feature (115)..(115): n is a, c, g, or t
  misc_feature (139)..(139): n is a, c, g, or t
  misc_feature (142)..(143): n is a, c, g, or t
  misc_feature (145)..(145): n is a, c, g, or t
  misc_feature (155)..(155): n is a, c, g, or t
  misc_feature (183)..(183): n is a, c, g, or t
  misc_feature (191)..(191): n is a, c, g, or t
  misc_feature (196)..(196): n is a, c, g, or t
  misc_feature (202)..(202): n is a, c, g, or t
  misc_feature (209)..(209): n is a, c, g, or t
  misc_feature (213)..(213): n is a, c, g, or t
  misc_feature (221)..(221): n is a, c, g, or t
  misc_feature (230)..(230): n is a, c, g, or t
  misc_feature (234)..(235): n is a, c, g, or t
  misc_feature (237)..(237): n is a, c, g, or t
  misc_feature (244)..(244): n is a, c, g, or t
  misc_feature (252)..(253): n is a, c, g, or t
  misc_feature (256)..(256): n is a, c, g, or t
  misc_feature (274)..(274): n is a, c, g, or t
  misc_feature (288)..(288): n is a, c, g, or t
  misc_feature (291)..(292): n is a, c, g, or t
  misc_feature (294)..(294): n is a, c, g, or t
  misc_feature (298)..(298): n is a, c, g, or t
  misc_feature (305)..(305): n is a, c, g, or t
  misc_feature (308)..(309): n is a, c, g, or t
  misc_feature (313)..(313): n is a, c, g, or t
  misc_feature (317)..(317): n is a, c, g, or t
  misc_feature (333)..(333): n is a, c, g, or t
  misc_feature (342)..(342): n is a, c, g, or t
  misc_feature (358)..(358): n is a, c, g, or t
  misc_feature (369)..(369): n is a, c, g, or t
  misc_feature (406)..(406): n is a, c, g, or t
  misc_feature (419)..(419): n is a, c, g, or t
  misc_feature (460)..(460): n is a, c, g, or t
accacaggggattggtagcagaggagcagtntgcgtgatgggtggctggaaaatagctaagangagacatcaaggtcagggattctggaganaccctcgtaacaggatccttgcngggggtgggtgagagggtttgttnaanntnaaaggtgggngatgaggaatatggtcagatagaaaggntgggaatngtttntacaantgggttngggnggagagangatggggcntagnnangcctagntggagggnnagnggcgcgagcggggcgttnggtcagggaggagngtnngncagnggggagnggnngggngggngaggcgcgaggggggncgcgggggnggcgagctgggcgcanggaagagcggnggcggaagagtggcgtggacgcggcgtgcgagggtcngtggaggcgagcnggagcgtgggggcaggggcatttgctgggcccagggtcccnatgctttggagggaggggagattgcgttctcaaagaatgaggcgtgc

SEQ ID NO: 562841 - DNA, 367 bp, Homo sapiens
tcatacaaatctgcaacctctcgttggtgccgttgatatacttgcagcccttgagcaaccaactgtctttgctcgatgaatgagctaatactgcgaccgctcttcagtcaccattaatgtgaggagcatgggcacatgcgtaggcttgccatagagttaaattgcctgtcaccaggctatgccgttcagtatgttcccaacacagaagctttattgatacaagtgagggacagatctcaggtacacatgtcgggtcagagatgcagaagggtccccaagtatctgtcctgattctagcctgtgtcagcataggattcccacggcacgtgtttactctacgtctagagctgcgtccacagtggctcac

SEQ ID NO: 562842 - DNA, 360 bp, Homo sapiens
cgcacacgatggtggggaagttgagcagctcaggatgtggccgtggtgtgcgtgtgaaataccaccaccgagaagtcatgcccttgacctagcctcatgacctcggcagtagctcatggtctcatcgatgccgggaaatgcgctcagtgtcctcctgcatcatcttcttgcccatgctcagcatgttgtcctcctcgaagaactcgtcaggcagctccgccacgcccaggggggggtcgatctccatagcatagaggttgtcatagcttttgcctgaggtaggcacctttgagaacttctggtcaaaagcatctgagatgttgtgtgctgggtctgtggagatgatcagaacactctcac

SEQ ID NO: 562843 - DNA, 612 bp, Homo sapiens
  misc_feature (594)..(594): n is a, c, g, or t
gcgaattcactagtgattagagactgcgagaaggagacacatggaatggagagctgggtccttatgtatgaattgaaggcagtgggcagcagccaagcagaaccttggagtcagcgatgggaattaggattgaagctcaaggcccaaggacagaccctggcacctggaatcatctaccacctatttaggcttgcatatcccacctgtcccaaaccctatcggtgccctgtggagctacctgtctgcaggcagacagtcccctctcctctttttccctgagcctgcactccctgcttgttccaatagcacctgcctgttgcccatggtcactgtgtggcagcagctctcacaggctgctgtggtttctctaacgcaccaaacctcagggtgtacagtaaaaaaggtgtctttgcttctcatggtgccctttagaccacctctaacatccccacctctctgaagaccgcaccatcagaacacacaaacacacacctgcagcctcctcctttggccccatcactccccctccatccacacaactctaggttcagcccctctactccttctcgcagtctcctaatcgaattccgcggncgccatggtgtgcgggag

SEQ ID NO: 562844 - DNA, 200 bp, Homo sapiens
gcatatcgccgacaggcccggtgccctttgagcgtggaatttgcaggtcatggctccctgctatcgaacaccggacacgggtcgtgtgctgcacctggcagttgcaggaccgacaccctgcaatgccttaagacggtgatgactggccttccagtgggcctggctggcagaccactttgggggtaccgacgctcgacatt

SEQ ID NO: 562845 - DNA, 407 bp, Homo sapiens
agaaataaatcctcagagcgcttatctacttatggttgcagctctgacttctgggtggggtgtgcatgcttaccttaaacgcacagcctttattgcctattttgtaggcagcccaagagtatgccttggagtatgcattgttgctacagtagcagatcaccgtgttctttgcacaccacatgcaatggtataagaagtccatgctctttggggtatgtaatataaaattcttaccggggctatgcttctgtgtaacatgtacataatagatacttaagaaatgtgctgaaaactacaatgaactggtttccccattactttcctatgggcttgtttacttaaagggacaagatagtttcttcatcctgctattgcaaatgatttcctaaggacctctttcacagtag

SEQ ID NO: 562846 - DNA, 293 bp, Homo sapiens
atggatgaactcatacaagcctgaagaattgttcaacgctgatggttcattgaaggacgaagtgaaggcacttgcacctaagggtgacaagcgtatgtctgctaacccaatcactaatggtggtcgccgtcgcggtgaagcacctaagacattggacttgtcagacctgcgctcaattcacaaacgacattactaacgaaaaccctggacatgaattgtccaaagtaacgcaaacatggacatgacaactctttcgccatactgggaggaggttacaaggtgataccccacac

SEQ ID NO: 562847 - DNA, 232 bp, Homo sapiens
actcagaaaggagggatggtaggtcggtaggtggagaataagggagacagctgagactggactcccagcacttgagaggcgtggaggtgggtgaatcagttgaggtcgggagttggagaccagcctggcctacatggtgaaaccctgtcactactaaaaatacaaaaattagctgggcgtggtagtgccacttgtatatcccaactactggggaggctgtagcgtgcagtgg

SEQ ID NO: 562848 - DNA, 864 bp, Homo sapiens
  misc_feature (134)..(134): n is a, c, g, or t
  misc_feature (302)..(303): n is a, c, g, or t
  misc_feature (318)..(318): n is a, c, g, or t
  misc_feature (339)..(339): n is a, c, g, or t
  misc_feature (403)..(403): n is a, c, g, or t
  misc_feature (424)..(424): n is a, c, g, or t
  misc_feature (436)..(436): n is a, c, g, or t
  misc_feature (439)..(439): n is a, c, g, or t
  misc_feature (459)..(459): n is a, c, g, or t
  misc_feature (462)..(462): n is a, c, g, or t
  misc_feature (490)..(490): n is a, c, g, or t
  misc_feature (501)..(502): n is a, c, g, or t
  misc_feature (561)..(561): n is a, c, g, or t
  misc_feature (574)..(575): n is a, c, g, or t
  misc_feature (585)..(586): n is a, c, g, or t
  misc_feature (596)..(596): n is a, c, g, or t
  misc_feature (598)..(599): n is a, c, g, or t
  misc_feature (616)..(616): n is a, c, g, or t
  misc_feature (620)..(620): n is a, c, g, or t
  misc_feature (637)..(637): n is a, c, g, or t
  misc_feature (665)..(666): n is a, c, g, or t
  misc_feature (674)..(674): n is a, c, g, or t
  misc_feature (690)..(690): n is a, c, g, or t
  misc_feature (697)..(697): n is a, c, g, or t
agcgggccaatgtatttctatttatttatttatccctcaacagtcctccctccaatttaatatatttcttggcagaggatagtaaatgtttccatggatggattccttggtggtggtgatggtggtttgttttntttttttttttgggggcagggtcttgctctgtcgcccgggctggagtgcagtgggcgcgatctcggctcgctgcgacctctggcctctcgggttcgagcgattctcctggcctcagcctcctgagcggctgggattgcgggttcgtgccaccacgcccggctgatttnnggtattagggtaganatgggatttcgccacgttggncacggctggtctcgagctcctggcctcaggtgatccacccgccttggcgtcccagagtgctggnattgcaggcgtgagccaccanacctggccggtngtnatatatttaatggtcttttnttncactaatgaggaccaccttgtaaatccngggcattttcnnagtttcctcttccatgtgaatggctccagctaacttaatattagttctctcaagggttngtgtagacctggnnttggtctctnnccatctgttncnnctctttccctttaacgntcanttgcctgaggtctatanggccctttaaggttgccagcccagagcnnaagagatnggtgtccctgaagttnagaaagncaccttgcctacagaatgggtgtccacacgtgttgggtgtgcaagttccaccagctttgactttgagatccaccccgggcgccctcacagacacttttcctacctttccagaatcatcagaaaggtcctatcctcagtagttgcctccctcttggcaagtgtgccac

SEQ ID NO: 562849 - DNA, 359 bp, Homo sapiens
agagaaatggggccatatctgtgagatttctatatatatgaggggagttgtcagaagttccatgtgtatgggatctttacaggtcagatcttgtgtacaggaaatttcaaaggtttgggagtggggagggaagctctaacagtgaggatcattttatcacattagactggggcagaactctgtcaggatttaagaatattttcagaacacattttagatattatttctatccatatattggaaagaataccattggcaatcttatttttttttaatgtgtgccgagtctcaccaagctcaaagaccctggttgggggtggagggtgcgcacaggggctgtataaggcaagaagactcgg

SEQ ID NO: 562850 - DNA, 432 bp, Homo sapiens
  misc_feature (425)..(425): n is a, c, g, or t
tcttttggaaactggaaatcgattttaggaatatttctgggatagaacaaaacaagtcatttggaggcagaacccagggtctaaatgacgaacctttctaccccacccaagggattcatcacagcagcctacagaatcatttattggaaactcacatcttaaaaggggtatcctcacagaatcattcatttacgcgggggaaacactcacttggagcttatgaaggttagtcacgaaaagatgttttttgcaaacacctacaatgcattatctaaagctgctaagcaccactgttctatttgcagcaggcattaaggcattatcctttgtcccatgctgtggacaaatgaatggtgcaagaagtactggctccaaattaccgtgaaggggagaaatacctttctttaaaattttattttcatttntaatttt

SEQ ID NO: 562851 - DNA, 433 bp, Homo sapiens
ttcgggcccggggtccacctgctgccccccccgtgggagaagttggcctttaccaagttggttccctttaggtgcttggcacgcggtttcagccccagggacgttttgtttccttggttccaggggtcccaggagttgccccccgaaaggtccctttcttgggcttcccggcaggggcccagccggggcccccccccttttgttgtgcccagcattttgggggtggcacccggggtttggaaaaagggggcccccttttccggcatggtgggccccggggcccttccgttggcttttccccagaagcccttggcccgtttggggggtaaccccccccctgtcattgtttttgttttctggggggggggggggggcccctgtttttgacccgcccccctgtcccccccccttatttacccccttgttcccccca

SEQ ID NO: 562852 - DNA, 890 bp, Homo sapiens
ggctgactctcttttcggactcagcccgctgcacccaggtgaaataaacagccatgttgctcacacaaagcctgttggtggttcttcacacggcacgcatgaaatttggtgccgtgactcggatcgggggaccttccttgggagatcaatcccccatcctcctgctcttttgctgtgtgagaaagatccacctatgacctcaggtcctcaagaccgaccagcccaagaatcatctcaccaatttcaaatccgctaaagactgacattgcccgatagcctcggaagccccgtagacccatcaacggatgccggggctttagtgtaaccctcacagttgaagaagcacaggaatgtcaggcctctgagcccgaagtaagcaatccatatccccttgtgactggaggtacacatccagatggccgtttcctgcctcaatgatgacattccaccaaaaagacgtgaaagtggcctgctcccgcccttaatctgatgaccattgtctttgtgaaattccttctcctggctcaattctggctcaaaaagctccccttgtgagcactttttgtgacccccctatctgccaacaagaagaaataaaccccccttttggagttgtatttttccttttaatccagccgaaattcctataaaattggggccaaccgtttattttccctttcgctgactccctttctcggacttcaagccacttggcccagggtgaattaaccagccatggtgtcaccaaaggagaagtcacaaacatctgtcgtggcgccgcccagaaaagttaaaccttggtggccggccagcgatacaacgaacgcgtcaaagcgggagacgggttcccaaaaaccggggggtgaaacagaggtggtggttaagcccga

SEQ ID NO: 562853 - DNA, 155 bp, Homo sapiens
tgacatctctacataaccacaaagacattgcaacaccataactattattctgcgcatcagctgtagtcctaggcacagctctaaacctccttattcgagccgatctgggccagccaggcgaccttctaggttacgaccacatctacaacgttatc

SEQ ID NO: 562854 - DNA, 774 bp, Homo sapiens
  misc_feature (569)..(569): n is a, c, g, or t
ggaaatagctaccgtgtgtgtcccttcctgctttccactattccttttgcctttttctcggccacgtggttagtctccaccagttgtcttctgcgacaaagtatgtgcttctagtatcatcctgatacattgtataaagaagatgcgagaatgtcatgtgacgtgctggttggcctcagaattatgctgtgagtttgacacatgatatatcagcttctccgatcaagtttatggtaccaaagctgtcatctagtagcgacatagatgtctgtaaccaataatgtagcagttctgcacttggaccacaaggtgtaactagaccattttgacatgtcagtcgacgattatggctgtactattgcttaaacaaaactggaactgatgttgaagtccactagtccaatacatttacaggcaatctgtgtactgaacatagtagatcgacgtctacttcaagattacaagatctgttacattctaagtgtgttcaggcttctgcaaggtcacacgggaccgctggatccagaagctatggaaccagcaggttgattcttgtattcctgattaanctacttgtaaacttgaaagcaagaccttgattgcggcaagaggtccagagtatgagtgcaagcaaaagcagaaattctcatgcgtgacctgagcaggacaggctgggtatttaaccaggtgcctcgtgttcgagcattaccgctgcctttaatgttaacacagtctggcagttgctaaatttgtgttcccattttaaatcgacca

SEQ ID NO: 562855 - DNA, 249 bp, Homo sapiens
  misc_feature (59)..(59): n is a, c, g, or t
  misc_feature (86)..(86): n is a, c, g, or t
  misc_feature (96)..(96): n is a, c, g, or t
  misc_feature (124)..(124): n is a, c, g, or t
  misc_feature (129)..(129): n is a, c, g, or t
  misc_feature (165)..(165): n is a, c, g, or t
  misc_feature (169)..(169): n is a, c, g, or t
  misc_feature (177)..(177): n is a, c, g, or t
  misc_feature (187)..(187): n is a, c, g, or t
  misc_feature (200)..(201): n is a, c, g, or t
  misc_feature (213)..(215): n is a, c, g, or t
  misc_feature (222)..(222): n is a, c, g, or t
  misc_feature (234)..(234): n is a, c, g, or t
  misc_feature (236)..(236): n is a, c, g, or t
aaaaaaaaggggggggggcccccccccccggggggggggttttttccccccaaaaaaangaaattttggttttggggggggggccngttttttccnaaaggggggggccccccatttttccccnaaatnaagggttttccccgggcccgggggcccccggggttngggnttgttttngggggggggnttttccccccccnntgggggtttttnnnttttttnggcccctttttnanggggggcccccca

SEQ ID NO: 562856 - DNA, 111 bp, Homo sapiens
gggtccccaagtcggcggggcttagaatctgaatggtatcattacctggatgaggggatcggggtagcggatggtgcgggcatcagtgagtcaccagatgagggattcctt

SEQ ID NO: 562857 - DNA, 383 bp, Homo sapiens
aagcacagaagaaacagaaatcacgatttagggaaggtgggtctggcctccctcatccccctcttcctccctctctgctggcatcctccacgcgcgtcgtttcctgtgaaggctccgctggcctcccataaggtcaagcaatgtggggctgctgggaacatgagctccatggtatacggcccttttcagaagggacagaatctcacgagcatctacgcagcccctccgctcctatctcacttgggggagtttctctcaaaagctcttctctcctcagagagcatttagcatttcatcaaaccatggaaatagagctggaatacacaggagttcttgagtttgctctttaggccatctgtctatcccataatcgggtggggtac

SEQ ID NO: 562858 - DNA, 234 bp, Homo sapiens
gtagggtgtttacatgtgtagcctatgttgtggtccatcagcccctcacattcctaggggttttaaatgctgtaggtggtatgtgacaccaaaaccccctctgtcatttgttgggaagtctttttttggcaaaaaccttgggtatatttgtatattacccatttggacagaattttggaagattttcagtttagttgccaaatttgggtcctttacaaaaaaaataccttgaga

SEQ ID NO: 562859 - DNA, 202 bp, Homo sapiens
tgtacctctcgtaattgatggccatcgcctaatatccttgctatgaaaaccgtagtgatcacaaccacaacaatgactagatcgaactcatgctcaaaacaaatgatagccatacacaacactaaaggacgaacctgatctcttatactagtatccataatcatttttattgccacaactgacctcctcgaacgacctaccg

SEQ ID NO: 562860 - DNA, 882 bp, Homo sapiens
  misc_feature (882)..(882): n is a, c, g, or t
tgggagcccccggaaaaattataaccagggtccacaccccaaagggggggaaaggggggccccaaactctttgcccccgcggggaaaatttggggggttcgcacccttcgggggccgttccttttaagcccccggcttattagccaaaaaatattccagcccataagtagtctatctacacagaactatagataccgtggtaggcactaaaacagggagggtcccctctggggagccatctcacctccgggaggagaagaccggcgtgattattcttctcatcacagagtatcccgggagatcactgtgtggggaggtacaaaaatctccttatccccggacgcgaggagagcattcttactagagaagagagcagtcttatgcaagacgacaacgaaaaaatatcagagaagcgagcagacatcaccgaacaataaagccctctatcaactcacccgcgcgtgtgtgggggcccacctaccccattatgtgggcggtgggggaaaccactgtggactaggaaatgtggcggcggggaacaccaagagcactgtggcgagaaccagagataacacacagtctgtgggagaccacgacaaatcacaagtcgcgggcgctgaggagagcccacagcattaatcccaagagggggcgcatgagagaggaagcaaaatcttctcccgggggagcgacccaaagacatttctccactacaagcacttcccaaggtgtgggccccccttctgaagacgagagaagaagagggcgcgccgcaaactatggaggacacgacagagaaaaattagccgtcagaaacagggggccccgaaaaaaccgggggtgtgcccagcattcacaagaagaggggccactcggcgagcn

SEQ ID NO: 562861 - DNA, 197 bp, Homo sapiens
gcgagcccatcggccgacgctgagaaccggacgcaggctcccctggaaacggccggcaaggctccgcctccattgcgccgcgcgccctcggccattaggggcaggccatccgtggggccaggacgcgccctgcgggtccggggagccatcatcgtgccgttcaccagcctgatcagaccgctcgccgtcctggcgat

SEQ ID NO: 562862 - DNA, 220 bp, Homo sapiens
gtcgatactgtctttacgatccatccttctcacgttcagacggcgtctaccaagcactaccccacatggcccacgtacctcaggctcatgtacagatcaagagaatgagttccttctcatccaactgacccatgcgccaagtgcatgctaactgacgacactagctcaccgcgtcggtccccaaggccgaccctcgcatcaatagtgcacgtacagccca

SEQ ID NO: 562863 - DNA, 289 bp, Homo sapiens
tcagcatgtcatacataactggcttctgcttgtccatccacacaacaccaggacttaagacaaatgggactgatgtcactctcgagctcttcatttattttgactgtgatttctttggagtggcggcactgtttttacagaaaaacatgtcattctatggttgtacacccactacaatgacgagaaaatacaaactatgcatccaacaaaggtctaatatccagactctataaggcatctccttcaacaatcaaaaaacaaccccattaaaaatgggccaccggacatg

SEQ ID NO: 562864 - DNA, 263 bp, Homo sapiens
tgataagcagttacggtactgatttactgtaattgacgtatactgagtatagtaaatctcaacagagtatacattttttatattgagtgtgacaaaaatggaaaagagggcagtggtcatgctgtaatcccagcactttgggaggttgagacgggaagactgagatcaggagtttgagaccagcctgggaaagacagtgagaccccgtgtctattaagaaaaaatgataaaaatttaagtcaaaagtggggaatatggccggg

SEQ ID NO: 562865 - DNA, 1434 bp, Homo sapiens
  misc_feature (1)..(1): n is a, c, g, or t
  misc_feature (895)..(895): n is a, c, g, or t
nctgggctttgatgtgacgcccatgttgttgtggtgcggccatccgcagtcggttgggtgaggctttttttcttggggcttctataatagtcggaattagtactttcccactgtgggcgcttttttctgtatatgttgaaggcttgtcgcgctagagtggtgtccccacaggatgtttgaaagaggcccatcttcgcgagatattgtggcgcccggaggcatttccacgttggggcgcacagaatttaattagtggtaggtaggttgtacaccttttggtgggaacgttcaaccctgtgttgggtcacacgcctcgtggtggcaacgcattttgtctttggggcccgccacgggtatgtcaaagacagtgtgagcggcccgattttcttggttgcaataaagataggatgtttgtggggaagagggcggacgccggtgtgtgccacgagtaattgataaccgccgccgcagctgttgttttgttgaaccacgcgtctggagaagaggtccacgccacccccactggtagctgtggaaattatcttctctgcggttggtctcgttgaagttgttcttatgccgcaccggtttcacgaaagtttcacacgaggggctgtgttctatccgtggtgaactcgtgctttttcacacccttggagccacacaattatcgctcgaggaaagagtttctcgcgggagacactttcttttaaagggagagaatttatagggccgcccaacagctgtttaaggtgctggcactgtttctcatagggggagacacatgagaacattgtgggagagttctcttccttttctgtgtgttgtatacaaaaggttgggcgcctcgagattgtgcccacctgttatttgttaagccctctctcgggggggngtcacaacaaatagagaaggggggctcttcgcgggtgtctcgggagaattaatagccaccacgttctgtcttgcacgtatagatggagagccactttttgcgagaagatccgagcagagaggccttcgctttgtctctagcgggagagtggccacaaaggaaaatgttgcacttctgactttaaagggggcccctcttgtggggcaccacacgggaggtcttcacaagatacaccccactggagagttctctaaatgagacgagtccactgctaaatgtttcgctggcgttacacttctactgggcgatatttacaaagagagtggcctacagaaattgttgccaagggtggcagcagacccatagcaggagtgactgaaacacaccaaggtcatattttgactgacaaatcctttctgcaactgcgggggcgaccgccaccaaataataccggtctttgtcgcttgtcttttcagatggatggttttaagagcttttgtttgcattttttaaaaaagagtaataaaaaggatttttta

SEQ ID NO: 562866 - DNA, 356 bp, Homo sapiens
atacagagagatcccgcgtacaatttacccagtttcccccaatgcatcaatttttaaaaccagtaaaaccaccaacagaatagtgccttctgaggttggtgaaaccaataggaaagaaacatgacgaggggatgctgaatcagaaatgtcaactttcctctcaaccttttgtatatatgtccactaaagtacttactctacattgtgattctttgtttttgtgaatctcttcttcagcagtgcatgagcttcctcacagcagggactgtgtcttattatctttgtcttcccagtaccagcgaagggcctagcacgtagtggaggaaggtgaggaggcaatggtaggggacttatca

SEQ ID NO: 562867 - DNA, 813 bp, Homo sapiens
gtggcgacatgcgacgactggcagcgatgtgctggtgtgcggggccagccccggtgactcccgtgggtgcagtgaggaccctgtggtccctgggtcctggtctgctgtgcatcccctgtggcaaaaggcggcgatggaactgcgttgacgcgaacatgtgacgtgcgtgagatggccctgtttgagcatggaagttctgggggctccatgtacctggaatcccaactgctgtgcctgcgtgtgcccactgtccccacttggtccccacagtagaagcgatgcagtgtcccagccggctcctgtgatccgcccaattatcgcgactcaacacatatccagcatgtgtccaggcagactctggatggcccgagcatgctgctgcagccacagtaggttcctcccatggtggtgtggccctccttttgtaggccctgttggctttggccctggtgatcggagtcaccttggacaggccagaggctcggagaagccatgttcctccggcgggcagcttgtggcccccagagggccctatcctgcgtccagcgcttcgtcccccacgtgctacaggagagcagattccgatctcttcctcatgcatgcaagtcccgggttaaccgcagagacaaataacataagaaacataaacaaaacatacacataactccaaagttaacatcctactcttccatcaacaagtcaatgcaaaaataacacacacaaatcaataagctaacagcatattactatacaatatgaggctctcacccaccaagtgtacaacacgactgaggttcaacaaatgacaagaca

SEQ ID NO: 562868 - DNA, 1099 bp, Homo sapiens
attagccccctaataaaatacattaaccactcattcatcgacctccccaccccattccaacatctccgcatgatgaaacttcggctcactccttggacgcctggctgatcctccaaatcaccacaggactattacctagccatgcactactcaccagacgcctcaaccgcctttacatcaatctccccacatcactcgcagacgtaaaatgatggctgaatcatccgaataccattcacgccaattggccgcctcaaatattctaatatctgcactctaccatacacatcgagcgaggcctatattacggatcatttatatcataccacagaaacactgaaacatcaggtcatttatcctccgtgacgtatggaaaacaatagcaaaaagccattcataggctatgtcctcccgtgaggcccaaatatcatttctgaggggcacacaagtaaattacaatcttactatccgcatcccataacattgggacaagaccctaagttcaatagaatctagaacgaggctaactacagtaaacagtcccaccccatcacacgattacttataaccttatcacttacaatcttgccctgacaataattcgcaagaccactatgcaagcaacctccacacctcctattcttgccacgaaacagcgtgcatcacaactaaagcccccctagggaagtcaacccatcacccatatcacgagttaagattcagcctagtcaagcacttgagctaacgacgaagtcagagaaacgcccattcgggattagcttgtcattcccttcatcatgctttagtgagcatagaaagaataataactccccacacactacgctaagggaccccagacacatatacgcctagaccagcccgtgtaagaacagtcccaataatacgaagattcagaacgggcacacatgtcggatccgactaagaaaggaggcgctgccactgagttcactctcaatcggaaggatgccagcggaattcgagaacagaaattacgacccacaatgtttacgcgcacggcaacacgttcagtatgagacaaacacacactgagcgcgagtgaaatcgaccatgacaaaaa

SEQ ID NO: 562869 - DNA, 206 bp, Homo sapiens
taagtgcggtagtttttaaactgttggtttttaaacaaactatagaactcttcatggtcagcaaagcaaagagtcacgtgcatcaatgaaagttcaagaaacctccgtggtacttaaacacgattcgcaacggttctgttatttttttggtatgtttagaatgctgaaagtgttttggaagttaaataaacgagtattacattttt

SEQ ID NO: 562870 - DNA, 104 bp, Homo sapiens
ctgaccagtgtgtttgtagattttctcaacatgtaaatagctgctttctaatttcctctatattcattcaatgcaactacaagctcatagagatagattaaaaa

SEQ ID NO: 562871 - DNA, 410 bp, Homo sapiens
  misc_feature (66)..(66): n is a, c, g, or t
  misc_feature (78)..(78): n is a, c, g, or t
  misc_feature (100)..(100): n is a, c, g, or t
  misc_feature (108)..(108): n is a, c, g, or t
  misc_feature (175)..(175): n is a, c, g, or t
taaaaaaaggggttttaaaaaaattcggacgcgcggtcccatctcttctccttgtacctggtcaancgagcgcgaggnagttcaggttaacagacaaaanttaattanacacgtattgagtagcgctagggttcacctatgccgaatccactgggtagcggacacgcacaagccnaccgagctttatagtgtgcctgcatagattttaaacattcctgggcacccactcaagagtgctctttttatcaccttctggaaatccgcaaagttgcaggggcctctggagtgtctcttctctagagagaattggtgggaccccccgtcagtagcacgtggcccctaactacgtggacgggagcagaggacttacagtcacgcatggacctcgaacatgaacatggcgtttccca

SEQ ID NO: 562872 - DNA, 348 bp, Homo sapiens
  misc_feature (348)..(348): n is a, c, g, or t
gcatggctcatgcctgtaatcccagcactttgggaacatgaggcagatggagtgcttgagtccaggagttcgggacctgcctgggtaacatgacaaaaccctgtctctacaagaaagaatacagaaattagccaggtgtggtggtgcactcccgtggtctcggctacttgggaggctcaggtgagagaatcacttgagcctgggaggtcgatgctgcagtgagccatgattgtgccactgcacttcagcttgggtgacagagcaagaccctgtctcaaacaaacaaacaaacaaacaaaaaaccccaaacatcattttttaaaggaggatcatctggcttgttttgtn

SEQ ID NO: 562873 - DNA, 109 bp, Homo sapiens
gaggttgcaggcgttcggactgacacaggcatggagtccgagcaaaaacctggcccttgcagggggcaggactcatggcacgctaaataaagaccggattgaagatgca

SEQ ID NO: 562874 - DNA, 187 bp, Homo sapiens
gccccccccctttttttggggggggttttcaccccccccttttttcccccggggggggggggggggggtttttttttcccggggggccccttttttggggggcccctttttggggggcttttgccccgggggggcccccccccccccataaaaaattttttttttttttttggcccccggcgtttta

SEQ ID NO: 562875 - DNA, 1313 bp, Homo sapiens
  misc_feature (479)..(479): n is a, c, g, or t
  misc_feature (714)..(714): n is a, c, g, or t
  misc_feature (810)..(810): n is a, c, g, or t
  misc_feature (837)..(837): n is a, c, g, or t
  misc_feature (973)..(973): n is a, c, g, or t
  misc_feature (979)..(979): n is a, c, g, or t
gaaaactcagtatatccatacgtattgcttgctgtcgtggcttccagtcacagttaacatagacaccgtgattccataaacatcgttcactcatacagaaggactacctcatgtgctacattgagcatagatgccctttggtactaactccattctgagtaaataaaagactgattcctgcgttgctttacactcggtatgccgattacctgccaaacaaagaatacaagaatagcgaagttgcgagtagaggctcatgtacctgttgttccagttcgttcgcgagaggtcctataactgagattctcatctacagcactttactgtcgcggaaaccaaggtccatttgggatacacacagagaaacagactacgacctggggacaacattgcaacaacgtttcacaaggcgcatcgacatttcactagcaacattttattgtttctccacaagacgctctagaacaatgcccactatntggcgtagcagcagccaccacatctctttatgacacacgctcttcgaagcacagggtgggaacactgaatcccctttcccaggatatattctggcagtccagcacaatacagtagagtatttcttatattcaagacaatatgggaacagcccctattcccccgaaagatggatttttcttacatccattgcgaacgcgacaacaagcagcacactttgcgacatatacgctttgnacgattctgacacgacagacagcaaacactacaaccagatatagacaagaactccaaatgtggctttctccctgagacattaatctaacgtgattntcgttaacaagggcacaatccccgatnacttcgactcccacgctatccacaatgggtcctttaaaaggcacccattgctaccccttattcggcagcttttaaaactactgcgtgggccacactttggaaacagtccttatatacggcacaacaagaaccaganacgaantccttgttaacattcttccccacagagaattgagcagcctggctggcaggcactaggtatacctgcgagacttacaagacaatagatcataccacttacacgtctcttataaatccaacatattttaaagtgaacccacaggctaacgtaagagacatgacaattggccccatgtagcaacggcgaaaaaaatgtagtatgtaatacatgctatatacaccgggtcacagcgaaataaataagcactcagaaaacaataacacagcgggaatatcaaagacaaaacatataacggaaaatgctgcgcacttaagatacagcatatgacagacaa

SEQ ID NO: 562876 - DNA, 291 bp, Homo sapiens
  misc_feature (21)..(21): n is a, c, g, or t
ggggggggggttccccccccnccccccggggcggggaatttttttggggggcccaattttccccccccccccccccggggggggggggttttggggggggggcccccccccccccccccttttttttttttttttttttggggggggggggtctttccagggatttttttctccgggcccccctttccgcgggggggggggggggggggttttttttttttgggggttttttccccccccccccccccccccctttcttttttttttttttttgggggggggggggggtga

SEQ ID NO: 562877 - DNA, 656 bp, Homo sapiens
agagagagagagagagagagagagagagagagagagagagagagagagagagagagagagagagagagagagagagagagagagagagagagagagagagatagagagtgctagacactatgttgtttttgaatacaggcatgtacagtaaaggtataaaacatgcatggaaagcaagtttattataaaggccagttactgctggagagaatgaaatacattgggtttgaaatgcctatggatggaattatacgtatatcattaatgtgatagtgagtatatcggtgattatattattgacactatattttggggattctagaaatattttatgtaaaatactaagggattgtcttgaagtatgattcagtttgcttcaaccaactatttatgtatatttctaagtaatttgaattacactgatgttaacattcttacacctgtgcatgaatcaggtatctgtatgtcagtgctgatttggataatagtgctgtataaagcagattcggcgtacttaatatgattgacagtactggtatttgctaaagtgaagcttaaactggttcttctacgagaactgcgcttaaattggaagtaaaccggggttgccctaactgttctgtctccttaggcgggatcagagcagatatggttct

SEQ ID NO: 562878 - DNA, 751 bp, Homo sapiens
gtggcaccagcgaagggagtgcgagtatgtgttgtgtgtgtgtgtgtgtgtgtgtgtgtgtgcgtgtgtgcacgttatggtgtttctccctctcatctgtctgagagtttagttgtagcagaggggccacagacagaagcctgtggtggtttttactttgtgcaaaaaggcagtgagtcgtcgtagaagcctgggaagttggccgatgtgtcttaaggagtgggtggacgtgagacatgtggctgtgtgtaataagagaaggacaaagggaggagaaagcacgatgtgctccagtgagtcttcgtcactctgtctggcaagcagattgatatataagcgtgattgtctctgggtttgtacttctgaaatgtagatgactgcttttgtgacaaacgagagccttctctctcccccatcgccctgtgttcttgggtaggagtgggacaaaggggcaatctacagagattgttggggcgcgggaacgtcacaagctttcggagtgggcgggtggcttgtcacagaaagacatttggagcgcatcttattctctctgtgttctctctcccctcgtgcgcggtcgcaccctgaaatagcactcagtgcctctgggtgtgccattgtgggggaaatggggagaaagaggggccgcgagtgagagctagaggcaggcctcggggtccgcaatatggagggcccgactcagggcgaaatgtcggtccggatttgtcggacggtttggcacggtaaggga

SEQ ID NO: 562879 - DNA, 95 bp, Homo sapiens
aaatcaacaaatgtgaaagcccagaaaaatatattcgtatttctggttttgctggatttttacatttttaaataaagaacgtgttcttttgagat

SEQ ID NO: 562880 - DNA, 945 bp, Homo sapiens
  misc_feature (26)..(26): n is a, c, g, or t
  misc_feature (81)..(81): n is a, c, g, or t
  misc_feature (83)..(83): n is a, c, g, or t
  misc_feature (96)..(96): n is a, c, g, or t
  misc_feature (103)..(103): n is a, c, g, or t
  misc_feature (110)..(110): n is a, c, g, or t
  misc_feature (121)..(121): n is a, c, g, or t
  misc_feature (157)..(157): n is a, c, g, or t
  misc_feature (186)..(186): n is a, c, g, or t
  misc_feature (190)..(190): n is a, c, g, or t
  misc_feature (198)..(198): n is a, c, g, or t
  misc_feature (207)..(207): n is a, c, g, or t
  misc_feature (217)..(217): n is a, c, g, or t
  misc_feature (229)..(229): n is a, c, g, or t
  misc_feature (232)..(232): n is a, c, g, or t
  misc_feature (234)..(234): n is a, c, g, or t
  misc_feature (242)..(242): n is a, c, g, or t
  misc_feature (247)..(249): n is a, c, g, or t
  misc_feature (261)..(261): n is a, c, g, or t
  misc_feature (271)..(271): n is a, c, g, or t
  misc_feature (275)..(277): n is a, c, g, or t
  misc_feature (280)..(281): n is a, c, g, or t
  misc_feature (289)..(289): n is a, c, g, or t
  misc_feature (297)..(297): n is a, c, g, or t
  misc_feature (303)..(303): n is a, c, g, or t
  misc_feature (311)..(311): n is a, c, g, or t
  misc_feature (319)..(319): n is a, c, g, or t
  misc_feature (342)..(342): n is a, c, g, or t
  misc_feature (344)..(344): n is a, c, g, or t
  misc_feature (351)..(351): n is a, c, g, or t
  misc_feature (364)..(364): n is a, c, g, or t
  misc_feature (379)..(379): n is a, c, g, or t
  misc_feature (405)..(407): n is a, c, g, or t
  misc_feature (412)..(412): n is a, c, g, or t
  misc_feature (419)..(419): n is a, c, g, or t
  misc_feature (434)..(434): n is a, c, g, or t
  misc_feature (437)..(437): n is a, c, g, or t
  misc_feature (479)..(479): n is a, c, g, or t
  misc_feature (485)..(485): n is a, c, g, or t
  misc_feature (506)..(506): n is a, c, g, or t
  misc_feature (512)..(512): n is a, c, g, or t
  misc_feature (517)..(517): n is a, c, g, or t
  misc_feature (530)..(530): n is a, c, g, or t
  misc_feature (855)..(855): n is a, c, g, or t
  misc_feature (927)..(927): n is a, c, g, or t
gtcacccttttcctgcacaacaacgnggtcttccatgatccccacatcgctgactcctggccgcagctccaggaccacttntnagctgtggagctngtggggncggaggnggctctgagcncaggcgaggccagggacatggccatggacctgtgtnggcaggaccccgagtgtgagttctacttnagcntggacgcngacgctgtnctcaccaacntgcagaccctgngtntnctcattgnggagnnnaggggggtgatngctcccatgntgtnnnggnngggcaagntgtggtcnaacttntggggcgncctgagcnccgatgagtactacgcccgctcngnggactangtggagctggtgnagcggaagcgatgtnggtgtgtggaatgttccatatatctnnnaggcntatgtgntggggggtgataccntgnggatggagctgccccagagggatgtgttctcgggcagtgacncagacncggacatggccttctgttagngctttngaganaagggcatcttcntccatctgagctatcagcatgaatttggccggctcctggccacttccagatacgacacggagcacctgcaccccgacctctggcagatcttcgacaaccccgtcgactggaaggagcagtacatccacgagaactacagccgggccctggaagggaaggaatcgtggagcagccatgcccggacgtgtactggttcccactgctgtcagaacaaatgtgtgatgagctggtggcagagatggagcactacggccagtggtcaggcggccggcatgaggattcaaggctggctggaggctacgagaatgtgcccaccgtggacatnccacatgaagcaggtggggtacgaggaccagtggctgcagctgctgcggacgtatgtgggcccatgaccganacctgtttccggtttaca

SEQ ID NO: 562881 - DNA, 873 bp, Homo sapiens
caaatataaaactgggaaaatatttgcagttcatatcaaaaaaagggctaatattcttgtcccagaattcctacagttttttaaggccagtaatttgatacattagtgtgtaaaggatatgaccagacagctcacacacagacacacaaatgtgaaaagatgcttgatctcactgataaagcataaattaaaacgatgtcatttttaaaaatcagattcgcaaattttaaaagttgctaacactggaatggccagagtaagaggaaacgtgacacaggcacagattgctggtagacatataagttggtacagccctctctatgtaattttgtgtttgtcaaaattacaaatatgtatgcccttaacccaggaattccactcctcattatatatcctacaaataaactggtctcgttatgacacaatgtaatgaatacatagataagtactgaaatacttggttatcatagcgtaaagatggtaatcaacccaaatgactattaccagaatagaaattaaacaaagtatgatatatccataaaacacaatactatgcagctgttaagcagaatgagacagtcctctatatatcaatatggataaagagtaagtgaaaaaagccaggagagaatgttgtctataatatgctgttgttgtgtacgggaaaataaataatataaatacctagaatatttgtgaaggtacagccaagaaactactatcactgattgtcttaaggtactagatggggcacaggacaggacgaaagatttacttcttattgtttcttctgtataacttttgaattttatgctgttaatgtaatttttcaaaaaaatatataaaaatataaaaacatgaaaaacatgaaaa

SEQ ID NO: 562882 - DNA, 385 bp, Homo sapiens
  misc_feature (66)..(66): n is a, c, g, or t
  misc_feature (86)..(86): n is a, c, g, or t
atgccctatccatccaatccaattagattagaacagaagaaaattggattggatggatagggcatnacattgaaagaaacattctnttcttacgtttacttgagttgtccatagcaacctgtcctgaaagattgtccgtttaaagtaagcctctcaagactgtgaccaccacccaagattggtgtttcataccgtcttgatacaaacagcagacatccagtcattcagctgcgttaggatcactatctctttatcagaagaaagaagagaaaggtagaagagggatttctacttcataattgaatgttctttgcttattaactgtggaagcaaacttgaaattctgggagagaaagcactgatggggcacacattgtctgtggtg

SEQ ID NO: 562883 - DNA, 363 bp, Homo sapiens
tgctgagaaggccctggggaaggcggcatccacatcagaagcatcaagaatgtgacagagctcaggctttctgacaaccccgcctgggaaggagataaagggaacaccaagggcgacaagcatgatgacctccagagagcgcggttcatctgccctgtggtgggcctggagatgaatggccggcacaggttttgcttcctccgatgctgcggttgtgtgttttctgaacgcgccttgaaggagataaaagctgaagtgtgtcacacgtgtggggctgccttccaggaggaggacatcattgtgctcaatggcaccaaggaggatgtggagatgctgaagaagaggatggaggagaggaggctg

SEQ ID NO: 562884 - DNA, 126 bp, Homo sapiens
ctaataaaacgcagaagaagaatcagtcatcagtattagaggtttgaattgggtcacatcaggtgtgtgccagagctctgtcaactgccccaccggagttggtgcaaatgtctatttactggaaac

SEQ ID NO: 562885 - DNA, 3362 bp, Homo sapiens
  misc_feature (3274)..(3274): n is a, c, g, or t
  misc_feature (3362)..(3362): n is a, c, g, or t
acccggaactacttagcccagggtttcctgagtgctcctcgggccaaaagcagagcgcacaaattccagaagaaattaccaacggcgggactatttcagtgctccgagaagtatcaccagtaaccaatcagcaaaaagctctagctcacgtggtgtatattcagcctatcaagctcctgatattcatgaatgctgtcatttccgttccgcctccttctttctcgacaagatggccacaccggcggtaccagtaagtgctcctccggccacgccaaccccagtcccggcggcggccccagcctcagttccagcgccaacgccagcaccggctgcggctccggttcccgctgcggctccagcctcatcctcagaccctgcggcagcagcggctgcaactgcggctcctggccagaccccggcctcagcgcaagctccagcgcagaccccagcgcccgctctgcctggtcctgctcttccagggcccttccccggcggccgcgtggtcaggctgcacccagtcattttggcctccattgtggacagctacgagagacgcaacgagggtgctgcccgagttatcgggaccctgttgggaactgtcgacaaacactcaagtggaggtcaccaattgcttttcagtgccgcacaatgagtcagaagatgaagtggctgttgacatggaatttgctaagaatatgtatgaactgcatacaaaagtttctccaaatgagctcatcctgggctggtaagttggggaggtgggggctggggttaatggaaggtctcttcgtgattgccggtgtcttttgctactggactggatcttatactcttccttttggaggcaagagtattgcaagtgtattactgactgtgagcagtggctcaatgcctgtaatcccagctgggaggctgaggcaggaggatcacttgagcccagtagttcaagatcagcctgaacaaaatagtgagaccctgtctctacaaaaacattttttaaaaacttagccaggaatttgaagttgcagtgagctatgatcatgccttgccactgcattccagcctgagtgacagagtgcgaccctgtctctaaaaaacaaaaggaaagtgtgttacctgtaggaactgtgaattcagtgggttttgctggtggttctgatcctgtggggccaggatatttcgaattaccttgtaagtgacttggaatttttcatcagcactaagtcagcctttgattttatttgacatagttttcggtgtgtgtattgctcttggcagttggtgtcactaggtgtcctaccgtagaagtgtccggtaccctgaagacacccatgccactgttgtgtttgatattgacgccacatatagacaggagtccaccactgtgttccatttcacaggtacgctacgggccatgacatcacagagcactctgtgctgatccacgagtactacagccgagaggcccccaaacccatccacctcactgtggacacaagtctccagaacggccgcatgagcatcaaagcctacgtcagcactttaatgggagtccctgggaggaccatgggagtgatgttcacgcctctgacagtgaaatacgcgtactacgacactgaacgcatcggagttgacctgatcatgaagacctgctttagcccccaacagaggtgattggactctcaagtgacttgcagcaagtaggaggggcatcagctcgcatccaggatgccctgagtacagtgttgcaatatgcagaggatgtactggtgagaggggaaagaaaaaacaaagggggaggacatagttctctatcctgggatcactgaggcatgtgctgatgaaatggtagggctcagtggttataattaactgcctcatcgagtctttgttttggtactcagtctggaaaggtgtcagctgacaatactgtgggccgcttcctgatgagcctggttaaccaagtaccgaaaatagttcccgatgactttgagaccatgctcaacagcaacatcaatgtgagtgcccttcctgagccccttcttgcctggtttcttcccccacctcagcacatacactcaaatgtgaaaagagttgggtgaggtgacctggagtaggatagagacagggcttcacctatagccccactgaagtccaggttgggaggaaggaagaggtgtgttatgcgtggttggagacttccttccttctcccatgattccattgtctcatttactgctgatactactgtgacttactgtctaaattcgtgatggaaagaaacactaaaattcagaggttaatgaaaatgcaattacttatttcccccatctgagttcacagaccccctatattccatccatgggtttcagctaaggcacccctagtctataagtgtatcagtagagataagaaagccttctcaagcatttcctttctgtcttctacctttttgacttttattcagtctctcctagctgtcatttatccacagctgtcctcatacccagtgtctaccatagagctggccaaagccagcctttttgctccctttccacccaaccccccactcattgtgtattctttgtcttccaggaccttttgatggtgacctacctggccaacctcacacagtcacagattgcactcaatgaaaaacttgtaaacctgtgaatggaccccaagcagtacacttgctggtctaggtattaaccccaggactcagaagtgaaggagaaatgggttttttgtggtcttgagtcacactgagatagtcagttgtgtgtgactctaataaacggagcctaccttttgtaaatttaaccaacaaagaaatccaaaaaacacaataaacaagaaacatcataataaccaacaaataacaaaacgaaacacaacacacttctttttaaacacaacaagacatgaaaaccaaaaaactgttgttggtgcggggccgcgccccccccgaaaaagattttttataccaaccccaccttgcgtgggcgggaccgggagccgccaagaagttgagtagagacaaacagcgtgctgctaagtagagtggctggttcccaaagcagagaacccggctgcgtggaagcacgcacacagacgtggcgggggtgcgtgtctcccccacagaaaagagaaaagcggggcgccgcgggagaagaaccagcgcagctggtgcgtgtacggaacaaaccccgagaaggagcgagcgccctgccagccggcgacacagcgaaggggcgaggcgcttctaacacancacagcgaaggaggaggcaggcagaccggagcagagcccagagtaaataaaaaaaaatagcccccgcggcaagcgagggcggagaagn

SEQ ID NO: 562886 - DNA, 239 bp, Homo sapiens
agggtgccgaaatgagaacaaggcagaaggagaggaagtataaagcgtgagctcacgccttatacttcctcaacgctttatactttctcaacgctatatacttcctcaatctttatacttctcaacgctttatacttcctcaatctttatacttctcaacgctttatacttcctcaacgctttatacttcctacaacgctttatactttctcaacgcttcatacttcctcaacgcttta

SEQ ID NO: 562887 - DNA, 1995 bp, Homo sapiens
  misc_feature (1907)..(1907): n is a, c, g, or t
  misc_feature (1995)..(1995): n is a, c, g, or t
acccggaactacttagcccagggtttcctgagtgctcctcgggccaaaagcagagcgcacaaattccagaagaaattaccaacggcgggactatttcagtgctccgagaagtatcaccagtaaccaatcagcaaaaagctctagctcacgtggtgtatattcagcctatcaagctcctgatattcatgaatgctgtcatttccgttccgcctccttctttctcgacaagatggccacaccggcggtaccagtaagtgctcctccggccacgccaaccccagtcccggcggcggccccagcctcagttccagcgccaacgccagcaccggctgcggctccggttcccgctgcggctccagcctcatcctcagaccctgcggcagcagcggctgcaactgcggctcctggccagaccccggcctcagcgcaagctccagcgcagaccccagcgcccgctctgcctggtcctgctcttccagggcccttccccggcggccgcgtggtcaggctgcacccagtcattttggcctccattgtggacagctacgagagacgcaacgagggtgctgcccgagttatcgggaccctgttgggaactgtcgacaaacactcaagtggaggtcaccaattgcttttcagtgccgcacaatgagtcagaagatgaagtggctgttgacatggaatttgctaagaatatgtatgaactgcatacaaaagtttctccaaatgagctcatcctgggctggtacgctacgggccatgacatcacagagcactctgtgctgatccacgagtactacagccgagaggcccccaaacccatccacctcactgtggacacaagtctccagaacggccgcatgagcatcaaagcctacgtcagcactttaatgggagtccctgggaggaccatgggagtgatgttcacgcctctgacagtgaaatacgcgtactacgacactgaacgcatcggagttgacctgatcatgaagacctgctttagcccccaacagaggtgattggactctcaagtgacttgcagcaagtaggaggggcatcagctcgcatccaggatgccctgagtacagtgttgcaatatgcagaggatgtactgtctggaaaggtgtcagctgacaatactgtgggccgcttcctgatgagcctggttaaccaagtaccgaaaatagttcccgatgactttgagaccatgctcaacagcaacatcaatgaccttttgatggtgacctacctggccaacctcacacagtcacagattgcactcaatgaaaaacttgtaaacctgtgaatggaccccaagcagtacacttgctggtctaggtattaaccccaggactcagaagtgaaggagaaatgggttttttgtggtcttgagtcacactgagatagtcagttgtgtgtgactctaataaacggagcctaccttttgtaaatttaaccaacaaagaaatccaaaaaacacaataaacaagaaacatcataataaccaacaaataacaaaacgaaacacaacacacttctttttaaacacaacaagacatgaaaaccaaaaaactgttgttggtgcggggccgcgccccccccgaaaaagattttttataccaaccccaccttgcgtgggcgggaccgggagccgccaagaagttgagtagagacaaacagcgtgctgctaagtagagtggctggttcccaaagcagagaacccggctgcgtggaagcacgcacacagacgtggcgggggtgcgtgtctcccccacagaaaagagaaaagcggggcgccgcgggagaagaaccagcgcagctggtgcgtgtacggaacaaaccccgagaaggagcgagcgccctgccagccggcgacacagcgaaggggcgaggcgcttctaacacancacagcgaaggaggaggcaggcagaccggagcagagcccagagtaaataaaaaaaaatagcccccgcggcaagcgagggcggagaagn

SEQ ID NO: 562888 - DNA, 219 bp, Homo sapiens
atgctgcggcgtggacacttggcattcagggacatggccatagaattccctcaggaggagtggaatgtctggaccctgctcagaggactttatacagggaggtgatggtcggagacctacaaggaccctggcttctctgggaaatctgtctcccgaccctaagtgtaatctcctagttggagcaagcaagataccccggattcgcaagtcaatgtgaat

SEQ ID NO: 562889 - DNA, 331 bp, Homo sapiens
gtcgtatcgcgctgacgtgcacacggctgcccgggagccaggtccgcttctggtgggcctctggcgcgggacactctcgtgtgggacacaccctaccacaccgtctggtactgcgacttccgcactggcaagatcggctggttcctgtgaggccagttcagtgtctctgtcaactgcttggaccagcatgttcggaagtcctccgatgagcgttgctttgataatatagcatcccaggctgggtgcagtggctcaagcctgtaatcccatcacttcgggaggccgagacaggtggattacctgaggtcaggagcttgagaccagcctggcc

SEQ ID NO: 562890 - DNA, 1767 bp, Homo sapiens
acccggaactacttagcccagggtttcctgagtgctcctcgggccaaaagcagagcgcacaaattccagaagaaattaccaacggcgggactatttcagtgctccgagaagtatcaccagtaaccaatcagcaaaaagctctagctcacgtggtgtatattcagcctatcaagctcctgatattcatgaatgctgtcatttccgttccgcctccttctttctcgacaagatggccacaccggcggtaccagtaagtgctcctccggccacgccaaccccagtcccggcggcggccccagcctcagttccagcgccaacgccagcaccggctgcggctccggttcccgctgcggctccagcctcatcctcagaccctgcggcagcagcggctgcaactgcggctcctggccagaccccggcctcagcgcaagctccagcgcagaccccagcgcccgctctgcctggtcctgctcttccagggcccttccccggcggccgcgtggtcaggctgcacccagtcattttggcctccattgtggacagctacgagagacgcaacgagggtgctgcccgagttatcgggaccctgttgggaactgtcgacaaacactcaagtggaggtcaccaattgcttttcagtgccgcacaatgagtcagaagatgaagtggctgttgacatggaatttgctaagaatatgtatgaactgcatacaaaagtttctccaaatgagctcatcctgggctggtacgctacgggccatgacatcacagagcactctgtgctgatccacgagtactacagccgagaggcccccaaacccatccacctcactgtggacacaagtctccagaacggccgcatgagcatcaaagcctacgtcagcactttaatgggagtccctgggaggaccatgggagtgatgttcacgcctctgacagtgaaatacgcgtactacgacactgaacgcatcggagttgacctgatcatgaagacctgctttagcccccaacagaggtgattggactctcaagtgacttgcagcaagtaggaggggcatcagctcgcatccaggatgccctgagtacagtgttgcaatatgcagaggatgtactgtctggaaaggtgtcagctgacaatactgtgggccgcttcctgatgagcctggttaaccaagtaccgaaaatagttcccgatgactttgagaccatgctcaacagcaacatcaatgaccttttgatggtgacctacctggccaacctcacacagtcacagattgcactcaatgaaaaacttgtaaacctgtgaatggaccccaagcagtacacttgctggtctaggtattaaccccaggactcagaagtgaaggagaaatgggttttttgtggtcttgagtcacactgagatagtcagttgtgtgtgactctaataaacggagcctacctctccgtaaactcaccaccaccccaccccgccctgcccaacggcggcccccccacgcgtcccccctgcaggctgcccccccctcttttacctgttctcccccgcttcctcttctcggtccacccagcagtggcccccccttatctatgttttcgcaccctgctttctcgctccgctcctatgctgctcttctctgtcttcgcctcttttttattaacgtccgtttttggttatatagtgggacacacctcgtgtaacccttaggcgggaacattttgtggcgtacgtggtcacccttcttctctggcgtgttgttgcccctacat

SEQ ID NO: 562891 - DNA, 2115 bp, Homo sapiens
  misc_feature (698)..(698): n is a, c, g, or t
  misc_feature (2027)..(2027): n is a, c, g, or t
  misc_feature (2115)..(2115): n is a, c, g, or t
acccggaactacttagcccagggtttcctgagtgctcctcgggccaaaagcagagcgcacaaattccagaagaaattaccaacggcgggactatttcagtgctccgagaagtatcaccagtaaccaatcagcaaaaagctctagctcacgtggtgtatattcagcctatcaagctcctgatattcatgaatgctgtcatttccgttccgcctccttctttctcgacaagatggccacaccggcggtaccagtaagtgctcctccggccacgccaaccccagtcccggcggcggccccagcctcagttccagcgccaacgccagcaccggctgcggctccggttcccgctgcggctccagcctcatcctcagaccctgcggcagcagcggctgcaactgcggctcctggccagaccccggcctcagcgcaagctccagcgcagaccccagcgcccgctctgcctggtcctgctcttccagggcccttccccggcggccgcgtggtcaggctgcacccagtcattttggcctccattgtggacagctacgagagacgcaacgagggtgctgcccgagttatcgggaccctgttgggaactgtcgacaaacactcaagtggaggtcaccaattgcttttcagtgccgcacaatgagtcagaagatgaagtgagtgggaatccaagctgtccctctgcagtntttagctgttcatttgctcggctcccctcacggtccctcccacactcataactagagctcctgtagccaaggagcttcttcccatttgtggctgttgacatggaatttgctaagaatatgtatgaactgcatacaaaagtttctccaaatgagctcatcctgggctggtacgctacgggccatgacatcacagagcactctgtgctgatccacgagtactacagccgagaggcccccaaacccatccacctcactgtggacacaagtctccagaacggccgcatgagcatcaaagcctacgtcagcactttaatgggagtccctgggaggaccatgggagtgatgttcacgcctctgacagtgaaatacgcgtactacgacactgaacgcatcggagttgacctgatcatgaagacctgctttagcccccaacagaggtgattggactctcaagtgacttgcagcaagtaggaggggcatcagctcgcatccaggatgccctgagtacagtgttgcaatatgcagaggatgtactgtctggaaaggtgtcagctgacaatactgtgggccgcttcctgatgagcctggttaaccaagtaccgaaaatagttcccgatgactttgagaccatgctcaacagcaacatcaatgaccttttgatggtgacctacctggccaacctcacacagtcacagattgcactcaatgaaaaacttgtaaacctgtgaatggaccccaagcagtacacttgctggtctaggtattaaccccaggactcagaagtgaaggagaaatgggttttttgtggtcttgagtcacactgagatagtcagttgtgtgtgactctaataaacggagcctaccttttgtaaatttaaccaacaaagaaatccaaaaaacacaataaacaagaaacatcataataaccaacaaataacaaaacgaaacacaacacacttctttttaaacacaacaagacatgaaaaccaaaaaactgttgttggtgcggggccgcgccccccccgaaaaagattttttataccaaccccaccttgcgtgggcgggaccgggagccgccaagaagttgagtagagacaaacagcgtgctgctaagtagagtggctggttcccaaagcagagaacccggctgcgtggaagcacgcacacagacgtggcgggggtgcgtgtctcccccacagaaaagagaaaagcggggcgccgcgggagaagaaccagcgcagctggtgcgtgtacggaacaaaccccgagaaggagcgagcgccctgccagccggcgacacagcgaaggggcgaggcgcttctaacacancacagcgaaggaggaggcaggcagaccggagcagagcccagagtaaataaaaaaaaatagcccccgcggcaagcgagggcggagaagn

SEQ ID NO: 562892 - DNA, 352 bp, Homo sapiens
  misc_feature (350)..(350): n is a, c, g, or t
cccttatcctccctaagataaagagaattacaagggtggttgtgaggatttgtaaaaatgctttgcacactcccctgaatcctaggatacagagaaggcctctgttcaaggagtgagctcccaggtccctgtttgattcctcaggagaagctgactcccaaagggacttttcccatctctacaaaaaaattaaataactagctggacacagtggtgcatgcctatagtcccagctgctcaggaggctgaggcagaaggataacttgagctcaggagttcgagattgcagtgagccatgattacaccacactgcactccagcctcggtgacagtgtgagactctgcctccnaa

SEQ ID NO: 562893 - DNA, 472 bp, Homo sapiens
tttctacgatcagaaacatctaccaccagtgtgaagatggaaggaaaaagagctccttttcctctccctcccccaccacctcctccccaccaaaaaaaaaaagaaaaaaaagagaaagccagaaaaaaccaaaaatagcctatgtgagtctgcttctaacagccaaaggatgtgtgcactataagcggatcccttgcaaggtgtgtcatagtgagctcaaacatgactatttatggtatgttcacggagtgaatggacacaaaacacgaaccagacacttatattaaacccaaacgtggcttttaacgagctcggttcctccacttttattggccacaagacgtcccctaagtcagagctacctgtggatccttccagcagtaatgtctcctgacttgctggccccgagttgcattgactccacctcactggcctcccaggcttgctgcgttgtgcctctccatgcggggat

SEQ ID NO: 562894 - DNA, 101 bp, Homo sapiens
acttctttttttttattaattggggaatggagtggactggctctgatatggagagacctgtaagtctggtataataggtgcccagcgtgaaaaaagcatct

SEQ ID NO: 562895 - DNA, 645 bp, Homo sapiens
  misc_feature (123)..(123): n is a, c, g, or t
  misc_feature (253)..(253): n is a, c, g, or t
gagacgttcttctgccgagatgtcgtcggggtttcctgcttcaacatgtgcttggacggaaccctggcgctctgttcccccacccctgtgcctggccgcccaatagccatgccctcctgtcancctcttcacctgcaccctcggactggccccagaggcccccgccggccggttccagcgccgtgcggcagaccacctggccggcctggccgccggccattctccttttaggtcgccgtgccatttgactggngagatccgtgtgtacaacctcttcggcaaggtgttgcccgcccaaagagaaattttaacaccagacccaaagggggcaccttttcacaaaggaaaatggggaggccacctgtggcccacctagtttccaaaaaagccccggggggggcccccctaaatggaggcaaatttttcaccaaaaaaagctcacctcttgtttttgggggtaaaaaaaaaagggggaagacccaccattttattagccacgacacatattttataataaacaacccacatcactcattcgtctctcctacacaaaaaatcccaaaccatatattagttcattctcatcaacaaagcaataacagaaaaaagatatatatattatcaataaaacacgacaaagtcatg

SEQ ID NO: 562896 - DNA, 1119 bp, Homo sapiens
catgtgtgcaaccaggggtgtactggaaccatttttagaaggaggtttcccccccgggtgttccactcccggcctgtgggaagaaatatcccccgttgtttcggcgcgaaggtgaacaaccagtgttctaatttatagggaaagaattagaaaatttggtgcattgtacacttgggtcccatgggaccccgcccgtttatggtctcccgtggttgaccacaaccttgtgtttgggggggatttagggaaagttattaattctggccccggagtttgcaccctagtgtgatgcaccccccatcttgtcttaattaaagcccaggagttttttggaagatttatgaagttgaaacagagacccactattgttgtgtcccccccggaaaaggtgaattttcttccttagatatagaaaattgagaagatgggacattttaaagagggtattatctcccacagttcgctttgtggaaaggggtgaatgtaagaaattcccacaatttcttgtttaaaaatattcccacctctaaatcttttttctaagataaagaaatacccccaaaaatattttcacattctaagagatataataatttccacctcttaaatatattgttataagaacagaggtagagatattatattgggtggcctgaaggtctttcttttgtaacaatgtgcctataacaggcgagaagtgttttttctctatatgggtataatgcggtctgttatccggagatatatataacccctccaaggttataaatggagaattatatcttatatgggaacgctgtgtgtttctcggttataactataaaatttatacaccacgtataaccacctcctcgtatgtatacccacttaccacgagaaaatatactttctggccttataaaaaatattgaatatatgcccacgaagaatgagttatgtgtttttttgacgcttggagacccttttaaaatgcctcactctgtgtgtatctgagaccacaattgaaactcgcacatgcacgccactataaaagggacaccagaaaccacgagaactgtttaactaaactttgggacatcccctggagtttttaaaaataaataaatatatatatatata

SEQ ID NO: 562897 - DNA, 140 bp, Homo sapiens
  misc_feature (94)..(94): n is a, c, g, or t
  misc_feature (104)..(104): n is a, c, g, or t
cgagccggtacccccaattaacctcattaaagtgctgggattacatgtgtgagcacgcgcctggctaggagtagtattagtgggccaggcagangcacatattnagactcggaagaatgaagatgaaatgtggggagggg

SEQ ID NO: 562898 - DNA, 965 bp, Homo sapiens
cgatgtcccatgtcgggggaaccccctgccaccgggtgaccaagggtcccccccccacatgtcaatcgtcaccgacaagaagcttgcgctcctaaaaggctcgttccaagttagtacccctgggctcccaaggaggaacccttccgacgctcaaggcaaccggaaagggtgctccctcggtgcaacataaaaaggacgctgaaagaatgatccccaggccaccaccatgttgggtaccaaaaactgcgaatctgtggggcaccccccacgcgaggagaaaaccctgtgctttcggagccgcccacaaggagtaaagaagtcttggcaccaccacgggggattatatcaagacacgagtggcgggcacctcccccttgcaagtttccctccgtagttcatcctcccatggacaagcaccccgctccgcgggggcgattgaaaacgacacacaacaaagacactcggcgcaacattcccatgatacagtttgcccgccccaaccgtacatgtcttttcacccgcgcgtggccgaaaaaacgaatctttttcaacgcgcacgcagggaggctgtcaccaaatacaataacaagaacacacaggttagggtatcaaaagtttctggcacaacgccgctcgactgaaggcgctagagtagttcgtacagccaacactgtcatctaaatacggtagatgaatctttaaacaaatatggactagtagtacacttctttacacactcaccaagtactaatagcaaaatgcaaatacatactattaatgacacatgtcggtgctacaccacgcatccacccacagggatcataatgattataggctgtcgatgatctttgaagcacagagggtgtctttgctgagggaccacagtgttcatacgtccaatgcctatgtattgagctcgcccaattatgataacaaaaaaaaaattccacaaccaacataacgca

SEQ ID NO: 562899 - DNA, 310 bp, Homo sapiens
tgatctgaggatcccgtctagacgctgaactatgtggatgcaggaacaggaaggatgttccttgccaagtaggatgcccatccagaatgaggggcaaggaaaatcctcatggatgatcatgacgggagactctggagtgacagcagtgccccaggccagtccaactgaagtggaagaaggctcagatagagctaaaatagcaagaatgggtgcaattggatggacatatttttacagagctgttggaagatgtggaaaagtccaaatacaaaaacaagtcaggaggctgggcacatagttcagcgtctga

SEQ ID NO: 562900 - DNA, 367 bp, Homo sapiens
  misc_feature (24)..(24): n is a, c, g, or t
  misc_feature (34)..(34): n is a, c, g, or t
  misc_feature (38)..(39): n is a, c, g, or t
gggggggagtttgtttgacgtacnttcggagggnccgnnaaaacttggcctattttaagggaggagctctggtcagtgggggaaaaaagggccagaaatctttattatttttctatagcaaaccagatattggatcaaccctcttgaaaaggcatagaagaggctgggcacagtggctcactcctgtaatcccagcactttgggaggccaaggcaggcagatcatttgagttcaggagtttgagaccagcctggccaacatggtgagactccatctctactaaaaatacaaaaattagccaggtgtggtggtgcacgcctgtaatctcagctactcggaggctgaggcaggagaatcacttgaacct

SEQ ID NO: 562901 - DNA, 259 bp, Homo sapiens
  misc_feature (72)..(72): n is a, c, g, or t
  misc_feature (180)..(180): n is a, c, g, or t
ggccgctgcaggacgagacccttggtgtggcgtccgtgcccctcgcagtggagggccgtccagggcatcctnagggagacgaaaagttgccagacggccagcattgccactaccagtacatccacccaggccaggaatcatgtagacgcccaggtgcagacgagaggcccccataactantcgcgtgcagcccccgccccagtacgacatacccaggctcgcagccttttattcggagagtggaggccatggtcatccg

SEQ ID NO: 562902 - DNA, 758 bp, Homo sapiens
aatggccgtgaatttctaacgcataatatactgtgatacagccattccgtacatgtgtgaagtcctgcataatttcgaacttgtcaaatgtggcactaggagtcattcagatctaggcttcatcattttccagtgagaagcagagacccaaagggcctgtaacttgtgcttggtcaggggacctgtctgtcatgcctggaggctcttcgagcacacttccccatctttcccttctgccactgtggcttcaagcacctctgtcatagagcgtctctgaaatagagtctcggtcattgacttatcccgaagtagagcaagtgtgttccctctcatgtgtacgtctccaggaccttggccagtacaagctctggccctaggctgcgtccacgttaatagtcataattcctgaaacagatgttgattgcatctatagaagggggtacaccctatggggcgtcattccactgggttgggccacattaaaacgaacggtgactccccgatatatttggagcacaaacgaaacaacatctacccaaacacgacgcaaaccacacctcgcacccattgtttatgaccccaacgtcctctgcctctccgtaaaacacagacttctcttacagcacaccactcgtaggtaactgagaccgcgcgcgctccccccctacgaggcaccacaaaccgcgtcgcagcacacgcgcgggtcaacaacagaaaacccgtggagcacggcaacaggtcggagagcacgcccccga

SEQ ID NO: 562903 - DNA, 143 bp, Homo sapiens
  misc_feature (5)..(5): n is a, c, g, or t
tgcantatgaagtgattgatcacagaatggattgtacgctgtgagaagtgcgacaccgaatttccaatttcaagtacctgcatgatccttgtcagtaaatatttgcagattttcaacgagaatcaagtgggtgaacttgtttc

SEQ ID NO: 562904 - DNA, 990 bp, Homo sapiens
agcggggtggagcgcgcgctgctctggacgacgagacacactactgcgcacgcgcccgacgggagctgcaccgtggtagcccacgcggtccgaacccgtctggtccggccgagcctggtagtattgctcgtaacgctgtaattcttgaacgattgggcggtgatgctgtgtgagtgctgggtgaacgacaattgatgacgctgattagataacttggataagaaagcacagtgattatcacggacctgaccctggatatagcagagctttcatgaagtctaataccagagtcgattggccacgtaccataatttaatacattcgcacaagaaaatttctggagagacgagataaatcgcctttcaatataaagggatctgttgggctacttgggtagagggctactaggtaagagcaatttccatccatcgtgcaagccccacccagtggcgactccatcttcatggaattaggtagattaagaggtaattgcccttcaagacatggacatagcgttggaacatttcatatccgatctacgcagaactaaggtcgaataaagtcttatcgtaacgatagtttttcgaactttccttgttgaaagcacttgtcccgtgtattgatttaactggggggatatttggcacctcggacggattttctcccgggaatatgatgtctcatgtgatcgattcaggtcgataataacttgtgggggcatggcctgtggcgaggataaggagccatgtaaagaagggtaacattgcaaaggaacttcgttcatcgaatagtgtgggggcaaggggatcccttttgttcaatggccagcttgtgataggaacgaaagttatgacctttcaagactaaacaaccgcgaccatggtgtccttgcaggggttggggagagatccaagaagacgaattctatgcttgatatctttatggctccttctgaatccattaccctgccaattcagagtcatgaccaac

SEQ ID NO: 562905 - DNA, 454 bp, Homo sapiens
  misc_feature (400)..(401): n is a, c, g, or t
attcgcggccgcgtcgaccgaagagggtggcatcggcttcgtggtcgcggacaatccgaagatccagcaggaagtgctggtgaccccgggccgcaacgccgacgcccgtgtcgtcagttcgtcaaggtgaagatcacccactggccgacgccgcgcttccagcccagggcgatgtgatcgaagtggtgggcaactacatggcgcccggcatggagatcgatgtcgcgctgcgcacctacgacattccccacgtctggccgagcgtgctcaaggaagcggcgactcaagccggaagtcgaggacaaggacaaagagaagcgcgtcgacctgcgccatctgccgttcgtcaccatcgacggcgaagatgcccgcgacttcgacgatgcggtctactgcgaanncaagcccggcaagctgcgcctgttctccggcgtcgacgcggccgcgaaattgg

SEQ ID NO: 562906 - DNA, 267 bp, Homo sapiens
atcccacagttagggaggctatggtgggaggatcacttgagtcagagtacaagaccagcagggcacatagcaagacctcatctctactttaaaaaaaaaaaaaaggtagctggtatgggggcccaaccttgtcgtcccagctaactcggcaaagctgaggggggaggatcattggagcccaggaaatcaccccggcaggaagcaatgatcatgccacggccttctagtaaaggcggcagagtgagtccttgtcctcagaaaaaaaaa

SEQ ID NO: 562907 - DNA, 245 bp, Homo sapiens
atgtgaatatgaagctcacgtagtacaagatcctaaccaaaaagttcccagcgtttagaccagggcttaggcttcatttttactttcagctcattaacaggaactttttggttaggctcttgtactactggttatattccatcaaagtgtattattcagtcaaggggcgtctcgctgaagtattagcaaggctcatcaatccgagcccgtttttcgccaacatttttgtcccggacccgaggtcg

SEQ ID NO: 562908 - DNA, 327 bp, Homo sapiens
  misc_feature (323)..(323): n is a, c, g, or t
ttcgttcgggacggatcgaaacccttgtgtaggcaataggaaatatcattcgggcttgatgtgtggaagggtgtttaaggggttggctagggtactaattgtctggcgtcgcctacgacgtctggctgagaatagtgttaattgctcctttacggagagcactgacgagaagtcaagccgagggtcgctctttgattgtgtattaagggtggaaggtgattttcctcggaatgcggaggtgattccttagggggttgtttgatcccttttcgtgctacactaggaggtggactgctgctagggctgctacctcctttatgatncacg

SEQ ID NO: 562909 - DNA, 589 bp, Homo sapiens
  misc_feature (267)..(267): n is a, c, g, or t
  misc_feature (296)..(296): n is a, c, g, or t
  misc_feature (371)..(371): n is a, c, g, or t
  misc_feature (480)..(480): n is a, c, g, or t
cacccgcccccaatctgtctcaggatggaatgacaccacaaaatgtctttctaagtcttagaactctttgtcgtattctctacctacgtaaccaaaagaaactttctaaacatcaggatgtttttcaatttatgtttgtctttgctcacacgacaacaaaaaaaaaattagaaacaaattaagacaaagtaaaaaaaatttcaatcttatgttaccggattgcgtgtcaggagagaagtatatgaaaaatacatcagcaaaattttnagctggttcagtaactatagttacagatnggaaaagaaaatgaaaaaaatttatcgagttgccaaatcttacattctgacatattaacagaagaaaggattttngtcccacaagtttaagacagaggctggggattttcttatataaaaattttcaaatcttggacacatttatcacaaaaattatgcttttaggacttcacatcatgtattnctgatcaggcatgatcctaacagcaatggtttaataaaaattttaaaaaccaaaaaccaaaaatgttttgaaagaaataagtaattagtatcccttccctaccctaaaa

SEQ ID NO: 562910 - DNA, 339 bp, Homo sapiens
  misc_feature (26)..(26): n is a, c, g, or t
  misc_feature (63)..(63): n is a, c, g, or t
  misc_feature (69)..(69): n is a, c, g, or t
  misc_feature (82)..(82): n is a, c, g, or t
  misc_feature (95)..(96): n is a, c, g, or t
  misc_feature (100)..(100): n is a, c, g, or t
  misc_feature (102)..(102): n is a, c, g, or t
  misc_feature (111)..(111): n is a, c, g, or t
  misc_feature (121)..(121): n is a, c, g, or t
  misc_feature (147)..(147): n is a, c, g, or t
  misc_feature (154)..(154): n is a, c, g, or t
  misc_feature (169)..(170): n is a, c, g, or t
  misc_feature (174)..(174): n is a, c, g, or t
  misc_feature (202)..(202): n is a, c, g, or t
  misc_feature (212)..(212): n is a, c, g, or t
  misc_feature (260)..(260): n is a, c, g, or t
  misc_feature (326)..(326): n is a, c, g, or t
ctgggggggcttacattctaaaaggnaaaatacaccttttttaaaatgggatttttgtttggngttttntggaaagtactgngggaatattttgnnaagngngctttgggnataacttagncccatcattatttagagaatagaggngggaganagaggaggggttttnnaggnggagaatgacagagcattcagggtaggnaggggtttanagggagataaacacagtctcatcaactaaggagagatttgctgcagtnaataggatgagggaaatagtctgtgggatgcaagcaaaggaagcagggtgccttagacactgagtngagccagaaagat

SEQ ID NO: 562911 - DNA, 412 bp, Homo sapiens
  misc_feature (346)..(346): n is a, c, g, or t
agcaaaggacccattggtaggggtcagaagggcagtgtaagacggacgggagcccaccagggagagatgtgtcacgggggctctctcttaagtcaaattcggcacatggcatgtgaccatcctcgtgggctcacggtgggtgcctgaggttcctggaaggtggtatcaggatctcaaggtcacctccgggacacagcatggatagaagggggcagggttcatgcccgggaggtggaaaggcaagcagctcatttctgagaagcagggtggccgggggggctcataacaccaagggccccacagggtgtctccaattaacctacggtgagcaccattacctccccanagtatccaggatgtcagaaacctaggggcacggagaaacttcccagcaatctttctttagaacaga

SEQ ID NO: 562912 - DNA, 133 bp, Homo sapiens
atctcctcatttagacaaacttgacgtgcacgccttgcctggggtgcccactgttgtgcttcatgcaaggtgtcttccaggtagctgtggtggtccgtccaggccatgcttgccttcggagttttcccaaggg

SEQ ID NO: 562913 - DNA, 354 bp, Homo sapiens
tactgcagtcgcactacacaccccggtccatcttgccagcatcagcatgcacaataataggccaagcacgcctcctagtttgttagggacggatcggaaattgtgtagcgaataggaaatatcattcgggcttgatgtggggaggggtgttacaggggttggctaaggtcataattagcctgggtcgcctcaagcagtctggtgcacacatcaatgttaatgtcattaaggcacacaaagcaacacaagtaagccgcaggcgtctttgcattgtgtagtaagggtggcaagtgattttatcggcaatgggcagtgattcctcaggggttgtctgatcccgtttcgtgccaacaa

SEQ ID NO: 562914 - DNA, 913 bp, Homo sapiens
aggtgtgccgtcgaatgtcgctcctgtttacttacgtcatgactacttgtatctgttcctgtcctctatctttggtactcatctgctttgggcaacctcggttcttggctgccaacctatctccgcaagacttcttggctgggatcccctaccactacagggctgcctctcgaatcttattggtgtgaacccctctcgggtggttccctacacgttgaagaacgaatcccacgtcgggaggagaccctagcgccggccttagccatgagtacaaagtgcgcgatcttcggtcccgtcacaatcgcccatatggcctgtctacaatgacaccctgtcgcatgcatgacgtcctaatatgtactcgcctgcggtcacatcatgtgatagacaccaagcccctaccatgcccacattacttgcttaagaattcctagcttcagggacgctttacgatggataggcccttgccttcgatatatgcgttctgtaagctggaccctgaccgttgcaacttcggtatgtaccacgaatcacataagcaaccagtgcaatttatccttccattggagcttagccggccagactttcatactcccctgacggctcccacaatcgtgcggtgacctccaagcagtttaaccatagctccataggcaaagaggacctgttgttatcgggatggagcacgtcgtggatccgaatggactctcatacatcgctcacgcagctcactaagcaactcatctgtgcaaatcaccagagcactatcagccttccccgccttgcagcatgtcagctttctggggctaacttctctgcccttgaggttggaggcctgaggcctcgttggaactcatagctaacctggttcagagaccaggaaggagacgtgcacagttttgaaagcacagta

SEQ ID NO: 562915 - DNA, 225 bp, Homo sapiens
gcaagtctagccagaactcacttcttaaactgtgtccagtcatcttcaatatgtggacgaccttcttcttgcagacctctctaaaagactctcaaactcacacggcactgatctcttaaactttctcgctatcaaagggtatagggtctcaccctccaaggaccaactctccatctccatgatgacttacttaggaatacaactttcccctgaggcatgacaaga

SEQ ID NO: 562916 - DNA, 260 bp, Homo sapiens
tgggaagggggcccccttttgtggcccaaattagggaacgggggaaaattccgggcccacggaaacttcggtttcgggggccaagggaattttctggcttaagcctccgggggggccgggttaaagggttttggccaccaacccgggcaaattttagtttttccagaaaaaaggggttttccccaattgggccgggggggcctaaaactctggccctagggggacccccccccctgggcctccaaaggggtgtggtttac

SEQ ID NO: 562917 - DNA, 147 bp, Homo sapiens
ggaggcagttctatctacaaaaacaatgtcccctcttttagagtaagcaggatcgctatggtggagtcttcataaattttgaagacaagtccccacgccatacttcttttagagatgctaaagctgctgcttaaccgagcgctacca

SEQ ID NO: 562918 - DNA, 976 bp, Homo sapiens
  misc_feature (1)..(1): n is a, c, g, or t
ngtcggcgcaggggcgcgtccctttggctcccgggccggtttgtggaccccttctcgcaactttgtttggcgccgcaaaatccgttttccctttccgtggttttgccccgggccatggttggttccccccgcgcggggttgtttctgcctccccctctcgcgggagctatacgtttttcgactcctggtctgccgccggcgacgcattcttctcctccaggccttaggggccgcttcgtgggccttgttaggcccctccccctccgctagcgatggcgtttcccagcccggtacttggttatagggcccccttcccacaggtctctgtaccgagcggacgtgtattccccccccatcaatgggctcctattccactcggggggctccccccggatgtctcaccggcggcggaccacttcctgcgcactaagcctggacccccacgatattcgctcggtgtcaagcaatgtttaatactcttacggcgcggaattgacataatgcatttggttggccaccgcgacacacaaatggtctgtctcagcgctttatactctcctagagaggccgccccgccctggtggaaactccggggggtaccctccagtggctactgcacacccccccgtagtgcactcgcccctacttaccactcttctgtggtccactacaatttttgtacacacccgaggaatacttaacatagtatctacctcattgttaggtaccactcttcctctttgaagagacctcaacatcaactccaatttttcaagatacaccccccccatccgccctcccgagggaacaataaaattgagtaccccccccccccctccccaccattattcagaacaccctatgaatactaacatatattcataccccaaatcaagacagaggaatactaacccccccccatgggggtttcagcccaaccccagggccccccaaatattttcccccacaaaaaaca

SEQ ID NO: 562919 - DNA, 538 bp, Homo sapiens
  misc_feature (160)..(160): n is a, c, g, or t
ccggcgggggaattgttcctttcccccaattatgggcttccccggagattttttttggcgggggttgtttggggccccattgccccccggagggttgggcttcccaaagggaatttaaagggtgggggcccaattttttttcccacaaaggtctggtttnacaggggtgtccccgggggggaattttcccccgaggggtttttgtttcgggtttttttccccgctttttttgaccggggccccccagggccgtggtttaagggggtggggggggggtggttttttccccccggaaccttgggggtttttttttttttttttttgggggcccggggggaaatttaacccggggccattcccccggtttcccattttcggcggggttgaaatacccccgcttttctttgggggggggggggccttttttccccccccccacccattttcccgcggggggggcctttgggtttttccccttccccccgggcctgtttccttgccgggttttggggggccccctttttaacccctaaattta

SEQ ID NO: 562920 - DNA, 313 bp, Homo sapiens
aacagaaaactgcatttagttttctcttcaaagaaggcacttaacgaggccagcgcggtggctcccaaagtgcctgtaatcccagcactttgggaggcctaggcaggcggataacctaaggtcaagagttggatatcagcctggcaacatggcgaaaccccgtctctactaaaaatacaaaaaattagccgggcgtggtggcaggcacctgtaattgcagctactagggaggctgaggcaggggaatcactttgaacctgggaggcagaggttgcagtgagccgagattgcgccattgcaacacggtctctca

SEQ ID NO: 562921 - DNA, 246 bp, Homo sapiens
cggataccccttggattgctcaggtcttcaatgccatgtcttgttcacattagtagacttcaccagcgggtgcgatcttgtgtaagtttgtgccggggcattgtggggaagaggtggtgctcaatctggaagttaaggtgtccactgaaccattcgttcaagaaggactgctccatgttgcacgttgctatcagctggctactgaaccagtcacggtaggcctcctggagacctgagcaagccagg

SEQ ID NO: 562922 - DNA, 546 bp, Homo sapiens
cccatagacatcaggctggagtcttctctgtgttgagaataataaaagctcattatttattttttaaaaaaaaaaaaaaaaaaaaaaaaaaaaaaaaaaaaaaaggggggggggcccaaaattttccccgggggggcccaagtttcgggtccccggtttttttgtacagaggggggcgcctaatgagagagtcgtatatttataagaggctgaaggacagcgggcgcgtggtttaaaaaaacagtgtcggtaagtgggaaaaaggagaaactgggggatattctggggaggagaggacatctataatttgctggggggagaacatcaagagggacaaattaacctctaagaggatattttaagaaggcctctatcgaggggtaagatataataaactatttttaaggggtggttattagggggtgttaaaacataagcgcggcatttatgagtggcaggattggaaaaagtttgggggctataggggagaattatgtatttttggtaaaaattattttatacacagaggaacatgagtaaaaaacc

SEQ ID NO: 562923 - DNA, 108 bp, Homo sapiens
ccttttagtgatttttccccaaaaccgagggatggatttacctttgcaattgggaaatttttctaactgaatcaattgttccatgaaaaataaatctttatcccccca

SEQ ID NO: 562924 - DNA, 516 bp, Homo sapiens
tgttgcgataactgacagtatctctgcaagtcctgtcaactttacatgctactgtctttaccattttatgctctcttgcattttttccgctttgtcttattcttctatagataatgctatataactcattatctttttatctcttctgttattattgttttaaaggaaagcatcctatgttcataggaaccaaaaaataatgatcggcagaagggggggaatagccacaggggacaaacctttaggcattatcagtgaccttatttctgcttttctgagctaataatggtgctgtatggttaagtccgagacttttgccacacactatatttgtgaaaattatacgagatgtggaatgagaacctcagtgatttctattccctagtgaggcctctgagggcctccacactgcctggcataacattccactgaactagtatgtgctagaggagggcacgaacatccgctccttccctaggcctgttggctctggttttctgtgcagatgattcattg

SEQ ID NO: 562925 - DNA, 902 bp, Homo sapiens
agaactcctaggctcaagcgatcttcctgcctccacctctggagtagctaggactataggtgcatgccattgtgcctggataattttttttttttacgtagaggaagagtcttgcgatgttgtcaaggcgggtcttgaactccgggcctcaagccatcctctggcctgggtctcacaaaaggctaggattataggtatgaaccacaggtgccgtggccaattcatagggtttaatgatcaagttacattaaatatcacctcgtatgggtatggatccttttagactagttcgtgtgtgaaacacttttggaactccgtgacaaagcacacataggggacgtacctctcttaaatttttatgccataagacattttcaacaaaagctccgggccataaccgttcttgtcttatacccattcacattgttctcccagacactaaaagaattcagtgagtgccaacgtggggaaatccgtggtttcaattatcaactcagtgtgggcacagtgactaagtgataaccagacggtctctaacaagtacgggcatgcagatttgcgccatctggtcatctactgcaggcaaagcggggtaaggccgtcacttttcaccacgaatacgggcagcaatggaggggctctcggaaaaacgagttaacggataccactccaatgtgcagcaatcgggccaaatggggcgccaaacaacaaagtaatataatacgacaagctccgacagagtacactactaccagcgggacgtccctgggaccaagtgagcggcacaaggacgccacataagagaagactatcatagactccaccaggccaacatggagggacaggggcaccacaggacggaaactggcaaccacgaagcgatacaggagaggcgcacagca

SEQ ID NO: 562926 - DNA, 577 bp, Homo sapiens
tccactagagtaggcataggtttggtcagaagctttcctacttaggtaggcagaagaaaccccatggctcccagacaagccacatcaagcagtatgagagagccactggatgccaggaagggctggatggcatgccacctccctcagtgacagaaacaagagacagtaaaactcatgctgaataagagttccagacagtccaaaaagataaagccgcagagttagaaccacagtggctgcctcttccactcttccaatatgtgaccgagggcagggaggggcacatgagtgctcagcatggaaaagacagtgactccctctgatctcttgtgactacctaggcaacacaaacaggtagtatcacttgtcagcgggtactctctggagcaggacggatgactatgcatttagtagcatggcccaaataggcacattgaagttaggtgtgtatattttcccttacatggactgagatgaaactaatacagagacatgattgaaagccacagtacttaccatttcatcaaacacgtctaagcagaagctataggcgtgttctctagtagccagctgccat

SEQ ID NO: 562927 - DNA, 957 bp, Homo sapiens
cttcccagcaagcccaccagattgctcgcctggcagaaggtagacaggcgtctctgagtgagggacaggactgatcttcccctgtgatgctgactccccagaaccacaccttgcccggcacctgccctgtgtgaaaggcaccatgctgggcacacaactgaatctcaacccaacagctcaccctggagtcagcctatctgggtccaaaacctggctggacaactcagtagctaggagagcccaggcatgttacctagcctatctgagcctcactctcttctctgtgaagtggcaatataagagggactacttcccagaagccacatgaagatctcagtgacagtggaaattggcatgtgcaaagtactccctacacgtcaggtgctgctgttattatccatctctaatacatattttccccattttgcaaatgaagaaactgaggttctaagaggtgagagggcccggcctgcacaactaggaaaaaaaagacagaagaaattaccctgcggctctttgggatgtcttcctacagaaatgcatcccctcccctgatgcacctcttcctttcatttatcatttcaacagtccatcatgctgagcctggaggcccaccttggagcccagtgtgggaagaaggggaaatactggggtctggaagccaggtaagacaggggttccaataccagttccccctactacaaactctccaggtccatattacctgggaaagttggtacttttgcccccctgtcttgacagatgataacaactggaggctcagctaatgacttgtgccccagtcccaggtgaggccgaaaaatctgtctccaggcagaacgggagtccgtcatgcaaagcggaaaagaagcagaaaccccaactggaagtatccgaagggagaggattggaacaacacacttctatattacatgatcaagaagtccagaagaattg

SEQ ID NO: 562928 - DNA, 497 bp, Homo sapiens
tcataaggatccttgctcccacttggttgcgtggggagggatgggacggacctttagtaccgattgatttttaaactaccatatttattggatctcagatagccggagatagtgtgcgtgtacttctattttatatacatctgagaaagaaaaaaatgtcgcagtaaactcacatgtcgctttgattagacgactggttcccaagtttagatcattaaacatatgaaaagtccttctacagacagccaggaaatactgtaggtgcataaattcactttgattaaaatcaaacactttaaattgtattcctcttttcatatcatgcattctcattttctcctctaaaatccatcttcttgtgtgtacacatttgtcctaacgcctgctctcaatcactttctagtcatgctgcgaatgcataaatagagagcctattcccattaacatggatacccacaggcagtgagaacccaaggtagttgaattgaaggggcagc

SEQ ID NO: 562929 - DNA, 247 bp, Homo sapiens
ggtgaacatgggatcccccgttgctggttacacacacagcctgatttggcaggctcggggtggaacatgagatgcccccgttgctggttacacacagagcctgatttggtagggtcggggtggagctgggatgcccccgttgctggttacacacacagcctgatttggtagggtcggggtggcgctgggatgcccccgattgctggttacacacacgagccatgatttggtagcggtcgggggtggc

SEQ ID NO: 562930 - DNA, 321 bp, Homo sapiens
ctgcacctacagaccatgctcatcactcacaatgtcctatctaggcccataccctacgaaacggcaggctccgcagatgaggctactgcatcacaacagcctccacaggcacagctccatcgttacaatggcctctatagacccagctactgcctcccagccttctctgcaggtcctgaactttctcaaggcgacctcaccaggcccagctcatgcttctgtgcagcctctccaggcccagctcctgcatggtggcggcccctcgaggcccagcctgtgcctgccgtcagcctctacaggcccaacgtctgcctcacagca

SEQ ID NO: 562931 - DNA, 1618 bp, Homo sapiens
gtgcctagccatcattccattcctcctccttcgcctctcataaaaagaaaatattgtgtacctgcaaacatatgctctgctatcagcattcagacacccaaacaccgaaatcatttagcagctcttactgctgtcagtaagcagatgatggcgtaaggggtttagaatttgatatgtgttttctaaagcatctctcaaaataggcattgtctatttcttgtttgttgcttgtgggaaatttttcgtcaagtgtacctgtacctaacccatgactaaaacttacctagatcttaatttctagatttaaaaagaagaaaaaagggatcaagtaaggaacagcgaagtaaagaatatctaagattaaaagtaggaatagctacaattacctagatttcaatttctgggttatttttagtgtgacaaagtaaagagtgtccaaaattacaaatctgagggataattcaaagatccttttttgttgtcattgttcctgggggaatatgtttcctgggggaaggagcatatctgactggtcccagggaagaaatgaagtagaactggtattgaagagatatctttctatgggaatccagcaaaaatactgggttccaagaacttgcttgcctggggaactcccagattctttaaaaaccttacatgtgaaatagcttaacataaatatataggtttagacatactgattgatgtttcagtgcctatttttatatgcatttatatcgctcaggtcatctattttccacttgttctattaagtcatggttttgcaaatggtcaccatttaaatataaggaagggacctattttgcttctttcatattcttcgacatttcctcaatgaaagaataaggaaagtttaggagtgagttacttagggtgtattctactctgaggatttcagttttactatagctgtatttaatcttatattaattgggcacttatattaatttagtgcctgtataatgttggcactgaaatggttctttagtgtgttgtgagaaaatttcaatgaagtcatttatagaaaactgtttttctcaagggaatttccctttccccttttcagaagtcagaggaaaaactggaattagagtatagagttagagataaagcgaaacgatggcagaatatgctgagacatttgctcaggggttaaaagacagggagtttatagaactcccttttctgcttgtcataaggttatctgttccttcttttggacatctctctagaggtgttcccaagctttgtatcacagattcttttatcgtgggggtcctaaactttaaccatttaaaaataaaaaccaagggttaccaaacaccttaatagagacttctctatgaagttacaagaagtaaacaaccatatggaagaatttgatgtgttctttgaagtcactgcttgtaagagaagacaacgtgtaatttttgagttactgtatgactcacgttggaaatgtttaaagccttctgtaggcatggtgtggtggctcacacctgtaataccagcactttgggaggccgaggcgggaggatcacttgcacttaggagtttgagaccagcctgggcaacataatgagactttgtctctaca

SEQ ID NO: 562932 - DNA, 493 bp, Homo sapiens
atgcttatccctctacgacatctcccctgctgtggtactgcccttgtcttcacagctcctcctccctcctctgcctgggtccgcccctgcaggaggaacttcctccgtgtccgaccgttccgccagctccccctgaccgccctgctgctctgttgctccttctggtgcagttttcctgccatggcctttctcttgggccagcctggggctcctccacctgtgctgtcggcctcactccggctgctcactggagtcctctgggcagccccattgccctcctggcttccgggccccttcttgtcgtgccagcctcttggatcattccttgagtgaccggctgagtgcctgcccatctgctgggggtgctgccgaggtgcatggaggtgtcctgggggcacggagaacaggcctgacgagaggaaggaggaacgtggcgtgccctggcatggaaaggccaggtgctggccagggtgtggcctgagcgtctgtgacg

SEQ ID NO: 562933 - DNA, 157 bp, Homo sapiens
acccgctcatctcatctaaaatcgcaatgcatcatttacaatatcgtaaatacaatacaaagaaagaactctgcatatttatggaaacattgttgatggtacagttctactgaaactcatacacatttcaccatttaatttacatatcgtcttgttg

SEQ ID NO: 562934 - DNA, 163 bp, Homo sapiens
  misc_feature (114)..(114): n is a, c, g, or t
ctactaaaaataaaagtcaggtgtgggggcaccccccttttgtcccaactaaccaggggggttaagccaaaatttctttaaacttgggaggtggagtttgcagcgagccggganatgccactgcactccagcttgggtgatacagcgagactccatctcaaaa

SEQ ID NO: 562935 - DNA, 384 bp, Homo sapiens
tagaggatcccctggccaggctctcgacctgggtcttcatccccctctatgggctggtatcccacgggggggtgattggctgggcacaggcttagcctcatggaacttccaacttgcaagggtttaatctggatccaaacccatataggagtctggatctcagaaacacagtatacggataattgccaggctggccgggggcaggaaacttcagctctacctcctcggtatcttgcagcgtacacacatgatatgggcagggatatgagggtcggctccttcctatcggcaaggtaaagccaccaccattctggttttccctcaggaaggtaagggctatacacgggaggtgtcatgtgggatgggtacccaatagagctctct

SEQ ID NO: 562936 - DNA, 1725 bp, Homo sapiens
  misc_feature (13)..(13): n is a, c, g, or t
ggagaaggggaantggggcgcttgaggggattataatttctttaaaaagaggggaggggagaggccatggccgtcccagccaagaaaaggaagatgaacttctcagagcgggaggtggagatcatcgtggaggagctggagctgaagaagcacctgctggtgaaccacttcaacgccggggtacccctggccgccaagagtgcggcctggcacggcatcctgagaagggtcaacgccgtggccacctgccgcagagagctgcctgaggtcaagaagaagtggtctgacctcaagaccgaggtccgtcgcaaggttgcccaggtccgggccgccgtggagggtggtgaggcgccggggcccactgaggaggacggagctggggggcctgggacaggcggtggcagtggcggcggtggcccagctgtagccccagtgctgctgacccccatgcaacaacgtatctgcaacctgctgggcgaggcaccatcatcagcctgcccagcaccacagagatccaccctgtggccctcggaccctcggccaccgcagccgcagccacggtcaccctgacacagatccccacagagaccacctatcacacgctggaggagggcgtggtggagtactgcacggctgaggcgcccccacctctgccaccagagacccctgtggacatgatggcccagcatgcagacacgtcggtcaagccgcaagcgctcaagagccgcattgctctcaactccgccaagctgatacaggagcagcgggtcaccaacctgcatgtgaaggagatcgcacagcacctggaacagcagaacgacctactgcagatgatccgccgctcccaggaagtgcaggcctgtgcccaggagcgccaggcccaggccatggagggcacacaggctgccctgagcgtcctcatccaggtcctccggcctatgatcaaagatttccgccgctacctgcagagcaacacagctaacccggcccccgcctctgaccctgggcaggtggcccagaatgggcagccagacagcatcatccagtgagggcaggggtcaggccagccttctgccatgatgggatgaaaactccatggacttactcaccatcaattaccaaggcccttgcatctccccagatcgtttcccaagtttggcgatttgctgtcggtgcctcagccacatatgaccaatggttacaactcagggctccagacctcagctaaaaagagaagacgctgccctcctgggcacgaacgtttagaatgctcaactcctctattgtgaccacaggaaggtggccctgaagatgcaccgaagacagctgggaggtgactgctgtactgtcagcctctctgtggaggcattcgtgcagtgccagctaaaagggaggtgaagggggatatcggacccagcgagggagttgctggtagaaggaaagctcttctcagtgtggctggattaagagcagcctagcagcttgggcacctccactctgtgcggtctgatggccccagcaaggtcgctgcagggacttcctgaggacttggtttggtttttttctggggttggaaatctgagccaatattgtgtctgttccatttgggtatgaagaggaagtctggatcacttaaactgactagttatttccgggtcataattttaaattaaagacatatcacttttttatacacaaaaaaaacaagaaaaacccgagtttcta

SEQ ID NO: 562937 - DNA, 955 bp, Homo sapiens
  misc_feature (17)..(17): n is a, c, g, or t
  misc_feature (420)..(420): n is a, c, g, or t
agcggcttttttttttncgccatcttttgtctttccgtggagctgtcgccatgaaggtcgagctgtgcagttttagcgggtacaagatctaccccggacacgggaggcgctacgccaggaccgacgggaaggttttccagtttcttaatgcgaaatgcgagtcggctttcctttccaagaggaatcctcggcagataaactggactgtcctctacagaaggaagcacaaaaagggacagtcggaagaattcaaaagaaaagaacccgccgagcagtcaaattccagagggccattactggtgcatctcttgctgatataatggccaagaggaatcagaaacctgaagttagaaaggctcaacgagaacaagctatcagggctgctaaggaagcaaaaaaggctaagcaagcatctaaaangactgcaatggctgctgctaaggcacctacaaaggcagcacctaagcaaaagattgtgaagcctgtgaaagtttcagctccccgagttggtggaaaacgctaaactggcagattagatttttaattaaggatggcgttattcagaaacacagacgagaagaaaaaacacttgtgtggggcggtggagtctggaaacttaaaaacacattatgggactgggcccaatgtacggccaccgggccacgcgtgtccacagagaaacggggccaagaacaaggggcggaacacacgaaaaaacacagccgcgggggccggagggcctgaccaccccagtgggatcggggccaaggcggcataacacgggtcaggacattatcagcccagcgacgacaacaggaaaccgaagcgacgacaagaaagacgctagcaacccaacaagaaacaatagcgcaaacgaggccgagagagtaatcaataactacatacgaccaagagaaacaacgaacagacacaaagcagagaggaacacgagaca

SEQ ID NO: 562938 - DNA, 700 bp, Homo sapiens
  misc_feature (13)..(13): n is a, c, g, or t
ggagaaggggaantggggcgcttgaggggattataatttctttaaaaagaggggaggggagaggccatggccgtcccagccaagaaaaggaagatgaacttctcagagcgggaggtggagatcatcgtggaggagctggagctgaagaagcacctgctggtgaaccacttcaacgccggggtacccctggccgccaagagtgcggcctggcacggcatcctgagaagggtcaacgccgtggccacctgccgcagagagctgcctgaggtcaagaagaagtggtctgacctcaagaccgaggtccgtcgcaaggttgcccaggtccgggccgccgtggagggtggtgaggcgccggggcccactgaggaggacggagctggggggcctgggacaggcggtggcagtggcggcggtggcccagctgtagccccagtgctgctgacccccatgcaacaacgtatctgcaacctgctgggcgaggcaccatcatcagcctgcccagcaccacagagatccaccctgtggccctcggaccctcggccaccgcagccgcagccacggtcaccctgacacagagtgagtgacctctcctgcccaggcggcgtgcataagtgggaagggccagcaagctctggggtggcctgggaaggttggctgccaagggtcagaggtcagatgggggtcttggaagaccatgagg

SEQ ID NO: 562939 - DNA, 1202 bp, Homo sapiens
  misc_feature (9)..(9): n is a, c, g, or t
  misc_feature (139)..(139): n is a, c, g, or t
  misc_feature (457)..(457): n is a, c, g, or t
  misc_feature (471)..(471): n is a, c, g, or t
  misc_feature (475)..(475): n is a, c, g, or t
  misc_feature (529)..(529): n is a, c, g, or t
  misc_feature (648)..(648): n is a, c, g, or t
ttaggaacngggaaaaataaaggttggcctttttgtttgtttgtttgtttgtttttttcccccttcaacacaggcctcactctgtagcccagctggagtgcagtggcacaatcacggcttgctgcagcctcaacctccngggctcaagtgatcctcctgactcaggcccctaagtagctgggactacaggcaagcactaccaaacccagctaataggtattttagttgagatggtttcgccatgttgcccaggctggcctcaaactcctgagctcaagcgatccacctgctttagcaccccgaagtgttgggatgagcccctgcaccatgcctggttttgaaagttactatggttatctacattgataacattgagaaaagctgagtaaacactgtactgttactgagatcttttctgtgagtttctgttaggatgcatttcaggatcctacactgnacttggttgtgtcncatntcatccagtctgtgagggtatcttagtctttgtctttcattgtaaagatgggcnttaaatatttaagggtagtcacattaaaagattggcattaggaatgcagttaaattactaagaaagtgatctaagctacataaacaatctggatgtgagagatgggtaataatagggtnacaaaagttttgtggagtaatattgtgttatctttttacaggcacctacaaaggcagcacctaagcaaaagattgtgaagcctgtgaaagtttcagctccccgagttggtggaaaacgctaaactggcagattagatttttaattaaggatggcgttattcagaaacacagacgagaagaaaaaacacttgtgtggggcggtggagtctggaaacttaaaaacacattatgggactgggcccaatgtacggccaccgggccacgcgtgtccacagagaaacggggccaagaacaaggggcggaacacacgaaaaaacacagccgcgggggccggagggcctgaccaccccagtgggatcggggccaaggcggcataacacgggtcaggacattatcagcccagcgacgacaacaggaaaccgaagcgacgacaagaaagacgctagcaacccaacaagaaacaatagcgcaaacgaggccgagagagtaatcaataactacatacgaccaagagaaacaacgaacagacacaaagcagagaggaacacgagaca

SEQ ID NO: 562940 - DNA, 339 bp, Homo sapiens
ttttattttaattaaaaacttaatttttagaccaagtagaatgggaaagggggggctgataaatttaagattcaaaaaagtcccgtcgaaacttaaaggccagattattgctttggggctttttaaagggacaagccatcccgtggttaaaggttttcagggaaatttgaaaaaaagcccagggccctttaaaaacggtttttttttcgagtttttgcctcgggctttgacctggatggcattattattgtttatgggaagtaaaaaaaaaaaaggaaagcccaagcttttcctggaaattaaatttccatttcccttttaaaaaaaaaacaattttcc

SEQ ID NO: 562941 - DNA, 2844 bp, Homo sapiens
ggcacgaggccccacaggacttttcacagggcccggcttgtagtagacagccaggccatatttgttgaaaaaattgatgggaataatactgcccaagtgagacaacgattctggattctgttttcagtgtgggggatctttcatcagtccccacagagaccacctatcacacgctggaggagggcgtggtggagtactgcacggctgaggcgcccccacctctgccaccagagacccctgtggacatgatggcccagcatgcagacacgtcggtcaagccgcaagcgctcaagagccgcattgctctcaactccgccaagctgatacaggagcagcgggtcaccaacctgcatgtgaaggagatcgcacagcacctggaacagcagaacgacctactgcagatgatccgccgctcccaggaagtgcaggcctgtgcccaggagcgccaggcccaggccatggagggcacacaggctgccctgagcgtcctcatccaggtcctccggcctatgatcaaagatttccgccgctacctgcagagcaacacagctaacccggcccccgcctctgaccctgggcaggtggcccagaatgggcagccagacagcatcatccagtgagggcaggggtcaggccagccttctgccatgatgggatgaaaactccatggacttgtaagtgggtcctgtgattggccttggccttagaccggccacgtgcacagctccctctttaataaacgcttaggggttgcactgtttttgagaagaggaatttgttgggctcctgggacccaaactcatactccccctacttgagctgccttgctaagatccagaagattggttagcagggggtcacgtgtgcatgtgatgggacatgtgttgtcatgaccccgggcttgtgacatgacccagccttggtcttggacaactgtaaggaacaacacaacgggctgtcactgggggccgtcacccagcctgggtctctactgagctgcccaaccccaggtgccatcctttcgagtagggtaatgtcactgatgctggcagttgagcaataatatcttcctcctttgggaggtagtgtgactgaggaggaaaccccaccctttttctcctcactgtgcctcagttctcaggggactccaatgactgttgtgttctcccccgaccccaccccaggcacagcgcaggcccttgttaggtagtgtgctgggacgcctccgtaatacatgcagtgtgcagccagtctggctcaggaatgctgtgtatggtggggacggtttggccactctctggttttcaacagcatctctgggcagccctttggtggtttgtccctagagcttttgactcaggtcaagctttggatgctgtaaatttttgagaaagccaactagtgtggaagcttgctgccccactgcagtgggtctgagtgacctgttggctttgtgcggaggcttgcatccagccagttgtatttattctgtgtgtgaacccctcctaggaaggcctccaggaaggctgccctgtggccacacccatcctcctttcctctctgctgactccacatttccaaaattcagtgcaaaaaaagccctgctgagcatcacatgctggactcttcccctgccacaccgctcagtgccttctgttctcttgagactccctctgagtagctgagtgaatccaaagccataattgaccctgaacgtaggaggaggaaaaggcaaagctgacctaagaagtgggaccctggccgggcgaggtggctcaagtctgtaatcccagcgctttgggaggccgaggcgggtggatcacgaggtcaagagatcaagaccatcctggccaacatgatgaaaccccgtctctactaaaaacacaaaaattagctgggcgtggtggcacacgcctgtagtcccagctacccgggaggctgaggcaggagaatcgcttgaacccaggaggcggagattgcagtgagccgagattgcaccgctgcactccagcctggcgacagagcgagactctgtctcaaaaaaaaaacaaagaaaaaaccaaaaaaacaaatgggaccctttggattctatgctcagggaagagcaggcagagccttggagtgctgaaggaggtgctgttccctgttccatctttacactttctcttctgagatgtctgtaaggattttacccagatgccatttgtctgtttcattttcagactcaccatcaattaccaaggcccttgcatctccccagatcgtttcccaagtttggcgatttgctgtcggtgcctcagccacatatgaccaatggttacaactcagggctccagacctcagctaaaaagagaagacgctgccctcctgggcacgaacgtttagaatgctcaactcctctattgtgaccacaggaaggtggccctgaagatgcaccgaagacagctgggaggtgactgctgtactgtcagcctctctgtggaggcattcgtgcagtgccagctaaaagggaggtgaagggggatatcggacccagcgagggagttgctggtagaaggaaagctcttctcagtgtggctggattaagagcagcctagcagcttgggcacctccactctgtgcggtctgatggccccagcaaggtcgctgcagggacttcctgaggacttggtttggtttttttctggggttggaaatctgagccaatattgtgtctgttccatttgggtatgaagaggaagtctggatcacttaaactgactagttatttccgggtcataattttaaattaaagacatatcacttttttatacacaaaaaaaacaagaaaaacccgagtttcta

SEQ ID NO: 562942 - DNA, 422 bp, Homo sapiens
acagcatttagcagcagcatcacataatcagggtgctggtgataactatgggcataaatcctgaacagacgcttaagaatagtctgagccacagacataaagtcgtcgggaaatgggacaccacctcttagataggaaaaagagtttcatcatcaagctgatctagaacccaagtcatcaaatagtcaatgtattttggtgcagaacatatgattggctttgtaatattagtaccatctgcccagggatattcatatctcggacctgcagacatgactggacagcttgcttcagtgcagaattctgtaaatagtaccatataagcatgttgatctggttaaagaaagtccacagtgttcacagcaatccattcattgagatcctctccctcaggcaacataacagcttgtctcagattccca

SEQ ID NO: 562943 - DNA, 445 bp, Homo sapiens
  misc_feature (326)..(326): n is a, c, g, or t
  misc_feature (397)..(397): n is a, c, g, or t
tgttggttttactcaaggccacactggtagcatggctggtaacatctgtgtgaaggaactggattatttaagtgtgaaattcatcccaaaaatccatcccaaaagacagtcctggccaatccttaatagtcacccacctcaagtcagaatttcatttcctgttggtaaataatgtcatcgcatttaagaacagccttgatgcctaaaggaatgcatttcccattgattatctcctcaacactttcagcaagttccttccagcagcagagaacttcagcaacactgctggcttccttctttcaacttgcataatctgattgctcaangcactgatgaaaaatatgaagaagaagtaagtaggcttcgctcaaaggactattttaaaagtcaacaagantgatcttgggggctattgttcggaattgacatgattttagtgctgcag

SEQ ID NO: 562944 - DNA, 3273 bp, Homo sapiens
  misc_feature (13)..(13): n is a, c, g, or t
ggagaaggggaantggggcgcttgaggggattataatttctttaaaaagaggggaggggagaggccatggccgtcccagccaagaaaaggaagatgaacttctcagagcgggaggtggagatcatcgtggaggagctggagctgaagaagcacctgctggtgaaccacttcaacgccggggtacccctggccgccaagagtgcggcctggcacggcatcctgagaagggtcaacgccgtggccacctgccgcagagagctgcctgaggtcaagaagaagtggtctgacctcaagaccgaggtccgtcgcaaggttgcccaggtccgggccgccgtggagggtggtgaggcgccggggcccactgaggaggacggagctggggggcctgggacaggcggtggcagtggcggcggtggcccagctgtagccccagtgctgctgacccccatgcaacaacgtatctgcaacctgctgggcgaggcaccatcatcagcctgcccagcaccacagagatccaccctgtggccctcggaccctcggccaccgcagccgcagccacggtcaccctgacacagatccccacagagaccacctatcacacgctggaggagggcgtggtggagtactgcacggctgaggcgcccccacctctgccaccagagacccctgtggacatgatggcccagcatgcagacacgtcggtcaagccgcaagcgctcaagagccgcattgctctcaactccgccaagctgatacaggagcagcgggtcaccaacctgcatgtgaaggagatcgcacagcacctggaacagcagaacgacctactgcagatgatccgccgctcccaggaagtgcaggcctgtgcccaggagcgccaggcccaggccatggagggcacacaggctgccctgagcgtcctcatccaggtcctccggcctatgatcaaagatttccgccgctacctgcagagcaacacagctaacccggcccccgcctctgaccctgggcaggtggcccagaatgggcagccagacagcatcatccagtgagggcaggggtcaggccagccttctgccatgatgggatgaaaactccatggacttgtaagtgggtcctgtgattggccttggccttagaccggccacgtgcacagctccctctttaataaacgcttaggggttgcactgtttttgagaagaggaatttgttgggctcctgggacccaaactcatactccccctacttgagctgccttgctaagatccagaagattggttagcagggggtcacgtgtgcatgtgatgggacatgtgttgtcatgaccccgggcttgtgacatgacccagccttggtcttggacaactgtaaggaacaacacaacgggctgtcactgggggccgtcacccagcctgggtctctactgagctgcccaaccccaggtgccatcctttcgagtagggtaatgtcactgatgctggcagttgagcaataatatcttcctcctttgggaggtagtgtgactgaggaggaaaccccaccctttttctcctcactgtgcctcagttctcaggggactccaatgactgttgtgttctcccccgaccccaccccaggcacagcgcaggcccttgttaggtagtgtgctgggacgcctccgtaatacatgcagtgtgcagccagtctggctcaggaatgctgtgtatggtggggacggtttggccactctctggttttcaacagcatctctgggcagccctttggtggtttgtccctagagcttttgactcaggtcaagctttggatgctgtaaatttttgagaaagccaactagtgtggaagcttgctgccccactgcagtgggtctgagtgacctgttggctttgtgcggaggcttgcatccagccagttgtatttattctgtgtgtgaacccctcctaggaaggcctccaggaaggctgccctgtggccacacccatcctcctttcctctctgctgactccacatttccaaaattcagtgcaaaaaaagccctgctgagcatcacatgctggactcttcccctgccacaccgctcagtgccttctgttctcttgagactccctctgagtagctgagtgaatccaaagccataattgaccctgaacgtaggaggaggaaaaggcaaagctgacctaagaagtgggaccctggccgggcgaggtggctcaagtctgtaatcccagcgctttgggaggccgaggcgggtggatcacgaggtcaagagatcaagaccatcctggccaacatgatgaaaccccgtctctactaaaaacacaaaaattagctgggcgtggtggcacacgcctgtagtcccagctacccgggaggctgaggcaggagaatcgcttgaacccaggaggcggagattgcagtgagccgagattgcaccgctgcactccagcctggcgacagagcgagactctgtctcaaaaaaaaaacaaagaaaaaaccaaaaaaacaaatgggaccctttggattctatgctcagggaagagcaggcagagccttggagtgctgaaggaggtgctgttccctgttccatctttacactttctcttctgagatgtctgtaaggattttacccagatgccatttgtctgtttcattttcagactcaccatcaattaccaaggcccttgcatctccccagatcgtttcccaagtttggcgatttgctgtcggtgcctcagccacatatgaccaatggttacaactcagggctccagacctcagctaaaaagagaagacgctgccctcctgggcacgaacgtttagaatgctcaactcctctattgtgaccacaggaaggtggccctgaagatgcaccgaagacagctgggaggtgactgctgtactgtcagcctctctgtggaggcattcgtgcagtgccagctaaaagggaggtgaagggggatatcggacccagcgagggagttgctggtagaaggaaagctcttctcagtgtggctggattaagagcagcctagcagcttgggcacctccactctgtgcggtctgatggccccagcaaggtcgctgcagggacttcctgaggacttggtttggtttttttctggggttggaaatctgagccaatattgtgtctgttccatttgggtatgaagaggaagtctggatcacttaaactgactagttatttccgggtcataattttaaattaaagacatatcacttttttatacacaaaaaaaacaagaaaaacccgagtttcta

SEQ ID NO: 562945 - DNA, 2783 bp, Homo sapiens
ccggcaagctggcggaaggggcggcttccgggatgccccgcccctccgcgccccgcttcgccggccacgcccgggcgcacctgaagtccccacagagaccacctatcacacgctggaggagggcgtggtggagtactgcacggctgaggcgcccccacctctgccaccagagacccctgtggacatgatggcccagcatgcagacacgtcggtcaagccgcaagcgctcaagagccgcattgctctcaactccgccaagctgatacaggagcagcgggtcaccaacctgcatgtgaaggagatcgcacagcacctggaacagcagaacgacctactgcagatgatccgccgctcccaggaagtgcaggcctgtgcccaggagcgccaggcccaggccatggagggcacacaggctgccctgagcgtcctcatccaggtcctccggcctatgatcaaagatttccgccgctacctgcagagcaacacagctaacccggcccccgcctctgaccctgggcaggtggcccagaatgggcagccagacagcatcatccagtgagggcaggggtcaggccagccttctgccatgatgggatgaaaactccatggacttgtaagtgggtcctgtgattggccttggccttagaccggccacgtgcacagctccctctttaataaacgcttaggggttgcactgtttttgagaagaggaatttgttgggctcctgggacccaaactcatactccccctacttgagctgccttgctaagatccagaagattggttagcagggggtcacgtgtgcatgtgatgggacatgtgttgtcatgaccccgggcttgtgacatgacccagccttggtcttggacaactgtaaggaacaacacaacgggctgtcactgggggccgtcacccagcctgggtctctactgagctgcccaaccccaggtgccatcctttcgagtagggtaatgtcactgatgctggcagttgagcaataatatcttcctcctttgggaggtagtgtgactgaggaggaaaccccaccctttttctcctcactgtgcctcagttctcaggggactccaatgactgttgtgttctcccccgaccccaccccaggcacagcgcaggcccttgttaggtagtgtgctgggacgcctccgtaatacatgcagtgtgcagccagtctggctcaggaatgctgtgtatggtggggacggtttggccactctctggttttcaacagcatctctgggcagccctttggtggtttgtccctagagcttttgactcaggtcaagctttggatgctgtaaatttttgagaaagccaactagtgtggaagcttgctgccccactgcagtgggtctgagtgacctgttggctttgtgcggaggcttgcatccagccagttgtatttattctgtgtgtgaacccctcctaggaaggcctccaggaaggctgccctgtggccacacccatcctcctttcctctctgctgactccacatttccaaaattcagtgcaaaaaaagccctgctgagcatcacatgctggactcttcccctgccacaccgctcagtgccttctgttctcttgagactccctctgagtagctgagtgaatccaaagccataattgaccctgaacgtaggaggaggaaaaggcaaagctgacctaagaagtgggaccctggccgggcgaggtggctcaagtctgtaatcccagcgctttgggaggccgaggcgggtggatcacgaggtcaagagatcaagaccatcctggccaacatgatgaaaccccgtctctactaaaaacacaaaaattagctgggcgtggtggcacacgcctgtagtcccagctacccgggaggctgaggcaggagaatcgcttgaacccaggaggcggagattgcagtgagccgagattgcaccgctgcactccagcctggcgacagagcgagactctgtctcaaaaaaaaaacaaagaaaaaaccaaaaaaacaaatgggaccctttggattctatgctcagggaagagcaggcagagccttggagtgctgaaggaggtgctgttccctgttccatctttacactttctcttctgagatgtctgtaaggattttacccagatgccatttgtctgtttcattttcagactcaccatcaattaccaaggcccttgcatctccccagatcgtttcccaagtttggcgatttgctgtcggtgcctcagccacatatgaccaatggttacaactcagggctccagacctcagctaaaaagagaagacgctgccctcctgggcacgaacgtttagaatgctcaactcctctattgtgaccacaggaaggtggccctgaagatgcaccgaagacagctgggaggtgactgctgtactgtcagcctctctgtggaggcattcgtgcagtgccagctaaaagggaggtgaagggggatatcggacccagcgagggagttgctggtagaaggaaagctcttctcagtgtggctggattaagagcagcctagcagcttgggcacctccactctgtgcggtctgatggccccagcaaggtcgctgcagggacttcctgaggacttggtttggtttttttctggggttggaaatctgagccaatattgtgtctgttccatttgggtatgaagaggaagtctggatcacttaaactgactagttatttccgggtcataattttaaattaaagacatatcacttttttatacacaaaaaaaacaagaaaaacccgagtttcta

SEQ ID NO: 562946 - DNA, 541 bp, Homo sapiens
ggcagcttgcttacccgatgtagcacttggcagctctcagaggcagccttggtggtttcactgcttcatagttcagtgcccccagggtgagtgcagcatcagggatggacctgcccacgtgaaaccagagaggctggtctttggcagtggctgtgaattgttgccaccagccgtgtgtagacaaaagtcaagttggagtaagtggggagaggtctgtataatgcaatgcaagtttttatgacttgaattagttaaatctgcagcccaaaatttcatgaaaataaatatttaaaacattttattaaaaattaaattgacaaagtcatattagaaattagtatttcaattttcccaactctaagtatactggaataaattgccttaaagtgaaagagtgagagtgtatttagtaagtcttggttaagcctttttggtttacattcagaaacaagaagagaatgactgatgtaaaatgtcatgacctgcaagttaggtcgtttccaattctgctttcttcaacattgagttgttggccaggtgc

SEQ ID NO: 562947 - DNA, 1680 bp, Homo sapiens
  misc_feature (13)..(13): n is a, c, g, or t
ggagaaggggaantggggcgcttgaggggattataatttctttaaaaagaggggaggggagaggccatggccgtcccagccaagaaaaggaagatgaacttctcagagcgggaggtggagatcatcgtggaggagctggagctgaagaagcacctgctggtgaaccacttcaacgccggggtacccctggccgccaagagtgcggcctggcacggcatcctgagaagggtcaacgccgtggccacctgccgcagagagctgcctgaggtcaagaagaagtggtctgacctcaagaccgaggtccgtcgcaaggttgcccaggtccgggccgccgtggagggtggtgaggcgccggggcccactgaggaggacggagctggggggcctgggacaggcggtggcagtggcggcggtggcccagctgtagccccagtgctgctgacccccatgcaacaacgtatctgcaacctgctgggcgaggcaccatcatcagcctgcccagcaccacagagatccaccctgtggccctcggaccctcggccaccgcagccgcagccacggtcaccctgacacagatccccacagagaccacctatcacacgctggaggagggcgtggtggagtactgcacggctgaggcgcccccacctctgccaccagagacccctgtggacatgatggcccagcatgcagacacgtcggtcaagccgcaagcgctcaagagccgcattgctctcaactccgccaagctgatacaggagcagcgggtcaccaacctgcatgtgaaggagatcgcacagcacctggaacagcagaacgacctactgcagatgatccgccgctcccaggaagtgcaggcctgtgcccaggagcgccaggcccaggccatggagggcacacaggctgccctgagcgtcctcatccaggtcctccggcctatgatcaaagatttccgccgctacctgcagagcaacacagctaacccggcccccgcctctgaccctgggcaggtggcccagaatgggcagccagacagcatcatccagtgagggcaggggtcaggccagccttctgccatgatgggatgaaaactccatggacttactcaccatcaattaccaaggcccttgcctcagccacatatgaccaatggttacaactcagggctccagacctcagctaaaaagagaagacgctgccctcctgggcacgaacgtttagaatgctcaactcctctattgtgaccacaggaaggtggccctgaagatgcaccgaagacagctgggaggtgactgctgtactgtcagcctctctgtggaggcattcgtgcagtgccagctaaaagggaggtgaagggggatatcggacccagcgagggagttgctggtagaaggaaagctcttctcagtgtggctggattaagagcagcctagcagcttgggcacctccactctgtgcggtctgatggccccagcaaggtcgctgcagggacttcctgaggacttggtttggtttttttctggggttggaaatctgagccaatattgtgtctgttccatttgggtatgaagaggaagtctggatcacttaaactgactagttatttccgggtcataattttaaattaaagacatatcacttttttatacacaaaaaaaacaagaaaaacccgagtttcta

SEQ ID NO: 562948 - DNA, 270 bp, Homo sapiens
ttctaaagtgtttagatagttattataaaacgctctacatgctgtgtatgactatgagacgaatacaggcaacctgagacaatccatggttaacacaccatacacctttttatctgatctttaccttccagtccttgcatcatacttcagtgtataaatttggtatttggaatggattacgttcctcacccgcccatggtctctgtgcttgcacaaccagccaccagtaggtgtgccttctcctcggtagccagatcattctctggcacg

SEQ ID NO: 562949 - DNA, 330 bp, Homo sapiens
ggataatgatagggatacgatctaccagaatggggatatacacccgtggtctgagatgtaaaccaaagaatatcatgaacagcgttacaggcctcctgaagtatatctctcacatgtcctgttctcatgctgaggagcctgagatccctgtgtggggattagacaggggactgttatgggtgtaggtgaataggcttatttggtctgtccctgtctgaagtgtattgcaggaattaagaaaggaccaagaagaggaagaagaccaaggcccaccatgccccaggtaactgagcaattgtgaacagctacttctgggcacacattatggag

SEQ ID NO: 562950 - DNA, 126 bp, Homo sapiens
gctagtcacctctacaataggctcctctagctctggctctaactctagaacaaaaaccaatgggatattttaaaactaaactccacctactttccctcaacctgggagacccgcccatattcctca

SEQ ID NO: 562951 - DNA, 122 bp, Homo sapiens
tctgcccatcgcgggaaccactggcaggcctctatctcgaaggaggcctcttcccgataggtgccacacagtccggcacaggcgcgtgggcagcgatccaaagccaacccggtgtagaaggg

SEQ ID NO: 562952 - DNA, 1103 bp, Homo sapiens
gctgccgttttgtcgcctctcttgtttgtcgtcgttctttttctctttgctctatgtctctctgtgctctcgcttcgtttgtcttacttccttttgtgtgcgtcgttcgccctctaggacttgtgtgtgctcagtttctgcgcttctctttgtggttgagtgtcaccacagggtcctattggggctcacacccgtgggtttgggtatcggttttggatttcgctccattcgggatctcccttgtctgggtacatctgcgctaccccttttgtgtgtcttgagtggttctcatttcgcacatcatgggttttctctgggctgaaccaccggtaggattcctttgtctgatcggagttaatgtattgcaacaccttgcttgaccacgctattgctcatctggaatggagcccctggaggtctctgcggattcctgatgatgctctgatgggatcggggagttattcgccgtcaagcacacagcgcaacagtcggaatctcatgatgacaaattgctacattggattgccggccctccacttctgtgtgccacctgccctcatctcacattcatctccatgtgcggcgattgcaagatgaatgcttcgtataactcagagagtgatgtgatgaagctatatgtaacgcacgacacttacatctaattgcaagcaatcagattatacattcggtgccaacggggaaaagagcttctaccggattgctccccaaaacctctcattcacacaccccagatgatgaatctacttgtcttgagaatattgctagtacacattaggaagcaagtaggggctggcatctgaagctctgcatttccttcagctgatacaaccttgtgcaggaggccactagcatatttggaatgatgatgatcagagagaagctcctatttctcagggttgagcaaagtggtatatgatcaggcctgagcatgacctcaattatttcaccgtaaccccaggccactatcatatccagaatggtcttcagagttgtctttatatttaatattaagttatactcaactgtttaatttatagtaaagacatgaattaaggcgcgctgtagagtatccctcgagggta

SEQ ID NO: 562953 - DNA, 696 bp, Homo sapiens
gaggggggcagggatggaggggcggcgcggtcgcgcagcggaggcccccgggtgcagaagggcgccgcagaccgcgggggtaaaaaacggcggcgtggggcagaacccacggtaggacgaggaccctaccctcccgcgacgcgaaaacgggggagaagtcgtctcccaggccacaggggaggggtgcctgaaagcgccacaagtggagccccgactaaggtgggtcccaccgcgaagacacacgatctccctctcaaggggggatacgccggccgcactactctctgttgtgggggtcccacaatgccacccacaatgggggtttatccgacctccaattgttgtagatacatagaatacatcccccatgggtggtcagacccgcctatagttaagagagtctgccttcgtgttgttcaacgcgcggttaaggtgtcccaacggtcggtcggcgggctctgaaacccggggaaatacccgcgtcggggtggtttaatggaccctgctcgaaattctcgccccccggcgtcgtagagcgagcctcacacgaggagattataaggcggccattgtgcctcaaggcggcgcgcgtcccgccccgggtaggtgagagacacaacgtcgtgcagcggggcaggggtaagaccggccgcccgcgcgcgcccaggagcacacggggtgtgccacaaagacgga

SEQ ID NO: 562954 - DNA, 404 bp, Homo sapiens
gcgagcccttttctacgtctcatcactggccccagagattgcaactccacgcactattagatatcatctcacaccagttagacgggcaatcatgaaagagtcaggaaacagagcaggtgctggagaggatgtggagaaataggaacacttttacactgtatggtgggactgtaaactagatacaaccattgtggaagtcagtgtggagatacctcaaggatctagaactagaaatagcattatgaaccagacatcgccattactgggtatatacccaaaggaactataaactacatgctgctataaagatacatgcaacacgtatgtacgtagcggaattattcacaaataagcaaagacttggaaccaaaggcaaatgtccaatagagataagacgtagaaag

SEQ ID NO: 562955 - DNA, 771 bp, Homo sapiens
  misc_feature (49)..(49): n is a, c, g, or t
  misc_feature (52)..(52): n is a, c, g, or t
  misc_feature (55)..(55): n is a, c, g, or t
  misc_feature (90)..(91): n is a, c, g, or t
  misc_feature (93)..(93): n is a, c, g, or t
  misc_feature (101)..(101): n is a, c, g, or t
  misc_feature (108)..(109): n is a, c, g, or t
  misc_feature (117)..(117): n is a, c, g, or t
  misc_feature (121)..(121): n is a, c, g, or t
  misc_feature (164)..(164): n is a, c, g, or t
  misc_feature (175)..(175): n is a, c, g, or t
  misc_feature (185)..(186): n is a, c, g, or t
  misc_feature (190)..(190): n is a, c, g, or t
  misc_feature (208)..(208): n is a, c, g, or t
  misc_feature (221)..(221): n is a, c, g, or t
  misc_feature (229)..(229): n is a, c, g, or t
  misc_feature (237)..(237): n is a, c, g, or t
  misc_feature (249)..(249): n is a, c, g, or t
  misc_feature (265)..(265): n is a, c, g, or t
  misc_feature (296)..(296): n is a, c, g, or t
  misc_feature (307)..(308): n is a, c, g, or t
  misc_feature (325)..(325): n is a, c, g, or t
  misc_feature (327)..(327): n is a, c, g, or t
  misc_feature (329)..(329): n is a, c, g, or t
  misc_feature (336)..(336): n is a, c, g, or t
  misc_feature (340)..(340): n is a, c, g, or t
  misc_feature (345)..(345): n is a, c, g, or t
  misc_feature (349)..(349): n is a, c, g, or t
  misc_feature (351)..(351): n is a, c, g, or t
  misc_feature (358)..(358): n is a, c, g, or t
  misc_feature (367)..(367): n is a, c, g, or t
  misc_feature (385)..(385): n is a, c, g, or t
  misc_feature (391)..(392): n is a, c, g, or t
  misc_feature (397)..(397): n is a, c, g, or t
  misc_feature (403)..(404): n is a, c, g, or t
  misc_feature (407)..(407): n is a, c, g, or t
  misc_feature (422)..(422): n is a, c, g, or t
  misc_feature (473)..(473): n is a, c, g, or t
  misc_feature (531)..(531): n is a, c, g, or t
  misc_feature (539)..(539): n is a, c, g, or t
  misc_feature (541)..(541): n is a, c, g, or t
  misc_feature (544)..(544): n is a, c, g, or t
  misc_feature (640)..(640): n is a, c, g, or t
  misc_feature (695)..(695): n is a, c, g, or t
  misc_feature (697)..(697): n is a, c, g, or t
  misc_feature (722)..(722): n is a, c, g, or t
tcttattcaataaaaaagtggagatatttttattcccaggtatattgtnacntanagtctttcttctctactgtctgctttattctcttnntnttattttnttatttnnacctcctnggtnctctctgtacattttttctcctctatacaagtctgtaccatgncttctgctgtnatttcttctnntttnctcttcaacaaaatttanactgtgcccgatntccttgtntccctttncttgtaactacnaggccttctgctccgncttctccggctcctttcctccctgccgtggnttctgctgttnncctcctttctttcagancntnttttctntggnctatntttntnggttctngtttttttntcagaatcagaatggctncatttnntgttntccctnnaantttcgtgttttaagnacctgggcttttccttggctttttcccggttatggtgactgctagaaagtncttcatgaagctttctcttcttagacttgtacttctcttcagaatcactgttgttatnttcttaananttntttttctttcttttcttcctttgtatttttttttctttattgttactctcactctcactactgctttctgaagtctcagtagaggaagaggaggangaggaggaagatgaggaagaagaggacttatgttttttgtgtttacttctgctcntntgaaactttttcttttttctatctnttttcttttttttcttctccagtagatctaatttcctgagaagtttctg

SEQ ID NO: 562956 - DNA, 196 bp, Homo sapiens
gctgtaattaatttttgtaaagggctggtcacacgtggatgtggtttatgaatccatttgggatgattttgataaccagatcgccttttcagaaatttagatgtgaaccccaaaagaagcatcctctcaacaaaaattaatagctggttatagtttttttaaacctagaaaaaataaagttgatttttttcagtta

SEQ ID NO: 562957 - DNA, 139 bp, Homo sapiens
ggggaaggggaaggggcccccatacccaaccccccttcccccgggggtgggggttttttttaatacagggggccccccggttttcccccttgaaaagggggcgggggggcccccccattttttttgggttggtcccctt

SEQ ID NO: 562958 - DNA, 118 bp, Homo sapiens
atcagctcggacccttttgggtctcacctggcctgcttgcccctaggccataatttccctcctggattcctacagtccagtgggctgcctgatactccccaggttcagctgccaggtg

SEQ ID NO: 562959 - DNA, 164 bp, Homo sapiens
  misc_feature (131)..(132): n is a, c, g, or t
aagtgcactttgcagacgttcttcacatgctatacatgaggtttggagattaggagcttttacctcgtagcagagcagtattaacacctagttggtcacctggaaaacagagaggctggaccgtggggctnncatgcgtagcggtcacactgatgctggagaga

SEQ ID NO: 562960 - DNA, 1412 bp, Homo sapiens
gcgttcgccgcccgaacacagtgcgtcgcgaaggctagcacccatatgtggaccaatatttagggaaaggcactataactacatgatcaagcgaattgttagtaccatgtgatgaacactgctaaagttactagtactacgtccaacacatgtaacttgtgtccctctgcatctatttatttccggggtcctcgaatggactatcacccatgggaaactacattatagaatctaataggaccgctggacatgggtgaactgggatatgcgggcgtacctatctactggtagtagcctaggtgctgtatgagaattacactgagaaactctggcgtgcaaatgatctcaatcagcactgtgaatagtctcacttttgtagtcatactgtagacgacaccgagaccagatacattatgtggcatgtatccagttggcgtgtatctcagcgctataaattgaaacgtggtaatcaggcaacattgactaaactgtggtagcgaatgcgcacgtgactagcaccatgtgtctttggtgccactcgcttttcgtacggtctccacgtagcgatgctacttgtcagaaactatttcgagcatcgtgggctgttacctcgccaagccacctatggaacgaaaaccccggcataaagcattagacccctttttgggtcctgaattggcactctagtgaggtgctgacaaacattcaaactaaggcattagagtccgcgaagtttcactactagaaaacgctgtgaatattgcacagctcccatgtccaaaacgtcttgggcatttcgcacgtacaacggcggattcactgcagccgaacactaggggacaaccggggaatctcgagacgacttgggcactatttcaccaaaacaacttttgacctgaacagaccaacccggaagggacacatcgtcaattcctatgttaaccccaattctaaccagctgtggtgtcaaggagtcttggacccccactgtagtagacaatgctcactgtgcttccacgcttggccagacggaaaccagggtgtgaagccgcgtcacacccagtgccaaagaattggctcagacccacgcagacaaccgagcaaaggccaagagccgaccatgagcagtggcatacaaaaaaaggccagacactagagcggaaacgacccaggacccaatccaccccggcctcactgcagcgactttctacaacacatgggggtggacattggtcagccgagcccgacatgcgcggcgatagaccagcgctgaagcataacctgaccatagacgaacaaactcgagccatcacgcgtctcactcgaacaccagcaacactcagacacgagccatcacactccctcactcgtcacaaacactataccaatagataaaagtattaaacaccaaa

SEQ ID NO: 562961 - DNA, 171 bp, Homo sapiens
gggcaatcaggagtattctctagtaaccacaacgacattgcgatcaccataccttattattctagcgcttgagactgtcatgtcctaggcacagccctaagcctccttattcgagccgatctgggccagccaggcgaccttctgggtaacgaccacatctacaacgttatc

SEQ ID NO: 562962 - DNA, 128 bp, Homo sapiens
tagctaactcgggaggctaaggcaggaaaattgcttgagcctaggtcaaggctccagtgaactatgcccataccaatgtactatggctggggtgcacagggtccaccctgtctcccccaaataagcta

SEQ ID NO: 562963 - DNA, 238 bp, Homo sapiens
ttttttccccggggggggggccggggccttaaggggccagggggttttttcgcccacccccaagaaattttcccctacccccgggggggaaatatggggggaacctttttttttttttccgggccggggccaacccccccccaaaaacccttttttgggtacccagggaataattgtggtttatcccaaaccggtgggggctttccctttccttttttttatgggttggggcccatta

SEQ ID NO: 562964 - DNA, 86 bp, Homo sapiens
acggccgtgtattactgtgcgacgtcgtatagtgggagctacaaatatgactactggggccagggaaccctggtcaccgtctcctc

SEQ ID NO: 562965 - DNA, 95 bp, Homo sapiens
tggaagaaccagaactcgtggggcactggcgaagatgtgaaggttatattgaaaaattctcagggagaggaggttgctcaaagaagtacagtctt

SEQ ID NO: 562966 - DNA, 860 bp, Homo sapiens
  misc_feature (38)..(38): n is a, c, g, or t
  misc_feature (318)..(318): n is a, c, g, or t
  misc_feature (419)..(419): n is a, c, g, or t
agcggctctttccttgcctaacgcagccatggctcgtnggtcccaacgaagcatctgcaagcgggtggcagctccaaagcatgggatgcgtggataaattgatccggtgtgtttgctcctcgtccatccagccggtcccgcacaagttgagagagtgtctccccctcatcattttcctgaggaacagagttaagtatgccctgacaggagatgaagtaaagaagatttgcatgcggcggtgtcattaaaatcgatggtcaaggatccgaagcgtgatataaccctaccctagctggcattcagtggactgtcatcagncattgactaagacgggagagaatttccgtctgagtctatgacgaccaaggggtcgctttgcgtgtacatcgtattacacctgaggaggccaagtacaagtngtgcgaaagtgagaaagatcttgtgtgggcacaaacaggaatccctcatctggtgactcatggatgcccgtaccatccgatgaccccgatccccgtcagtcaagggtgaactgataccagttcagatgtgatgttagagacgtggcaagattactgatttcatcaagttcgacagtggtaacctgtgtatggtgactggaggtgctaacctaggaagaattggtgtgatcaccaacagagagaggcaccctggatcttagacgtggttcacgtgaaagaatgccaatggcaacagcttggccactcgactttccaacatgtttggtattggcaagggcaacaaaccatgggatttctcttccccgaggaaagggtatccgactcaacattgctgagagagagacaaagactggcggcaaacagagcagtggggtgaaatgg

SEQ ID NO: 562967 - DNA, 779 bp, Homo sapiens
ggaggcctgccacatgaagagcggggtctgcgggctgctgcctgatctcagacacggcaacgccttgtacagcagcaaccgttcgggatgacactgaagtgccattcttggatgcatgatcatgtgcccactggccagaagcacctgtgctggtcccatgccccgagccccgtgccgacccacaacatgcgcccgagcgtacgtgcctgtacacagcctgtgcttgctgtgctgtcctagtgccccacgatattgtccggacaatggacaaggtagttcaggccatcttccgctctggacacgcatatggaggaacccagtggccggactgagcctgcactgcgtgaccagcacacgacgcggaggatgcagcgaatcaggctgctgcagcctgcactggagacgcaattgcggcaacggcacgacatgcgcgatgtaacagcccgacttcgagggtcttcatgccaacagaaacgagggatggccaagacacgccccataggaggacagcgcggtgaacagggcccacgagcaagaggacaggacacgcggcaacccacaggggccaccaacagcaccactagggtcgcgagcacaagataacaaggtaggccccaagcgaaaacccgttggcggccaacaggatcccgacaaaccacgcgagaacgaacaagtgcgaagatcatacaccatagcggcccatagagccgaaaacgacccaaggcggcccaacaggggagaggcccccgagcaacctacagaaaagaaacaccccagga

SEQ ID NO: 562968 - DNA, 815 bp, Homo sapiens
  misc_feature (656)..(656): n is a, c, g, or t
ggcacatgaacatggcggttggtgtagggacggattgctccgagcgtcggtctgcccgaacatgtgagtgccattccttggtggcatttctgccactgaagaccctcaggcctgctgcgatgttggaaagaacagagcatagacataaatctactatgtgttctggtatccatgtctaagcaaaaaattattgcagcatccagttcctctaggtgccatgctagccatgcttgtcaccgcagcatgcaccctatttgagagggtacggccggtgtcaatggagagtctcaagagaccgtaggccttgatgacgttctaaggggaaatatgttggatgacttggcttggtagggccttagggattatgcaggctttgtgtgtcctacagaaactcgttgtcttttgaggtgacaagaagttaatcgaattttcaagatgtgtagctgtgaagtttgtcgctagatctcagtgggattcccagtttataccagtttttgccggggtaaactacaacctaagaaggaatggtgggtgtgtggggtcaacaattggtaacattcgcatgttcttgtctagactttaaccataatgctaagattattccctgatgacttactggtgttgctcgtgcagaccggttccatggtcgtatgctntcaatgcatggtcttctctccattaatttgatccacacattgagtcgtcgaagcatttgcgagcgtctgtggaatctctccagatggggccgaaggcgttgggaatgaaacccactcccggatctgggtgaagggcggttccaaggtatgttagaaagg

SEQ ID NO: 562969 - DNA, 195 bp, Homo sapiens
ccccgcagtaaggagcctgtacacagtcactcgcttcttctggcctattctccatgctcgctcccgggcctgcgtgtccgtgcttgggttccagtctgagtcatagatgacaactctgtttgcccccgtacaggttgacaccgtaagccgcccacccgctgtggccaagaaggacgggtaccgcagctcgacatt

SEQ ID NO: 562970 - DNA, 306 bp, Homo sapiens
acgagactcccgcttcagcctaccacggtgctgggattacaggcgtgcaccaccatgcctggtctaaatataaaaatcatttgtatacagaaaatttgtttccaatgttggttacaaacatgttccgaattcaccatttcatcatttgaaggttgagagaagtaaaggccacctgactcctcactcgactgatccgtgtatcaacactaatataaattatcatctgtcgataagtagtctaactctgccaatactcatcaaacagtttgctggtttaactgtattagaaagattactgtttttcta

SEQ ID NO: 562971 - DNA, 1232 bp, Homo sapiens
ggaccagggcgggacctggggcgggggacgggacttaaataaaggcagacgctgtttttctaccaaaaaaaaaaaaaaaaaaaaaaaaaaaaaaaaaaaaaaaaaaaaaaaaaaaaaaaaaaaaaaaaaaaaaaaaaaaaaaaaaaaaaaaaaaaaaaaaaaaaaaaaaagaagacagagacaggacgcgcggcgcgcggcgcaggacgaacagcgaggagaggaagtcgcacaggtcaaaacaccgcacggcggcggacgcgggaggcgccgacgcggcagcgagagacaagaacggcgcgcccgtcagctggcgagcagggagggccccgggcgagggggggagaggcggaaacgagccgtggagcgcacgtcagccgagaggggaaagaagacacagggaagggcgggggcggcagaagggcagacggggggagggcaaacaaccggacgcgcgaggaggaggtcgcggggagggtgcgaatgggagacgaggagagaagcaacgggcagagggcagccgcgcagagcgagcggaggacgaaaagacgaagaagaggcggccgcagcggcgggcataaaagacggcgaagggcggggacggcaagagaaagagagcggacaaagcgacggaagcagagaaggaacgacagaaaggcggagaggaggcggccgagaagggcaaggaggcagaggagaatagcaaaacgaacgcaccggcaaggaggcgagcgaaggcaagacagagaacggagacaagagaaacaaaagaacgtgaaagggaagaggaagagaaagagagagaaagagagaaaagaacacaggagaaacgagaggaagagacgaagaaaggacagccggacgggagagaggaagaggcgagggaccaaaggcacaagggaagagcggacaaggagagagaaggcgaggaggcgaggggacagagagtaagggagagggagcaggagagaaaagaggaagacgggaggacgcgagacggagaggaaccgaggcacggagcgaggcagcgaagaggacgggagcggcacgggggggaggaacgaggaaggagagaagggaaccgaaggaggaaggcgcgggcagagacggaggcgggagagagcggacaggagggacaagaaggcggcaagagacgacgaacgcgagagaaaggcaagggaacgagaaaaagcgcggagcagggatgagcgaagaagagcgagggggacgag

SEQ ID NO: 562972 - DNA, 148 bp, Homo sapiens
cgccactctgggcgggggtccgttcgttctcctagtgagatcaaacgcagtcgacgcagataaaactggccgtcgcgctcctcagctagctgagaacgtcccttgacgagaaagcacgacgcacaggtaaattcgccggactgacgag

SEQ ID NO: 562973 - DNA, 267 bp, Homo sapiens
aaaaatgaatcagggtcatgccttaaaaaaaaaacttttgttaaagtattcccctgaaatcccaaatatttgtgggtattataacaatcattggaaagcatggagagctccctttcataatttgagggaaaatttttaacaaatgccaaaaagcttgtttatgggaatgctgtgtttctttttaattatttgtggttccaaacaattattttttgaactcttttaattttggactaaaatctataataaagcttttccccagcttta

SEQ ID NO: 562974 - DNA, 169 bp, Homo sapiens
atgttgacagctgtctcctgcttgtcccctgtcagcatccagatcttgatgcccggtttgtgaagagcttctatagattcagggactccctcctgcagacggtcttcaatgccagtagcaccaagtaatgtaagttagttctccaaactcatggcagattcaagtagta

SEQ ID NO: 562975 - DNA, 201 bp, Homo sapiens
  misc_feature (16)..(16): n is a, c, g, or t
  misc_feature (78)..(78): n is a, c, g, or t
  misc_feature (93)..(93): n is a, c, g, or t
  misc_feature (95)..(95): n is a, c, g, or t
  misc_feature (124)..(124): n is a, c, g, or t
  misc_feature (131)..(131): n is a, c, g, or t
  misc_feature (148)..(148): n is a, c, g, or t
  misc_feature (176)..(177): n is a, c, g, or t
  misc_feature (181)..(182): n is a, c, g, or t
  misc_feature (201)..(201): n is a, c, g, or t
ttttcctcaaatagangtgaaagaagtgaccttttattgacagatgattagcagtaataaggctattgtatgtaacgngcatccccaaaaatncnttcctcactaccattcagtgtcaaaaggnggatttnaaagctgttctctcgtnaagctttcctgagcatgtcttagtaaanncccnnattctctttagcaccctcn

SEQ ID NO: 562976 - DNA, 384 bp, Homo sapiens
tggttatagctcagcattggccttatttgaacgagatttgaacagttggccccctttgattggccgaaactcagtgattggcccaagagtaggttgcagtctgtttacccatccttttaggttatagttccccatgtacagagaaattttaggccaaacttaaaatatgtaaggaggcagctttaggctaaacttgttttaacagcccccaataccccctccctttagtgagcccatttgcccattccaattttaatgacagctccttagaattttttatcaacgaagaccctaacaaagaatggggcattcctccttctcctttttgaggatgccctaccctgtaacaaagtcgtttttaataaatttgcttctttccccata

SEQ ID NO: 562977 - DNA, 838 bp, Homo sapiens
gccctggtcgcacccgtgcaatccagcctcagcaacagaacaagggcctgtttccaaaccaaggaggtaaaaaaggggaaaccatgactccaaaaaaaaaaaaaaaaggtgaaatacgtgtaaattgacaaaacatatgcaatatttctatactaaaaactacaacgttagtgaagaaattaaagaagagcaaaataaatggagaagcacatatcgtcacattcatggattgtaagaatcaatgtaaaaaatgatattaattttccctaaattgatacacagtttaagtgcagttcctatcaaaatccctgcaagatgttttgtagctataaataagattatcccaaaatatatggaaagacaaaagaaccagaataatacataaaataattttgaaaaagaaagataaagtgggagaaatcattctattcaaatttgagactactgactattataatcaagactgtaggatttgatagatgaacagacacagaaaatagaatagaacagagaactcagaaattgcctcacaaatatgccagctgattttcgacaaaggtacaaaaacaattcaaaggaagaaggatcaccctttaatcaccctgtactggcctgactggatatccatagctctgacacccgcccccctgccccctccccgctgccaaatgaacttcagcttaaacttcacacctcattaaaacttaatctcaaatggatgacagacatcaatgtaaaaattaaaaccataaaacttttagaagatattgtaggagaaaattgtgaggtactaggaaaagttgacgagttcttagaaatgaaataaaacccaaaatcc

SEQ ID NO: 562978 - DNA, 829 bp, Homo sapiens
tccggggggcccccccttttttttcccaacaaaaaaaaacccgggtttaaaacctatttttaaaaaataccccgcgcgtggagaggataaaaaatcttgtgcgccccctcctcctcccccccccccccccatcttctttgtgtcctcctctctcgctcgccgggagtatcatctcctctttgtggtggcgcccccctctctgcagaagacgtctagtgagcaggtggggtgtgtcctgcccccgccgtgtgagtcgaaaggagtgataaagcagtcgccggcgcgtgtgagggtgagagtgccgcccgagatggtgtctacacacactcctccagagagttggttctctgaaaaacacactcctctgatcacgccagagagagagagagggcggcgcgcccgctctccaccgcaccctctgatgatgcacgtctgtggtgggtctctctatatacacccacccgagttggtgcgtgtgaaagagagagtgaccagcaatgtgacggggggtgtgcttaataaagatagagagagttaagacgtgaagtgatgtgatgagcgtagacgagtattatctatcccgcgcaagacgagatgaggtgtcatctctctcactatctataagctgcagcgtgaagatagaacccagcattgaaggagagatagtgtcgctaccctgctcagctcaacccgacgatgtgtgttgggagagtgattttattctctctcctagtcaagaaccgaagggagtcgaattatagttttctctctccgaggtaagaaacaatgaggtggtgcaaacgaaaacgaagagagatcattaagagat

SEQ ID NO: 562979 - DNA, 745 bp, Homo sapiens
catgcccagtgccagcagagtctgttgctgcctgggcagatgctggaattgcctgcatggattgtctttcggtggggccgcggcgtcgcggacgcctgtatcacttgagggcatgcgggcttcacggccgtgctaacagtggactcggaggagcccacgcttcaaggcgggtgcctgtggtctgaggatctatggcgcctcttcgtgccagcgctggcacaatatcgccgatagcggacctatctcatccatctggaccgttgcggtggtccttcatctgcgtcaggctccgcgctgagggccgtgcggtgtagtgtgcatctgtcagttgcacgtgagtcacgtcgaaggtgtggcctattaataatctgcctttatctcaatgataggactgacctaagcttccctttgaaatagagcctatgaagacatgctccacgatttcgtcaccaccagaggctaacgatgaattgaagggtggttggagtggccaaccatgataaattatacccagcgcagatggagatacgaacgttgtagtacctctagatgcagactttataaggcaatatcgtttacaaaaagtgatacggcatcaagtatccagacattgcagactttacctcaagaactcttggctgttgacccaaactatcggtttcacagggattgatggatgcggttctctacaagtgtcgcaagtgccatgtgaacataatttcgaagtctagtatctggttcacgt

SEQ ID NO: 562980 - DNA, 94 bp, Homo sapiens
tatttttttaaaaagtatttcccaagaatggaacaaatttacttatccagttaaacctttgaaaaaaaaaacctccttttattgttttttttca

SEQ ID NO: 562981 - DNA, 622 bp, Homo sapiens
  misc_feature (522)..(522): n is a, c, g, or t
gcgatgacagtttccagtaaactccgcggcctgctgatgcagcagctgagaggtaccagccagctgtacttcaacatcagccttcgatctctgagctcctctgcacaagaggcctccaagagagcccccgaggaagtctcagaccacaactatgagtctattcaagtcacaagtgcccagaagcatgttctccacgtgcagctaaaccggccagagaagaggaatgccatgaacagggctttctggagggagttggtggaatgcttccaaaagatatccaaagactcggactgccgggctgttgtagtctccggtgcaggaaagatgttcacttcaggtattgacctcatggacatggcctccgaactcatgcagccctcaggagatgatgcggcccgatagcctggtacctccgtgacctcatcagcaagtaccagaagaccttcactgtcattgagaagtgccccaagccagtgattgctgccattcacggaggctgcattggcggaggtgtggacctcngtttctgcctgtgacattccgctactgcactcaggatgcttttttcccagatcaaggaggtagataatgggcttggctgctgatgtaggaacactgcaga

SEQ ID NO: 562982 - DNA, 376 bp, Homo sapiens
ctcgttggatcataaagtctgaagcccaaataagggtggtctttcatgcctcaggtatgttacctcacttgttatcaaattctagttgaaacatgtaaccattcatattatcggtccagaagacatgatttaccatgatgcgatcagtccgaaagggtggttcaactctctcccatctgtaaactactcttcctgtgagtcccattcacaaaatactttcttcaatatgatcgttataggcatcacaccagtattatgtgttggtgtgaaagtccatgagtttaaaccatttggtcacagcatctttgaggtcacggagaatctgccgattgaatccatccatcctggccttttccatccttcccacgccgtcgtc

SEQ ID NO: 562983 - DNA, 675 bp, Homo sapiens
  misc_feature (326)..(326): n is a, c, g, or t
  misc_feature (482)..(482): n is a, c, g, or t
  misc_feature (489)..(489): n is a, c, g, or t
gctctgcacaggtgtacccatgtagcgggctgcatggttctagaggttgtgggcatgatggacagtctcccactcagtaatgtgctggagttcctacaaggagcctctggcccatggctcccgtctgctgggagagaccctggcagcctcgtccacttacacagggcttgtgaggacgagtggttctgtgaagatgaccgcgatccgcatagaaagggccgattctgtgtacgtgctctgcgtccaccatccttgtgtgccgcgatcatgtactcttgagatgcgaaggctggcaaggcgacaaggtacgatctcgtccaggaggnagaccctcgaagggggggggaccttttttgcggtgagaggaccctggctttgtccagaccagtggattcgacaactgcgatgtattgagagagcggaggacagcggacgcgtgctaaaaaggggtcttgcacaggagacaccacgacccagaattnaaccccngtttcgccacattgtgtgaacccatgagcggtggcattgtggtgatcgggaagagccgtgcaattcgaagggtcatactccattgcaaacgaccgctcttagttgtctgcgtcacgagctcgtcacctctagcagcgaaaactcggtgactacgcaggagcggcgcaggactggtatagcgggtgg

SEQ ID NO: 562984 - DNA, 607 bp, Homo sapiens
agagccgcatgtatatgaggggtacttggtctcacactttatgcctgtgtgacatgggttttcgaggtgaatcttatgtaagtttaagccagtagtggtggcgactgtacatctatcgacatggtgaggtagagcactgtttgggagggaaacgacgttgaactcccatttggtgacagtagtagctgtgaggtgctgccagaagctactgctagcatgaagataggaggagactgtaggaaatacaagataggaacaggtctccactgaaatgttaactctttctctctaaacggccatccaggcctcaatgtctgcagtttctgatctgtgagttatgagcttagtccaaatcttacagtttcttaaagagatagtcatagatgaagggaatcacagtgtgatagattattatggtgagcattaggtggcttgaatgtgctggaatgtactggtaaagctgttataatagggcagaagcgtgtggaggcaaaatataaatgcttgctcaaagtgctgtgtaggctcttatgagggttaatttgattgggacctgtagttaattggcttatggctgctataactaacaaattagcacaaacttggt

SEQ ID NO: 562985 - DNA, 602 bp, Homo sapiens
atagtatgccacaaactggcaattcttcaagtttactaaggaaaaaggccctaatttctgcaaagtcctttgtctttggaagttcattacacctggtacacactgtaaatcagacttgtgtaacaggccttttgacagacaaatcatttgggatttgtaggggccatcttcatgccttaaataggactaagcaacgaatttcccatttggtaactctagatttcttctcctgaaagttcaagctgaagtcaggttttatggacaagtgacacttaggcccagtttgtaaacagatataatttccaggaatcgtgttttttttttttcatagtcaacatttatgcagctagtattattatatttatgcagttatttatgtgattaaatggatgatttagatttcattagaaccgtgtggtgtgcccatgatattggagaataacttcatatatattattcggagagataggttatagatggaaggacataatctatacaacatgactactggcactttaatatctcttggggggaaacttgaggctctctaaggcagcattggtatctggtctttgaatcgtatgaatcttcgagagcatata

SEQ ID NO: 562986 - DNA, 1800 bp, Homo sapiens
  misc_feature (135)..(135): n is a, c, g, or t
  misc_feature (184)..(184): n is a, c, g, or t
  misc_feature (284)..(284): n is a, c, g, or t
  misc_feature (460)..(460): n is a, c, g, or t
  misc_feature (1023)..(1023): n is a, c, g, or t
  misc_feature (1086)..(1086): n is a, c, g, or t
cgtccgacccagaagactactgcagggtcaggggcccacaggtcacgaagtcgagatgggcctggtagagggcatcctactcgcttcgtgcactcacgcagagtagtaactcgagattggaaattagacaagtcncatcatggttgccatgcctcggaccagtgccgttggctgagttgccatngtcgtactagacgtgcatgcggacggcgcggaatgctcggcatgcatgttatgcgctctagcaactgtactggtcggacacgtactgatcaaagcggtcnacggtacggagaaagcacctcggcgtggtgcacacggaagcgtgtggcagtgtccgcaagtggagtaaatcctaatagaagagacgccttttagttagcatcgcgccgtgaacaagatgtcatttaccgtaggacacgcgtagtatggtggcgcacacgggtgtaggttgttccantgaggggccttggctattgcaagtccaacgagtgacgatttttataggatctgtgagtgtgaacggtcgcttgctttcgcgtgaagctaaaaagtccatatgtagatagcctagtattagcgggttgccaccaacgcataactagaagcaagtacaagcaatgttagcatccacgcagctcgatactggacacacaaatagcaagtgagttcagttgggcggaaaacccaggggacacatgttgaggaataagctcagaagcattcttgcgagtgtacgaatattagggccagaggattgctcgtgagagttgtagctaagaccctctgtagccgggagctgatattagaggaccttgcgaattgtgccagaatccgggcaacgagaaggggtgccgcgttttctcttccccccctcggtttgggccgggggcaaaactaatctcctgtacctttgccaatggttatgggtgtcggtcgagggccattaggcctttactttgccaaaggagaatcccatttttcttacctataggcccccatgtttttggccttcgggaggcnccggggtatggcacacaaggtgtgataccgagataacgaaaactttgtagagcgggttgttcncaccagtcccatttgggaccgtaggagggacaaataggacaaaggactttggcggtggggatcttgcgtaggacgaaaggctttagcggagtaggaaatgggaattccccccaggagatcaagagactgttggagagttggaaagtttaccgcaagggaaggggacgccgaatgggcaaccgcaattggtgggggaccaagagacggggttgtaaacggggttaaaatgggtttgaatgtaaactgattgcgggtcgtcaaacgggattgaagacgtgatggggggagacaggaaaatagattgacccaaaagtggtttggggtgttcaatagacaaaaagggggggagggaaaggagggagcccccgagacatgtgatcgtggaccgttgagttaatgaacaaacacgaggcagggatagtatgaaaggtgtggtgaaagaaaaaactccctatagatgggtgagtaagaagaaggtgagcatccaattcatgaacatagaggaggagggggataaacacaggtgagcgatgtgatggcgaccaacagaaggcgagacgactcagaaaagaatcatagtgaagaagatgatggtgggagcaatttagataagggagatgagagaagaaggttggaacgaataacgaagcggcggaggagaacaacttgtgtgttgaacaagagaggtggatgaatgaatgtgaagaagagaca

SEQ ID NO: 562987 - DNA, 424 bp, Homo sapiens
tcggtacgaggtggccctgggggaggccatgacttgaccgccatctgtgatgcctctgagcttgtgccggtctgccagtgtaactgcagccttggatgaggagcttgcagcaaaagcccaacatcaacgcagccacgctagagaaagtcatcgagatcagagtaaacactggagctgtgtgcagaagtcgcgctggctgggcggtccctgcgagaggccaagcaggtgagaccgaggaggccgagactgtgagcgccatggccttgctgtcggtgggggccgagcacatggtctgcggcacgccgggaacacagccccaggccggcagaggagcccatggagcaggagcctgcccatgtgacgccccggcccccatccctcttggcttcaccattgtgattttgtttattttttctattaaaaa

SEQ ID NO: 562988 - DNA, 273 bp, Homo sapiens
  misc_feature (60)..(61): n is a, c, g, or t
atttgggagtttttttgtagataatggggtttcgccatgttgcccaggatggtgaactcnngggtagattgcctgaggtcaggagttttgagaccagcctggccaacatggcaaaaccttgtgtctactaaaaatacaaaaattagccaggcacggctgggcacggtggctcaatcccagcactttgggaggctgagacaggcggatcatgaggtcagaagatggagaccatcctggctcatatggtgaaaccccatctctactagaaaatgt

SEQ ID NO: 562989 - DNA, 405 bp, Homo sapiens
actacctagacctgaatcaacaggaaacactacaaattaccacaccaaagtaacaaaaggaccagcactactccctttgcaaatcccccaccctttacttgtgtggcagatgaaaaattgaaattatgtctgatagctcccttcccacaaccaatcagtaaggctgtggagccaaatcttcatttgcatagaagtataactatgtaacttcactgcagcctctgattggttgcttatccacaatcagatgtctgcatagggtgtagctatagtaacttcagcctctgataggtcccctcctgcaaccaatcagactaataatgagccactacttcatttacacagggcatacaccaagtaaccaatgggaaatctctaaagggtatcaaaaccccagacacttct

SEQ ID NO: 562990 - DNA, 482 bp, Homo sapiens
tccgtttttcttgttactcttggagctgctcttcttggtcctggtggattgtgggcatatgggcaaatacaacgcctttctaagaaaccaaagaaggctcctaaggttgagctcgggaccaagactgttgatacttccatggatgaagggttacagggaactgcttatgctcattcattgtctaacaaatctaagaagaaaaagtagacatctctttctatgatttttccccttttgttttctagttattacgttcctagttagagggaaaattgcaggaaagttcaacctgttgtaactcatactatacgttcatgatgatcaggagagtttagatgctgaggtagtttgtgcaaatttagccatgaaaagggcttgcctggtttttttgtagaatgtaaaagaagattttgagtttctatttaatcttgttatagagctgttagtgctataaattgacaaagagaaaccttttgctaaaa

SEQ ID NO: 562991 - DNA, 366 bp, Homo sapiens
  misc_feature (338)..(338): n is a, c, g, or t
  misc_feature (353)..(353): n is a, c, g, or t
ctcaggtttgaatacagtggcatgatcacggctcacctgcagccttgacctcctggacccaggccatccccctgcctgagcctcctgagtggctgggactacaggcacatgccaccatgcctggctgatttgtaaattttttgtagggatggaattctcactttgttacccaggctggtctcgaactcctgggctcaagtgatcctctcacctcgtgcttctaaagtgctgggattacaggtgtaagctactgcacctggctgatttatttttttaagtataaaatatgtctgatccctgggtgtctccaaatctagtaatttctatacatttaaagncaattttaattttcntggttttttgaaa

SEQ ID NO: 562992 - DNA, 148 bp, Homo sapiens
ggtgggacagctcagtaggatcagatgaaaggaagtttctgaggcagtgggctcgacgccagtagcctcctcgggtacacagggccacacagtgaccaccgcgggaccagtgactggtgagcagcccagtacgcaaagttccagcggc

SEQ ID NO: 562993 - DNA, 262 bp, Homo sapiens
  misc_feature (1)..(1): n is a, c, g, or t
ngactctagtggaccccgctccacccgacggggggggagatgaggcctgccccctaaccccttttttgccaaatgggccattatcgaagaatcagcgaaaaacaatagcctcatcatccccaccatcatagccaccatcaccctccgtaacctctacttctacctacgcctaatctactccacctaatacactactcccatatactaacacgtaaaaataaaatgacagttgacgtgcaaaacccaccccgcgggggagcgg

SEQ ID NO: 562994 - DNA, 444 bp, Homo sapiens
  misc_feature (36)..(36): n is a, c, g, or t
  misc_feature (61)..(61): n is a, c, g, or t
  misc_feature (182)..(182): n is a, c, g, or t
gtcttcctcaaccttgtgtcccttactgaaataaantctggttccttttgccactccatancccaatatggttagctgaacccctgccctcctcacatgcctgttgttacatacccttagcctggtgattaattttccttgttttccccaagtcaataaaaagattgcagacccaggcacgngtgtcacgcctgaaatcccagcactttgggaggccaaggcaggcggatcacttgagctcaggagttcaagtccagcctgggcagcatggtgaaaccgtgtctctacaaaaactacaaaaattagccaggcatggtggcatgtgcctgtaatctcagctacttgagaggctgaggtgggaggatcaattgagcccacgaggttgaggctgtagtgagctgtgatggtaccactgcactccagcctgtgtgacagagcaagatc

SEQ ID NO: 562995 - DNA, 86 bp, Homo sapiens
ttcccgggttcatggtaataaaaaattcaatgtcatccaaaatgtggtttaagatttgcacatctcagttaatggggtccgcacaa

SEQ ID NO: 562996 - DNA, 433 bp, Homo sapiens
caaaaaaaaaaaaaaaaaaaaaaactctcaaacctaactctgaagaaacaacctcagtagtaacttgcaagtacctttaaagcttgcaatcataaaataaggctctaaagactagtttcaaatttccaaaagtggccgggcacagtggctcatgcctgtaatcccagtactttgggaggccaaggtggaaagatcacttgaggtcaggagttcgagatcagcctggccaacatgttgaaaccctgtctctactaaaaaaaaaaaaaaaaaaaaaaaaaaaattggccaggcatggtggcgtgcacctgtggtcccaactacttggtggactgaggtggaaaaatcacctgaacccagggaggttgaggctgcagtgagctgtgatcatgccactgcaatgtagccttgatgacagagtgaaccctatctcagg

SEQ ID NO: 562997 - DNA, 323 bp, Homo sapiens
accacaagtgtctgagctgccctcggatttcaggagcgcgagcctgcacatggagaagcacggctgcagcctgcatccccgctctgcacccggcctacgccgacagcgtccccacctgcgtcattgccaaggtgctggagaagccagaccccgccagcctgtcctcccgcctgccgtaggtctggctgcactgcagcagctgggccgctagattgcagtccttcctatagagctcgttgtcctctgacagcttgtcgatggtcaccttggcttctagcagatggctgttgagggcaacaatctcgtccccacagagagagcgt

SEQ ID NO: 562998 - DNA, 89 bp, Homo sapiens
aaaaaaaaatttttttttttaaaaaaaccttttgttacaaaaggagggcttttttttcccaagggaaaaattatggcctttttttttga

SEQ ID NO: 562999 - DNA, 640 bp, Homo sapiens
gagagtgaggactatacaatttctgcacaacctactcaggcgctgtagacactaaagcagactacagacacttgaactataacatatctaacatgcactaaacctggttcgtagttacagctaaatttgcacataaggattatgttagccaaccatatgagttgacctacgttagacccaggtacttctgaagcgtgtaactagtgaaagagtacctcatattcagacaagatattaagtcatgtatcatccatgaagtattggtaacctcgtacaacatgtgagattagtgtcgcatagtgaaaagactctcaaaccctgatttcagtccataagcaatacactgaataccgaaaggtcataaaatgacaagtattgggtcatgggacgaaggtcacgattcagctcacattccactggccaagcaaatcccctgactaaggtggaagtctgtggggccaggaagaattcttctcttataggaaggcactgcaactcacatgacagtaagtgcagccatataatcttcttacaggtaagaataattacaggtagtgaataattaggaaaattactataatatacagttcagtccatctgactctaaatttcttgcctaaatgctaaggagatttgttgg

SEQ ID NO: 563000 - DNA, 580 bp, Homo sapiens
tgatgttggagtgggccctggtgggaggtgttcgggtcgtgggagcagatccctcatgaatggcttgggccatcctcttggtgatgagggaacactcactctgagtgttcacaagatctggtggtttaaacgtgtgtggcacctctccccacccccactctttcttgttcctgcttttgccatgggactcgcatgatccctttgccttctgccaggactaaaagctccctggagcctcctcagaagctgagcgatgttggcgccatgcttctggtacagcctgcagaaccatgagccaattcaacctcctttctttataaattacccagcctcaggtatttctttatggcaatacaagaacagcctaatacaccaggggtttgcaggtaacccgggcccctgtccttgaggacacagcagcaagccattggtaaagcaaaactgtccataaggaaggctgctcccatgcagtgttcatttgggcagcccagaaattgagaaatcctcggtccatttcaagtttgggggaaaacttatttttatcatatttgagatgaataataaaagcaaatccagaaaa

SEQ ID NO: 563001 - DNA, 179 bp, Homo sapiens
gagatggagtcttgctctgttacccaggctgcactgcagtgagctgggatcgcgccattgcactccagcctggctgacagagcgagactgtctctaaaaaaaaagactcaagtggaccctacaatgaagcctacacatcccaataggagccccttctgtcgtcttctaacagccgtata

SEQ ID NO: 563002 - DNA, 149 bp, Homo sapiens
acacgcaatctactctatattttgtgttgtttttcagacataatctcactcttttggcccaagctgaggtgggaggatatgctttgagccccagggagtttgaggctgcagtgagacattctactccactactactcccacctggggga

SEQ ID NO: 563003 - DNA, 143 bp, Homo sapiens
ggcgggagaacgataatgcaaagtgctatgttcttgggtgttcacaaggcttcagacccatgggcaaggggcccaggcagttgccacaaggggccagggggaagggagaaaagattaaacgggcccctttttaaagattggga

SEQ ID NO: 563004 - DNA, 133 bp, Homo sapiens
  misc_feature (7)..(7): n is a, c, g, or t
  misc_feature (66)..(66): n is a, c, g, or t
cactatnctactactactcgaatgaagggtgtgtagtctgacatcactatctatgcataaactggncaggatctagggacttgaaaatccatcttaccttgtagctctgggtaagatgacctgagtcccttat

SEQ ID NO: 563005 - DNA, 243 bp, Homo sapiens
cagagttgtgtaacaatcaccacaatcaatttagaacagttcatcaccctcaaaagaaatcacgtacccattaacaataattccccatgtgtcccacatacctagtatctcccccagccccagccctggacaacctctaacctttctgtctctatagatttgcctattctagagatttcatataaatggagtcatattaggttaatgcaaaagtaatcgcgggtttgtgccagatgacggttt

SEQ ID NO: 563006 - DNA, 181 bp, Homo sapiens
  misc_feature (40)..(40): n is a, c, g, or t
ggcgccttgaggactccgacagcacagaggaggcgatggngaaggcctcggcggataacggggatgaggtccaacaggtagtcgggagggatggcggcagcttgtgtgcgagaagtcacagagcacctaggcaaagagagtctcaggggctgtcctcctctgtgctgtccagtgctgtcca

SEQ ID NO: 563007 - DNA, 106 bp, Homo sapiens
attaatcgcatgaaattcaaaaacacacattcttctctaatacccacactagagatcactgaattgggttgaagcaacagaacatggaattctatgggtggggttg

SEQ ID NO: 563008 - DNA, 144 bp, Homo sapiens
atccgtacactgcctcctggctgtataaacaagtcatacatttgaaaagaaaaaaaaatgttgtttacaaaatgttttctcctgctgcagtaaatatttttgcatgatgaaattccaggtcacacttttccaagtgtataatgt

SEQ ID NO: 563009 - DNA, 323 bp, Homo sapiens
acttcatggacaaacaatagcttcttaccatcaaaaatgcaagacttattacacagagtcaaggtaaattttacaaaatctggcattcaatcacaagttgccacaaatgcaggaaaaaaaaaaaacaggaaaagacccatagtgaaaataggattaaaccagaaactgactcagatgataggagacgggacattagaacagtggtaatatctgtagtccatatattttaaaaggtagctagcagacaggacattagaccaatggtcatatctgtagtccatatatttcaaaatgtagctagagcaaagacgggccttattttt

SEQ ID NO: 563010 - DNA, 499 bp, Homo sapiens
aaacaccggaatcttaggaaccaagtcacaactgaagcgacgacaaaatgtcttactggaaaagagggaaattatgtgaaattctgcgtcaggataccgtagactatctcccaggagaaaatggaggtgacacgattacttaatgggtgccaccatattaagaactggtcaggatatggtagattattggtaatgtaattaataggcaggaaaaaaattttaaactgggataattatcggaaaaacaaaatattattaggggaattttggggactccagttggtgaaaaatatttggcataggtcttaataaaccactaaactaaccccaaaatctgatacctataaagatgagaaaaagggaagtatgtataaaagcctgtgggcagtagagagattaagataactaatcttcatccttcttagatggaagtcagtagctactatctaaaatgaaaacccaacaaaaagcagaataactgacttagaaaaatgaagac

SEQ ID NO: 563011 - DNA, 128 bp, Homo sapiens
atggagagaggaggaggtaacagcgtgagtgctagctcaagaggtcagcaaagttgtgcaggcgagccttaacatgtcattggtgcagacccaagcatcgttgatgttctttaataggaacatctggt

SEQ ID NO: 563012 - DNA, 1284 bp, Homo sapiens
  misc_feature (422)..(422): n is a, c, g, or t
cgcgctgagaaagctggaggtggaagccaacaatgcctttgagcagatatcgatgacctgtatgaggacacgtggcgtctcatctgtctacctctgggatctggatcatgaggctttcgctggagtgatcctcataaacgaaggctgcgagagtcgagcagtcaaacgagacgatcacaccggctgctcgcggagttccactccacgtcgggtagaacgtgcaggagaaatccgtcgactcgcaccgaccattacaagttgacctccacggtgatcgctgtgcgctgcgagaccaacagaaatctggctctgggcaccatgaacctcgggaggcgaagccttatccatgagcagatcgcgtaggaatggtattgaaactgtgagttgactgcttcggcccaaactatatgaccagactattnctgggcggcctggtaggacggacattgggcaaacaggaatactcacgaagtacgcctgagagcggagaatcttactttggagagcagaacagaatgcgcatatcgctcgagatggggtcctggaggtggtctcgtacgagcacttttatgtcagattcacaattccatgacacgagaggatacgctctgaaagagatgcacctgggtgcgaagggcttcggagagcagaagagctaggccagattgcgtagaaaccctttcatggtattcaatgcatataccgaggacaagcgcgcggtggcatctgtcggtatagcactgtccttttacttgagaaataagcttccgtggataccctgacttcgccctttcacgacttccgttcccgattgcgccgatccccctgagaaggtggtcaatcgatacacaggcttgccagtccattttgagcccggttaccaggtggctcacatggcgtgcttccccctttgcagcagagtcacagaggcacctgaacttaggcccgaggcgcgttcacttcccagggagctccccggacggcccttgggctatcatttggccccacgagggccttccgagctgctatcataggtaccaatctttcctcaggcaaatttgttcccaacttaaggaatagaaccccgttggttggcgcgttacaaggatcagcccgcacgggggagacgccccccagagagtactcattacagtccagcgtaggtgtcccgcccccatattatgttatataagggggacatatagacaatcacaagatatggaccttggcagaaggccgagctatcaattctccaattccctagacccttaataagggggagaa

SEQ ID NO: 563013 - DNA, 449 bp, Homo sapiens
gggtaatactcaaactaaatgtttgtccccccaccccctaaagtcatatgttgaaattagaaaccgcagggtgcaatgactcacgcccgtaatcccagcagtttgggaggctgaggcaggtggatcacttgaggccaggattcgagaccagcatggccaacatggtgaaacctcatctctactaaaaatatacaaatcagccgggcgtagccgtgggcgcctgtagtcctagctactcaggaggctgaggcaggagaatcgcttgaatctcagaggcggaggttgcagtgagctgagattgcaccactgcactccagcctgagcaacagagcaagcatctatctcacaaaaagagagaaggggagaaagaaaggagaaagaaagaaagagaagaaagaaaaggaaggaaggaaggaaggaagaaagacagagagaaagaaagaaaagaa

SEQ ID NO: 563014 - DNA, 369 bp, Homo sapiens
cacaccctggctactattctttcttccttctaaagatgagctagcaaaactttttataggttgtcccctcttcatgcagctttttagaataaacatttattacattatttcttcaccagaattatatttttggaagtctgcaggaaaaatccgcttgcctaagtgaatttggcacacaaagagtaacaacaaatcaaactttaagctagccaaccaacacacaaaataagcatgcaaagaatagcacatcaagtcttatatggatacaggtattttagcccactccacttataaggtattacaaaatctctatatagtattgaagctatatgttgcagtttaaagttacttttaacaataatacgtata

SEQ ID NO: 563015 - DNA, 225 bp, Homo sapiens
ggcgcaggtgctatgatgcagttaattataaattaggtatagtaagagattaaaacaaaaacaaataatagaatataacaatgtactgtaataaaagttatgcaaatgtgatctctgtactcacctatattggacggtagttgaccacaggtaactgaaaccgcagaaaacaaagccacagataagggggcactactgtattgggctaacttgaggatgaacatg

SEQ ID NO: 563016 - DNA, 1211 bp, Homo sapiens
gtctcctcgaggatcgaggtggactctgaccacagcctgtggctgggaacgggagacagagtgcggctgtgctggctcagtgggaaactgaggctgcacgtggtggtagtcagtgaagatgtcgtggcgaggacgagcaacagtgagcaaactaatctgctcgagtgacctggtctgtgaccaagtatacagcatgtgcgtgggctgaccatctgccaaccagggatacttctggtccttggtggaatgcatctagctcagagtgtgtctggtactgagccttgtgtgacgaaaggtgatgccatgattatggaagaaacatgggaaaatctacaagacaagacaccgcgacatgacgcacaggtctcgcattacacccaaacagcataacggatacacctacacctgtgtatgctcaccttctacccctttgacagagcgaccaggattatatacatcaaggaacggtgacctatgcgaaacaacattgacccttggacgctccaatgagagactggcatccaatcggctaactgtaagctcacactatctgagcgttgactgtaactcagggagaacccaagtaaccaagggacggcaaaggaagcaacgtaacagaccggcagaaccaaccgtaagaagcagcacgctggcccctaacagcactggacaaacccatgcaaacaccacaacaacacaaccatggacacgaacagcctgacaaccacacagcacgacccacgcacaatacaaacatgcacacccgaactagacacggcataggaggacaacacccagcggccacccagacaaggccaacgcccggggagacccaaccacagacatacaagaatacccccagaagccaggacgaacgaatgacccaccgaacgacacagacaaaagaaagaccaatccacccacggacgagacagaccaccgcacacaagaagacggacagcacaagaagacaaacggaaacaagaataacaaacgcccccaacacgacagtgaggcaaccgaaaaaaaagagaaccaaagaacggcaccaaaacggccgaaccgaaaacacggataccacccaaacggaccagcaagcacgcaaaaacaagaaaaggagacgagcgcgaccaagcgcgccagcggaaggaacgacagacgaggcgcaaagaacaaacaaaaaacacgaaaaacaagaaaagaacaaaaga

SEQ ID NO: 563017 - DNA, 732 bp, Homo sapiens
tttagctggactcgccacaaaattcacggggagccaattatgtaaattatcttgctgccaatcctttgagcccttagggattcatctttctgtttccaccgttagggtggcctgactggccattgttattagcccaacatcatccacttaggcctctgttactacaacggacaacggtacataacgttgtagactcactttccacctaatgtcctatccaataggaggctgtaatttgccactcaataggagggcttcaattcaagctgagtgttcccctaattttcacggcgtacacccctatgagcccaacctacgcccaaaatccactttcactagtcaatagttcaatcggcgttaattctaaccttttttcccacaacactttttcggcctatccgggatgccccgacgttatctcggagctaccccgagtgcataccagccacactggaacatcctagtcaatctgtagggtcaattcaatttctctaaacagcagtaataattaataattttcatgaatttgagaagccttcgcttcgaagcggaaaggtcctaatagtagaagaaccctccattaacctggagtgactatatggatgcccgccaccctaccacacattcgaagaacccgtatacatataaatttagacaaaaaaggaagggatcgaacccccccaagctggtttcaagccaaccccatggcctccatgactttttccaaaacca

SEQ ID NO: 563018 - DNA, 396 bp, Homo sapiens
tgtctcccaaaggtcagtctaaggcggcagcacctatatagacatgacgtcaggggattaggaaggatccacagtcaccttccctaaggcttactgacttgtactataaggtatataatttaggtatacgcaccctaagtaacatctgattgaaggcgtgaacttgcttgagatccactctcagacacaggtttagaggggaaacgcaaaagaatactgggagcttcaaggaggacgaacagggtcacaggacaaggggaagctgggcctatagcagtccagcatggttaggggccaacagttggcttctcaaaaggtaatgggttaacacagtcgtcctaattacacctcctgagatgccgaatgtcctctcagctaagtacacatttctattgt

SEQ ID NO: 563019 - DNA, 924 bp, Homo sapiens
tcctttggtttttggaagtgtgggggttgggtttggtttttggagtcttttttttaaagtgaaatttatggaggaaaaatatgtgaaggaccttcactctaagaatgtatatttttcttaaaaagtaactcctagtaggggtaccactgaatctgtacagagccgtaaaaacgtgaagtttcgtgcctcctgattgttatttgggtgagtttggttcccttgtgaattttctcattcttatacagttacttttcccttgcattacaaacaagcattataaaagggcaaccaaacgtgcacatttgatttcacaaattattaacaacagctccttttaacaaacgttttggccaaccattaatgtggtcgatctcattagctctatttatccggggaagtgtatagtattggaaaccagaatttgggtaccttgcacacatcatcttgtaagctggttgggttttcaaaaatactggtgagataattacccagggtacgaatggaccttgtaatggtaactggctctggggcaatattctctggtacatattaagcgacaccagatggatccccatggtcggacctcggtcgggtacataagggcaacatattttggtatgcaaggcagtttccaactcaaaagtcggatctgacctctgtaaaatgtgactgtcgatgcaaacccttacaaactgacgtgggttttcacaacactttcacagctaggcacaggaacctacttgaaagctgttcctgtcacaaactggtctggttccccgtggccactttccccgtcacaggaagttacctatttaccaattccacgacttgttcacaaggaaaaactcacgcagggtccacacacgtccctacataggctcaattctctacacagggtttcaaagggcaatgcacaggaatact

SEQ ID NO: 563020 - DNA, 111 bp, Homo sapiens
ggctatcacattatctataaacctaaaaactccaggacagaagaaaaggatgatatggggaaatttgcccataaatgccggttctggttcttagtttagcccatttcccat

SEQ ID NO: 563021 - DNA, 662 bp, Homo sapiens
  misc_feature (60)..(60): n is a, c, g, or t
  misc_feature (108)..(108): n is a, c, g, or t
  misc_feature (190)..(190): n is a, c, g, or t
  misc_feature (199)..(199): n is a, c, g, or t
  misc_feature (214)..(214): n is a, c, g, or t
  misc_feature (216)..(216): n is a, c, g, or t
  misc_feature (232)..(233): n is a, c, g, or t
  misc_feature (240)..(241): n is a, c, g, or t
  misc_feature (243)..(244): n is a, c, g, or t
  misc_feature (249)..(249): n is a, c, g, or t
  misc_feature (258)..(258): n is a, c, g, or t
  misc_feature (264)..(264): n is a, c, g, or t
  misc_feature (268)..(268): n is a, c, g, or t
  misc_feature (272)..(273): n is a, c, g, or t
  misc_feature (280)..(280): n is a, c, g, or t
  misc_feature (283)..(283): n is a, c, g, or t
  misc_feature (290)..(290): n is a, c, g, or t
  misc_feature (293)..(293): n is a, c, g, or t
  misc_feature (302)..(302): n is a, c, g, or t
  misc_feature (309)..(310): n is a, c, g, or t
  misc_feature (314)..(314): n is a, c, g, or t
  misc_feature (323)..(323): n is a, c, g, or t
  misc_feature (328)..(329): n is a, c, g, or t
  misc_feature (339)..(339): n is a, c, g, or t
  misc_feature (344)..(344): n is a, c, g, or t
  misc_feature (350)..(350): n is a, c, g, or t
  misc_feature (353)..(353): n is a, c, g, or t
  misc_feature (355)..(355): n is a, c, g, or t
  misc_feature (372)..(372): n is a, c, g, or t
  misc_feature (378)..(378): n is a, c, g, or t
  misc_feature (387)..(387): n is a, c, g, or t
  misc_feature (389)..(389): n is a, c, g, or t
  misc_feature (391)..(391): n is a, c, g, or t
  misc_feature (395)..(395): n is a, c, g, or t
  misc_feature (402)..(402): n is a, c, g, or t
  misc_feature (460)..(460): n is a, c, g, or t
  misc_feature (488)..(488): n is a, c, g, or t
  misc_feature (508)..(508): n is a, c, g, or t
  misc_feature (520)..(524): n is a, c, g, or t
  misc_feature (585)..(585): n is a, c, g, or t
  misc_feature (626)..(626): n is a, c, g, or t
cagaggacccacctgggccaaggactccaaagccgcggggacaccgggaagtgcagcggnccaggcaggctgggtgggagggaggagggccgagacaggagcagcccncccagcagaaatacaatccgagctacaaagcatgggaaaaagagactcttttaggatcagatctgtgagcacgttggcgagnaaaaacaantcaaacaaaaaaaananccttgtgtctctctgnncaaaaanncnnacccnaaccggaanacagcnccancacnnccccaanaanacaaaancanaccaaacanccccccnncatncattgtggncgganntggatatatnctgtncaggancancncatatggaagtggactnaacccnatgtagaancncncacncactgancattgttattcattttgtaaaatactagtctttattttcattttttgtaaaatttaancatcgtatgcgcataaagaaaaaggaancaagaattaggggaaaatancattttccaaannnnncccccaaattgtcctgtgtctatgtatctatatctgttttgtatttttttctggttccaanccagatttcctgtgattctatactaataatttttgatatanccctttgctttttataatgagtgcgatatatgttgt

SEQ ID NO: 563022 - DNA, 421 bp, Homo sapiens
  misc_feature (82)..(82): n is a, c, g, or t
  misc_feature (87)..(88): n is a, c, g, or t
  misc_feature (98)..(98): n is a, c, g, or t
  misc_feature (103)..(103): n is a, c, g, or t
  misc_feature (109)..(109): n is a, c, g, or t
  misc_feature (112)..(112): n is a, c, g, or t
  misc_feature (114)..(114): n is a, c, g, or t
  misc_feature (131)..(131): n is a, c, g, or t
  misc_feature (137)..(137): n is a, c, g, or t
  misc_feature (146)..(146): n is a, c, g, or t
  misc_feature (148)..(148): n is a, c, g, or t
  misc_feature (150)..(150): n is a, c, g, or t
  misc_feature (154)..(154): n is a, c, g, or t
  misc_feature (161)..(161): n is a, c, g, or t
  misc_feature (219)..(219): n is a, c, g, or t
  misc_feature (247)..(247): n is a, c, g, or t
  misc_feature (267)..(267): n is a, c, g, or t
  misc_feature (279)..(283): n is a, c, g, or t
  misc_feature (344)..(344): n is a, c, g, or t
  misc_feature (385)..(385): n is a, c, g, or t
ccccgggctgcaggaattcggcacgaggagaattttaataaaccagaaggaaactaatgccccttccaggatttattgtggncgganntggatatatnctgtncaggancancncatatggaagtggactnaacccnatgtagaancncncacncactgancattgttattcattttgtaaaatactagtctttattttcattttttgtaaaatttaancatcgtatgcgcataaagaaaaaggaancaagaattaggggaaaatancattttccaaannnnncccccaaattgtcctgtgtctatgtatctatatctgttttgtatttttttctggttccaanccagatttcctgtgattctatactaataatttttgatatanccctttgctttttataatgagtgcgatatatgttgt

SEQ ID NO: 563023 - DNA, 306 bp, Homo sapiens
cgccgagcgagctggaagaccctcgcagtgagcaggccggtgcctgtcaccagcgaatggctagattgtcaccaccgcacctggctttcctactggctgtacagcctcacaccacaactctctctcttcttcacctgcactctctgcttctaaaagaccattggtacacacactactcagaagacatgcatatggggaatcaacccgatgcttcagagacctacttacatcttcatgggatagataaaacaaacacagcttaaactgctggcatccagtgactttaagtagaaggatccaacacta

SEQ ID NO: 563024 - DNA, 196 bp, Homo sapiens
gcagttgttctattggatatatatctaaaggatataactaatatgagtatgttgaagagatatctgtactactatgttcattgcagcattattcacaatagctaagatatgaaatcaacctaagtgttttcattcattgatggatgaatggtgaaagaaaatgtggcatacatacacaatagaacaactacaaccg

SEQ ID NO: 563025 - DNA, 1001 bp, Homo sapiens
  misc_feature (371)..(371): n is a, c, g, or t
  misc_feature (500)..(500): n is a, c, g, or t
  misc_feature (587)..(587): n is a, c, g, or t
  misc_feature (619)..(619): n is a, c, g, or t
  misc_feature (812)..(812): n is a, c, g, or t
  misc_feature (973)..(973): n is a, c, g, or t
tggaattccaatggttttttttttttttttccaattccaaaaaattaaaacccatccccaacccccgggtaaaggggttggccctgcccaatgggggggatactttcgggacctgattacacttttctaaatcttaaaatacgaattttttcttttcacaaaccggtaggaagtcaaatttctcaaaatggttaagtgtaactacgcatctttttttgttgttcagagaacaggatgttctctgtccaatggccacttttccccattttaattataaccctaagcgatctcctctttattataaacacatgcttcttatttttttttccacactataaaatgtgtgctctctttgtgtgtgagacagagantctctcatttctctgataatttcttcgcctctttgagtcagacaccacaccccccactctttgttctttcattctgtcacccacacacactttctctgtgtctccttcgactcttttgacacactccantctctgtctctgtgtcgatgagagagaagacttttgtttttctcacacaccagagtgtgtgtggcttctctttcacacccagacacncaaaaatttaaagcttttcttccgcagtgtgntttccacaccgtgtcttctcgcgtgttttaatgagtgggcgtatacaccgcgggtacaaacaacagagttgccgcttttcatccatttctctaatatatatatacgcgcgggagacacccctcgtcggttcctcaaataacttcttctcttttacgtatttttccctccacagcaatctttgcgtcctatctnggctgtttcttgcgcaccactgtgtctttcttctctctcccgagcaacacctgttgttctttcttcttctccggggacaacactcttctcctcccgcacagggacagagtcttcctcggcaacatctttctcgctcaattatggaagaaccggcctttttntcgggtggctaccccaatcttcgtcgcg

SEQ ID NO: 563026 - DNA, 359 bp, Homo sapiens
  misc_feature (116)..(116): n is a, c, g, or t
  misc_feature (120)..(120): n is a, c, g, or t
  misc_feature (140)..(140): n is a, c, g, or t
  misc_feature (142)..(142): n is a, c, g, or t
  misc_feature (146)..(146): n is a, c, g, or t
  misc_feature (152)..(152): n is a, c, g, or t
  misc_feature (168)..(168): n is a, c, g, or t
  misc_feature (177)..(177): n is a, c, g, or t
  misc_feature (236)..(236): n is a, c, g, or t
  misc_feature (238)..(238): n is a, c, g, or t
  misc_feature (240)..(241): n is a, c, g, or t
  misc_feature (243)..(243): n is a, c, g, or t
  misc_feature (247)..(248): n is a, c, g, or t
  misc_feature (256)..(256): n is a, c, g, or t
  misc_feature (263)..(263): n is a, c, g, or t
  misc_feature (269)..(269): n is a, c, g, or t
  misc_feature (284)..(284): n is a, c, g, or t
  misc_feature (301)..(301): n is a, c, g, or t
  misc_feature (307)..(307): n is a, c, g, or t
  misc_feature (311)..(311): n is a, c, g, or t
  misc_feature (326)..(326): n is a, c, g, or t
  misc_feature (329)..(329): n is a, c, g, or t
  misc_feature (335)..(335): n is a, c, g, or t
  misc_feature (353)..(354): n is a, c, g, or t
cgctcgctcgctcgctcgctcgccctcagcgcatgggccccgcgccgggccccggggcctcgggccgccgggacgccggggtcccataggccggggcgtgggcggggcggccagcntgangaagctctgcaccccctacnancacnagggcnggcggcggcggctgcnccgagggangcggccctaggcggtggcgatggggaccgcaaggatagcacccggcctggcgctcctgntntnntntctnntttttttnttttttnttttangcgctggtggtatgnagattacgttattattnaatatnatanatatttttttttttnacntttctnatgcccatttctaaaaanngttca

SEQ ID NO: 563027 - DNA, 252 bp, Homo sapiens
tatctctagatcgacaggctccatctaaacgatatttggagggtcagcactggagctcacgtgtcgacggaacttgtacagtggaggcatgcacctgcagtggtgaatacacgtctgacctggatccatgcatacatgattgggtcatgatcacggatctcatatattcaaggagcatgcatagaaaggtatgcatggccgtggtgaatacacgtcgagatggaggcatgcatgcatgctcgggtcctggac

SEQ ID NO: 563028 - DNA, 591 bp, Homo sapiens
gacggctaggtaggaggcgggggttaatcggccgagggggaacccaggaatattacagctagccagcgatctcagtcagagagaaagtggttggagggtggtcaagatggctgataagcagttcagcccactgcttccacgttagtagaaccagagacagcagtaacaggaacagagtcacagcgtcaagagtacattatccaagagagaatgctggaactcaacagaggcaaggtgatccaggggaacaccaaaagtggggaaggaggaggagaggcagcctcgtctggctgggttcggctgggcatcaggaggtgacaatatcaccaaatattaagggaagaggtgagtaggtgtaggggccagaccctacgagggatctgttgaggttattatcgtacacacgcaaattgatggtgggaagacatgggagattgtacgcaataagagacacaagtacaaaagagattaaagagacaagacatgggggcaccagggagggaggaacaaaccgtagccaagccagagaacgatagacgaccagatagcatccctgaatgccagactggtgctgtatatatacttgggaca

SEQ ID NO: 563029 - DNA, 509 bp, Homo sapiens
  misc_feature (2)..(3): n is a, c, g, or t
  misc_feature (9)..(9): n is a, c, g, or t
  misc_feature (11)..(11): n is a, c, g, or t
  misc_feature (16)..(16): n is a, c, g, or t
  misc_feature (267)..(267): n is a, c, g, or t
  misc_feature (402)..(402): n is a, c, g, or t
  misc_feature (435)..(435): n is a, c, g, or t
  misc_feature (456)..(456): n is a, c, g, or t
  misc_feature (461)..(461): n is a, c, g, or t
  misc_feature (498)..(498): n is a, c, g, or t
tnncaccancncaccnccaccaggactgtgaccttgctgtagaggtgttgtgatcatttggagtaaacaagtcactctggccttttgagttgttaggggtttttcattcctttctcatcttcatgagtttgtctcattttgatctttgaggctgctgacctttagatgaggttttcgtggggactttttggttgatgttgttgttgctttctgtttttctttcgacagtcaggtacctcttctgtagggctgctgtggtttgctggngattcacttcaagccctatttatctgggtccctcccacacctgaagatgtcaccagagggtgctggagaacagcaaagatgggaccccactccttcctctgggatctctgtccttgaggggcacccacctgatgncagtagaaatgctcctgtattagggtgtctggncgacccactggggtggttcanccagntggaggggcacaggatccaggacttggtttaatgaanactttggattg

SEQ ID NO: 563030 - DNA, 333 bp, Homo sapiens
  misc_feature (306)..(307): n is a, c, g, or t
gctattcagaaaagaaagtgcagggctgggcgcggtggttcacgcctgtaatcccagcactttgggaggcctaggcgagcagatcatctgaggtcgggagttcgagaccagcctgaccaacatggagaaaccccgtctctcctaaaaacacaaaattagccgggcgtggtggcttttgcctgtaatcccagctattcgggaggctgaggcaagagaatcgcttgaaccctggaggcggaggctgcggtgagccgaggttgcggcattgcactccagcctgggtgacaagagcgaaactctgtctcnntaaaaatgagatctgaaacccaaaaa

SEQ ID NO: 563031 - DNA, 1342 bp, Homo sapiens
ggttcgcattcggctgccgagtcgcggtcgtatcctgtgcggcttaatgtggctgattcttcgcccgaggtatgcgggggtcacgtgtcgtgccgtctgctcctcagctcgccgctgatagccgagttacgtgagctagtcgatagggggctggtagtgccttcattgctatggtgggtacggtgggtcggatgggtagagcgagagcattggtcggagcgggtaggaggaggggggacggagtgacagccaagtgccgttgagggggaggagtgtgggcgagcactgttttgagatggccctgaacgcagagaatacccgcgagttagcccgggagcgcgtggacgcgtccgtgtgacgaaacaggggagcgggcagtcccagtgggctggcgccagagcactgcggattggtgccactatgtgaccgtacggtgcaacctggggcggcgtggggtagcatccaaggagattgttgccgcaaggctttcactggtcgatgcgaaggtcgaagttggcctgtttttcttcaaaggtttacacgcggggggttacttctgggaggcgtgaagagtttgggcttgggtggaaagatagttgaagcctgggtagtcgtataagccgaaatcggactgcctcctcagcgagtgactcgtccggtggatataagcacttcctctctggcggctccgttcacaatattttgccatagggcaagacctgtacggcagctaggccgtcccacggcgaacgtgcgctaggtctgcgtgccttccaagggggccggggggacaagggtcggtgcgggatccttggggaccagtctacaccggcttgggggaagcgttggcaccggaagataaccttgacatgacccggagcatgcttgtggcacacttgggtagccaggacacagcaaacaggccagagtgcatgagcgcaaggggccaagcaaacccgaacatccactctgaaaccgcggccactcgggccgcgcgcccttggcacagaccacccccgcccacacttgggcacgcaccatcgagcactgaaaaccattctacccccacaacccgtcatacgacagcaaaacaataagcgatcagaccaacaagcaacgagagacaacgaggagggaaaaaagtagaaggaacgggttaagtaaaagagaggagacgctcgggaacaggaggcagagggggaagaaggtgtaagggaaggaacgcaggagagaatataggaaaggtaggtgagcggagacagaagagagaaggggagagcgatagagaaaagaaaataacaaatagaagaagataggggacgagaggaatctcgggaaggaa

SEQ ID NO: 563032 - DNA, 136 bp, Homo sapiens
ctgttgaccgcgctgtggctgcgcctgttcgaccaggaggccacagcctgccgccgggcggcggcgcgctggggcagttggccagcatcgacccgcgcggcctcgatccgcggctggcgaagacgcgcatcgtcat

SEQ ID NO: 563033 - DNA, 392 bp, Homo sapiens
  misc_feature (84)..(84): n is a, c, g, or t
  misc_feature (139)..(139): n is a, c, g, or t
  misc_feature (169)..(169): n is a, c, g, or t
cttagaggatcttaccgcgtacagtgcgcggaggggatattgggtgcgtcaagattcaacttcacccgtaacccaccgccatgnccgaggaaggcatgctgctggaggtgtaatgacgttaatactgcttacaagaggnctgaagactgcctcatccacgatggcctanacgtggaattcgcgaagctgcaaagccttagacaagcgccaagcccatcttggtgtgcttgcttccaaactgtgatgagcctatgtatgtcaagtgggtggaggccctttgtgctgaacaccaaatcaacctaattaaggttgatgacaacaagaaactaggagaatgggtaggccttggtaaaattgacagagaggggaaaccccgtaaagtggttggttgc

SEQ ID NO: 563034 - DNA, 153 bp, Homo sapiens
ccatgatgaggctgcatctccccccagaaccaaacatattccatgcatgcctcctcagactctagaatcccccaaccattccctttgcagcttccatggggcccagcaactgtccatcctacctccttgcagccatatggaggcaatatggga

SEQ ID NO: 563035 - DNA, 457 bp, Homo sapiens
gcatctcccatgaggagctgctctcctgaccacgggcaatatgttgaatctttccggccgctcgtcaaccattccaggcaacaccagtgcacgcaggactccatgcaccagaagctgccaggcataataggcagatacccgcattgctgcttaacaaaccaaataccggccagatgccttcgctcacgcctgtactcctagcacttcgggcggccgaggcgggagcattacttgccgcctcggacctcagacccagcctgggcaacatagcaacatcccctctctcccaaaaactcacaaagttagctgaacaaggcggcatgcacatgctactccacaccgctgaagtgggaacatcccctaagtccgagagcccgcggcttcagtcgacatacggctgagacactgctctcagcctggatgacagagcgagaccctgtctcaaacaacagaaaac

SEQ ID NO: 563036 - DNA, 171 bp, Homo sapiens
tcttgatgtcctgtgtcggcaggtaggtcagcacccgctcgttcttcttgccgcccaggatgaagcggttgacgtagaccggctcggacagcttgttgatcgggctgcgatcgtagtcgctgctcagctcccagctgccacggcggccgccggcgcgggtactggctgaag

SEQ ID NO: 563037 - DNA, 329 bp, Homo sapiens
  misc_feature (116)..(116): n is a, c, g, or t
  misc_feature (268)..(268): n is a, c, g, or t
ggccgccattttgatggcaggaagagtccggttctgggacagctggagacagtggtggtgactgaaataactttaccaaaggaaagctattttgcgaactaccttctccagcgganatggccaatgtgagtaaattatctcttaagaatcagcatagtaaactcgtttgggaatgttaggaatgaaagaacgggtttaattatgatggcattgggtggtatagtgttagatataatgtatcaaaaatgtcaagggaagcaagtggtgngaaattaatgtaatggctttgaagatggtagcattctttggcactgcaaattacacttatt

SEQ ID NO: 563038 - DNA, 405 bp, Homo sapiens
ctccctgtgattgagaataaagtgtgcaatcgctatgagtttctgaatggaagagtccaatccaccgaactctgtgctgggcatttggccggaggcactgacagttgccagggtgacagtggagggcctctggtttgcttcgagaaggacaaatacattttacaaggagtcacttcttggggtcttggctgtgcacgccccaataagcctggtgtctatgttcgtgtttcaaggtttgtttacttggattgatggagtgatgaaaaatgattaatttgtgcgggagacatattgacgcactgacttctcttgatgctaggccgctgggtagggatttatactgcttggaaatacctggcatttatttaatactactgacactgtacatcgcttcccagttacgcc

SEQ ID NO: 563039 - DNA, 814 bp, Homo sapiens
agcgggggttggggtcacatggcggcgactgcggcaaagcgagagcctcggagacgccgctgccgccagcacatccgccatatcggagccgacactgggggcagtcctggagaccccgaactctctcgatgagtcggagaagtcccgttgtatcagagtaagatggacggtagcttatgattgtgattgtggtgagctggagccaactgatcactaagcaaaagacatcttctgttaaccaacagccgccagggcttcctgttgaccatcccatatatagcaacaaaaggaaaacaacgcagcagaaccggaaatagtgcttaccagcaccttagcatgatgcttgctcaaggaacagatccaaccacgtgcatgtaatcatgcacctgatgacggagaactgttcaatagaaagcctgtcgatgtgacactatatatacaacataacggttaacatgtccaactcgttaagccacaggatacactctggagtggacaagagatgatcacttctccagtatccagataatgacggtttcatagattaacccgatacaacatgtcatggcaggacgttaggctggcacccagttagacttggacactactgacagtacctggccaaacgccttattacaaaacgtccgtcccactgacttgcacattacgacagcgttagaccgaaggccttttacaacatcctcaacagggggcacacgttccgaaccagggcaccggttaagggacaattaacgacaccatgacaccaatccacggacaccaccaatctcgcccaggatggcaacgcactaaa

SEQ ID NO: 563040 - DNA, 155 bp, Homo sapiens
caacacaaaaacaattaattaccaggcatggctgatggcatgagcctatccagctacttgagaggctggggtgggaggattgattagagccaggaggcaaggctgcagatgagccatgattgtgctactgcactccagcctgacttacaagagtg

SEQ ID NO: 563041 - DNA, 515 bp, Homo sapiens
tttagtccgtggagctgatgtgagagcgagtagtccaggcaattcaaaagcccagcccgggagtctgtccaccatggcaacgcgccagcgtctccatgtgtcgttgggctttccaaagtctgcggctgactggcctggggctgggccgggctcgggggccacaggcagtgtgcgacgaggccgcatctctgcttcatcacatgggcaggtgggctggaggcctagatgcggctggacgaggtgctgcccgagctgatggggagcctggcactgtctgagttgctcttcagaggggaggggccaccccgggcctgcagccgcatggaccagtaccagatgaagatgaggaagccttggaaggaggtgatgatgctgaaaaggtagaggacgacaagctggaaggtgccagaagcaaaggagaagaagatcaaggcccagggcagggccaggacccaggctgaggcccagcagtgtcagcacatgtgaccccttttgggtgtgggggcgcacccggg

SEQ ID NO: 563042 - DNA, 1336 bp, Homo sapiens
cagcctctggggcgcataccaacctatccagcctagcgacctagcggcagaaaaaaaataactatatatttctatgccccatacatacctatgaggcgagcaaaaaaattaaatatttaaccatagagggaaatacgtagcacataccaggctaggtacagtgtaggcaaccagatacggtagccaagtaactagggagtgtagatacacgtagatagaacataggcatactgaccccaccggcacctaaccacggtggcacatgctgacctagcagctaggacctgcatactactagtagtaactaacaatagaacgccaccaggtaggcaacataatagtaacctacgtagcacatacctaggtaggatactaagcaacctagggcacccataggcactactagtatactgctacacggtacctatatacaggacccacgatactatacaagacaccacgcaacaacgctatatggtaatacatagggtaccaggtactagggcgcgcgacgcgtcaaacccaacctagaggcccacaaagggacccaccctaaccacccacgcacgcgtgccacgcctgaaagccctagcgctacagcactacacctaggtacactagtggcactagctagcgctaaccgcggcacacgggcaagtgccacgcaagccacgccgtaggtagcaacttaggctcttaagcccaaacggacgccttataccaccagaggttcttaagacaccacccccaacattaccacacctaagacggtcgccccagcagcagagcagagctaatccactgcgaggcctcaccctttaggccgcacaactaggccggcggcccaaacattaccataaccccttatacaaataaaccaaccgaccaacaaaccgaacgtaccccaccggcaagcacaaacaaacgggaaacattctaaaccccgccccttttaaggaaattaaacgtggcgccaaatcttaccccaacatttggtgaaacactttaacgccccgtattacccaaggctacgcgtatggcgctagcccccttattacgcaccccaccacaaaaacgggtagctacctaaggagaccaaccccggaacaggggccaccagcaggccccccccaaaaacgaatacttagccccccaaaccccccataacaccaaccccggaatatcacccaatcacccaaggagataaacgagcagtatacaagcccaacagccacacaaattaaaccgacctacggccaacgtaaggcaagacaacagcacccaaccacacctcacagcgccccagctcatacgagaacaccccgcataacagcaa

SEQ ID NO: 563043 - DNA, 544 bp, Homo sapiens
cacgattgcacgtcctgtgtgcgatactccctgcttcctctcagccccacctgagagcgggacccttagctagccatgctctgacagtctcagttgcacacacgagccagcagaggggttttgtgccacttctggatgctagggttagattgggagatacagcagtgaagctgaaatgaaaaatgtgttgctgtagttcgttattagaccccctctttccattggtttaattaggaatgggggaccccgaggctcacttgttcaggctcccttctggcctagaagttaggaagtccagagctctacagtttgaaaaccggtttttttatgaaccaagtagaacaagatatttgaaatcgaaactatttcaaaaattgagaatttctgaccactttaaaaaaccacagaaaattcacccgagtgcactgagcacgccagaaatcagggtggctccaagagctggtcccaccttaaggagacgcgctgctgatgctgtcgtactgcctagcgccttggtctacaggggacgcgccaacgtgggctt

SEQ ID NO: 563044 - DNA, 131 bp, Homo sapiens
aggcaggtgatagtagttgttcacagctgtacagctcaacgttgtgttgatccagaaatttttgttcagcatatctgcatactgattaattgctcgcaggaagactttattttgcaccatgttcatgatca

SEQ ID NO: 563045 - DNA, 1693 bp, Homo sapiens
tggggacttcttgtgcccctttattacctgacccattatttgaaagggataaacgcggaaggagtgtgggtgtggccccaattgccgggccggccatgtgctttaggggctttgtaagggtaagtgagaaaatctcgcccaggataggtggccgatctcatctcttcgggctttgatctctctccaccctgtgggtgagaagggctcttgtgcgcgcggtgtgtataaacccccacacacacatgtgggtgaccacacacacatctctctgcgggagaagagaagtagatctacatgtgtctcccgcacagacggtgtgcgtatctttcacccacatatttctcgcgagcttctctctcccagttgtgtggcgtggcgcgccctctctcttctctgtgtgcgcctgtgtgcgcacagtgcgccgccgcttctcaacgcagagagagagagagtgcgagcgctatcttctcgcgcgcagacaagtgtcgcccccggagtgtgtttcatcgcgcgctgctctgcgcccgacggttgttgggcagcgcgcaccctgctgttgtgatacacacagcgctgtggaccatatcccacgcgctgatgtgccctgccgcaatcaggagacacaccaatgatgtgctccaccacaacaccacgccgctgttgcgcctctccaccacgatatcctacacgacgagctccgccgccgcgatgatctaacgacgtgtttgtaccaccctgctgcttgcggcgaacaaaaacaacgtcggtctctcacgcaggcgcctctcatcctcattcttctatgctacttgctagtagtagcctgctccactaataacactacttcatccttgctgggccgacaatacatcatatagcgacgccccccacaaataattgttggcccacaaataaatcaatacaaatccattatcattagcacgttactacacataacatgcctccccatataaaaatctcccccccatatgattcaaccaaccaccccctccataatcaacaccacagaggtagggagagcgaaccccccctcctctatctaacaaacggcgcgccctctcacttccccttaattatcaatgtttagaaaacaccccaccttcagccggcaggcccacccacctaataatgcaccccccaaatggatgtctgctgctacaaacacttctagacctcacgactacttaccacaccacccaacaactcctcccacaccaatatatatactaccggccgcccattccttcctccatccttatccatactactacactcaatcacacggacgccccccccccattaaccttaacttaactacatccaccaacacaacacataacccgactatttcatacaaccgcccgaaccaattatctatatatttccgctcactcacccaccgtcagactaacgcatgcgcggccccaccacacacactgcttggtcataccacctccatcccgattgattagtactaacacagctccggcacataacatatatcttcacacgccacacagtaggctgcgctcccccccaccccctacactaacataacatcaacccctccctactcccactgttgtgtctgtctcccacacaacaactatacgatgcccggccacccatcctacctgacgtaaaatataactacccggcggacgaatacaac

SEQ ID NO: 563046 - DNA, 162 bp, Homo sapiens
agtgcagtggggaaacagagatgagaggatagtacactgcagtcgtgcgaacatccgtaatctcaagtgatctcctgtctcaggcgcccaagtagtgattaggagcatgcgctgacgatgcccagaatccagaactttgtctatcactctccccaaccacag

SEQ ID NO: 563047 - DNA, 551 bp, Homo sapiens
aggtatggttggctcaggcccagctctgcaccttgattgtggaagctgagcataaaccaactttaaaaaatcagttgtttgtgcttggtttttaaatggggacaggatcggtatagtggctgacgcctgtaatcccaacactttgggaagtcaaaatgggtggatcacttgagcccaggagtttgagaccagcctgggcaacacggtgaaaccgcatctctacaaaaagtacaaaacagccaggcaaggtggcgcacacctgtagccccagttactcaagggtcttgaggtggaagatccctcaagcccaagaggtcaaggctgcagtgagtcatgatcacgccatgccatggcactccagcctgggcgacagagctagagtttgtctcaaaaaaaaaaaaaacaaaacaaaacacaaaaaacgtgttccataaaccctcttttaatatctagaactgctggggaaagtgaaaactcctggaggctaactttatttcctctaggggtttatattttatagcagtaagtagtatatattaattcacatttct

SEQ ID NO: 563048 - DNA, 199 bp, Homo sapiens
ttatcaaaaataatagttttaactggcttctagtcttctgttgcattactaatattctctcgagttgtattacagaaagtggagtattgaaatatcctagctatattgtatggctctcttagtagttcattcagtccggttagcatttgcttcatatagctgaaaccccaatatgagacgcacacacataatttatttg

SEQ ID NO: 563049 - DNA, 211 bp, Homo sapiens
gtatccgtatgcttgcaaagtctgacactcctggccacactattgtcctggggaccaggcatccctggattactgactccttgctaatactgggtctgagccctctggaacctttgggaccagtgaatcccagtctcaataatacctaatgagttcatgagccacattcttcttagaagtcagctctgtcttcccagaatttttatcttca

SEQ ID NO: 563050 - DNA, 181 bp, Homo sapiens
gaccatttcctttctgggagtcatgcggttttataaggctggttaatgtaaagccaagaagattaaaggaattgtccttttgacaacaaaattaaggtttcccggaataccttcaggaaaaatcggttcttcgaagaatcctaataggacaattgtgagagaaacaaatcccaattattgt

SEQ ID NO: 563051 - DNA, 186 bp, Homo sapiens
tgcttagaatttggggggaaatttagaaatattattggccggattattgggaatttgttataatgaatgaaaccttttgtcctattagattcatattttctttttatacctttgataaagtaaggcatggttgtggtttatttggtttatttttgttcccccagttaaataaatcataaaacttta

SEQ ID NO: 563052 - DNA, 1192 bp, Homo sapiens
ttgtctgtttcgttcttctgcgcggtcattgttgttcttgttcctctcacacgggtggtgtgtgtctctcctcctcttgtggatgttgattcgcggtcttgtacacctctgctgttctgtggttcttgttcgtctacttacttctttaccgatgatgtgttcccctttgttttgctttcgcctgtggcgtgtcctgtctttctccagggtggttttcacccattgtgggttcgtctggctcgctggtttcggtgtgtccccacgggtggatctctgggtggtgctctatctccgtgttattggggttatcctgtgttcccggtccagtgtatctcggtttgttatactctcgtgtcgatatgtctccctctatggctttcgatctaagtctcttttctcgggggacctattgtgcggtctttcatatgctcctatgaattgttgtctgttcaagggatgtttcgttcgtggctacgtttgctggtgactagcatattttgtacctcatcctattggaagcagctggcctcactggctcaggtgattatcctgaaccatccaggccttataagcgctcggctatgcccctgtattggattgccacacggctcacattgcatgcaagtttgctgtagctgtaaggttaaagattgatcgccgttctggtataatagctggtaagtatggccctataattcttgaagtctggtgatgctgccattgttgatatggttcctggcaagccctatgtgtgttgtagagctttctcagtactatccacctttgggtcgctttgctgttcgtgatatgtagacagacagttgcggtgggtgtctatcttatagcatgtggacaagaaggctgctggtagctggctaaggtcaccaagtctgcccagataagctcagaaggctaaatgatatattatccctaatacctgccaccccactcttaaatcagtggtggaatgaacggtatgcagaactgtttgttatcaaattaggaccatttaagtttagtagtaaagactggttaatgataacaatgcatcgtaaaccttcagaatggaaaggagaatgtttttgatggtatctctatttatggatatattatattatgcgagtggacaagtatattaaagatgaggtcgcaaattatattgcagcaaattattacagatgcaaatgtgaca

SEQ ID NO: 563053 - DNA, 413 bp, Homo sapiens
cagctctgattgtaggtcaccccttttcctctgtggaagggcagtcacattgtgatctttcaaaacattggctaaggcggtgatgataaccaaggctgatatgttaccagcacacagcagatctcagggctgagagtgaggcatgaatcttccaagtaagtggctccatatgggcctctttgaggtctttaaagtcaacagtctcttcatcatggaattcaacttgacccctgttccaccgacatcagaactggtgaggtgacagggatttagagcgacttgtcaaagggatgggaaatgcatttgctcaaatgataatgacattcacaatagtcaagattcgttgagctaggatgcatgctaagaactttacaagcatttctattaaaatctcaacactgctcaatgaaaaa

SEQ ID NO: 563054 - DNA, 395 bp, Homo sapiens
gtactataagaggaaagacggagaaatcattctcgggacatagccagtctcaacactataaggcccaggattgcaactatcctttatacacaacactcgcctattatgcaaaagaacaccaaaaacttacagtaaatgatgaagacagtttatacttgccaatatatcaccctcacggctggcagaggtagcactagcttagtacacaatataaactggcactaaaaaaaaaacctggttcattattattttacgtctacgataactgtcaaataaagcgccaatttgcaacctaccaagcaacaaagtagactccaaaattccccttctgtcactctggcagaattcagcacagtgtcactttactaccttttcacttttcttattatattttt

SEQ ID NO: 563055 - DNA, 418 bp, Homo sapiens
  misc_feature (3)..(3): n is a, c, g, or t
  misc_feature (83)..(84): n is a, c, g, or t
  misc_feature (99)..(100): n is a, c, g, or t
  misc_feature (105)..(105): n is a, c, g, or t
  misc_feature (147)..(147): n is a, c, g, or t
  misc_feature (154)..(154): n is a, c, g, or t
  misc_feature (157)..(157): n is a, c, g, or t
  misc_feature (186)..(186): n is a, c, g, or t
  misc_feature (188)..(188): n is a, c, g, or t
  misc_feature (190)..(191): n is a, c, g, or t
  misc_feature (212)..(212): n is a, c, g, or t
  misc_feature (223)..(223): n is a, c, g, or t
  misc_feature (250)..(250): n is a, c, g, or t
  misc_feature (279)..(279): n is a, c, g, or t
  misc_feature (293)..(293): n is a, c, g, or t
  misc_feature (299)..(299): n is a, c, g, or t
  misc_feature (306)..(306): n is a, c, g, or t
  misc_feature (313)..(313): n is a, c, g, or t
  misc_feature (395)..(395): n is a, c, g, or t
aanaattataccacaaaacatgatattggatttatacactggatcccaggaatgtgactcactgggaaaaaatgttcgactanncatcttcactcaacnngccangaagttatataacacacggtaaacatccacctggctcaaggngcaaatncantacgtacagcattggcagtagtgcgtcanangnngcagaactatttcacactaancagttgaagantacacaagattaataccatccagcatnaggatatagctgtggattttacaaaccantcttatttctaacntcaggngttggtnttttttnctgtccatcttaaaatattactgctttaatcacagatcagataaaaaggacaacatgcacaacctgccacgctagaatcctnttgtaggcgctaaacagtgaaat

SEQ ID NO: 563056 - DNA, 232 bp, Homo sapiens
  misc_feature (91)..(91): n is a, c, g, or t
  misc_feature (97)..(97): n is a, c, g, or t
  misc_feature (104)..(104): n is a, c, g, or t
  misc_feature (108)..(108): n is a, c, g, or t
  misc_feature (131)..(131): n is a, c, g, or t
  misc_feature (173)..(173): n is a, c, g, or t
ccagtgtggggcatcactgtgaagaggcacgggaaaaatatggcaaagacttcaaggacatacggcaagattttcttcctgggaaatcatngactancatcatngaanattattacatgtggaaaactacngacagatatgtgcaacagaaacgtctaaaagcagcagaagcngagagtaaactgaaacaagtatatatcccaacctacagcaaaccaaatcccaaccaaat

SEQ ID NO: 563057 - DNA, 121 bp, Homo sapiens
cgggtctgaagctggcgggtcagcttctgcgtctctgctggtgtctctccttctctgaccgcggctgagccctgattcgccttcctcactgctgggcagcttcccaccacctggagcagcc

SEQ ID NO: 563058 - DNA, 898 bp, Homo sapiens
  misc_feature (161)..(161): n is a, c, g, or t
  misc_feature (181)..(181): n is a, c, g, or t
gagagaagcggaggccctgctcaaaacagcgtctcttattctgagccaaagtgttcattctcaatgcaatggtagtcatcaaataccatcaagtcaaatatcacaatcctctcttttgtagcttagtctaatacagggattcccatttgagggggcttatnaggatactcaggctttttangaagacatacctacttcttcgtattctgaaatgcagtgtggattccagagtttctacataggagaggctttgaaaatgtaatctggttgtatggcagggcaaagggagatgttttaaaggtacatttatatagcaagtgcaccctttttttaaaaaaaacctagattcctttttgtttgtttattgggggagtaaatggagattagtttagtactccaaccaccgcctgtatgcaccccaccgcatgacatgcgccccctggtggagagttactacctctacaagtggaacaccctgtaaagtgaaaccctggaaaagtttcaatgcctgcattctaggcatagattccgccacagaattaacataacctccctgagtctcagtgtcttcatccgcgagatgggaataaggaaatctgctggacctgcttactttactgggctgctgtatggaagaacacaatgagaatgaaaggcgtatatcaaatatccgctggaagtagttagttttacaattcaaatgaaatgaacatgaaactatcccttctcaaggacagttctatctttttcctttactggagtttatatttctcatttttataacactttttttgtactatggtgtaatgctgggagaccattcctgtgagaccagaggagttaaacagaacctggagaaagagatcataacaatagctaacatttattgagtatccga

SEQ ID NO: 563059 - DNA, 1061 bp, Homo sapiens
gcgctgggctgctggggggcgcgggcgaggactcggtcggcggacggcaagcgatggccgtgccgagggagatcgccctgggcgcttactcgccattggactacatgagctagtcaccgagcttcccgcggctgccctgatggacgaagccggcgcctcgaggcccctgttgagggggctgcaagggaacgaagacgccattcttgggagacccacgacatgcgaccgctggtactctctttaccatgaaagtctgtcgagcgggcgtgcacgtcgggcatgccctatcaggacagtcaggtctgcgagattgggcaagtccaacgacgcgtggtccgctcagctatggacgaagaaggctacagagaggaccgcggttgcttcgcgccacgcaaagcgtggggactgatgcttgctaccctagccggccaagtggcaattgtgggcttcacaggggttcatcggtacaagcgggcctgtcgtcacgcttcgttaacgcgtgtgttccccggtggcgcctgcggtcgatgccagattctaacttttcgggggagatccccctacaagaagtcattcacaattccaggcggattgaccacggtgggttgaaccccggagttgcgtagcaactcgggcatggaagcaataccgagcatagagagccatccggaaggagttggcctcaaggtacaaaccaagtggtaattcgtacttggaggggacagcaacgcctgcggtgtgcaggcaagggcctaagatgagtacaaggcggagataatacgctgaaggaccttctccaaccaaagagaattttccttggggagtcctgtcgtagcgcagaatgaagtggggggcccttgtgaactggccatggagctaagacattttgaaagaaatcctcggaacataaatattggaagatggcaacagccgttacatgttaggaagtattacacgggaggaagcatccccgaacaatgcgagggcgggttccccatctagacgagtataagaaagaaacccgttcacgaaactagaataccttggagagaaggaaccca

SEQ ID NO: 563060 - DNA, 415 bp, Homo sapiens
acacacgtgagctactataactccaccatcttcttgccccatagaatactgataattacttatcactcttccatcgtgataccctcttcaccagttaatggcatacgtgtatatcaatggaggactgtttaaatcaacagtgatgtcaacatgtatatgcaatattaaactgcccagcagcacaaataaaatagcctgactgtactcttaatagaagtggtgtagaattggattaatcatgaacactgatacatataacattctcatcattggtccatgcatgttctgcaatatattaatatgtagagctatttatttcttttaaataatacagtcaacatccatgagcaaatcatccaaaccaagaacaaggaccctgcctgtcctgtcatcagacaatgtttgcaggatcctc

SEQ ID NO: 563061 - DNA, 578 bp, Homo sapiens
ttagattttaactaaatggagcagctccttataatacaaattgtatagtaaggatacaacactaattaatatgttttcagtttaatttgttatgtattttttaattatcaagaaaaagaaacagttttgtacatttgaggatttttttttcaacagctttcatctgtattgtcttaacgtggaactttaacacaccagaaacgaaagttgttaaaagcagccttctagcacaaacacttttttaagtaaataatggtagcctaaaacttaatatttttataaaatattgtaatattgttttatgaattattaaaataaaattctttgttgaatgcatctatgtattcttttctgttgctctttgtatttcattaactttgtaaattttgacatattctgaatttattcttccattaggggaaaaatgttcagttagaacatccttggaaatccttaacagagttaaaatcgtctcttcttacatttagaatactgttgaatttatttcacatgactaatttcttgtgtctagtaaatgatatgttctaaaattgtatcagcaaatacagttactgtat

SEQ ID NO: 563062 - DNA, 177 bp, Homo sapiens
agagggctgtcagatgcatgagtataccattgaaggccatgatgtcccacacaatgatacggctaaccacaactgtccctggggccacaggggcccaggaactgttgtcagggcctgcgtcgctgatgatgaggctgaggcctgagtgggccggaagcaacttcccctgggggcggg

SEQ ID NO: 563063 - DNA, 352 bp, Homo sapiens
catctttgaagagcctgaggaccccagtaacctgctcattcttctacgtgaaatcatactacctacctgtgtcctgactgtgatgttcatgccacagctggccgctacattgctcacccttggactaccttaacagtacaatggtctagggacctagaacataggaggcatgacccatatgagacctaccaggtccatgactacctatcggagcaagctctgttccctgtacgagaacgactgcatatttcgacaagtttgaatgtgcctggaacgggagcgacagcgtcatcatgaccgtggtggcctaaaacaaacttcttcctgcatgtcccgcttggggtaccgagct

SEQ ID NO: 563064 - DNA, 148 bp, Homo sapiens
tactgcagctgaaacggtaagaatcgctgtgacggtggtacctgtctactgagtagcctcctcagattcattgaactaggtctgtcccaatgtatgggatggcggatagtacgtttgtacttactgtggcacctccttaatataaacg

SEQ ID NO: 563065 - DNA, 122 bp, Homo sapiens
ggatccttcaggagcgagactgggggagctgttcatagaccacctggatcctatatgcctgagaattgggcagtgtggtcctcagacgaaactctggtgctattactgtagcgaagggaaaa

SEQ ID NO: 563066 - DNA, 1893 bp, Homo sapiens
  misc_feature (248)..(248): n is a, c, g, or t
  misc_feature (957)..(957): n is a, c, g, or t
  misc_feature (1297)..(1297): n is a, c, g, or t
  misc_feature (1552)..(1552): n is a, c, g, or t
atcaaccgactgcgttgtcgcgccagataagtgtaagacatagaccgtacttgtctctggggcgggacgataagacaagcaagcacacagtcgatgttggagagagtatagctgctggcggacagacacgagagtctctcgcgcgcggagttgcgacccaggaggcagatgcaccatcgtcggtcgctaggtctagtgtggtgatccccgcgtggggattgcgtcgacgcaaggagtagtcgtcgcgnagtgactacgccggaaacacgtggggacagaatagttcgcggggcacaccacgtgggtgccggagtttctttgagacaccggcccttgggagagagtgatctctccactttgtgtcggagtgggaagttcgcatccctcggtgcgctagctgcggcagggggatagtattattcagggggagccctgttgattaatcacagggggggggatattacaatagtggtgtctctctgccgtccatgacagcagggggggcaagctatacatttcccatagtatcatggaacgcccgtggtggcgggtggtcgcttataatcatgatattgtccgggcgggggtgcgtgtttccgtgaaattatgtcggtgcgctccgcaacgtgggggcgcgcaaatgttacgcgttagcctgctccgatgatcgtctcccgcatgtaggtgagacatccactctggcgcctaccgacgttgtcggctttggtgggttgtgatgtgtcataggggagcttgatgtgtatactgggctcggtccaacgtgagtgccgcccggtgggatctctcggctgtcctcgcttgttgttggctacgttgcatcatatttgggggctcgtgtgtctgtctttaggcgcccctgctatgtttgtggtagcaactacggccgtgtgatgtgatggtcttgtgtgagcggcggggccggtacaagatgtgagngtctgtagctgggtctaagcgtctgtctctcgcgcggggggtgtaccactacattatgtaggtagagcccggtggagctgacacactgcaagagtggcttcaaactacatccgcggggcccaacgcgtcgtgccggtgaacagtagttttttgtcggagggcgtactagagaatactagtcgtctccacgagaagataattgttaggaggggggggggagcgcacataagaggacccctggttttcttctattcacaacgaggcgagtggtgcgtctatgggggtgtcgcctacaatgcgggttgtcatcttctcgtcgcggcgggggcgtcacatcggngggggagacgcgcacactctctcgtagccctggtggttctctcgctgatgcggataacgagaggcctctcacatagaaaagggattgatttctctataaagagggactcgcgcgcgcactccctcgtgcgcaccacacactcacacacacacacacacacgcacacgcgggggaacaccacaagagagagatcccacgcgtgaagagatttctctccacatccgctcgggcgagaccactgcagaaccttctttngaagagaaattctccacgcttggtcgtttgttctcccacagcccggcatttcctcggcctcgtaagatgtgcccgcgggaatggtcttctagaaaagggggcgcatatgcagatgccgacaccaatcggcaacccgcgtctgccggtgttttgatacacacggggtggagaagggaacgcctaggcagtacccttgacgtggggcccacaggcgtgaaaacactcccagtacctgagacctagagtccaaatgcttgtatggaaccatactttgtgttttaacgtaattattttaaaccaaaccccccccgttttcccaaattgtaaaaagaaaaaaaaaa

SEQ ID NO: 563067 - DNA, 116 bp, Homo sapiens
cacacgtaaggggtagggggtagactaggacaagaacaccctgagaaagtatttgtacagcacaagctttatgaggaataggagaacacagggtaccgatgctcaaacttcgtaat

SEQ ID NO: 563068 - DNA, 186 bp, Homo sapiens
agagttccagaccagcctgggcaacatagagagaagccccatctcttaaagaaaattaaggaaaaaatgatcaatgacaggatatgtggattttttccttaattttctttaagagacagggtttcaccacgttggccaggctggtctcaaactcttgacctcaagccatctgtccacctcagcctc

SEQ ID NO: 563069 - DNA, 227 bp, Homo sapiens
  misc_feature (14)..(14): n is a, c, g, or t
  misc_feature (16)..(16): n is a, c, g, or t
  misc_feature (19)..(19): n is a, c, g, or t
  misc_feature (36)..(36): n is a, c, g, or t
  misc_feature (40)..(41): n is a, c, g, or t
  misc_feature (67)..(67): n is a, c, g, or t
  misc_feature (79)..(79): n is a, c, g, or t
  misc_feature (87)..(87): n is a, c, g, or t
  misc_feature (95)..(95): n is a, c, g, or t
  misc_feature (105)..(106): n is a, c, g, or t
  misc_feature (108)..(108): n is a, c, g, or t
  misc_feature (114)..(114): n is a, c, g, or t
  misc_feature (116)..(116): n is a, c, g, or t
  misc_feature (120)..(120): n is a, c, g, or t
  misc_feature (143)..(143): n is a, c, g, or t
  misc_feature (154)..(154): n is a, c, g, or t
  misc_feature (193)..(193): n is a, c, g, or t
  misc_feature (205)..(205): n is a, c, g, or t
  misc_feature (225)..(225): n is a, c, g, or t
gcagccaggtctgncngcncagatggcaaccactgnagcnngcgtcggctgtgggctctgctgtgcnggcacacatgtnggtcacgncattactnggggcttcanncngaggangnaatnctgagcctccgaggcctgacatnacttaccaggngcctcagggaacccagccagcacagcagcagcagccttncctctatgagancaaacagtttctggagtgtncc

SEQ ID NO: 563070 - DNA, 264 bp, Homo sapiens
ctctgcttcagcctcccgagtaactgggaccacaggcaagcgccaccacgcccagctaggtttgtatttttagtagagacaggatttcaccacgttgcccaggctggtcacgagctcctgacctcaagtgatccgcctgcctcaacttcccaaagttctaggactacaggtgtgaaccaccacgccagttcagggagtaatttatttagcacctactatgtgccaagcactgttattggaactttatgacatatgacattcatg

SEQ ID NO: 563071 - DNA, 977 bp, Homo sapiens
  misc_feature (1)..(1): n is a, c, g, or t
  misc_feature (148)..(148): n is a, c, g, or t
  misc_feature (260)..(260): n is a, c, g, or t
  misc_feature (271)..(271): n is a, c, g, or t
  misc_feature (282)..(282): n is a, c, g, or t
  misc_feature (284)..(284): n is a, c, g, or t
  misc_feature (295)..(295): n is a, c, g, or t
  misc_feature (317)..(317): n is a, c, g, or t
  misc_feature (343)..(343): n is a, c, g, or t
  misc_feature (362)..(362): n is a, c, g, or t
  misc_feature (366)..(366): n is a, c, g, or t
  misc_feature (372)..(372): n is a, c, g, or t
  misc_feature (403)..(403): n is a, c, g, or t
  misc_feature (405)..(405): n is a, c, g, or t
  misc_feature (425)..(425): n is a, c, g, or t
  misc_feature (656)..(656): n is a, c, g, or t
  misc_feature (661)..(661): n is a, c, g, or t
  misc_feature (664)..(664): n is a, c, g, or t
  misc_feature (674)..(675): n is a, c, g, or t
  misc_feature (696)..(696): n is a, c, g, or t
  misc_feature (698)..(698): n is a, c, g, or t
  misc_feature (704)..(704): n is a, c, g, or t
  misc_feature (706)..(706): n is a, c, g, or t
  misc_feature (710)..(710): n is a, c, g, or t
  misc_feature (713)..(714): n is a, c, g, or t
  misc_feature (750)..(750): n is a, c, g, or t
  misc_feature (755)..(755): n is a, c, g, or t
  misc_feature (840)..(840): n is a, c, g, or t
  misc_feature (961)..(961): n is a, c, g, or t
naattcccgggatggacagcacagctgacagccgtgctcagacagcttctggatcctaagctcatctccacagaggagaacacgcaggcagcagaaaccaaggggcccctcccaaccccttcctgcacacagacgcaacacctggaanggctcctgctcacaacatcacatttaaacttctggaacccgcccaccactgccgaaatcacgattgaagcccaaccacccaaaatttctgaagggaaggatgttcttctacntgtccacaaantgccccaaaancntcctggctacntctggtacaaaagggaaaaaanggacctcaaccaaaacaaaaaaacgnaaaaaattaaaggtaaaanaaanaaatangggcctgcatacagtggaagagaaacaaaanantccaacgcatccctgctganccaaaaagtcacccggaaggatgcaggaacctacaccttacacatcaaaaagcaaggtgaaaaaacaaaaaaaaaaattcgacatttcaccttcaccttaaacttggagactcccaagccctacatctccagcagcaacttaaaccccagggaggccatggaggctgtgcgcttaatctgtgatcctgagactctggacgcaagctacctatggtggatgaatggtcagantttcnttntttttttttnnttgcagctgtccaaaaccaanangacccncnaacnaannggtgtcacaaagtatattgcaggaccctatgaatgngaaanacggaacccagtgagtgccagtcgcagtgacccagtcaccctgaatctcctcccgaagctgcccatcccctacatcaccatcaanaacttaaaccccagggagaataaggatgtcttagccttcacctgtgaacctaagagtgagaactacacctacatttggtggctaaacggtcagagcctccccgtcagtcccgggggtaaancgacccattgaaaaca

SEQ ID NO: 563072 - DNA, 1190 bp, Homo sapiens
  misc_feature (955)..(955): n is a, c, g, or t
  misc_feature (1044)..(1044): n is a, c, g, or t
  misc_feature (1075)..(1075): n is a, c, g, or t
  misc_feature (1077)..(1077): n is a, c, g, or t
  misc_feature (1080)..(1081): n is a, c, g, or t
  misc_feature (1084)..(1084): n is a, c, g, or t
  misc_feature (1114)..(1115): n is a, c, g, or t
cgtgtctgtaagcgcgtgatggttgctgatgtcttctgtgtaccacttttaactgtggttcatgagctcagtcagtgttggcgtgataatgtggctaatcccttgtggcgcgtacgtgtgtgtgagcctgtgccagtgtatgtggcgatattcctgcttatggcctggtttgagattgcgcctcatgtgttagggcaccagctctcgtgagatgtgcgtgtaatttatggtatatctcatgtccccaggggtggtcgggtttcgggcatgctctattgaggtatttgcatcgactgggtgtccttgttgggggtgaaaattttcgtctttgtgtcggattgtggatggattcgtgttgcgcgtgcaatccctggtgtgagtcccgcgaattgctgccagtggcccgcatgggtatctgcgcatatcttacataggcagggttcgttgttcaagcaaaggagtatgggtgcggcgggtttgatgatccatcttgggtgcgaaggagaggctcatgctcatgttgtttccatgtatatagaatgagttggcgcaggccgtatgtgtcgttcaagagttgggtacgtaagccgattggtccagaagaattcagtggaatggcagtcttcggggcgatggacattgacacgagaagggagagtgaaggtgggagttatgagagctgctgtgtgtattgcaagcctggtggtccatctgattgatccggataatgaagtggatgactcgtgtttgtcggtaatagagtataaggccaactgtcaaagatccagtgtagaacctatgctgccctctgcttcacacctctgcttggagaggatcaagtgcatgcctgtcagttttagaagcaagtaatatcatcctcgtggtcaagagcagtgtccgtggtgtgcagattcctctccaattgctgcgtggtcgtggcccgacctctcacggnatgacagccttcgtcacccagcctgtgagggtcctgactggagcaccttctaaatctaagattctgctgaggagcccccgttggtcccnctgggcatgctgtgctcggacggaaagcggngnctnntgngtccttgtgtccctgcctgctgaagaatgnngctgcgtctgagggcaagacgctgtctgctgccttcagtacagatgctgattaaagatgatagcgatacagaatt

SEQ ID NO: 563073 - DNA, 423 bp, Homo sapiens
tgcaggccaccgcccaggaagaagggatcttcgagtgtgcggacccaaagctcgccatcagtgctgtctggaccttcagagacctaggggttctgcagcagacgccgagccctgcaggccccaggctccacctgtcccctacttttgccagcctggacaatcaggaaaaactagaacagttcatccggcagttcatttgtagctagaactgtgaggaggagcctgtgctgagacttctcagccccagaacacagctgtgtcctagagccagaagatggagaggaggctgcaaacccttagctgctctataaatataatcattgaggcttgattgtcccttgccatctcttgctttttcccttctttgatgtgataaacaaggggacgagacgagttgtcttttccccagcccagcagcaaaaa

SEQ ID NO: 563074 - DNA, 354 bp, Homo sapiens
  misc_feature (349)..(349): n is a, c, g, or t
cacgtgttgcactctctacgaaaaatacaaaaattagatggatgtggtggcgcatgctgtagtcccagctactcgggaggctgaggcgggagagtcacttgaacccaggaggcggaggttgcagtgagctgagatggcaccactgcactccagcctgggcgagagagtgagactctgtctcaaaaaaaaaaaaaagaaaagaaaaaaaaaaaaaggggactatactagtgttccgaaaagtgtattttcggtcccatacggaatccagggtttcttcccctaggtgattaaaatacaagaaaaacgttaaaggaggggcaacagggggttcccggagctcgaaattcgntaatc

SEQ ID NO: 563075 - DNA, 465 bp, Homo sapiens
gggacttaaaacatgaagaaaaatgaattgggagaaattcaactgagcaaaatgtatttttctttcttattaatgttgttttacttacacaaaaccacagagaagtagctagaatgagagtcttttaataaaagtatgagatgatccgggaattatgagggaattgaaatcttaaaaaaaaattaaattacttgtatttaaaaaggatgggaagcctgtatcaatgcagcatttcccagctgtgttccttgaaatgttagtttgtttagatatgttcctagaggactcatggggaaacagtaagtttcagaaaatgcttgaaatgtagtccacatttaggggctcctaggacttattaacatttttgggtctctgagaagtcttaaagaacctgttttggctggtcgcagtggctcacacctataatcctataatccaagcactttgggaaatactaggttaatc

SEQ ID NO: 563076 - DNA, 118 bp, Homo sapiens
cactggcgcaggcggtgcctctaatactggtgactgctaaggtgatgttttcggtaacaggcggggctaagattgccgagttccttttacttttctttaacctttccttatgagcatg

SEQ ID NO: 563077 - DNA, 243 bp, Homo sapiens
gcccccaaaacccccccttttgaggaggagccccccccccccccacgagaaaaatattttttttgtggggggggggggccccccccccctccctttttattttaccccccccccgggggggggggcccccccaaacccccccccggtttttttttttttttaggggccccccgggggggggttttttttttttttttttttttttttttttttttttaaaaaggcccccccccttttttttta

SEQ ID NO: 563078 - DNA, 365 bp, Homo sapiens
aggtcgatctagaggtccccggtgggagacgggggtctcactggtgagcaagacggtctccatctcctggacctcgtgatccacccacttcggcctcccaaagggcggggattacaggcatgagccaccactcccggcctcataaatatttaaagagtagaaggtgatggcttagaaagtatgtcagataaactccagctggggtttggtgccagtaaaatgatgtagtaatgatttcccttcttggggggggggggtggaagaggataattctagtccatagaggggccaggtataaatcagggcaggcaatattatgtgatgataacaaatagccccaaattttagtggcttagtacagcaaa

SEQ ID NO: 563079 - DNA, 429 bp, Homo sapiens
cttagccgtcaggtagaacgcttactcacctgacaccgacttcttagagaagcgagtcttttttgaatggaggagcgatggtaaccacactagggggcgcccatgatcggctcccagtgcacccccttaagggtaagcaggccgcatatctagagtctgatagtctgtgtgtacataaggtctagaagtctgtggaaacgccctgaaacttgtagtattatcttcactaccctcttatgttaaggtctacataataggatttctacaccaatgcgtttaattctctacgatctcttcgtattaaaattctcttctggaataagctgtggcaatcttcttaccacctggttgacatcaacctctctacaatgacacaacttctgaccttttataaactagctacttccgtgaaaaaacacaacacaaaac

SEQ ID NO: 563080 - DNA, 392 bp, Homo sapiens
  misc_feature (5)..(5): n is a, c, g, or t
  misc_feature (13)..(13): n is a, c, g, or t
  misc_feature (180)..(180): n is a, c, g, or t
  misc_feature (350)..(350): n is a, c, g, or t
  misc_feature (358)..(358): n is a, c, g, or t
acaanccttaatncccttatggatcacatgcctcaggtttttgttgtttcagttttccttgaaaaatctgtgcttggtgcctttcccattttgcccaggagttaaaaatagatactattggcccaggcgcagtgactcgtacctataatcccagcactttgagagtctgaagtgggtggntcatttgaggtcaggagtttgagaccagcctggccaacatggtaaaaccccatctctactaaaaataaaaaaattagcgtggtggtacatgcctgtaatcccagctaatggggaggctgaggcaggagaatcacttgaacccaggaggcagaggttgcagtgaaccgagntcacgccnccacactccagcctgggcaatggagtgagacttc

SEQ ID NO: 563081 - DNA, 367 bp, Homo sapiens
cccccaattgggttttttcccccccctgggggccaggtttgtcctccaaagccaaggggttcccccaatccctccctttttttcccaaatttaactttttgggctttccccccccccttcccaggggttaaaatttcaggggctacccccgggccctttgcggctgatttgggggttttgtttaaaaaaaaaaccgggggggggggattttttggaaaactgggggtggggggaaaggggggatgccccagttttggggttttgggtcccgttccggggggttatggggtttttccccccccccccccccttttttttttttttttaaaaaaagccaaaatgggaataaaccccaggggcccgggga

SEQ ID NO: 563082 - DNA, 104 bp, Homo sapiens
ttactgagtctctgtgtagtgcggctggtctcttgagaagctctgcttggccttgttctcctcctcagccagcctctcaaacatattggcatagagcttcttct

SEQ ID NO: 563083 - DNA, 311 bp, Homo sapiens
  misc_feature (271)..(271): n is a, c, g, or t
  misc_feature (281)..(281): n is a, c, g, or t
agagtataaaaacactgaaaaaattaaaatctgctattaatagactatcccaaaataaccactgttaatgtttttaaaaatattttatttgaaattcttccatgtttatatattgtatatattcatagttgagattatacttgtatacaggtctaaatcatgctttaaaactttataaactttaagcattttatgagtcattaacaattcttttaagcaacttttttttttttttttgaaatgcagtttcgctcttgttgctcaggctggngtgcaatggngccgagattgcgccactgcagtccgcagtc

SEQ ID NO: 563084 - DNA, 329 bp, Homo sapiens
atgtaaatactctcatgacaatgaagaacatcaaaataggaggtgaggaaagtgcaacatgacaagagtatctaatcagcctacaagaggagtcaagatcctctacctcggctgtgctggaaagtgtgactacacacctcacggcccagctacgcatatcctacaaagcaggcagaacacctagttatgcaaagagcatcactcacagaccactgcagaccacctgggaggtgtggagcttctatctagtagacaagcctgccaaggaaactacacaggcccagagacaaggagaaacctagaaaacaaggtagaaagtcttggaaaag

SEQ ID NO: 563085 - DNA, 171 bp, Homo sapiens
tttttttgccccccccccccggttgggccgggccgcttcccccccccggggggggaaaaagcctttttggggccccttaaaaaaagccccatttccaagggggaggggggttttttcccgggcccaatttttccgggggggggggttccctaaaagttttttttcccctga

SEQ ID NO: 563086 - DNA, 117 bp, Homo sapiens
gcgcctctttatgtgtcgccctggtctttcctaatgatattcctgagagcttctctgggtcactcttgtcatagagtttcaatacgtaaagccacacggtcctggtatgccctctaa

SEQ ID NO: 563087 - DNA, 358 bp, Homo sapiens
  misc_feature (35)..(35): n is a, c, g, or t
  misc_feature (62)..(62): n is a, c, g, or t
  misc_feature (241)..(241): n is a, c, g, or t
  misc_feature (243)..(244): n is a, c, g, or t
gaatgaataaaagttaatttattctatatcctcangaaggcagaagggaagatttcagtgtncatgacacaaatgataaatgtttgagatgatagatatgctcattaccctgagttgatcattacatattgtatacacatatcaaaatatcactgtcccataaatatgtacgattattatatgtcaactaagaataataggggaaagaagtaatggaaccgtatactcgcagttgtcaacnannaaagtaaataaatctgccaaggagtacacttggcctgtgtggaggaaattattaacattttctgaaggacatcaaatgatattagaataaatgtcggaaacaaggaaatgttac

SEQ ID NO: 563088 - DNA, 774 bp, Homo sapiens
gcggagttgtaacgctccatctgactgagtagagcgaccggacgatcatggcgcccggagtggcccgcgggccgtcgccgtactggaggttgcgcctcgagtggcgccgcgctggtcctgctgctcatcccggtggtccgccgcgcacgtagcctcccggatctcgtcttgttctctagtaacagaaagaaaatctgtgaagcagtgcctgacagaaccgtctcctgtctttggttgcaatactaacaaggcttgtctggactacccagttacaatgcgtcttgccaccggacttccctttgtaaatttgagctctgcacgctggggagttggtagggtgaactttgaggcgctgatcatcaccatgtcgcgtagctcgggggaaccctcctcctgggcattgccatctgctgctgctgctgctcgcaggaggaagaggagccggaagcctggacaatggagatgaggagaaggccatgcgtgagcgggaggagaggcggatactggcagagagggaaccgcgacgtacgtccagagcatgacgctcgacgtaccactgctgaccatgccgaacagtcgtgtactgcgcctgttccagaaataggacccgtatgctatcatgcgaagcagggtaatggggctccaacaaattcagttgcgatgagccttcctgatgaggtgcacactgtggaagaccagagccagacagggaacaccaagttgggcatttgcggcttctggactcggccaatgaacctagcacctaccacgacg

SEQ ID NO: 563089 - DNA, 373 bp, Homo sapiens
  misc_feature (321)..(321): n is a, c, g, or t
ggaatgaataaggttaatttattctatattctcaagaaggcagaagggaagatttcagtgttcatgacacaaatgataaatgtttgagatgatagatatgctcattaccctgatttgatcattacatattgtatacacatatcaaaatatcactgtcccataaatatgtacgattattatatgtcaactaagaataataggggaaagaagtaatggaaccgtatactcgcagttgtcaacaaaaaaagtaaataaatctgccaaggagtacacttggcctgtgtggaggaaattattaacattttctggaagggacatcanatggatcattaggaataaaatgtccgggaacaagaaatggttaccatttaaa

SEQ ID NO: 563090 - DNA, 113 bp, Homo sapiens
tgtgaccagttgcgacagacagcgccaagaacctcatcatcttcctgggcgatgggatgggggtgtctacggtgacagctgccaggatcctaaaagggcagaagaaggacaaa

SEQ ID NO: 563091 - DNA, 141 bp, Homo sapiens
tacgtaggtattagcgggttaaggatgagctactgtagagcaagtacatggcacaacagtgcttatgatgccctggatgaagttaagagggcaccgagtcagacaaaatactattgacgcctggtggtggatatgcgatga

SEQ ID NO: 563092 - DNA, 368 bp, Homo sapiens
  misc_feature (148)..(148): n is a, c, g, or t
tgtgtggtgatctagaggatccgaggtatgtgtgtagaagagcttcgaacgtgctcactctgcagtttgcctggagactgctgtgtagtatgtctgctgtctccatgaatcgggtcacatctcacgggtggctccaagctgtcttttngcgagacatgtcctgcttcaatttcatatttgtggctaaggcttcctggatgactcctgatgagagtgatgacacctgcttcccttccaggttttgttcaacttccccaatagactgcaacaggctctccaggctttcctggacactctgagattgggcaattgctttctgcagcagagaagatcgctcagccaggctataggagaggctttggaagtgg

SEQ ID NO: 563093 - DNA, 215 bp, Homo sapiens
actaccggccccagttcacagctcccactctagttcaaataaagtatcttataactaagaatacctatagaatgaagcagatatagaatctgcttctattatcggccaagggccgttgggaggtggggagaaatggggagatgttagtcacagggcacaaacttgtagttataggatgaatgtgttttgggggtctaatgtactgttgtaactgg

SEQ ID NO: 563094 - DNA, 840 bp, Homo sapiens
ttccatatgcattttagatggatttttctatttctggaattgtgccattaggagtctgatagatactgcattgaatctgtagagtgctttgggtagtattgacatcttcccactattaagtcttccagtacatgaacacatgcattttcctgatgactaatgatgttgtaccttttcatatgcttatggctattgtagatcttcctgggagaaatgtctatgcagacttttgccaattttttaatttgtccatttaaaaatcagggttttttttgttgttgagttgtaggagttcttttggtattccttatactagtcccttatcagatatatgcttgcagatattttctcccaggtgggttgtcttcacttccttggtagtgtcttttaatacacaaagttttaaatttttatgaagtcaaatgtatctacatttttctttggttgctcatgcttttggtgttgcatctaagaatccactgccaaatccaaggtcatgaagatttactcctatgttttcttctaagaattttatagtttttgtattacataaggtctttgagccattaagatctttgacttaactttgtatatgatgtaaagtcactgtcaaacatcattctttgcattgtggtgtccaggtatcccagcattattgttgaaatgctacacttctttatattccttgatctctaacaagagttgggcctttgtactacatgcctgaaatgtgtccgggtactgaggcgggggcttgggaagaaaacctggggcccctggaaaaaaaccggttggaaatacctaaaacccggaggggtccagactgcaaccgggccaggg

SEQ ID NO: 563095 - DNA, 1301 bp, Homo sapiens
gggggggccaagggcacaggttacagggggattcttgctgccgatctaatatttatttaagcatagacagacttataattaatatacgttagttagtgacatagaaacagtcaactcggaaattaacgtcataagcacttgttctcatattatcaagtcatttcatttctacatgcctccacatcagcccatgtcaatattccagcatggatacccccgaaccaccatcccacccatgatttgttccacacactgatgatctcccatagccatgctaggagacaaggcagggcagggacagacacactatggaaaggccagaagatgaggagctgatcatggacacaaatgagggcaccctagagaggctagcacacagggtgtatcgcactgggaccaccaggacttctccattgagccacatgggatcctgggctgctatgatgtagggcagagtgggcggaggtgtcataactgagtgccatgcaagatcttgcagacggcacatggacggagtggtcgtcgaaggtatccatcctgagtagcggacgggcagacaccggccccactctactatctagagagacggacacaacactgacgagacgtgacctccaaagaaagaagttaccagagcacacctattcacccagagacacggcgtgacgggggttgacactcgcgcaacagggcatcatgaacattgcaggccagacgggacaacccagaggattgttgatcaagaccctgggacagagggaacacacaggacaggcacacgggaggacagaggatacaccctgaacaaatgatgcaagcaatcatgggaacatgcatatccagacacaccccaaaccccacacacagctcaagcgcagtcagagccacgagaacacagcaacaccacagacgaaaatcagaacatcaaggacacacagaccacaacagtacacgagcgagtcgaacaagccacaactcacacaaccacaaacatgacaagcgacaacgaacacaagtcaacaaactggaatcacaggacgggaaaagcaaccgaaaatatacaacgagaacaaggaagaccaaagacgaggacccaagaacaactcgctaacgctagaaaacaaaaagagaacggaagagacaacacaggaaagaaaaaagaaaacaacacagaagcagcataaacaagacaaaacaagagaccaagaagcgaccaaaacgaagagacaatacaagagaagagagagaccacaacggaaaccacacacaggcgatgcaacgagacgtagcaagaacacaaa

SEQ ID NO: 563096 - DNA, 229 bp, Homo sapiens
  misc_feature (24)..(24): n is a, c, g, or t
gctgtctcaaaaacctaagagtanaacagcacaggccagaatctggccatagtttgctcacccctctatttcttttttttccccagaaacccttgtgctgagacccctcttttaattagacaaatcttcaaggagttgctatgtagtacagagtaagggggagataggagttaaaagatcttctctagcttttaattaaggtgaggcactaaacctgttttacgccagt

SEQ ID NO: 563097 - DNA, 790 bp, Homo sapiens
  misc_feature (203)..(203): n is a, c, g, or t
gagcagcggggctgccacagctcctcaccccctgaaaatgttcagctgctccaagtttgtctccacatccctccttggtcaagagcacctcacagctgctgagccgtgcgctatctagcagtggtgctgaaacgaccggagatactgacagatgagagcctcagcagcttggcagtctcatgtccccttacctcacttgtctntagccgcagcttccaaaccagcgccatttcaagggacatcgacacagcagccaagttcattggagctggggctgccacagttggggtggctggttctggggctgggattggaactgtgtttgggagcctcatcattggttatgccaggaacccttctctgaagcaacagctcttctcctacgccattctgggctttgccctctcggaggccatggggctcttttgtctgatggtagcctttctcatcctctttgccatgtgaaggagccgtctccacctcccatagttctcccgggtctggttggccccgtgtgttccttttcctatacccccccaggcagcctggggaacgtggttggctcagggtttgacaaaaaaaagacaaataaattctgtttatttagcctgggggaacaattgaggccaattgggaacttgttcgcccgcttggggccagtttactctagacttggggaagttaagaatgccgccaccaataaagcctaattggccattccccttatggtgggggtattacaattaatggcccggggttaaaaggaagggattggccctgcgttactttg

SEQ ID NO: 563098 - DNA, 273 bp, Homo sapiens
tgcgggtctcttctgacggggagagctatgctgggcatctacatccccacccgggccggtgctgggtcatgcaggatcccagcatgaaccttcaggggctggctgtgggcaagggactctcctcctatgagcagaatgacaactcccgggtctacttggcctactaccatggccttctggggaacaggcttgggtcttctctccagacccacggcggctctcaaaacaagtgtaacttctatgacaacaaagaccgggaatgcgtgaccaatc

SEQ ID NO: 563099 - DNA, 865 bp, Homo sapiens
  misc_feature (278)..(278): n is a, c, g, or t
cattcgtgtggctcgcggtctcatttggtaagtgagcatgttccttgctgttgtcttatgagatcctgatcatgactagtgcttggattttcgacctacataatcacacatccgctctggggagaagacgccgaatcgttctgtgactaatccgagcatggtagttctgcgaggtcgatgtaggtggcatctcatcgagcaatgcgagtccagattgggaagtctgatatcagatttgacgccctgatattggtgccccttataccctcacttgtctntagccgcagcttccaaaccagcgccatttcaagggacatcgacacagcagccaagttcattggagctggggctgccacagttggggtggctggttctggggctgggattggaactgtgtttgggagcctcatcattggttatgccaggaacccttctctgaagcaacagctcttctcctacgccattctgggctttgccctctcggaggccatggggctcttttgtctgatggtagcctttctcatcctctttgccatgtgaaggagccgtctccacctcccatagttctcccgggtctggttggccccgtgtgttccttttcctatacccccccaggcagcctggggaacgtggttggctcagggtttgacaaaaaaaagacaaataaattctgtttatttagcctgggggaacaattgaggccaattgggaacttgttcgcccgcttggggccagtttactctagacttggggaagttaagaatgccgccaccaataaagcctaattggccattccccttatggtgggggtattacaattaatggcccggggttaaaaggaagggattggccctgcgttactttg

SEQ ID NO: 563100 - DNA, 115 bp, Homo sapiens
ttctagaggatcctaggtggtgtgggtagggacgtagcaatgttgtacttacaggacagaattcactccaaatttacgagtgtggttcgggatgtagaagctgaaactatgtaca

SEQ ID NO: 563101 - DNA, 979 bp, Homo sapiens
cagtcttgatccggactggaaccatggagggtgtagaaggagatgaagaaggaggttccattgttgtgccagaaatccttaagaaaacgcgacggaatgcgcagagctggaataatcaatgcgcccatgacaacaggatagattggcccagcagagagtgctgtcgcaaagggcagggccgcgacacgtcttactctatgacataagcacgccacgggcactatgcacagaggacactatagggccgagtgtacacgacacctggcaattcgaatggggaggatggtaagaaaagtctggctaacttctatgtacctgcagataacaataatggttagtgagtcactcaggtaaatcagtcgtgctatcaattggagtgagcaacaaatggttcggtgaaggtgtgagccagtttacattacgtcgttacgacaaaatattcaaagttggaatctgttgtgaaggtcaacaaaggcttcgattaacatgcattgatggataggtagagccaatatattgcgattgggggtacccagaatcttgaagtgctagaaatggtatttgatctaatatgcgtggtaatagagcgaaaatgaataaagaagcgaatgcttttgacagataacggctttgatttgatcgatctcttgagtaaatcactgcatcatctgccatggaggatttgattcctgagcatctatactgtggacaaagccttcaagaaggcaaataattgctgttggcctccaaatggtctcctccagagggtgatggagaactaatccaccatttggtcacgggggaactcatggacaggagaccaatcaagtaattaagaagataggtctcagatattttacgagtacaaaggacgttaatggaaaaacaaaaaatattggctacagaatataaaatgtaggacagaaaaaaagatgaaaaatgatcaaaaggatcataagtattaaaaataacaaaaaaa

SEQ ID NO: 563102 - DNA, 495 bp, Homo sapiens
gcggggataaaagaatccttcaccgtaatgttgggttccccggtcctctataaatttgagagcccccagtatggtgtaaatcttgccgatcatcccgatgcacccctgtcccaggtgtagggagcgccccctctccttagattatttgtcgatattggagcaatggtgggtttaccccctctggatgggaagggccctgccttttttctcaattttcttcccggtttcctaaaggaccgggcaaagggttctgcccctttgttcagggcccggggttatgaagtggctcctccttggtcccctcggaaacctgtgtgaggggccctctcccccccttatggttgggtccccggaaccccctttttgtttttggtttttctcttggcccaaccatgggcgtgggggatggtggggtttcccctttttgtttgttttttgtttgattttaaacaaaaaaaaaataaaaggggggaaaagccccttttttttttttta

SEQ ID NO: 563103 - DNA, 151 bp, Homo sapiens
  misc_feature (8)..(8): n is a, c, g, or t
  misc_feature (23)..(23): n is a, c, g, or t
  misc_feature (38)..(38): n is a, c, g, or t
  misc_feature (146)..(146): n is a, c, g, or t
gatcttgncccaaagaggtcctntgtgtgggtgccatnaggatcccgggctgagccagagaggctgggcctgaccacagtgccccctctctcaaaggtgccatggttcattcccctctaagggcacgagaacttggcctgaccatnccttt

SEQ ID NO: 563104 - DNA, 744 bp, Homo sapiens
tgggtttggtaaactcgaggggattattatttcttaatgggagaaagaaaaaacagcattgggggacaaagtcatacaggggggagtgtctcgagggagagagaggtgactccaactccaagagaggagtgcggacacacgtggacacacgtgggagaaacacaccgcagagcagagggtgatcactctctctctgagaggaagagacaacctcagagagagcagactccgcagagtggggcgcgcacacgatgagggagagacgacgagtggcgaggacgacgacgtctcccggagtagggggaagaacggtagcggcgccaccacgaaggggggcgacagaccaagtcggaccacagagggaaggacgccctctaattgcatggaccacacaaccaaaaagaagggagcaaaggtggtcggtcgggcgcccccaacctaaatgcttgcctacccgacgacaggccgggaggtggatagagattcaatcagcaaccgcataggccggccaccccgcccaggatgagaagaaagcgacagaacaaagcaaagcattagccgaggagcagcccacgccgcgccgaacctttgccctggaaatggaaaggataaggggaggagacgaaaacggaacgaaaaaagcggccaccgaacaatggcgagagaccaagaaaaggagagagcacgaccaccaccagacaaggcacacaacagcacactactttggccgataccatagacttg

SEQ ID NO: 563105 - DNA, 946 bp, Homo sapiens
aacaggcatccaggccaggcacatctctgctcacccgtgatgggctcaaggcgtggagggcatttcccagcggcgctgctgcccctgtggctgaccatgattcttttcctgggcccactgatgcagctctctatggatgcccttgtgacctggcagatgggcatgaaggtagtcctggccccccgctcctgggcccgatgcctacacagatcatgcgtatggctgcggaaccaagtgatcgccccgctgacatgagtgagctggtgtaacgggccctgtatgcatgcacaatgttagccaccggtgcatgggactgggccctgctggtgtaccaccgtgcaccgcgtacaatttacaggacgattgcccaattatagcaccactaattatttgacgacaggcatgcgatgtccgccaggagacaagcgatggggaaagaatctacctatgtctgctgcagtaccaggttagtcgctacaacaagcatgtcgattcgagtgcgctacaacttgcttatcctcttcatccgcacaggacacactgattggggacgggtaactctgccattcacgttctgcaatacatgggtttcccaactgtgttgtgctggcttggagcacccaagaggctggaccctgtaggacagggctatgcacctggagtgtggagaaatctgacactgcatactgtccagcacctcagggaaccacaaagctacaacggcagacatacccatctagtcgtgtctcggagcggcgccggggactcagaaggctacacctgaggtccaggacctatgtacacgcatacgcaagacctctaccggaccacggactcacccaacaggggattgaagacaagtgatggagacaagcaaaaacggagaacaggagggacaagccaaaaaaagagacaagacagaaaaagaaaacaaggcaacatcaag

SEQ ID NO: 563106 - DNA, 436 bp, Homo sapiens
gtcacccaggctggagtgcagtggcgcaggctcggctcactgcacctccgcctcccaggatcaagcgattctcctgcctcagcctcctgagtagctgggattacaggcatgctccaccatgcccggctaatttttgtatttttagtagagacagggtttcaccgtgttggccaggctggtctcgaactcctgaccttgtgatccacccgccttggcctcccagagtgctgtgattacagctgtgagcctccgtgcccaggccagtgttctctcttaaatgtgtttcaatatggtggacatttattgagcacttgtgttgggcgtttcaacaggaggcactggtacgaaaagtagcttgttctagttcatatatcatttgcactttgcttaacttgtataagtactttttactgtttaataaatattttattagaaa

SEQ ID NO: 563107 - DNA, 195 bp, Homo sapiens
actcgctattcgtcggcacctcgctattcatcggcacctcgctattgatcggcacctcgctattcatcggcacctcgctattcatgggcacccgtggctattcatcggcaccggtattcggcgagtgctgctgccgggggggctgtaacactcggaggggggcgccgatgaatagcgaagtgccgatgaatagcg

SEQ ID NO: 563108 - DNA, 383 bp, Homo sapiens
atccagatttcataatctgccattcatcgccacctagtttgatccactcactttcacacattgtttggtacaatcatctactaagtaggctttctctttatcctgtacttacttagacctctgttttatgcccacgtatccaaacttaatttttagccttggcctcccagagtgctgtgattacagctgtgagcctccgtgcccaggccagtgttctctcttaaatgtgtttcaatatggtggacatttattgagcacttgtgttgggcgtttcaacaggaggcactggtacgaaaagtagcttgttctagttcatatatcatttgcactttgcttaacttgtataagtactttttactgtttaataaatattttattagaaa

SEQ ID NO: 563109 - DNA, 791 bp, Homo sapiens
agaaaaaaattcatgaaatcaaaaagtagactatttcaccctatggcagctaagtggtcctggggcatggagtcttcaacctctctatgaatggcacaccttagtcacttatgttactttggtgtccccaccagtggtggggggatttggtaatcctagatctatgagtttgaacaaagtgaataatcaaaaggaaaataattcctgtgtggttcataaattaagcatcactaaagtctctgtgaaaggcatttctgtatggggcaagatttaaaatactaaagccttaggtcctattcatatttaaagtagcatgtttgtaaccgtgttactatttggagagagaagcagtgtgcctgcaaattggaagactaacctttcaaatagcaaaagagagagagaaggctgatattcggctttaaaataaagatggtgtggtcgtgtttaagtgtaactgtcactttcccagtgaaaatgatttcatatacatggagggtctctacaggtatgggtcaacgtctatacaatgtgcaacaaaaatgataccccaactttcattttatcctttggtatgtgtgaacactggaaactttatgactattgtacattatcaggggtttctggatataaagggtgacaacccagaaacgtatttggacctatggaaattcgggggtctcgaagaatatgggctgtcttggaataggcggcgaacggatacatggcccttacgaaataagaccgaatacagcaataacccgagtcgtggtagacaagctgcatcgggaaaa

SEQ ID NO: 563110 - DNA, 508 bp, Homo sapiens
catgccgcagacatgaaataaaagctttgcaaaggcaaaaaaaaaaaaaaaaaaaaaaaaaaaacaacttgttgcgggcggctcccggcccccgcgaaaagctcttctcaaacaaccacattgctgttggggagcgcgcggccccagagaaggtgtaacaagtaggacactggatgcaaacagctgtggtgcgcctaaggagagacccggcggccatgagaccaacgggcggggattccccccaccatataaaaacagccccggggggaacaccgagacgggtttcgagagaacaaaactctccagagaggggagctgcctgggaggagccacatacgcgggggagcctcctaactaaacccggggggagtcccaaaaggcagagccctccggaaattttcaaaatttatacgccccccgaaccacggaggaggccctcctaccccacaccctgccatacgaccacgcactacgtcgctctcatgagatcacacgtgcacgtgcgagt

SEQ ID NO: 563111 - DNA, 654 bp, Homo sapiens
acgaggagagttagagagagagagagagagttgagagagagagagagagagtagagagagagagagagtgagtgagagagagagagttttgtgacttcttcccgtttccctactcgtctttattctttgcgcgtccttttctctctcatttcctcttcttctgtttgcttttttcttcctttctatttttcttacttctctctcttttctccattcctgttttcttctcttctttgttcgctcttccttttctgttattgttctcccctgtaccctctctcttctgtgttccctccggttccttttttcttttttttccctttgtgtcctttaccactttccttgctttgatttcctcttcctcttcgtgtttctttcttttttctccctctgaccttcttattcccttcttcttttttctgccctctctccctcttttcttttttcttttctttcttttttgctcctccttttttccttttcccttcccgcttttctcttcttctctttcttctttttctctttttttcctcctctcccttttttctccccttcctctttttcttttgccctttctctctttttctctctctccctttctccctctttttcttctctctctctcttcttttttccttttttcctttcctctct

SEQ ID NO: 563112 - DNA, 310 bp, Homo sapiens
  misc_feature (238)..(238): n is a, c, g, or t
  misc_feature (273)..(273): n is a, c, g, or t
gttttgatacatatataatgatcagatcagaacaattagcatatccatcacattgaacatttatcatttatttgtgttgagccatgattgtgccacttcaccctgggcaacagagaaagaccctgtctcaataaaaaagaagagaaaaactggagtgagaactctcctcctcttcataatcatagtatccacgttagggaaaatgcttctgaggagtaactttaaagtactgtgtgtngcatcttcccttccaaaaccttggctttttttctnccttttttgttagggtgagggaaggggggaaaaccct

SEQ ID NO: 563113 - DNA, 152 bp, Homo sapiens
tatctacgctgtaaccctcattcccaattgcctactagaaaattatattataaataactgcggggcacctcaaatacacatatattgtggcgaccaaagccattatcctttttccttaacaccgccagagtaatgccatcctaaacttccca

SEQ ID NO: 563114 - DNA, 965 bp, Homo sapiens
ccttgcctcagattcagcatagcggagcggatccgatcggatcgtgagcggaatcggagcacaaccggatgctaggctcatgctgagaaggcggtctgcgtagaccactggagaactggatacactcatatggacacgattagtaacgaatcactggccgaagtggctctcatgtctcacagctaaggcaccgatcctgcaaaagattgcgagatagatcgtagtgtggtgtcatgggagttcagccgaggtcgtgacttgactagaatcaacgtcatggacccaggaactcgtttggactatcgagctgaagatcactccacacatttgcctcactgatagtacgagtgcacaggttcaatagctggcacgatcatggaatgtgagcggtctccttgaattgcgcagggcactcgtgtgactgatgccagggcacggtgtccaccatggtatgaacgggatagcctactcgtggaaggtgacattcgccagtgagggtgtaccacattctgggtgtggacatccctggtagtcagcaatgcagcaggagggctgaactcgcatgttttgacggtggggggatatcatgctgatcggggaccatatcaactacctgcgttgagcggtcgaaacctctcagagagtgcccatgatgcaaggttcggagatcgttccctgacagaggtctgggtgcctaagcacggcatatgcaggcaaggggcccctaagtgctgggaaacgccacggggcaaccagtgtacctgacggcaggcccatgctaaagcgtgcgaaccactataaaggtgacaagtccaacagtgcaactgacgccactgtgtacaaggcacagaatcctacccatccactacagacgactaccacagcaagataatggacacagaacacaccaacaagaaacgactgagacgcgcgactttaccctgtccgtcacacgcgcacaaact

SEQ ID NO: 563115 - DNA, 294 bp, Homo sapiens
caacaggagtatgacaatttttcaacttgagtgcacacactgtcgccggaatcccgcgttacagtgaggaagcgcattcgacagcgcgcgccggatcgtgggggccgacggcgtgactctgtggttgcggacctggcggagatgcgcattggtttcgattgtagaccattccttttaggagttgagaaaggatcaatttatacagcattctcgacctatggtttgtggtgggggaaactagatatgtggataaaaatacagttggcaaaataaaaatgccaattttacatttga

SEQ ID NO: 563116 - DNA, 1938 bp, Homo sapiens
ggtcctcggagcaagcggaacaggacacaggtcttccccaccataggaattgactttaaaattaggaccatagagctcgatggcaacgcagacattaacactgcacgcactatgggcacacagcccgcgtcacggacacggcttctcgcgacgcactcaccaacgcgccctacctacagcggcgcctgccacaccgcggccactcactgcctgcgctcctaccgcaccactccaccccaaccgcagcaaagctccctctcgcacgacaccactcccgcgaaccctgggcactctcgccacaccactctgaccgcgacgccaccggccccctccctgcccaccacaccgcttccccacaccccgcaactccactaccctctgcgcgcaacccaccacgctgcctgcaccgcctgcacactgccacccaacgcacgcacaccacgctccccccccaccgcgcaaacccgcgcgcccaccgcaaacccacgccctgcgcccccccctccgccaccctaactcggcgaccacttccacccgcctccccacctgccccacgcaaccccacgcgcgcccgccacacgcgcccccacaaccacttcaaactcgccttgcggcacacacaactcgccaccttctctccccccaaccctccctcccgccccccaacgccaccccactcacctcccacaccaccgccccccccaccaccacctgcgcgcaccaccacaccaccaccacctccccgcgcacccgcgggcccaaaccccacggcacccccccccccaacgcgggccgcgaaacgcccaaaaccccccacagcgcgccgacgcccttccccgcatcaccacctcccgagccgcaccccccggcggcaacccccaaacccccccaacgccaaacacccaacccgggcacgccccgacaggcccctatgtgcttttctctcccccagcgcaacgctggcctcggtcatctcccgtttcttccgcttggccttggaccacggcctggcgcaccaaccccaaccgcccagggtcccccctttttcaccccttcccctctgccaagcccccccccttcccggcccccttcccaccgcgccccctccccaagcggcctattggcaaccccccttggcccggcgcccccccgttgccctctctccccttttgggacagccgctctcgcgacacgcccccccccccaccgcctttccctcaacaccctttccacacgggccccccccgccgcggctgcggctccccccccgtcattacgcccccccgaaccgccgccccttctcccctcatatgcgccccgtggccccgcccccctcccggcgtgtcgcgccctccctacaacccgccggtcaccccgcggtcgcccgtgctgcgaccgtccccgcaatccacgcccggccgaagcggcacctccccccccagaaccgcggcgtgcgcccccctaacaaccccccgcccaaccgaccgacacacacccttgcggccccccacacacgcctctcgcggccgcgcccacaaacaagcccttgccgccccctccccgccaacttctcctcccgctcacacgcccctacaaccccgctgggcgcccctccccctcgggccaaccctccccgcctcctacccctcactcctccaacacaccccccctccccccctcgcgccccacgccacaccttcgcgcgccccccctctcccaccccccccctcccccaccccccccacccgcctccccggcgcccccctccccctcccccccccttcccccccctcgcccccccacccccccccctccccctgcgcccccctgcccacacccccccggcgctgcccccccgcccccccccccgcccccccgcccccgccccctctcgcgcccacctcctcccctctccccccacccgccactcccaccgcc

SEQ ID NO: 563117 - DNA, 308 bp, Homo sapiens
gaaaatgaattggcaacatttacctttttaaagtttttgacttttgctcacgcctgtagtcccagcactttgggaggccaaggtgggtagatcatttcagctcaggaattcgagaccagcctgggcagcatggcgaaaccccatctctgcgaaaaatacaaaaattaggtaggcatggtgatgcatgtctgtagtcccagccactcaggaggctgaagtgggaggattgcttgggcctaggcggttgaagcagcactgagccacgatcacaccattgcactccagcctggtgacagaaccagtcttta

SEQ ID NO: 563118 - DNA, 944 bp, Homo sapiens
catgtgtgcacggttattcgccacagttcttaatccaagtgctgcatcttacaacacggggtgggggaattcagagcttaatatcaccgtaggtgcactagcttctggtgaatggatagtaagatgccctgcagcactatcaggtgagcttttctggaatcttgttctcagtgcgcttagcgatcgctcttacctgtgacttggctagttgtgtgatcagcggaggaggtgaggatcaatggttcaccacacgctcttctccgtcccatgtactgacccagtgccttaccgatgttcctggtggagctgggtgtttctctcgctcacccatgtcccactaacacgtgccgaaaaatctgtgtatgtgccaattgggtgaggtcagccccaagcctcctaggggagtcagggcaatacacacggtgccctcatcgtggtctagatgccatgtcccgtctctatgagtagacttgaggagaaaggcggggaagcttcctcagccttgcagactatgctgtgcgcattctacctagccagagctcgtgaaaggcagtgctcgtctgtgttcttgtacctgggaccaaagtaaaaatccaagcacattccccttgcagttaggggaggccctaatgccttctctaagtcagagaggcagcgttatcaaactcagcgccgatactttgtttacatgggatggggaagatgggagccagggtagtacagagtgggatggtcaggacctgggtccattgcaaacaaaatggggactctcattgggtagggaggtcactccctcgtactcactgagtctaggagtagggtagggttattgccccaaccattgcgatgggaggtggagggacaggctcagcctcctgcagtgtctaaatgaaggcctaaatgtgtgaagtgcgatttctgataaatgtgtacgtcaccacccg

SEQ ID NO: 563119 - DNA, 158 bp, Homo sapiens
gagcttgggaactgcggcacaaggtatatggggatgggaaggggaggagtggggagcagaggtggtgtgaagaaaccaagaggagaaaatgaaagcggtgcctaggcaagttgaggtggtcagtaagatagagacaggtaatccactatgcacgaaag

SEQ ID NO: 563120 - DNA, 421 bp, Homo sapiens
atgagtcttttatattggaaatactgtgaatggaaaattgccaaatcccttcttagtatattttaagcaccctacaacactttacctccctgcctttagtggtatttaaacatatggccaagttagtatttgggtttgattcctttggtgaagattaaggcatcaaaacatttcttgaaatgttcgagtacaaggctaaggcacacgtcaactttcaaaggtcatgacccattcggtttgcatatgttcaagtgagccattaggatttgcccaagtgcaataccacaaatcgagaatgtatatttcacattttgggcttgaacacattcatgcatatattttgggaaacctcatagggatttagaaagaatcatgaccggaatcaaaattcttccaataaaatttctatttaaaaatctct

SEQ ID NO: 563121 - DNA, 467 bp, Homo sapiens
ctgcaaactactctctgcctctctcataaggatcaaagcaagacccctggattataagaagccagccaaagtgcatctgcattcatggatacatatatcagtttcttcagaaaaattctctctctgccaataatacatcagatcatgtgatatctgcccatgtaacaattatggaaacaaggccaggcgtcttggctcacacctataatcccagtactttgggaggccgaggcaggcggatcacttgaggtcaagtgtttgagaccagcctagccaacatgatgaaaccccatctctactaaaaatacaaaaattagccaggcttggtggtacacacctgtaatcccagctactcaggaggctgaagtaggagaattgcttgaacccaggagatggagtttgcagtgagccaagatcacaccaccgcactccagcctgggtagcaggacgagactctgtcttaaaaa

SEQ ID NO: 563122 - DNA, 195 bp, Homo sapiens
aaattttgtgccctttgaactccatggcatattcatcctctaacagcgacataaaggaccacgaggcgcgagtgcggttccaacctgagcctctctgtgggctatttcccctgtgaggacaccccctgtgaggacacaaccctcctgagaagatgcaccttccaagggttcttccatccactttctgcctcccgt

SEQ ID NO: 563123 - DNA, 188 bp, Homo sapiens
  misc_feature (91)..(91): n is a, c, g, or t
  misc_feature (134)..(134): n is a, c, g, or t
  misc_feature (178)..(178): n is a, c, g, or t
gtcaagtctaccatcattctagaaggaaaaggcatggtgggaattcagcacctgaacttgtatttacaccagcctcggcatctggcaaggnaatagcgattgttcatagtgatgcagagagagaacaggaggangaagaacaaatacacacaaacaactgatctagggagactccaangatccaacag

SEQ ID NO: 563124 - DNA, 132 bp, Homo sapiens
ggtagaccgggcttgtgggttgacgatggctgtgggttgaccgtggactaatgggttgaccgtggcatgttagggttagaccgtggatagatctttctaaggatatccttagaaagattaagccacggtcaa

SEQ ID NO: 563125 - DNA, 834 bp, Homo sapiens
agcggggttgttgcggaaccaggaggtgaagcgatgcgctgtgcccgcgtggatctttaaggtctctcggctgctgggtggcattccacaacccaaaagcaggtgaccagaggttcttactgagtggtgattcaagacgagtaagctttacattccacggtacgatggtactgggcccagcaactttccagctgtcatgttaggtgaacgattttcgatgctgccaatagcacctattcagtgggaggagcggaacgtcattgccattcaaggacctggaggatacatgtgtgagtgcatcccttcagaggctaaagagtccatgtgataacgaacatagattggcgcttgacaaggccctttgaagaccccaatagcagccggtcacccatctatgacatttactggctgcgcataacatttgagctttacgcgaatgtccgacgcattgtgtctctatcgacacggcctataatagagcccttacagcgatgtaaatagtggtgacgcgattcgaggagatagcacagaaaggacgaatacatgtgtgcaattgaggcctgtgatagtcgatggagatcgtgcagagtatcaagctcatcaccgagggggcgagctagcgcattgctgactttgcctttgaggtattgcccggaactaaccaccggagcaacgtacacggcggtgcgacaaagcctgacatgatgctggatgtccgatggggctgaggctacaactgtgcagggcaagttgctgaaagcttgtaggcattttcacattcaatggaggggtgttcctttgatacgtatgttgaatatgggtacagaatcttcc

SEQ ID NO: 563126 - DNA, 323 bp, Homo sapiens
tactgtgctttgggacggcggcatagtatgtaaaatatggaacttatgaagttaacaccagaaaaggtacagaactggaacagtgaaattcttgctatgcaaaaacctcttattgccaaacctatactgcaaaattactctttgtcaacagactgaacgggaaaaaatactaaacgaattcctccactaaagttctcctacatgccagttcattctattgaccaccgaatatcaaacactcagaggaaaatcacagacgatactattggagatgcaaggggctatgaagttattaagccgatattaagaggaataggatggat

SEQ ID NO: 563127 - DNA, 97 bp, Homo sapiens
cccctggggggcccttaacttggggattttttttcttaaaaatgtggaataaagcctttttttaaatttttaataaagtgttgaggttgctttccca

SEQ ID NO: 563128 - DNA, 1058 bp, Homo sapiens
  misc_feature (369)..(369): n is a, c, g, or t
  misc_feature (825)..(825): n is a, c, g, or t
gggctggtacggccgggagttaggatgcaggtcactgcgtgggttggtttgtgtagagaggcgtgagcgagcccgttgtccggagtgcacctgctgcctgttctgtccctcccgggagcccccgccgctgtcgccgtcgagtcgccatggaagtgcagaaagaggcacagcgcatcatgaccctgtcggtgtggaagatgtatcactcccgcatgcagcgcggtggcctgctggctgcaccggagtctgcagctgtctgctggtcatgcgcagcgcccgggagctctacctctcggccaaggtggaggccctcgagcccgaggtgtcgttgccggccgccctcccctctgaccctcgcctgcaccctgncccgagaagccgagtccacggcctgagacagcagaccccctgactggtgagcaccctgtttccggagccaatggacacgcaggaggcgcctgacagccgaggagacctccgcctgctgtgaccccgcgccccgccaaagtcagccgcaaacgacgcagcagcagcctgagcgacggcggggacgctggactggtcccgagcaagaaagcccgtctggaagaacaaggaagaagaggagggagcgtcatccgaagtcgccgatcgcctgcaggcccctccggcgcaagcggagggcgcctatcccaactggcccgagtactgcagaggcgcttctccgggctcctgaactgcagccccggggcccctccgacggcgccgcccgcgtgcgaggcaaagcccgcttgccgcccggcggacagcatgctcaacgtgctcgtgcgggccgtggtgtcttcntgatgaccccgatcggcgctgccggagctcagagcgcgcgtcgaaccttcgcccgagggagcatacttgaggcgaggcaccccttcatcttgggggaacgccgcgaaaacgagaaaaagcacagcggctctaaaccagaaagcctgaccagggacacacaaaggacgaacacacaataaccaggagagccaccaaacagcacgttacaagccacaacaacacaccaaaaaagc

SEQ ID NO: 563129 - DNA, 349 bp, Homo sapiens
acttactatacacagatgtactgctttgacacatcgcacactctcgtttccttgcccatagttcctcgaccgatactggctcattttcctttcttcagtcacattccggggcgtgatcacttacagtaaaagcagcgtttagaactccagctcctcttaacccacttgaaatatttggattcacggtcctgttgtgtttgtttcccaagctagaacattttctcctaagatacgcctgagattccttcctcagggcatagttaatacatctaggacccagagttttgcaactcggggcagctgtttttcccagtggccggcaccttgagccccataccttattcattct

SEQ ID NO: 563130 - DNA, 150 bp, Homo sapiens
  misc_feature (138)..(138): n is a, c, g, or t
ctctattcacttttaatgagaaaatggttatgtcctgggcggagacaccatcatctcttagctgaaaaattcaatcattgtccctgcttgtgccctctttcagtccatattcaacataaccactctgccctgtcacanatagtcagttat

SEQ ID NO: 563131 - DNA, 304 bp, Homo sapiens
atcccttacaccccacgatcactctggaggtcagtaggggaaggagtggggtgatgtgagtgtcatagaggtacagtaggggaaggagtggggtgatgtgaacacttatggaggttcagaacgggaatgagtgaactgatgcgaaagtaatgccggtgcagatagagggaaggagtggggctgatgtgatcactatggaggtacagcaagggaaggagtggggtgatgtgtcgtgtcatggaggtacagaaagggaaggaagtggggtgatgtgtaatggaggtacagtacggaacggagtaag

SEQ ID NO: 563132 - DNA, 293 bp, Homo sapiens
gaacgtcttaggttatcaataagctcctagttcagacggcatgggtcaattcacaaaggaggacaaagctactatcacaagcctcttgggcaaggtgaatgttgaagatgcttgaggagaaaccctcgcaaggctcctcgttgtctacccatcgacccagacgttctttgacaacttttgcaacctgtcctctgcctctccatcatggcaacccaaagtcaaggcacattgcaagaaggtgctgacttccttggagattccataaagcacctagatgatctcaagggcacctt

SEQ ID NO: 563133 - DNA, 703 bp, Homo sapiens
  misc_feature (59)..(59): n is a, c, g, or t
aacgcgtattaatggtcttttttataaaggggtattaataatttttctgttgcctagtncggggcgtaatttgtatgtcgaaagatctttgaatttgagaaaaagagcgtgtcctgcaaggaaatattgcgtacattctgcataggagaagagtactttttatgaaaagcagagggtatcgtggcataaatgtatgggtgtaagaaggtagtataaaagaagagtgtttacagagcatggtatcagttgtgttaaagcgcagttcagttatagtaaacatatgttgtcacagaaagggttagagctgagttggcatataggtgtgcaagaaaccttctggatggcagctcatgaacatagaacgttcagctttcagatgtagtagtgctatgagcagttactgctacatctcgtaatagtaaatgtagagatgtgttgtaaataagcatcgggtacgtgtcagaggagcatgactttgccaattctgacgggtcaacagttgataggcaatgctttgcagatgggatggtggctagataccgagtgaatgtgatgaactccacgcctttatagtataggtcggtcgtaaagtaatgctgatatatgagcaggtttaagcgtggaagttgaaagaaaatctctctgtctctctctgtctctctctctctctctctgtctctatagctctctctctctgtctctg

SEQ ID NO: 563134 - DNA, 147 bp, Homo sapiens
tgaagagaccgtgttgcaatgtgtgtttaaggcacagccagaagatccgtgtccacccatgtgccaaataagacaagtgggcaaaggttaaccaaactggcaagaggaaaaatggggactatttaatggcgttgtggaaaagggcct

SEQ ID NO: 563135 - DNA, 385 bp, Homo sapiens
gggggattttcccccgggggggttttttggaatccgtttttggggacaaaaaaaaggcctttttttaaaaaaacccccttttggggggggtttttttaacccttttaaagggccaccccttcccaagttttaaaaaatgggggatatccttttggggggtatcggaaaaatttttgttttttttcccccgggggcccgggggggccaattttggggaccccttttttttttcttttttaaaaaaaaccaaaattttttccctttaagattttttaaattccaccttttcccccttttctttttttttcaaaaaattttttttttcaaaaaattttttttttttttggggggccccggaaccctttttaaaaccccccgggcccca

SEQ ID NO: 563136 - DNA, 1088 bp, Homo sapiens
gctgcgccccaggtgagcggcagagggggcggggtgaggggctgagccggaggcggctcaccatggcgggacaggtgcctggtctgctacaaaccagtgcaatgagccatgccccgagtcctgagactatccctcgccctagctagtctgggcctccatgcttgggaccgtgggagcgggccaacagatgctagtgtctggagacatatgataaatgcatgctcagtaccgcgcgaccaagaccgccgcaccccgttagatccagaccccaaggtacccttgggcaccatgggccagagagcattaccttcatctctggctctgctgagccggcccttgagtgccccacctgctgcctgctctggcgagcctgggtgtgggagtggtgccgggctgccttctgcttccggcgttgccgggattgcctccagtcgctgttggagcctgtgtgcggggatgcagccctgtcctgtctactgaggactccaatgaggggactgctgaagccaactgggccaaggagcacaatggagtgcgcgcccagcgccatgatcgtgcagcctgccagatcggggggatgcgcatgcggctcaagtcaatcattgggcaacgaggttacagttaccaccgatagttcaggctctaaatggcaatccctgtgtatccccttacccgagaggccaagaatttcccttcaaggcacctggaaatggcggacttccatgcttgaaaagggacgccacctgtctcggataccacctatgcccagtagacaacacattgtcgtgcccgagcgcactcgatattgagccaggatagacatcgtatggccacacagaaggagggagcaaaaccacgcttctggccatggcaaggctgcgagcgtatgtacacagtgaccggaggactgggccagaggcatccacatggtgaaggcgctacaaatggagtagcggaccgactcaaagaaatatggacgaaactgcatgccgagccacgaaaatcgaccttcgccgtggcaggcgaagtcatacacacagtcgtgctacaggacgacaggcgagagtcgtgcaacgttcagcagagaa

SEQ ID NO: 563137 - DNA, 865 bp, Homo sapiens
gacctgcgctttcccattgtgctagctgaaagttaatgtgtctagcgggccaaatcagggacatgccggcattagcgggatgagtgggtgtcccgggagggatgtggtcattgacggccagtgaagggcgagagtaccacaggaccgacttgcttccttgtgagctggagatgagcgggctgggtacccgtggaataggccatgcaggccacgaaagagagtgacagcgagctcctcgaggatgaggaggatgaagtgcctcctgaacctcagatcattgttggcatctgtgccatgagcaagaaatccaagtccaatgccaagtgacgtcaacatcctagagcgactcgtgcagatttgactacctgactgtcgtcattcgtgggagaacgatgtaatccttaatgaaccgtgtggaacaagctggacagtcctgccactgcctcatctctttccagtccaaaggctttcctctggacaaagctgttgcttactccaagcttcgaaacccctttcttatcaatgatctggccatgcagtattacatccaagataggagcggaggtgtaccggatcctgcaggaagagggtatcgatctgcctcgatatgctgtgctcaaacgttgatcctgcccgagctgaggaatgcaacctgatagacaggtgaagaccaagtagaaggtcaatggagctgtctttccaagcctttgtggagacaccagtgagtgcagaagacacaaagtttacatctaataacccagttcagctggacggaggaagccagcgtctctatcgcaagattggcagcgaaacagatgtaactccttctgaaaaccagtcggaacacaggggtctcgtcctctag

SEQ ID NO: 563138 - DNA, 253 bp, Homo sapiens
ttgtggttgtagctctggagtcagactaactggatctaacccatcttgacagctgtgtacctgggctcagcaggaatttaaactcccagtatcctggcggggctcggtggccacacctgcaatcccagcactttgagaggccgaggcgatcccagcactttgagaggccgaggcgggtggatcacttgaggtcaggagttcatgaccagcctgcccaacatggcgaaaccccatctccactaaaaatacaaaa

SEQ ID NO: 563139 - DNA, 391 bp, Homo sapiens
tcagtgtcaggcagccacagtggcatcaaagccaccttctcggctttgatgttttccaccttctctgaggaagataattatgagtctgttcatgaaagcttttggtagcagcagaaacggcaatgtcagggcctaggcggaaggttcccaagtctgctgagccctgtgcatctgggcttgcgacaatacctacacacctccgacctgggcacccagctggaagggccacctgatcggcgcagaaaggccactgggcggaatcctggcacaggctgcagatgctgctcctggggcttagcactgagcagtttccacaggggcccctggtttaaagccagcagcaggacgaaggttctcgtcttactcagtccacagctggccacatcttcat

SEQ ID NO: 563140 - DNA, 250 bp, Homo sapiens
atgaagatcagaatccacgctagttttgcacatgcagtatcttgtcctgaagagtccttgtatactctgactgcttggatgtcatcctaggcaaagcaagatagatagctatcagcaaaccggaaggaagtgcttaagaaaacgataccagccaaagcctaaacaagaactgttcacaccgacatttgattatttgcatttctagagtgtctaaagtacttttggattaattctctctttcagacactta

SEQ ID NO: 563141 - DNA, 157 bp, Homo sapiens
agagcctgatcttgtcgtgctggcgtttttaacgtgttgtgtccgttgatctggggctactgtacaagtgtggtagattcttcctgaaggccagcgcttgtagagctggcaggggtcagtgttgtgtgtagcgagccagtgctgctgtgcgtgtgtg

SEQ ID NO: 563142 - DNA, 938 bp, Homo sapiens
  misc_feature (141)..(141): n is a, c, g, or t
atacctaatgcttaccggaacgaaaaattctatgctatatacaactacgtcataatggccccgaacgtatgtaggccccgtacggtgcgtactacacacccttcggcatgacaggcctagtagaatactcgttcaccaaangagcccctaaaacccgtcacatctacccatcacaccctctactatccaccagccctcggaccatatgagcctctctaccaataccgctcgttcgtaactcatgaaccccgcacatcccgcgatgaccctagacaccactgcgttggaagatgcaagagccttgaaggactgcgctcatagaattctgagcgctactctctacgtcttatgcccgtgtacctccatgacctctgtatcatgccgtgaagccatggatagcccgtgtttacctctcctcgaatacggggcaggcgacatgctgcacgcctaggataaggcacctacacaacacaatcttcctactaatcgaaaagctgcgacacgctgaagcgcggataccagtatgcgttagctcatgcatacctagtctccgcgtcacaatcaccccgtaggaccttccctcttgatacccattctcaccacacgctttcagtcaagcaaacaagcggaggaagcatcgcgtactcgaatttagcatacgcgtaggccatttcagtgagcaccatgtgtgaccatacctcctggactttatcgtccaagacccgatacgagagattcaaccgaatcactctggcgacttctgcctaatggaggagtatcgaaactcgttctgatggcctgactgaatctaggtgtgccgaacggccacattcgtgctaattactagatacgacgagcgtacctgatcgctggtcatcataaggcggcttcaccgaatattgtggggctagagatgggaattgtgaacgtggtcttcc

SEQ ID NO: 563143 - DNA, 492 bp, Homo sapiens
gacttggaaccaacccaaatgcccatcaatgatagactggataaagaaaatgtggcacatacacaccatggaatactatgcagccataaaaaatgagttcatgtcctttgcagggacatggatagagctggaaaccatcatcctcagcaaactaacacaggaacagaaaaccaaacactgcatgttctcactcataagtgggagttgagcaatgaggacacatggacacagggaggggaacatcacacaccggggcctgttggggggtgaggggccaggggagggacagcattaggacaaatacctaatgcatgcggggcttaaaacctagatgatgggttgataggtgcagcaaaccaccatgacacatgtatacctatgtaacaaacctgcatgttctgcacatgtatcccagagtgtaaagtaaaataaaaaataaaaattaaacacaaataacatttctaataaaacacagctcttatctgttctaac

SEQ ID NO: 563144 - DNA, 1137 bp, Homo sapiens
tattctctagaaagcagcaaagacagtggaacactatacctataatgcggcgcatgagctggagtcctagggcacagctctaagcctccttattcgagccgagctgggccagccaggcaaccttctagggtaacgaccacgatctacaacgttatcgtcacagcccatgcactttgtaatagatctgtcttcatagtaatacccatcataatcggagggcttgggcaactgacgtagttcccctagataatcggtgtcgccccgatatggcgttataccgccgtcataaacaacataagcttctgactcttacctccctctctcctactcctgctcgcatctgctatagtggaggccggagcaggaacaggttgaacagtctaccctcccttaggcagggagactaactacccagcgctggagcctccgtagacctaaccatcttctccttacacctagcaggtgtctcctcgtatctataggggccatcaatttcatcacaacaattatcaagtgataaaaccctctgccagaacccaataccagaacgcgcgctcttcgtctgatccggtcctaatcacagcaggtcctaattactcctatctcatcccagtcctagctgctggcatcactatagctactaacagacgcaagctcaagaacacttcttcgacccgcggaggaggagaccgtattgctaatacaacaccaatgctgattattccggacacctgaacgttcatatccttatcctaccgggtcgggaataatctcccattgtgacttactaaccggaaaaaagaaccatgggaatcaagggatggctgcgggatgatacaactggtcacaggggtaaccgggtgaacaccaaaatttaacgagcagaaaaacagaacaacagcaaatatacacccggcgcccaaaaacaggcgaccacccggggcgacaacagcagaagcgcacacccagaacaaaagaagaagacggacgagaacaaaaaacagacgagagacaaagagaggaaaaacacagaacgaaagaacaagagaagacgacaagaacgaagaagaaacagcacaaagaacacagaagacccacaaccctatatacgacagaggaaggaccaccaaacaacac

SEQ ID NO: 563145 - DNA, 911 bp, Homo sapiens
actaccaaatacaaccctgtgggggccagtgagctgcgtgacctgtatttgaaaactgacaactatactagggaggagagtacttatagctacggatggtcaaggaggtacgcccgggagctaggaggagagcacgtaccagtactcagagccacggctactccatctacggccgcagtacctgaggagtggcccaaactggcctactggttcataccagcacacaaggtctacttctctccaaacatagcagctgtgcatacaatacccagcgtgacccccggatatatatagacacatatacttcaagtgtcacaaagcaaagctaagtagcccacaaactatattggcgaagcttgcttcgcgagaaacattcttacactaggcctccacactattcgccatagagtggccaactgcataccacaccgccacaaatggattcaatacgcaggcagcgttcaatccttccttactctaaaaagataatcgctagaacgcgcggatatatcgagaagagcagtagggccatgaatggccgcttcacctagcccgacgaatgcagagcgctatcactgatttgtttcccgcataccacgtcagttcccgacagaacacacgagaaacgtttatggtacactaagatgatcaagcaggataagccataatccccgtaacaaggtcacacgttaccgtggataccttcacagttgttaaagctcagcccatacgaagggctggctcctacacaagccatacgcgcattatgaacgcgcctgtatatcgagtaccggctgcccctgctaccgaggacaacaagactaacccaaagacaggatcccaacacaaacccaacctagcgaaatctggcccaaccatcaactgctaacaaccaatatacccaaagggct

SEQ ID NO: 563146 - DNA, 349 bp, Homo sapiens
tcgtctagaggatcccgtaggtggttgtgggtagggaaacagagtgggtataaagagtcaaagggccaggtgcagtggctcacacctgtaatcccagctactcaggaggctgaggcagaaggactgtttcaagccaggagtcagagaccagccttggcaacatagcaagacccatcgctgcctccgttaactatagtcatgcatcgcttaacaatgggaatatgttctgaaaaacatgtcattaggtaatttcattgttgtgcaaacaccatacagtgtacttagaaaaaccttgatgatatatcctactacacaactaggctatgtggtatggcctatcactgctagg

SEQ ID NO: 563147 - DNA, 206 bp, Homo sapiens
ggccttctcaaagctgtccttgtctgtcactgagtacacgatgacatatgcatctcccatggccatgcagtggccaggtagccagtggcccccatcctagcaaatacagacacacacaaatatacccaatagtcctcatgccccagctacaaggctgtcactccctgtagcccctaccccaaccctgccctggccctcagcctgcg

SEQ ID NO: 563148 - DNA, 423 bp, Homo sapiens
aacctcgatatcatttgcaacactatatatacgttaggtgtgatgaaagaaagctcagttgcaggaaatgaggaagtcaaggatcagagaggagagacagcaaattcaactacctttcacagaagtgaggtggtgaaggaaagcagagcaatcccaagtgatagcttaaggatcaaagctggtttagaacaaaaaagatacttggtagctaaatttttcctctaggttcaggcacaggcttgaagcacacttgtagctcagagcaggagagttgcccagaaggacctgaagagtgcaaagaatggagattatttccggtccccataaaagtccagagtgtatgtgggatctacagcacagctagaacggtttgacccaacagggagtatagacatttctttctctgtgacagaagggtcagga

SEQ ID NO: 563149 - DNA, 445 bp, Homo sapiens
  misc_feature (1)..(1): n is a, c, g, or t
  misc_feature (130)..(130): n is a, c, g, or t
  misc_feature (204)..(204): n is a, c, g, or t
ntggttccaaggatctggcccaacccccagccttaggtggatgccagatggatctggagggaaaaaccactgcccaggggacttttaactttctctcccaaagaaaaggaggaaaaaattcctttaactnccaaccctggtaccccaacaccatgaatgttaccaatagataggaaaggagtggtgggtcttctcttcttattnttccaacacagggtttctcagccttgccattattggcattttggacagggtaagtctttattacgggagggctgtcgtgtgtacccctattctcttcccactagatacaagtagccccttccctctaaggtcataacaatcaaaaatgtctctgcatagagccatatgtcttgattaaggactactgctctaagtagttgcatggtatgtggatcaggggaggtaaacctgtcatggtatc

SEQ ID NO: 563150 - DNA, 1333 bp, Homo sapiens
cctgcgtttcgctggccggtctcgtctgctcgctgtgctggtgttgcctccgtgctccccacgattggtggtctcgtctcctcttgcgtgttgtccctccgttgtgccctcggtactgcctgctgttcctgtgggatgccttcacggctttgtcgcgcgtgtgcgccatggatatcatttgcctgcctcgtggttgtctttccaactacgccctgctctctctgagtcccgcttccctcgtccaagggtgcgttctttcgtggcaagggctcttgtgcccagcatattctcacattcgtgtactctctttacgggatgctcttgacgtacgcaccattcctttggctttctgattggtaagacccccaggtcctgtgtggaacattgtcctactgaacgatctatacggaaatgccaagtcaaaagggggcttgccatctaaattgaaggccttgcccttgaagtgtaagactctctttgctttgcccgcagtcattgagcacatccgaggatgtacacagagcctacttacgcaggaattccataagaccctggaagagccattctgaagcgacacatcagggcaacttccagcggctcctcatctctctctctgcagggaaaccgtgatgaaacgcacaaacgtgcacatgtcactcgcccatgagagatgcccaggagcctgtattgcggccggtgagaaccgcctgggaatcagacgtagtccaagttcaatgcggttctgtgctcccggatccgggcccacctggtagcagttttcaatgagtaccagagaatgacaggccgggacaattgagaagagcatctgccgggagatgtccggggacctggacgagggcatgctcgagcctgtggtgataatgtctcaagaataccccagctttctttgcggagaggctcaacaagcccatgagggggccaggaacaaaggaccggaccctgattcgcatcatggtgtctcgcagcgagaccgacctcctggacatcagatcagagtataagcggatgtacggcaagtcgctgtaccacgacatgctcgggagatacttacaggggatataccgcgaagattctgcgtgaagatcagctggtggtcatatgactcgaactagtgaactggtggctcacattctgcacgcaccgttgcacggcaacatccagtgccaggaaataaggccataaagaatgtctgtttctaacaaatccacaaatagccctcgagattcaccgtcctagagcttaggcctgtcttccacccctcctgaccagtatagtgtgccacaagggacctgggtcggtctagaattacccc

SEQ ID NO: 563151 - DNA, 110 bp, Homo sapiens
ctcggtcactctaaggatcctcatgtcatcagtggaagcgaaaggcagtctctgtgcgaaatcacagtggaagagaaggcagtctctgtgtcaaatcaccagtggaagag

SEQ ID NO: 563152 - DNA, 522 bp, Homo sapiens
  misc_feature (118)..(118): n is a, c, g, or t
  misc_feature (313)..(313): n is a, c, g, or t
  misc_feature (462)..(462): n is a, c, g, or t
gaatgggtctgccgcgagtgcgagcaggttgagatggggcgtgagcaccagcacgatgggcggcatagaggcttctccacagttcttatggttgtggagtcaaaatgtactggtggtnaatttggtcaatggatggctgcggatctgttcggtgatcgaacgtttaatcaatgcaattgctggatcaccggctgacgtgcattcggttgaagtattgcgcgaggttgctgaacgaggaggactttcgagcattggccgggtcgttccagtcgttggcatcactggttacaacccggcattcgccgggtttttngtggttactaatctgtgaaacagcttcgggaataggagccggttgtcgggtggcagagggaaattgttacctgacggaaaataacctaacggatgggttacgatgagagtaggtgcttacaaaggctatgtcatttcggtgtttatcanggatgagcattgcccgccccatgtgcatgtcaggcagggacccactcgggggatcctcta

SEQ ID NO: 563153 - DNA, 577 bp, Homo sapiens
  misc_feature (7)..(7): n is a, c, g, or t
  misc_feature (82)..(86): n is a, c, g, or t
  misc_feature (89)..(90): n is a, c, g, or t
  misc_feature (109)..(109): n is a, c, g, or t
  misc_feature (113)..(113): n is a, c, g, or t
  misc_feature (142)..(142): n is a, c, g, or t
  misc_feature (147)..(147): n is a, c, g, or t
  misc_feature (152)..(152): n is a, c, g, or t
  misc_feature (162)..(162): n is a, c, g, or t
  misc_feature (164)..(164): n is a, c, g, or t
  misc_feature (179)..(181): n is a, c, g, or t
  misc_feature (186)..(187): n is a, c, g, or t
  misc_feature (213)..(216): n is a, c, g, or t
  misc_feature (218)..(218): n is a, c, g, or t
  misc_feature (226)..(226): n is a, c, g, or t
  misc_feature (229)..(230): n is a, c, g, or t
  misc_feature (235)..(235): n is a, c, g, or t
  misc_feature (240)..(240): n is a, c, g, or t
  misc_feature (263)..(263): n is a, c, g, or t
  misc_feature (265)..(265): n is a, c, g, or t
  misc_feature (271)..(271): n is a, c, g, or t
  misc_feature (276)..(276): n is a, c, g, or t
  misc_feature (283)..(283): n is a, c, g, or t
  misc_feature (306)..(306): n is a, c, g, or t
  misc_feature (323)..(323): n is a, c, g, or t
  misc_feature (338)..(338): n is a, c, g, or t
  misc_feature (354)..(354): n is a, c, g, or t
  misc_feature (358)..(359): n is a, c, g, or t
  misc_feature (363)..(363): n is a, c, g, or t
  misc_feature (383)..(383): n is a, c, g, or t
  misc_feature (386)..(386): n is a, c, g, or t
  misc_feature (388)..(388): n is a, c, g, or t
  misc_feature (396)..(398): n is a, c, g, or t
  misc_feature (402)..(402): n is a, c, g, or t
  misc_feature (417)..(417): n is a, c, g, or t
  misc_feature (434)..(434): n is a, c, g, or t
  misc_feature (448)..(448): n is a, c, g, or t
  misc_feature (454)..(454): n is a, c, g, or t
  misc_feature (480)..(480): n is a, c, g, or t
  misc_feature (483)..(483): n is a, c, g, or t
  misc_feature (509)..(509): n is a, c, g, or t
  misc_feature (523)..(523): n is a, c, g, or t
  misc_feature (533)..(534): n is a, c, g, or t
  misc_feature (536)..(536): n is a, c, g, or t
  misc_feature (541)..(541): n is a, c, g, or t
gcttggnggtgaacgaattctcagcctgtgagatccgaccatcccattaactttgaagtttctcttgattaatagaagaacnnnnnggnnggtgaagggggggaggaanatgntaaaaaccttatgacaatcatccaaatgnggggnaaggncaaccgattnancaattccattttttnnnttttnnaattttttatattttatttttgtttnnnngntttttggntgnnatagnttggnagttcctaggggccctgggaggngngctggntttgnaaagggntgggggggggaagccctgtaggntgcggtgaccattttcnagagaactgagagtncgtgctcccaaaggtntganncaanagcttaatgtgaaaagaaantgnantgaaaggnnngggnggaaatggtgatganctgggcttatgtgaggntgtttatatttttntaaggnagccccagattttttttttcagttanagnctcagggaaacgaggttttggttggngggttctgcagggnttttttccannantgagnctctagtcccaaaaccatccttgagaaaatcgtgtg

SEQ ID NO: 563154 - DNA, 409 bp, Homo sapiens
ttccctgatgcgtcctcaggctgcctcggctgtacatgtatgcggcatatactttgactctggccatacattccacttattgtgtaccagaatcgaccgtacccgacatcctcgttacgctcaagaggtgttaggcactatactcagtgtctatgcccgtcacataaccagccgttggcatccgagcggctcacgagggaagcatcctcgtgagacttggtcacctggtctctctgactttcaaacctggtttcttacaggtcgttgtcagtagtgggagccttgcggagaggatagagctgaaggactaatgcaaatgaggaagtaagtcagggcgggctttgagaaggggacccatatcctacaggcaaaaagcaggctaggtgaccttgggtactacgctttggca

SEQ ID NO: 563155 - DNA, 138 bp, Homo sapiens
cctacagaggtgagactctgtctcacaaataaaaataatactaatacaaataaacagcaacaacaacaacaataaaactcttgtattatcaaagaacttccaaaatctgcttattatgtccattcaaagcgatgaaat

SEQ ID NO: 563156 - DNA, 162 bp, Homo sapiens
cttagacaaaaaggtttggagcagaaagaaacgtgctcatctttgaccttggaggtggcacttttgtatggtttcaatccttactatttgggattggattttttagggtcaaggctacgactttggggaaaaacccctttgggttgggagaggttttttgca

SEQ ID NO: 563157 - DNA, 239 bp, Homo sapiens
  misc_feature (10)..(10): n is a, c, g, or t
  misc_feature (38)..(38): n is a, c, g, or t
  misc_feature (64)..(64): n is a, c, g, or t
  misc_feature (72)..(72): n is a, c, g, or t
  misc_feature (104)..(104): n is a, c, g, or t
  misc_feature (204)..(204): n is a, c, g, or t
  misc_feature (213)..(213): n is a, c, g, or t
aaactttttngcacttacacagacgagacttcactgcntgaggatcatacgacatttcaatcgnacacaaanttaaaaaataaaacaaattttaaaaaaccatnttgaatttccttaaaattattccaatactttccaacttaaaattcagaacaaatcctcctagagactatcaataccaatatcttcacattgctcagctgntacatacgncccaccagttcacaactaatgacaca

SEQ ID NO: 563158 - DNA, 145 bp, Homo sapiens
ggggcctgccttggcccccccccgtggcccctttcctgggtggggtgggttttagctccccccccccccccgggtgggttgggggccccgggggtttgttcccccccgcccccgaaggggccgttttcaaaatttttttttccca

SEQ ID NO: 563159 - DNA, 1598 bp, Homo sapiens
atggatttcggactggccctcctgctggcggggcttctggggctcctcctcggccagtccctccaggtgaagcccctgcaggtggagcccccggagccggtggtggccgtggccttgggcgcctcgcgccagctcacctgccgcctggcctgcgcggaccgcggggcctcggtgcagtggcggggcctggacaccagcctgggcgcggtgcagtcggacacgggccgcagcgtcctcaccgtgcgcaacgcctcgctgtcggcggccgggacccgcgtgtgcgtgggctcctgcgggggccgcaccttccagcacaccgtgcagctccttgtgtacgccttcccggaccagctgaccgtctccccagcagccctggtgcctggtgacccggaggtggcctgtacggcccacaaagtcacgcccgtggaccccaacgcgctctccttctccctgctcgtcgggggccaggaactggagggggcgcaagccctgggcccggaggtgcaggaggaggaggaggagccccagggggacgaggacgtgctgttcagggtgacagagcgctggcggctgccgcccctggggacccctgtcccgcccgccctctactgccaggccacgatgaggctgcctggcttggagctcagccaccgccaggccatccccgtcctgcacagcccgacctccccggagcctcccgacaccacctccccggagcctcccaacaccacctccccggagtctcccgacaccacctccccggagtctcccgacaccacctcccaggagcctcccgacaccacctcccaggagcctcccgacaccacctcccaggagcctcccgacaccacctccccggagcctcccgacaagacctccccggagcccgccccccagcagggctccacacacacccccaggagcccaggctccaccaggactcgccgccctgagatctcccaggctgggcccacgcagggagaagtgatcccaacaggctcgtccaaacctgcgggtgaccagctgcccgcggctctgtggaccagcagtgcggtgctgggactgctgctcctggccttgcccacgtatcacctctggaaacgctgccggcacctggctgaggacgacacccacccaccagcttctctgaggcttctgccccaggtgtcggcctgggctgggttaagggggaccggccaggtcgggatcagcccctcctgagtggccagcctttccccctgtgaaagcaaaatagcttggaccccttcaagttgagaactggtcagggcaaacctgcctcccattctactcaaagtcatccctctgctcacagagatggatgcatgttctgattgcctctttggagaagctcatcagaaactcaaaagaaggccactgtttgtctcacctacccatgacctgaagcccctccctgagtggtccccacctttctggacggaaccacgtactttttacatacattgattcatgtctcacgtctccctaaaaatgcgtaagaccaagctgtgccctgaccaccctgggcccctgtcgtcaggacctcctgaggctttggcaaataaacctcctaaaatgat

SEQ ID NO: 563160 - DNA, 808 bp, Homo sapiens
gaataccattgttgctggaagtcttattacaaaatcaaacctgcatgcatgatcaaagctgaagaaagcagtaagcaagaagagtgcaccacaacatcaacagccccagtccctacaacagaaattccgaccacaatgagcaccatggctgctgccgaagcagcagctgctgttgttgcagcagcagcagcggcagagcagagcagctgagccaatgctaatgcttccacttctgcttctaatactgtcagtggaactgtcccagttgtccctgagcctgaagttacttccatggtggctactgtggtccgatcatgagaatacagtacctatttcaacgtgaggaacaagcacaatttactagtacccctgctatcaggatccacgtgtggaagtatccagtaatactgcagaagacacatctaagcaagaactgtagctgatttactccaaaaaagaagaggaggagagccacccagcaaaagaaaacataccttggaaatacacaggagaggcaacgcacgctttaaagattttgacaagaaaggcgggtaccatcgaagtgcttcatggagcggctatgaaactgttattatgactccacgatacgtgctggcaagttagtgaaaaaagcaggcttagtgctataagtcaaaaagaaaacaaaaaaaacattgggggcccggccagaaaatttaacacttgtgggcggggccagagtatgacatgcaagggcaagaacggcagaggggtttcaaaaaccgggccgggtggaaccggtgggctcgcataaccaaaaccccggggc

SEQ ID NO: 563161 - DNA, 964 bp, Homo sapiens
gtctgatacacttctgagcctcattggataatcttgttgattactacagggattaatgtatgttgcgtcgcctagttgcttgatttgctccacgagcttgaacgtgtagtcatgaactaggccactattgtgaccatacttgacacctagggttggagcccaccagagatccaggaagcttttcgtttagccatcgttaattaggggaggaggcactacgcacggaaaacagggtctaggacgttcgcgtcgcaagacgagtatgtgactgcgttatcaggtgcgcccccgcaatgaccagcattgctaacttaatagaaggcggctcccacgccaagctacaagaaactaggcttttggttgttttgaaccagaagatcatcgctctactgagggtaattcccttcacttatgggaggagcgttgcctgttccgcccgccaaagtcggacggacctattttgggagatggcgttgaaacccccagagaaaggcccctcgtatcccaaatattagaaggcgacgcatgggtggggggagcctttggcggaccttttttaaagaaacccttctttttggaccttttttttcccccccaccgtgcccgtgtttttaaaaagaggtgtgggggttattaaataaccttccataagggggaagtttgaggttaatataccgggacagggaacaacggggattcctttccaattttccacggcggcctttgttttggtacaattgtcggtacccaatattcccatggtgtgtgtttgctaccttgtgtcctattaggtcccatttgtatgggagcgggagaacagatgggtgttccgcccaggtatgatattcacgcacatccttccacataggggacagtttcaccacgacggatcaccaaaattcccctattaaaaaataatcctagtgaagttatgttggttcccaatggcggcccccatggcctg

SEQ ID NO: 563162 - DNA, 430 bp, Homo sapiens
  misc_feature (39)..(39): n is a, c, g, or t
tttttatcatgttaacaaaatgttctcttttgaagatcntagggttggctaattaaccaataattcaagtagagtgtcccagaaaaaaaccaccttgggctccctgtttggagttgggcgggctttgagcattgccaatggcccctactcacctgactttggatcctttccttttaaaggctttgcattttgcacccagcttcactaacagtggggtgaaaacatccttgggttgagtgtttcatttgggagttatttggccagggccttttgaacagaagggtccccatgaaggggtaaaaaaaaaatgggtaaaagtcagctttttttttttttttaactctaacccccttcaaaaatttttaactactttggaacggcagggcttaacctggtgataaaagcagttattaaaagtttacgttttcca

SEQ ID NO: 563163 - DNA, 141 bp, Homo sapiens
cctgaccatagaggatcccgtgatgttatcccaacactagcaatctaggtctactacatacaatctctgggtggatgatcttctagtactgtattttaaattaaggagtttagttataactgaaattgatttgttagtctg

SEQ ID NO: 563164 - DNA, 217 bp, Homo sapiens
ggtaacaaaactactttttttaatcatcagatttatactagctatatggatattcgcatatctggtcattatgcatctcagaattttattacatatttatataatcctgttcgctcagttattggatgagtgcaagctaatcatgttggtttataatagtagtcaattttagtaaaataaaaattacactatcaaactctttactttataaattgtc

SEQ ID NO: 563165 - DNA, 950 bp, Homo sapiens
  misc_feature (35)..(35): n is a, c, g, or t
gagagaaagaaataaacaaaaggaggaaagacgtncgtgccgtacccaaggtagcgtcacatagtttgttcaccacgggagttacaagactggttctcactaccgctgtcgaacaagagtcggcagtcactagtagccaagaggtcgccgcacccgagaatcagggcaccgcaccaggcgcacccggtgtccacagaggaaaccacccatggcccttatattcaagagactgccttattcaattacccgagcggggcctcctccccaacatgtgaggcgtcccacgccttgaacttgatttgcgccgacttcctggggctacacacagtcatgctccacaacactcgggggaccaaggttgttagagccaagcacgggacaagaaaactgttgtggaccagacagaacccagaaatgcctggggcaaatcggggaagcactcgtgcatgcttacagaccccgggggttactctagtccgccccacgcacgggcccccccaggctcgggggtcacgagcccccagagccgcacccccccggggggagcacgaacacaaacccggctttcgctaaaaacccatagtggtatggagaaaccccaagttgcggacaccaacttgtcgcgagtgattacacctgcgggtcaccccacggacacgcaggggtgcccccgcaagtaaacccccgccgccaagaacgagccgtttggagccaaatccccacaacgaacaggggttctgtgacggcgtgttttcagcccttatcctctgtgagagagcgcgcaattatgccgaacggagacacatatgtggtgaactctagagaaaagcggactcgcacttcttgatgggacttaaataggccgcgatctgtttttattccgaacgcggtgacaatttttggacatattaaaaaaagcacccctgtgaaattaaacagttcacaaaaca

SEQ ID NO: 563166 - DNA, 143 bp, Homo sapiens
  misc_feature (24)..(24): n is a, c, g, or t
  misc_feature (84)..(84): n is a, c, g, or t
ctcgtgcgaattcggcacgagttntttttttttggtagtaagaacacttaacatgaaatctaccctcctgacaaatcttttgtngtacaatactgtaatattaactatagggtgcagcgttttacagcagacctgtagaactt

SEQ ID NO: 563167 - DNA, 405 bp, Homo sapiens
  misc_feature (130)..(130): n is a, c, g, or t
  misc_feature (250)..(250): n is a, c, g, or t
  misc_feature (272)..(272): n is a, c, g, or t
  misc_feature (384)..(384): n is a, c, g, or t
cccgaaaaccgtcacgctcgacgtgcagaacatgacgtgcggactctgtccgatcacggtcaagaagtcgctggagaaggtgtccggcgtgagtgacgtccaggtcaatttcgaccagaagacggcgacngtcacctacgatcccgataaggcccagcccgaggcactgactgaggcgagagccaaggcacgggtggatcaatggatcgagtgcgatccatgaaccccaccttctaaaagatagggcctnagcttaccgtggtatctctggngagcagttccatggcagcaaggcttcgtagtctgagaccgacgacgcatacggcaggcgctcaagtacgtggcgcagccacgtatagggctcctggccgttgaccttggcgnctcgaccaagctggatatctg

SEQ ID NO: 563168 - DNA, 319 bp, Homo sapiens
  misc_feature (39)..(39): n is a, c, g, or t
  misc_feature (75)..(75): n is a, c, g, or t
  misc_feature (81)..(81): n is a, c, g, or t
  misc_feature (121)..(121): n is a, c, g, or t
  misc_feature (150)..(150): n is a, c, g, or t
  misc_feature (204)..(204): n is a, c, g, or t
  misc_feature (249)..(249): n is a, c, g, or t
  misc_feature (292)..(292): n is a, c, g, or t
ttcagggaaagatggaagatcttccagaacaagaaaaanatataaatgttgtagatgaattagaaatacaatttnatgaanttcagctagaactatatgaagttaaatttgagatattaanaaacaaagaaatactgcttactacacagntggactctcttgaaagacttataaaagttacaccttagattgacttgggtctgnttctgagttgttctcctccatcggttcgtgagtggcttctgctgntggctccatactgccccccacgactgtctttggaggcacattntagggtctggtaagaaaaacaggatga

SEQ ID NO: 563169 - DNA, 147 bp, Homo sapiens
tcttgacacgaggtggaggctgcagtgagccaagattgtgccacgtgctactccaacctagggtgacagagcaatgatgctggctccaaaaaaaaagaataagaaagaaaaaagaaaagagactagtcctttctttacttacgttgg

SEQ ID NO: 563170 - DNA, 721 bp, Homo sapiens
catgaagtcagtcactggaagaggaaggaagctctgcagatgacaaaagcacctgaggacacctgaaatatctcttggtgctggtgcacatttgagcagtagctcagaggagtggcatcattgaggaggaggatacatgtgttaagcaccctgctggccaaggtatggcccggatgttggaaactggctgtagagccgcagtggttcctgatattaaagaaatgttgtttaaagctgtttttcttacaccctatttgcctttgaaattttaaaagcattcactttacacatctgttttgcctttttacaaaactttttttaaagagagccctctgccaccaaaatatgcttgacctcatcatcctgagatcactgctatcaaaatatttggtgtatattttttccctagctaatttgtgtgtgtatatacattctatataattgttttattgtgtacaatttgtgtaactattatctgctttaaaggtttaacagtacctttttctgtcattaaatagtgtgcaaaagcatgtgtagtaactgcactatatgactgtctctggtcagagcataaatttcttcactggtctcctgtacagcggtctgcaaacttttaagtggctagctaatacatatttttagactttgctggtgatatggtctctgtcctaactactggactctgtttttttagaacaaaaacagccgcagctgtaagcaa

SEQ ID NO: 563171 - DNA, 427 bp, Homo sapiens
gattggcaagatgttagtttctccgtaggttgtatctttaaaaataaatgcaactatttaaggggtatgctgcactagtattccttagaggaatcagttctttaaagttaggaaagcgagtagccaggcatgtgttggcgaagtctgttcatcgtagctaagtgttaagaccgcccttctgtaacgttttcatggtaacgcccagttagagcgctgcatttaggtcgtgttaagcctattcagcccttgtaaaacaaggaatccaccctctttcaaactgtcaattccgtcccagcctgtatagtttagtcatctgtacatcttttcagccatcagccccttcttttccgactgattcagtatattaattacaaggttattgttgcgcgtgtcgtcacacgctcagtgtaataaaaacggcttgaga

SEQ ID NO: 563172 - DNA, 116 bp, Homo sapiens
  misc_feature (93)..(93): n is a, c, g, or t
agggacaagcaaaccacatccaaaccacagcagcatgaaaggggatgagtcagatctcgggaggtggtgcctcgtggaaggtgttcggctccngggggcatatcccacatgaacgg

SEQ ID NO: 563173 - DNA, 1184 bp, Homo sapiens
  misc_feature (185)..(186): n is a, c, g, or t
  misc_feature (203)..(203): n is a, c, g, or t
gggaaagttctaaagagaagaaaaaaagacaaagatgacaaggaggatgaaaaagaaaaagatgctggcaactttgaccagaataagctggaagaagaaatgagaaagcgaaacagaacagagtagaaaaatggcgagaagagcaacgtaacaaggctatggcaacaacataggagaactgcaannacaggcaacatcgacanagcatgcaaaccaagggcaacaacagtggcagtttcagcaggcacgcatgcatgcatgcacgcaagcatgcatccctgccagcacagctgcaacacaggccagggcaacatgcaacatggcagggtgcaggagttcagatcccattcagcatgcgtctaccaatggcacagcacagtgcaacagcaggcacagctcaaacacaacatttaacgactgcagcacagtgtacagacaggtgcgatgggcggcacacatgcaacacagcaagtctggagccaacaacgagtcacaacaagttgtcactcggttgtgacaacacaaaaaagcagttgtggacttctgatcaagaagacaaggtgagctgatggagaactgaccaaggatgccatggagtattcttcagaggaggaagacagtcgatcttcagacagcccttacagggtatcaaaccaaaaacaggcgaacagcttctagcaaaccagtgaatcactggcacaaaactcgagtactgagccatattaggaacaaacttctcatgttcgaacgtcccagcaccttagccaacaaactgtcttcacaagaaagagagcaacaatgtgatttcgacttggcacctgggcagggccattaccaggtcatagcagggaacacggtggccccaaacgcaattacataaccagggggcatcacgaaggtcgcaacttcccaagagagaaacggtggggcgatcccactcacaaacgagcagggcaagatcaacaaggcccacaagcccaatcaaacaccaaaaacagaaaccaggaaaaaaggtcggaccacaaaccagaagggaacggcaaaaacaaaagcgcaaaagcaaaaaaacacgagaggacagaacaacaccaaaacgaaacaaggaaaaaagaaagaaaaagcacaacaagagaaaaaaaacacagagaaagcacaacaaccacaaaagcaacacaccacagcaa

SEQ ID NO: 563174 - DNA, 133 bp, Homo sapiens
aagttttttgaaaaaaaaaaaccctcctcttttttaaggatggtttaattactgggccttttcctttttttttacccatccccctgtcccttagggtaaaattttcacccttaaataaaacttttcaaatata

SEQ ID NO: 563175 - DNA, 153 bp, Homo sapiens
  misc_feature (35)..(35): n is a, c, g, or t
  misc_feature (58)..(58): n is a, c, g, or t
  misc_feature (61)..(61): n is a, c, g, or t
  misc_feature (63)..(64): n is a, c, g, or t
gactcggagtggaatttaatggaatggaatggagnggagtcgaatgaagaggagtggngtntnntggaatggaatgtagtggaatcgaattgaatggaatggaaagcaatggaatggaatagaatggaatgaagaagtgaaatatgagctgag

SEQ ID NO: 563176 - DNA, 453 bp, Homo sapiens
ccaccagggaataccacttctgatcccaggatcgtccttgcaaattgctgtatttataaagatttttgggacggcgctgaaacgtctgttttagtacatcaagttctatttttgaattgagctcccaaggtagtttgttaaagaacttttagaaagctccatgtgttctttaaacattttttcccttttaaaaacaaattttaagacatttgttacagtcccaatatttttccttttatcagaatttttgtttaggcactcaggattattgtttctggccaaaagaaaaaagtggccaggctaaatcagtttttaaagttgatgtgtatttagggacattttaaaaccttgtaaacaatgtttatcatggccagaaagtgatttctgaatgtacctatgaacaatccgagtcaagatcatgattgcttagagatgttttttattaaagatcac

SEQ ID NO: 563177 - DNA, 353 bp, Homo sapiens
gacgtgttcgataagcttgattctggtacgggagtggtcagacctgtaatcccagcactgcaggaggccaaggtgggcggattgattgaggtcaggaattcgagaccagtctgggcaacatggtgaaaacccatctctcctaaaaatacagaaatgagccgggcgtggtggcgcctatagtcagctactcgggaggctgaggcaggagaatcgcttgaactcgggaggctgaggcacgagaatcgcttgaactgggaggctgaggcacgagaatcgcttgaactgggatgcagaggctgcagtgagccatgttggtgctggtgcactccagcctgagcaagaccttgtctcag

SEQ ID NO: 563178 - DNA, 597 bp, Homo sapiens
  misc_feature (14)..(14): n is a, c, g, or t
  misc_feature (23)..(23): n is a, c, g, or t
  misc_feature (25)..(25): n is a, c, g, or t
  misc_feature (41)..(41): n is a, c, g, or t
  misc_feature (51)..(51): n is a, c, g, or t
  misc_feature (56)..(56): n is a, c, g, or t
  misc_feature (60)..(60): n is a, c, g, or t
  misc_feature (69)..(70): n is a, c, g, or t
  misc_feature (131)..(131): n is a, c, g, or t
  misc_feature (135)..(135): n is a, c, g, or t
  misc_feature (144)..(144): n is a, c, g, or t
  misc_feature (151)..(151): n is a, c, g, or t
  misc_feature (157)..(157): n is a, c, g, or t
  misc_feature (165)..(165): n is a, c, g, or t
  misc_feature (167)..(167): n is a, c, g, or t
  misc_feature (170)..(170): n is a, c, g, or t
  misc_feature (179)..(179): n is a, c, g, or t
  misc_feature (199)..(199): n is a, c, g, or t
  misc_feature (206)..(206): n is a, c, g, or t
  misc_feature (210)..(210): n is a, c, g, or t
  misc_feature (219)..(219): n is a, c, g, or t
  misc_feature (221)..(221): n is a, c, g, or t
  misc_feature (225)..(226): n is a, c, g, or t
  misc_feature (228)..(228): n is a, c, g, or t
  misc_feature (234)..(234): n is a, c, g, or t
  misc_feature (236)..(236): n is a, c, g, or t
  misc_feature (247)..(247): n is a, c, g, or t
  misc_feature (253)..(253): n is a, c, g, or t
  misc_feature (256)..(256): n is a, c, g, or t
  misc_feature (264)..(264): n is a, c, g, or t
  misc_feature (281)..(281): n is a, c, g, or t
  misc_feature (293)..(293): n is a, c, g, or t
  misc_feature (314)..(314): n is a, c, g, or t
  misc_feature (324)..(324): n is a, c, g, or t
  misc_feature (341)..(341): n is a, c, g, or t
  misc_feature (346)..(346): n is a, c, g, or t
  misc_feature (359)..(359): n is a, c, g, or t
  misc_feature (361)..(361): n is a, c, g, or t
  misc_feature (406)..(406): n is a, c, g, or t
  misc_feature (409)..(409): n is a, c, g, or t
  misc_feature (437)..(439): n is a, c, g, or t
  misc_feature (447)..(447): n is a, c, g, or t
  misc_feature (449)..(450): n is a, c, g, or t
  misc_feature (458)..(458): n is a, c, g, or t
  misc_feature (465)..(465): n is a, c, g, or t
  misc_feature (476)..(477): n is a, c, g, or t
  misc_feature (507)..(507): n is a, c, g, or t
  misc_feature (509)..(509): n is a, c, g, or t
  misc_feature (523)..(523): n is a, c, g, or t
  misc_feature (543)..(543): n is a, c, g, or t
taaaggggaaaaangggtttatncncaaccatttgaaaaanaccatttgtnaccantccntcaaaaaannctttatgaacaaaaagccaagaaaaattaaaatcggagcttatgccaaaccaaaaaaaaanaacngagggaaanaaacttnaaaaanccttaacncnggnaatgggaanaaagataacccaaaaaaaanttccaanaaanagcaaaaantnaaannangtaaananaaaaaaaaaanaaagcnttncccaaggnattaaatttacaaattnaaaggaacaaanaaatttctatggcataaaaangggggtaaanccacagagggcattgcntagcnggccaaaaatggnangggccccagggtttttttttttaagcccagcaagaacctaagggnacnaattaaagcggggccccccaaaaataannngaaaaagnannggaattgngggaagnggaaaaaaaannaaaaacaataaggaaaaaccaaaaaacagntngcctaccaaaaccnaaccaaatcccccgcaaaanccggggaagccatttgggggggtttcccacccccggccctgaaaaagggcatat

SEQ ID NO: 563179 - DNA, 2142 bp, Homo sapiens
  misc_feature (1370)..(1370): n is a, c, g, or t
  misc_feature (1375)..(1375): n is a, c, g, or t
gaggggctgctttgtgttggtggttgcttgcgggtcttttctttgttgttggccgcgcgtgggtttcgggggggtctgtgtccgtgccctatgctttgtcgcgcctgtgcctgtgtggtgcccccgccctgtttgttcccgtggtttctggccccctcgcgttgtggacccggggcccctccgtgtggggaatttcgagggtttacacccccttcccctgtggccaccgggctttggggggtgacctcccgtgtggtcccccccgtcttcccgggttgtgcgtggaatcttgggcgcaggtgccagacagatgtgggaccccagttggacgccccccgcgggggcagcacggccattggggggccacacacccggtgtcaacttttctgcgccgcccttgaaggttgaatcccttgagaatttggcgcttgtggctcacaagccccctggttgagcgctctttgggaaccccattggcccccccaatttttctcttttggagggtcactttacccccggggcgttcccacaacatctttctcccagagcccccctccggcttattcccgatgaggcccccccctgggtgaaattgtattggggagatatgattctcctattgggccccacatttcccattcaccaccactggagtcccccccggtattcccgcgagatgcccgaaaaatactttttctaccacaaagggggcctctatcgcttttgtggaaatgaggaaccacctcttctgtacccggcccggttattgttgaaagggagaacctttgccaaccacttctgaaagagtttaacactggctccccaagaactctccctggaggcccgctgacacgcctttttgaccctgatgagggagagagaatgttatgaaattgtgagcccctggcccacgcgcactcaccacctggccgcaggcccttgctgcaccccctttttttgttggccctgaccccctgaggagccggtcccttccaccacccacgcccgcccagccccacgccacgattgaccacggccccacggcccccgccactgaggaggatgtgagggcgcggaactgggccgccccacgccccttgaactccacgccctcgagcccccacggccccacaggccacagagccacccccactgaaccacgtgcacaatgttgaaaggaaaggcccggaagcctgcccggggacccagactggtgcccagctgccagaaagcacagatttgacccaagctatttatatgttataaagttataataaagtgtttcttactgtttgtaacccctggtaccagtgtgtccatctccaggctccttgccttccccttacctgaccttattaataaagtctttnttagnagttaaaaaaaaaaaaaaaaaaaaaaaaaaaaaaaaaaaaaaaaaaaaaaaaaaaaaaaaaaaaaaaaaagaaaagaaaaaaaaaaaaaaaaaagaaaaaaaagcaaaaaagagcaacaaaagacaatacaacaagaagcgtgcagccagaagagaggggcaacagaatgattgacgagaaggcacgactacaaacacgcacgaagaaagcgaggcgcgaaccagaccactgcgacgagcaatagagagcgagcaagaaaacgatcgcataggagagacgaggacaacggaccgaagcccacccagaacgccaaggcaaaacacagaaagaaggaggaggcgccagcgaacgccagagcgagagagaaacaagacaaaagcacacagaagaagacaaagagcgagcaaagcacaggaccagaagcacaccagacacacccagacaccaacaacaagcgctagagacgagaacaaacagagagaggcagaagacgacaaacataatatacagcggaactaagaaatgacaaacgaagcgggacgcaagcagaacaaacagcagcaagcgacaggacgaagaagatacggagacgaggagaacgatatggcaagtcgagtgagcacagaaagagatagagacacacagaggcgagaagaagcagaacgaaagcagagagaaagagagaaagaggcacaaagcaaggccagagccaaagtagagaggaggaggagaaaggaaggggagcaaggagaggtggagaaagaag

SEQ ID NO: 563180 - DNA, 338 bp, Homo sapiens
gagttatctggtatccggaagctctgttcgaaagaagaaggtattggttgcaggtacctcaagaaaatctattatgtgaacaacagatatagtgaggtgaatcctcaggagagtaaataccctcccgtcaagaacagatgactcactatgctgtttactcttcaactctttttttttgagacggaatcttgctctgtcacccaggctggagtgcagtggtgctatgtcggctcatgggaaccttcacctccaggttcaagtgattctccggcttcagcatcccgagtagctaggactatagacatgcaccaccatgcctgagtacaacctgccggtgg

SEQ ID NO: 563181 - DNA, 408 bp, Homo sapiens
  misc_feature (18)..(18): n is a, c, g, or t
  misc_feature (22)..(22): n is a, c, g, or t
  misc_feature (232)..(232): n is a, c, g, or t
  misc_feature (238)..(238): n is a, c, g, or t
  misc_feature (315)..(315): n is a, c, g, or t
  misc_feature (366)..(366): n is a, c, g, or t
  misc_feature (399)..(399): n is a, c, g, or t
tagccgtaaaacgcgcanaccnattggcgttattgccgttgagaccaccgatataaacacctgtacttccatcggtcgtgattttacttccgcttccaagatcgacactggtgccatagtcattgatggttaggcctataccgttcgagttttcaatggtgaattgagtgggctgttagtgttgagctaatgccaataaatgatgcccgtcatcgttactcttaaatggtgnctggcntgtgcctaaagtcaggcatggggtaatagtcaccaattaaaggttaatggccgatggagaagggttttgaccaacancatctactgtgaagtcgggttaagctgtcagggaagctggtttttgccctnaataatggatcccttttggaaaacccagaagcngccgtttac

SEQ ID NO: 563182 - DNA, 174 bp, Homo sapiens
cacgtgtgggggctcacacctacaatcccaccactttgggaggccaaggggggaggactgcttaagcccaagagttggaaaccagccttatcaacacaatgggggcctgtttttaaaaaaaaaaattttttttaaaagaacccggcgtgaaggggggggggaaccttttaaatt

SEQ ID NO: 563183 - DNA, 186 bp, Homo sapiens
  misc_feature (20)..(20): n is a, c, g, or t
  misc_feature (108)..(108): n is a, c, g, or t
  misc_feature (129)..(129): n is a, c, g, or t
  misc_feature (134)..(134): n is a, c, g, or t
  misc_feature (149)..(149): n is a, c, g, or t
  misc_feature (152)..(152): n is a, c, g, or t
  misc_feature (164)..(165): n is a, c, g, or t
tctaaacgctaaaaaatttnaaaaaatctgaaacaaaccaaaaaactaaacattgagccctgaatctttacagccaaaacctaacctttggtcaattccttcttcaancccagatactcccgagtccancccanggcagggcttctgcnggntctcaattcttnnttttaaattttatacttcttt

SEQ ID NO: 563184 - DNA, 529 bp, Homo sapiens
  misc_feature (4)..(4): n is a, c, g, or t
  misc_feature (27)..(27): n is a, c, g, or t
  misc_feature (76)..(76): n is a, c, g, or t
  misc_feature (81)..(81): n is a, c, g, or t
  misc_feature (99)..(99): n is a, c, g, or t
  misc_feature (102)..(102): n is a, c, g, or t
gctncgtagtgtcgcgaaggctcccgntcctaattgtccgtaacgcgtgtgcagcctttgttttcctgtactggcnctgtncttaatgcgcgaattgtnggngtttgccaaaccgtattaacatgacagttaaatgtaaggctatgaaattacattggaagggagctttcaagtggtaggatattgactaactgagctccttcacttaaaatcagctgaataattccttaagtatacttcagacagtgtaattgtttcagctgttaagttaaactataaccttatcaggcaactcctgggtaagtaacacttagaaccatcaagagtggtttaaggggctggctatacccattcctctgtagagcacagagaaatcctattaaaaaaaaatactacatggtaatgaaatcttagcattgattgagtgctttacgtgctgcctgcaagttttcagttttgttgttagagttttcgtctttatgaatgataaagtcctatgttcataaagtaacatttaaattcctgaact

SEQ ID NO: 563185 - DNA, 138 bp, Homo sapiens
tcctccacgcatcctgctactggctgccgggacctgaaccgactacctcatgaagatgctcactgagcgaggctacagcttcaccaccacggcgagcgggaaatcgtgcgcgacatcaaggagaagtgcgcctgggtg

SEQ ID NO: 563186 - DNA, 1650 bp, Homo sapiens
  misc_feature (106)..(106): n is a, c, g, or t
gcgtggtggtgtgtgagcggcggcggcctgggtgggggtctcggtggttgagggatagcttgaagcgctgggggtgttgttgctgccccccttcggatattggtgngggggtcctctacggtggttctgtcactaggcttcagctgctgggtgccacaggttttggggtgagccacgtgtcaacctgtggcccacacctgcgcgtgggggggttcttgtgcgtcaggcgcctggcctcgacgtggttgctccttttttgggggtgggcacacaagtgtgtgcgttggcgagcccggggccccacgggtgttgttggtcatacgtcggcgggctgccccgggtgggtgggggccacccactgcccagggttcgtgtggggaaccacttcctccacggggtgcttttcaggcgtgtgttggtcgcaaggcaccctttttgtaggggggcccaccgcgaagggtctttcttcggtggcttctatgagggttgcctcctgttgggtggagcacccctgtggcataccggcaatgcgtgtggcgtggtgccccgagcgggtttctggggagtggggcccctccggcgtgtgaagccttcgttgggacacccactcccagtggatcctcgaaccgaggttgtgtcgtgcgcgtggagtcccccttgggaggttgcggcccacgcctgggtgggcgccacaaaggtgtttgttgggggggccactccgcttcagtgtccagctctccggggcgtttgtgggcaggacgcgaatcgtgccccccctcctcaccttgggggggggctcgcacggtggatcctctcccctcctcggagggtccacaatcccactttaattgggggataaagggaaatggggtgtagcccgagatgggcgcggatgctccacagggcaacagatgggagactccacatgcgccccaccggggccacatagagcaggatgcccccagcgggtttgcttcacgggcatctctccattgatcgcctgtgtgacccacacacgccgtgtgcctggcacagtggaagaagatacccggggctattcacgtctccggggcccgctgtggtccttggaccacttctttccctcggaattcgggcacacacacacccagctgtctggagactcgttcactgtccacggtcccactctccgcgagaggggacccccctgggataggcactctggcgcagtagaaagctctcggagaagccacacctactggcttccagagcttgcgggtcccagagccaccaacaagagggccctctctgcgcctttctgcgtgtcaccgtgggacacaccccaacttctgccggcaccttgcccacgaaggccacacggaccgctggcttggtgtgtgccttcttgaaggcgaagaggcccccgaggaagctcctggcctacgataaggcgctgcgggcacgcgccttgaggccctcgctgccctacccctgtagcggcacactttcacgcggctcaccacggaaccctcccagtgcccccccttttttggacttcctgtggccacacacccgaagactccccatgtccccggcaccacccgccccccaaccacccgtgggaaaccccatcaaggcccccttcccattaaacaaaaataaataaataaa

SEQ ID NO: 563187 - DNA, 235 bp, Homo sapiens
  misc_feature (7)..(7): n is a, c, g, or t
  misc_feature (105)..(105): n is a, c, g, or t
  misc_feature (115)..(115): n is a, c, g, or t
  misc_feature (138)..(138): n is a, c, g, or t
  misc_feature (143)..(143): n is a, c, g, or t
agcaagngtctggaaggtgtctagctgggtagagagcctatttctaacagacacgcacatcgcagaaagcagcatgaacagctatcttccacatacttcccagtntacatttggncttaatgatcttgaatagatccnctctncatttttactcagccaggtttttgtactgattgtacaggtgttaaatttactttcaagcatttttttgtaatgatggttgtatataatttca

SEQ ID NO: 563188 - DNA, 203 bp, Homo sapiens
atcaccacctaactccatgctatctgatgtttcatgggcccccgcttagcggccaataacacctggtgctcctggtgatggacatcacacaatgtttaatacacacttacgccccacccttttcataaacatttactttgcccaattattcctcaccccttttttcatcctttgtcccaccgctttttatgtataaatgatta

SEQ ID NO: 563189 - DNA, 376 bp, Homo sapiens
  misc_feature (19)..(19): n is a, c, g, or t
  misc_feature (41)..(41): n is a, c, g, or t
  misc_feature (88)..(88): n is a, c, g, or t
  misc_feature (179)..(179): n is a, c, g, or t
  misc_feature (250)..(250): n is a, c, g, or t
  misc_feature (265)..(265): n is a, c, g, or t
  misc_feature (299)..(300): n is a, c, g, or t
  misc_feature (333)..(333): n is a, c, g, or t
ggcctaccctcctaccccngagcaaattcccccctgccctnagccctcccccaagtagctggaacctacaggcctcatgccccactgngcccccagcctaatttttgtattttcccgtagagaccggggtttcaccccacattcgtcaggttggtttcaaactccctgacctttgtgancccaccccgcctcggcctccccaaagtgcctgggattaccaggcatgagcccatcacaccctggtcaactntcttttgattagtgnttttgtggtatatctttttccatcatgttacttnnaatatatctatattattgtatttaaaatgtgtntcttacagactgcatgtagttgggtataatttttatccagtct

SEQ ID NO: 563190 - DNA, 682 bp, Homo sapiens
acccaccggcggaaatgtatagactcctatagggcgaactgggcctctagatgctggtgtatataactccgattatccaaatggacttctccaagtacatcgagaattagagacgcatgtcagtggatctcgacatacaacacatgttgtaatcgccataaccagactctcatgctagacccccgagctgtgggcccccatggtctgaagcacacagagcatatgcctcatgaagcgcgctactcacttcgctcagcatgggccaaggtggcccttgtcggcacatggagtggattctacagagtgatacatgcctcccttttatttcctgagtccatgccggaatgtgggtttccatttaacatggtggctgttcaccaagaaaatgccatgggacagcccccgtgactactacatcatggggtgagggtaatagacagtgtccatggagtgcttccggtgagagtttgcatgtgaccattagattattaagccatcatgtctgttgacaaaatgtcagtatcatggccagccgctctctttaatttcccatgtctgccaatttctggcgttgtccatgttgctactttaagggccacagccatggtttgattacattaactaacatcatggtttgcagaggcttggtgggtcccatgtatccagattgtttgaacctgtt

SEQ ID NO: 563191 - DNA, 368 bp, Homo sapiens
  misc_feature (40)..(41): n is a, c, g, or t
tctaggagtcagagtatgaatcaagaagaatggacttctnnttcttatctacctaatgccagataatgatgacagcaatgcattttctacattcatatcctcaatcatatgtttttgaatgcttactggaaaaccggtttaaaagaaaggtgactagttattggtcttgctctgacagccgtggaaaccatttgctgatgaaagcacaagcaacaacaacaaaaaagatgaataaactggatttcaacaaaaacacatttgtgcttcagagaacatagtcaagaaagtgaaaaggcaacccaccaatgggagaacacagtttcaaaacatatatctaataaaatatttgagtccagattaaaaaaaaa

SEQ ID NO: 563192 - DNA, 295 bp, Homo sapiens
gtacacactccccggacgcacgctgaactgatcgagctgcagcgctctgagacctaggattcctctttcgtctcaccgtaggtagggaagactggcattgtcttcgcaaactcatcactcgacatcgtactacacgacacgtactcagttgtcagccccacttcccactatgtcctcatcaataggcagctgtatttgcccatccatcggcggcttcatatccactagatttcccctcattctccgtgctacaccgctgacccaacagggggcatcctctaggagtcagcacctg

SEQ ID NO: 563193 - DNA, 153 bp, Homo sapiens
  misc_feature (67)..(67): n is a, c, g, or t
  misc_feature (131)..(131): n is a, c, g, or t
tgaggcagatttatatattccgtactttccctcttagtgtacagaagttcatgaattcccatttgcnagaaacctatgagattaactgatggaggaactaactctgaagggagtaaccacagatacatacngacatatagtaacatgagcgcc

SEQ ID NO: 563194 - DNA, 1348 bp, Homo sapiens
gaaaaggcagtcaccgttttccacttggggtttggtttgtgcaacaggcagggaggagtggggacgcgtttgttctagcttgatttccatggcaacagcagacggcacgcttggaccccagaacccagacaccctcatcctgtggccagaggggccggaccacgtgaccccatattcaggattccacacacagcccagaccgtcaccgatgacccggatggacatgcacttgttcccaggaacacacctcactcctctcctggacctcccattccgtacctggcctccctgcactctccagcacccatcctctgacccccaccccagtcttcaccagatgagaatcctgcacagctgggtggatggacctggcgcagagtgggagaggcatgcacactgacaggatggctatgacactgggacatggaaatcaaggaccatccgacgatactggtccacgagcaaccgtcgcaatcacgagatacatacgatgatgcaacagggcaatagggaagagcgcatgaacaataaccggagcaaaacaaacggaacaaaacaaacaaaaatcacgcacctatacacaacaaagaccactgggaagaataacactagcactaccagaaagacagcgcaatctgcaaaatcaatgcctaggagaagacgcatggagtagaggagcaccacagcacctaccaaggcaacgccaccgcaatcggatgagagagcgcgactagagagagcgggccaccaaacccgggcagcgacacagccgcaacacgcgcagacacagcaagacaaggagacctcccatgaaacacactgagaactagggaccggacagtgacacacaacacaaacagcaacataagcagagcggccgtcgcggaacaccagtgaatggcgcacagagcacacatgagatacaccaacaataacacacacagacaagcacggagagagcaatagcccacccaagctaggggcaaacgcacagacagtatccgagacccagatccatacactaagcaactcaagcataaccgaggaaacgacagcacagattacaggagagacgaaaaggcacacgcactggagaaaaaaggacaaaagaaccacgcggagacagcataccgatataggagaaaccaacctaaggacacaaaagtgaccacaccatacgatacgcatatcgacaaagcaacaggatacaccaacatagagaatacgaaacgatagcggccacaatcaatgataagtaaggaggcgacaccgacaacgagcaaagtactaagcgaaagacccaacagcagaacatacaaacgacacaccagtcaactgataaacgact

SEQ ID NO: 563195 - DNA, 332 bp, Homo sapiens
  misc_feature (10)..(11): n is a, c, g, or t
  misc_feature (183)..(183): n is a, c, g, or t
  misc_feature (185)..(185): n is a, c, g, or t
  misc_feature (263)..(263): n is a, c, g, or t
  misc_feature (285)..(285): n is a, c, g, or t
  misc_feature (311)..(311): n is a, c, g, or t
  misc_feature (326)..(326): n is a, c, g, or t
tttgggaccnnttttggaaacggccgcatcggtctttattctggttatccatgagcttgagattgattttgtagtcacccacctctaaggccatctttggcttcaaaatgatagattcttgggttgggtcgttgtactgaatgggtccagttggcacctcccccgtggtggttagttctggtngngaaaggaagaagtatttgggaggaaggtctgcatcaatgatgtttatgaacctgaggctttgggattcctctcaccanaaaaaatatagttccgaggttntgggtatggggggcgtttgtccattnacatcacgacagggnatccag

SEQ ID NO: 563196 - DNA, 158 bp, Homo sapiens
atatatcctctctgacctttaccatataatctatactagattattaattttataaaatctttactgttagctgggagaatatggatacagtaaatttaaagtatatacatgcgacgtaatactatatctgagttacaatgtgttcggaattggtgggt

SEQ ID NO: 563197 - DNA, 179 bp, Homo sapiens
aattagctagaaccgaagcccgttttggatcttcatgccctgggattctgcccgcacggaccccatctctgtgacttcctggagactcagcttcctagataggaagtgaagcttatcaagaagataggtgaccaccctgaccaaacctccacaggactgggatggcccgagaggactgg

SEQ ID NO: 563198 - DNA, 352 bp, Homo sapiens
tcttcagcacagcgagctgaatgtaccctcttgcgcctgtggaatcaaatgacagcgaggacactcccagcaagctcttcggggctagaggaaacccagcattatcagacccaggcactcctgtaccaacaccaggccagtcagacccagcccccatgtaccagcgtgggccgagtctttgccactgaccgagactcaggacccaatgtacgtctgaccttcagcctgcaacacctgtctgacgacagtcaaggccttccgcatccatccccctgactggagaagttaccacactccaaaccctggaccgtgagctgcatagcagctatcatctcctggtgcaagttcagga

SEQ ID NO: 563199 - DNA, 920 bp, Homo sapiens
aactaagtcatattttatatcttcttcgaaaccacacttatccccacctctggtatcatcacccgatgaggcaacagccagaacgcctgaacgcaggcacatacttcctatgctaccaacctgagtgaggctcgccttcccgcgtacgtcatgcgcgactgaatttacactacacgagacagccttagtgctggcactgaaacattctactgactcactctcactggccgcatgaactatccaaactcctgagccaacaacctgtattatgagtagcttacggcgatagcttttatagtaaagataccctcgtttagggagtccgacttgatgattcccttaaatgcccgtgtcgaaagcccgcctagctgctgggtcaaatagtagttgctcgtaggtaactcttaaaagtagggggtatggtataatatggcgtcaaactcattcttaagccccctgacatgaacagataggataccccttccttgtactatccctatgaggcataaattataacgaaagctccatactggcgttaggaaaaaagaacttaaaagtcgtgattggatagtcttcaaatcaggcacatgatggccctcgtagtaacagcgttctcatcagaatccctgaaggttcacggagagtcattgtcatatatcggccaggattaatctcaataatatgttgtataaatcaaatacgaaggtcaaggcgtattatgctcttaagatcaaattatccaataaagttttgtggttagaaggtcgtaagttgggtaaaccaattactatgggaattgggggggacaggtcggaaaatatccaatggggaaagcgaggcatcttttttgcacggggtgcccttaaatcttgaaaagttagtctttcccgaggtgaaaaaagggggcagggggggagtga

SEQ ID NO: 563200 - DNA, 184 bp, Homo sapiens
  misc_feature (51)..(51): n is a, c, g, or t
  misc_feature (91)..(91): n is a, c, g, or t
ccacctcagcccagcctagcacccagagagcaggaggctcctgggacccantggcctctggttgaaacgtctggaatttactacacagaantcagagaaagagagagagagaaatccgcgtcgggcaggccctcatgggccgcggtggtcggatcgcccccactggcgcacaccagcctactgc

SEQ ID NO: 563201 - DNA, 714 bp, Homo sapiens
ggcttcatttccgggtgaaactggcattgagggtactggggcgtgcgtgaggctgtttactgatgcttcctggtccggtggcctcggtccacggtaagccatggcatgatatgatcccaaggctaagaatatcatgccaaggaagcatcattggcttcttccgcaacaacttcggagtccgcgagccgtaccagatcctgctggacggcaccttctgtgcagagcggcgctgccaggggccagatccagctgcggagcaatgttgccccgtacctcatgggggagacgctaagtttggtgctagctagatagtatgggtgtgttcaataagcagtctagacataccatctggggaaaggcatttatactggggcaaaaggtgggattgcacaagaaatgcgcaaagttgcggaaattgggtctctcattgtcaaggatgttgcaggtgagtggtgggtccagaagtgtctgctttccattggcgtttgaccgagggggaaatactccttcattcaattaattgttgtggcgcgactaccaggggatcaggaatccgtctggtgacaagtaaaataagaacgcctgaaagttcctcctcaatgtgttattcattcagaaccactatggttttgggacaaccctttgtcccaagaaatggcgttgtaaaagcagtggcagcaggtccacctggtctcggtgcttgagaaagaaggc

SEQ ID NO: 563202 - DNA, 124 bp, Homo sapiens
gtacataccctatggtgccaagtgacaatggtgtgaactacaagattggagagacgtgggaccgtcagtgagaaaatggccagatgatgagcttgcacatgtcttgggaccggaagtcgagagt

SEQ ID NO: 563203 - DNA, 133 bp, Homo sapiens
tatgtacgcaaagactgtacgccaacacagtgctgtactgatggcaccatcatgtaccctggcattgcctgacaggatgtcgaaggagataactgccctggatcccagcacaatgaagatacaagaatcattg

SEQ ID NO: 563204 - DNA, 319 bp, Homo sapiens
attatgatacgaatcgagctcgtgtaccggtttcgccatgttccccagtgtaaaattacaaagtttttttgtttggtttttgtttttgtttttgttttggagatggagtctggctctgtcacccaggctggagtgcagtggcgtgatcttggcttactgcaacccatctcccaggttcaaacaattctcctgcctcagcctcccgagtagctgggactacaggggcatgctgccatgcgtggctaatttttatatatttatttgcttgagaaggcgtttttctgttgttgcccaggatggagtgcaatggcacaatctt

SEQ ID NO: 563205 - DNA, 223 bp, Homo sapiens
tggcgtatgttgcagtgagctgagatcccaccactgcagccttgtatttcccaagctcaggtgatccttccacttctgcctccccagtatgctgggactacacagcacacgccaccaaacctgggcttatttttttgtatttttagtagagatggggtttcgttatgttgcccaggctggtctcaaactcttgacctcgtgatctggccaccttgtgtcgtcc

SEQ ID NO: 563206 - DNA, 2850 bp, Homo sapiens
gacagactgccaaatggaacagacaagcaggttgtcttgtgttaaagaaaatgagatatgagtcagttactcccggaggcaatgctgctgttcagctcttgtgtttttgtggccagggtcttcatgaacactaataggggtaccaggccctcttccttgttagaagaaatcaggataacaaaggtatattgggcacccctacaaaaggaatctgtatctgtatcaagatgatctgaagaacagcttctacctttaggaatgtctagtgttccaaaatgactagcatcttccattttgccattatcttcatgttaatacttcagatcagaatacaattatctgaagaaagtgaatttttagttgataggtcaaaaaacggtctcatccacgttcctaaagacctatcccagaaaacaacaatcttaaatatatcgcaaaattatatatctgagctttggacttctgacatcttatcactgtcaaaactgaggattttgataatttctcataatagaatccagtatcttgatatcagtgttttcaaattcaaccaggaattggaatacttggatttgtcccacaacaagttggtgaagatttcttgccaccctactgtgaacctcaagcacttggacctgtcatttaatgcatttgatgccctgcctatatgcaaagagtttggcaatatgtctcaactaaaatttctggggttgagcaccacacacttagaaaaatctagtgtgctgccaattgctcatttgaatatcagcaaggtcttgctggtcttaggagagacttatggggaaaaagaagaccctgagggccttcaagactttaacactgagagtctgcacattgtgttccccacaaacaaagaattccattttattttggatgtgtcagtcaagactgtagcaaatctggaactatctaatatcaaatgtgtgctagaagataacaaatgttcttacttcctaagtattctggcgaaacttcaaacaaatccaaagttatcaagtcttaccttaaacaacattgaaacaacttggaattctttcattaggatcctccagctggtttggcatacaactgtatggtatttctcaatttcaaacgtgaagctacagggtcagctggacttcagagattttgattattctggcacttccttgaaggccttgtctatacaccaagttgtcagcgatgtgttcggttttccgcaaagttatatctatgaaatcttttcgaatatgaacatcaaaaatttcacagtgtctggtacacgcatggtccacatgctttgcccatccaaaattagcccgttcctgcatttggatttttccaataatctcttaacagacacggtttttgaaaattgtgggcaccttactgagttggagacacttattttacaaatgaatcaattaaaagaactttcaaaaatagctgaaatgactacacagatgaagtctctgcaacaattggatattagccagaattctgtaagctatgatgaaaagaaaggagactgttcttggactaaaagtttattaagtttaaatatgtcttcaaatatacttactgacactattttcagatgtttacctcccaggatcaaggtacttgatcttcacagcaataaaataaagagcattcctaaacaagtcgtaaaactggaagctttgcaagaactcaatgttgctttcaattctttaactgaccttcctggatgtggcagctttagcagcctttctgtattgatcattgatcacaattcagtttcccacccatcagctgatttcttccagagctgccagaagatgaggtcaataaaagcaggggacaatccattccaatgtacctgtgagctaggagaatttgtcaaaaatatagaccaagtatcaagtgaagtgttagagggctggcctgattcttataagtgtgactacccggaaagttatagaggaaccctactaaaggactttcacatgtctgaattatcctgcaacataactctgctgatcgtcaccatcgttgccaccatgctggtgttggctgtgactgtgacctccctctgcatctacttggatctgccctggtatctcaggatggtgtgccagtggacccagacccggcgcagggccaggaacatacccttagaagaactccaaagaaatctccagtttcatgcatttatttcatatagtgggcacgattctttctgggtgaagaatgaattattgccaaacctagagaaagaaggtatgcagatttgccttcatgagagaaactttgttcctggcaagagcattgtggaaaatatcatcacctgcattgagaagagttacaagtccatctttgttttgtctcccaactttgtccagagtgaatggtgccattatgaactctactttgcccatcacaatctctttcatgaaggatctaatagcttaatcctgatcttgctggaacccattccgcagtactccattcctagcagttatcacaagctcaaaagtctcatggccaggaggacttatttggaatggcccaaggaaaagagcaaacgtggccttttttgggctaacttaagggcagccattaatattaagctgacagagcaagcaaagaaatagattacacatcaagtgaaaaatattcctcctgttgatattgctgcttttggaagttccaacaatgactttattttgcatcagcatagatgtaaacacaattgtgagtgtatgatgtaggtaaaaatatataccttcgggtcgcagttcaccatttatatgtggtattaaaaattaatgaaatgatataactttgatttaaacagttctgacacat

SEQ ID NO: 563207 - DNA, 192 bp, Homo sapiens
cgttctagaggatccacccaccggcaggttgtactggttttgggggagaagtggtgcatatgacaaggatggaagaggtcctatgacaggatcaagtggtggtgaccgcggtggcttcaaaaggtttggtggtcacagggattatggacccagaacaggtgctgattcagaatctgataattcaggtaacaa

SEQ ID NO: 563208 - DNA, 148 bp, Homo sapiens
gccgctgggagggggcctctgaggtttggatgccaggtgggctggaagaggccctgggtgagtggggctggcctgcagaacgggacttggggccggggctggtgcaaggtgcctcgtgcttgtgcggttggagctgcacacgtgccct

SEQ ID NO: 563209 - DNA, 2790 bp, Homo sapiens
gacagactgccaaatggaacagacaagcaggttgtcttgtgttaaagaaaatgagatatgagtcagttactcccggaggcaatgctgctgttcagctcttgtgtttttgtggccagggtcttcatgaacactaataggggtaccaggccctcttccttgttagaagaaatcaggataacaaaggtatattgggcacccctacaaaaggaatctgtatctgtatcaagatgatctgaagaacagcttctacctttaggaatgtctagtgttccaaaatgactagcatcttccattttgccattatcttcatgttaatacttcagatcagaatacaattatctgaagaaagtgaatttttagttgataggtcaaaaaacggtctcatccacgttcctaaagacctatcccagaaaacaacaatcttaaatatatcgcaaaattatatatctgagctttggacttctgacatcttatcactgtcaaaactgaggattttgataatttctcataatagaatccagtatcttgatatcagtgttttcaaattcaaccaggaattggaatacttggatttgtcccacaacaagttggtgaagatttcttgccaccctactgtgaacctcaagcacttggacctgtcatttaatgcatttgatgccctgcctatatgcaaagagtttggcaatatgtctcaactaaaatttctggggttgagcaccacacacttagaaaaatctagtgtgctgccaattgctcatttgaatatcagcaaggtcttgctggtcttaggagagacttatggggaaaaagaagaccctgagggccttcaagactttaacactgagagtctgcacattgtgttccccacaaacaaagaattccattttattttggatgtgtcagtcaagactgtagcaaatctggaactatctaatatcaaatgtgtgctagaagataacaaatgttcttacttcctaagtattctggcgaaacttcaaacaaatccaaagttatcaagtcttaccttaaacaacattgaaacaacttggaattctttcattaggatcctccagctggtttggcatacaactgtatggtatttctcaatttcaaacgtgaagctacagggtcagctggacttcagagattttgattattctggcacttccttgaaggccttgtctatacaccaagttgtcagcgatgtgttcggttttccgcaaagttatatctatgaaatcttttcgaatatgaacatcaaaaatttcacagtgtctggtacacgcatggtccacatgctttgcccatccaaaattagcccgttcctgcatttggatttttccaataatctcttaacagacacggtttttgaaaattgtgggcaccttactgagttggagacacttattttacaaatgaatcaattaaaagaactttcaaaaatagctgaaatgactacacagatgaagtctctgcaacaattggatattagccagaattctgtaagctatgatgaaaagaaaggagactgttcttggactaaaagtttattaagtttaaatatgtcttcaaatatacttactgacactattttcagatgtttacctcccaggatcaaggtacttgatcttcacagcaataaaataaagagcattcctaaacaagtcgtaaaactggaagctttgcaagaactcaatgttgctttcaattctttaactgaccttcctggatgtggcagctttagcagcctttctgtattgatcattgatcacaattcagtttcccacccatcagctgatttcttccagagctgccagaagatgaggtcaataaaagcaggggacaatccattccaatgtacctgtgagctaggagaatttgtcaaaaatatagaccaagtatcaagtgaagtgttagagggctggcctgattcttataagtgtgactacccggaaagttatagaggaaccctactaaaggactttcacatgtctgaattatcctgcaacataactctgctgatcgtcaccatcgttgccaccatgctggtgttggctgtgactgtgacctccctctgcatctacttggatctgccctggtatctcaggatggtgtgccagtggacccagacccggcgcagggccaggaacatacccttagaagaactccaaagaaatctccagtttcatgcatttatttcatatagtgggcacgattctttctgggtgaagaatgaattattgccaaacctagagaaagaaggtatgcagatttgccttcatgagagaaactttgttcctggcaagagcattgtggaaaatatcatcacctgcattgagaagagttacaagtccatctttgttttgtctcccaactttgtccagagtgaatggtgccattatgaactctactttgcccatcacaatctctttcatgaaggatctaatagcttaatcctgatcttgctggaacccattccgcagtactccattcctagcagttatcacaagctcaaaagtctcatggccaggaggacttatttggaatggcccaaggaaaagagcaaacgtggccttttttgggctaacttaagggcagccattaatattaagctgacagagcaagcaaagaaatagattacacatcaagtgaaaaatattcctcctgttgatattgctgcttttggaagttccaacaatgactttattttgcatcagcatagatgtaaacacaattgtgagtgtatgatgtaggtaaaaatatataccttcgggtcgcagttcaccattt

SEQ ID NO: 563210 - DNA, 506 bp, Homo sapiens
gccagccttccccgcgagcggacgcggcagcgcctctgtacctcgctttttcttatttttcccccctttcccctttctttttatgtgtaggaccgttatcttgtctcccataccccggcgaggaccagtgaccccatcgggaggccgcatgcagccgggcgcgggggcaagacgccggagatcgacgacggaggcggaggagagcgcgaaaagagaacgagagagtgagacgggaggagaggaagcggaggaagagcaggggagagggagaaggcagggaggagagaggggggggggtgggggggggggcggagggggaggcgggaggaggggggcggggggggggaggggagggggggcggggagcgggggggaggggcgggatgagggcggagggggggagggcgtggggcaggcgggagggggcgggggcggggcggggggaggggggagcggggggagcggggggggggggggcggggggggcggggggagggacggggggg

SEQ ID NO: 563211 - DNA, 297 bp, Homo sapiens
ctagaggatccggggtaatcgatgccacttacatttttgtggaaagctagatagctcgtgtagacagtagacaacaaggtaaataggttttatgcccagaaatgggcctttggctaggcctttagtggtgtgggcagggaagttagctggaactagtttaggactctgcgttggatggcagtttggttggtgactggtggatacccggtgtacaccacatgatttccaaccccttttagtggccacctttgtgtttcagggctgggggctggggtcacaaggtgggcatcgcataaa

SEQ ID NO: 563212 - DNA, 790 bp, Homo sapiens
tccatgattatcacattctgccattaagggatattagtaccgtaatacgtgaagaatatgttaacttaagtctgaacttgctgggtgtaggctagcttctttgtattcttttactatccacccttgtcggttgaggtattcgtttcttgactaataaacccttctgatacttttagccacgaatatcagtctcataaagctattcctcgagtatagtttgtggctaacataaaaatgtttagcttatggtaataactatccgaagctgaactccctctagcaagatatttgtcagtgctcttatttagtatgcacttatgactatgcacttttgctgaaatattgtttgtaacactttgagtatattggccatttgataacaggttgtggtagtatgttggtctgtaattgaagttgcagatttaagaagtgttgttagctttgtaaatcatatatataggtgtatttatgtcctggtatatcgtcattccatctgcagctggagctggaatcccattgagtcttctatgctaccattcattttcttcacgagttcacaaccagaagagtgtgaaattcagtgaatgctgtttactaatcctgttacgagatgaatctcatttcaccaaaatttaattatgtttttcccgctagcagtgattgatcccacgtttgacagactcgattcactctgaaatttggcaagaactcaccacttaagggctccagccagtggcttactcagctgaactctagggttactactctttaattggtcccccatgggggg

SEQ ID NO: 563213 - DNA, 180 bp, Homo sapiens
ttagggagatgacctaaatgtatttttcagtcttacacccctgtttacttccttatatatactctgcgtctccaaataaacaaaactggtcactatgcccaaataagcacataccatccttttcctgtgcctctgccattcatttccttttcctgaaatgctcttccttctaatccccta

SEQ ID NO: 563214 - DNA, 632 bp, Homo sapiens
  misc_feature (521)..(521): n is a, c, g, or t
gttctcatcttgctaagcccaattgctctccctaacctgcttttggcttcaaagacttcagattccatctatcctggcattaacagtgtgcagatgtttaactctggactggcttcagctgtgctacactaatgggcgctgtccacataagcaatcttataaggtcgtcaatcaagaggccaaagtctgaatcccttctgtggctgacttaagcacaggatccagtccagagccttgttaatccctgatctactgtgccatacactcacttgcatgctaatatatgagcacgtacatacagcgtgcaatataccatgggattgatagaacgtgaaactgcaatagaatccttcaatcttactgttcaatgatcaagctgattagtgacaaatgcagatggaactaaatagactttccaagattacagaataccattgagcagatcggtgcctgactgtgattgaaatcgcactgcgaagtagaatatctctactacgacaccattgcttcacgatatcatnactgacgacacgtatagcagctcgcagattcttacctagagtgatgcatagtgcactatgtgaaagaccataaccatgtgtcatatgttgagtgactggtccgctaggggg

SEQ ID NO: 563215 - DNA, 295 bp, Homo sapiens
  misc_feature (275)..(275): n is a, c, g, or t
accaatggccgcagacgatcttcagatcacgttcaaccctgcctgggacttcaaaccacggatacatgccttgagtttgcgtcccggtgttcctttgtcttcggtggagattcgcccgcgtggagtgcagtagcgcatgcgtgttagcacgttgatgattgccggctgcggttgcagccacttagcgctggcgaccattccggcttatcgccatacatactgtgcagtaaattacggtagtccggcgccgtgttatttgctgtttccacctccgnttgccacctttccggccacc

SEQ ID NO: 563216 - DNA, 816 bp, Homo sapiens
  misc_feature (28)..(28): n is a, c, g, or t
  misc_feature (84)..(84): n is a, c, g, or t
  misc_feature (104)..(104): n is a, c, g, or t
  misc_feature (107)..(107): n is a, c, g, or t
  misc_feature (110)..(110): n is a, c, g, or t
  misc_feature (124)..(124): n is a, c, g, or t
  misc_feature (147)..(147): n is a, c, g, or t
  misc_feature (169)..(169): n is a, c, g, or t
  misc_feature (200)..(200): n is a, c, g, or t
  misc_feature (203)..(203): n is a, c, g, or t
  misc_feature (208)..(208): n is a, c, g, or t
  misc_feature (214)..(214): n is a, c, g, or t
  misc_feature (234)..(234): n is a, c, g, or t
  misc_feature (260)..(260): n is a, c, g, or t
  misc_feature (263)..(263): n is a, c, g, or t
  misc_feature (267)..(267): n is a, c, g, or t
  misc_feature (270)..(270): n is a, c, g, or t
  misc_feature (292)..(292): n is a, c, g, or t
  misc_feature (345)..(345): n is a, c, g, or t
  misc_feature (362)..(362): n is a, c, g, or t
  misc_feature (376)..(376): n is a, c, g, or t
  misc_feature (394)..(394): n is a, c, g, or t
  misc_feature (406)..(406): n is a, c, g, or t
  misc_feature (417)..(417): n is a, c, g, or t
  misc_feature (422)..(422): n is a, c, g, or t
  misc_feature (431)..(431): n is a, c, g, or t
  misc_feature (433)..(433): n is a, c, g, or t
  misc_feature (436)..(436): n is a, c, g, or t
  misc_feature (444)..(444): n is a, c, g, or t
  misc_feature (449)..(449): n is a, c, g, or t
  misc_feature (602)..(602): n is a, c, g, or t
  misc_feature (707)..(707): n is a, c, g, or t
  misc_feature (716)..(716): n is a, c, g, or t
  misc_feature (755)..(755): n is a, c, g, or t
  misc_feature (812)..(812): n is a, c, g, or t
accttccgtaaccatgtccaagtctctnaagaagttggtggaggagagccggagagaagaaccagcccgaggtggacatgagtnaccggagcatctccaacatncangangtcaacggcctctntaccttatcccaaatcacacaantggtcctcagccataacaagcnaacaatggtgccaccgaacatcgcagaactnaanaattnagaggngctcaactttttaaaaaacnaaatcaaggaacagcccacacagatnagnagcnttnagaaactcaaacacctgaaccntggcatgaacaggctgaacactttgccacgaggcttcggctccctagccagcncttgaggttctggactngacttacaacaacntgaacgaaaatactcttnatggaaacttcntctacatgacnacccngcgtacacncnatnaaagaaanaacanatttgaaatcctgccgccagatattgggaagctcacaaagttgcagatactcagccttagggataacgacctgatctcactgcctaaggaaatcggggagcttacccagcttaaagagctccacattcaggggaaccgcctcaccgttctgcncccagaactaggaaacttggatttaactggccagaagcaggtattcaaagcagagaacaatccctgggtgaccccattgcagaccagatccagcttggcgtgtcncatgtattngagtatatccgttctgagacatacaaatacctctacggnagacacatgcaggccaacccagaaccaccgaagaagaataatgacaaatcgaaaaanataa

SEQ ID NO: 563217 - DNA, 117 bp, Homo sapiens
aggtcgagttcttgaggatccccagttatggcccgggcgcggtcatacttcatttcatgttcacctatcatcctccatcgatcgtctattccgtactcctcacccttggtggcggga

SEQ ID NO: 563218 - DNA, 558 bp, Homo sapiens
aggtacccggaatgcagggtcaaacgcgcttccagtgttgagcacccaccttcgtcaaacacagtgacgacaaaccctatgtgtgcaatgtgtgccaccgtgcattacgatgggccgctggcctgagccatcatgccctcacccacaccgaccgccaccccttctttttgccgcctctgcaactacaaggccaagcaaaagttccaggtggtcaagcacgtacgcaggcaccaccctgaccaagccgacccaaaccagggtgtgggcaaagaccccaccacccccacagtgcacctgcatgatgtgcagctggaggatcccggccctcctgctcctgccgctccccgcactggacctgagggctgaaagcctgccccacctcctgtataggaagagggtatggtctgagatgtgcagactgggaccagcgctagcctgaggagctcagagcctaaggaaagactggcttatggggtacaagggtgactagaaccttcctgggactctggctatagtactttgaaattatcacccatataaaagagggacatggactat

SEQ ID NO: 563219 - DNA, 118 bp, Homo sapiens
tgtgcacattgtgctggcttagctggactgctgcgtgtgttgtaaccatgtggaagaccccagccccagtgagacggaaccgttctatcccagccatgataataaatgctgctctccc

SEQ ID NO: 563220 - DNA, 229 bp, Homo sapiens
  misc_feature (84)..(84): n is a, c, g, or t
tcgtctagaggatcccagcagttatacagactcaccaagcacagactgctgttccaccaagcacgtcttaccttagccacgatntcccaagccacacgtactaagggtggacttcaaagattttgtccgggtataaaccaattcccagggggaccagttactttcaatacagggtcaaattcagcaacaggtcctacaatccagtgctgttttcagatacaagcttcag

SEQ ID NO: 563221 - DNA, 1855 bp, Homo sapiens
tatggggcccaaaaattttattgggcgggtcaggaaaaaacccgggggaaggggcacccttctcctctcccactccctctctaccccaaaaagacacccctcacaaagggacacgaaaaacgcccacaaagccaggcggccatcaaagagaccttggagaggcaaaaaaactggtggaagaagactcatacgcgtggaacccgctcgagaagccgagggcgtggacggaacagagggcgcacaccaccgcgagccacacagacgcggaaaacatgagagagtgctcacagaggagcacgcgcaagggaaaacactcgcgagaaacatcaagtagcgcgccaccacaaaactaaagcctatcgcgaaaaaaatagtgcggcccccacaacagcagaggagaatataatcacataataaacagcgcgagaaaatatcacagagagcactgggagaatataatagtggcgcacacacgagcgagaggggcaccaccacaaagaacagcgcagcacccacatacgcgaaaaaaaaagcagggcacaccacgaagagagtcgatactactatccacaccaaagaagcagccgacgacgaagcatcatacgaaacaaagaggacacccaaccaagcgcgtaggaaagaacaaccagtcggcaccgcagaattcaccaagaactactcctccaccaaaaagaaaacccccctcttagcaaaagaagaaggagaataaggcaaccaccaacagcacacgagaagattcacgaaggaaacaaacactccatcgcgacagacacacccctgcgtagggatctccaaccaactctatgcgagagacaaaagaacacatggaaggacaccacccaagatagagaaagcggaggcacaaaacaaggaacggcaacctcctccacacaccgaaggggacaacacaacaataagaagatacctaacacacaggcgcaccagcagggaatagctgcaggagaacaccacacaccaaagaaggggactaattcacagaacgacacacgacacctagacaacaacgagacggtagacatatagaagctacaacgaggaggagctaatagagagcaccaacctcaccaaataaaatagtaggagcgggctaattcacagcgcagacttgagttcaaacatcctaacgcaaagaagaaacactctcaggagagcagaaagaaaagcataacatagcagctgaagagagacccacccgacaaggaagcagagacaggaagcaataaaaaccaccaaacagcacaaccaccaaccaggacaaggagaacacctctggagggggacgcatccaacacacagaagatagatgcgaccaccactctaaaagcagaacgacaacaacggagaaatataaccccccacaccacagacagaggaacaacgacaacactaaacaacgcagaaaaagccacacacaagcaaaaatccaatacaccagtatagacagaagagccgaaatagtaagaactacttgaggaacacaatccctcccccgaagaggaagatgcaagactccacatgagagaccgacagaggacagcagagaacacacaactaccgagagcacccccagataacgcacgacgcccgcaagagacaaaagtgacaaggcgacccaaccaacgagcaaatgaatgtgacaagaaacaacgtagtacaagcaaccacaacacaatgaggcggtgcgcgacagtacacaatcgattaccacaccaaacaacgacggcaaacgaacaaaatcatacgcaggcagaaaacacgtcagtgagcgatcacaacgaggaggaggcacacacaaacacaacagtgactccag

SEQ ID NO: 563222 - DNA, 247 bp, Homo sapiens
tgccttagcctacaaacggggaagtttttttcttctacttgttgatcctgtgttggagatttcccagggtatatggcattcctctaagtatgtctttcatttccagaagttttaatggttttttattcatgctatttctctggcgattttttcatccatatccggtattttttttttaatttctttaagtgggttttcaccattctctagtgcctccttgagtagctaattattcaacagtctcaag

SEQ ID NO: 563223 - DNA, 667 bp, Homo sapiens
taccggtagccagcccttgaccagtacgaggaagtttaaaagaagctggagatggccaacttattaagacccagagctggaaggcaccaagtggccccatccatgaaggattaattcgactgatagaacccggttccaagaaccctcccctgatccactaactggggacctgcacgctttcacctgaggcacgaaacttgaagagagagagaagaactggaaacgagaaaaagaccccgcgagtgactgagcttgctggcacgtcaccgctcacgttaatgtaagaatactgcccatggcccggagagctttaccctataagacccaaaagaaaccacgctcttggggccccgcggcgctggtggctcaccgccccgtaatcccccgcacctttgggaggccgaggcgcggtggatcaccctgaggtccacggagttccagacccgcctggcccaccctggtgagaaccccgtctgctactataaaataccccaaaaaaattagctgagcggtggtggcgggcgcctgtaatccccgctacttgggaggctgaggccggagaatcacttgaacgctgggaggcgcgaggttgccgcgagctgagatcatgcccttgtactcccgcttgggccacaccgagtgagactccctctccaaaccaaaccaa

SEQ ID NO: 563224 - DNA, 712 bp, Homo sapiens
tgcctgggccttggtgtagctggccgaagacgcggaggtccatgcctgatgaactggctgcgtgctttatggctacctgcctcagcccagccgccatatgtccaccatgcgttccgcccagatcttggcctctggcccttgcagagatgcatgcgcttctactgtggatcccagtcaccggtgtgctctgactgaagagaccaatggagtggatgaatgctggccccgctgtggggtgccagaccagttcggggtacgagtgaaagccaacctgcggctggcgtcggaagcgctacgccctcaccgggaggaagtggaacaaccaccatctgacctttagcatccatgaactacacggagaagtttggtgctggtaccactcgattggagtgcgtgttgcgcagtggccttcctgctgtgtgggagcaagtgccacgcccctggtcttccaggatgtgtgccctatgatggacatcctggctgcgtgcgacctgagtgtgagtgccgacatcattggtactcttatgcctctggccttccacttgcgacatgctcgcccgtttgattggcaccggttggcttctggcccacgcctatttccctgggccccgggctagggcgggacaccattttgatgccagatgagccctggacttctccaggcctgactggctggaacaacttctcttggtggcgtgctgacttggccctg

SEQ ID NO: 563225 - DNA, 346 bp, Homo sapiens
ttttaaaaaaatttttttcaaagtgttttggggaggagttttagggcttggggaaagggaggacccctttggaggaaatggcctttttttttaaaacaaaaaacacaaaacctcccaactgcctggcaagcccagtttcccttgtttgggccctaacgggactccaaggcaaccccccccccctcctggaaaggtgtgtgggtgtgagtgtgttcgagtgtgtgggctggtgttttaatatctataaataagtatatatggggttttttatatgtggataaataaagtctgttcatattggagctttgggagatgctggaattaaaaacaaaagtttcctcccgga

SEQ ID NO: 563226 - DNA, 439 bp, Homo sapiens
  misc_feature (146)..(146): n is a, c, g, or t
  misc_feature (149)..(149): n is a, c, g, or t
  misc_feature (162)..(162): n is a, c, g, or t
  misc_feature (206)..(206): n is a, c, g, or t
  misc_feature (217)..(217): n is a, c, g, or t
  misc_feature (264)..(264): n is a, c, g, or t
  misc_feature (312)..(312): n is a, c, g, or t
  misc_feature (323)..(323): n is a, c, g, or t
  misc_feature (383)..(383): n is a, c, g, or t
  misc_feature (428)..(428): n is a, c, g, or t
cggccatggtgccaccccatcaatgccatcctggctgtcgagaaggagggctgccagtgtgcatcaccgtcaacaccaccatctgtgccggctactgcccaccatgatgcgcgtgctgcaggcggtcctgccgccctgcctcaggnggngtgcacctaccgngatgtgcgcttcgagtcatcccggctccctggctgccgcgtggngtggaccccgnggctcctttcctgtggctctcagctgccgcttgtggacccttgccgncgcaagacctctgactgtgggggtcccaaagacaccccttggacctgngaacacccccnaactcttaaggccttcctctttcttctaaaggacccttccccggaagccctttccaaggnccaatcccggacttccttgggaggccccttggacaaccccccgancctttcccctt

SEQ ID NO: 563227 - DNA, 376 bp, Homo sapiens
  misc_feature (33)..(33): n is a, c, g, or t
  misc_feature (36)..(36): n is a, c, g, or t
  misc_feature (42)..(42): n is a, c, g, or t
  misc_feature (232)..(232): n is a, c, g, or t
tgttgacatcggtttaatagccgacgagatgtnagnaagtgntgatatatttgagcaaatctgataggatttatgatggatggatttaggatataagagaaagacagaaccccgaaaaaacttcagagcctctggtctgagcaattagaagaatggaagtacttttcaccaaaattaagagcagtagattttagcaggaagtcaagaatttttatttgatacattttagttngcaatatcaactagacagcctaatagaggaatataaatctagggctctaagaagtaaacatggaaatcgttgctacagagatggcatttactctaagagactggattggactgataacattgtgtgtgaaatgggaaggtggga

SEQ ID NO: 563228 - DNA, 350 bp, Homo sapiens
tctgagccggccccgattgggtcaacgcagctgtgctggcgtctgttcgtcgtgtcatcatccgattagcaggaatgatatgattcctacgccttctcatccgataaagagttggaagaggttgtggcggttacgaggattattatggtgattaagaatagtagtaggtatttaaagaatcggttgatgaaggggtctgagtgtatgtatcatatggagaattctataattgatcatgtgacgaatagtgctacgggaatgaatattcagcttggcaggggtggccatgaggccccggaggatggggtcaatgccaccttccagcacgaccctccaggaggcaaaaaaga

SEQ ID NO: 563229 - DNA, 430 bp, Homo sapiens
  misc_feature (3)..(3): n is a, c, g, or t
  misc_feature (382)..(382): n is a, c, g, or t
  misc_feature (419)..(419): n is a, c, g, or t
ttnttcccccccaagatagagtcaagctctgtcacccaggctggagtgcagaagcatgatcacagctcactacagtttcaacgtcccccgctcaggtgatccttccacctcagcctcccaagtagctgggaccacaagtgtgcattaccacactcagctaatttttgtattttggcagagatggggtttcaccatgttgcccaggctggtctcaaactcctgagttcaagcaatccaccttcctcggcctcccaaagtactaggagtacaggcatagcacttgctcagccataaatttttattattaatctcattgtaacaagtgagaaaactgagacccagagagcttaagtgaacttcctcgaggtcatagttaacttanctgccattagtttccaatttgaattcaattctgattnccaaataagtt

SEQ ID NO: 563230 - DNA, 191 bp, Homo sapiens
atctgtttccatcagttgttttggttcactatcatagccctctcttcctagatgtccatacatctgatctcccctacctagtttccctccccatcccttctctcatccagttccctccttccaacgactattatatttctccatttaaatattctcccttcacatattatttatgatcattctgtcgacgc

SEQ ID NO: 563231 - DNA, 159 bp, Homo sapiens
tctgcgattagatctagaggatcccgacagcacttaagtccgagctggcacacataaaccggtgtggtgttttttattactattatcatctgtgagtgacaccaggcgactgtaagtgcaacacagccctaactaaacgacttctgcaaggaacccacg

SEQ ID NO: 563232 - DNA, 136 bp, Homo sapiens
gataccaccacgcagcactagtaggaaaagtatctggggtcctctcgggaaggagcaatgagccatgggccttgattaaaaacccaaattatttaagaagccttgtgctccaatcttaaagaatacattacctcaa

SEQ ID NO: 563233 - DNA, 658 bp, Homo sapiens
gcgtctttccatatagtgagagggcagcgggaacaaataaactaacctgtcctttggggaaaagccaatcaaactcactaggattaggcattgctctatcactcctccatatctttggaagacggaggtcatgtttatcttaggtatgcattcaagcactaatgcttatctttgcacagcgggggagtaatcttatccaaatgcccttggagagaaaggctccccctgacagaactaccttacagaccgtttcctacagatagccgccaatcttgagtccttggtattcgttcaaccgtgctattttgaaggaacttgaaatggtatcgttgccagtattctaagaggccattgctggaagcagcctggcgacttgcgtcttccagactctgaaatctatctccatgcgagaggatgtcctatcgtcttattgtgcagacattaccatctcatccctagggaagggggtgcttcacacttcaatgcttagtagatccttgtgaggtgtgctccccttggcaccttcagtacattggggcaacacggcgtcccacgccctctaggatgatcccaaacgggattacatccggttactcgcctggggaactcggcctaaaaggacagtatgtgcccatgggtaaccgattacatattcttg

SEQ ID NO: 563234 - DNA, 653 bp, Homo sapiens
  misc_feature (206)..(206): n is a, c, g, or t
  misc_feature (317)..(317): n is a, c, g, or t
  misc_feature (334)..(334): n is a, c, g, or t
  misc_feature (373)..(373): n is a, c, g, or t
  misc_feature (409)..(409): n is a, c, g, or t
  misc_feature (485)..(485): n is a, c, g, or t
  misc_feature (488)..(488): n is a, c, g, or t
  misc_feature (498)..(498): n is a, c, g, or t
  misc_feature (501)..(501): n is a, c, g, or t
  misc_feature (509)..(509): n is a, c, g, or t
  misc_feature (512)..(512): n is a, c, g, or t
  misc_feature (514)..(514): n is a, c, g, or t
  misc_feature (549)..(549): n is a, c, g, or t
  misc_feature (551)..(551): n is a, c, g, or t
  misc_feature (554)..(555): n is a, c, g, or t
  misc_feature (558)..(558): n is a, c, g, or t
  misc_feature (571)..(571): n is a, c, g, or t
  misc_feature (575)..(575): n is a, c, g, or t
  misc_feature (577)..(577): n is a, c, g, or t
gacactgctcagggaagagcctgctacggtggactgtgagactcagtgcactgtcctcctcccagcgaccccaggctggaccccctgccgggaccctccacccttcggcccccaagcttcccagggcttcctttggactggactgtccctgctcatccattctcctgccagccccagacctcctcagctccaggttgccacctccntctcgccagagtgatgaggtcccggcttctgctctccgtggcccatctgcccacaattcgggagaccacggaggagatgctgcttgggggtcctggacaggagcccccacncctctcctagcctggantgactacgtgaggtctatatctcgactggcacagcaccnacctctgtgctggacaaggccacgggccagggccanacccaggcgcatccctacaggccagcccaggcctgccggaaggggccgcacctgctgtgtccctgcgagacatcancgnacgtatcagnggncagcagcncanantgccatggctgatactgtggaccccctggactgcncnttnnggngagtcccaggaanagcngncaagccacgagggacctgcacaaggatggacatggcgcctctgcttggcctctgtgggaccactatacgacagatg

SEQ ID NO: 563235 - DNA, 419 bp, Homo sapiens
  misc_feature (319)..(319): n is a, c, g, or t
actccactcataccactcgaacatcgtcttaccccagtatccctcgattccggacggcgatcgatccgaagccccttcaagccccctcacctggacaccaccaatcccacctgtcacacccccctggcacccggactcccccctctccccctccctcgctccacggagagggggagaagcctcggccataaagaggccccatcccaggggaccacgccatccacatcccgaccgatatcggacctgcgaccctcctggtcccaacccacatccgctcctataggcgcttgttccccggctggagtccctctgggggggnactaccacccgcccataccgctctcctctcaatccccggtctccctcgactactccaggacgcacctagcccccggaccaaacacgcctccagtgtcctc

SEQ ID NO: 563236 - DNA, 814 bp, Homo sapiens
  misc_feature (8)..(8): n is a, c, g, or t
  misc_feature (174)..(174): n is a, c, g, or t
  misc_feature (198)..(198): n is a, c, g, or t
  misc_feature (461)..(461): n is a, c, g, or t
  misc_feature (548)..(548): n is a, c, g, or t
  misc_feature (553)..(553): n is a, c, g, or t
  misc_feature (556)..(556): n is a, c, g, or t
  misc_feature (568)..(568): n is a, c, g, or t
  misc_feature (573)..(573): n is a, c, g, or t
  misc_feature (579)..(579): n is a, c, g, or t
  misc_feature (590)..(590): n is a, c, g, or t
  misc_feature (711)..(711): n is a, c, g, or t
  misc_feature (764)..(764): n is a, c, g, or t
gctttatnagcagctagggaattctttatttagtaatgtcctaacataaaagttcacataactgcttctgtcaaaccatgatactgagctttgtgacaacccagtaataactaagagaaggcaaacataataccttagagatcaagaaacatttacccagttcaactgtttaanaatagctcaacattcagcccgtgngttgagtgtgattgccagccttcccagtatacaggtccttccgggaggcaagagacctttcggctggtctgcgggtgcctcccaatgctggtcctgtggggcttctttctgagtctcgttttcttcccccgcggtctgtggtctggcactcaagtgttcgggtttccggggaacgtggctgcctccgtgttgggtccttgcttcgccttctcgtcttaacatgcccccttctgcccttaaagccttccctgtttccacaaatnacttctcttcatctgtttctccaagtttctgtagctccgtgtacttctcccccaaccgttggcgggttggcttggggtttgggttgngtggntcnaaagctctttgnccggncccatncactgggtagnactctcgctctaatccgatcctcgtggtaccagatgtcttggatgggagctttggttttgccatatcgcactcgaggcctttggaagacgggctccctcagcggggggaaggcgtcatatncgtcaaaccacaggggcttctccttcagcaccccggcccgaaccaggtcccgngtccgagagaagatgctccctacggtttccagccggctgcctgccatgat

SEQ ID NO: 563237 - DNA, 1054 bp, Homo sapiens
ataaatataacatgaaaaaaaaaaaaaaaaaaaaaaaaaaaaaaaaaaaaaaaaaaaaaaaaaaaaaaaaaaaaaaaaaaaaaaaaccgggacggggggggggcaacgggggccccgggggtttaggggggccccccggggggattgggcccccgggccccccactcgttggtggccctctttcttatacggtagttctccaacggcggggtattatatgtgtagcggaccactaagaggtagttaatcgccggggggtatgaggggatggggggcgcccctgcggggaaaaaaaaagataacccccctaaagaagagggaccccccaaacatgggggggagaaacacaacaaaacataaataaactgggcacccccctcgattgtgatgagaagggagcgaccacctcagcagggaccacccgcagaactgcaccaacacaccacttcgcgctagggggaccacacagacaggacttcgctcgaaggaattacccaccacgccgcatactgacgcaccaaaataattatactccaccccacacaaccggaggggggcgccgtcgcgcaccacaacacggcgactgaaagagaggagcaataacaacaccacagccccacaagagagtaaccaaaaacaaggccgcgggggcagacaccccacaagcatgtgttgccacacacgaggagaacaatccagtgggatcagacaccacccacgactcctcgtggacaccctcctaacagaaagcgaacaccacaaccaagcactcactcgagctgacgcagacgaacagctcccaaaagaagcttcgttggaagaaccaccacgcagggggatgatcgtcgcccccccccacccagccaaagtggggggattactaaaccaggcgcgggacgagccaccacacaacagagggcatcagcgactggaccaaccacactgcaggcgccctgtggaacagcaggacaccacacaagcaagtagtagccaccaccagacagagagagatcaacacgccgcaacgcgaagaggacaacgtagagcacactcc

SEQ ID NO: 563238 - DNA, 115 bp, Homo sapiens
cgacccagtgccacttgtctcaccgtgagagagcacataccccaacctaccactgcggtagtattacacttgtctccacccgtgagacagcactcaccgggtcctcccagggatc

SEQ ID NO: 563239 - DNA, 150 bp, Homo sapiens
ccagacgcggggtttctcatttaacgtttttaatgggtctcaaaattctttgacaaatttttggccaagctgcttccattagaagagtacttgatttaaaaactaataactccaaaactgccacacgcaaaaaagaaaaccagggtccag

SEQ ID NO: 563240 - DNA, 421 bp, Homo sapiens
  misc_feature (7)..(7): n is a, c, g, or t
  misc_feature (9)..(9): n is a, c, g, or t
  misc_feature (11)..(11): n is a, c, g, or t
  misc_feature (47)..(47): n is a, c, g, or t
  misc_feature (151)..(151): n is a, c, g, or t
  misc_feature (200)..(200): n is a, c, g, or t
  misc_feature (204)..(204): n is a, c, g, or t
  misc_feature (316)..(316): n is a, c, g, or t
  misc_feature (341)..(341): n is a, c, g, or t
  misc_feature (348)..(348): n is a, c, g, or t
  misc_feature (367)..(367): n is a, c, g, or t
ccaattngncnttatggccgggtgccccgttgggtttcagacttgcntggggcctgtaggccttttgttttggcaaatttctcccatttggaatggggaacatttactcaatgcctgtacccacattttatttaggaagcaactaacttgnttttgattttacaggctaatagatgaaagggacttgccttggcttagangagnctttggacttggactttttgggttaatgctggaatgaattaagactttgggggactggtgggaaggcataattggttttttattattttattttatttttttgagacacagnctcattctggtgcttaggctggagngcagtgncatgatcttggctcactgnaagctccacctcctagattcaagggcttctcatggctcagcttctcaagcagag

SEQ ID NO: 563241 - DNA, 409 bp, Homo sapiens
  misc_feature (20)..(20): n is a, c, g, or t
  misc_feature (39)..(39): n is a, c, g, or t
  misc_feature (47)..(47): n is a, c, g, or t
  misc_feature (82)..(82): n is a, c, g, or t
  misc_feature (106)..(106): n is a, c, g, or t
ggagaaacccggggaccccnggtaaaataattggaaggngccacccntggaggggaattaggtgaagggtaaaaattaaaancctccaattttacctattattggncccatccagacagataaccagtttgttaaaaatgataatagccaacaatttgattatgtgtgccttatgtatcatatgtatgtatcctgtatcctatatatgcctcatgtataaatgaaataaatgactaatatcacaagggaaaggaggaaggaattaggattatttcattattataagttacactacctatgaagcagtatagttttatttgaaaatgaacttgcattagttgtaaatgtatattgcaaactctagagtaaccacttaaaaaggaaaaaaaaagaagcataattgatacac

SEQ ID NO: 563242 - DNA, 1177 bp, Homo sapiens
gtaccagcaaaaactctaacaccaacctatctatcgaccccgccggaggaggagacacccatatctataccaacacctattctagatattttcggtacaccctgaagttataatatatctatatcctaccaggcttcggaataatctcccatattgtaactatactactccggacaaaaaagaaccatttggatacataggtatggtctagagctatgcatatcacactctggcctacctagcggctttactcgtgatgagcaacaaccatactattatacacgtaggaactacgaccgtagacacaacagaagacatatttacaactaccgctaccataatacatcgactatcacccaccggcagacaaagtatctagctgacatcgcacacacctccacggaagcaatatgaaaatgatactgctgacagactgctactagagcacactaacagagtatacatctatctcctataacaccgataggtgcgactgactggcacatacgaaatcagcaaacatcatcacatagacacatcgcacctacacgacaaacgtcactaccgacagatagcctcaaatatccactaatgttcataatcaaataacgacagctgtatacggccatcatacagaggacatacaataccactgatctatcccctaaacctcagggcaacacccctatacaacacctacgaccaaaaatccaacttaacactaatcattaatgccattcggacgataaatccaaaactatcctaaccccaaaaacaaatatactggagagatatccgggaaatgacccacgaaagatacaatacgggtactaacccgaacgcaaaaaagaaccaagtacacacttcctactaatcatggaaggcaacatcattatatcctccaacaaccactaattactacttaactccaccataacatgtacaacccccacctctcactacacaatccaacacaaaaactaacctaaaaccagacactactaaataaaaccccaacaacacatataaaacaacataaacccaacacaacacaaacacacatatgaactaaccacacactaccacactacacaaaccacaaatcccacacatatatctaaacccaacactaatccactaaacataacaaacatctcacatccacaaccaactacac

SEQ ID NO: 563243 - DNA, 1068 bp, Homo sapiens
attgagcaacgagagaagcgccttgcgactacgggcgtgcccaagcattggacgctaaggaatgaaagtaggtgtgatcggatttctcctgaagtgaaagtgattgagtattagagtggttgaaaggcgagcgctggtgtattgtttgcacacttgattaaagagagagtatcggagagaacagacggcgtcgtgcaactatggagacgatggggaaggcgggaataagtaatctgtagattggatcagtccgaagggcgatcggatagttgtgtcatgctatggtcgatgtactatagcgtagattaatggcaaatcagatgatcgaataggttagcgaattatgaggcatacatatttgctagatgcattgaagtttacattgaacaaggatagtacccaagatgggtctcgaaataggatactgctcgtgtgtatctatataagcgtgtcccatgtgatggcttaatgtggagatctatataacgctcggaatgaagcaatatgaaatgtgtgctagtgcctagtggggattcgaaccatggagaagtgcgcttagtactgcataactgagtgtgagaccgacgtgcaaccgaatttgggacttggtataaggagaaggattaacctgaaagtcgcggaataattactctagggcggtgtacggcgaaccgtttgcctggcgatggataggtagagagcgtctatataacctgcacgatcagcagcaagcggtctgaggatcacgctccaagggaagtacgcggagcaccagccacgcccgttcgctataattcgaacttcgaagggggaccctataagaaagtggttccagggttccagataactcccagggggagactgacaacgaacttgacgttgtgaatagcatcgatgtatagaacccccagattgcagtgggttggcgatagaaccgaaagagtttgagtttttgcgataaaggcgaaaacaggttgggaccaaacgtgacgcaccttgggaatgtctcaaggaagcaagggttgtttgtgttgttagacatggaacttgtcacggagaaaagcgtgg

SEQ ID NO: 563244 - DNA, 1674 bp, Homo sapiens
  misc_feature (455)..(455): n is a, c, g, or t
tacaaatgtgaagaatgtggcaaaggctttaagtggttcctcagaaccttactaatgcatcagatagattcatactgaagagaaaccatgacaaatgtgaagaatgtggtcacacgcttttaagatggtcctctgcaacttactatacatcacagagaacttcatactggaagagaaaccctgctaacatgtgacagcaatgctgtcgaccagtctttaaaccacgtcctccacgagaccgtaactgataccattaagcagaaaatccatacctgggaggaggagcacctcctagcacaactgctgcacagccactgctggccaccacgccttctttacagtgcagtctcttctacagcgaccttcaaactatactcacaattacacgaagaaactttcattacgtggaacgaagagtaacctcctatgcacacatttgttgcacacgaacagtncgctgagccaacacaaccccactatgtcgtcacctttggcgctcccttcccacacgccgtactaatcactctgacagcacgcgcatctcacaggacagaaaggctccccattacattgctgcgcaccataatgcatctaatcccaccgttaagacaacaactgtggtatacacagggcaaatggtgtgtgggggccacacaagagacccgcttatactcaacatgccataacagggtcgtccgcatataccaatgaggcatctattcagcccttcaacaaaagcgagtataagatcgcaaccgaaacgcttcttccaagtataacccatggtcacaacgcaagggaacacaacatacgccgccataccaaagaacagcttaggttcaagaacaagcggaacactacggattaggaagcgaaacaacaggcgcccgtctattcgtatacacaccgccaattagctttcccgcgtgttacaaactgggcccctattgttcaaccttccttacccaccagcccactactactttaggatcagcacacaccttatccccaactaactacacacatgtaggctgtaacagaatatgacgcgacgcacagatcgttcttcagcgattacaccacaccattcacattacgagcgacgaaattgatgagcctatccggacttgacgagcatcagagaaataaagctaccgctaaagtgttaatatgggcgttcatctattaggcaaactatcagacaagacagatacatctaaagttacgcacaaggatggccaagatcgatcacaatcctgcaaatttaagtcagtactgacggactcgcgacaaatcacacttggtcaccggtttatacgtatcacacagccgcgagatacaagcgaggacaatgacttttatcgggtccgacacaaacacgtggatcatgattcaagcagtcggaaggcacttatgtcgagctcgcacgtctcaatatcatcaatatatcattgcgaccttgactagacgctgcgcgatatggtggacagacgcaactagagttatcgtcctcatgacttgtgtcactcaagacaacagctagcttcaatgtcagaacagctatcttgtgtggaccgacgcaagactgtgtgcactggctgcgcaacaagcacgctccgcctgtaatacaagcacattgtgagtactgatgcacgcacataatagatacaccgc

SEQ ID NO: 563245 - DNA, 268 bp, Homo sapiens
  misc_feature (1)..(1): n is a, c, g, or t
  misc_feature (29)..(29): n is a, c, g, or t
  misc_feature (37)..(38): n is a, c, g, or t
  misc_feature (40)..(40): n is a, c, g, or t
  misc_feature (52)..(52): n is a, c, g, or t
  misc_feature (151)..(151): n is a, c, g, or t
ncccgcgttaagtaactcctcattcgccntctgtctnntnggtttgactgcncatgtaagtggaatcatccaatatttgtccttctgtgactggcttatttcacttagtataatgtcctcaaagttcatctatgtagcatgcatcagaatnttcttcctttttaaggctgagtaatattgcattgtatggatataccacgttttgtttgttttgtttttccattcatccatccatgggctgcttccaccttttggttactttgacgcg

SEQ ID NO: 563246 - DNA, 187 bp, Homo sapiens
gtgctggtggttctttacatggcccagttgcctattgttctcctggccaaaagcacaccaagctgccagaaatactagactgtcctagatattctattcaccagccaagacttctagttgtaccttaaacacattagaaagaccagcagagatctagttgagtcggcccagtccagaattgccccga

SEQ ID NO: 563247 - DNA, 251 bp, Homo sapiens
ggtatcagtcctcataaaaaaaaggttgcttttgaacaaattcacatttcaggaacacctttatttttggttttaattttcctcttaggtattccgtttaaaaatcattgtggtattagaaacaggtaaggaaattaaagtttttaaaatggtttcattctttgcaatatgcaaaatttagattttactttctggtcctgtaaagaacctgaagtgaatttacacttaatgggtgaattaatccagaatta

SEQ ID NO: 563248 - DNA, 989 bp, Homo sapiens
agagaggccgtgcccctcaggtactggtttcttgcacctacaagagagttggcaacatcacgtaagcaaagacttcagttgacatcacacaaaagctgtcagtggcttggtttctatggtggcactccctatggaggtcaatttgaacgcctgaggaatgggattgatatcctgttttggaacaccaggtcgtatctaaagaccacatacagaatggtcaaactcagatctcaacccaaacttgaagcaatcgtctgtcctaggatgacagtggacccagatgttggatatcgcgtgatttgcatcgtatccaagctggaaacgagatttataccgtgtgcgcataccaaagaaatacattctagatgcaaccacaatcctcgctaaacaattgcttttgtatcatagctaacgtgtgctcctctatttgggtatccaatgtctcggcaagaaattactatgcaatacatcttacattattaacaggtggacctgactcggtaacagagactcgagaaaacggcaataactgtggagcatctggctattaagtgccactggactcagagggcagcagttattggggatgtcatccgagtatatagtggtcatcaaggacgcactatcatcttttgtgaaaccaagaaagaagcccaggagctgtcccagaattcagctataaagcaggatgctcagtccttgcatggagacattcccaccagaagcaaagggaaatcaccctgaaaggttttagaaatggtagtttggaggtgtgggtggcaccaattgttgctgcacgtgggttagacatccctgaggttgatttggtgataccaaagctctccaccaaagatgtcgagtctaccattcttcgatcgggggcagccgactggaaggacgggggtgcactggttataccagggagaaatcagttccgggcggacacacggcgacttatccacggaacgggtccttcgagaaaataagac

SEQ ID NO: 563249 - DNA, 452 bp, Homo sapiens
cagaaataggagtcattagcgcgtgaagcctcactagggatgttacgagcgtgggctgcagccagggatgaggggtggtgcttgatttgggaggactgtctatgcccatttgtctcatgtacacgagagacaggtgcccccaaggaacggcagggtggcgggcggaaaagtgaaccgtgtactgcaagttaggagatgctgcatgttcccaccctctcggatacaactcagtgcacacaggaggtggcctgataagtccgagacaggagagaccggcagtcacaatggggttctggcttaggaagggaagggcctggttatcactgtgggatcctgctaacagcagccaaccttctgctcacaaggaagaaagtttggtgttgaggggggtgagagaaggctgaaagaatgtgagcaaacatattgctgagcctgccgtctaggagcgtaat

SEQ ID NO: 563250 - DNA, 463 bp, Homo sapiens
  misc_feature (173)..(173): n is a, c, g, or t
tcaaagataaactttgagaatatcaagtgtcaaatgaaaggttagttttgcatagtgtttatattttagatttagcaaattaggactaataccttctgaccttacaaatcacaaatcataattcatcttctctctcccctgtgtgcttcttagttcttcatggaaaaacttanaatcatcaacacaaccacatgatattgacaagccaccctgggcaatcatttagaagcatctaccaaattaggatttggtttctaaagtctgtcagttgacagtttgttgatgaagtaatcccctctgcatttaacttcacagttcctgttgctcttccacttcctcatccaaactcttcagtttctcctatacaaaggctttcgtcgctccctagtagaaagtagcatcaacagcttatgccccttttcacgaaattcttgcctatcatttgttgcctttactaatgctg

SEQ ID NO: 563251 - DNA, 145 bp, Homo sapiens
aacaccaacccataaacaacaagcgcccaactgacccaggatggggaccacagccagagcagccttggacttgacctatctgactgttgctcctgctgtctctgagggggatttaccgactacagacagcggcagctgcggcccg

SEQ ID NO: 563252 - DNA, 470 bp, Homo sapiens
  misc_feature (32)..(32): n is a, c, g, or t
  misc_feature (111)..(111): n is a, c, g, or t
  misc_feature (173)..(173): n is a, c, g, or t
  misc_feature (201)..(201): n is a, c, g, or t
  misc_feature (251)..(251): n is a, c, g, or t
  misc_feature (258)..(258): n is a, c, g, or t
  misc_feature (267)..(267): n is a, c, g, or t
  misc_feature (270)..(270): n is a, c, g, or t
  misc_feature (276)..(276): n is a, c, g, or t
  misc_feature (293)..(293): n is a, c, g, or t
  misc_feature (298)..(298): n is a, c, g, or t
  misc_feature (300)..(300): n is a, c, g, or t
  misc_feature (306)..(307): n is a, c, g, or t
  misc_feature (315)..(315): n is a, c, g, or t
  misc_feature (317)..(317): n is a, c, g, or t
  misc_feature (328)..(328): n is a, c, g, or t
  misc_feature (337)..(337): n is a, c, g, or t
  misc_feature (343)..(343): n is a, c, g, or t
  misc_feature (453)..(453): n is a, c, g, or t
ccaggagagagtcagtacattagacttatagnggaggagcagaactgaaccctggcctgtgaaataacaatttcaattaaaagctgtctggccctgaagaaagagaaatgntcctggatatagctggtcctctgagctggcagagctgagcctccctcgggtcttctggtggnaagatgccaaagttgaatagtgtctgtnggcatgatgaccaagtccttgtgctttgggcctcttccctctggtatttnggggggngtgccagangcncccggnggaggtactgggggggnccagngncaaatnnagcggctngntttcttggggngcatctggngaattncggggcgaggccagtgactcccagcggctccagtgttggttggcgggcactttgggctttccagggagagaggttgcgggggagggggccatgcagaaggcgagggctgncttggcaattttgtctg

SEQ ID NO: 563253 - DNA, 448 bp, Homo sapiens
tgcacagctagagcgtgatctctgttgctgctagagcgtgtccgtgtctgccgggctgtgccgagccatggaaccagtgggaagaccttcacttgcactgcttcctaccccgagtccctctgagccttcttgagatgggtcagatggactccctgagagccgaggacgcggctgtcttctactgtgcggtttgcagtaatttcagctgtgcgatctttgactactggggccagggaacccaggtcaccgtctcctctgcatccccgaccagccccaaggtcttcccgctgagcctctgcagcacccagccagataggaacgtggtcatcgcctgcctggtccagggcttcttcccccaggagccactcagtgtgacctggagcgaaagcggacagggcgtgaccgccagaaacttcccacccagccaggatgcctccgggggactgta

SEQ ID NO: 563254 - DNA, 174 bp, Homo sapiens
gacaaaatcatgcacagaagcagaaaaaggcaaacagagaagaaggaggaacccaagtagctttgtaggcttcgatgtccagaacctcttgcccttcagcctgtgtgcctatgagccagtcaccaccacagctacgcgatatcctaccatgtagatgctacacagagtcccaga

SEQ ID NO: 563255 - DNA, 175 bp, Homo sapiens
  misc_feature (147)..(147): n is a, c, g, or t
tgcaatactatttttttttttctctctctcttttttaaagacagttttggggtaatctttttctttggcttaagtcagagatggaagggggaaatgagcaaaggaaaaaacaaccaacaacaaggagaatgaagctttcccttctgntatcaaaatgctccggagaggagggact

SEQ ID NO: 563256 - DNA, 450 bp, Homo sapiens
aagatgttccaggcaggacgagagaaagggctaagaggacactaggtatgaaagaaacagaggacaggacatctcagcctcagaaccaccctagatgccagccagaggagaggccagaaacatgtgactgatgaaggtgtccactaaagcttcacacaaaactgcctagagaggagctggatgcagctgtggcaaagaggataccccacatccaggtgtaggagaaaccttgagaaagcagcctgcctcttctctcacactctttcactccatctctgagtcttcctttccctttttgatctccctgtgttgcccacccccaaggaatagggaggggatctctcatccctccgcctctgttgtccctggtctctgcaataacctaatgatttctcatttagttgtccagggctggatgcagaaaggctcgttttgattgcttgttccgct

SEQ ID NO: 563257 - DNA, 352 bp, Homo sapiens
gactccatctgtggcttttcaggagaggccaaggccctccttagtacattattagaactttctgatcccagggaaatccacacgtgtgtatcagcaaatgggggctgctaggacagtgtgtcttaagtcaagggcctcttatcacacagacatgcacagaaaacattgacataagagctttgtggaggaagactatgggctgatcccagcccctgtccactgtcaggccatggtcagtctgtggctgatggcgtacacatccatctgtgcttgcactccaatacaatagaacataaaggaaaaatctgggccaagatcagtaaagataaggaccaaagacaagagctgggat

SEQ ID NO: 563258 - DNA, 183 bp, Homo sapiens
cttgcagaacattttatccaatggctgcagaatacacattcttttttagcacatgtatcattctcaaggatagaccatatgttaggtcacaagtcttaaaacattaaaaaagttgaataggatgaaggatgttgtgtgaggagagtggaatacaactagaaactaataacaagaggaattttt

SEQ ID NO: 563259 - DNA, 945 bp, Homo sapiens
cgagggaatactgcagcagactagtgaggaaggatgtcctgatccagaaatgagatgatggtgttcacaatccaggaatgggcatggagggatgcataaatgtaaatggatttagacagaagcattttatagaatttgccatgaattttgtaattggatgtggtagatgacaatcagaatagatctcagggataatgcttaggtaatagatctgaggcattgtttcggattatctgaggtaatgaacctacgcttaagaaaccaatcatggtttaacacaaataaccatgtattttactcgtgcacatcggtgagtctagaggtgtgtttacatacgtagagctacgttgattgtgacagatccctcatgaacgtttgtatatgctagcatggatgcgcgctgcgagtgtcacctcaaggcttcttacacatgcctgcacactctgaggctgggatacattgtcgacacaggctgtcgtgctgggacaagggtggccccctgggggcagtctctcttacagtgtggtctttccgtatgtgaatgcgcctccaggatagcctggactatcgtcaatattgccgcgctgataggctgtacagagccaaactgtgaccacgagaagctggcagaaaactgcctggtcttatctacccagaatcctcaagaggtgatccagtgtcccttttactgttgtacttgattcatcgagtcgcagtaaacatgggcattgtaaggtacaaggggcacgaagggagatagctattggcgggaggaaacggtggaaaaattcctgggcagggtagaaaagaccactgatgtttttgggtggggtaaagggggtctgcgctatgactgggaccccggagaaaaccgtgttggtggcccgggaaattagccttgagaggacaagataaatgtgaaaataaatgatcacatggatgacg

SEQ ID NO: 563260 - DNA, 228 bp, Homo sapiens
tatagtctcccaagtctctctggacacaaatgagcgggtacctacagaggaaaaccctccaagaacacaggagactgggcatgggggctcaagcctgtaatcctagcactttgagaggctgaggtgggaggatcgcttgagtccaagagcccaacaccagcctgggcaacatggcaagaccttgtccctactggaaaaaatgaacatcaaatgattattgggaccttg

SEQ ID NO: 563261 - DNA, 982 bp, Homo sapiens
  misc_feature (2)..(2): n is a, c, g, or t
  misc_feature (100)..(100): n is a, c, g, or t
  misc_feature (118)..(118): n is a, c, g, or t
  misc_feature (211)..(211): n is a, c, g, or t
  misc_feature (215)..(215): n is a, c, g, or t
  misc_feature (227)..(227): n is a, c, g, or t
  misc_feature (289)..(289): n is a, c, g, or t
  misc_feature (296)..(296): n is a, c, g, or t
  misc_feature (300)..(300): n is a, c, g, or t
  misc_feature (312)..(312): n is a, c, g, or t
  misc_feature (319)..(319): n is a, c, g, or t
  misc_feature (347)..(348): n is a, c, g, or t
  misc_feature (362)..(362): n is a, c, g, or t
  misc_feature (368)..(369): n is a, c, g, or t
  misc_feature (382)..(382): n is a, c, g, or t
  misc_feature (413)..(413): n is a, c, g, or t
  misc_feature (436)..(436): n is a, c, g, or t
  misc_feature (501)..(501): n is a, c, g, or t
  misc_feature (720)..(720): n is a, c, g, or t
  misc_feature (728)..(728): n is a, c, g, or t
  misc_feature (833)..(833): n is a, c, g, or t
  misc_feature (894)..(894): n is a, c, g, or t
  misc_feature (912)..(912): n is a, c, g, or t
  misc_feature (914)..(914): n is a, c, g, or t
  misc_feature (982)..(982): n is a, c, g, or t
cntggcacagatgaaaggtaatactcaccagctcctcacatgggactcagtgacaatgtcagctacacaccatggaaggagaacaaacccgatgtaaaangcacctagctggggagangctgtggtgttcactgcctctctagcaggtttgcttttgtgcactgtggctaagtctggatgaataatattgggaagggaattatcggttgcntggntcctttgctggntgcttccctctcctgattggtgtatactcgccatgtggtaggtggtcttactggtgactgtngtttccnttcnggaattcttctnctctctnccttttctgctctagaaggttggggaanncttcccccagtatnattttnngctgcggcttctnaaggctgttaaaaagcatcctaacttaatancaaataacaacagttaccaaatnttagacagataagtggcctgatcttaaatcaatcaatggaaaggtagattcataaattttaaatnttttctggtgaccagtccattaaccatggggttaatgcctcgtctgaaggaagatgtttacgctgcatccacgatccagcaggcgcggtgtgctcttggcaactgtgaatgaatagctaccgtttcccttcaacacaccgcgctgccaccggtgaccgcatgtcaagtgctgaagttagaagagaccccacgttggcaaaggccccccaggcgatgatntgcctgangcggccaggtctgtgggaaacaagacttacgatctcaaataatgacccccaagtgccctcgcctcttcctgcttgccctgtgcgcctcgacctcctcacgggganttccaaatgagttccatttccctctcagttctaggcactctggaacatctttgattaacangggtttttcatttctttncnacgccattggtgacttttgacttggaatgccgattccttctcctggaagaatggctttcgttgttgcn

SEQ ID NO: 563262 - DNA, 917 bp, Homo sapiens
gcaggcctgtaaacccagcacttcaggagatcgatggtagaggatagcctgagtgcaggagttctagaccagcctgagcaacatagcaagaccccctctctaccaaaaaaaaaaaaaaaaaaaaaaaaaaaacaaacaacaaagaacacaacacaacacaccacgaacacacatatacgagggggccgcgaacaaagaagtaatacacacggcgacacgcgagcgcgcacacggaatcagagaacgcacacatcacggagagcagcggaggcaaacatccaccgcacgagcaccacactgataggaaggaggacagcgaaacaacacagcgcgaaagcagcacgcgcgaggagcccacaaccgaagtcaaataacgacagcgcagacaggaaacagagccacagagaaaaacaacaagagaaacaacagccacccaggcagcgaagaaaacagaaaaaacagaaaaaagaagaggacaagagggagaggccggggggaagcgaagagacagggggcgggtgcagacgagagctgacgaaaagcgagaaaagagggtgagggaggacgagggaagagagaggaagaagaagaagggaggcagaagaacacgagagaagacgagagggagacgcggagggagagatactgaaggaggaggacagcgcaggagaagatgcgacgtggaggaaaggcaggagggggagcgagaaaggtgcaatggaggaagtcggagcagcggagatggaggagagcgacagagagaaggagaggggaggaggaaggaggagagagaggagaaaggggaagaaaaggagaagagaagagcgcagccagcgagcgagagcgacaggagagggaccgagcgagcgagagcgaacagagggaggcagccacccggaccaggaggcgaagagaca

SEQ ID NO: 563263 - DNA, 996 bp, Homo sapiens
ggctgggtgcgttgtggctgcctcgccgctgatctcgccacgggctctgccagcagacagccttggcacacaggcacaagggctggatgcccagagatggagagtgcccaaggggagatgtgagcctggcagtgtgcttgtcctgctaacctgtcgctgaatgtccccagaagctgtggccctcagtgccaggcctagccttcctccggcccagcatgcgcctgtcggtccgtgagtggttgctgcgtggcagcctggcttgcgccctggtcctggtgctggcggttcagcttgggacagcaggtgcttagagttgcctgggctgtgtgcttggctgggcctgcgtggatgcccccggtggcgtgcccattgctggtcctgagcagggagggagctgtgttgattgggtgtggacaccaaagacacttttggtaattacctgctactggccaatggcctccattgccttgctcatcttacggtgtgggttggccgtagccgtcttccactgtgggcacccgcggttcgacttgcggctgccattggctggaggcgcccacaccgtgatgggtgccgctgctgggcgatcggaggacacctggcattctatccgcgcagctgttggcttggcccattgctgccaagggaccttggtttccaaaagcttacttgggcccagtcggagaaagccttgctgggccttggcacttgaagggccgggggcgttgaccggcattgcacggggtgcctggaacagcacaggcaagtgaacagtcgaccccgtatgcgagtcacctagtcgcacgcgtagaattatgcccgccacgctagctgggacagaaatgccagggccacccggcagcgtcgccatcctcgaccaacaccacaccgtgactccgctatttataacccgtgcgttccaaacggttccagtaccgagatccataaaccgtagtacagacacacgctgtgtatagccaccagcgttaccattag

SEQ ID NO: 563264 - DNA, 643 bp, Homo sapiens
  misc_feature (11)..(11): n is a, c, g, or t
  misc_feature (357)..(357): n is a, c, g, or t
  misc_feature (418)..(418): n is a, c, g, or t
  misc_feature (449)..(449): n is a, c, g, or t
  misc_feature (488)..(488): n is a, c, g, or t
  misc_feature (498)..(498): n is a, c, g, or t
  misc_feature (508)..(508): n is a, c, g, or t
  misc_feature (544)..(544): n is a, c, g, or t
  misc_feature (551)..(551): n is a, c, g, or t
  misc_feature (580)..(580): n is a, c, g, or t
  misc_feature (617)..(617): n is a, c, g, or t
gaacgccagantctcaagcgcggttcggtcagtccgtgaaggggcttctcacggagaaggtgaccacctgtggtactgacgtaatcgcgctcaccaagcaggtgctgaaaggctcccggagctccgagctgctaggtcaggcagctcgaaacatggtactccaggaagatgccatcttgcactcagaagatagtttaaggaagatggcaataataacaacacatcttcaataccagcaagaagctattcagaagaatgttgaacagtcatcggatctacaggaccagttgaatcatctgttgaaatagaatgacatgtaagagtgctgtaggactcctttgcctatgctgaggagtnaatacccttaccccagctgtcctctgcgcgtttggcttttctattattcttctccataaanttaaagttagaaaagcttctgctgcttaggngccggggcgcggctagctacacgccctgctaatcccagncactttgggnaggccgaggncggggtggtatcacgaggttcaggagtttcgagacncagcctngtccaagatggtgtaaaccccgttctctnactaaaaaatacaaagtaattagtctgggcgttggtnggcggggcgccttttaaatcccagcc

SEQ ID NO: 563265 - DNA, 430 bp, Homo sapiens
tgtgttggtccccggaaattcggccattatggccggggtaatgggcaggacatctccctggaagatagccgcctaaggttcaatcttcgggctcattaagctgatgactggggtcatgtagcccctaactccagactccaccagatgtgcagggttagagatgtcctggattcctataaggtccctattcaggatagacctaaattggatgaactcagggccagtaatctgccccccaattggcctttccctgagcagggggcctgctcattagatctttggatactttaccatgtgaaatactaccagaactgttctctaaacccactttttctgtagaggaaggtatcatctttttttttctcatattacaaatggccaaataccggactttctattttcatattggctgaacccattttttaaagga

SEQ ID NO: 563266 - DNA, 857 bp, Homo sapiens
taatgctagtggaggctgggttttaatcggacgagggtagcatatcacatagacagatatctccaagagtgctggagtgaccagcatcgcctgctgaagcccacggctgtgccatccatcttccacctgacctgagaagaagagtggggtgctggagtgccatggcctgcaccctggagaaaagatgccagcaaggccacagtggtgtgtgtgaggtgtggacactctgatgtgcctgccaccagcatgatgtgaggcttgcaggttgtgtcacctgtcctcgatgtgtgaaaccctgatggccaagccatgagtcccctgcaggattgaaagcaagcatgctctgcaagtgtgaatgccacacccagtggctggcccaagttgatgtgcctggcccagccacggatgcaagtgcccatgcaatgcatcttgtgaactgtgactccagtgatggattgtgacttgtgccaccatggttggcatgtggcaagtcaagggacaaatgcatgaatgctgtcttgccacatgattgctaggctgatgaagagctgccaacttcctccattcgaaatggtgggtgcgttgacaaggataaagaggtgtgggcatattctatggattgacttatacgcccccattgatactgggggcgtgcaaatttatcggcatcacttcattctgtacagtattctacctccaatgcaacaccccggagaaagggcatcttgtcaccccgagagccccattgaccgcaaagaggctgaaaggaagatgttggaaccaaagctgcagtgggagcagcctggaccccgaaaagggccttgccagagcctaccaaggtcatcagttacgggaac

SEQ ID NO: 563267 - DNA, 109 bp, Homo sapiens
gtggcgaattcggcacgagggcggagaagatggcggacgacaaggattctctgcctaagcttaaggacctggcattactcaagaaccagctggaaagcctgcagcggcg

SEQ ID NO: 563268 - DNA, 344 bp, Homo sapiens
ccctcttccaaccccacccaccaataaaaagagatttccaaatgcatcatatagtcatcaagacatggtaaagtctgtttcaaaattgtattcattctagttggtgtttagaggcatcttattatggttttaatttgcattcctttgatgactgatgatgttgagcatcttttcacgtgcttattgccattcctatatcctctttcatgaaatgtttttttctattttgcccatttaatttgggttatgtcttatcattaagctgttaagagtgtctcacatattctagattacattttcactctcctagtggtgcctttccaagagcagcttttagttttggt

SEQ ID NO: 563269 - DNA, 890 bp, Homo sapiens
  misc_feature (144)..(144): n is a, c, g, or t
gctggttattcactccgaccatgccctctgaaagcactctatagacctgaagcaggttcgcactgctctactccctaagacattaggcagcgacttcctgggacacgtacctgccgggggcgcactccacgaagtaccctaaangctcagagttgcgccctttcctccaatgctggaattacgttgtttccatgttcccgagacttgcacgatcatattaccttcgaccgaaagtgacacggtgaccactctcgtgggagctccgcacgtgggaccaagtcggcaggagggcaggtatacatacctgggaccgcaatcaacatccggatggtaggtttctatctacccgcaacagtgccctttgttggccctccatttcctgtaggctactatgtaatgaccaatgggtaatgctgtggcgccgggaagaaaactacgccctgtcctgggaatgctgtgaaaagcccaactcctgtttcggaggccagaacgaactagcattaaacgaatggtcatcccccgatgagtctcaagtaggcctgagaccggcattgccgctatggagggaaagcgcccgacgagttgaaccgagttagtctcaggaaccccattgtatcttccgccttgtgacccccttgaaatccggtagttgaaacagggcttgggtactcggagttgcgggcgacgggaccaagagactttctccagattcgtggcttgattaatcacccctttgtccacacaaactgtctgctgggtaacgtgccataatcggcacggtacgaaagtgcctgggtgactcataaattgatagccccacgtattacttttttgcacgacagtttgccgtgcccatgaggtgccctcccaggcgggaacaatggcacaac

SEQ ID NO: 563270 - DNA, 391 bp, Homo sapiens
ccctcttccaaccccacccaccaataaaaagagatttccaaatgcatcatatagtcatcaagacatggtaaagtctgtttcaaaattgtattcattctagttggtgtttagaggcatcttattatggttttaatttgcattcctttgatgactgatgatgttgagcatcttttcacgtgcttattgccattcctatatcctctttcatgaaatgtttttttctattttgcccatttaatttgggttatgtcttatcattaagctgttaagagtgtctcacatattctagatgtcctttgtcagatatatgcattgctaatttctcccagtctgtgggttacattttcactctcctagtggtgcctttccaagagcagcttttagttttggt

SEQ ID NO: 563271 - DNA, 170 bp, Homo sapiens
tctctgcatgtgtcatagttacagtgtcctttctctccttcctttccagccactgtgtcttgaaaatgcttgtcctggttgagcgagcccctgccctgtaccctcgctctggtatggagcaaggagagaggcccagcagacaaggcaggaagaatcctgaaggcggaggg

SEQ ID NO: 563272 - DNA, 769 bp, Homo sapiens
aaggcaggacaggcccggtggtaatacggacgaggtggttccaggagcgtggccttgtgggccatggtggtttgacctcttcagacccgtccggtggcctggaggccggagtgctctcctgagtgtctgcccctgcagtggctatcttgtacgcctgctgctggtgctgtgatgtcgctgtgagtgtgcttggcagtggactctgattttgtgttgtgtcctgctgctgcccctgccctgcctctgtcctgtgctcttgaagctatgtagattgatgtgttgccatgatgtgtgcatgtggatgctctgcctgtgtgtgatgatgtggcttgtgcccctgtagtggacatgttgcccagtgtgaatgtgatgcccctgtgtcctccagggcacttgacttttgcccttttttccctgtttgatatgtcatgtgctcatgatgtgtgcttgtaaattgtctttgtgtgaagatggtttcttgtaagccccttggcccttgtgttgttgacgtgatggtgaaattgtgctctgtgcctggctgcctgtgcctgtgtgctatctcttttgtgctcccaaagagaagtgacagttgttgggagtatctgcctgtggcttctcttttgtgctcccaaatgagaatgacagtgtttgggagtatctgccggcgctgtccaggtcctttagtacagcgtcactccatctgatgttgcagaagctgggctgaacctgcggtgtgtgggcatagacctgggctgggtcttgcgcagcc

SEQ ID NO: 563273 - DNA, 280 bp, Homo sapiens
tgctgttgactatttttgattaaactgctcgaggttagggctacgcatagtggggtatctaatcccagttcgggtcttagctatggtgtgttcggatatgttaaagccacttccgtagtctattttgtgtcacgtggagtgttttacaactcaggtgagtttaagcttaattggggagggggtgatctaaaacactcttcacgccggcttctattgacttgggttaatcgtgtgaccgcggtgcctggcacgacattgacccaacacatagtctgcagca

SEQ ID NO: 563274 - DNA, 190 bp, Homo sapiens
gtaccgcaggctctctactcagcctcctgaatacgctgggactacagcatatgacactgttcctggctaatatttgaatttttttttggtagagagagggttccatatgtggcccagacggtttctaactccgggcttcaagaagtactcccacttggggttcccaaaatatggggataacagacctgag

SEQ ID NO: 563275 - DNA, 180 bp, Homo sapiens
ttacgacccgaagacattcctcccagcatgacaaaatctgctcagctcaaaggctttgggacatcccctggacactgtacagcctccatcagagatatgtggcccttcaggccatgggagagtcggacactcaatgacggcactcagctgggggtacccactcccgtcttcgggtcgttt

SEQ ID NO: 563276 - DNA, 390 bp, Homo sapiens
tatatttgaaattcctttttaaattaggtgggtgaatggtgtaaaacttcactatatgttctccctgtccgttacttgacttgctcatctcctgccaatatatgtccattttaaaaaacaaacaaccccatcaaaaagtgggcccaggacacgaaccgacacttctcacaagaagacatttatgcagccaacaaacacatgaaaaaatgctcatgatcactggccctcagagaaatgcaaatcacaaccactatgaggtatcatctcacaccagttagaatggccctcattaaaaagtcccgaaacaacaggtgctggagacgctgttccgaaataggaacacttttacactgttggtgggactctaaactagttcaaccattgtggcag

SEQ ID NO: 563277 - DNA, 102 bp, Homo sapiens
gccgcagacacggccgtctattactctgcgagagattcatcgggtagtggtggttattactcatccgagtactactacggaatggacgtctggggccaaggg

SEQ ID NO: 563278 - DNA, 1570 bp, Homo sapiens
acgctgaggccacgggtcccggaccaaccccacctccagtgcaacagcagtgttttcaacacatccacacagcatgggcaacaatctgtgagcaaaatttgcccttcccacatggacagacttgtcccatggtcatcacactttgtcatgcagcaaccaaagcataacacagcacagcaaaacgcacacagtataactgtgcccactaacccaagatcacactctgctacccagaccatgcaaacacaactttcgggccaggacttctgtcccctctgcacagaattcagacagcaggacaacacacagcctctcccacaaacatacccgacgcacattacacacacattcgccatctgcacgacccatcacgccattctcttacactcgaacgtgcagaccaaacaacggacaacagtcactgcttgggcgccacccggcaccacggggatcccacacccttacatcgccttagaaggacacaacacaaacagaccaccacatacacgctcgccatggacactggacacaccgcaacattgacacggacacacatgcccaaccaccaaacaaccgaggaaccgcctgcacatgcgcacggcaccaccagagaaacaaacacgcagacctacaaaacgcagccaaagacgccgaaagacatcgaccaaggactgacaacaagacacatgcatggcggataccaaacgacctacacagaaggcgcccccaccacactaccccaggaaacaacaacgcagaacgaaaaaacataagggaacaccagaaacactgggaacgaaccgcgggcccaatcggcagagcaaaaccactaacaacaagcgggcacaccaccaagcaatgagcgctacaccacaacacacacaccactagcacacacaacaggacgatagggcaacttcccagcagcatgaacaccacataacaagggacaacacacacacaccggacacaaaccccacagtaggcagcaacgacccggaccaggaaacaaccgggccacacaacaacagaccgacaaaccgcgacaacaccgaaacgcaactaatggcgcacaagagaagacacaccgaaacacaagcagaccaccacggacaccgcacaaacggacacggtaagcacagaacaaacgagacaacaaagaagaacaaacaaaagcaggaaggcagaggaacgagaacaccagacagaaccaaccgaatatcacgcgacgaaagcaacgtagagcaatagagacaacccaaaccagggcgcacagtagaacaccagagaaaccatcgagccgacagcagacgacacgagaccccgacaagcacgagcaccgcgaacgacacaagacacaagcgggaaggacagaacgaacagcatagtaaccaacgaaaccaagacaagacagaagcgaagaaagcgacgacggcggagtgcggacgaagacacgtagcagatagaacagaaaaatgcacagagaaggagacgccgaacaagaacacagcaaggcagtcgagaacaacgactcacgagcgcttcctagacacagggaatagccgcacca

SEQ ID NO: 563279 - DNA, 414 bp, Homo sapiens
ttcccaaaaaaaaaaaaaaaataaaatgtccggaaagacattttggttttggaggaccagttgaattgattggtaaccttctatggcctaaataataatctgatggtagcctgccaaggagtatactatgatatataattgattctcaaataatagatgttatttcatttgtaatgcattaaaataaataaaaacctgtaatgttgtagaggtattttctctgaatagcaaatcattaatttacacatctgtacatgtattctgaatattaagccctttaacacctgtatagaccaaggcaagaatacaaatgggatagaattaaatatttgtattggcaaatatttacatgattatacaatatgacaaagtttttaataaatctatagataaacctgagccatttaaaaataa

SEQ ID NO: 563280 - DNA, 558 bp, Homo sapiens
ggaccccaaagccgtgaatactgactcattcttaccctgcatgttatacaatggtatatgatggctgcctccttatgagactgtaaggggagctctagtaagttcccttaagcaccacagaagatcatcatggcttggtcccacttttaataggaaagaatccaagttacaccagatagtgtatacttagctctcctgaagaagaccagttcagtggattaatgtctacatttacatatagtattcaaagacgaaacttgtgaatctttacatatcaacatgcccacgttaataccagtggtgataatggtttgaattatgggtgagtgtacagtatcagagatgtcagatgcactagatatatctataaataaaatcagggctttacggtcaacaatatactttggcctgacttaagtgcctgtgcttagactcttagaaaagactaaaatgaaaatggccccgctataattgtcaagcttaacacagagcttgtgcggaaggtccctatactgttgagtgtcagcgatctccaggtccacgatatgttctcgtggc

SEQ ID NO: 563281 - DNA, 128 bp, Homo sapiens
cggctcggaccgtgactgtatcttcaacacaacataactaatgaacagacgttggtctccatctcttgtcaatgaggaaaggcaaagtgattctttgattccaattcgaaatggtgtggggataaata

SEQ ID NO: 563282 - DNA, 298 bp, Homo sapiens
gccatcccccttcgtaccagaggtatctcatgcttcttctccttcttagatgtgcgaaccagtgaattgatgtggggagtgagttgactgattattgcggcgcttgaatccagggccactgctagttcttgggactggctctccagatccttcagggtaggagaggatgcacggccctccccgtagatacctgttgctgaatccccaggtgagtgggaaccaccagaagtggctgtgtcagggctactgccattgattttctttttcctgttagctcctgctggaatgccaaggctct

SEQ ID NO: 563283 - DNA, 258 bp, Homo sapiens
gcaagcgtaaatatgactaggagctcgggaaagctgcccggttcacctgtgacttcgcacagtttagggcccatatcatgctctgcggataaatcccacattcaacgaacagctattcctcaagtaactccctgcaactccctgctgcctctgctgaatgcgcacgcaccatcctatgggaaagcatattatcttatcccgaaaatcatccacttacaataagccactatgaaggcaaagcgtgaaaccccagattgg

SEQ ID NO: 563284 - DNA, 960 bp, Homo sapiens
tggcgccgacgtcatggtggagcgagtactgcgcaagcctctttgccatcctcctcccccaggacccctcgttcgagatgtcccctggacctgtatgtgctatgcgggggcctctggggaggccctgctggagacgctctggctacagttcttggtcctggaacttgcgaggccttgagcaggccgaggcctgggccagtgtctccacagatctgctccaactgctgctgcccatgatcgagctggggtgcccatcgagctggccctactgctggccgtggtgcaactggatctgggggtgagcgtgcctcccatgatgaggtggagggcttggtggagaagatccggttccccatgatgttccctgaaggagctctttgagctgctgttcaactgtccctgtactggagcctgtagggcctgttccagaagaagactctgcaggccctggtaattccacattgtgtccttccatttgctgtgcccggtgcatgggcctgaacctcggcgtggatatctacgaggccccggttttagacctcgaccacctggagtgcctttgtgagtgacagttcctggagtgccggtggtctccactggtctatcagtcagcacgggggcttttggtcgaggtattcttctgattattttcatgacccctctgagtaccagattgacatcctaacagtacttctaaaatcaaacaagccacattcatcttccgaggacatatggtgtctgaccgtggaatactcccgaatacagaactgatgaaaaaggtttactgatcttggacaaacccgtataagtgactaccaggttgggggatatggacatgataaaaaatcctaagctgaaaggttagggacacaaaaaggaagggaatcagtgaaaacagaaaacaaaaacggagaagaagaaacacacacagatagtagaagaaagaagatataaaaacaa

SEQ ID NO: 563285 - DNA, 787 bp, Homo sapiens
gggtgtggccggagtaggggggtttgacgggcaagtagggacgttgctgacacgatagcgtcctctgcgagtgtggagccgatggacgacctacacttagcaacatcatctcagcagcgcagtctgaagtggatcttcgttcgggggcaaggtgtggtgtgggcaagactcacctgcagctgcaatgcctggcagatgcagctctccaggggtgcgtgagagtgttctgatcatctctcacatgacccagctacacaacgatctcagcatgcttttcgaccacgacagttctcgacatgggtgtcctagccaaggtcaaaggctatgacgacctctttgtctatggagattgaccccaggctgggcgtggcggagctgctctgagcgcgttcgttctggcaggaggacaacgatgctgagcatgggcaagaagatgatgccggaggccgatgaggcgcctctccctggcatcgatgaggccatgagctatgccgaggtcatgaggctggtgaagggcatgaacttctcggtggtggtatttgacacggcaccacacgggccacaccctgaggctgctcaacttccccaccatcgtggagcggggcctgggccggcttatgcagatcaagaaccagatcagccctttcatctcacagatgtgcaacatgctgggcctgggggacatgaacgcagaccagctggcctccaagctggaggagacgctgccgtacatccgtcaagtcagcgaacagttcaaggacctgaagcagaccaattcatctgcgta

SEQ ID NO: 563286 - DNA, 143 bp, Homo sapiens
cattagctgacgttagtgtcttagtcagttcgggctgcattaccaaacatcttaagctgagtgacttgtacagcaacagatattaattttccacattcctaggtgggaggagtcagagatcaggggccacgcattgccatgct

SEQ ID NO: 563287 - DNA, 355 bp, Homo sapiens
aggatccccccagtattctgctcttgaaagcagcaggagttgagtcagtttaaatttgggacaggccagccgtttttcctcaaatcacctcccagatcactagcagccaggtgcttgatcttcctgacaggagcttggaagcgcgttctgtgggggatgtgatcagcattagaaaataaacccaaaggtactgatcttcagggaaccccagtccaactgctgggccacatggctccacgagcaggatcacagtcaggcagcctcacccaggcatgcagcatattagggtcccacgttgtaaacgcgcagcagatagacgaagttttgctgtatcatatcacgaagcaggaactgg

SEQ ID NO: 563288 - DNA, 930 bp, Homo sapiens
ggcccagcacgatgatgagctgagcgatcagcgtgggtgaataatccatcaccaaacatcaggaacgaggatgtgaggctgctgggagggacagatcaacggcaggagaggtgggttccctgactcctttggaaagagaactaggagataaggagatgagatgatagacgatccctctgcaccatcaaggctccagaatatcccctgcacgaatgtgcccagtgtgagaatcgtcctttgctgtcttcctggatagatcgatttcacacgaactcgaatatacgatgaggggcgacgctgcacggatcgcgccggatgccgggtggctttcagctagctgtccccagaactgaggatcggatcttgcgctgcaccgttgtcgacgtcggtagagggtggtagggcgaggtggggggacagggtggtgggacagcgtgtgctcagtcggggagggacttggtctgttgccttccacatgtctagtctcgggacgctgtcggggcgcgtcagtcctgatgcttgggggtgtcccgagtgacttgtgcagctatggctatgtcgggttggcgggataccacaaggctcccgaggaggtggtggggggtgactcgtgctgtcggcgagtctggggggtgcccctgggacggtggcggtcggatgcactccagccaaggacagttccgggacgtgcgctgggggcgctgtcacgggaacgcgccgtcaccctatgagcacgtcgcttgccgtcgaactggcttctggcgggaacagactttggcgtgcggttcctggctacggactccgtgcgtcgtgacgaaggtcgcggcgccaccagtttgcgggatagcctctggccgatggtttgtggccacgggcttgtcccaacaggccgcggggggcgcgccggacttccttcggcccggaggggcc

SEQ ID NO: 563289 - DNA, 489 bp, Homo sapiens
  misc_feature (446)..(446): n is a, c, g, or t
acccaatgtctgtacccccactgtatctaggaaataactagcttgcttttgattttacaggcttataggcagaagagacttgccttgtctccagatgagactttggactgtggacttttgagttaatgctgaaatgagttaagactttgggggactgttgggaatgcatgattggttctgaaatgtaaagataaaggatttgggaggggccaggggcagaataatatggtttggctgtgtccccacccgaatctcctcttgaattgtactcccataattcccacatgctgtgggagggaccaaggtgaaacaactgaatcatggaggcggtttccccactactgttctcattgtagtgaataagtttcacgagatctgatggttttatcagggatttctgcttttgcatcttcctcattctctctttgcctgctgccatccatgtnagacgtgatttgctcttccttcccttccaccatgattgtgacc

SEQ ID NO: 563290 - DNA, 302 bp, Homo sapiens
  misc_feature (1)..(1): n is a, c, g, or t
  misc_feature (63)..(63): n is a, c, g, or t
  misc_feature (70)..(70): n is a, c, g, or t
  misc_feature (74)..(75): n is a, c, g, or t
  misc_feature (83)..(83): n is a, c, g, or t
  misc_feature (94)..(94): n is a, c, g, or t
  misc_feature (103)..(104): n is a, c, g, or t
  misc_feature (113)..(114): n is a, c, g, or t
  misc_feature (119)..(119): n is a, c, g, or t
  misc_feature (123)..(123): n is a, c, g, or t
  misc_feature (149)..(149): n is a, c, g, or t
  misc_feature (152)..(152): n is a, c, g, or t
  misc_feature (171)..(171): n is a, c, g, or t
  misc_feature (180)..(180): n is a, c, g, or t
  misc_feature (183)..(183): n is a, c, g, or t
  misc_feature (192)..(192): n is a, c, g, or t
  misc_feature (213)..(213): n is a, c, g, or t
  misc_feature (302)..(302): n is a, c, g, or t
nttgcacatttgctataagcaaagtcttgatgatgagcgcagggatgcagtgtatctatcagntattgantatnnaaacttanggatgggggcngatagcggnntccaattannctaancatncctgtaaatttttggaaagagagganaanattaaaataattcacttgnaatgaggtnagntgtatatgngaaggtttttagtagcatatntcacaattgttgcagatgagaatattaaaaatcattctatggtaatatattcactctgatgtgtttgcatagtctagcgttattttttn

SEQ ID NO: 563291 - DNA, 117 bp, Homo sapiens
gatttttggagacctctgcgccatgagagccaagtggagagaggaggcgaattcgaagcgtgaggcgcaaagaggagagatgagcacagagtccacgtaaccgtagctctgcacacc

SEQ ID NO: 563292 - DNA, 358 bp, Homo sapiens
agagaggatatagatcttcatgtaaagtattctttctcagggctgtcctctcatctgcggagcaatatctctgtttaggtaccagtaccatgctgtattggttactgtagacttgtagtatagtttgaagtcacgtagcatgatgcctccggctttgttcttttggcttacgatcgactaggcattgcggactctttttttgaaccatatgaactataaagtagttttttccagttctgagaagaaagtcattggtagcttgatggcgatggcactgaatatataaaattacctttgggcagatgacatccggaggcctaatcgaggatttcatcttccattatgcccaactccagtc

SEQ ID NO: 563293 - DNA, 313 bp, Homo sapiens
agacttcgaccaggttgagactgtcttcaaaaacaaaaactaaaaacaaaagctattacaaatattcaattattcttgttttctcacttcccactgcaaggaagatattccacttgtcgcaggtgtggtaggttgatgctgcctgagcttgtaagtgatctaatatgaccgaacaccaagccgtaaagctggtcttcaatgcccggtgggtttcattgcagtgcctgtgcttatttgctattacaccatgctgcctttgtccaccatactcacagtccgatcagaatgtttgaacctcctccagtgtttggtg

SEQ ID NO: 563294 - DNA, 351 bp, Homo sapiens
  misc_feature (102)..(102): n is a, c, g, or t
  misc_feature (202)..(202): n is a, c, g, or t
gggttcaagattcaatctatgaacccaacatttttaatactatataccattctctttttgtattaatttcctattgctgctgtaacaaatttccacaaactnagtggcttaagacaacagaaatgtattctcttccagttctggaggccgacgtctaaaatagatccatagggctgtgttccttgtggaggctccagggganaggggttttcttgctctttccagcttccaggggctgcttccgtcctttggctcttggcctccttcctctaccttccaaaccagcaccatagtgtctctgaatatccttcttctgtctcctttcaccctcttgcctcccttttataagga

SEQ ID NO: 563295 - DNA, 270 bp, Homo sapiens
  misc_feature (71)..(71): n is a, c, g, or t
  misc_feature (101)..(101): n is a, c, g, or t
  misc_feature (107)..(107): n is a, c, g, or t
  misc_feature (113)..(113): n is a, c, g, or t
  misc_feature (174)..(174): n is a, c, g, or t
atcggatcccgtggtcagggcccccagggccaactctcaatccccacccccagtaataggcactcatgggnacctgtgtcccttgccctctcctgagaagngctaanatcganatgtcacaagtcacgtgcagcaggacctgggtccgaggagagagctgtaggaaaggccagngccctgaactcaatggcggactggggtggtccccaccagcaacagccaccttggcccgacgctccacatcagattcctcaaggcgctagagtgcgg

SEQ ID NO: 563296 - DNA, 269 bp, Homo sapiens
cctgtcatctcttggcctcccaaagtgctgggattacaagcgtgagccactgtgccccgccgaggaacagaattttaaggatacatttccttaatgggtccgggggtttctggaagcggctctttagtttgagtagacctaaaaatgctagggactctacttctacttatacagagggcacggatagtccatggcatgaacagttttagagatacgcaaaataaatgcattggatactcataatttactacttataagaggcaaagaat

SEQ ID NO: 563297 - DNA, 559 bp, Homo sapiens
ccctttttggctgtcgtgccgacagcctgacagctgcagtggtgacgcacgagtgactgtgttgcagtgtgctgacggtgagccctgaagtctgtgctagacgtggccgcgctgggagggtctcgcggggagtggccgtcggggtgagtgcttgcttacctgtttccgagcggctgggcagctatggctattcttcgtgtgtctgtggtgaacctggctggcggcttgatttaccagttggacagctacgcgccacgggctgaggctgagaaaactttcagttatccgctggatctgctgctcaagctacacgatgagcgtgtgttggttgctttcggccagcgggacggcatccgagtgggtcatgcagtgctggccatcaatggcatggacgtgaatggcaggtacacggccgacgggaaagaggtgctggagtatctgggtaaccctgctaattacccggtgtccattcgatttggccggccccgcctcacttctaatgagaagcttatgctggcctccatgttccactcgctctttgccatcggctcccagctgt

SEQ ID NO: 563298 - DNA, 132 bp, Homo sapiens
agccttgtccatcacttatcctttcccatctatcatccttctcccttcatggaatccattccttcatgtctaaaaacacattcaacgtcttttcttttttttttaatttatattttttatttttaatggaaa

SEQ ID NO: 563299 - DNA, 373 bp, Homo sapiens
  misc_feature (131)..(131): n is a, c, g, or t
aattttgtatttttagtagagatgggggtaactccaatgttggtcaggctggtctcgaactccccgatgtcaggtgatccaacccgctcggcctcccaaagtgttgagattaaaggcgtgagccaccacgncccggccccagacttttttttttaaaactgcatgtgtacatcaaaaggtaatttggtgttaagcaaaggtagtcaacttatgattctataatcatctttctgtgctggagtaaaaatgtaattccaagacatacacatgcacacaaacgtgtgtacacatagccacacacactcttcagaactgccgagtaatcagctggtttgtattacttaaagaaaacacagaaagacaaagtcgacgc

SEQ ID NO: 563300 - DNA, 283 bp, Homo sapiens
cccatcttttaaaaaaagtaaaaattaaaaatatacttcatggttcatgtcatagccctagagaatgaaaaatttgccgttggttgtccattaagtgatccgttggttaaatatccctaaaagccaacggtattccatggggattttggttttctttttatcattgtatcaaactatatggaaatcatatggttagatgtgattatttgataatgttagtccatttgaatccattttagatatttcacaattaaagaatatgaaacttcagaaaaaaaaaaaa

SEQ ID NO: 563301 - DNA, 431 bp, Homo sapiens
gatgaaacagctaatacgggtaatcggaataacacagatgtaaagcccatatatgggaaaacagcctgaactgtagcgcatatatacatgtgtatgtctatgcaaagattaacgcaattcaagctgtgacagagtgtacagagaacatgtaaatcttcctaagatatctgcatagctccgttcagcttcatcttaggctatgaaacctttgaaactcaagtagcagtatacgatataccactgtacttcttcctatataaatcttggagaactccttctccccgccccccaactcattttgtgtagttttctttgttgggtataatagagacagagtcttgctctgcactccaggctggagtgcagtggcatgatgttggctcgccatagccacaacctcgaggctatcatggagctgaacctgccaacgg

SEQ ID NO: 563302 - DNA, 321 bp, Homo sapiens
  misc_feature (88)..(88): n is a, c, g, or t
  misc_feature (153)..(153): n is a, c, g, or t
atttgtagaagaacagaaaagccaactgaaggcaagtcctataagaaaaatccaaattgctttgggaggcctggctgggcggatcatnaggtcaggcgtttgagaccagtctgggcaatatgatgaaacccccttctctactaaaaacaacanacaacaacaacaacaacaattagccggacatggtggcgggcacctgtagtcccagctacttgggaggctgaggcagaagaattgcttgaacctgggaggcggaggttgcggtgaacctagatcgtgccacttcactccagcctgggcgacagatcaagactccgtctg

SEQ ID NO: 563303 - DNA, 313 bp, Homo sapiens
cagatcataatagggttcgtgcttactatgagaatctaatgctgccactgatctgacaggaggcagagctcaggaggtaatgcaagtgatagggagtggctgtaaatacagataaagctttgctggcttgcccactgctcacctcctgctgtgcggcctggttcctatcaggctacagactggtagtggtccagtctggaggttagagacctgagcaagccaggcctgatttgctcaggtctccctgtcggtatgtccgctgagctgtgcaagccatgtctggcttgctcgagtgtgtggccatcttgtgagg

SEQ ID NO: 563304 - DNA, 150 bp, Homo sapiens
tgccaagagaggcatgtgattcgaatatctcaggccacagggactgctgcagtgcctctgatatcgacgcagatcagccgatgatgcgatgaacagtataggctggcccggagagatgtgcgcgatgaatcgcccagatggctcagcagc

SEQ ID NO: 563305 - DNA, 395 bp, Homo sapiens
gcacccatgggcctttcatacatatggtattgtcggatatatagtctatctgatatgatagcttatgagcataaagagcatgcatgatatgctggctcacagagttgttacgaatttacttctctacatggcctctaccaatcatgctctattggccttggatggatcctggcagagctccatgtagacatctgcggtcggtattgccttgaagcgcctggggctaggactccctagccattccttctgcactcctggcaggctgagtgaaataaagtactcgtgtgtttcatgctcgaggcctctcgtatagccagtccggtcaaaggcacacagtcagtgagtcaggctatgtggcacatgcaatacaccagaggtgttcctcagggtcagag

SEQ ID NO: 563306 - DNA, 189 bp, Homo sapiens; identical to SEQ ID NO: 545746

SEQ ID NO: 563307 - DNA, 120 bp, Homo sapiens
tgtatctaccatgacagtatcacatagaagttcaccgccctaaaaatctttggtgcgtctattcatacctccccctgaactccgggcaacagcgatctttttactgtctgggtaccgaga

SEQ ID NO: 563308 - DNA, 460 bp, Homo sapiens
  misc_feature (460)..(460): n is a, c, g, or t
tatcctggtctccaatgctgctgtcaaccctttctttggaaatctaatggatgtcacagaggaggtgtgggacaaggttttgagcattaatgtgacagctacagccatgatgattaaagcggtggtgccagagatggaaaagcgaggaggcggctcagtggtgattgtgggttctgtagcaggcttcactcggttcccttctctgggtccttacaatgttagcaaaacagctttgctggggtcttactaagaactttgcagcggagttggccccgaagaacattcgagtgaactgcttagcacctggactcatcaagactcgattcagcagtgtgttgtgggaggagaaagcaagagaggacttcataaaagaagccatgcaaatcagaaggctaggcaagccagaggattgtgctggcatagtttccttcttatgctctgaagacgccagttacatcan

SEQ ID NO: 563309 - DNA, 130 bp, Homo sapiens
  misc_feature (62)..(62): n is a, c, g, or t
  misc_feature (119)..(119): n is a, c, g, or t
tggttgaggcctttttttgctttcttcttcttttctttttttttctttgtctatttttctcntgtcggatttcttcttctccttcttgctctttgggttgctttgatctccaccttcanccgtccccatc

SEQ ID NO: 563310 - DNA, 171 bp, Homo sapiens
  misc_feature (93)..(93): n is a, c, g, or t
  misc_feature (139)..(139): n is a, c, g, or t
aggacgaggagcagaagccacagcagaggcctgacctggctgttgatgttctagagaggacagcagacaaggccacagtcaatggacttcctnagaaggacagagagacggacaactcggccctggctgcagggagttnccaggaggtgacgtatgctcagctggaccact

SEQ ID NO: 563311 - DNA, 411 bp, Homo sapiens
ccctcgcgatagaacactcctgtataccggcctaagaattgtcccccgtttagtcacaccaaactttctttgcacaccttatgtagatatcgatagctcagcacactcatgttgccgtgttacacattcgaagcctcagaaacacctaagcgttaacagtcacacacaatatcctccccgccggatgtattaatatcgcgcatatccgaatacgcccgcccgttctgcaaatgcataagtattcagacggattattccatgctcaacacaagtaatagctcccaagtcaccacctacacaatgtgtcctatgaggaatgtatccctaccacaaacactgcaagtaggagtacaatatgcttatcagaagcacaaggagctcgacgataacgatcaaggctttgctctgccg

SEQ ID NO: 563312 - DNA, 925 bp, Homo sapiens
  misc_feature (52)..(52): n is a, c, g, or t
  misc_feature (136)..(136): n is a, c, g, or t
  misc_feature (158)..(158): n is a, c, g, or t
  misc_feature (162)..(162): n is a, c, g, or t
  misc_feature (170)..(170): n is a, c, g, or t
  misc_feature (182)..(182): n is a, c, g, or t
  misc_feature (191)..(192): n is a, c, g, or t
  misc_feature (194)..(194): n is a, c, g, or t
  misc_feature (208)..(208): n is a, c, g, or t
  misc_feature (214)..(214): n is a, c, g, or t
  misc_feature (226)..(226): n is a, c, g, or t
  misc_feature (274)..(274): n is a, c, g, or t
  misc_feature (280)..(280): n is a, c, g, or t
  misc_feature (297)..(297): n is a, c, g, or t
  misc_feature (925)..(925): n is a, c, g, or t
tatatattgatgaatatggtcaatggtcacatctatgggttaattctttccnaatcagaaccaataattaggatagattttttgctctcttcattacattgtgaagtgtcttgtgtagtcatattctcttgttggnatgccagcttgttcaaattttntganaatttgtnggtacatatggnctccaagtnntncccctccttctgcnacagtntcattgtttttnttcatcacctcagcatgcctgcttgggtgatctgaacacatggggggnggtggngggtgggggtgattttnaatggtcactgttttcttcacatgatcctgactgatgtcttcatacatgtgctcaactgttaaaggctgccgttgctcatcatagccaaacaaccataatcgtggggtctggtaatttttatcataagtgatgttaaggtcataagttctggtttgccaaatagcatcttctccgccagcttcagttttggcttttcaagcttcttctattttccttgtttctagggtagcctcatctgtttccaacaatccactctcttcatattcttccatatctgcagcttctccttcatcttcatcttcttcctcttcacatagtgctgagcaatcttgaagccttatattgtccttattttccagtgtgatctctttaacggcttccgttattcctgtaatacctgtgttgtgatatgtatctacccatccgccatcaccatcatcttcttcaatgatagcttccaattcatctgaatattccatctgtttgcaccgcttatagcacggcacatttttggttaccaaaaaattgtttgcctgttggtaggtatgccttcactttcaattcttcccctgtagcccattgccatgttggacagtggtgggctaggtgatctccagctgccacaan

SEQ ID NO: 563313 - DNA, 603 bp, Homo sapiens
catggtggcatgagtctgtgttcccagctacttgggaggctgagacacaagaggttgcttgaacccaggaggcagaggttgtagtgagccgagatcatgccattgcactccagcctgggtgacagagcaagactccgtctcaaatgttagtctaaaaaattaatgaggcatatataaaaacacagaaacatgtatttacaaaaagttgacattttcctgaaaaaaattacagccagaaattttactgcagagttcttattctgacataatccttttccttatcattttttaagtttcctttcttttcttttcttttgaggtgtggtctcactttattggccaggctgcactgcaactccggccttatgggacccactgctttggcctctcacgcgctggcttaccggctgagccaggctcttcccttaagttgtcctaacactacctgttactccctctccctcaccgtcctcaccagagccgcgtctccctcatctcccctcgctaggcgctcgatctaccttctctctcctctcacccatctcccgcccatgcctccccattggctacacccctcgtccctcctgtcccctgcactcgccc

SEQ ID NO: 563314 - DNA, 154 bp, Homo sapiens
agaacaattcgttaaaaaaagagccttatggcttttttttgaaaatgatttgttgccaaaacgccagtgtgtgctgcaatattttggctctgactaatcatactaattactgccgcaccatcaacaccaaaaggctaagacagccgcttcaatt

SEQ ID NO: 563315 - DNA, 1224 bp, Homo sapiens
cgcggttgcctggagccctgaactgagtgctggctgtgctgggagcccgtgttggctgtctggtcttcgcgtcgtgcccctgctggatgccatgactgcttgccccctgtgctgctggtggatgaatgatagtgttgcctgatgctgtgctctgtgtgccctgccactgctgcctgccactgatgtgatgccctatgctgctgacctgctgggctgtcctgcctgatgcatgcttggccctgtgcattgtggccctggggctgcgcagcttgccctgcctgggtgcgtgggttggagctgatcagaataattgttcagcatcaaccccctggagaacctgacaggtgtacattcagcatgtctggacctcccctggttggtcttcagtgatcacgcgtaatgctgccatgtgccatagcttatcctgaccctgggctacttcttcaaaactcacggagattcaatccccagaaatggcagacggatctggaatacttttctgctacggttcaatgcatttggactatgtgtgtatcagagaatgacaccctcaagcatctcacaaacgacaaccacaactccggaaagtaccaatgaccagcgggcagtgccccgagcttccaccccagtacaccccagtgccctggaggactcgggcccggtgaatatctcatgtctcaattcacccttaacctgtgaaccactgaaacccttcggagggtatacccggacaacgtaacgtcatcatgtacctcaaaccatctatacgggcatcagaattgtgcgtttaccggcatgtgaacggccacgacggagataaacagtcaccgttacacctgacataacagacgtggcagcacgcatgcctgcgccctcaaaggaaactgtgacaaccgagtgtaatcaaagcccatgccacgcccgaacaggcagaccgtggtagagacacgaaacggaaggacgacccggaactggggatccgggacctgtatagcgaacgcagcagcctcggacctgcagcctccgaacggccaacgtgctcacgagaagtacccagcacacagccatgcggacaacggcgccgagaacagcagaacaggcagcccacacgaggacgcagagcagcgagtgcccgaagacagccgcaacgcccacaacacgacgagcagaaagaagaggagagtacagcgcaagccagcagtcgcaagaactccgctatcgccg

SEQ ID NO: 563316 - DNA, 761 bp, Homo sapiens
agcggaggacttgggaggccgaggtgggtggatcaactgaggtcgggagtttgagaccaacctgaccaacatatagaagccccatctctactaaaaatacaaaatcagccggatgtggtggctcatgcctgtaatcccagctactcaggaggctgaggcaggagaatcgcttgaactcggaaggcggaggttgcagtcagctgagatcgcgccattgcactctagcctgggcaacaggagcgagactgcgtctaaaaaaaaaaaaaaaatcctaacagacaagttcataacaacgaatgctcttggagtacatacaaggtgatctggagctcttcacatgtagaatcctatgagatgggacccggagttttaatatcacatggttacaaataaggaagactaaaaggggtaactagcctgcttaagactacagaactggggaggggcgccgggcgcaggggctcacgcctgtaatcccagaacttggggaggccgaggcgggcagatcacgaggtcaggagatcgagatcatcctggctaacacggggaaaccccgtctctactaaaaatacaaaaaattagccgggcatgggtggtgggcgccggtagtcccagctactcgggaaggctgaggcagagaaaaggcgtgaacccaggaggcggagctttgcagtgagccgagatggcgccagtggaatccaagccggggcgaaaaagagagactcgggtctcaaaaaaacgaaaacaaaaacagaactgga

SEQ ID NO: 563317 - DNA, 283 bp, Homo sapiens
cccccccccccccccccttattttccttttgtttcctggtgattaggccaaagtctgggagtaaggaaaggattaggtcctttggagccaaaaaaaaagtagcttggaactttttagatgatccccacccacctggcctccttgcttttccaatgtgttaccaaaaacccgtgggttataatgtaaaataatgtgctttttgccccaggggtaattccttttggtttgctttgttaaaactgtaaaaccccccgacccttaataaattttttttgggtagcca

SEQ ID NO: 563318 - DNA, 104 bp, Homo sapiens
gacatgtagtcctatgagcttaatttattaatgcaaactgtaccttacaaagccacagttcctaatactaggcacatctgcattaaataatttcgtgttgtgcg

SEQ ID NO: 563319 - DNA, 409 bp, Homo sapiens
cagacacgggccagaatgtgtgtgggcacatacgtagactctgagggacatctctacaccgctcccatatcgcgaacacgggcaacatctacaagcccaacaacaagggcatggcagacgagctgagcgagaagcaagtgtacgaagcgcacaccaaggagatcgacctgtgcaaccgcgacccttaacaccttaacgatgacctggtcaagaatgactttgaagatgtgaatgcagaaccacgaagggacacacaggtttgacgcgatttgggggcaggtttaccacctttactgtgacgtactgggtttaccggttggtgtgtggcctctttggcattccgatggcacttatctggggcatttactttggcattctctctttcctggacatttgggcaggtgtacct

SEQ ID NO: 563320 - DNA, 308 bp, Homo sapiens
atgacgcaggacttatgcaggaggagaatgtacagtgtacagtatactaacattagtgctatatagggtgatagataggtccaattgggtgtgaggagttaagtaatatgtttgggattttttaggtagtgggtgtttggagaagcagagggtgaacttgctgttggaggcagtcttcttgaggatctttattgcacaaccagcctgggttctcaagcaacagcctagagaatttcttattgccctgttagggaacattaactgagctcctcagagaagaacaatcctcctggagaacactctggaaa

SEQ ID NO: 563321 - DNA, 203 bp, Homo sapiens
tactcctcaccaagcatgacgtgagagactaagcctcgctgatcgccttcacaatatggaatctgcttctactccatcgtggactcagcagccttggtgctcaggtgccagatgcaaagaaagcatgtacctacatcagatctaaccttgatccagcaatgtggattcctcttctacgtgcccaggccagccaggcctctcag

SEQ ID NO: 563322 - DNA, 874 bp, Homo sapiens
ggtaggaggacgccagtcgcggggatcttctcctcgtttctggacgtgttatctgtgctcatgtccctaatgtgtctcggcttggaccgaggggctggggtgcctgtgtggatcccgcaaactgacgtgcgggtgacggtgcttgctaggcgcggtggcctagtgggctaatggaggcccgtggggcgcgacgtcagacgcgtacagctgtgatccaggtcggagcatgggaagataagtacgccgactgtgggtggtcggaggcgcatgccatggagtcgctgccccgtgtgcgcagctgatggagggccatgcttcgaagctggccatctggatgcattgtccgtccggagcccgctggtgcgaacgtctactcctggagggtcgatcgtgtctggcaccgcggcgtctgctcggtgctcgacaaagttcctggggccgccgtccgaggtggacctgcgggatcgtggaccgtgatccaggccgccaggaatgacgcagtgggtataagtcgatatctaaaccaggaaggaaggttcaaggtagcgacgcagaaattgcaggttagacatccagtgaatgagaaaaacatgactgcagcatggtatgacctttctatgacaagacaagtctcggaatccatttggaacggctgaaggacaagatcgagggggacgcactaggcgacagtggggtcagacacgggcatccgtgcattcatccttagcaggagcaactatcggtcggacacgtgatgatgagtctgggggtaagacggacaagaaaaacaaactcaaggatcagaacctacggttccaagtccaattggcgaagaccgccattccagtcatggtggtcgccggttcaagccaaa

SEQ ID NO: 563323 - DNA, 1255 bp, Homo sapiens
gcccacacccacgtcttctatctcacgcagagttttcggtttggtgtggaaatagcttatgtgggagctactatcttggcatgtttgcaagcagagtccaggcaacacaagcactttggttggaggaaaccatctagagctggccattagaggtgacgcaaaggggcaagtggccttgtctgtcccggaccaacagccaaacgtgtttgcatgaggccgtacggcgtgacggaacggggaattcccattcaagagctacattatgacttgggcgggactctaaatcactctctggatcatgggaacagacatcatatgatacttagagaatccatttcatatcaggccaggagagaaagcaacaggaaggcaaagcaaaaaaccttcgatccattacaaagaccacaaaatacatatacagcaagactgaggtagcaccaaaagaacacggcttagagcatggcatttcaaacgaagcggctacatgactgaaccccgccatgccccgaagggcaaccaggcaggcatagaaaagacccaaagaacacagacagcaggcccgaaccagacactaaccaatcaggaactgccacgagcccgaggagcaaaagcgactccgcccaacatgcccaatactgcaacactgagagaacctaagcacacaaggtacaaatccgatggggacaactgcagccaacaaaacagcacaacaacgaacccgaaaggaacaagaacaaaaagacaacacgaggaacagagagcaccaagaggaaaaccccacaaggagcaccagaaaataagagcggcaacagaaataccgacagaaaaagaaaaggacataacaccaatggaggcatgaaccgaccggtgacatgcagagacagcaaaaaacacgagaccaacaacagcgccacacacaagaaacaaaagcccagcaaacacccacagaacgcaagagcgggggagatgacggcagccaccaagaaacgaccaagaaacgatcagtacaaacaaagaaaggcaacgaacgaaggcaggcaaagagcacaaaaggcggcgaaagggaaggcgacaggaagagaagaggacaacgacagagcgggcggcaaccggcgcaccccgccccacgcaacaccggacggggccgcgggcagagagagccgcacggagcgacgtagcaggcaaaaaagagtagagagcggcgcgcgacacgcgccgagcaagacccaaagcgccaagagcaggaggacaacac

SEQ ID NO: 563324 - DNA, 359 bp, Homo sapiens
agttcgacggagactctctctcacacacagtattaagacacacccacaatgacacacataccttccaaaggcactacacttacccacaccccatccaattactcacactcacaaattcccaagccaaatacatccacacacacagacacacacatcattctcatacccatacacacacacacacacacacacacactccaaatacagccccactcttacagcacacgcacactccaaatacagccccactctcacagccccatgcagacacatccaccctctcatatatcatcatccggattcatcccatatagaccatggagatccactggatgatgatatatgagagtctccgtcga

SEQ ID NO: 563325 - DNA, 906 bp, Homo sapiens
gcatttgagcttcacacaccccttcaggcgctggccttatccgggctatggccttttaccaggcccctcgtgttcccctgtgtggacgctctccccccgtagccagcggccgctgaaatttcggatctaccacgcgcttcaataagcggcgcccccccccacggcgaggagatgggacccttttggaaacgccggtcccactgccaaagttccatatgtgctgggcaataaaacgcgcagggttgtcgcgcttggggacattcaccctcccggggtgcgtccaaagacacggcccgcgctgcgtcgctgccacgaagacaacgtcccccccgggaatttcccgggcggcttcgccctatcccccggggtgttaaaaccattggggggcccctcccctcggaaagggggccgccccgtcctccccgcgggtccacgaggcggagccccctatgcgcaggtgtccaggcgtctccccggcggccgcagtgcgcccattggtgccctcccctgagcgttgcccgccgggggctggccgtcttcttcaagcgcggtctccttgtggcgaattttgggctccttgaagttcgtggcgttttatcgcccctggcgaaaggctccgcaaacacacaccatcgtggcgtccagagccccaatcacacccggcctggcacattacaagagtctacatacgcccgcgcctaccgagaatgggcaaaggccaagagcgccatccaccctctggtaacaacccctcagggcacgggcagcacctgggtcatccccccggcaataccccgcacacatggcggaggtcgcaagccggtagaacaacaccgagcacacccgttcgaatagaccacccggccccaaatccgggaaacccgccttttccaaacaaacacgaaa

SEQ ID NO: 563326 - DNA, 239 bp, Homo sapiens
tccagtacccgagcatgcttgaatggctgtcaaggtcagacgtgtattcagctacatgcgtctgcatgcctccctggtacaagtaccgtcgacacgtgagcaaccgtgctgacctccaaatatcgttaagctggagcctggtcgacgtgtattcaccactgaggtgcatgcctccctgtacaagttccgtcgacacgtgagcaccgtgctgacctccaaatatcgttaagctggagcct

SEQ ID NO: 563327 - DNA, 328 bp, Homo sapiens
attactgagtatgtggaaggcagcagagcgggctggcgaggagcacagctcaggagctagactgcctgacttccaatcctggctctgaggctggctagctatgtgaccttgagcaaattaccctccttaaacaagagcttgcttcctggcaggggacacgcgttccagtgagaggcccgagctgacctatatgcacaccctgttacttggggagcacaaccggctggccacagagctcaagagcgtgaaccctaggtggcatggtgagaagctctaccaggaagcccggaagaacgtgggggccagaggccagatcatcacataccgt

SEQ ID NO: 563328 - DNA, 133 bp, Homo sapiens
tcagggaactatctcagttattccacgatcttataaatgctcaatatgtgttccttgttgtcccacagcagacatcaatcccatggtccactacagatccgtttgtcggatacagtagggagaggggatcctc

SEQ ID NO: 563329 - DNA, 310 bp, Homo sapiens
aatccagcagcggggtgctgtgctgttagctggtgccggacccgttgacatgcaggtcaccacagcgcgtggggtctggtctgggcggccgggctcttctacactcactgccacggggtctgatgctgctggcaggtgtgggacggccttggagacgggctgtgagctttgtgacccaggccccaagaggagagccagctgccggggagacccactcgggggctttgtgaagaccacgtcacagacttcctgcctggaggccgggtgtcccctgccagcatccgctgcctggtgtcctctgcctggcgcc

SEQ ID NO: 563330 - DNA, 1806 bp, Homo sapiens
atgtcgttaagtccagtgagtaagcctgaactgtgaataaattaccaaaaacttgcttagaatttcattttgaagcaatttgctaatatttgaagtgtatacacatttgtagttatgttagaaattgtattgtactaagaatgtaatcaatgtctactttagttgtaaacatttctgatgtcaaaactttattcattactgttgattttaagaatacgaaatcactgcctaaatattaccaaaagccactgtctctacccgaacttcccagtttgggaaagaatcgttagataaaacaaaggctctgccctttctgataccaaactccacagatactttctcacatcttttaaaacattttgcaataacatattgtttataggaagtttacagggtatgcaatgattaaaacttttaagtgaattgatagttgcaaaagaaaggataatatttaaggtcagtgagtagcaagacaatctaaagtttctgtaatatctggctctctgttaattatagagcaaagtttcccttacagaatccttttatgaacagcaagctagagtctatccctagtggttatagcacctgctgcgtttttcaggagacagttaggccagggtgatttgaatggatagatgtgctgttttgcctgcttgtagaattcagcccagtctttggtctctctctctctctccctcctccacctctccctctctcttcttctgcaccagagcctaaggctgcgccaccaagatgcgtcattttttccagaggcttctttttttttttttttgagatggagttttgctctgttgcccaggctggcatgcagtgctgcaatcttggctgactgcaacttccacctcccgtgttcacacgagtcttttgcctcagcctctggattagctgggattacaggcacgtgccaccatgcctagctaatttttgtgtttttagtagagacggggtttcaccatgttggccaggctagtctcaaactcctgaccttaagtgatctgcccgccttggcctcccaaagtgctgggattacaggcatgagtcaccgtgtcctgcccagacatatcaaatttgacaggtattgtataccctttggatctttaggaattaatttttgcctctgtcactcagctttgtatattttgaaatggagataagtatagggaggtcttggaaggaaaattgccagaattcccaaaccatgtaacactcattgagaattccagatccattatatctaaagggcaagtgaaggaaacagtattgtgaactgggtataactccttggttcttaactagtacattcttaatctgtgagacccaaaggttgataaacaataatttaagattgtacagtactctaaacgtctgcaaaggtctagatgttatcagtatcactagtttttatttctgccagtagctcccttttaggttacattgttgtcctctttccagtgtggcatctgtcattggtttttcactatggcaagttcattaaaaagcttgctccattgttatcttcaagtaatgcccataaggagatggaagatatctgagacaattaaggctttagcttctaggcaagagaaataacgttgcattaaatttcaagtttctttctgctagacttgaatgtgtctagccactctaatttatgggggcttttggttttttcctattgtactttgtatgtagaattgttttgaaatatcaagcatatttactttgaatttgaactctttcttaattttgtatttatcctttgaataaaatgtaaatccaaaaaaa

SEQ ID NO: 563331 - DNA, 236 bp, Homo sapiens
ttatgtctcttttctctcctttaatctggaaatagtttctcatcattttttctcttacagggcactaacactcaggacagttattggcagactaattcaggatggtctgggtttttcactaattagattcagctatatgcaatgtttgggaagagaaactacatgtgtcaatatactggttcttctgaaggggatcatggtcagggcggtgcaaacaggtcaattaatcctcattc

SEQ ID NO: 563332 - DNA, 195 bp, Homo sapiens
tgaggatcccccgtctatttcactgagtgggatgcgctctagttcctcgtagcggcgttccagcagcacgagctcagggtcggccccagggaggtgtttcatcaccaggttgtgatcccacatggaatgtcctgcgtgacgaaagccttcacctcctttaggcggctcagctgtcatcccccgcaggtctctacc

SEQ ID NO: 563333 - DNA, 1023 bp, Homo sapiens
  misc_feature (610)..(610): n is a, c, g, or t
  misc_feature (1021)..(1021): n is a, c, g, or t
cacccaattcactcatcaagtcagtcttcacgttatgacccaagcagaatggcatcagtccatgatactggaatagagattcctcgcggcgtgcactagggctctagttagtaccaccagcgatattgtgcctcacagcacattgtgtaacgcgggtactcactatccgaacctacatcgcaaagacatagtaccgtgctcgaatttgatgcccgcaaattctccaatacaaaatgtctcccatgcgcgtagtgtcgacataaagccccaggaagaactttgcctcagatctcataattgttcgtcgcaaggtatgcttaggaagaagcctaccggaggtgctcgcaacgatggtaagcacgtgggtgtccccaccaatttgtacaaaaaggcgtctcccagttacgggatcgtcccttggagagaagtacttggaaccttttttgtagtaacaccacgccatgtatgtctcacggccctagagggcagctacgacagaccactaacatcagagtcttccagccctattcagcgttcccagagtactgaggacgcactatggcttggacgagtactggacaccgatactcgtgggtcgtattacagatancatggaacgcattcatccaggcagctcaaaccaggtttacattggtccatttaactagaattccaacggctctgccgtatataggggtgatgtaagcagacccttaaaatgtccattggaagccgtggttcaaaaattgataatccacctctattaaatgggtcctggcaaacgcttggtattacatacctaaggggactttgaaccatctggagtgttggcacacggacttaatacttgcacaattacgccgcacgcggcaaagcaccaaattccataaccagttggcccacgaaaacatacctcacggcgttcgcaaaagtacctttccaataacccaaaacgggaatataggaccacaagacgctgtaacgtcgtgttacattgtcctcaccctctctactttccggnca

SEQ ID NO: 563334 - DNA, 391 bp, Homo sapiens
  misc_feature (14)..(14): n is a, c, g, or t
  misc_feature (191)..(191): n is a, c, g, or t
gtcactgctgtcangtgtcagtactagactatttatcctgtatgttgttgctgttgtatgtatgtattattgagacggagtttgtcttgtgccaactagagtgcatgtgtgtctcggtcactgactccactctgtgtcaagcgatcattctctgctcaagctccaagcaagtaggatacaggtgcccacancacgcctgtttatttttgtgttttagtagagatggggttcaccattttgggcaggctggttgagaactcctgaactcaagtaatacggccgctctgtctcccaaagtggctgggattacaggcgtatttcactgtgtccagcctgaggttctgtttagaaacaacagtctatgatagtataatacctctcttttttgtac

SEQ ID NO: 563335 - DNA, 640 bp, Homo sapiens
atcagaggatccccttcgaaggtgttctggtttgccttataccctacatacataatcaagaagggcttcacaaaactctcaaaactattaactgcttttctactaatgcactgcccaaattaaaatcttttcaacaaattgaaacgatgaagcactgtgttgagcagcagtataaaaatgctaagatgcattcctactgctaaatgagactggtaaataaataaataaatgaataaaaggtgtatccctgtgactaaaaggcaataaacaccaagaatttcagtaacagtgaatttgatggctcaagatgataatgtcttttcttttttgagactaagactctgccactcaggctacagtgcggtggcgtgatctcagctcactgcaacctccacctcccatgttcaagtgattctcgaactcttaagctcaagtgatctgcccacttcagcctcccaggtagctaggactacaggcgcatgctgccacgcaccggctaagttttgtatttttagtagagacggggtttcgccatgttggccaggctggtcttgaactcctgaacgcaagtgatctgtctgacttggttcccaaagtgctgggactacaggtgtgagccactgtgccaagacatttaaca

SEQ ID NO: 563336 - DNA, 345 bp, Homo sapiens
  misc_feature (7)..(7): n is a, c, g, or t
gcgcggnatcccattggataacggatggggaaggaggcattgtgagagataaggtgataaaatatatactctacaatcctttggtgataaagcaagatgggaacaagatgctaacttccaagggtattcgtgatcataacaagctaaactcaggtcccctactaggctctgctggaagacagaaccgtgatgctcagtcaatctcagtgccaagtgtcatgctgacccctgcaagtgcacacggtcccaggccctccatgacgagtgtatcaagaaggcactcagattgtgactgcaggctctgacgttcacctgcctgagctgacttaatgcctgtggcacacc

SEQ ID NO: 563337 - DNA, 100 bp, Homo sapiens
atgtgaaaacactggaacaggtgctgggcgtgactctgctggtacgcactacccgcaatctggcgctgaccgaaagcggaagtcagctttatgaagagtt

SEQ ID NO: 563338 - DNA, 492 bp, Homo sapiens
  misc_feature (11)..(11): n is a, c, g, or t
  misc_feature (73)..(73): n is a, c, g, or t
  misc_feature (76)..(76): n is a, c, g, or t
  misc_feature (96)..(96): n is a, c, g, or t
  misc_feature (103)..(103): n is a, c, g, or t
  misc_feature (109)..(109): n is a, c, g, or t
  misc_feature (137)..(137): n is a, c, g, or t
  misc_feature (167)..(167): n is a, c, g, or t
  misc_feature (173)..(173): n is a, c, g, or t
  misc_feature (178)..(178): n is a, c, g, or t
  misc_feature (197)..(197): n is a, c, g, or t
  misc_feature (204)..(204): n is a, c, g, or t
  misc_feature (221)..(221): n is a, c, g, or t
  misc_feature (225)..(225): n is a, c, g, or t
  misc_feature (228)..(228): n is a, c, g, or t
  misc_feature (244)..(244): n is a, c, g, or t
  misc_feature (246)..(246): n is a, c, g, or t
  misc_feature (255)..(255): n is a, c, g, or t
  misc_feature (287)..(287): n is a, c, g, or t
  misc_feature (417)..(417): n is a, c, g, or t
  misc_feature (470)..(470): n is a, c, g, or t
  misc_feature (472)..(472): n is a, c, g, or t
  misc_feature (476)..(476): n is a, c, g, or t
  misc_feature (478)..(478): n is a, c, g, or t
  misc_feature (486)..(486): n is a, c, g, or t
  misc_feature (488)..(488): n is a, c, g, or t
ataataatgancagaaggattacacagctcacaaaaactttccatataagacgcacgatgttaaaccacagcngangccatcccacacagttattnatgaganttcttnttagcttctaatggtaatcatttttgtntcagagtgcaattgagactaattattagtnaaggtntacanacattaaaaggtgcatagnaacattngggtggggggggggtgnaaanggngatgaaaacacaacancngggctttanttttgtgattggtgtccacatgattgcaaggngattactttctccacctgattcagcttagtgaagataagttgtcctccaaatttaaatagtatcatacagcattgtgagaaatttgattccatagaacaaaatatttccagtccttagtatgatcttggnttttcttttctacctttccaattgtccaaaattctcataaattaaaatatttntntatntntatattangngggg

SEQ ID NO: 563339 - DNA, 464 bp, Homo sapiens
ggccggtccctgcatgggaattccccccaggtttttttataatgggacacccatggcctgtgaaactttccagtacggcggctgcatgggcaacggtaacaactttgtcccaaaaaaaaagtgtttgcaaacctcccgaattgtgggggcctgcaatctccccaaagtccggggcccctgccgagcctttatccaactttgggcattttatcctgtcaaggggaagtgggtcctcttcccccacgggggctgccagggcaacgggaacaattttttctcaaaaaaaaagtccaaaaagtactccggtgtccctggtaatggttataaaaaaattttgcgcttttccaaattacaactggccggtttccaaatcaaaaaatggccagtttttttcccggggtcctttggcaggcagccccaaacaacctgggtccaaataaaaactaaattgtaaaccccttttt

SEQ ID NO: 563340 - DNA, 850 bp, Homo sapiens
ggttgtcacctcctcacatatgtgctgcagtgcggtggtgcggtgcttctggctgtgtagcgctccgtgtgcgtgtctcctggtatgaggtgtgccagtggccccactacgctcgcgcttttggccttgggagcgcgcctggttacccggcagcaggtaactgtgtgcctctgagctgttggctgtcgtggttttaggtctgtttggttttttgattttgtttttttggttggtggttaaaattttttttttttttttttgggtttctggatcctccaagtgggggcagatttatgtgggccacgcgggtgattggagaaaaaaataaataatttctcaacaagagaataaaaataaaggcccttcccaaaaccaaattgatttaaaaaacaaacccttttggcgaggatgggacgagaggatcctatggtcttggggggcccagggattctacttccgtctatgaaacggttctccgaaaagagcatcgctcgcttggttgggctggggacagctcgggctcggggttcccaacttcggggtacatcccgggtccaagtgggtgggattggacctttttttcacggttaataaacaaaggcgcgggtttggcggcccaagtgttgggtccccaacaacaatgcaactacagctacactctcactcgcagaagcatctgactgccatcacatccactatgttcgcctagccctcctactaaaccaacgcgactacttctgacatccagcacaccacgagcacccgtatctcttgcggactagttataacatcagactgtgtgcatcactgccacctgatattgtgtaatgactcctcgcgacacacacgg

SEQ ID NO: 563341 - DNA, 448 bp, Homo sapiens
gaagttactcctctgtgtcctgatggtccttgacttggccttggactgtccttgacctccaataccttagacagttgcaggtgggaacagtgtagcttgaggttctaaaatgctttgctgatggaaaaggttttgttctgaaaagtgaattacaataggaaatggatttgcattactgacactatctgctgtgggctttgcctctattgatttaaagcaaaagggcacaattagtggccttcaaagagaggggaaaaaaaaataacctaactctgtcctagcacgttcaattaacttgtttactttgaagggcacatacctcccatttttacatctacagcgtagagcaggcgttgcctagtgtcgtctgtgatggcaggatcatggctctcagacaggattatcttcggttcatagaagtaaggctactgtctaacattaagcacaa

SEQ ID NO: 563342 - DNA, 188 bp, Homo sapiens
  misc_feature (93)..(93): n is a, c, g, or t
ctgccaggcggtttagttgggtttcggccgggtttttcccgtcccgacgttgttaaacggcggcccgtggattggattttggtggcccttttntagagctttggcgttgcctgcccgggttcgttagcttgggtccttttgagcggcgcttcttcttctttggtgcggggaggcgaccgaagggggga

SEQ ID NO: 563343 - DNA, 344 bp, Homo sapiens
  misc_feature (183)..(183): n is a, c, g, or t
tttttaaaaaacccccccccccccccgtgttttaaaggggggttggccaaatcccccccccccctgtggggtttttaccccccagccataaaaaggggccccaaagggggttgaaacccccccctctttaattgccggggagattcccaaaaaaaaataattttttttttgggcttcccccanggggggggccccccggcccgggttaaaaaaaaaaatcccaaaaaggcccggggtggggttggggttgaaaacaacaagaagaagaattaagcccccctccccccccgggggggggggattttttttttttccccccaaaaaaacaggatcggccctttcca

SEQ ID NO: 563344 - DNA, 671 bp, Homo sapiens
  misc_feature (515)..(515): n is a, c, g, or t
atagcggagtaagccgcctacctggaagtacccgtatataacttgctaggaagacatgtatataactagtatacgacgagagcggcagcggcgaggtaggacctgcgagagtagtgtggtatgccctagtactagtacgtactagccggccggcccggaccctaggacaccataccagctaggcttaacaagatagtaacggagcgcaagaggacggcagcgtacggcgaaggtgacctagtacctgcatacctacaagacggccctagggggtaggcagagctacaccgtagaccgacctaatataccgagccatatagaccaagaggagaaggggaagatacacatatacgctagactataccacaggtttagcagaaatagtaaccctagccttacgcagaggaataacctagtaacccggatacagacacatttacgaaagctagtagcagagacctacacctagcgccaatacccaaacggcttactagtagccgatatatacagcccgngaaaactacagacgctagggcggaagcctagtaacgcaagaagctaggataaaggacccagggtaagcggagagacgcggcccctacccgcgtaggacataaccggccatagagcctactatagcgagtagacctactagggcttacgtacctaca

SEQ ID NO: 563345 - DNA, 453 bp, Homo sapiens
tgtattcattcatctgctgatgggcatttgggttccttctaccctttggttactatgaatagtgctgctaagaatatgggtatagatacctcttggagaccctgctttcaattcttttggatattaatagtttggatacttgtcccccaaatctcacgttgaaatttaatccccaatgttggaggtggagcttggtgggaggtgattggatcatggggaggatttctcatgaatggtttaggaccctccccttggtgctgtcctcaggagaattgtgtgtggtatctccccttgctcactctcttggtcctggtcttgccttctcaccatgtgatacactgactccccctgtgccttccaccatgactgtaagcttttgaggcctcaccagaagccaataggatgcacagcaccatgcttcctgagccaattaaacttttctttataaattaa

SEQ ID NO: 563346 - DNA, 538 bp, Homo sapiens
  misc_feature (92)..(92): n is a, c, g, or t
atgacccaccaatcacatgggcctatcataatagtaaaacccagcccatgacccctaacaggggccctctcagccctcctaatgacctccgngctagccatggttgaatttccactttccaattccataaggttcttctatattaggcctatctaaccacacacatctaacccattattaccccaagtgtagtggcgcgagtgtaacagcgagaaagcacataccagggccaccacacaccacctgtccaaaaaggccttcgatacgggataatcctatttattacctcagaaatttttttcttcgcaggatttttctgagccttttaccacgtccagcctagcccctagcccccagattaggagggcactgggccccaacaggcatcaacccgctaaagtcccctagaagtcccactcctaagacacatccgtattactcgcatcaggagtatcaaatcagctgagctcaccatagtctacatagaaaaccaggcgaaagcaaataattcaagcactgcttattacaattttactgg

SEQ ID NO: 563347 - DNA, 170 bp, Homo sapiens
cagcaacatagatgaagcgtctagctggtgcaggctgtactagacgtcgggacaggcttgcgtaactgaagaggggaggagcagctgtggcaagggcgtccaggcagagggaacagccagtgcagagcgcctgaggccagctcagtttgagagatcactgtgcccccctg

SEQ ID NO: 563348 - DNA, 815 bp, Homo sapiens
  misc_feature (11)..(11): n is a, c, g, or t
  misc_feature (87)..(88): n is a, c, g, or t
  misc_feature (136)..(136): n is a, c, g, or t
  misc_feature (161)..(161): n is a, c, g, or t
  misc_feature (207)..(207): n is a, c, g, or t
  misc_feature (286)..(286): n is a, c, g, or t
  misc_feature (296)..(296): n is a, c, g, or t
  misc_feature (323)..(323): n is a, c, g, or t
  misc_feature (347)..(347): n is a, c, g, or t
  misc_feature (363)..(364): n is a, c, g, or t
  misc_feature (367)..(367): n is a, c, g, or t
  misc_feature (375)..(375): n is a, c, g, or t
  misc_feature (377)..(377): n is a, c, g, or t
  misc_feature (379)..(379): n is a, c, g, or t
  misc_feature (381)..(381): n is a, c, g, or t
  misc_feature (455)..(455): n is a, c, g, or t
  misc_feature (463)..(463): n is a, c, g, or t
  misc_feature (725)..(725): n is a, c, g, or t
  misc_feature (732)..(732): n is a, c, g, or t
  misc_feature (737)..(737): n is a, c, g, or t
  misc_feature (742)..(743): n is a, c, g, or t
  misc_feature (745)..(745): n is a, c, g, or t
  misc_feature (753)..(753): n is a, c, g, or t
  misc_feature (762)..(762): n is a, c, g, or t
  misc_feature (766)..(766): n is a, c, g, or t
  misc_feature (768)..(768): n is a, c, g, or t
  misc_feature (772)..(772): n is a, c, g, or t
  misc_feature (774)..(774): n is a, c, g, or t
  misc_feature (776)..(776): n is a, c, g, or t
cctccccttcntcaggagtaatctgtgcggatagattggctggacttttcaatggttctgggttgcaggtgggcactgtatggctgnntatggagcgtacagccccccaggagtcagagcctcagcccggctgccntggtggaaggtacaggtgttcagcnccttcagaaaagggcataaagtggtgggggacaattctcaaaaaantaaaatgcattaaccattgctggctatttgcttacctagtaagaattggattcatttttgaccagattattcttctatncttttttgcnataaatcaaatcccacatatctacaantggtatgaagtcctgcaccccccnttgtatgtctctgtcnnttnttttcttntntntnagggtgggttacactcatttacctcccctctcccccccaaattatgacacaaacgagtatgtttcctctctagnaccctgtnatgccttcctcccccatccccagagctccttactgtaggtcttaccctggacaaggattttttcaagttggaggcacagaacatgagcaatctgacattcccacagcccctcaaacatgcaaggctactaaggcaggaggagtataaatgatggatattgaccaagacctgcttggacggagacccccatattatctgttctcttcgttcacaaaacagccttcacttgtttcagaatttgatggacacatactttgatganccggagnttcanatgcnntntttacacnttttgttgnaatnancctntncntttgtagaagagtttaaataaaaaaaaagagaaataaaa

SEQ ID NO: 563349 - DNA, 1677 bp, Homo sapiens
tcgggctccagccccttttgaaatttgagtctcgcaaccagcaagttcggaatcccgagataccggatcctctgcgcaaaatgttttctcccgaaggtgaaaggcgggcggcgggagccgaaggcggactcggagcgctccgccgccgccttcaggacccgcccgcaggcccgggacgcgccgatgcgggctgcagccgaggagcagccccgaggtccgaggtccgcgccgctggcgcgcggccgaggagacgctcggctgttcgctgttgctggtgttctaaactatttatcttgtgtgtgtacatttgtgggtggagtttgtgcgcctggtttttttgtttggaaaacactgcgtggtcaatgtggttatgggggggagtgatgcatttttttctagtcttaaaactaaaaacttgagtctaccatttcttggttgcactgaaaataccgcccagcctgatggtgttcccgtgctgtccctcccccttcccttctccccgcgtctacctccccaccccgttctgttccccctccctccttctccctctccctcaaatccgtgagttttggaagccccagggcctctctcccccgcccctcctggatgaggccaccatcccccaaaccggcttgttttgcagtttccccaggatcctggaagctcgctggcgctcgagggtggcggggacacgggggggtgggtgaaggttcgttaccttttctagtgcgttctatcatagttaacggttgcacacttttttaaaaaaagtaaatggatttgccacaattaaatgtcataacatttatgacagaatataaaatattaacatattttaagccaagttttaggtgtattttttgaatcttggttataaacccaattttaaagggcgatgtatccagcgttgtgaaggcaacagagtgtacccatatttatatttttataaaatacctataagactgtgaatctcttgtgctaatggctgagttaattgaaggatcgttttgcccctttttagcctcccagagcttcgaggactcaattcgaacccgaaatcctgccgtgggggaggggttgcgtcgagacctgggcccggggaggttctcctgcgtcactttctgtcctgaaaggcgcccttcctggtttctgtggctccaattttctatgcagccccacaccccttgttgttttgatcctgagaaataaaagggaggctgaattattcaaatttaaatgaggtttccccttcatggaagtgctgctgacccttcgtgcagaaatggggagcacttgaggacacaggtgggtggaggccctttgtgcgtggctggtcgtattcgggcagccctccgtcgctttttataaaactttgtgtgagaagaatatattgataatgtcagtgaaacaagcagacattgaaatggaggcacagattactccacaaggagttcttctgtatattttttctagatgcaaatacctttttaattatgttaattaatgttaagactttctaggcttatatcgaagctgtgtgtgggtcacggggtgatcactgctaactggataaagtttgtgcagcacattcctgagtgtacgatattgacctgtagcccagcgtgaaaaatttataaataaatttttcattgatctttttatattaaaaaaaaaaaa

SEQ ID NO: 563350 - DNA, 141 bp, Homo sapiens
cccgagataagtcgtatactagtgacggagtaagtcggtgcactttgcctggcccagatcggccctgggtctgtctccaaaaagtgtgatgacatgccaggcacgggtgactggaaggctcaggattcagtgaactgacca

SEQ ID NO: 563351 - DNA, 722 bp, Homo sapiens
  misc_feature (258)..(258): n is a, c, g, or t
  misc_feature (363)..(363): n is a, c, g, or t
  misc_feature (383)..(383): n is a, c, g, or t
  misc_feature (398)..(398): n is a, c, g, or t
  misc_feature (430)..(430): n is a, c, g, or t
  misc_feature (438)..(438): n is a, c, g, or t
actctaccccacgaatggagggctatcattcttacttgtttgtgctgttgataatgataatacttttaggaccttaactgaaaagctgcttcgtgttgaagcctgctgcatgcactgctctttcagttgttgaggtcagcccctcagttttttctccaccttgaggcctttgaaactgtaaaagcggaagtcgttttgtgttctggatctgtaacgtgaccataccgttcaggttcatgctggcatccttggagtagntttgctaatgtgagaatttctgaggtgaggatctcagacacactgaccagaagaagcttgttaggcaatgtgtggaagtggccgaatatacttaaaaagaggtgngcagaggcaggcggatcacntgaggtcaggagttncaagaccagcctggctaacatggtgaaacccngtctctantaaaaatagaaaaattagccgggcatggtagcgtgtgcctgtaatgccagctactcggaggctgaggcatgagaatcacttgaacccgggaggcggaggttgcagtgagccgagatcacgctgcacaggaatttccaaaatacgtacttgcaaagtaatacagaaacgtgactttcggcagctacccaagatgatgcctattttcagtgttgatgtattcaggcaggaaaaggtttacttggtggaaactcctgttagaatttcattcggggtggaaaggatct

SEQ ID NO: 563352 - DNA, 251 bp, Homo sapiens
cgaatggattattcagccatgaaaaggaaagaaattctacagccgggtgcggtggctcacgcctgtaatcccagcatttgtgggaggccgaggcgggcagatcacgaggtcaggagatcaagaccattctggctaacatggtgaaaccccatctctactaaaaatacaaaaaattagccgggcgtgtggcaggcacctgtagtcccagctactcgggaggctgaggcaggagaatggcgtgaacccaggag

SEQ ID NO: 563353 - DNA, 150 bp, Homo sapiens
acagccacagtcgcatccgaacctaccgtctgattagctaggacttaaactgacttgagtcgtggcaaaagttaacaaaaaaggagaaaaaatgaacaatcgatgaggttcataggaaactaactaccaggtcactatcaaaacccgtct

SEQ ID NO: 563354 - DNA, 370 bp, Homo sapiens
tgtctcgtgtatctggttcctactgggtcatcattccgtacgacacgagaggtcaccccaggactccgtcaagttttattccggaggaccttcttgtcggggaagaagttcctcgagcggagagtcgtgcgtaccccacaagacgcctcccttgacgggaaccgaaagaggacgtccgaagaaccgacaatacctgggcgtacctcaaattaatacgaatcgtatataaaaaccgtatgatcctaaagaagggggatcctaaaccggttttctccccttcctagttttaaaccgtccgacccccttgttgagccgggggtgactacctctttttttgtttgtctaccttcatttctgctctatctttgtg

SEQ ID NO: 563355 - DNA, 406 bp, Homo sapiens
  misc_feature (193)..(193): n is a, c, g, or t
ttaagtaaaaactattaggatttttctcacagtaagagaactttttggtgagtgagacagacaaagacagtgtcaataagacaaggtctcaccaggctggccttgaacttgcagaggttcttttgcctcagggttccaaatgctaggatttatagggggacctgctgtgcccggttaagacagctggctttantcctgtaattccaaagtgccattgttccaagaaggaagacttactggttattttggatcattgatttttctaaaagatggaaaatccaacttttataaatactcttagcaaataatatggtgtttgctctatttcctacttggaatttaaggaatgttctttagaaaatatggtactttttcttttttttgaattaattaattttttttgatg

SEQ ID NO: 563356 - DNA, 935 bp, Homo sapiens
ccgaggtagctcatgcagagccaggagaagacctggaacgcactagggcaccttttcaggacacagagggctggagccaggttctgatcccgaccttgcctcctggtcacgtgtacctggcctgtcgctatgtgcaacaggacgccgccgagtcccgcattctcctccaggcacaatggctgagtgaatgccctcagagcgtgcgcggagcactgtggctgccccaatgggcacggacctcgcgtggagtaggaccgagacgagtaactactctggcgttgagcagcagaaccttgccgtgccagcgttcaaaactaacccgtgggctggttaccgtgaggactaacagtgacccctagcactgcgctgtctcgcgatgtaccaaggacacaggacaaacaagagcataacgcgaacacacagcagaaccccacaaccggacgcaccggacaatggcactccgggctcggaaacgtccccgaggagagcacacaaactctaccaagagataaaaccctgacacagccaacacgccattcaggttgacgttgggctcccccgcaataaaccttagcaattcctaacattccattggttgacccgtggctatcgaaacgtacccagagcaccgctaagattacatacaccattccaacacatgagaccaatacccaatcttggtcactttgcaatagtcatctggaaacacttcacgcctacataaagggcaacactatccattgtatgatacgccccagtggaacgcttcccgtgggacgcgacctgtacctcaattccgcttcaaactaacagcaatagtaaagtagtggccgagacaatggaagcaaggtgcacacagagcactaggcgaggagggcgttacccccctcgtcacacccatatcaaatcacggctctgggtcgaacatagggcac

SEQ ID NO: 563357 - DNA, 335 bp, Homo sapiens
ggggcccccccccccaattttttttccccattttgggtttttcccctggcccacccggttatgggaaaaacccccaaattctgggccggggccccccggtttggtttcccccccaaaaaatttccggtttttggttttggttcccccttaccaaagggccgccaaaggggttttttttttgggggtttggggaaaaaaccctttgggggtttttgggaaacccttttccccccccaccccaaaatggttccttggccaaaggcaattttggtttgaatttttgattgggaaggttttttgcggcctttttaaaaaaatttggccggaaatggtta

SEQ ID NO: 563358 - DNA, 141 bp, Homo sapiens
  misc_feature (126)..(126): n is a, c, g, or t
  misc_feature (129)..(130): n is a, c, g, or t
gcacctatagagaagagacgagatgctggtggcaggcatgaggacagcaatggttgtatcaactatgaagagttcgtgaggcttatgctgaaggggtgacgggcccactggggctggagctcagtncgnngtgcgttgctg

SEQ ID NO: 563359 - DNA, 754 bp, Homo sapiens
tatagtatgagacataactctaaccccaggaaagacttctcccattaaaatgatggttgcaggtcccttgaggtttctacaggggtgcttgtctggggaagatgcacacagacatgaaatggcagtgatacctatacagagactcccaactcacagtgacacagcagcatggacagagtgaaatgcatacagaaatagcctctcacatatttactggctcattgtttagctgaggggtttccaaagctgagactgctctttcgtcttccatttagtgaagatatcctactcccccaccaaaaaaaggaaaaataccaagatattattggattctatcttttaatttgggaaagatgcctgtggattttatttctccaaacaattcctttccatagatgtgatttctggtggtaagaagcctatcagtcttctacctcagtgatttaaaaaaaaaaaaaacaaaaatgaaaaacaattctgccagacataaatgtcctctgtttgtatttatgcggtttgctgtgcccaatcgacctttctgcccaggtttaatgatgccacttaaaaagccattcacacgtcccctctcctttcagagctttcaagctgaaattgatttccttattcaaccccccctcccacttcccactggctgccaacccatgctccttcccccaacctgattatatggaagtgctgtcactgggcagagggttttttttttttttttttttttgccacgtctattaagaag

SEQ ID NO: 563360 - DNA, 720 bp, Homo sapiens
  misc_feature (586)..(586): n is a, c, g, or t
  misc_feature (620)..(620): n is a, c, g, or t
  misc_feature (682)..(682): n is a, c, g, or t
ttctgtttttactttctagcctctttctaagatgcaatgatttgaaacagcttgctttactttcttttaatttgaaattattgtccaaaattcacatttcacaagattacattagctttccttctgtcagggagagtatacatagaaagtgtagtgatttttttcaaaggcttttctagcctactctaagtacttgattccacttagggatatgccaaggggccccgtcccattggattgagtgttagactgaagtttactagtcctcgttagtcttttgatttaatcatttatgctgctgatatgattggattaataaagcaaatctgaggaggtgatgtcagcgcagctgccaggacacttttttcctttcctctcagctacggatttctaggctagatttgaaaattccaggtgctatcatctttttgataatactgatatttttcagtgttgataatttatctcacttttgaacatctccaggtaaaatcatcagtagtatacttagacttattcatacaaataatttttttgcagttatctcatgtactttatggccttgctttaatactacataatgttntaaaggaaattcatggagctttttttggcataantgtgggatagagtcaatttcatttctcttgaacattatctagtggctttctgaagtcagggnttcgaattttcatgcattttacttggtactttttgctc

SEQ ID NO: 563361 - DNA, 130 bp, Homo sapiens
ggagtcgtgaaccgactgcatctgtgctcagcctccccagtagctgtgattacaggcgtgcgccaagacgcccagtgaagtttttctagtacagatggtgtttcaccatcgttgcccaggctgtcttgaa

SEQ ID NO: 563362 - DNA, 253 bp, Homo sapiens
tagcgctggaacaacacatacactcagagatggcagacagcagcaggactacgggctgatagatgtaagagcccagaacgatctcttcagccacatcagcgcaatgacgtgggtcctgctgaacctcaactgtgacgggctattaccagggtgaactacgacgaacgagaactgggcggaagattcagactcacgctgcagacgagaccactcggcccatcccggctcatcaactcgggcacagactcattaa

SEQ ID NO: 563363 - DNA, 230 bp, Homo sapiens
ccctgagataaggcttccgcgcccagcttgccgcctacggtgaaaagacaaccctgctcgtcgacacctacgacatcgacaatgcggtacgcacggccatccgcctcaccgagggacgcctcggtgcgtgtccgtatcgactccggcgacctatccatcgtcgctcgtcaagtccgcgacttgctcgacgacctcggcgccccgaacactcgcgtcatcgtcactagcga

SEQ ID NO: 563364 - DNA, 921 bp, Homo sapiens
  misc_feature (19)..(19): n is a, c, g, or t
  misc_feature (75)..(76): n is a, c, g, or t
  misc_feature (94)..(94): n is a, c, g, or t
  misc_feature (97)..(97): n is a, c, g, or t
  misc_feature (112)..(112): n is a, c, g, or t
  misc_feature (126)..(126): n is a, c, g, or t
  misc_feature (128)..(128): n is a, c, g, or t
  misc_feature (145)..(145): n is a, c, g, or t
  misc_feature (157)..(157): n is a, c, g, or t
  misc_feature (159)..(159): n is a, c, g, or t
  misc_feature (162)..(162): n is a, c, g, or t
  misc_feature (172)..(172): n is a, c, g, or t
  misc_feature (174)..(174): n is a, c, g, or t
  misc_feature (186)..(186): n is a, c, g, or t
  misc_feature (192)..(192): n is a, c, g, or t
  misc_feature (194)..(194): n is a, c, g, or t
  misc_feature (198)..(198): n is a, c, g, or t
  misc_feature (200)..(201): n is a, c, g, or t
  misc_feature (209)..(210): n is a, c, g, or t
  misc_feature (215)..(215): n is a, c, g, or t
  misc_feature (218)..(218): n is a, c, g, or t
  misc_feature (226)..(226): n is a, c, g, or t
  misc_feature (228)..(228): n is a, c, g, or t
  misc_feature (236)..(236): n is a, c, g, or t
  misc_feature (238)..(238): n is a, c, g, or t
  misc_feature (240)..(240): n is a, c, g, or t
  misc_feature (263)..(263): n is a, c, g, or t
  misc_feature (285)..(285): n is a, c, g, or t
  misc_feature (297)..(297): n is a, c, g, or t
  misc_feature (299)..(299): n is a, c, g, or t
  misc_feature (328)..(328): n is a, c, g, or t
  misc_feature (330)..(330): n is a, c, g, or t
  misc_feature (338)..(339): n is a, c, g, or t
  misc_feature (344)..(345): n is a, c, g, or t
  misc_feature (362)..(362): n is a, c, g, or t
  misc_feature (371)..(371): n is a, c, g, or t
  misc_feature (396)..(396): n is a, c, g, or t
  misc_feature (398)..(398): n is a, c, g, or t
  misc_feature (405)..(406): n is a, c, g, or t
  misc_feature (419)..(419): n is a, c, g, or t
  misc_feature (422)..(422): n is a, c, g, or t
  misc_feature (475)..(475): n is a, c, g, or t
  misc_feature (841)..(841): n is a, c, g, or t
  misc_feature (847)..(847): n is a, c, g, or t
  misc_feature (850)..(850): n is a, c, g, or t
  misc_feature (852)..(852): n is a, c, g, or t
  misc_feature (882)..(882): n is a, c, g, or t
cgccccggggagctcggancgcgtgcacgcgtggcagacggagaaggccagtgcccagcttgaaggttctgtcannttttgcagtggtccaaanaanaaaaaaatggaaaangggaggcatgaaananatcttttcgttgttgtnctttcttttgcnanaangaggcaaaananagcaagtaaaanattcananacananngcatgtannaaaanaanaagtacanantgggtganananggcatccttacctggaaccttangggttggtttactgcgtgaacngcatctgctcananaatgggaatgtgctttgcagccgagtcanangtccaaannttcanngcctttctcctgtgcanattcctcanctgtgctgccctcgctgcccagaanantccttanncccagtgaacaanaangtgaccagcaagtcttgcgagtacaatgggacaacttaccaacatggagagcngttcgtagctgaagggctctttcagaatcggcaacccaatcaatgcacccagtgcagctgttcggagggaaacgtgtattgtggtctcaagacttgccccaaattaacctgtgccttcccagtctctgttccagattcctgctgccgggtatgcagaggagatggagaactgtcatgggaacattctgatggtgatatcttccggcaacctgccaacagagaagcaagacattcttaccaccgctctcactatgatcctccaccaagccgacaggtggaaggtctgtcccgctttcctggggccagaagtcaccggggagctcttatggattccagcaagcatcaggaacattgtgcaattgtcanaataanaananaacatggacaagtgtgtgtttcaatggaanactatctcatgcgagtctggcaccaaactccggcatttg

SEQ ID NO: 563365 - DNA, 364 bp, Homo sapiens
aaactaattacccactcatttatcgacctccccaccccatccaacatctccggatgatgaaactcccgctcactcctcggcgcctgcctgatcctcccaatcaccacaggactattcctagccatgcactactcaccatacgcctcaaccgccttttcatcaatcgcccatatcactcgagacgtgacttatggctgactcatgcgctaccttcacgccactggcgcctcaatatccctaatctgcctcacgctacacatctcacgaggcctatattacggatcaatcctctactcccccgggcatcgggcttatccgactgcttgccactatagtcacagctatcattggcttcgtctcctgg

SEQ ID NO: 563366 - DNA, 290 bp, Homo sapiens
accttcttttgaatcctacctctgcctcttactagccacatgacttgggtcttagcatgctcatctattgaatcggcggacacttaatgctgaccccacatttgtgctgaggattatgcaaataaaatctgtaatttgtgcaagcatccaccaggtgcctggtcagacttggatgctcaattaaggcctttgggtgggccatgtattgaattggattctcacaattatggccattatttagggtcctggtgtcctaatctatgtactgaggacatccttgcttgttttca

SEQ ID NO: 563367 - DNA, 352 bp, Homo sapiens
tcacctaaatagaacttctggcataatttccattacgactggatagtctttcttgcatatcactaatggagttggaataaagagacgtttgcctatccctgttaatgatggttgtgttgaagaatcttcctcggtcacgttcgtgttcagatctcttatgttataattagatcagagactggtagcatcgtaacactctctgaaagcaccagtgcccagagtctgctcggtaataaaattatggatccagattgttctgagagacgaagatacttgctgctgatagaggtgaaaacgagattgatccgtctggggttttacggtgtgcactgggtgctgcacagacttgtca

SEQ ID NO: 563368 - DNA, 568 bp, Homo sapiens
cttgagcatcatctcatcccgtatcttaaaatgcgttatctgtttgcaaactgctgatttcttttggagaatcatccccataaacttctcataaagcatcaatgattttaccattcttccacccaagcttcacactaaatttgatgtttggttttgcttcaattttagtagaatttatgttgctctgacaggtgctcttttcaaacttacgtcttacctttttagtgcctcaaactacatcctgttcaggcatgttataacaagttagtatgagcttattttggtataaaaaaatttggactccataattttttcataatatgcatttttcattaccttttggaagacaactcatatcaccttgagcttcttttcatatgcctattttccatatgtatatcttctttggtgaggtgtccttttcagatgtttgtacatttaaaaatcagttattacccactcccaccacttctattcaacatagtactggaagtattatcaagagagagcaattagacaagaaaaagaaattaaagatatctaaattggaaaggaagaagtacaatga

SEQ ID NO: 563369 - DNA, 145 bp, Homo sapiens
tccagtttgagatagcatgggcacgtagcgcgactccatctctacaatacataaaaattatgctgggcatggtggcgcatgccgtagtcccagctacttgggaggctgaggcaggagaaccgcttgagcgggagagcggcggttg

SEQ ID NO: 563370 - DNA, 287 bp, Homo sapiens
ccctttaggggaatgactctgacttttagacggtgtccacccagtgtgtcaggtgctgcaaagcgtttttggaaaaggcccccttaggcaggtttgtgccctttttcggccagcctgactagacccccccctgaggtcctgcctttttcagtcggggtgtaatcccgttccagggccccaagcccagctctttgttcagttgacttactgttttttcccctaaaaagtaattgtaaatggaaatccgttgtgtttggccggagaatccataaaaatttttttttcca

SEQ ID NO: 563371 - DNA, 368 bp, Homo sapiens
cgggcgagctgtgtgccgccgctacttccgaaaccatcatgcaggtggccgccacgcatttccccatgacagagtgggccgtggcagacatgcttggctgcatcatccactccgagttctatcgcgccaaggtgcaggcacgctgcccgggcccggtgcacaagctgtcgttggcctatccggcgccggacgtgaggcaggacctgcggtcggcggtggatgatcacagccgcctgcggaccagcgcgtgggtgtggtcaatccgaacaagtgcgttgacaaggtcgtgcgcgcgttgatgcgtgaccccgggctggccgcacgcaccgagtaccgcgtactcggcggtgtcagcgagcaggagcgca

SEQ ID NO: 563372 - DNA, 122 bp, Homo sapiens
aacatagccccaatatagtaagatctatactaataatcctagatgaaatgttatagatgctatatgatacaagtggtggccatgagtgaggaaaggagctcacgcccagagagccggaattc

SEQ ID NO: 563373 - DNA, 938 bp, Homo sapiens
atgatttctgtctgctctgagcggacgttaaaatgggcccccggtcccccgaccgcaccctccttcctcagggcacttactaagggaggggtctccctctcaccatctccccagtggcctgcccgctccaaccgctgcctgcgggctcccccccgtcgctcaccccggacgtgctccgggccactgagacacaagacctattgatgttctagcgcctgggagaaaggagatcggactggtgtgttcccaggtggggcgccaggatggctcctgggcgatgctcctgccgccttccttcactggcacttacaaccggtcgggagccccagggaactacccctcaggaccgctcaagcattcgccgagcttggtccattcatagacacccttacagtttggcccgaggtcaaattacggttgctggtaatggggtactcacatccccgcagagccgcagggtcagtccgccaaattgttggacaaggcactgtcagaacgaaccgtggtaatagcgtgcgtgtacacatcctctatgaaaagggacgcactgttagtatgcgtatgataggagtactagctatactagtgagagatcaacactatgagtcaggcaccccacccaagcagggcagaagaggcacaacacgaccggtgggtggagtccgcaaccaaaggaagatcaccgaacgtcaacgcaggaaaaaccgcgagggcgtattcctacaggaggagtgcgcacgcgacaatgagaggggacaagcacactcatgataatgtcgcccgaaaccttccgaaatgctgcaccgacaggacgcagaaaaaagacccaaagtaagagacaaggaacagagaggggcttcacccggaagagagacaagggcacacgagacacagcacaatccggggccggggcgcgcgtaacaaagatagccgtgcgg

SEQ ID NO: 563374 - DNA, 636 bp, Homo sapiens
ccattgttggccgcatgtgtcggtgatgtactagggaggcctcggtggacatcaggcgcaggaaggtcagctggatgtgccacatctggcagggtcggagccctggcctgccatactcgaactgggaatccatctggtcatgctctcgcccgaaccatgacatgcctacttgtccctatggggttctaagctagatgtaccacgttcttcttgggccacactgtggcttgagtgtgggtacacgcagggttctcaccgagtctccatgtttgcagaacgactttgagtggcatccagtgtttgcagcctttggttggggtcaatccaagtactctccacttcttccagtcaggagtggcacatcttagaggtcacggcaggtcgcgggcggggttcttgcggctgccctctgggccccggatgtactcgatctgctgactcaggcccttgagggtggtgtccacctcgaggtcacggtcacgaaccacattggcatcgtcagcccggtagtagcgggcaccatcgtgagccttctcttgaggtgcctggggcaggaagctgaagtcgaaaccagcgctggaggaccagggggacccggaggtcctggagggccggtggaccaacaggaccggatca

SEQ ID NO: 563375 - DNA, 413 bp, Homo sapiens
  misc_feature (27)..(27): n is a, c, g, or t
  misc_feature (352)..(352): n is a, c, g, or t
tcaagaggatccctcagcacattagtnggagtcggggggaggtcaggaatatgatcagataagggatttataccttagagcaaaatctataagtctctctcagttaatcaatttaaatgggcttaaggctaataggggggtgtaaactttaagaaatataattctcccattcaagtttacagcaaacatctagccaccttcaaaacaaagaagatacagaccatcatttagcaatactaatacatgattttcctgggggatggcaggttggagaatcctttagcaacaggacatacttcccctaaattacagtgaattatttataacgagataaagctttcaggtacaagcngaaggtggggtgtctaacaactaaaaactatcactaaaggtgctgaagggtaccgagctcg

SEQ ID NO: 563376 - DNA, 975 bp, Homo sapiens
  misc_feature (371)..(371): n is a, c, g, or t
  misc_feature (453)..(453): n is a, c, g, or t
  misc_feature (479)..(479): n is a, c, g, or t
  misc_feature (490)..(490): n is a, c, g, or t
  misc_feature (536)..(536): n is a, c, g, or t
gcgatcgagggtaccgagggaggaagtgtaactaggatatctagttccggtcggtaaacaggcaggaatatgatcagataagggatttataccttagagcaaaatctataagtctctctcagttaatcaatttaaatgggcttaaggctaataggggggtgtaaactttaagaaatataattctcccattcaagtttacagcaaacatctagccaccttcaaaacaaagaagatacagaccatcatttagcaatactaatacatgattttcctgggggatggcaggttggagaatcctttagcaacaggacatacttcccctaaattacagtgaattatttataacgagataaagctttcaggtacaagcngaaggtggggtgtctaacaactaaaaactatcactaaatctcaaagagaaagttcttgcaaaatatgtacagttcacaaggngcagacatttcccttctttaggcttntatctaaggangggctatgaaactgggcccatctgtatacaggctcaaatttacgtnttctaacacggaacgaatctatgcagctgaggcttattggcaggaaatacttcattcggtatgtacaatatcatggtcaccataacataggaggctgtatatcatcttgaagtggtatgatctgccatgacaataagaagtctctaggaatctggatataaacgaattaaatgttatcctagaacattagtcggtccacgcccgcgcaacttcgcacctcacacttatcacaattcctctaccccagggtaaacattagttcctcttcaatggtacaacttggcgaaccctggaacaaccctaacctttcaacattgtaagaagcacaacggagaatggtctcggagcaacatctacgtgccccctgggaattctcctaaatggcctggggcatttcaacggaattcccatttcaattataacacaggattgggttccc

SEQ ID NO: 563377 - DNA, 338 bp, Homo sapiens
  misc_feature (22)..(23): n is a, c, g, or t
  misc_feature (136)..(136): n is a, c, g, or t
aggtacaggtcttgctctaccnnacttctcaaatttgtgaacttcagttttctttttaacaccttaaaaacgtggtaggtgggcaaggggctcctgcctataatcccagtgctttgagaagccaaggcaggagaanttttccttgagcccaggagttgagatgcagtgagctctgattttgtgccactgttcaacctgggcaacagaatgagacccggtctcaaagagaaaaaaaaaaatgggatggtcacagggcttatgcttcatgtagtagttacttttttgttgggggagatgcgagtctcttggtggccgggttgattggcagggagccgata

SEQ ID NO: 563378 - DNA, 1377 bp, Homo sapiens
ggggcatacaaggtttagtcgagggctgaggaagaaatatggagagcaagaggatgattgagactcccatatcagagatggggcttagctggaatgggtgtaggtgcaggtatggctgggttagcgaggccattcgtgaatgtatgaccttcagctctgtccatagcgagccattagaccaggttaataagctcagcggccaagaccatagtaccatggtcgtaggtggccattcagaccgtgtgaccgtattagttctgcaggggggccctaagtggatgcctctagacatggtgtagtctgcctcagcgacatcgagcagtgcgttggcatgcactggtatgggcgatagcacccaggcgttcaagagcgtggtctagtcgccttggcaattctagcaggtatgctgaacaggcacatctacattcaaaatcgagccaattccgggcataactagatccagtgggtggtgcatcagcagaattgaatttgatggctatcgggggtatccgtatcttgaagttatcctaccgggaagcgtcgagtcgacaaggatctttcatggatatccttcattggggacaaagtccaaaagtgatgaaaggcgaaggaaagacgattatatactggtgggtaattcgcgcatctcaatgaccgtgatggggcctagtggcttcagaagactggcatgcagagcgtatcataaaagcacggaggttgaactgttgagggtggataacatcatgcggtacacatgaggacgagaatgggaccatgggcaaaacccatagaaggccagtggtcagtgaaagacaacatcaagcacaggaaccaggaggggaaacggagggactggacaacacaggaaggagacagaaaggaagctggaatgtcatgtagccacggactacaagcgaagggccaaggacgtcagaaaacgcgggaaagtggccaccagaacaggcaccggcgggtaacagacgaggcggaaagtgtccacaaaaggcacacaaaggcaacgacattgctacaaagggccaaaacttgatagcgcctaggtgcacaaaggaaccatcattattttgggcacaaacagagaagaaacactaataatagatatagatgggacacttgaaacacaaacgatgagaaagacatcatctgggacgcaaatagtagacaacagaccgtagaaaggtattgcggaaccaagtgagttaatatcgagcgaataactttatgaagagagatgtattgtaacgcgaaaccaataatggtgagattatacaagacatgcagcaatagaaataagagctgactgaagagggaggatggataacaatacatatccaacaagggagtggtctagaacaataa

SEQ ID NO: 563379 - DNA, 256 bp, Homo sapiens
  misc_feature (32)..(34): n is a, c, g, or t
  misc_feature (38)..(38): n is a, c, g, or t
  misc_feature (54)..(54): n is a, c, g, or t
  misc_feature (69)..(69): n is a, c, g, or t
  misc_feature (116)..(116): n is a, c, g, or t
  misc_feature (162)..(162): n is a, c, g, or t
  misc_feature (180)..(180): n is a, c, g, or t
tgttggtgctctactgtctgcaagcactagtnnnctancaagcactagtgtctnccaagcactagtgtnctgccaagcactagtgtcctgccaagcactagtgtcctgccaagcantagtgtcctgccaagcactagtgtcctgccaagcactagtgtcctnccaagcactagtgtcctnccaagcactagtgtcctaccaagcactagtgtcctaccaagcactagtgtcctaccaagcactagtgtcctgccaa

SEQ ID NO: 563380 - DNA, 1159 bp, Homo sapiens
cagggctctaccctcacttcctggaaagatctagatggttattgctgtttgagactgtctcagtgggataagttgaaattcaagtgtttgaactgctgataatttggatttgttttttttgttggtttaaccttgggacacatgtgatcatagtctaagacccgggtggggagaattatccccacgatgggtcatcagtggaaagacatcaactgtggcaactggtgccctccaaagcatatcctatactatcgtgtctccacatctgataccagaaggtgcagccagtgcagacggtatattccagcgtctggatcaccgcgatatcctttcaccaaagtggctccataacgtggaagatctcactttccccttggtggggtaggaaccgactgcccagatcggcgcagggagtgtgcccccgggagccattacacgacacgggtaaatattatatattattattataaaagaacagtggccgatacgagtgaggggcgcggggacaagtgccaccaaccacaggtcgcataaacagaacaaaagaagtgcccactctaacaccccgtggacaggtggccaaaagcgtgggcccacaaataaaagagagaccccaataatggctgtagcaacagagccgggagcaagacagagagacgaggcaccgactcaagcagacccaacacgccaacgggggagacacatagtgcgacaacagaacacagcgagcgacccccaaatctacacccgtcgtgacgcccaattactttgggcggccgagaaacgacaccacgggtacggagaaagcaagagaaaaaaagcacacagcgacagcaaaatcctcgcgggagcgccaccaacatagtaaggggcgagattacaacagcatgtatattcacaaacacagtggaaaccaccaatagcgagaaacaacacagaaacacgcaaaaatgagaaacacaccacacaagacagaacaacaagaacaataaccgagaaaccaaagaaacaagagcgaccgggcgcaggacccagcgcacgaagaagcagcccgtccctgcgcgagggcacgcccccgatgatccgacacacccaactaagcagcaacataaatcgtacaaccacacatccaaacagtatgaagaaagaatcatgacac

SEQ ID NO: 563381 - DNA, 196 bp, Homo sapiens
tagggaagaacatacaaaacagagtaggtaaaatgaggataggagaagatcatcctgaacaaaattagataaatggtttatataagattgtacatcatggaggaaatgcaaacaagctcaaagctactataatctatactaatctaggtcctgtgcctaatggcaaaagctagtaatatccaaaaggtgagagcaa

SEQ ID NO: 563382 - DNA, 390 bp, Homo sapiens
caccctcattgcccaataactttctaaaggccttatacttcttaatactgttgcataggggattaagtttcaacatgaattttggagaggctacacacactcaaaccatagcccatattgtgactagagtttagactacaactgcctttacatttacaataattgtcgactaaatgtagttaaagaactactcatgtctttcctagatcgtatatagagggttgttttgaaaaccctcggaacacaatctttattagctttctttgctacagtagtaccaaagcagttcatttaaattagacggcagtctaatatacatagagtattatatacgaattagatttcacttagagattttaaaacagtggataggaatctaagtggcttatc

SEQ ID NO: 563383 - DNA, 111 bp, Homo sapiens
ttcgattggcgggcaacttattctgtcctccaggctggagtgcaatgacatggtcattgcgtcactgcagcctccacctcccgggctccagcgattctcctgcctccctgc

SEQ ID NO: 563384 - DNA, 398 bp, Homo sapiens
ggcactaggcagatcctctcatattatagcaaggttttagaagaccctccaaaaagtaaggtatgtaactcagctgcatagtattagataaagctatactctgctactgtacttaatttgatacttttttgtttttggaaatggagtctcactctgtcgtccaaacgggagggcaggggcacgatctgggctcacggcaacctccgcctcccgtgttcaagcaattctcctgcatcagcctctcaagtagctgggactacaggcacgtgccatcccgccgggttaattttttttttaaatttttaagtaaagacagggtttctccatgtggaggcgggtctggaactcctgacctcaggtgatccgcccacctgggcctccaaaagggcgggaataat

SEQ ID NO: 563385 - DNA, 850 bp, Homo sapiens
gtgcttggctggcagattccactacggcactgcgtatggaggcagtaaatgtgaaggatgtgtgtgagtgacctcgtccaggccatggttataactacttggggaaatgactatgttacatcctggcatcacagtgtgagcccttagaagcatacatctattttgtgccccgtgtactatcagaagcttgaaacacatggtgctagataaaatgcatgccctgggccctggtggacccacagagcctgtaccttaccagtgcaaacacactgaagtgactggtctctgatgatggtggcatatgctgtctcgagggaaattggaactgtgacttgtataatctggtatatggatgccatgatatgcttatatgcataagaatgaagaaactaaattgaatatatcaaaggttgaaattgcctataagagaggttcgattgtaatatgagtgacaagatgttgagaactatcaatggaggttatatctgagacatgtattggccaataacttgacaatgtacatcattgacaaaaatagtcatacactaccagaatacctgtatgactgcaaaaatgaatcataacatggaaactacaagatctatgaacattcaatacaaccaagtgtgaaaactgtttccaagttaacaaagtgacatgaagggagatggaaaaaaaatgactcattaacgcaaaaacaaggtgagtacattacacaagcaaagggtaaaagcaaaaagggaatctaggaacacgaaccaaccaaggagaataatacccatgacgaatacaaccgcataaaaccacaacaaaatagaagggtaaaaatatcagaatttatacaaactga

SEQ ID NO: 563386 - DNA, 212 bp, Homo sapiens
tctaatgtagacattagaccagccaattcccagccccagcgtttgtgacactgctaatacgtgtccaatttacttctaagggcatcacagaattctccaataaagttaattcaatattcagatactcatttcataaataatcctcgtgtggcataagtgctcccccgagaaggggagtgttacaaacgtttgagcgggaaaagaccctggga

SEQ ID NO: 563387 - DNA, 306 bp, Homo sapiens
ctttctggaacaggggggctaggaccgtgtagtaacaccattgtcatttatcaatcacctcgaggcgggcgcaattaatcacctccttttatccagtctcaacctcacacccacttcatgcccacgaagttctcttatcatccccatgttacagattgggaaaacaaatcaaagagcttaagtaaaactggtctaaaagacttgagtcaggcctatggctccagacaaatggtgcagcttcagagagtggaagttccagtcccagtgcccagccaactgcctctctcgtggacaaatcggttcttt

SEQ ID NO: 563388 - DNA, 418 bp, Homo sapiens
  misc_feature (8)..(8): n is a, c, g, or t
  misc_feature (70)..(70): n is a, c, g, or t
  misc_feature (98)..(99): n is a, c, g, or t
  misc_feature (142)..(142): n is a, c, g, or t
  misc_feature (305)..(305): n is a, c, g, or t
  misc_feature (343)..(343): n is a, c, g, or t
acccacgnaggattcctctagattccattctttgggctggagttgaatcaggtcatcccgggggggactngggcgcaatggaagcactgaattgaccnnggacaactaaagatcgaggaggaaggaaagagagactcagggntctgggaagcctgtcaacagagcaccccatgcagaaagggctgcaggctgtctttgtgttggaaccagggaagaagggatttggggaaagaatcaccctctccttgcctcagtagactctgtgacttcctgaggacacagagcagagctgcgaggagggcggncaggtcttcaaacttgctggccgcactccactcttggngggtggtaccctgactctgacagccaaggatagacaggggagccggccttttccatgctccccttgggcccccca

SEQ ID NO: 563389 - DNA, 465 bp, Homo sapiens
  misc_feature (213)..(213): n is a, c, g, or t
ggaatagatgttaagaacttagggggtgatgtccaagggaggtcagtgataccaggacacgacaccatttgcagcacaggagttcagacagcaccggccctggattcacacagaggaactttctcccaaaagaaccaatcaacttctaactgttgtggttatttgcataactcaaatgagaagcgagggccttttggtttaacttctgtgtcntatgaggtctggaatgagtcatatgaacactggaattgtggaattggagaagagaatgaggacccacacactatgataaaagttaaaaagcaagtcaaagagttccttctcttgtactcatatctgcaccacgtctagaacaacttcccttcccaagagaattaaaatacattttttgtttttccctgcaatactctgtagtactactgttctggaatttcagttctcatgcaacataccggtcccgattga

SEQ ID NO: 563390 - DNA, 833 bp, Homo sapiens
gcctttaggtacactgcctaccttactggtcgcgtgcaagtccaccctggggagaagccctgtgaattggaagaatgtggaaaagcctcccctgtttcttccagcctaactcaacatgtaagaattcatgctgcagagaaaccctgtgaatgtaaagaatgcggaaaagccttcactggactctcaggtctttctaaacacgtccaaacagaccctggacagaagccctatgaatgtaaggactgtgggaaagcctgcggtgggttttatctactgaatgagcatggaaaaactcacacgagggagaagccctttgcatgtgtggtttgcggaaaatattttagaaattcctcatgccttaataatcatgttcgaattcacactggaataaaaccctatacatgcagctactgtgggaaggccttcactgtgcgctgtggccttactagacacgtacgaacacacacgggcgagaagccatacacgtgtaaggactgcgggaaagccttctgtacatcctcgggccttactgagcatgtaaggactcacactggagagaaaccatatgaatgtaacagatgtgggaaatccttcactgtttcttcaagcctgactgaggcacgcaagaattccataccggagagaaaaccctaacgaatgtaagcagtgtggcaagccttcacagggcgctcaggcctcactaaacacatgcgggaccctcaccggggagaagcctatgaatgtaaggcacgggggaagccctacataaggttacttactgaattgagcctgtgaaaatccccggaggggaacctacatgtcggagcagaaac

SEQ ID NO: 563391 - DNA, 125 bp, Homo sapiens
ggtcggtacctgggaggcaggacactggacagcagatcaggagacaaatgagactacaggctgacgttccgggcaaatgccaggcccgcaccgaccacggggccgacattgtctcccgcctccca

SEQ ID NO: 563392 - DNA, 374 bp, Homo sapiens
  misc_feature (188)..(188): n is a, c, g, or t
  misc_feature (338)..(338): n is a, c, g, or t
cacgaggcacgccctcggtctgtgcggtctgctgcatcttgaggccgtgctcgtcggtgcccgtcaggaatcgcacgtcgtagccgtcgaggcgcttgaagcgcgcgatggtgtcggtggcgatgtactcgtaggcgtgtccgatgtgcggagcgccgttggggtacgcgatcgccgtggtgacgtanaagggtggccgtgaggcatcagctggcgcagtcatggtgcgcctactctaactagcgtgagcagagaccgtcccgcaccaccgttgcccgagcccgtcggcactctcgtcgacgcgcacacccacctcgatgcgtgtggggcgaccgacncgggagtgtggccgcgatcgtggacaaggccgagtc

SEQ ID NO: 563393 - DNA, 199 bp, Homo sapiens
  misc_feature (29)..(29): n is a, c, g, or t
  misc_feature (69)..(69): n is a, c, g, or t
  misc_feature (101)..(101): n is a, c, g, or t
  misc_feature (125)..(125): n is a, c, g, or t
ttgtgaaattgatatatcaattgtttatntttttaccataggaaaattagagttttgtatacatatttnatgattacagtaaacaggttaaaatttagcanatagaattttgtaagcttttttanaatgtgtgaattctgttataagggggtggctttgctacaatttattacaaagcttagttatatttcattactta

SEQ ID NO: 563394 - DNA, 401 bp, Homo sapiens
tgagatccccctcgaattggaactgaatgggatgatttactttcgaagctgaggcatgctgctgaagaagtctggttgcagggaccacggattgaatcggaagagatgcaaccctcattggatctggttctgagaagtacacacctggcatcggatgacctttataaattatctatgaaaatgccaaaagctctcaagccaaagaagaagaaaaatatttcccatgatacttttggcacaacttatggaaggattcatatgcagaagcaagacctaagcaaactacaaaccaggaaaatgaaggtgccgaacaagcgacctgccgaaaggataacagaagaccacgagaaaaagtcaaaaagaattaaaaaaaattgatggaacttagccagccactactg

SEQ ID NO: 563395 - DNA, 260 bp, Homo sapiens
gctaactgagacgtgtgatgtatgttgactgtgtgtgagtgtgtgtatggacataagtgctgtatgtgactgggcaggctggctcgggcctgtaattccagcactttgggaggccgaggcaggcagatcatttgaggtcaggagctccagacatgcctggccagcatggtgaaaccccgtctctactaaaaatacaaaaaaaattagctgggcgtggtgccactcacctgtagtcccatctactggggaggctggggcag

SEQ ID NO: 563396 - DNA, 107 bp, Homo sapiens
ataaaatgggtgcatgatctatcacgtgtgacagcaggcctttgcctcgtggccagtaaagcccttcctggtcgctctccttcgattccattttacctcctcttctg

SEQ ID NO: 563397 - DNA, 105 bp, Homo sapiens
gtatgttcagccttatgtaattctagttattctgtgtatggagtggtgtctcactatggttttcatttacaactccctaatgactaatgatgtagagcatcttct

SEQ ID NO: 563398 - DNA, 125 bp, Homo sapiens
ccatagtgctgcatctgggtggagcgaccactcccctcacataccacaggcccatggactcactatagtaacaaactcctaccaacactgaccaataaaaaacgatgtgggcttttatttttttt

SEQ ID NO: 563399 - DNA, 183 bp, Homo sapiens
ttatactaagaaaatagaaatggagaaaataacttaagcttcaactttaagaagctagaaaagagtaaaccaagtgtgaattagaaggaaataatgaagacgaagaaatcaatgcaattgaaaatataaaggaaaaaaaaatcagtgtaacccaaagcacataatggggtatcctagggtacc

SEQ ID NO: 563400 - DNA, 651 bp, Homo sapiens
agacatcactttcagtctgttagaaataaagatagtttactttcttctctcaagtacagattgtagtatagttcagttcattaacaggtttgacgtgctatacattgaatagactgatttcatctgctgatttagcatatctattacatgcctactaagtgttaggcactactctagaagatgtgactatatcagagaatcagacagccacggagagactcaactctatagatgagccaggatcaatgatcacatggtgacaagtcctatgctgagaattgccctgtatgatgtcatcaacagtgactgggtatctagattgtacggtcagagatggcctatctagaatgatggcatctagcctcggttctgactagcaaggaggagccagccatgcccagagtggtagaagcacactccagtgtaccagtggggccacatatggatgtaagcattaatgcgaacttgatgtgttggagacccagaacacgtgtgaaactgcagcatagtagggtagcagatagacagtctcaagtggtcttagagaggcatcctcaactccgtcatgaagagctgggtgtgatggttcacgcctacaatcctagcactttcggaagccaaggtaggcggatagcgtcagtctgggagtac

SEQ ID NO: 563401 - DNA, 903 bp, Homo sapiens
aaagaggagctggagttacagaaatgattgtctctggttctcagtttttagcccttgagaggacatacttttccagcctcatgggtatggcactcttaattaaaatttcagtgactgtttactggatgaggcagatttttcacatttttgcaaattaaatatattttatatatattaagtttaattttttcagtttttttaatgtaaaagcaagtgaaaattttaaataaacttctggtaaattaccaaaaaaaaaaaaaaaaaaaaaggccaaagccatttaacgttgcactacccagatcacttgggagccaaaaggggtttacttctgaatggggtgtccgtattgttgcccacattaggattgagtgggttgggggccctccttttattagaaattgttgttggttctttccccctagctgtctcttgctggtctggtcttcctggttatcgcccctttcattttaaaatcatgaatcagtggtaagtgggtaaatgggtagtagttcatcttttccccatcacctttgatggtctcttatgtagggaataatagcttttcaaaatattccgtggggtaaagaactttactctgaaacttaagccttagaaattattcggcggtatgatagaatgaggctgggggtcatagctttctggccttgacatgggaattaactgaacaaaatccgagttgtaaagtcacttcctgattggctataaccgggcccagtcatctacattctcctcccgatgcaaaattgcttcaggcagcgaccaagtgactattttggcatcccctttttcactctcgtctcccacttattctcccgcaacagcgtccaccttttagccgtcacccaggaaccgtttccacaatactcccacgcactgtaccac

SEQ ID NO: 563402 - DNA, 340 bp, Homo sapiens
tgatttgcacactaccgcctctaactcctggcactcgaagattatcctcctgcctcttagcctcctgcgtcgcttggactgcagctgaataccacctctcccagctgcctagtgcgttttaatcactatttttgccctctgtgtctgaaggtccactgttttagaacgtatatataaagcactagttcatccttactcttcacttattcaaagcagctaaatcttatctttggcacctgcgcatatatcctgtgaaattacataatggctgtaatcagagaataaagatgacgctacattggatatgtcttcattaagatctattcaccgtgtccatgct

SEQ ID NO: 563403 - DNA, 398 bp, Homo sapiens
tggggaggatcatggcggagggtgaaaggcacttcttacatggcagcagcaagagagaaatgaggaggaagcaaaagtggaaatctgataaaacccatcagatctcatgagatttattcactaccacgagaataacatgggaaagaccagcccccatgattcaattacctccccctgggaccctcccacaacatgtgcaaattctaggagatacaattcaagttgagatttgaatgtggacacagccaaaccatatcaggctactcgggggtttaagaattcatattaacttgctctgccagagaaagcacaatttattaatttcagatctttccaggcagtttacaaactttttcctaccccagggcagatggcacatgtctttttattcagagggg

SEQ ID NO: 563404 - DNA, 123 bp, Homo sapiens
cgtgaatgcagcctgctgagaattcaccccgtacatcaccatgatcggatcccctatctattatacgttgtatgtttacataaatacggttcaatgatcattagtgttttaaaaaaaatactg

SEQ ID NO: 563405 - DNA, 117 bp, Homo sapiens
cctcatcgcttccagcctctagcagaatatagcccactaagtcctaactctaacactattcttaggcgctatcaccactctgttcgcagcagtttgcgccctttacacaatatgacc

SEQ ID NO: 563406 - DNA, 158 bp, Homo sapiens
ccaggcatattgttgaatagtaggctgatggtttcgataatacagtatgggataggggtgtcggtgtgccttgtggtacgaagtgtgccagggcatttttaatcttagagcgaaagtctataatcactgcgcccggtccattaggggacgcgccaatc

SEQ ID NO: 563407 - DNA, 772 bp, Homo sapiens
tcgagtttagtatatgatttattttttcttcatctatattaagcaatagtaaaactaagccttgatagggggacacttccaatgttttacattttagttgaattaaaagatatctccttttccaaaaataagacctataaatgatttgttttctaggtaactagtgtacaatgccccttccctctgtttggtagctaaaggtctacagttatgagaaaatggaataacataatggggtagaggccataaaatattttaaacacattaccaagttattttttctatcttctatttttaacgtatacaaaacatttattcattttgtgttaacaactttgttatttattcaggctgttgttaaatggtatgaatatttgaaaatttaatcctgattggtacaaggaggaacataaaaatattctttaacaaaaatggtgtcatgaccccattgttaaaagattaacctttttttaagggcttgttttggggacttttacttgagtgcttactataaagtgtgttatatggtatatgattcttatttttggaaggtataaattacattttcgtggagggggaatattgtttgttacggtccctgcagtttgaaaacctgtttatttgcaccacctctatcttaaataggaaggattcgcggggtaagaggttggactttacaggggctgacatgcattgttgcgtcacagatcatttggggggagggttttggtgcccaggcctttggttcctaaaaagtggagatatgcgggtt

SEQ ID NO: 563408 - DNA, 491 bp, Homo sapiens
ggctgacaacagaagcactgatgtctctcactttaaatcaaaagttagaaagtattaagcttagtgaagaaggcatgtacaaagtccagacaggctgaaaactaggtctctggcccaaatagttagccaagttgtgaatgcaaaggaaaagctcttgaaggaaatttaaagtgctactacagtgaacacatgaatgataagaaagcaagaaggccttatttctgacatagagaaaataaatatcaaaccagccacaacattcccttaagccaaagcctaatccagagcacggttctaattctcttcaattctgtgaaggctgagagaagcaaggaagctacaaaagacaagttgacgctagcagaagttggttaatgaggcataaggaaaaaagccatctctataacataaaagtgccagatgaagaagcatcaagtgctaacatggtgaaaccccatctctactaccaatatttacaaattagctggtgt

SEQ ID NO: 563409 - DNA, 570 bp, Homo sapiens
tgggagaggaactctcagaactacaggaccctaatatgctctcccaagtgctgggtgaaacgcagccctcaacttcagagcaacgttgacgtgggtgctttctgcagtaacaataggaagtttggccgggcatggtggctcacgcctgtaatcccagcactttgggaggccgaggcaggtggatcatgaggtcaagagatcaagaccgtcctggccaacgtggtgaaaccccgtctctactaaaaatacaaaaattagctgggcgtggtggcgcgtgccctgtattcccagctatttgggaggctgaggcaggagaattgcttgaacctgggaggcggaggttgcagtgagccgagatggcgccactgcactccagccctggtgacagagcaagactctgtccccaaaaaaaagaataggaagtttacgaagctccgagaaatttctgttttatctccaccctcctcatttccctgctttcagagcactggttctagccagacccagcatggcgtgacacggagacagtgcgctgcgaacagccccacaatctgtgctccttacccctgg

SEQ ID NO: 563410 - DNA, 354 bp, Homo sapiens
tttttttttttgaggaatttctttgaatggtagctctcagaatacgaagaatgttgaacaaccaggacacaagtaggacaggaaagaggatcattctgggaatccaggtagcaggaaccacccaacacactttacaggatgctgctatcacgagcatgcgctctaactctgttccatcactcgacccaagatggcagttctgggaactagagagcgctgccggccggcctgcgttgcatgcctgccccttggcaaggagggaagcatcttgacgacagttcctgcaaggctgcagccagtggggcaggcagagcgagatgctgctatcgaaaggtgaacagattgttatcaggg

SEQ ID NO: 563411 - DNA, 112 bp, Homo sapiens
ttagggctcattcaggggggccacatccacctccagtcccgggccaggtgtgagaggcagaccagcagagggacttgatcccttcggtgtctgtttggcttctgggctgggt

SEQ ID NO: 563412 - DNA, 488 bp, Homo sapiens
agagggcttgtgcgtgcgcacgtggggcgcttcacacattttacacattttcatttttacttagatacatacctttgaagttgttacccatcactacatagggggaatagcaaccctcgtgtccatcagcacatgagtgggtgaacaaaacgtgcccgtccagacagtggacactcgacagccgagaaaatgaaagagatgctggcacgggctacagcaccaaggagctgtgtggacgtcatgccgcggggccctgtctgatcctctcctgggaggtctctggagttcccagatctgtagagaccgaacgcagaatggcaggtgccaggctggggagaggccttcagtttgggaggactctggagaccggtggtgaaggtggacgcacagctgtgggaatgcggttcgtccgtcggacacttaaagatggtgaaaatggcaattttatgtattattttactacaattaaataaaatggatttttttag

SEQ ID NO: 563413 - DNA, 447 bp, Homo sapiens
agaatgagatcctgtcatttgcaagaacatgaacggaaccggaggtcattatgttaagtaaaataagccaggcacagaaagacaaacttcacatgttttcacttatttgtgggagctaaaaattacaataattgaactcatggagatagagtagaaggatagttatcagaggctgggaagggtagtaggaggctgttggggaagtggggatggttaatgggcacaaaagttagaaagaattaacaaggtctagtagttgatagcacaacagggtgactatagtaaaattagtttaattgtacttgttaaaaataactggcagactatatgtgggttgattgtaacacaaaggataaatgccttaggtgataagttttaaagaggcttcaccaccttccacgaaaaacagggaacacaagtatattgagtttgctcattgtgggcaaa

SEQ ID NO: 563414 - DNA, 1039 bp, Homo sapiens
tcaaggctgtactgagccttgactgggccactggactcgcagtactgggtgacagaatgagaccctgtctctaacagaaaggaaaatcatagaggactgttatccaaggatagaagatgaggccatgaatactgaggaagaggggcaatgatccagaaaacatagtatttgctcaaatgttatcgccaggtacgcaacagcatgcaagagtgacttggatgattcaaataatctttaaaagctggaagaaagcaagataatcaaggtttcatgtatgtattaagtaactatttttggggagagtgtacaacagtcgcttagtatttaagtgaaggagcctaattcaaagcaagtcatgaaaatcaggaagaaggtatggctgtagattaggcacgtaggcaatgagacagggatcgtgagaggtacagagatagcagggagagattaattgtgaagtccagagatagcagcgagtaatacatattcactgcgtcaaaggatgtccatatggaggaagttttaatgcataaagaagtaccaaattacggggggctgaaagaggatgccctgcacagaatttaatagagtaagttagaagggtgtctacctgcatgtgttcgtgagagcatatacaggaattgttaccgggaaatcgtggggcaaaaaaaaatattcgcaggtccccagtgagtttgagattaaataacactacttgtatataacacttaggtcagaagaagaagttacgaggagtgttaaaggtattggaggtgaacgaaattggcatgtgttcaacatgtgtggatgctccggacaagtaccctcagggagtgcgggaacgaccgagggagggggtggacggcagggaagcctgggccaggttgccatttgttaaaactgtcatcggcatgtacctgtaatgcataatgtgtaaaaacaaagggggattaaattgcaggaggaaagtgccgcgttgaaaagggcagaaataaaagagcgacaaatggtcaaaaagattcaacattggagtaaaacaaga

SEQ ID NO: 563415 - DNA, 862 bp, Homo sapiens
tgcggtggctcacgccaggtaatcccagcactttgggaggccgagatgggtggatcacctgagatcaggagttgagaacagcctgaccattatggtgaaaccccgtctctactcaaaatacaaaaaattagccggacgtggtggcaggcgcctgtaatcccagctactcgggaggctaaggcaggagaatcgctgtgaacccagaaggcagaggttgcagtgagccgagatggtgccatgtgcattccagcctggacaacaagagcaaaatcgatctcaaaaacaaacaatcaacatcagaaaaaaaaaaacccatagatctaagctggatttttgtaaatcccccagttgtaactatttcaaaactttggtggacataaagtgctcataattagtaccaaaggggtctctttcacaagatcggtagtgtacgaccggtgactaatgctgtgtgctatttcccgctgggggactacgtggtctagatgctcggacggaaagtacgagagataagctacataggactggttgctttctataaagtacagactaaataaagagccatcagagccccgggcgtggcttccaacacattacttggtttccatacaggtagaagtttcactattcaataccagattcttaaagcctcaagttaaataggttcctaacagccatgggctacataccgtccaccacctccgttttgcaacggtaaacctggtcgcttggggcctttcacgatatccataactcgcattatctctgactgtgacagcgctttttcaacatgtacaggactgcgcgttatcgggagaaaggacttcttacccaaaattcccggtgagtcttaaccatatat

SEQ ID NO: 563416 - DNA, 636 bp, Homo sapiens
gacggctcgcaccgcccaccctcccgggtaccccttccggagccccgcagaccggctaccgtcctagattctggctcccgttctacaaggggagctggtcaagagggaagaagcctggaccctagccattctggcaccttctggaagtcaactgcgcctcgtccgatccagacgggacgtcccctgatggtgggctagattctgagacgagatctgtccctgaaggaaggcccgacttaagcgagcgtggcttctgatgggtatcctctgtggcctagccactgaagcccacattttctagggggtgtctgtcactgctcgtccccggagggccgagatagctgaccccagctctcaaacgagttccatgccgtggcgtccgtggctttgagcctgggacctgtgggtccgaccagctaggcccggaggccctaaggagtctggtgctgccccctgcccgacagggcagtcggatgaggcagacggccccacacactgtgcctgaggcccggaaccgttcgcaccctggcctgccccagtcaggccgtagttagaagagcttttacttgggcagcccagccgtgtctggcgcgaacactggaatgcatatactactttatgtgatgtgtttttgat

SEQ ID NO: 563417 - DNA, 1386 bp, Homo sapiens
  misc_feature (1041)..(1041): n is a, c, g, or t
gccgcgtctctcactttctggctcggtgttggcgtggttgtctgttctctgcttttgggcgccgtttttcttcccttgtcttctttgtctggttttttctgtttctcgatgcttctttttgtggtgcgtgcgctgttctttttgtctcgctcgcgtcttgctccttcttcggtgcggttcttttttgtttcggctgttgttgctgtgtcttggtttttgctttttcttcgtgcgcttgggtgtggtcctgtgctgtctttttcttgtgttgttcctcttctctctcgtctgctcgtttttctttttgtgccttgtctgtgttgtgggtcttcctcgttgtttgtgcgttttttttctgttgtgtttggtttgttgtttgccctgtctcttttcgtctctgtcggcggtctctgtgcctgtgttgttttctttgttgctttttctttttgttgtgtgtctttgttttttttttttgctttttgttcttgtttttgttttgttgtttgttgctttctgttgtgtttttggtgtgtgtgctttcctttgttgttttgtcgtttttgcttttttgttttctgtggttttttggtttgttttgtttttttctgtggcgtttgtgttttgtctttgtcgttttttccgtctgtttgttttttcccccccggtggggaggtctaactatttaagcccggggctttcgtttttagtgggaccccgttcccggttcccccctggggggacgccccctttcccccccctgttttttgcccccccccccccggaggttctactaactcgagggcagcggacttccgtgttctcctcggaaccctttcacgcattcggccctccgggggagccccgcgattccaccgcctggtgctttcgcacggtcccccttggctagtagccccccgcgggggccgctttcctctgcctccgcgcacttttttggccttagggctcgccgggcggccggatgtcacccgattgtgtcacccccggcgcgagcacttttactcagccacattatggccgtanatcctatggcgaccccatattatgtagccatctcttgtaaccaactgagaccggactgtgctctccggttccggtattttcccgcgcgaggaattcgtcgagcccaccggattcaccagattctgtagttccttaaaatatctgacttttttcacctactaatacactaaaagggaaaagttttattcttttattgggacaccttcacgctgtaactcacatgtatttaaatatggagaatgtgaaatgctatataactctttttatatccaaagttctccagcacttatttttattttatgccttgtttgtcttttacataaataaaatgtttattagattgga

SEQ ID NO: 563418 - DNA, 582 bp, Homo sapiens
  misc_feature (525)..(525): n is a, c, g, or t
ccgagggtcagtggccactgaaggtatgaggcaaggcaccgggctgctggcaagggccccaaccgcctccaccaccgtgcgcctcctgtgcgggaaagaggaccactggtgaccagcagccaccagaggcccagtcgctgcgagtacctctatggagctgatgacagccagcgcgcctgcccggaggccaccgcgctgaagcaacacccaccgaagacggccatgagcgagcttctagctggatgggcgcatgagaacctcaagaaggcatgaagccagcgccctgctagtgccgtgccacccgcgcccttctgggcctgacctgtggctactgttgccctcctactgtggcggcaggacctttgtggggcttcgtgccctgctctggggcccaggcggggctggtccacaatcccaggccccaacagccttcaaagatgggtaaaaggagcttgccctccctgggccccccaacctatggtgaactcgccccagccacccccaggcctgtgcctgccaaccctncctaatggggaactagtgaatgaaccgtagagacgcgcgtgtgagacgctcgtcaca

SEQ ID NO: 563419 - DNA, 1023 bp, Homo sapiens
gttatacgtcctatgttacatttgctaggataccatggatgtgtacctccagtagagtcagtatttctctaataactgtgtcagggtcgctccacgaccaattttatatcaatttgaaattaggttagtttgagccgtcgttcacactgcaacacaagggttcccggtggggagcctttcgccgcacctggccgtcgccggttacaaccacagttttccctggaacgctgtcctggcggataagacataagaaggattcatctacttagcgggttctgctgtctctggctgggctggttgttgaaggatgggcttaggacggaactgtcatgctccctttccaatccctgggggtcacagttgggacttagatggcagataccagaggaaagacagccgggatgcaacgcatctggagaacacacagaattatgcaggaacaaagacatacactggctgcaaacatcattgctgtttattagtcaccttaattaataggcagatttgcatttctatgagtagctctcagccaagggagacaaggtactgtagacactccagtgacttctgttgagtttgagaaggcacaagggctcggggcagcgtgaggtagggcgtgggggacccctccatggctcttaagaatggggctgcgcgcatgccctccttcgctaaaaatccttcagctccaacaggtctaggacccaaagagatgaggagattgatgttttaggaaccggatggtgctttgttttattgcatgtacttaaatcgtgatgataatatcccaccttttcatggtcaggtgcggctggctcacacctagaaacctagcactttgggagggctagaggagggtggatcacaaggtcaggagttcaagaccagcgtggccaatatggtggaaaccccgtcatgtactaaaataccccatatctttagtatttcttatttagcctccatacttgggagactgaggcaggagaacttgcttgaacctgagttaagtcgaggttgcagtgt

SEQ ID NO: 563420 - DNA, 110 bp, Homo sapiens
ctcattatatctgagtaacattaagatggaaatcaaatttaaatgcaagatccacatctgatatataagaagaggacattatggttcagactcccaaatcatcgattgct

SEQ ID NO: 563421 - DNA, 81 bp, Homo sapiens
taaaatgttgaaccccccccccccccccttttttttttttaaaccagggatgtttgttgaaataaaacattcagtttgcca

SEQ ID NO: 563422 - DNA, 1120 bp, Homo sapiens
attagccccctaataaaattaatttaatccacttcattcatcgaccttccccaccccatccaacatctccgcatgatgaaacttcggctcactccttggcgcctgcctgatcctccaatatcagccacacggactattcctacgtccatgcactactcaccagactgcctcaaccgtccttttcatcaatcgcccacatcactcgagacgtacattatggctgaagtcatccagctacctttcacgtccaatgtgcggcctcagtattctttattctgtcctctttccatacacagtcgggacgtaggcgctattattatcggatctatttctactactcatgaaaccttgaatagcatcggcatttagtcctcctgcgttgcagagccattagcaagctatgccttcagtaggctattgtcctcccgtgagaccagaatatcgattctggaggggccatcagtaatttacaaacttacatatcgcgccatcccatacgattagggacagaccttagttcaatggaatctgaggaggctactcaagtagacagtcccaccctcgacacgattctttacctttcacattcagtcttgcccttcattattgcagcccgtagcagcactcctatctcctattcgttgcacgaaactgggatcaaactaacccctaggaatcacctcccattccgataaaatcaccttccatccttactacacgaatcaaaagatgccctcggattacttctcttccttctctccttgatgacattaagactattctcaccagaactcctagcgaaccagaaattataaccctaagcaaccttaaaaacccttgccaaatttagccccgaatgaagattccctatttgcatacacaaatttcgattccgtccctataaaatatgggggggggctgtggccacataatatgcacgcgccaccattagatattgcacacgctctttttataaaacacgactatatttttgccgcaagaacacctattgatctcaccgcgccacttttcaatatgagagaagaaccctttcatgagggagcgcatataaacaataacaacccttcgattagtgggaaaaaaaaactgttctagctga

SEQ ID NO: 563423 - DNA, 151 bp, Homo sapiens
ttcctcaataaataatagtgtactacacatgtaatcatagaccactttacttgctagtcagatggcttcgcaaaatgtttctgcagttgaacatctatcagctatgcctttctatttcccacaaagtaattccttagatattttactagta

SEQ ID NO: 563424 - DNA, 194 bp, Homo sapiens
tacggatgcattcactgtgtgcttggagcgcccattggtatacccgtaaggagcttggttctatgcattctaatttgaggtcccacacaggctgttaatcaatttttataagtctgaaagcctcagtttcctcctctgcaaaatggaacaaattactgtccgtctcaagagaaggacgtgaggagtcccatgtg

SEQ ID NO: 563425 - DNA, 323 bp, Homo sapiens
cgggtggatcgcttgaggccaggagttcaagactagtctggccaacatggcgaaatcccgtctctactaaaaatacaaaaaattagctgggataggtggtgcacgcttgtagtcacagctactcaggaggctgaggcaggagaatcgcttgaacccgggaggcggaggttgcagtgaactgagattgcaccacagcactccaacccggcgacacagcgagaccctgtctcaaaaatcacaaagaaaaaaaaacggagagagaggtggcaagtcccgttaaagccttacggtgtgaatgtgctggattgtgtgtgccaccctca

SEQ ID NO: 563426 - DNA, 238 bp, Homo sapiens
gtccaagagcccctggcaaaccactgatgtaagtccaacagtcctaaagctcagaatttggaatgtgatgttttcagggcaggagcatacagcataggagaaagatgagggctggagactgagcagtctgctaatgcaccttctttgcctgctttttctgctctctggcagccaagggatagtgctcaccagattaagggtggatctgctctctagtcactgattcaatgttatctct

SEQ ID NO: 563427 - DNA, 271 bp, Homo sapiens
  misc_feature (229)..(229): n is a, c, g, or t
  misc_feature (251)..(251): n is a, c, g, or t
  misc_feature (261)..(261): n is a, c, g, or t
atccaaccaccttggcctcccaaggtgctgggattacaggcatgagccacgcgcctggccttaattttgtatttttagtagagacagggtttctccatgtaggtcaggctggtctcaaacacccgacctcaagtgatctgtccacctcggcctcccaaagtgctgggattacaggcatgagccactgcacccggccaaaaaggtgtttctacatcaaactcttccattnactgaagaaaatagcttatatnaatccttcanaaagcatgct

SEQ ID NO: 563428 - DNA, 204 bp, Homo sapiens
  misc_feature (191)..(191): n is a, c, g, or t
tgaggattccggtccgctcggaccatctcggctcacttaacctctgcctctcgagttcgagcagttctcctgcctcagctttcgacgtagctgggattacaggcatctaccacaacacccggctaatttttgtatctttagtagagatggggttttgccatgttggtccgaggcggacccggggtccgagnctcgaaattcgta

SEQ ID NO: 563429 - DNA, 324 bp, Homo sapiens
tccataatgttgcccaggttggtctcgaactccttgggctcaaacagcaagcagtccatccaacttcagcctcctaaagtcatctgggattacaggtgtgatgtcactgtgcttgggcatgttattgtttctggtaaaaccccgagtagtacatatttgaggctgtggagctcatgtggttgtaactactcagctcggccatcggcaaacacagagcagccatagacccagacttaactgaatgtggacgtggtgagcctagagtaaaactcgattcagaaaatatgggacacacatatatggagggggacccgggactcacat

SEQ ID NO: 563430 - DNA, 284 bp, Homo sapiens
tgaggcagggggatcccttgagcctaggagttcaagaccagccggggcaatatagtaagaccccatctctgataatagtaatgataataggaatgaagtaaaaatttagaataataaaagtttataaaacaaatcttgagaaggggaaggagagggctgagccaggcacagtggtatatgctgtgtagccccagctactgggggggcagacgcaggaggactgcttgagcccaggagttaaataccactgagcctgggaacacaccaagacaccatctcttaaa

SEQ ID NO: 563431 - DNA, 279 bp, Homo sapiens
ggcgattgcggtaattcccgtggcactttcgagagcatagctcggaatgaaggagtagaggtgatcgcccgaaggacttagggcgccgagagcagagacgtgggggaacaccgccgttcccttcgggccggtgatgcggagagcgaggtagatcccggcggagttttcgtcgatgggaaaggagccgggctcgtaccggtcggggtcggaagagacgccgaagcggctacccgtgaacacgatctcgaggtgccagctttggcctgcacgatcccggaa

SEQ ID NO: 563432 - DNA, 250 bp, Homo sapiens
gctcgaccaagcatcagaaccaaattcaagatatggctagagatgttggtactgtctcttcaaactgtgtttttccttttagtatgcctcgtaattttttcttgataactggacataatgtactgggttaaagaaattgctgtgatgttcctttagtaatgtgatggtaaggtgtatgtataggtgggggagcattctatagtcctatgattaggtctcagtcttttagtgagcctgtgcctctggatgt

SEQ ID NO: 563433 - DNA, 150 bp, Homo sapiens
gaattcggtcacgagtgtcttgtttcttagattcatcttatggattcttgtaaaggttgtttgtgaaattaggtttccccttttaggatctcaggagtagttgggtaaagacaattcctcctgtcaatcgataagacagagcttgttaac

SEQ ID NO: 563434 - DNA, 112 bp, Homo sapiens
agtggagagtgacttagaggatttacccgacagccacgaagctgtacgaagcccaccacctgcaggcacgtgcaccatggtggccgccagtattcccgtgctcgcccctcac

SEQ ID NO: 563435 - DNA, 593 bp, Homo sapiens
gcgctagacatcactacggagaggctgacagcggcaggggcattggactcagatcgggtgcagaggcgttgtgagtccgtggatgcaagggcctgaggagccaggagagaagtttcggaggctggcaggcgaagggggtgatccggccttgccccgaccccggctgtatcctgcagcatcctgctatgcccagcccagatgtggtatacggggccttaccgccaccaggctgtgaccccagtgggcttggggaagcactgccgcccagagccgcccatctcccttccgaccagcagaccacaaagccgggaccccaggactggtgcaccactcgtcttctcaccaagcacaaactcaccagcaagacaacaacgcccacctgtacctgaccgacggaagggcggaggtcagacctgcctgagtggccatggctgggacccgaggggtgactagaacacctccaaaggctcatacagctggccatgcagaagaccactgctcccactgcaaactccacgagagcccacagctggggagctacacacatatgctgacaaagaggaaaaacagaagacaacaggaaggggagcaaa

SEQ ID NO: 563436 - DNA, 342 bp, Homo sapiens
agtggtgtgatcctggctcgctgtaacctctgcctcctgagttcaagcgatccttctgccttaatgtcccaagtggctgggattacaaacatacgcctgtaatctcagcacttgggaggccgaggcgggcagatcacctgaggtcaggagttcaagaccagcctggccagcaggtgaaaacccatctctactaaaaatagaaaagttagttgggcatggtggtggtggcaggcgcctgtagtgccagctcttcaggaagctaaggtaggagaatcacttgaacctggttggtggaggttgcagtcagcctgagatggtgccactgcactccagcctgggtgc

SEQ ID NO: 563437 - DNA, 421 bp, Homo sapiens
taccgtgccgtcgttcaacatcggtcgtaattggaaaacccctgtggtttagcagctgcttatatgctaacatacctcagaagaatgaaaaatacaggtaatcgttctgagcctcagacatgaaacatatagccaggtttgctttggccagttgggccacactgatccattgttgtgcacaagtctgtcaaagagaaagcatgagtttcatctgattaaatcatggcacagatttctaagtcttgaaatatcatgagcaataagcggtttataatcaacaaatcagaaaatgtaaacaatctgatgtgcaaatgctaaaagaatgctgagaattaagagagtctggggaactagagatatagtgtaagtgtatcattagtgtgcagcttgccatgtaaggaatacagattaggaatttgga

SEQ ID NO: 563438 - DNA, 498 bp, Homo sapiens
  misc_feature (76)..(76): n is a, c, g, or t
  misc_feature (99)..(99): n is a, c, g, or t
  misc_feature (115)..(115): n is a, c, g, or t
  misc_feature (132)..(132): n is a, c, g, or t
  misc_feature (170)..(170): n is a, c, g, or t
  misc_feature (178)..(178): n is a, c, g, or t
  misc_feature (197)..(197): n is a, c, g, or t
  misc_feature (216)..(216): n is a, c, g, or t
  misc_feature (224)..(224): n is a, c, g, or t
  misc_feature (229)..(229): n is a, c, g, or t
  misc_feature (246)..(246): n is a, c, g, or t
  misc_feature (267)..(267): n is a, c, g, or t
  misc_feature (271)..(271): n is a, c, g, or t
  misc_feature (283)..(283): n is a, c, g, or t
  misc_feature (295)..(295): n is a, c, g, or t
  misc_feature (298)..(298): n is a, c, g, or t
  misc_feature (307)..(307): n is a, c, g, or t
  misc_feature (309)..(309): n is a, c, g, or t
  misc_feature (335)..(335): n is a, c, g, or t
cctgtctgaggatacccagggagatgctgtccagaagacagagacattccaccatgagcaggatcacccaaccttnaacacgatcacccccaacctgtntgagttcgccttcagnctataccgccagctggnacaccagtccaacagcaccaatatcttcttctccccantgagcatngctacaggctttgcaatgntcttcctggggaccaaggntgacactnacgangaaatcctggagggccngaatttcaacctcacggagantccngaggctcagatncatgaaggcttncangaacttctncntacccttaaccaggcagacaggcagnttcagctgaccaccggcaatggcctgttcctcaacgagggcctgaagctagtggataaggttttggaggaaggtaggtggaccactcagaagccttcactgtgaacttcggggacaccgaagagggccagcagatcaacgattacgtggagaaggggctcggg

SEQ ID NO: 563439 - DNA, 1191 bp, Homo sapiens
gcccgggcactccccgccaggtcttgctgccggggtcttgctgccggggaggcccagtcctggtgggggaggctcattgggctgggacctctcccctcagcaatgaccccaggcaacatcccctgccatggaccaagggatggcggtggattggagcccaaaggaccagacgccacagcatcctttccacagtacacattgtacacctaccatagtcccctatttcggctattgttggggtaatatcaggtcattcccagacttgcaagtggaacacagcaccccgagatctcgaagaccccggagcacccgagcatatcgtgatcatggaacatttgcactcagcccgtagatataccgtcatcgttgacaggagaaaaagaagaaaacaaaaactagaagcaaagtaggctccgaacgtgcattcctaggaggagacccaccagcgcacacgagccgggacgcagacgcagaatgcacaagaggcgactgtagtagagccagcagaacacagaggagggcgacaagaatacagaaacagacgcacaagaaaggtgacaagccgacagaagccttgggaagacaagagcagggcacacgagaagattaccccgcatgaggggacagacaacccgcaacggacaacaaaccacaaagacgaaggaaacgagcacccaaaactccagaaagcacagacgggcggagaaaaagagcaagagacatcgagaaagagaggggcgaccagcaagagcagaaacaaaaccccgagacaaggcgaggcacagcaacgcagcaaccacgacacgagacggagcaagcggggcggggataacaacagcgagcgataacaaagagcggcacacatagcgaacgagagaacacaacgagagctcagcgcagcgcagagggaggcaaaaaccccagaaagcgggacgcagagaaggcgaacatgacgaacacacatacacaacagaaaccacacgcaacacccggagacaaacagaacaaaacgagtgacgaaccggacaagaaaacacaacaagacggcgctcagctaagcagcaccagaacaaaagacggcagccaacgacaaaccacccccccgcgcagcaggacagcgggcgacgcatacccgaagtagcaacagacaaccaccatacgaggatgatagatgaaaataacgagccgcag

SEQ ID NO: 563440 - DNA, 401 bp, Homo sapiens
  misc_feature (288)..(288): n is a, c, g, or t
gtgtgtgtcctgtgtgtctgttgtgtgttcgcgtgtgtgtgctgtgtggggttataagcccagcacctccaggtaacaaccacagcgtcagactcagtttgctgagtggtactcagcacaggcactgtgctcagcatcccacggcctccacgagcctccggtttaagctcacacagagaactgctgccagaacacattttacagacggggaaactgaggtacaagacacacgcaatgggtctcatctgacgttcaccagcaatatactttagccgagtcaggatcagnaagcccactgtagccagtgcaagcagcgtgttgtgcgctgtgctggcttgagaagccaagtctcaggcaggtgttacttaccacggcggagtgtgcaaagggcaccgagaggt

SEQ ID NO: 563441 - DNA, 959 bp, Homo sapiens
ccggatcacagtgctgagaagtcgaatacgcttcatccattaggtcacaggatgtgtcctgggctcctcgggaaaggttctgcccaagatggggctgggagcagttggaagttacttgcaccccatacctgaacagaaaccctcaactccatctggaatgtggaggcacatatcaatcccaagttgccaaacatcagcctggatgtgctacagacccagattacctgagatcttgcatggaatcccacatggtcatgatccgggggaacagtggacatcaaacccaaggacaatgcgttcaagtccaaaccctggcactggccatatcaaactatcagggaactatgacttatcaggggtcaaatgacaaagatttacacgagatctatatgaattggaaaaccggtggatatggtggatgaatcatgttgagcatcagaccatctaccatccatctccagggtagaaatccattgcatgatagccaatgccagcagagggagcaaggaatggacagaagcgcagagtaggcaaggtcagagatccatctgaggcatctcaactccaacatgaccatggacaggacagaaagaggacacactgacaacccccatggacgaagggacaggctgacatgactgaatgaggcacaatcaattagcattaacaaaccaaacaaccattacacataaatacctacgacacaagaacagcgaaaccaagggaaccatgacaaatcacgcaacaaaacaaaacaccaaggaaacaaacagaagaataagggaatgaacccgagagaccccatgaaatgacaaatgaagagatggcacaagagcctcgaatcaggacatggacaaaaaccaaaaccaaaacacggtataacctgtatttcgcgacgagaaccacaacagaacaacaccaaagatgacaagagcaatgcacaacacaacagccaggtg

SEQ ID NO: 563442 - DNA, 150 bp, Homo sapiens
caaaggtacagtgtgatgcagcggtacacagacgtcattaccacacaagtatacatccattcatcgtgcaataatatgcatctcttctccaaaggtagtcaaaagtattaagtcatcaaataaatcctcacaattaccaagcaacactta

SEQ ID NO: 563443 - DNA, 983 bp, Homo sapiens
ggtagcgatggcggctgggccgagtgggtgtctggtgccgcgctgtgggctacggttgcctgtgtggcgactgtgcttcaagcggtgtctgcttatggggcacagttgacatcgggaggcgatgcagagcagtttagcgctttgtctaccaactttgctttgcgaggctcttgttgatcttgctcggtattagttgaacgctgtcttcagctgtgtttcctgtattgccgaggcatgctgtccagggaggaagcacaatttgagagaccaaaaccgtctgtatgcaggagctattcttgaaacgttagtggcatcgaaaattggcaaggttcccgtcattcgtccagggctctttgcttagggatgtgattaaaccgcagactgttcagaggactcgtcacattcttcgtcctgtccgtggttcaggacccctgttgcttaccgtgcttggtgacgaatagatggggaacatgggtctgtgagaactgacgtgctttctctaagtggaaccgcatgacggtgtatgaagacattcctgttgtgatcggttggaacgcatatgaatctttggttagattgagtctatgctttgggttccttatctattgaagtagttactggcctctacaaaaataagttaggttctggtgagtccaatggagtcacgccgtttacgtgaggcattaaatctctgaagcgtgaatggggatacgccagccaactaagagaggtggcacgtacgaaaccattttggtaccgtcgccctcctggctggggtaccgtacaaccaggtttcccaccgcgcgaaatgacacgaactggggagtggcccaggtcaaaaacgagtccctcacggggagaggcagcaattatccactcctcggtgccgacagagagccaacacacataaatagacgaggcggcggccacagtacgcggaaaaatatcaggacaggcacacccacaagagcaacaagacctaa

SEQ ID NO: 563444 - DNA, 951 bp, Homo sapiens
ggcgggtttttcggagcttgggggtcgtgcagatctgcgtggatctaggtgcaggagtctcattgatggtctgagcctggcgtggccaggctggtggtgtcccagaagagccagtgagtcgaagatgcttgcatggaacaaccaccctgggcttcaagttccgacatggagtcatatttgccgttgactccagggctaccgcggggtgcttacattgactcctctacagtgctgaactagaggtgatgaggagatcaacccatgacctgctaggcatgcatggtcgtggtggcgcagctggattgcagcttctgggaacggctgtcgggtcggcaatgtcgaatctatgagcttcgaaatcaggaacgcgtctctgtagcaggtgcctccaaactgcttgccaacgtggtgtatcagtacaaaggcatggggctgtccatgggcaccatgatctgtggctgggataagagaggccctggctctactacgtggacagtgaagggaaccggatttcagggggccaccttctctgtaggttctgagctctgtgtatgcatatggggtcatggatcgggggtattcctatgacctggaagtggagcaaggctatgatctggccgtcgagccattttacaagccactacagagatgcctactcgggaggggtgcagccacctctaacacgtggggagatgggttggatccgagtctcagtgacatgtgcgtgatctacctgagaagtatagtggctctaccccttgaagaggggggatgcgtgtgggttttgggggaggcatggcaaacggaccgggcctcccctccatttagggaggcgcatggtcggattttaagctgggctgacctagttccgctaagaggcgagggatgtcttggggatcccctcaaaaaacaaacaaaaaaacctctgggaaaagatcctagattgaacga

SEQ ID NO: 563445 - DNA, 925 bp, Homo sapiens
agcaggttcgaaagttcctgtgtgcagaacagaaggctggtgtgtgagtggtgggagtcgggtgctaaatatttctactagtgctcctgcaaggctagtgatgcagctggtgccccccgacctggctgctctgccctggtgttcttgctgcctacagagtttggcctgtgagcatgatcctgctgcctggctgggaggcctggtgtctagtgctctccacgacaatggattccaatggcgagaacacttggtgcctcttgccatgggccagtggacgggacttgaaatcagagccagggtgagtgcgtattccccacaatggggcttgtcagcgcttaatgtggtgcctgtgtgaagccagaggttgggcgaaagctcgaggacgcaagaagttggagagagtgttgtgcttgcatgttggaagtatgcagatcagagtgacgatatgaagagtagtctggattgtcgtgggacaggagttaagtctaactcgaggaacggacacgaagggcggattgtattggccaagcagggtgataccgtgggtcactcagcgcacatggcccacagggcgctaatgccggaagcaaccggccgggcccgagtgaacaagggctgggccatgcacctcggtggcctgctgatgctgagcgggaacctatcttacctccgagaggagcacaagacgcaccccgtggagggagattggcccttgtgagcagacacagagtggtgcacaacacatggatacgcgaaagacgcacggtcacagcggacccggagagaaacggcgaagggacaggcaagaacgcaaaagggatacacgcatatggggacagccggacaaaggggagtacagaccactacgcggggggacaagtggacataccggagaggtacggaggggaacaaacacgacacaggg

SEQ ID NO: 563446 - DNA, 404 bp, Homo sapiens
  misc_feature (9)..(9): n is a, c, g, or t
ctgagctcnctagatgtgaggagttaaaacagagtgctaaaagagtggtgtttcacacgttcactgtggtgtatcatcaggacgcgttcatgcagctgtgacatgacctactgagagatattctcagaagtgacaatttaaatgtagggaagaaaccggtcgagaagctgctatgctgtggctagaggatatacacagaatcacgaacccaggatttggcttctgtgtcttagccaaatcagaattgatgcactttcagaagtaacacagagagcttggtttcaagggctggcacccaatgagaagtcagaggtggttcaagggctgtgtaagtgcatgcgccaagtttttcaaaccaagacttgggatgactcaagaggtgatgtttcattggagcatcttcg

SEQ ID NO: 563447 - DNA, 165 bp, Homo sapiens
cttctctccaactctgtgcgcatagcaactggcattgtgttgcttgtaatgtttctgcatgtggcgagcattatagaatgctccaggccagagaatggattgctgcatgatgccagggactgtcaggagtgctgggacttgtctttgagcagagctccagagaag

SEQ ID NO: 563448 - DNA, 412 bp, Homo sapiens
agtcgtggtcccatcagacagaagagataagaacgcaattctgtgatgttgtattataagcaaagagagagtggaggacaaaaatcaggggggagacaaaaaactggcttctgcttgctttgatggttatcaggcattcacccaacaatgcaacagagatggcactctcagacaatgcttttgtaacaaaaggttaatagtctacccagggagcccaaagtgactttacacccaagagaactgtcaggtatgtgctatgtagaccactgctacccaggaacatggcttgcataggcaataaataagcaaagctcactgttcactcaagcaggctgagccctgtgaaaggcaggcgtctgctgctcgagtcttggctaactgcgaagatggcaaatcttcatcctctgatgca

SEQ ID NO: 563449 - DNA, 387 bp, Homo sapiens
ctctgacgagctttgacaatggtttatcatcagcgcacattattgagcactagctgtgtcaggcctgagtgaggtgatgtgattgtgtgccgtacagacaatgcgaccctagcaaactggtgtgctgaagaccatgcgtgctgcttgctgtggggagaggcttgacaggtgcatctgagcagggagagcagggccccatggaggagaacacagggaagagggttggcaggcacagctgcatgcctctggggttgctatcctggttgggaccctgtcttccagccaggtgtatccccccaggagccctgtgccagggagctctcagcagccttgcatgctgagccagggctactgcgcaaacctgctgtcctcctggagatggaaagg

SEQ ID NO: 563450 - DNA, 777 bp, Homo sapiens
tccttttggaggcagtctgcacctccagccttgggcgacagagcaaagactctccattcttcacaaaaaaaaacaaaacaaacaaactcttccgcaatatataacaggggagagcattgcgggcgcgcctcatatagcgctcctttttgagcgaccgcgggatctatagggcgctacattccaaatttgaggagaattcgggctatcccctatgttgaaattgcgccctatcaacattattcaaacaaaaggcttattattccattagaaaatctcatatctggtatcaccaccaatggggacatggcgcattacacttacatatttagcccccaccaaacctccttgtggggcctacaccaggggccccagggtgacatctctttagctaggagcatattattaacattttcaacccctcttgcgggggggctaccaccagctggtttcacaaagggatattactctccccgggaaaaaaccacgggggtagtaccctccatatgaggaaccacttctatctaaagacagaaagttacttgggcgccaactgagagtactctcgaaaatcgaggagtgatgacccacacacaagaggttgcccacccccttgtgtagcccccccgggagggggacacgccacgcgagagaaacaacacgcggaacaacgtaggaacatattgaacccccgcgggggaacaacaggaggacccccgcgagggccaacaggcccaccacgagatgagcacggaacccacaaacacgtgattgataccc

SEQ ID NO: 563451 - DNA, 381 bp, Homo sapiens
  misc_feature (16)..(16): n is a, c, g, or t
  misc_feature (33)..(33): n is a, c, g, or t
  misc_feature (56)..(56): n is a, c, g, or t
  misc_feature (69)..(69): n is a, c, g, or t
  misc_feature (291)..(291): n is a, c, g, or t
  misc_feature (305)..(305): n is a, c, g, or t
  misc_feature (362)..(362): n is a, c, g, or t
  misc_feature (368)..(368): n is a, c, g, or t
caccccaaaaaaaaanctgtaacgtgccccaanaaatcccctaaggcgctcttganaagtgcaatgccnatgaagactggtttagaacaccccgtgaaccctagttgcctgttgtcacggcatcttgcactttaggagactaagaccgtccctggttcgtctgtgtgtggtgtgacccaatggtgtgcccagagcactactctcaaaatcactagtgttagcaagtcgtcccgggctggggagcgttcgccgtagtctttggaagctttggctttagatttaccaagcccngcctccccgctgcnagtgccctgctctcccgttcgcctctttctgtttctgtgtgaactttcccggtaatnataaanagttaaataggtt

SEQ ID NO: 563452 - DNA, 160 bp, Homo sapiens
  misc_feature (11)..(11): n is a, c, g, or t
  misc_feature (48)..(48): n is a, c, g, or t
  misc_feature (126)..(126): n is a, c, g, or t
tattatctagncattgcatgtttatgttcaaattaaaacagggagtgngcaataggcaagttatagaagtggaagcctaaaaaaaactccatatcatttgaagggaaaaagttgtgttacagatgncagctaacgtcagcctttgggtggtttaaaggtt

SEQ ID NO: 563453 - DNA, 927 bp, Homo sapiens
  misc_feature (206)..(206): n is a, c, g, or t
  misc_feature (290)..(290): n is a, c, g, or t
  misc_feature (300)..(300): n is a, c, g, or t
  misc_feature (362)..(362): n is a, c, g, or t
cagctgcagcattatagagcaattccaggagtagtacagaaggtaaaccaagttcagcaagatagcacgctagtaatcaaacatagctaatcccaatgaacaaagtgcgcttatctattgataacgcattagacacgcagcgttgccacaattgcgtgcatgaaaatcgaatgtagatagtagtctacgaaactcaaacaactacntgcttctactcttctatcttaccacaacgaggtctcgttggcggtaacagtggtcaacagtacatgagggagtcatggacattntgacctgagnaatgctaatggatgaactttcatcgatccatagctcgaaatggtccaagccttaacctactnggtggaaactgggatcccttcagtaatgtgtactgtacgaaaagttacttctagcagctgtgttaaggcataaagacgaagctttgataaaatactagctaattagaaaggacttgcagaaaacagcaagacttatcactctcgaagtagatgcaaaaggtgatgaggattgcccgtgtattgttcccaaatttttgaatgcagtctcctggtcatgcgtaatcgagacaggtgcttagtgtcttataccattgcccgtacagtacgcttcgtgtcgcggtagtcacatcatagtacatgaaggtgcctttgaaggaacttcggacttaccaagtgaatagatccccacgagaaagcaagatatgctcccttgacctgagactgtcccccccttttagttatatacccccttaatacaagatatggacctatttcggagctactttccaaaagaaattctacaaggggactcgatcaaagattgggtcactttcaaagacatggtttacgtaaacgccaattttgggaagtgcgagtcgtaaatatgtattttcgtccatgccaa

SEQ ID NO: 563454 - DNA, 269 bp, Homo sapiens
tatggaggaaactaggtaaagagcacacagaatctccctgtatctctttcttttttttttgtttttatttgagacagagtctcgctctgtcgcccaggctggactgcagcggcgcgatcccggcccactgcaaggctccgcctcccgggttcacaacattctcccgcctcagcctcccaagcagctgggaccacaggcgcccgccaccacgcctaactaatgtttggtgtttttagtagagacagggtttcaccgtgttagccagtacg

SEQ ID NO: 563455 - DNA, 156 bp, Homo sapiens
ggagctggtaccgaattcgcggtcacgttggggacaggggatgccccggtccacaatctcaaagcccaaaaagctgaaggttcggagcaaggctggctctgtcctcgcggttcttgtggaagcaaatgaagacatcccaacggtgaccggcgactt

SEQ ID NO: 563456 - DNA, 145 bp, Homo sapiens
cttctctcttcatcccatgtggctagaacatggctggagttcagcacccatagactgtgccattgccttccttgtcaaagacactgcagaccctcaacaaagtcttcacagtgtggcctggtccttgtatgtttggaaatggctt

SEQ ID NO: 563457 - DNA, 729 bp, Homo sapiens
tgggatgtttttatttttcctcatggcaaaataaggcccaagacttaaaaatcttcatagctgcttttttctttcttttaaatttttagttgtggtaaaatacatctaacgtaaaattttccatcttaatcatttctaaatgtacaatgccatagtgttaactatgttcatattgtggcgcaaccaatctccagagctctgtcatcatttccaaactgaaactctggactcatttcaacagcttcccattttcccttcccccatcccctggcaaccgccattccagcagacaccttgtatctctatgaatttgactactctgggtaccttatgtaaatggaatcatacaatatttgtctttttgcttctgactcatttcacttatcatactgtcctcaaggttcactcatgttatagtacatgtcagactttcagtttttttcaaggctgaataattttccattgttatgtatataccgtattttgtttatctgtgcatctgtcaatggacattggattgttcccaacttctggctactgtgaataatgctattacgaacaccggtgttcaaaggtctctttgagatactaatttgacttcctttggatatatatgcccagaaatgggactgctgggttacatgagaattctatttttaatttttggagaaacctttataccattttcccatattggctgtaccattttacctttttgccaaccattgc

SEQ ID NO: 563458 - DNA, 149 bp, Homo sapiens
tgatgtctgctactgacaggctatgtaggacatacttctggtgggcactgtgcggaaacttgaggataaatcagtgagctgcatgcatcttaaaggcatggctgtctcctcacttgagtgcaaggtccatcgaccaaagccctgttctg

SEQ ID NO: 563459 - DNA, 965 bp, Homo sapiens
ggggagccgggctggcaggagcaggaatggcggggtggggtctgcaggcgaggagcgccggtgtgctggtgtacagcggctaggggcgctcggggttctcgatgcgtgacaggctttgcgggcccgcgaagcgggatggggttgccaggcgttgagtgtggtaggatgaatgaataatggccctaggactaacctagtcaatcagttacaagatgaacgaagacatcaggtctgcaatcctggagacacgcgtctgagcaccaaggtgcatcatgacttgggccgagtttggggtacaagaacttcttgtgcgtgtgcaaggaggatggagtgagcatttgcgcagtccctctagtcggatcggcgtgggcatagtagtgggggctcgtagggccgaggtcggccaaaatatcacgaaaggacataccttgtttgaagaaagctagttggatgcatggccctggatgacaggaatctgtatgggaacattcgtaatgaatcgtccacaccatctggcgaatgcgaagccccatcatcatgggatgtgtgagactcacatgatccattgagagggatcgcaagatgatggagcctggtcatggagacatcaatctggttatgcacttcgcgtgttagagagatgtgccagaggattgtattgtgccaacagctctggcccatacttgctgaatgtgagaaagtaaactagccggccaattaccggcgcaggggcaagacgtgctacttggatgtggctcccgagtttacactggatacgccggatgtagcagagaaaatcaagtgagcgtgtagtgttgacattgaggctactggtagagctttagaagtccgtagggatacttaccagtgaactgaatcgcagggaaacatcgagcgagttaaggaagcgcaatcagtgggaacacaggagcgaggcggaactcacccaggatattgaggctcat

SEQ ID NO: 563460 - DNA, 297 bp, Homo sapiens
  misc_feature (3)..(3): n is a, c, g, or t
  misc_feature (35)..(35): n is a, c, g, or t
  misc_feature (37)..(37): n is a, c, g, or t
  misc_feature (40)..(40): n is a, c, g, or t
  misc_feature (81)..(81): n is a, c, g, or t
  misc_feature (88)..(88): n is a, c, g, or t
  misc_feature (102)..(102): n is a, c, g, or t
  misc_feature (117)..(117): n is a, c, g, or t
  misc_feature (123)..(123): n is a, c, g, or t
  misc_feature (136)..(136): n is a, c, g, or t
  misc_feature (190)..(190): n is a, c, g, or t
  misc_feature (193)..(193): n is a, c, g, or t
  misc_feature (211)..(211): n is a, c, g, or t
  misc_feature (229)..(230): n is a, c, g, or t
  misc_feature (241)..(242): n is a, c, g, or t
  misc_feature (261)..(263): n is a, c, g, or t
  misc_feature (266)..(266): n is a, c, g, or t
ganggagggggtaaaagtcgtgttctgccctgtcngnggnattggagtgccccgctaggtaagaagcaatgcttagatctngcttccnggcagcagcttganttcccgaatcttccngcacgngcatacaaatgcngcgttagaatccatacacgtaatccatattcaccttcccatccatcccgcagangcngcatggtgacacccaggntactgtccatgcttgagnngacgtatttgnnggttctgttactacaacgnnnggnatattcacggacatgcctgtaataccccggc

SEQ ID NO: 563461 - DNA, 1272 bp, Homo sapiens
ggcatgtctgtctatggagcagcgattcttaatgtttcttgactatcactcgatgaactggcctgtcagcttgaacacatgtggactcatcctggatacctgatcttgcacaaggtccaagaacccgctacttgagtggatctgcatccggggacccgtttctggggaaatccctatattgaggctgtaggtagagtaaaagtcatctatatatttactttccataataagaatcctttcccaacactatctgatccttctgattgcacttccgaaaaagccgtaaagtactgtagggagttcaatgtcttcaggacataaataaccaacctaagatctctctatcgtcaattagctagctcgagtctctatacaggcaattctccttgtcctgttccatctcattcaatttccttttgcactggagcattgtattcagtcgtagcgttaactgtgctgaagctagcaaatttgcgcatcccagtatgagtatccttaccaaaatcccgtagttccggttcctcgagcctgctcccattgctcaggagtaaaacgcaaacccatattgaactcgccgtgggggtcctccttccaacatctctcgtgtgaaaacctttgctaccttaaccgttttggcagaccatgattccttatcgaggcattcacaacggtaggggagaccctcgagctccatcctgtgggcccaatttccgttttaactaacggctcagcataaccctagttacgaaccactgacattgtaaaccacggtcccaaatttaaccccaaaggtaaggccccgtatctcaaacactataagttactacctttggcactcaggtttctaataacgatcatgaattactgcttaggcttgtgatgcctgtggaatctccatcaccactattgcggcaagagcaaggtacttccttagatgactttcaaccttcgctctaatcccataggatttccccacccttatggaggaaagaccgagcttttaccttggtgggaaacccccctaactgaagtggcgaaaacgactatctaaaatgtcttcatctctgcattttcccgtggccctggacaaatgtgtcaaatatatggtctataaactatcatatcagccccataaaaaccctgtctgccacctacttcggtcaccacatcgctcaatacctttaccatagtgctatacaacgggccatcaagagctataccaacatgggcatacatggacgaaccatatgtaggagcccaacgacatatacc

SEQ ID NO: 563462 - DNA, 278 bp, Homo sapiens
accataatttctaatcttatggctaatttgttagtcctgaaaaggcagtcttgtccccaggtaggaagggagtttgttttgcaaagggctgttatcatctttgtttcaaagctaaactataaactaagcgactcccgaagttatttcagcctacacccaggaatgaacaaggacagcttggaggttagaagcaagatgggttcagttaagtccgatctctttaactgtaataattatctcagttataagaaaatataacataacaaaatctctcaaaa

SEQ ID NO: 563463 - DNA, 977 bp, Homo sapiens
  misc_feature (723)..(723): n is a, c, g, or t
tcaacagacaataagtgacgatgacggccgagccgattgtgctgtcgtggatgccgttagtttgggctatcgagacttgtcaggttgtcgacgcatagattacaatcgaaggaggggtgtcaggctctcgatgggcgctcaagtaattcaatgctggtcgtcaatggctagaagcatcttcaagcactaattactcatccgatcttagcgcttaggctcaacatctagcttgatccttagatcagggacatgtgcaaatcttcgcttaactctcgttgtgcatactcatgaagtcggacatgtaaggaatcgaagtgctgcttaggtaagggtatagtgcacgaattatctggaatagaccccagtcatagtgccttgattgtgacattcgtacattcttattttctatgtgaaccattctgttgggggaagtaacacttgagggctacggagtgtacccgtccatgatattcgataggccgattgggttcccatgtggattgactaaaatcacataataaccctgatactcactgtacagtgaacgtagtctggacatcacatgctatgtaggtacctgtctgtacgattcactacatggctcttgctatctcacaacagacctatttgtgaccacacggaattgtgagactagcatattgcactgcctgaaataggttgatttacgcttcctaaccttggtaatcattaagagcaagttgntagaaagagtagatgttgcatgaagtttggagcaaggttgggtataactgctattctacaaagttcttgactgttagggttttaggatctccgtccttccatttgggttatgccgtttgaagtctaaatgggaaaatgaatgtacaaggcagccattcacaaaaatactagatttaaagatatccggctgtgtgttccccaatgggatttcaatacattattagagattgaaccggccatttaaccatttactg

SEQ ID NO: 563464 - DNA, 884 bp, Homo sapiens
  misc_feature (174)..(174): n is a, c, g, or t
  misc_feature (221)..(221): n is a, c, g, or t
  misc_feature (223)..(223): n is a, c, g, or t
  misc_feature (233)..(234): n is a, c, g, or t
  misc_feature (236)..(236): n is a, c, g, or t
  misc_feature (239)..(240): n is a, c, g, or t
  misc_feature (243)..(243): n is a, c, g, or t
  misc_feature (245)..(245): n is a, c, g, or t
  misc_feature (247)..(248): n is a, c, g, or t
  misc_feature (252)..(252): n is a, c, g, or t
  misc_feature (266)..(266): n is a, c, g, or t
  misc_feature (273)..(273): n is a, c, g, or t
  misc_feature (278)..(278): n is a, c, g, or t
  misc_feature (281)..(281): n is a, c, g, or t
  misc_feature (283)..(283): n is a, c, g, or t
  misc_feature (294)..(294): n is a, c, g, or t
  misc_feature (308)..(308): n is a, c, g, or t
  misc_feature (323)..(323): n is a, c, g, or t
  misc_feature (346)..(346): n is a, c, g, or t
  misc_feature (368)..(368): n is a, c, g, or t
  misc_feature (371)..(371): n is a, c, g, or t
  misc_feature (377)..(377): n is a, c, g, or t
  misc_feature (385)..(385): n is a, c, g, or t
  misc_feature (389)..(389): n is a, c, g, or t
  misc_feature (393)..(395): n is a, c, g, or t
  misc_feature (418)..(418): n is a, c, g, or t
  misc_feature (445)..(445): n is a, c, g, or t
  misc_feature (459)..(459): n is a, c, g, or t
  misc_feature (463)..(463): n is a, c, g, or t
  misc_feature (490)..(490): n is a, c, g, or t
  misc_feature (511)..(511): n is a, c, g, or t
  misc_feature (525)..(525): n is a, c, g, or t
  misc_feature (535)..(535): n is a, c, g, or t
  misc_feature (546)..(546): n is a, c, g, or t
  misc_feature (561)..(561): n is a, c, g, or t
  misc_feature (563)..(563): n is a, c, g, or t
  misc_feature (565)..(565): n is a, c, g, or t
  misc_feature (569)..(569): n is a, c, g, or t
  misc_feature (597)..(597): n is a, c, g, or t
  misc_feature (610)..(610): n is a, c, g, or t
  misc_feature (845)..(845): n is a, c, g, or t
aggttggcgcgggctgggaggtgttccagccctttaagatgttgcgcgtggtgagctggaacatcaatgggattcggagacccctgcaaggggtggcaaatcaggaacccagcaactgtgccgccgtggccgtggggcgcattttggacgagctggatgcggatatcgtctgtntccaggaaaccaaagtgaccagggatgcactgacagagcccctggcnancggggagggnnanaannccnangnnagcntcagccgcaaccgnagcggcnatgcnggngnagccaccttcngtaaggacaatgcnaccccagtggctgcngaagaaggcctgagtggcctgtntgccacccagaatggggatgtnggntgcganggaaacanggangagnnnacccaagaggaactccgggctcnggatagtgagggcagggccctcctcanacagcagaagagcngcanaggggaagggaaggagaagaccggganccgaagcaacggggagcggcncccaggcggacccngggaggcgcngagcggcgagncgggaagaggcgcgncnancggnggcggcaaatccgagcagaagccctccnggcggcagcatgntgatcattctgggtgacctgaatacagcccaccgccccattgaccactgggatgcagtcaacctggaatgctttgaagaggacccagggcgcaagtggatggacagcttgctcagtaacttggggtgccagtctgcctctcatgtagggcccttcatcgatagctaccgctgcttccaaccaaagcaggagggggccttcacctgctggtcagcagtgactggcgccgccatctnaactatggctcccggcttgactatgtgctgggggacagg

SEQ ID NO: 563465 - DNA, 124 bp, Homo sapiens
aaggatagtgctggtgctgcgtgagtcttttctgcatggggtacacacggccacacacagggcaggggaaagagctcagcttgggagtcggatctggcctcttcttccggtcccggctgtgcac

SEQ ID NO: 563466 - DNA, 166 bp, Homo sapiens
  misc_feature (73)..(73): n is a, c, g, or t
  misc_feature (105)..(105): n is a, c, g, or t
ggagctaacgactgtaatggaaatggcacggtatcagtacaacaagcaacagcactgccaccagcccaggatncaccagttctgcccacccagaaccacctccancctactccgagtcgtgggcaagaaacgagtcggggcaagaaaacgagtcgtgggcaagaaa

SEQ ID NO: 563467 - DNA, 198 bp, Homo sapiens
acgtgcgatcaaatgattctcctatcctcagcctcccgagtagctgggactacaggcgcccgcagggacgcccagctaatttttggtatttttagtagagacggggtttcacttgtgccagccaaagatggtctcgatctcgcgtgaccttgtgtatccaccgcgtctggggcctccccaagagtccgtgggcattac

SEQ ID NO: 563468 - DNA, 368 bp, Homo sapiens
gctctcatatgagttaaagctctacgactcctgagcaacttttatgtacctggcttacctagtgctggggcttgcaactaatgtacagaagccaaggagtccagatctagatagcagagaagtccgtctcattctaaaacattgcaactcctgttagagtccaccccatgaagctgtttcagatggtgtatctttggactggaattctataagtatatatagtccaggctaaaacaaatgtggctagctaggttggccgtgctgtctcagtaggacatggacagactccagcttacaccctctggcgaccttggacctacgctgccacagtgcattatgagccccgcaaggggttaccgagcatcgaa

SEQ ID NO: 563469 - DNA, 151 bp, Homo sapiens
agataaggaaggagctagagagtgtgagaagacagctccagtgctgcggtggcaaacaatcagatgttgagtctcctgaacaggacgaccggcggagaggctccgtgacacagcgaccacaggctaccgtgaacacggacgcgacgaggct

SEQ ID NO: 563470 - DNA, 202 bp, Homo sapiens
agtaggaaaaaaaatgggattttaaaactgtgtttgggccaggcgtggtggctcacacctgtaatcccagcactttaggaggccaaggcggatggattgcttgagctcaggagtttgagactaacctgggcaacatggtgaaaccccatttctacaaaaaaacaaaaacaaaaacattagccaggcatcgtggtacatgcct

SEQ ID NO: 563471 - DNA, 1080 bp, Homo sapiens
agcaacataaagacgaacgtgatcgtcaaatatgaacatcattgttgcattgtaatcggctaaaacataagctatctcggactacttgatctcaacatcaatcctaacacacgatggcagcactattgatcgttgatagaacctactggtaggtcatctcctaatgaatcgatctcatcgctaataggctaacggcagctaatgagtgatgagtgtgctaagcaccaattccattgatcctcaaagggtcgctcgtacggtcgccttgtgatatcgcacatactaagatatatcattacccatacgccatgcaagtctggtgcattcgaaagcaaatatgccctggactgacacgctcaaaccgtataacatgactggcctgcgatagttaatatattgcttctatctccgggagcccctggcctaacggtatgaacagttccaccttgccctcctacactgaatgcagtccttgtaccaatttcttaagtatactacctggtctgatgcctcaagaatatgcggtatcggactaagaccaggtcctagagctggaccccactttgttagtgtggctcaaactgacagattgacaccatcttgcaagagagagagaaacacatggatacagatcgattgaccaggcaacaccgggatcgcttgaagatctttcgccgaaaggaggagcgccatctccgaacactcgccaacttcaacagaagattgcgggccatcacctgggggcaacgtgacacccgaatgatggaacgaggcgccgtcgaaataacgacgggcctgagagggccacgaagaccctccacaatctaccctaggaagacacggcgaacacggggcttcactgcagacgacacgcacaagtcaggactcgttcccgtccggggccaacacgtcgccaggtcccgggcgcccaccaacctgcgccgccacagcgaccagcaaccgaacaatagggcggcgaagcaacccaaccacgccggacaagagacacagagaaaaccaacagacaccgaaacacacaaaaccaccacaccacccaccgcacgaaataacccaaggcac

SEQ ID NO: 563472 - DNA, 129 bp, Homo sapiens
cctccttaatagcgaaccacaggcatgtgccaccatgcctacctcagttgtttttgtatttgtggtagagcacgggatcaccatgtgcccaggctggtcttgaactcctgagtatgagtgatccacctg

SEQ ID NO: 563473 - DNA, 668 bp, Homo sapiens
gcggccctccttcggctccatgattgttcgccgatcttgttacctgttggggcccccctgtccggttcgctttatctcctgacgctctcgttccttctgccatcgcgctctgtctgcggggtgcgttccgctcctgcgcctccgcgccctccgagttttgtgtgtgcgtttgtgccccgcgccgcagtcattctccccggccgggggggcttccccggcgcctactgcattcagagcgtgggcgcccaactgtgggtttgacccgcgggtccccccacagagcaggttcggtgggctagtccactcggtggcgttttctctgcgcgcgcgctctcattggccggcgagcgtccgtcgggctcaagtgcgctgcgcttctctttgcgatttgtatttgcaactttgtgtgcgacgcgcgctccgcgcgtctgtgtgaagcagtcaatagatgggtgttcctcgtactgtggtggcactcctctcacgacaagattttccccggtcacccaccccgttcgtcccaagtatcccctagaggtgtccctctctttttctctcctccgacggccattacttgtgtaagcggtttgtctaggcggtcttctcccacagactgagccaaaccaaaacacaagaatttgcttccccgccacaacaatagtcaacaa

SEQ ID NO: 563474 - DNA, 358 bp, Homo sapiens
  misc_feature (25)..(25): n is a, c, g, or t
  misc_feature (64)..(64): n is a, c, g, or t
gagattcaaattagccccgaagttntgggttattggggcccaaaaaaaatggatttttgtaaanaagggtcagcccgagatttccgccgtttttagggcaatgggcccaaaaaggcccaacttattgttgggtggcgggaacttcccggcccctttaaccaagtggaagaccttgaaacgcgtggagggcataaccgggaaacaaattgagtccttccttaaggccaacattctgggttttgccgccggccagcggtgtggggcctcctgaccgttgtttcctcactccgccttttcaaatttttgtataaccccgtgttgtgtaaatacagtttttgctccggtgaaaaaaaaaaaa

SEQ ID NO: 563475 - DNA, 390 bp, Homo sapiens
agtgtaatgttactcttggaatagcatgctccaggattgccaagcggtgtctcagtttactctgtggccaggtccctactggtatatcgcttactatagttttcaagtagttgcagcttgaataacataaaataacataatataatgtcatttatgtgaatttcccacgtgaagaacgcctgtaaaccttgcagtattgaaactcagtgaacaaggcatcttagacaagctgaaaaacaaatggtggtacgataagggggaatgtggagccaaggactccgggagataaggtcagtcgctgaaggtacttttggtactgattagcaatcacattttgacccactgtatattttctaccctaaaacggctttccttccctacatcatcact

SEQ ID NO: 563476 - DNA, 159 bp, Homo sapiens
gcctgtggttaatggcagtgtgcctgcagttccagctactcgctgaactgagacagaagaatctgcttgaacccgagagtgaggttgcatgtgagccgatgatcacgccactgactccagcctgtgcgacagagccatgactccatctcaaaaaaaaaa

SEQ ID NO: 563477 - DNA, 1189 bp, Homo sapiens
tgggcccagcgccagctccgagtcccgacctggcccgcggcagcctgcgcctgcgccatggccacctccccgcagaagtcgccttctgtccccaagtctacacacttcccaagtcgccccggtcaccgcaggaagagatagattccattcttggcgaaactcggagggaccctggacccggaggaagaaagccaaggaggtgtccgagctgcaggaggacggacatgaacgaccatcaacctgccccctcagaccaatatccctaatgagctggaccccgagggacacgaatgctggaaggacaatgagcgtgcgaaacaaaggacgcgatcccagacatccaacgcagctgaaccccacaagactatcaaacgacacttgcactgacaggctatttcaaatcagaccctgggacttcaactgactgtagtacgcgattagcgacgacaacagacatgcacaagtagacacacgacacctagacttgagagcattctagggtacattgacctggggaacccaacagatcacatagcacaagacaccgcataatgtccacgacgaaacaacttagcggacgacagatcgacgaaacggccatacaacacatgatcgcgcatagcaagcgaataaccaccacaatgacacacacgaacgaacatcatggcatccaagacaacaggccacaacacgcaccgtgtgcacgacacacttggtacaccatagcgaaccacaacatgaaaataccacaacgcggaaacaaagcccaccctagagaacacatcgattcccacagtcccccaatccggaaggcccacatttccaaacaccggcatgggagaacaagtacgacatagcagaaatcataccacttcggataacacacactacgaccccaaacaataaacacgcatcactattacgcgatatgagcgcaacaacaactacctacttactatccaacacccccaattcagcaattaccacaacctactgcgcacacccatatagataccatcccaacgcgccacttattcatccatgcctaccaaaaccccaaaaacatatacacacgaccattcaccaacatcgatcccccaaatttattataaccacaatattcacaacgcaacaacgagatccacactaagaacaataccacaaacacacaataccctatcacaaatag

SEQ ID NO: 563478 - DNA, 1060 bp, Homo sapiens
  misc_feature (323)..(323): n is a, c, g, or t
  misc_feature (707)..(707): n is a, c, g, or t
gctgcgcaggagcagcagggccgtatgcatgacatggcgcccagaccggaatggcatggtcttgtaagccccacttcgcactaaggactggcaagcgggcagcgtggccaacaggtggtttcacatcgcaggccggctcctgtatggactcgctgcagacctgtaacggcccgcgcctggccaatggcgcgccgcattcagccccgctgcccctgggtcgggtcctcagtccggtcccagtcggtggcggctgcgcctcgacgagttcgtgttaccacaccggaatggttgctgcgtcgcgtggcctgccagggcttcaggcncgtgtaagtgacgcctcaggggtggccctggacatgttcagctaacgaataggctggcctcggatctcacctcgagcactttcatagtggatctccgagagggatggcggagagtcacagtccacgggaggtcccttgtcatgatcccagagcgatgtcatgctgtgcctgaatggacgtacacggatcctagaattcagtccatctttactccacacgggaaaggccctcggagccccctcaaagaaaggagatgagccagttcgttagctcgaagtgaaactaagatagagcgtggggtcatcgcctagggtttgacgcgggacccgggttcgatgccccggtccgggaacccgtctactcacgaacggacgaaaggctcgnagtcatcactgacgtgaacgagaacgaagtttcgaaacgccttcgcatagtctccgtatggcccgtgccaacgcccgggctcgttcggcgatacggggcaagaaatagagccaaggaagccgcagaacaggatgttgacagacgaaccacaataaagcccatcctgggggcacttggaagtcaagaaccaagataacacaaaaaaacgtcgggggcactctattaccgagggggcggaaaacgcgcgtcatgcaaatggtggcctggccacagggttccctggcccctttctttgtcaccggggcaatttgcgggctccctaaagtgagcgataaatcgataccggtactgag

SEQ ID NO: 563479 - DNA, 463 bp, Homo sapiens
ccccctttccgcccccccgggggggcttttttttttcccccaccgggggggttttttttgccccccccaggtgggcccccccccctttttggttcccctttccccggtttttgccccccccgggtttccggggggccctttttgtgggcccaattttttttggggggggcccccgatttcccacccttgttggttgaaaattgggttccccttgggccccccttttttttttgggaattttttcccccacccccccctttggggttttttgggggcccaaaggggaaatgggttgggtttaatttttggacccccatttttgttttccccccttttggttttgagcttttcccttgggttcccccctttttgggttttaaatttggggggaaaaattttttttggttttttttccacccccccttttttttttgcccccttttttaaaaggggtttaaattta

SEQ ID NO: 563480 - DNA, 347 bp, Homo sapiens
gagacagagtctcactctgttgcccaggctggagtgcagtgtcacaatctcagctcactgcaacctccgcctcctgggttcaagtgattctctgcttcagcctcccaagtagctgggattacaggcaaccgccaccacacccagctaatttttgtattttcagtagagacggggtttccccatgttggccaggctgttctcgaactcctgacctcaagtgatccacctgccttggcctcccaaagtgctgggattacaggcaggaactaccatgcctaaccctttcccctacctttcttttttggaacagcctgggtgacagagtgagactccattcccccgcaacc

SEQ ID NO: 563481 - DNA, 168 bp, Homo sapiens
ctctctcctagccgactggttctgcgcgaattgggcttgacgtggatgacgtgcacgcagctccagccagtcttctaaggaagccgtgaactctgaagaatatggctctgaccgtgcgcctggccgcagtggttcttctgatgagcaagggaactccactgagaatga

SEQ ID NO: 563482 - DNA, 334 bp, Homo sapiens
caggagtcttattggatagcggtggggtgcaggtactttgacccagccaaggaagtcagcaagaagccaccagcccgaatggtgacgctgccacgaccattctgccagctgatcctggaccccatcttcagggtgttggacgcgatcatgattttcaggaaagaggagacagcaaaactgatagagaatctggacattcaaatctggacagcgaggacagggacaaagaaggcaaccccctgctgaaggttgtgatgcgccgttgtgtgcctgccggaagaaccccttgtggcagatgatcaccatccacccgccctcatccgtttatccagtg

SEQ ID NO: 563483 - DNA, 343 bp, Homo sapiens
ggatccagcaaccgataccttgaccattaaaggcacgccgccgaatttgcgcgaccaattgcagcgccggacgtctggcggcaattaatcggttttgtgttcagaatgccagatgcggcgtgaacgcttatctggcctgcaaaaaatagcaataccgtaatcaggcataatctgcagatacaaaaaaccccgccggaggcttttttacaacttattcagcaattaagcgcgaacgaagtcgatgtgctgcagcttcggtttgtacgggcgacgctgtacgtcctgagctttaactttgatttctttaccgtacacgcatggtcagaacttcgctgtagaattc

SEQ ID NO: 563484 - DNA, 150 bp, Homo sapiens
ggcggatgcatggtgtggggagcggtgaaggggaagggacagacgaggtcagtactgtgaagccgaaggtgggaggcatttcataacatttcttgttgatcaaaccaccgtggacacccttctttggccaatcaagcagggactaggcgt

SEQ ID NO: 563485 - DNA, 1055 bp, Homo sapiens
tggagagtggaatgagagaagtgacccagatcagacctctacaagaagactcaggaaactctttacacaggcaggacagaagacttcagcatgcccatgtccacagtgggcatctgccatcagcaggaagcttggagacatgaggaactctgcgacccttcaagtcgtttgaggaccgagttgggaccataaagtctaaggttgtgggtgacagagagaacggcagtgacaaactcccttcctcagaggggagtggtgacaagcccctgtcggatcccgcaccatttctaagccatgatggttgcattcacccgactgacagagcacacgcaaaccagacctcagcatcacagaacgaagcatctgttcagcaggagacaagccagaccagggcaggatgagcagagccggaccatgaggacagtcctgacccatccacagcggagatgtggcatgccgcgtttgcatgaatttagaagaacacaggcttgtacacagatgttttacactcacgataagtagatgaaaacaggatcactgtgctgatcattccataagagaggtgcagcgaagtggacagggcaggaaggttaagcacaaaatatagagccaaagaccagagatcccttagcagactcaatgttagcccatcagactgttgaaggattgcacgaagtcataagaataaaatcagtggcatcaactgactactgaactcatcatccattccatgaatcaaagaaaggaatgcaataaaccagacaagtcatacaggtaacgaaagattaaaacacaaaatggcgacggagaagcggagcaaataagaaaaccagaaaagataattacctgtaaggatgacaaagatagaaaacaacttaagaaaaacaattaaatataacagactgcacattaaccgcatcacagcaacagattataaacagaaatatagcacaccgatatcacatcacccctatacaacaacagataaacaaaaagcacaaaaatacactcataactcacctagcctaagatattaacagacaaacacacaaatc

SEQ ID NO: 563486 - DNA, 370 bp, Homo sapiens
tgatcaggcactgcatagttatgtggggtatgttgtttcaatttgcaatcccctaatgtcatatgatgctgagcatgttatcatatgcttggcactcagttatgtttccctttccttcatgggcctgatggagctgtttctgattcaaagcaacaaagaactggcctacattgttatgcggagacaatcatgtttctacgactgacttgcgccgaacattcccttccatatcatctttcaagcagtgcatggagaatgatactacatgcccaagtatcatttccttatttgggatcctttcggcattagcaccagaacaatcggtgctaaaaacaataggaactaattgatgccctcccccctatcaaaa

SEQ ID NO: 563487 - DNA, 254 bp, Homo sapiens
cgctctaagattaaaaatgccctagcccacttcttaccgcaaggcacacctacaccccttatccccatactagttattatcgaaaccatcagcctactcattcaaccaatagccctggccgagcgcggagccgctagcatggcggcaggccgcgtactcatgcacctaattggaggcgccaccctagcaatatcaaccatgacccttccctctacacgtatcatcttcacaattctaattctactgactatcct

SEQ ID NO: 563488 - DNA, 553 bp, Homo sapiens
tgccacgatgctgccgcttaggactctttcactgctgctgggagcagtagcaggaaaagaagttggctacgagagactcggcctgcctacaggtgatgactcgcccagtggtcaggaatgtactggaaagaccaccatccatatattggcgtatgcgtctccaaatagatgtctaacacccgcttcctcctatatactaatgacgagacccaaacagactttcaatgaagttgccgcagatacatcgaaggacatcagtggctccaatttcgaaaacacaagtagaagaaggcgtcgctttatctcaattcgtggactcaaaacaagatcgccgaatctgaggaatccgagccctcatctctcgacaggtcatcggacaccagatcttgagggacgcgcatatttagcctcctgtaaggtcggtccactgcgtggtacagaagtaagcctggcataatcagggactgaggtatccatgccagagagtggatgtctcctggcatactgccaagaggttagtaagagaggctgtacgaaccaatggaaggtgaga

SEQ ID NO: 563489 - DNA, 101 bp, Homo sapiens
caggtagacctaacaacaacaaccgtattgctgttccccaaccttttcctccgaccccctaacaacccccctccgtaatactaactacctgtggttagagt

SEQ ID NO: 563490 - DNA, 914 bp, Homo sapiens
cccgcaacgactgcgttgttgctgccgacgatggagggggcggcagagaactgtcgccgcgaagggtggaggcccgcggtgggtagtaaataggtggggtgccgccgcacattgcgccccctgggcgaggcaaaggtgtggcgcgtgtccccgacgtagcaagcgggtgcgcacaagagtggggagttgctggtcccacagtgcagagagagagatgggtacacacgctggcggccgcagcatgagggagcgtagatatccggtcatgagagcagagggggcggcaaaaagcagcacgcacgctggttgtgtggggctgttaggaggcggcacagggcgcgcacgttgtgtggatagaacccttggagaagagggccccgcctgtgttggagaatgtaaaggggcacccgccagaaggcgcggcggtaggcgtattgagagggtgatggaagtacacaggaaccgctggttaaggcccccggggataaaatacaggccgcggtggccgcaccacgcgggggatgccccctctggatgaggggggccaccgcccgccgagaggtccatagtgcgtgcgaggaaggatgcacgcgcgaatataagatagtgtgtgggccggggcgacaataagggggcaccccctcgtggtgaccccctgctggagggaattggagcccccggtataatcgctcactgcggcgctgacgtgttgcctggtacaccccaggcggtgcacaacttaaccgggtgcggggacagtcagtatctgctgccccattgtttctcccctaaagcatgccagaaagtctgttgttcttctagaaaacatataaaaaactgatgttttgtgggcgagattggcgcaatgataatgcgaacttctccgctgtgtggaaaaaacccccaacataaca

SEQ ID NO: 563491 - DNA, 93 bp, Homo sapiens
tgagcccggaccagcggcgccttttttgtctttttctgcccatctgtctactaataaaatgtgaaataaaatacctgtattgctcttcccatg

SEQ ID NO: 563492 - DNA, 827 bp, Homo sapiens
  misc_feature (1)..(1): n is a, c, g, or t
  misc_feature (286)..(286): n is a, c, g, or t
  misc_feature (380)..(380): n is a, c, g, or t
  misc_feature (505)..(505): n is a, c, g, or t
  misc_feature (511)..(512): n is a, c, g, or t
  misc_feature (514)..(515): n is a, c, g, or t
  misc_feature (517)..(518): n is a, c, g, or t
  misc_feature (520)..(521): n is a, c, g, or t
  misc_feature (560)..(560): n is a, c, g, or t
  misc_feature (565)..(566): n is a, c, g, or t
  misc_feature (569)..(569): n is a, c, g, or t
  misc_feature (573)..(573): n is a, c, g, or t
  misc_feature (575)..(575): n is a, c, g, or t
  misc_feature (579)..(580): n is a, c, g, or t
  misc_feature (582)..(585): n is a, c, g, or t
  misc_feature (587)..(588): n is a, c, g, or t
  misc_feature (592)..(592): n is a, c, g, or t
  misc_feature (601)..(601): n is a, c, g, or t
  misc_feature (619)..(619): n is a, c, g, or t
  misc_feature (628)..(628): n is a, c, g, or t
  misc_feature (630)..(631): n is a, c, g, or t
  misc_feature (639)..(640): n is a, c, g, or t
  misc_feature (644)..(644): n is a, c, g, or t
  misc_feature (649)..(649): n is a, c, g, or t
  misc_feature (651)..(651): n is a, c, g, or t
  misc_feature (657)..(658): n is a, c, g, or t
  misc_feature (662)..(663): n is a, c, g, or t
  misc_feature (665)..(666): n is a, c, g, or t
  misc_feature (673)..(674): n is a, c, g, or t
  misc_feature (676)..(677): n is a, c, g, or t
  misc_feature (686)..(687): n is a, c, g, or t
  misc_feature (690)..(691): n is a, c, g, or t
  misc_feature (694)..(695): n is a, c, g, or t
  misc_feature (703)..(703): n is a, c, g, or t
  misc_feature (708)..(709): n is a, c, g, or t
  misc_feature (715)..(715): n is a, c, g, or t
  misc_feature (717)..(721): n is a, c, g, or t
  misc_feature (723)..(723): n is a, c, g, or t
  misc_feature (725)..(727): n is a, c, g, or t
  misc_feature (730)..(733): n is a, c, g, or t
  misc_feature (737)..(737): n is a, c, g, or t
  misc_feature (740)..(740): n is a, c, g, or t
  misc_feature (759)..(759): n is a, c, g, or t
ntaactaataagcaggagaaaatgggaaaatacatggagcagttctcaaagtatacaatggccagtaatatttttcatggtcagccctgacagtaatacaaataaaatccaaagaaaaatgacatggcattttttgttactgtattttgggcagtattaaaaacaccagcaatgccaaaggtatatgggaaatgggttcttttatttcttggaatgtaaactggaactatttctggaggaatagagtagcacaaacaattcagttgtctctacaaaagatgctatntacatttccccctagcttttctattatgacatgtaccaaattgtcacaccattcaagcacctgtaggaaataagagtttaaagaaacaaatgtnacagatgagttctagagtgctctaagaagctgatttaaagaaaagattaagcctccacctagagttttatttttattttttgggatggagtcttgctctgtcacccagactggagtgcagtggcntgcaanntnnanntnnatgggttcaagagattatcatgcctcagaatagagtagntgggnntanaagncnctgnnannnngnntggntaatttttntattatttttaatagagntggggtttnannatgttggnnagantgggntngagttnntgcnntnnggtaatnnanntgcctccgnntcnnccnntgtgggtnttccnngtgtgngnnnnncngnnncgnnnncgcnctncgcgtctcgaaagtatganagaaataaattaatgtagaaataaattttgaaagagattgattaaatttttttttttttttttaaatt

SEQ ID NO: 563493 - DNA, 620 bp, Homo sapiens
  misc_feature (620)..(620): n is a, c, g, or t
caactattatatatatgagtagtttatgtcttcataaagtcagcagaaactcgtattgaaaaaaatatatatccccaagtgaattactttataaatgccacatgacaagggagctaacctatgacctacattgtccagcataccggacaaatgatacatggagaggctcttatctatttatatacctataccaacatattgcacttggtccatcaagtgcttgcataatcattaacggtacaagttaatatggtaaaccccatgggaaaataggacagtccaaccgatctcctctggattggaaacgaatctactgaaggttggaaagggtcctcgcactgtgggacaaatagaggcccattccgagggggaagcatacacacactacttctgtggcagaagttgacttcgtggggcccgctccccccgggagggaacctttcccagactaggaccttccaagtatagacaaagcggttgcacatacccagttcgcgaccaccacttttttccagtcactctggaatttcctttctagcatactggaccacccaatggtgacccgccgaatgttcccgttttcgtatgcctaatgcctgaatcccgcaggacccacgatn

SEQ ID NO: 563494 - DNA, 227 bp, Homo sapiens
gaaatcatctaatgataaaatggtgacgattcagagctctgttaccgtggtaaagatggactcggaggggaaggggaactccgtgtcccctgcaaggttttcgctggtacgattttccccttgagatccctgggcttgctgagttcttcttggtgttagaaacgttgttctctcttcagttgttgcttgccccctccgcattctcctttcgctcttggcgacacact

SEQ ID NO: 563495 - DNA, 138 bp, Homo sapiens
ctcttttcacaggggaaggggctggatctgaccatagaattggcctggaatggcatggtgggagagctggtctatggaagagcagatgtggctgtggctcccttaactatcactttggtccgggaagaagttatagat

SEQ ID NO: 563496 - DNA, 174 bp, Homo sapiens
ccgaaactgtcaagattggcaaggttgattgtacacagcactatgacctctgtctccggaaaccaggttcgtggctatcccactctaataacaagaatcgagatgggaaaaaggtggatcagtccaagggaaagcgggatttaaagtaacttaagggagtaccgtggagtctca

SEQ ID NO: 563497 - DNA, 125 bp, Homo sapiens
ttgctaacattactttatattatattacaaaactattgtagcctcaaacagttagcaagatggtatagttaccaagtgccattttggaggttattgtgtaccgatcaatctctatataaatttgg

SEQ ID NO: 563498 - DNA, 276 bp, Homo sapiens
atagaaaaagaaggggacagacagagactaactcatgtcacacggtgatgtgtgtgcacttacccacggaggacactatagtgccacgttctccagcgtcacatcacggtacaggcatctctgaaccttcactaaggagattccattcctcctgggtaaatttcacagccacgtcttcaaaagtcactgtgccctgttatgatgttgacagatgaaaccacaaaccaaccctatgctgaggtatcacaatccatctctcccacagatcacctcgtg

SEQ ID NO: 563499 - DNA, 601 bp, Homo sapiens
atcccatatagatcactgaagctggcataccgtcaaataagtaaaatctgacaaaaaaatcaggccgggcacagtggctcacacctgtaatcccaacactttgggaggccgaggtgagtggatcacctgaggtcaggagttcgagaccagcctggccaacatggtgaaacccatctctaccaaaaataccaaaattagggctgcgcagtggctcacgcctataatcccagcactctgggaggccaaggcaggcaaatcacctgaggttgggagttcacggccagcctgaccaacatggagaaaccctatccctactaaaaatacaaaattagctgggtgtggtggcccatgcctgtaatcccggctactcgggaggctgaggcaggagaattgcttgaacctgagaggtggaggttgaggtgagccgagatcgagatcatgccattgcaccccagcctgggcgacagagtgagactctgtcttaaaaaaaaaaaaaaacacacacacacaccaaaaaaacaaacttctttgggttattctgattctgtatattctttcttttctcctattcttttaccatttcattcaggcttttgccccc

SEQ ID NO: 563500 - DNA, 120 bp, Homo sapiens
tatgtcaaaccaagtcacttttaactgtgcttattatggcttgctgtttgattggtgcttttcctttaatcattttggtgccaggtttcctatcagtcctttcatgtcctaatatggttg

SEQ ID NO: 563501 - DNA, 222 bp, Homo sapiens
attcgcggccgcgtcgacaacgattttaaaaaataagtagtgctatggatggggctataatgctaacctttgatagtaatgagaatgtattacatcttactttctgaatagcgggatgaatttatgaagggattattagcaatggaaagattggtaatggtattaagttatatgtgtctaaatattatattagctcatttctcttgcattaatagtactgct

SEQ ID NO: 563502 - DNA, 217 bp, Homo sapiens
  misc_feature (79)..(79): n is a, c, g, or t
gagagagagagagagagagagagagagagagagagagagagagagagagagagattggtctgttcatgttcgtttgttntctctctcaagacatagggtcttgctagtattgcccaggctggtcttgggactcgggcctcaggtgattctcccacctcggcctcccagggtgctggaaaggcatgagccactctgctggcccgagaccctgtctctt

SEQ ID NO: 563503 - DNA, 138 bp, Homo sapiens
accatcacagaatgaagagaagccctttagatgagcgtatacacccgcttactatccacttcatgatgacactgttctactaactggaagtgagaatttttggcttgcttatttgaccaacgcagaggaaataattgc

SEQ ID NO: 563504 - DNA, 267 bp, Homo sapiens
cctcgttctgcttcttgcaaaggacgtatagctgttctctatcagcctctattttataagcgatttgaaattattatttgcaatttatgaacctacggaagaaagactgtgaatagaaaccagattaagaagataagatttcggatgaattgaaagaaaaggcctagattgaagatgataacaaggatgatcgaataatgaagacccccaaggaatacctgaatttgggttcactgttgttcacgaatgttgacttgctaccgtgac

SEQ ID NO: 563505 - DNA, 81 bp, Homo sapiens
ccgggctgccctgtcactcctctaacacttccctcccctatccccaacatgccctgtaataaaattagagaagactaacaa

SEQ ID NO: 563506 - DNA, 110 bp, Homo sapiens
tgatattgtgcaggcaggtagggaaatttctttgtacaaattcatgtccctggccatgcatggcccaggagttcaataccagcctgggaaacagagtgaaactttatctc

SEQ ID NO: 563507 - DNA, 141 bp, Homo sapiens
tcacgagtatcacagctacggctcccgaggtgccgggacttgcagacgatctcgttcatcagtgctcaatggtgcccaggctggagtgcagtggcgtgagtctgcaatcgcaggcatctcggacacgctgtggtggatcct

SEQ ID NO: 563508 - DNA, 141 bp, Homo sapiens
attccagtagcctgcagagagagacgccgggtccagcagacagcgtgagggctgccccggggtgagctggctatggtgacgcacggcttcattccactccaccatcctggcgtttctcggtagagcagactcgctcgtgga

SEQ ID NO: 563509 - DNA, 816 bp, Homo sapiens
  misc_feature (249)..(249): n is a, c, g, or t
cgaggtcagattagtccctcccggagggggcggactcccttatgtggggggcccccgaacggccccgctccgggtatgtggccccacccgccggcacaattcaggattttctctcttgatattgtattctctcgcccctcgggggttaattcacgcttcacgcccggggtatcggagtagcgctcgcactcgactgtcacggcatcgtctcgcgattatggctcgcgtcggtgctcgcaattgcgcgcnacgttcagcgcatgctctatatatactctgcgcgctctctcttccaaaagaggcgcatctctcataacgctctattattccacacacccataagagagcctatttttaggaagcactaagttcatttccggcaccatcacggtcttcttaagaattcttactggctcactcatcaccctccctcacgctctcctatttaatcctccctctcggggggaacacctcatcctcatcttatgtttgctaagcccccctcttgtcctcgcggttcccaagaactatcacctcttgacctatctccacgactccgcacaaattatttggcctcacccccaaaatcccctttcacaatagcatttttccccgcccctcacgcctattggggggtccaaccccactcacctccctccactcttgtcaacacgacataacctcccgctcttatgtaaccacggaggtctaccacccctcactcattctttagtacccccttatgccccccagtattgttccccattgttcacctcatcaaccccaatcattccggggtttcccctctacataaca

SEQ ID NO: 563510 - DNA, 137 bp, Homo sapiens
cacccgacgtgcgtatgacctgtacgcggcacgcaaagccggtctgagatgcgaggctgcggactttctatctgaatacgccaccgaagatatggaccttgccggaatcgcttcgatggtggcgtgcacgccggatg

SEQ ID NO: 563511 - DNA, 501 bp, Homo sapiens
agcaagaagagcgcgggagacagtgataatgaaaacgtaagcctcaggctaatttccccatagccatggggcgaattcccgggtcactaaggcaggcatgcatgtggggatttcctttaccttttctataagtggtgccaaaacatccacttaagttcttcgattggtaccattccttcaaataaagaaatttggtaccaaaaaaaaaaagaaagaaagtggtcggtagcaaagctattacaggacagaaagggggtaggtgggtcgaggcggtcactggcactactcatcactcacacggaggtgactggggaggagccggggaaggacagaagggagtcacagggagctcatttccagcccggctaaaggggagggagaaggtggccatctctggggacagctcggggcttctcaggtcctccctttggacctctgtagtcctgccaggcccagattatttggctcacttgttgcttgctctccagaaatatcaggggg

SEQ ID NO: 563512 - DNA, 130 bp, Homo sapiens
tggggaactttggtaattttgggttttggaaatactttaaatattaagttggttttaaaattttggcccttttttggctcttttaaaattttgtacaaatattatcaacaaaaaacaaaaaaagcaagag

SEQ ID NO: 563513 - DNA, 493 bp, Homo sapiens
  misc_feature (256)..(256): n is a, c, g, or t
  misc_feature (266)..(266): n is a, c, g, or t
  misc_feature (269)..(269): n is a, c, g, or t
  misc_feature (276)..(276): n is a, c, g, or t
  misc_feature (333)..(333): n is a, c, g, or t
  misc_feature (453)..(453): n is a, c, g, or t
ccaagttgagagataagtgctctctcatctatgcacccattactccatcatattatcccatgtaccatgctgggattgtctatctccacctctgattttccccaggaagggctctccaagataaaaacctccccttcagattgtcttcaaccagccagtgctcccccataacaaacaaggctctcccacttttcctctttctctcaaaggccaccattagagcagtgcaactcactgagaaatatcctgcaaagantaaaggcccntcnccccttntagagaaagcaaaacatggaacaaagaaggaaaggcttctttttttttcttctattntattagccccctcattttcaaaggcaccattgtttcaggagaactgagtattttttaaaataaataaagaagtgaatacaatcttaagattccaacttattaacagaaaacatgtgtagncctaagaattaaaaataaatatgtctttaaagatgaaaaa

SEQ ID NO: 563514 - DNA, 1098 bp, Homo sapiens
ggtcgggcgagcgggattgctgcggactgcgctgcgcggcggcgccgaggttgctgagtcgcgtgctaagccccggactgccctgccttgaggctgtgctgtggggcctgcggtggccctgtaccacgacggtcgcgtgcggcctgtgctgcgctgggccttgcgtgcctggtgagtttgggctggcagcatcaagctctcgatgctacgcggtgcctgcggagcccgtggtcggcttctggtgtgcgcgttggatggctggtgctctgatcagcgtcgtctactagcctagccagaggtcttgtcgggactattgtccctccaacgcagctatctccagagcatggcgctatcacctaaatgcgtgtgtccacttgtggactctgctccccggctgccagacagcacacattaatcattcgctgacttaaccgtgggctggctattctcggacctgagatgggcaatagaaatatcggaagagagtcctgactggcagaggccgagctagtgtgctacctgtgtgtgcgggactgagtggggcactctgggaaacttgggttctggagcgcttgcagtgggccctccacgaggtcctgcttgtcagtcctccgttaagccgggatgatggcatgagggtccgccatcaagtccctggactgatgagggaaggcggatgcttgacttcactagcgccttgccccaggcagttgtagtgggaacttgcgccactatccaggagaggggatcggttccccggaacgcgtgcgagcccttctcttggagcggttgtggcttgttgttctaatcaaagtaaaaccaggaccatttacttcgccgaattgaggggttgaaacccaacgaaacgattccatgaaggggaaccccccagtgacgggacttctttgctcggagcaaagggcacagaagttggactcccttgaaagggcggatcccggcggaggatactaccgttcaacggttggccaccggcatatgttggtttgcacaacctgtgtgaaacttatgggggactttcccctttaagagacgccgtgtccctattcaactctgggaaacaccgttgatcacgcgcta

SEQ ID NO: 563515 - DNA, 429 bp, Homo sapiens
atcccccagtacgtcaggctcgctgtggtacacagctgagacggtacagagagggaggttgaggacggagaactccatcttcaatttcgggctcatgacgttcccatattgagaaaggcgcgccgtttcgcagcctcgtctgtggaacgcccctggggtatgcgttaggaaggtctcgtcccagccccgagtgacaggcaatgggctttaaaagctaggacatggtgatggcgtggagggggtgagggtgagtcccacaggcaggcttcactcactgagcacctttgtggcacttcgaggacttctaagtcctgggcattacaacaaccttgcccttgccggctttcaggggaatggggcctaatgaaggggagttacctccattaaaacgtcaaagaaatcaacggtccccaagtctcctttcacatg

SEQ ID NO: 563516 - DNA, 984 bp, Homo sapiens
  misc_feature (436)..(436): n is a, c, g, or t
ggggacagagggtggctccggccccaggtgtcgtgaagaagcaggaggctaggagagtggtgcgtccccgtgtgtgagaaagggcctagcgacattttggcctgggacccgggacagtccgagggccaaagagagagcctcggcccagttattgatgatcctggcctccgcgtactactcagggttgcgagcgaggatgagacgaccagtcccctactagggcgtgctgagaagttgccgtccgtgcgatttaaggcatgttgcaacgcagcgcgcctaggtaccgcgcgaaagcatgctgactgccacgtaggctgtaaggctagggcaccactagagtgacgagaacgcgagagtacacagagacagagagtacaggaacgccaggagcactcgtatggctcgcgggtccggagcagagtaaggtctggctggngcgaacaggggtacgctgccagatcgaagtagacactaccgtgctgcattgcgacgccagcgatgttaagcgagccgtgcagccgaccttaggctgcgatgatacacaggagaacgctcaggctgtgtgggtgagttggacacagcgatcgctgtgatcgccatgcgacgcatggtgtgtcgttcgttggccatgcgcgctcgtgctcagtaagaagttgggcggtgcccttgacgtgcatttgattcagagggagataggcgaacgactggaggacagtcgtaaagtcgcaccaggaaggatcctgcaggcaactgtgcgggcttcagcgacatggtgaagcttcggatagaccatgagggcgcattaggcgtaaggctggtggaaagctatcagtgaccgaattacaactgacctgatacgagtgcagatctcgccggcgactggggtggcaactgtcctgggatcctaagtctgtgggtcgtatcgccaagctcgagaaggcaaagggtccagaaactggccagttaaactgggttaactgttca

SEQ ID NO: 563517 - DNA, 393 bp, Homo sapiens
gggagtaaacctctatgatttctgaagcaaacaggttaagccttgcccctcatatacattccgcccagttctccagcaggttagccacagccctggattgaacctcaaaagcctaggtcttatccacgctgacttttaaagcagacaacatcatgctggtggatccatctagacaaccatacagagtcaaggtcatcgactttggttcagccagccacgtatccaaggctgtgtgctccacctacttgcagtccagatattacagggcccctgagatcataccttggtttaccattttgtgaggcaatcgacatgtggtccctgagctgtgttattgcagaatcgttcctgggttggccgtaatatccaggagcttcggaccatgatcagatt

SEQ ID NO: 563518 - DNA, 262 bp, Homo sapiens
gcccagattaggttccaccgcctcgcctcctggcgtgtcagcgagtctcctgcctcagacttctgaatagctggggctacaggcccgcgtcaccatgcccagctaaattttctttgtagttttagtagaaatggggttccgccatgttggtcaggctggtctcgaactcctggcctcaagtgatccgcccaacttagcctccgaaagtgctgggattacaggcgtaagccatctcgcgtattgtttttttaataaagtaatt

SEQ ID NO: 563519 - DNA, 343 bp, Homo sapiens
aggctcgtgagagtataggacgatgtgctggacaagatgctgtagaggcgggaatccacttcatgtatctaccaaccaagcaccgtgggaggcagtctcagactcgatgaaacgactacaaagtgccatgacagaaggtggtgtggttctacgggaacctcagagaagctatcaataaatggcacccttaattgatttgaacatgtcaatatacatctgtcagccactacagggcatcagaagagcgcgtctggaagcacagccagcttggccgttttacagcactaatgttgcagtggacatattatttgtcgttaaggtcctcctcctccccgggatacag

SEQ ID NO: 563520 - DNA, 412 bp, Homo sapiens
cccttgagtacccttctccgcgtaatcgatgatctgtttcttgccctccacggtgtctccagagttcacagtgaaggcttctgagtggtacaccttttaagcctcgtccaaagtcttatccactagtctcaggccctcgctgaggaacagtcctttgccggtgttcagctgaacctgcctgtctggctggttaagggcacgaagcagttcctgaacgctttcatggttatgagcccccggaatctcctgtgaggttgaaattcaggccctccaggttttcttggtaagtgtcagctttggtccgcagtgatagcattgcaaaggttgtagcgatgctcactggggagaaaaagatattggatctgttgcactggtgcgacagctggcggtatagtctggagtcgatctctct

SEQ ID NO: 563521 - DNA, 314 bp, Homo sapiens
tcagttgagcccagtgtttgagaatcagcctaggcaatatagtgagaccccgtctctacaaaaatttttttagacagggctgattgtacatgcctgtagtcccagctatttgggagacgaggtgaggaggatcacttgagcccagggaggttgaggttgcagtgagcagtgtttgggacagaaactctgtgtcaaaaaaaaaaaaatttttttttttgaaagacagcacaggtaaattgtttaaaatagggcatcttgtatttattttaaatttaaggatttatcctttccagacacaaattttttattccact

SEQ ID NO: 563522 - DNA, 223 bp, Homo sapiens
tgtgtggccttcctacacagtatacgggggctccctaatagcatatgggggcttctatagataatcattgcgagcttcctacacagcactagggaggcttcctacagcactgggagatctcctataatgtacatatagagggctttctacataagcagtgtacaggggggcgtatcctcacagcatggagctacctggtagtcggagtatcactatgaacaag

SEQ ID NO: 563523 - DNA, 127 bp, Homo sapiens
ggactgtagatgtctgaggagaatggtgtgacctaggagtcagcaccttggtgaacaagaggagtggcacaaggccagtggtacctcgcagaggggaaagcaggcattacaggatagcatctcccag

SEQ ID NO: 563524 - DNA, 373 bp, Homo sapiens
  misc_feature (61)..(61): n is a, c, g, or t
  misc_feature (73)..(73): n is a, c, g, or t
  misc_feature (129)..(129): n is a, c, g, or t
  misc_feature (166)..(166): n is a, c, g, or t
  misc_feature (290)..(290): n is a, c, g, or t
  misc_feature (335)..(335): n is a, c, g, or t
  misc_feature (371)..(371): n is a, c, g, or t
ggaattgagttttaaagttcccctattgccagccttatgtcttaattgaattcatcttcanagaagctgaaanagttttcaaaagaataactaggccgggtgcggtggctcacgcctgtaatcccagcnctttgggaggccaaggcgggtagatcatgaggtcaanagatcgagaccatcctggccaacatggtgaaatcccatctctactaaaaatacaaaaaattagccgggcgtggtggtgggcgcctgtagtcccagctactcgggaggctgaggcaggagaatcncttgaacccaggaggtggaggttgcaatgagtcgagattgtaccnctgcactccagcctggtgacagaatgagactccgtnta

SEQ ID NO: 563525 - DNA, 1239 bp, Homo sapiens
cttgttctgatgtcttttatccctactgatagttcctctttctcattatagcaaactaaccagagctccagggacagcctgaatgatctcagtgcctcaggctctgaggtactcatgcctcacaggaccccagacagatgcttgtcgggttataactccaaaggcttccttatgtagaactcttctgtagaatgttggcaggtcacgagcaagatgttcacactgttgtcaatcctgagagaatttcagcttctgaagtgatctaggcatgttcgggtacaaaagtgatgctaaagttgagtaggtgtccttattttataagggaaaaggacgagttgatgcaaaacaaagttcgaactcttttgagagggggtcattttgcagaaagatctctatttgaatgatgaaaattgctcaatgtctctatagggcttttaatttgtgaactaatttgggtagcggatcactataagttctactagtttttagaattatttaagtaaatgtgcaatacaatctatgttccggcgtccctatggcaagatacctagccgagagcaatcacgtttgcccttggaccctagtcccttgttgcaggtccttcactgcctgatgcagggggttcatcaatggctcaggccactttgtgaaagtgaaggttggggtataaccggccatggaacgcctagaactatcccgatactgtcgttccctagtctctccttcctcgaataccaggataccatcttctaattggggagaactcacgttggttcattcttccctacatgtaggatagaggtgatggtgcctaaagtaggttgaattgggtctcgttaaacttggtggaacttggccctcaagtctgttcaagtctcattgttgacttacaggtaattggcttacccggcattatatttgaagtggttggggactaaaggcattggaacacttctttacaggacttggtattcaaagcattcaaattccccaaacattttaaaaaagccattctttgcgaactgctatgttatattctcgccctttcccacaaacttaaagaacaggattccaacgggcatggtaattcaagaaccacaaagccattatttgtgggctgggccctctcaagttcccttctgggacaccccattatttacgggaacacaatcgggcctgggtcaacccaaaaggcaaggaaggcttgggaaccatttccgttaagaccctttcttcgca

SEQ ID NO: 563526 - DNA, 1522 bp, Homo sapiens
  misc_feature (174)..(174): n is a, c, g, or t
  misc_feature (1225)..(1225): n is a, c, g, or t
gcttacctcgaactcttacgctggtcgcgtggacggtaagccgtgtgacccggttgtctgcgtccgtgtcgccttcggtctcactaaattccactaagccactatgtcgtgagtgtcatctccatccacgttgtgcccaggcatggatgtctccgagattggtgaatgccttgnctggcgaggctctagctggcctgggaagcgacgggcatccaggcagccgatggacctagatcgcctaaagtgaccaaggacccatgtggcggcggacgccgagatgacttgccattcgaacgacactttgctgtccagatcgatggacggtgcgcctggcacaaggccacgttgccaccgggtggcttgtatgtctctcgtaagatcttgaggaaaccccaacagatcgattgaatgcatacgatttcgcacattggacgaccttatcctgtcgcaagtgtactgtgccaaccccttgaggcaagcatcaatacacaaggccaaggcgaaagaattgcttggcaccaaattagagctaattggcgcacgaagggacggcatcgtaactagcccgactatgggtcgagagggacgactcgagtattgagacctttgatgttttgggacctccgaaagtttctgccaaatgctgtgggatgaaccctaggtggcagcctgggttcctttcatagggggcttgtctttgaggtatttcccaacaggctttttgggttggggggacacctggttactgggggtttcaaccttccctcttggcctcatgggcaacggttctcctcaaggttcgattaatcgggccagggaaaatccaaagctgggatgtttctccagagtttaacccggggttacccccaggatttccaaccaggctggttacgtttgaaggcgccgttaccagaaattccgattcccttcatcgaaacccagtagcgaacgcctgggaagcaacttcttggacttggtgggcctttcactgcgtaacacacattggaggggcaatcctattggagaatctgggttggttgggaagaccctcggagtattcgaaagggggcaaaacccttaaggaggtaaaacatgtaaaaaagggacttttttgttaaagggccagcaactcggtggtgtatcttcccacataaactgtgctaccccgtgaagagatattggaatggtgggcccccgtgaattgtttagacccggtcaagaaganttcccgagagaccacccgggggggggcccaaccacccgcgagactcactgatgctctggtgggacaattgtacccgacgcgggtaattctgtctgcgtgagaaaaaacaaccacgagaatcagagtttgtgctgtgcagagaaacacaacacgcgtggttggtggtcctccacccaacaccagtcgtgcagtgtagtccgcacccagctgccagtaagtcattcagtctaagatacgagatgctgacagtaccgacagtcagtggtagcaccactaaccacagacgtaagtagttgt

SEQ ID NO: 563527 - DNA, 266 bp, Homo sapiens
taggtatcagtcatgagtagccctggctgctccacccactcccaggtagaccagaagccttcatacatctcacgttgggggacaacaaaagggggaagggggggcacgaaggctcatcattcacaataaaacaaaataaaaaagtattaaggcgaagattaacaaaatttagcattacataatttacacgaaagcaatgctatcacctccccgtgatgtggacattgcgcaccaggcgataggagaatccatctagaagtcgacca

SEQ ID NO: 563528 - DNA, 662 bp, Homo sapiens
  misc_feature (2)..(2): n is a, c, g, or t
  misc_feature (21)..(21): n is a, c, g, or t
  misc_feature (25)..(25): n is a, c, g, or t
  misc_feature (31)..(32): n is a, c, g, or t
  misc_feature (48)..(48): n is a, c, g, or t
angacaggatcatttactgangctnacttanntagaagttctcatttncttttcaaccagaactgggctaagaaccctaaaaagggtttaataccggaaggggggggagggggttttttggtgtttttttcccaaaggggccttctcaaaaaaaaataccccaccaaccttttggggggggggggttttttttccaccccgccccgcaaatttatctccccccaaatttgggcccccccctcttgtttataaacccccctgtgggagggggggggttttttattttaaaaaaacccccccccccccttttttaaaaaagagggggggccccccctcttttttagtaatggggggggggctcctctcccttcttctttttttttttttttttccgcacaacggggggggccaccaacacaccccagggtggggttgggggcgccaacacacctccccttctgtgaggaaggaaagaacactcctccttttttttttttggggggcggggggctgtgtttttatataaaaaagaagcaacaccaccccccccccccgagggggggggggggtgtgttttttaacccgccccacacacccttttttgtggggagaggaaagatatttttttctttttgagtgggcgctgttgtcggcgcttctcc

SEQ ID NO: 563529 - DNA, 293 bp, Homo sapiens
cgaggccacagccctgccccagcctcctaccagcacccctcactttgatctgtggcatctgggggcgttttacagccccgtgactgtgctagaaggaaagcgggagggcaggacctctggctcacaggagtccaagacacagagccagcatttgaacaatgactgtggtcccctctgatttagacccactgtgcgggcgggaaagcagaggcctggtaatgcccctgggccagagctggggaaagcacgactcactgtgctcaggataggggactctgaagcctcttctcctt

SEQ ID NO: 563530 - DNA, 983 bp, Homo sapiens
tcccaaaaagggatttttttttaattcaagtaactgcaaatagaaaacaaaaaggggacccccgggtgggaacaactatgggttacccctcccaaaaaaaaaggggggaggggtgggcccttaaccctttaagggtcatttgggcccccctgtggcacactcgtggatgcggccattccttaggggcggggccccacctttcccgcggggaggggggtaggctcggcgcaccaagctcgtgccgatgcccaagccccttcttccccaaaaaggagtcatctggggggaggggactcggggcacaaaaacaggagggcaagtgaggaatgacctgttgggcgcgtggttagcacaagcaagtgagggagtgtccaagaagggaacttggaacaaaaaacacccacatgtgtggttccaaaggatagcttggggacaaccgcggaggaaaaggtggaaccaacaaccttgggggggccaggtagcaaccaggaggggggttgggaaccggcacagggttgacctctgtgttaattggtgtgccccatctgaggggggggaaatgtgcgtgatgtggcggaaacaagtagggtttgggagagcacagccagagcccacttcggggttgggccaacagggctggggcctccactggaaccaatagtgatctgcttttcatcacacaaaatgtgtttcagactccagggaaggcgaggcgggtgtggccccaggtaaacaggaatggggacttaccccgtcggctttagtagcaaggggttgtcaccaatagggatgggagtggcaagataaagggcccgttgacacaaaagtgctggaactggggcaccccaatggacctgttccaggtgaaagggcacgaaaaggtggcataggagaccgcccagacataggagagcccaacaaatcaatgagccaggaagactacagtatagagagcctcctgtgtgttgctgttctggtggaca

SEQ ID NO: 563531 - DNA, 172 bp, Homo sapiens
cggtacgaggcccacgtgcaggtgcccacaaaagtcctcctaccctgagaccagcacaacctaggaaccctgtcaaaagccccatggaggtgatttcacaggccccctgctatggcgcctgacacacgggggaagccacgcacgagtgagtgtgttgggaacaagccccaca

SEQ ID NO: 563532 - DNA, 244 bp, Homo sapiens
  misc_feature (197)..(198): n is a, c, g, or t
  misc_feature (233)..(233): n is a, c, g, or t
tgggcgagagagggagacactgtctccaagaagaaagaaatcccagcggtagatccaaactgtagacactgtaggcttcgtccgttatagtatgtcaggcagctaggccgattgacagtaagttcatgatccgtggcgaggggttcgagcgaatcagtggcacggattcacacccatgaggacacaggtcatcatgnnactgcacgggacaactttggcatcccaacacgtcntgtgtcatagc

SEQ ID NO: 563533 - DNA, 504 bp, Homo sapiens
ctcagagaggctccagcctcgctggggaagcggtggagtcaggacagtccacacgtgcgtggtttgcactgagctgggtttgtcagttgttatggatgttgagctgagtggcactgtttggaattggagttgtcatgtactgttgtgggggtatctgtaggggtgttgtcagggcctctgaacagtgcatgtgtggctggctagggtacggacgtgtagctgtccagaacagtgttgtaaggcagtaggcagctcctggccgtttgggctgctatcagatgtcaggttgtactgggaccatccggtggtgtttaccggctgtgagtgaatcctggccatgttttgggtgcctcttcccttctatctttgtacagaggggggccccaggacacctggagggaggtctcctgtcttaatcagtccctccacaggtaagcaggcaggcaggctcaagccccctcactctcagtaattttaccacggtgcctaagttcagagccaggt

SEQ ID NO: 563534 - DNA, 188 bp, Homo sapiens
tattaatcgtcggcgaacaagatcgtctttcttcttcctctcctctccaaacatcttaagtcattgaaatctttgtctctaattttcactccccagtatcaccaaggctgtgaagattctcatatccaatggaccatttcagtgttcactctgaagcataaatcatccaaccttcattaaatcaattc

SEQ ID NO: 563535 - DNA, 195 bp, Homo sapiens
tttcagttatctttatgggaatgccccatttatctgaaaccaattttctgtattagtctgttctcacactgctataaagaactacctgagactgggtaatttatgaaaagaagaggtttaattgactcacagttccacaggctgtagaggaggcattgctggggaggcttaggaagcttacaatcatggcagaag

SEQ ID NO: 563536 - DNA, 937 bp, Homo sapiens
  misc_feature (311)..(311): n is a, c, g, or t
  misc_feature (427)..(427): n is a, c, g, or t
atgagattgatgttagaagtggatgatgagcttgacaagacccggagtgaattcttggctggtgtccactgacagacgcacaacgaggagcatagtctactcgtagacaagcaagagtacctatcgtagtacaatagacagagcgatcaaagcacgagctttggaccgcactgcggctcgggcagtgtccatagcttcgacgcgtcttgccaaggaagacccatctaggggtttccatcgaggatgtacctggtcttccatgtccccagttgctatgcgtggaagctcatatgagacatcgacttgatgtngagatgggttacacccacgcagtgagcgtatctgcacgtaagctgattcttcgtatcttatacctagtcctcttgagggcgtcgatggaagtgcatagttgatgcacagtatgacntatcgtcatatccctagagtgttggccaagtcaagggagagcgcataaagaacagtctagaggtcaacgctctctttggagaaatcctgcgaataacataggggccatctaccgccaacatgccactgaaattcagaacttgcaagccaatttctttgaatttagtgagccccttgttgctttgccattgccactcactaggtatctagccatatgagttcttagctttgaggggccgtttaccatagggggacttgccttgtacgtgggttcaaaggtgaaccaaacaacccagaaatggacagacggggtcattcacagagaaccacgcctgtataatcccgttccgttcgttttcaacgcccatagtcttcttttccacaacccccaccagaggttccgcctttaggcaccaacagaaagattcgccattgtttgccattgtacgccatccccttgggtcctaacagtaggggaccgtctaagaattagtgttaagaagagaaacgc

SEQ ID NO: 563537 - DNA, 408 bp, Homo sapiens
aaattagcaacccgtcgacacggatcgaatcgatgcggtcgagagtatccgtgagcggtcctggaacgaccgcagtgaggtgcgcggacccttcgacatcatcggcgacgtgcacgggtgcgcgtccgtaattgcgcactctgctcagcaaactcggttggcagatccagtacgacggggcggacgcgatcgacgccacccaccccgaggggcgtcaggccgtcttcgtcggggatctggtcgatcgagggccggatacccctggggtgctgcgcctggtgatgggcatggtcgcgtcaggcaacgcggctgtgtgtgtccggcaaccacgaagcgaaactcgtccgcgctctcaagggctccaaggtgaccgtctcccacggtctggccgaatcccttgctcagctg

SEQ ID NO: 563538 - DNA, 123 bp, Homo sapiens
aggatccgcgtcgacttctgctcttggaggcagcagtggtcaaagtgccctgaagaaatttaagtctatccgtgagacatgaaggagaagggcttgtgggggagttcctgaggacccacaagt

SEQ ID NO: 563539 - DNA, 400 bp, Homo sapiens
gatcgcgagcggcgccctttttttttgagtctcgctctgtcacccagactggagtgcagtggtgcaatctcggctcactgcaacctccgcctcccgggttcaagctattctcctgcctcagcctcccgagtagctgggattacacgggcacaccaccatacccagctaatttttgtatttttatgtagtgaaaggggttttaccagtgttgggcaggctggtcttgaactcctgacctcaggtgatctgctccggcctcagcctcccacagtgctgggattacagggtatgagccagccacgccgcggcccattataaatttttgtttagacaagttctgttggttttaagagaaacggggttctgtgtccccattggcccaaagggggtggcgatgggg

SEQ ID NO: 563540 - DNA, 489 bp, Homo sapiens
  misc_feature (488)..(489): n is a, c, g, or t
acacaatgaattggtaccatccgttgttggagatcaaacctagaatgtccttagccagggacctggaaatgagtggtggccacagtctgttaggagtcgcttttgcagagtggatacatgtttctgctgttaaagctaacagcctttgcagaagttcagatcccttgttggccagtattgacctagtcttctaaaacgacagtaaaagtctacaagtctttgggaagcagctctatctatctatgctttaatactttctggactgcacaccagtgtgctgtgcagtcatgctgacactgaggtctcaggtgacttctgtgcctttgtgataaagggtgagataaaccatctcagagggaaggctggtgaatcattacagcaattttggggaccccttgtgccttacctcgaaatttttttaaaaggggttggagatttcttgggtccatgaaataagaggcgcttatattgattcaaaaaaaaaaaann

SEQ ID NO: 563541 - DNA, 1073 bp, Homo sapiens
  misc_feature (260)..(260): n is a, c, g, or t
tgaggtcgctcacagctggtaaaaggcggatgacagcgggcaggaaatccgatatctcgctcccaaagtgcccattgtgattcaggtgacgatagccttcccgtggggccccctccacaggatccgcagttcgtcaagaggccacagtcagcaacggtgtggtcagcgaggccgcaagtccaccagcaggctccacccttctcagtcaagtccctagacacagtcgagaggccgagtacgccgaggcccggaagcggatngctgggcagcgccaggccctgaggaggtagcaggagtaaacaccaatcgctccgataggccgatatccaggaatcgtcccagaacccgttacgcatcaggcaggtcagcccaagtaagtgtgattcagaccaggcttggggttcctgattggagtctcaatggtcttcaaaactaggcgcagactacaagtgtcgaggcaacgaaaatgatgccgccgattatgcgtgccgatcaatcgcgctcctggtgtcgtccggccacgggtttgcactgtccgtggcagggacagctggacttgagcagagggaacgacctgacttacttgcacttgtgatcccccttgctccggccactgtgaccttgaaaccccatgcactgtgacctcccccgcttctaccccttcccactgtgattggcagcatcgacaagggctgttccaagtcaactggaaagggaaagggtgggggatagcggaaagggttggggaaaagccaggacacgaggactcgaatgaaggccggaacactctgccactgttagtcaagttaggggatagaatccatgtccctccacccaatagtacaaggtactagctcgtgacctcaatcggactcttggggaatatggcataccacccatagagtagcacgttcacaacccaaacacgaaccgtcgccagttgccaggttagcccgcacacgcctaatgtacactaagatccaagggcaaataacatccctttgtctctaaagtatttgcggaataatatggaatgtatataccgcaaattctctatcatgacagtataaact

SEQ ID NO: 563542 - DNA, 781 bp, Homo sapiens
  misc_feature (1)..(1): n is a, c, g, or t
ntaccgcagtgtgtgtttggctttccgtggttgcgcccttgatatttgggactgtgcgtcgtcctctttcctggcctcgcccgtttttcgtgggtgggccccctctctcgtgcggatgctgctgtgttctgggacacccatgagtcgttcgcctctgtgtgttgaccccaccacgcctgaggagctatcctacctccctcgcgctcgcgggttgcattctcattccccccgcggtggccgttaattttggtcctgttaccgcgtgtctcccagacgggggggtaagatctaagtcttggcaccggtgcacgcgctggaatgagtgtcgatagttcctttgatggttacgcgcctctttcgacttcgcagaatgtgggcaaaatagtacacgttcggtaagcctgagtgttcgcacccaccgacataatccctgttgtggcccacgcgcgtggcgcagtcggtgtatgttggcgagagacgattggcgcttgcatagcctacttctttctgtttttgttgagaacatattttctgtagtgtagtgcagcgctcgtggagactgtcgtctgcctctattttgcacacgcaaccactattctctggtggcttttgtttcaaccccacgtatctgtggctagtgtgacggcatttatactcgtcgctacaccaaaaaggagataatattccctcactcacccctcgtgtgaccgctgacaaaaaaatctcgtgccgctctatacagggtgtagggataagaccaaaaaaaaacccacatataaca

SEQ ID NO: 563543 - DNA, 207 bp, Homo sapiens
gatgatctagaggatcccattgctcgccggaccagcagccctgttgaagtatcacaacctaccacagccgccgagctcaactccaacaacacacttttctgccagttccacaaccttgggccgtagtgaggaatcaacaacagtccacagcagcccaggtgcaactggaacagcactcttccctacccgctctgccaggaacccacg

SEQ ID NO: 563544 - DNA, 998 bp, Homo sapiens
  misc_feature (226)..(226): n is a, c, g, or t
gctgtggcccagtgacgcgagctgaacggaggtggatggggacagagcgatcagggtgatggggcctcatcgcgcccaatcggtggagggtggacagctatgcgcctcagcccgtgtacatggatcccaacctgaacttgatgatgcatagaaaatagactctcgtcgccctcaacaactcacgaacactggaggatatacacgagagttctcgagtggcgttcgnaacgggacgcgagggtggggtgatggattggggacggggaaggatgaatgatgatcagtcacgtgtgctcagcgatgtgggaacggtgtgtcaaagagaagtgttgcttgctgtgaggacgctgggaagggagtatgtagatggggggctgaactggaatactatgtctgctgtgagatgggagcgaatgggccaattcatgctacactcaccactggattgagtcccttgaagtggcccaagatctcgagtacctaggattctgatggggttaatcatcttcggagattgcgaacgagaccaatgtataggtttaccagaaggttcctttccattaactaacggaggtagagtacgatccccacatattgtggttcctggtgcaaccaaaggtagccttctgagtaagaaggggtctaaccagtgtctacctactccgcacgaaggtcggcatttcccgtcctagggggaagggacttgcgggcgcattgcgctaaggccctcaacaccatggagagggcacataattcttttgttgcatccctagggagaagtaggactggcaagtgggaactgggaccagcacggaggagggcgagaacaacttgggcccgctgttatcgccgctttaccggttgtgcagagtcaatctttggcaccaggaggtacaaggtgagccagcatggcgaattacaacgcctctcgcagagatacgggtcaatgggcggagattagcccggattcccagctcggttccagattaatatgaccc

SEQ ID NO: 563545 - DNA, 278 bp, Homo sapiens
  misc_feature (66)..(66): n is a, c, g, or t
  misc_feature (172)..(172): n is a, c, g, or t
tggtggtgcacgcctgtggtcccagctacttggggagctgaggcagaggggccatttgcacctggnaggtagtcaaggctaccatgttcacgccactgcattccagcttgggtgacagagtgagaccgtctctcaaaagaaaaaaaagtctgggcatggtggctcgcacctntaatcctagcactttgggaggctgaggcgggcagatcacagggtcaggggatagagaccatcctggccaacgtggtgaaaccccgtttctacgaaaaataccaaga

SEQ ID NO: 563546 - DNA, 115 bp, Homo sapiens
agatggccgacttcgatgatcgtgtgtcggatgaggagagggtacgcatagcttcctaaattaatcactcatgcacccccagggggaatttaatgaggtattcaattgacgttcg

SEQ ID NO: 563547 - DNA, 136 bp, Homo sapiens
  misc_feature (16)..(16): n is a, c, g, or t
  misc_feature (95)..(95): n is a, c, g, or t
tctagagatcctacgnagagagactggtgagggctgtatctttcagaccagacggggaggcatctatcagaaagtcactctgctagctcggcatnagcgacagcacgagcgcttccacagaggtgaaaaactcgat

SEQ ID NO: 563548 - DNA, 136 bp, Homo sapiens
gcaagaaagtatcgaagtacccaaggtatgtatctatactgtacaaaaaatataaagtaccaatgatgtatatatactgtacataaaatatgaaagtacatcaaatatatataggatgctgtacataaaagggaac

SEQ ID NO: 563549 - DNA, 290 bp, Homo sapiens
atatcagttccaagtgtcgagcaaaactcaaaaaggcttgagcaatatgagaatctacttggcttaagtaaagcttagagggtagctatacagggctgtcccactacttttgcaagtcctcccattctgccctcctcttcctgtatgatggcatcatcctgagcactgggtttcctacatgaagcagatgcttggaacacttacaagaatacacatctgcgcacttactaaccaaagcaggagaatataacgtgccattattcctaacacgtatccccagactccctctg

SEQ ID NO: 563550 - DNA, 945 bp, Homo sapiens
atacacacacacatttgaacactctcaagctacagaacaaattgaaagtgaagaataacgaaacatactttttaaatcacctgagagcaacgttactggtatggtatattctcaagaaacctgcaattattgtaacttcacttgtcaaactgagtaattcatacaacgaatctaatcacatttaatattggcaatattctcatgcatccagaagtgcaaagtcaggctatttcattcttctatctgtattataatactaaactgcttctgatatttctataaacaatcatacaaaatcattagagaacacctaatccaaatccagcatcacagatacaggacatttataccaacgttaagtcattttccctggactaccaggtttcatgtaaatcactttatacaagcagattcggacaaaacttggtatattaactgctgctctcaaaacacaatgtaagactgcaataactagtgtcctttttcttcaaagtggtctagcgcattatccatgtaagctataaacactacacacgaaaacaaatgcctgacaaatgacatatatacataaatgtcagtgtacgaagccactgggtttacgatagatcacctcacacttggcattaggggaacaattaaccacgaggaaacacggaatcaccacactaggcccaaaatactttactaatctagcttattcactatttcgccctcactatccatattgccccaaatgctctcgaactaatttgcccacagacacttgcagagggtcactcgcagtctggggaccaaggacacaaaacgacccgtatcagcaccttaaccatgcgctcacaagcgccataaacttttcccctatcgtgaccactactatgaaactacagcatatttatcaaatatttaacacatttcactcgtgcttcatagaccaccctaacttta

SEQ ID NO: 563551 - DNA, 438 bp, Homo sapiens
  misc_feature (346)..(346): n is a, c, g, or t
  misc_feature (395)..(395): n is a, c, g, or t
  misc_feature (404)..(404): n is a, c, g, or t
  misc_feature (436)..(436): n is a, c, g, or t
atgttcggctggcgcgctaatccgcatttcgggccgttccacatcctaagcaacctgctgatcttcggtggtttcatcatgctcgcttccgcctggcgggtgctgtatctggcgcagcagcagcaccgtctggccaccggtggactctatacccgcatgcgccatccgcaatatgtggcgtttgtcctgatcatgctcggcttcctgctgcagtggccgacgttgctcacgctgatcatgtttccagtgctggtctggatgtatgttcatctcgcgctgactgaggagctgagatgcgctggccgagttcggccgggcatacgaagcgtattgtgagcgcacaccnacgtttcatcccccgttggagcagtggtgcgtcgaaggcgtcgtctcanttgatcacngacaccctccagtcagcaacaatcctcctgcnaa

SEQ ID NO: 563552 - DNA, 808 bp, Homo sapiens
cagacctaaaatcgctcatgcatactcttcaatcagccactatagccctcgtattaacggtcattctcatccagaatcccctcgtagcttgcatccggggcagtcatggctcataatcgcccacggagttacatcctcattactattctgcctagtcaaatctcgaaagtacgaaggcactgccacaagtcgcatcatgatcctctctcgaaggacattcaaagttctactccacaacttaagtagctttgtgatgacttcgtagcaagcctcgctgacctcgccttagcccgccgactattaacctactggggagaactctctgtgctagtaatcacgttctcctgtatcataatatcagctctcctacttacagtgactcaacagtagctagtgcacagtccctatactgccctctacaatatgttaccacgaacacaagggggtctcacatcatcccacactactatttaaacaacatataaaccctcattcacatgagaaaacaccctcatgttcatgaggagcgtatcccccattctgcctcctatccctgcaatcccgtacatcattaccgggttgtgctccattaggtagtaggaagaattacaatatctttgggtcgtcgatctgccttggatgtcttttagcctcttcgtgaggccggcggcctaggagatctcattggttgctcgtcccctggcccgggctgtttgtggcggggttgccgtaaaaacccgggggcccggggtcgagcacccgcggggttggggcccgggctctgcgggttagggtgtttcccgggggg

SEQ ID NO: 563553 - DNA, 140 bp, Homo sapiens
  misc_feature (104)..(104): n is a, c, g, or t
ggcggcgcagcggagcggggcagagcatcctgcgccccggcgcggggccctgcggaagacaaatcgcctactttggacccgccgcagagcctgggcggaatacngattttgtttttatgaccacgcacgtcaccctggaa

SEQ ID NO: 563554 - DNA, 172 bp, Homo sapiens
catcgttggcggtgcttcgttctctgtcactccctcctgcttgttcctcctgcttgtgatactcctacgtggtgcccctcttcctggttgtctgtggcctgtttcaatgctgtcttgccatcctgtcgtttgttgtgcgcctccctgcctgtcccacccccatcaacccgtg

SEQ ID NO: 563555 - DNA, 871 bp, Homo sapiens
cgtctgcccctcgccgtcgccccgctgacctcaaccagccgccggcgaaatggcccctaagcgaggcggcaaggcgccggtcccggcgaagaagaaaacggagaaggtgaccaacccgctgttcgagaagaggacgaagcaattcggcatcggtggcgccctcccgcccaagaaggacctccaccgcttcgttaagtggcccaaggttgtgcgcatccagcgccagcgccgcatcctcaagcagcgcctcaaggtgcccccggcactccaccagttcacccgcaccctcgacaagaaccttgcaacgaaacttgttcaagatgcttcttaagtaccggcctgaagacaaagttgccaagaaggagaggcttctaaagagggcccaggctgaagctgaaggtaaaactgttgaggccaagaagccaatagttgtgaagtatggccttaaccatgttacctacctaatcgagcagagtaaagcccagctggttgtcatagctcatgatgttgatccgattgagctggttgtgtggctccctgctctttgcaggaaaatggaggtcccttactgcattgtcaagggaaaatctcgccttggatcgattgttcacaagaagactgcctctgttctgtgcctgaccacagtgaagaatgaggataagcttgagttcagcaagatccttgaggctattaaggcgaacttcaacgacaaattcgacgaggttaggaagaaagtgggcgtggtggctgtcatgggctcccaagtcgcaagcgaagaccaaggccaggcaaagggcttatcgcaaagggagctgcgcagcggatgaactaagtttagcattgtttgaaccaatatctattcctcattctt

SEQ ID NO: 563556 - DNA, 327 bp, Homo sapiens
tctctgctcccagattcaaccaattctcctgccttatcctcggaggagctgggactacaggtgcgtgccacacacaccggctaaccttttgtatttttaatacagacggggtttcaccactgttggacaagctggcttggtctggaatctcctggacctccatgcgattgccttaccttccgcctcccaaatgtgctgttgattacagggccgtgagccatctatgcttggtccccagtttttctatacatcttatgacactgttgatgatcacacacttttaatgtcatcagcatctctatactagtgctttagagactatgatcc

SEQ ID NO: 563557 - DNA, 880 bp, Homo sapiens
gcagagcggggggggggtccgaaggaagaaaggggagggctggtcgcatacggattattgcctactgggatccatcttcaaactcaacctgggacatgtgggcaatatttgttccaaaatattttgctccatagggtttgccatcgggccacttgacttggacgacttctccctcaacaggtggggccagcttcaaaccgcgctccgctcacgacgtcctcaagacacgcggctgtgacaacggaccatcgcagagcatgacgccgtacattgtttcggaggggcaccaggctccgatctgaacccgggtacacccgggccggaaatgggaaggtaaccagcgggggcgaaaaaaagaacagaggggggggagaacgatgcacgagcgagaaccgtgggtgacgggcgggacagggcgacgaacaacctgggtctggcggcgggacacgtgggataagggccggccgagaaaacaggggaccaaacgggcaggggcgggggggcaccgggggcgacacagggcgaaggaaaacgaaaaacccaaacggcgagatgggaacacactggcccggcacccgggtggtggggcggtgggggacaggagggagaggaggggggacgtagcgggcacggtacgggcggaggatggatggtggcgacacacggaccgaccgagaccaggtcccagccagccagcgagggcgacccgcagcgagccagccccgcggcgggcggttgacacgccagccgctcggcacgcgtgcacccaccaccggggggggtgcaggaaccagggtgggcgcggccccacactcaacccacacccgagtgcaacagccccgtgacacgggggggcaaacacaacacgaaacagtggtgg

SEQ ID NO: 563558 - DNA, 113 bp, Homo sapiens
actctagcaggatcccagatgtaagcagagaacccggctggagtcctgggacatgggctggaggagctgggaaaggctgagacttctgtcaactattccctagagtttgcagg

SEQ ID NO: 563559 - DNA, 315 bp, Homo sapiens
aatgccggtaaatacgttctcctaaaaagacaaaagcatattctgaaagaggcttgaagaagaagatcctagagacattcacgagagaggagggatacaaaagatgaaaatcagacaacaccgtttttcaaaaactgggctaccaggggatgccagcccccattgtctcaggagagcactggcaggtttagaatcccaggtccagtgaaacgtttcctaaacgcgctggtctctaaatcactaaggggacagctggccagcaggagagtcggctgcaacccaaggtctatataggaagaagacagcctacccgca

SEQ ID NO: 563560 - DNA, 364 bp, Homo sapiens
  misc_feature (285)..(285): n is a, c, g, or t
  misc_feature (288)..(288): n is a, c, g, or t
  misc_feature (349)..(349): n is a, c, g, or t
tgcactccagcctgggcgacagagcaagactccgtctcaaaaacagaaacaaaaaaagttaattttaaaaaatacaaacaaagctgaatttccagatctttttctattctaaattctataaaaattctaactttactccttttttttctgctgaatttacagttaaatattaatatgattacacttgctctgttacttctttccattcatactgtagtaccagtgttacttaaaggtcacacttggctgggcacaatggctcacacctgtaatcccaccactttnggngaccgaggcgggcggatcacctgaggtcaggaatttgagaccagcctgcccaacatggcgnaatcccatctttact

SEQ ID NO: 563561 - DNA, 257 bp, Homo sapiens
ctgcgccttgaaccatggtcctccagttcctgcgtccgattcctgtccttgctctcttacactgagtaccctggcatggcaatattacggtctactctgattacgcacgagctgttctagatatcagtgatgggttatccacaaatactctgatatacattatgtcttctcttcccggctattaatgattcatgatacaaggaactaggccgcgtggtcgttgttttctacagatgcgctcaagaagcaggaactgg

SEQ ID NO: 563562 - DNA, 346 bp, Homo sapiens
tagtcacggttggctcatgcctgtaatcccagcactttgggtggccgaggcaggcagatcacttgagattaggagttcgagaccagcctggctaaacatggtgaaacccccgtctctactaaaaatacaaaaaattagccaggcatggtggcgtacccctgtggtcccaggtactcaggaggctggggcaggagaatcacttgaacccaggggggcagaggctgcagtgagccaagatcgtgccactgcactccagcccgatgacagagcaagactccagctcaaaaaaaaaactagtgtggtactggcagaaagacagacattttaagaccaatggaatagaaga

SEQ ID NO: 563563 - DNA, 244 bp, Homo sapiens
agtcgctcaccgttgtcaccaactaccggtcctgggctctgtccaggcgcccagttacggtgcctcggaccgatcagcagctgcgtccagtgtctatgcaggcgctgggggctctggttcccggatctccgtgtcccgctccaccagcttcaggcgcggcatgcggtccgggggccttggcccaccgggatagccgggggtctgggcaggaatgcgacggcatccagaccgagaaggagaccat

SEQ ID NO: 563564 - DNA, 191 bp, Homo sapiens
aggctattgagggaagaggaggaaggagggaagaggaggaggagggagggaagaggagcaggagggagggaagaggaggatgaaggagggagggaagaggagggagaaggagggagggagaattggattccttgtatttttccaaacactctgtgccatttaaagacaccatgcttttgaacattctaatc

SEQ ID NO: 563565 - DNA, 957 bp, Homo sapiens
tccgcgtgcaaacttttcgagaggtataaatttgcgggacaatttttaggggaattcccttaagggcggcggttttttcccgcgctccaccaccttggtgtcgtaaaagcctcttggcagggctctctactcaattggtagttttcgccataaaactccgtggcgtcatctttgtcagagaccctcgttccccgggtttagagagcgaggttcttttctatctttggggcgtcttcccaccggttttccctccacaataggtcggagtaatattttccgctgtccgatattcggcctgtgttgggtataaccccccctggttgtcgcccccttgttttaaggttactgccttctcccagccccttgttggtgttccgccccggtggctgtaaccaaacgcgtgctgagcctccctggggtggggccactacctacaggcgccccctcacgcttcttgtgctgtttaagatggagacccacctgttgtacgacctctccggcagaatcatgccgtttctcaacaaaacatgggcggcgagagtatattttctggcggacaacagcacacgatgttgttttgggtcctgcgattgttcaacaggagccagaaaatattcacagaaaatgtctccggttgttgttccccggggcgccgtttaagtatgctgcgggtgtttataatccccggcgcgtaattgtcgccaggaccaccccttttggtataaatctccccactttctgcgagacacatcgcgcgcccacaattggcaaagcatacagtatggtgctttctcccaagatgatggccgccgggtttcacccagcgcacagcgtgcacgcccatacagatggtctacccctccgtttgtcagctcaccgccttttgtctaattatgtgagacagaaaatcagttggtttcgcccccccgaaataaattggggaaaagcccacataca

SEQ ID NO: 563566 - DNA, 137 bp, Homo sapiens
gacactagttaccccccggtcagcccatctagccctagtcctaccattcctcacgccatctgcatccacatcttgagtcctggaacggccctaggtgcatgcacctcactgtgcaactctgggagcagcatggcagg

SEQ ID NO: 563567 - DNA, 507 bp, Homo sapiens
taccggtccggaatcccgggtcggggcagttgtgggggaacacggtgggagtaagaccggcccttgggtttgtgtgggagctgggtgaggcctgtgactgccagctttcccccacttccctgacaacctgcatgactcagcagaggcagccataactctcctaggtacacgactccagtgacctgggaatctcacccacattccctacagcagccgcagcaagacccgcccaaggagagtctgagctcagacacgcctagctccacccccacctgatggtccttccctatgcaccctggcaggaagacaaagggcaaataaatcttgggagttctagggccccgcccactgctggttcctccccatattaccacagctgatgctttctggaaaggaccacctcctggcaggaggccaaccagcaaaaaaaaaatagaccattaacccaccaaagctccattgtaccctctgacacctccaccgaacaggcactggtagccatggctg

SEQ ID NO: 563568 - DNA, 312 bp, Homo sapiens
cccgtttgggtgcaacttaaaaaacgtggccgttaaatgttttaggtcccgggcctcccccacgtgggcccagggtggattcgagctgtcaggaagcatgccaagggcctgcccatagtgcctcgggtcctgttttagggctgggccttcgatgatttccgggacgttttagacagtgaggattagataaaggagctgagcaagaccgtgctttaggtgggcctttcggcccccccgggggacgtgttttttttttaaccctggagtgagtgagcaggggtgaaaaacaggccccccccccgttttctgtta

SEQ ID NO: 563569 - DNA, 974 bp, Homo sapiens
aagtgcagacaggctggtggaattgcccaggagaacggagcgtctacaatgcattcgacagttgggtgactccagaccaagcgtgcggacagcactgtttgctgtcttctcgcgtcagctgtttcttcgtgtcttcagaaggtgggccttctggaatcgggtccagcgtgggcgcttgggctccgctgacgagtattgacagggcatggacgctcgccctccatctcattcacaggccctttccagggcccaagctggggcatgacagggtggcatggccattggggagtctcttgtgcaactgcaagtggtttctgaacccccaatcccagctgagttgtcagacaggccagactggtgtgcgggaaactgggccctggccctgtggagtggttgctgggtgtgagacacactgcccacggcatgataccagtctctagctccatggagtggtccctgacagaggctggtgccagctcatctttgaactttaaccccttcaaagcttcaccagaaatttggttggcgcaaatccacaacagaaaggcgtgaaagaaagacagatccatgatctgctggtgggctggttgcccgtgggggcacgatgcctgtgtgacccccggagacacaggaccacggccttgtgaagattccgggcctgggttgagaagcgacctcccagcacttggggatggaaacgggggtgggaggataggccccgccccagcctggtgcaggaaactggaagtgtaggaagtggccccctaaaagggagaggcccgccttgaacccagggaatccaacatacccagccaggagaggccccacccgtgaagtaggtaacacggccaagcctgaaaagccaataccgatgcccggaggaggactggcgccgcccgtggaccacgaaggcgtgccgtgggcagagaaaaaaacgcggaacccaacagcaccgtcaccgacaccacggagag

SEQ ID NO: 563570 - DNA, 368 bp, Homo sapiens
ccggctctaacccatcttttcaggctgtcatctgtagaccacgacaaagtgccgggattacagagcctgagccactacaccatggcctgtatattgaatgttatattgattttctcggctagtagtttagcctgctccttcatgaagcagcgtcttccttctgtctttgcctgttttttgttagcacacagattgagaagtgacatcatcagtgcaatttagctacctacaggggtaagcgcattgagtcatacgccgtgtctgttatataaagaaaagtatggtccctggtgttaggggcttagaatctagcgatgtcagtaggcactatggaacaacaggaaaggacattttctgttggacccttc

SEQ ID NO: 563571 - DNA, 346 bp, Homo sapiens
  misc_feature (43)..(43): n is a, c, g, or t
  misc_feature (62)..(62): n is a, c, g, or t
  misc_feature (103)..(104): n is a, c, g, or t
  misc_feature (285)..(285): n is a, c, g, or t
cgcctgtgccataatggaacattaagcctgaatgactctgacncatgattactgaataaggncccactgttgagacctatgctcaccaaaaaaaatttcaaannttactgctggcaggtggattgcttgagtcaggaattcgagaccagcctgaccaacgtggtgaaatgccatctctgctaaaaatataaaaaaattagctgggcgtggtggcaggcgcctgtagacccagctactcaggaagctgaggcacgagaatctcttgaacctgggaggcggagcttncagtgagccaagatggtgccactgcactgtagcctgggctacagagcgagattctgtctcg

SEQ ID NO: 563572 - DNA, 785 bp, Homo sapiens
atttgtgttgggggggaaccacacccacccgcgtgggggcctcatcactcggcccaacttccccacgaaaaagttttaacacaccagcttgtgggaacatttggcgagacaaatatacacacgcgcccaccagagtttctcccacccgccacggtgtttctctcacactctcactctctttatctctgtatctctctctttctcgataaacaactcgtgaggtagccacgagagagcccccccacttcgtttgagaaaagctcctctgaggggtgcacaacttaaatgtatccacgccacatggcacagggtgtatagggagaccacatttgtgcacatcgtcacaacgtgccctcttgtcacatatggcctggtttgaagaaaattcacgggcccacacagtcacatgcacagcccaagtcccactatagtaaagtttaatttcccacacttatgcgtctataattatggttcacatttcccaatccccgatcacacactggaagggaaatcggacacacaggtgaatgccacgcacgttcctgccgtccgtctgtcacagggaaagccacaggcacgaagcccaccacagaagcacatggtccacatccacgagtgttccctgagccccctcccccatactggagacccctcttcagtgtaggaagatctgaaatgggtgctaattcccttcttcatgaaacccgggccctcttccttcatctaaagcagcccctcctaggtgaagaagtgggaattaaattggaaataaaccaccagtttaa

SEQ ID NO: 563573 - DNA, 130 bp, Homo sapiens
  misc_feature (44)..(44): n is a, c, g, or t
  misc_feature (66)..(66): n is a, c, g, or t
  misc_feature (85)..(85): n is a, c, g, or t
aagcgcatggatcgcatgatggtggagcacctgctgcgttgcgnctactacaacacggctgtcaantggcgcgccagagcggcantcgaggacctagtgaatattgagatgttcctgacggccaaagagg

SEQ ID NO: 563574 - DNA, 485 bp, Homo sapiens
  misc_feature (87)..(87): n is a, c, g, or t
ttttcttctttgttggctgtgtgggaggcacaataaccggagtagggagaagcaggtttcccatcaagttcctgaaacccaaagtgnaagatatatatgaagacaagggaatttactcggaaatttaaagttttcccccaagaaaaggatgacagaattaggaagtgggagatgatgtttaaaagtgaaccatctcagccaggcacagtggctcacgctggtaatcccagcactttgggaggccgaagcaggtggatcatgaggtcaggagatcgagaccatcctggctaatgcagtgaaaccctgtctctaataaaaatacaaaaaaattagccggaccggtgatgggcgcctgtaattaccccagctacttgggaggctgaggcaggagaatggcgtgaacccgggagacagagcttgcagtgagcctagatcgcgccactgcactccagccagggcaatggagcgaaactctgtctcaaaag

SEQ ID NO: 563575 - DNA, 1440 bp, Homo sapiens
atagttctagacgcgatgcggcgcccattttttttcatatttgtggtcttaccgtccctatgagggctaaaagaggattcatcaagtgcacagacgttgtgtggcacacaagaactccaggtttgacggaaacgggatgaaacgtcctgacgcttgaaacaactataccttgtggcggcatttcacaggacacacgcaacacagcacaaccggaccgggcagatgggtgctgcggagcagcgtggcgcgtggcaaactacaggtgggagaagacaccgggcacaaaccgcctctgacatgtgcgcaaggatacgcaagattatccttgagaattgccgcatggggggctcattccctgtgggccgcggtattcatgaacaccacgcatttccggtgtccacaaccagcgttcccacacaccacctgtggaaaaaggcaggagagcagtgcacactgagtgaccaataagaatagtcagaacaagaggatgaattctcaaagacataccacatcatacttatggggattatccacacacaccatatacacaaaatatcatagccaatataacaatataaaaacccatgtgaatagaaggagtttgcatgcgtatagacggagaacaagccagcatacacagagaaactatgtgcgtcacacaaacagaagggaagaacgtgcatataacacacttttgagagacagaccaaaagcatgcgcaatctatagcacagaagggatggtacacagaaggaccatctacatagaaggggagacaaaagaattgaacagacctatatgaggagcacccacaaggggccacgagcaacagcactcgttactcacacagaattgttgaggaccaggaaaagacaacattagcacaaaaagagcaagcgagagataaacccacaactatactcaaaaacacaaaaatatatcccacaataatataagaaaacaaaagcgacaccattcatcgcaacggacattgaggggacctcagcggcaaccgggagccaaacgacaaaaaggaggagaagcaaagaatagcaacaaggagaaacataggagagagcgaaaacaaagaaaccacaccaaacacaggacaacaaatgacacgcgaactaacgagggaacagacaaaacgaaccaccaaaacaacacaacaaaaacgaaacagacagaacaaatgagagaaacagaagaacagtataaaaaaacacagacacaaagaaaagcaggaaagaacaagcacacagagagagaaaacgcgagaccagaagcacgaccaaagacagaaagagaaaaaacaagaaagaagaaataggaagcaacaaagagaaagaaacagaaacaaagccagaaagaagcgaaggaagaaagagagaacaaagacaagacacgagaaaaagcacacacagatggtacagacacaaa

SEQ ID NO: 563576 - DNA, 410 bp, Homo sapiens
cggatttattcctggaagataccatcctgctacaccatccacccttccggtatcccccggacctctaaccacccttgtgggcagattgctggaagacaccatctctctaaacccaatccactgttacctactgcccctgcgggtcacaccaggaaaataccatccacatccaccttccatcctgtctccacccccactactgccagtgtgcctcattcctggaagataccatcttgccacaccatgcaaccttcctatttccctctacccctctgggtcatttcgagatgatataaccacatctagccttccctgtttccccacagtgactataccacattcctgaaagatactgtcacacctcccccaacacttccaccttgccttgtctccccctttcccctttgggg

SEQ ID NO: 563577 - DNA, 1211 bp, Homo sapiens
  misc_feature (578)..(578): n is a, c, g, or t
  misc_feature (972)..(972): n is a, c, g, or t
  misc_feature (1120)..(1120): n is a, c, g, or t
  misc_feature (1211)..(1211): n is a, c, g, or t
agcggaactactgtcaggcgttactgcagagttagagaagggttcccagagccgatgccgacagtgtgaaagaggcccttgagctagtgacagcttgtgtgctcattcataggagacggagaggacaatgtgtaagatgccaacttccgcagatattagaactacatggacatatggcaagcagaactggcagacaaatttcatcgcgtgtctgtggaacacatccagccgtacttggttgtagtagaagcatccacgctgttatcttctaagtcacagtcaataactcgtgcgaagatattcaagtgggattaattgtattgaccgatcctagagttagccagattatacgacagcttacatgaataaggaaatacttgcgagagcaaaggcaaatgtcacagctaccagagtacgcaggcagtgctaagaaatcctcatgaataccttcagcgaacaaatacatagtgcaacgaagcaccaaatccagccatgtgcacttatatagcgggttatataaaggacacgtgattcttatgcacgtgcaaaggaaaggaagggaaaggataaggcactgnaaagacatatacgaggtgcagtggacttgtactatgtatttgcaactgggactcatataaggacgctacgcgttggaaaacgaagaaaattgtggaaacggagaaagtaaaaaggaaggcggagggataaacacgtgaatgtgaatggtttggctataagtacattattttcttttgggcgctaatatataaccgatgacttagagaaaatattttgcgaatgttatccgctcccttttacgccagagaaagtcgtatggtgttgtttctagggtcaaagattataacaacggacagagctgaaagcgagccccagtgaacgacggagcaaggcaagagaaaaaagcaaaggggttgttaggcatcataacagaagacacgtatttggggaaanaccaaaagttgtgggtacagtcttgggagaaatttagggtaagagggaaaaaggcgcaaggaaacttagggttgacatgataagcctctatgtgtgtgtaaggcggtatatatcagacgaaaacctgtgttaagaacacaacggagcnttaacgtggccataaaagtgggcatagaggggtttgaaaccatatactatttggtgcaaaggacgctcgagttatatgtgaaacttgagan

SEQ ID NO: 563578 - DNA, 113 bp, Homo sapiens
ccagaaacgagatcgcacacaacagtatgaagaaagtcagggggactgcaaaggccaatgttggtgctggcaaaaagccgaaggagtaaaggtgctgcaatgatgttagctgt

SEQ ID NO: 563579 - DNA, 799 bp, Homo sapiens
ggttagctcagctctgaagaaagacttccttacattttgtaatctgttacacattctaggtgtggtgtcacacagctgcattcatttgttttcccccagatcagtttcttggtggctcaattttttgccctgtcagtcaaaaacaaattaagtgtctactgggtactcatgtgctaaagaaaaaggaacagtaacaaaaagcttcccatttttccccaatttcatgcaaagaatctgcactgtcactttcagagccatttaggatcctgcttttctgttgctggtggaagccctgaaaattaaatgaatttttagtattgctagtgtctggctaaattcaaggttttaaaacccaccctaactatgctgcaattctagactgaaataatgaacagatgtcatttgaactaacaatatcgagaagacttttcactaacaacacagttgtctgtctagagatggagatttaattttttttgtctgatcacatgtggagtcccatttaattttcccctatcagtcaaaaacaattaagtgaagagaaagaagctattcgtgatattgtccttcgcaaagaaaactctttcctgacccaccaacatggcaacgattcagaggcagaaggtgaagttgtgtgtcgactgcctgatcttgagaaggatgactttgctgcaaggagagcaaggatgaaccaaaccaagccaatggtgccattaaatcaactcctctatggcccttatccaaagaaaggggcagagaaatcagatggcagcaaacagctctcaaagggaatctcaaa

SEQ ID NO: 563580 - DNA, 538 bp, Homo sapiens
aaacgatagaggaagaggggagtgaagtggggtctgctggtgaagacaacccagctggccaaatgaatcctggttggaagccttccgatggtgggtgtgaattacctgacgcagtgggtaaggagcacccttcttcagacggggctgtggtggcaccagctcccaagtctgaagaaaaagatgctgctgagatccaaaagcgcaaaaggctagagcaagctggaatcaaggtcatgccagcagcacagcgctttgccagtcaaaaacaattaagtgaagagaaagaagctattcgtgatattgtccttcgcaaagaaaactctttcctgacccaccaacatggcaacgattcagaggcagaaggtgaagttgtgtgtcgactgcctgatcttgagaaggatgactttgctgcaaggagagcaaggatgaaccaaaccaagccaatggtgccattaaatcaactcctctatggcccttatccaaagaaaggggcagagaaatcagatggcagcaaacagctctcaaagggaatctcaaa

SEQ ID NO: 563581 - DNA, 698 bp, Homo sapiens
  misc_feature (1)..(1): n is a, c, g, or t
ntggcatgggccaatcgtaaaaagatttccttggtagtcataaaatgcgggctcccagttatggaggcggcatacttttatcacaggaggatgggctttcttttccaaaagcattctccctatctctctttagtccaatttgtcttttccctgtgtgtccctgagccagtcactggtagagcggataaacgtgcggtgattatcatagattattctggtgtgagaagaatggatgctgggaagcccccaagtatccaccccgatttctcttttccagtggggaaaaattacagtaatacttggcaggacatttcccttaaaggcaaaagtttccaattagacttctttttacaatttattccaatccctaagatgagctaatcaccaaaaaaaaaataaagcctaagttattttcagccaggtgcggtggctctcacctgtaatcccagcacttcaggaggccgagacgggcagatcacataaggtcaggggtccgagaccagcctggccaacatggtgaaaccctgtatctgctaaagatccaaaaaattgccagggcgtggtggtgggttcttgtagtcccagctacttggtaggttaaggcgggagaatcccttgggcctggaaggtgccggttgcagtaagccaagatggggccattccactccagcctgggtgacagggctagaccccgtctc

SEQ ID NO: 563582 - DNA, 81 bp, Homo sapiens
gcggccgcctactactactactactgctcgaattcaagcttctaacgatgtacggggacatggagaaaacccggtacgccc

SEQ ID NO: 563583 - DNA, 235 bp, Homo sapiens
  misc_feature (14)..(14): n is a, c, g, or t
  misc_feature (16)..(16): n is a, c, g, or t
  misc_feature (45)..(45): n is a, c, g, or t
  misc_feature (55)..(55): n is a, c, g, or t
  misc_feature (59)..(62): n is a, c, g, or t
  misc_feature (71)..(71): n is a, c, g, or t
  misc_feature (96)..(96): n is a, c, g, or t
  misc_feature (205)..(206): n is a, c, g, or t
  misc_feature (228)..(228): n is a, c, g, or t
  misc_feature (235)..(235): n is a, c, g, or t
ctctgctgtaactntnggaaaaatgataccactttattgcttttngaagtatgantatnnnngtgtatatnctctagacttcaaactctataaagngtctcaaagaagttggctggataaagcctactgtggatgtctttatattcaaagattgatgatgcaatttgaatatgtgtccccacggaatctcatgttgaattatatnncctaatgtggaaggtggacccnggataan

SEQ ID NO: 563584 - DNA, 264 bp, Homo sapiens
gatactgccgtagtggctatcactgctgagcgactcattgccaagctatttccctctccaccaagagacagagcgcagctaatctacccacacccacggctgcataactgcagtttcagttcctaatgagggactgagtgcctcttctacaggcatgctagacaaaactgtaggtctactagatactaactacccttcccactaacccctgcttgtaagagacttgtactcatagttttgatagtactcatctaacttactata

SEQ ID NO: 563585 - DNA, 176 bp, Homo sapiens
ccattcgtatcatcggcactcgctatcatcggcacttcgctattcatcggcacctcgctattcatcggcacctcagtttatttattttttttaatttcttaattttttgagatagggtctctctctatcactcaggctggagtgcagtggcatgatcatggctcactatcctcatg

SEQ ID NO: 563586 - DNA, 335 bp, Homo sapiens
ctaaaaaagaaaaagcaaaaagaagatacttctcactaatgtaaagatggtaaagaagaaccatcatttactgagaacctagctgataatcggcacaaggctagatgttataaatatattaactccaaaacatatataagctgaggaaactccaaagcctccaagttttctatagcatcttcctgagaatacttcaaacttcacacttaaaaaaattcctccttcacaatgtccaaataatttaacattctgatctttatgacttcaaatgtgatactgaaatggtattcttggaaaatgattaagaatgagggaaggccgggagtggtggctta

SEQ ID NO: 563587 - DNA, 732 bp, Homo sapiens
gtgaccagcagttccatgccatcactgtcacccagaagattgtggatggaccctccgggagactgaggcgtgatggccgggaggatctccacaacatcatccctgctctaatgacgctgtcgacgctgaggtcgatgtcgtccctgctgctgaacgggaggctcgcgtggtgtggtctgccgtgtcccccgcgtgccgacgtgtcaggggtggacctgacctgccgtgtatgaagaccctgcccgatatcgatcgagctcctgaaggtggtgaatcccggcgtcggagggacccctcaagggcagtcctgggcgtacactgcgcaccaggtggtctccgctgacttcaatagggacgtccactcctccagtctttgacgctggggctgacattggctcctcaatcgaaacaggtttgtcaacgctacatttcctggtatgagcaaacgaatttggactaccaggcaaacaggggtggtggatccttcatggtcctcatcaatggacactctcgaaggtagctaacgactcctcgtgtggaccagcacaggcccctaagcaatgagcacaagagaaggaagagcagagcacctacactgctggggagtccctgccagatctcagtaccctctccatgactgaatctcccgctcctcacaggttgctcatgtagaccccttgaagaggggaggggctaaggagccgacttgtatgtccagcctaaagtacctgg

SEQ ID NO: 563588 - DNA, 122 bp, Homo sapiens
  misc_feature (7)..(7): n is a, c, g, or t
gtaaatntacaaagataacgtcgcaattttcttagatttaaatcaaagacattcatcaacaagatttcgaatggaatattccagaaatttctgagccatctgatcacaacaaccgtctttga

SEQ ID NO: 563589 - DNA, 211 bp, Homo sapiens
ctgctaaattcatcactcatgcaccccaaggggaatttaatgaagtattcaatgacggtcggctactacttaataatgacaatcttcttaaggaaggggcagcacatgcattttccagtatatacatgggtcaggtcacgcgctctttagatatagaggatatataagagcacagtgctttaatacacagcacgcgggtagccctggggta

SEQ ID NO: 563590 - DNA, 143 bp, Homo sapiens
  misc_feature (55)..(55): n is a, c, g, or t
ttacaggctgagcactgcaccggcagagaatccatgtttgttggaaaatatcacnttcttgttcttgactttggttttgatattcagtttagaacttaccctagctttcagacaattactggggaggcacacgcttgcagtcg

SEQ ID NO: 563591 - DNA, 854 bp, Homo sapiens
  misc_feature (66)..(66): n is a, c, g, or t
aaatagtaaaaaaaaaaaaaaaaaagaaaaaaaaattgtaaaaaaaaagaatactacaagaaacanctctcctctgctctctccttatcacactactcaacatgaaggcaataagaatgaagacctttatgtataattgacttccacttaataaatagctagcttggacttgttctgatggaaatagaaggagtccgaactactagagacgcaatgtaaagggctaatcttatcaatggcacttatgatacttacaccatattgtttatgataaaaaaaattaataaaattaatttgtataacaatcttacgaaataataggcccttagcatgttcacatatatcgtaagaaaccactaaataccaaaggccacacacaccacaatgaccatcaccctctctcaacaccacactaagtcccctatctctattccaccgtaattaatatctaaaaaacgtgcaatgtcgctgatcaagctattcttggtagttcgagtagtgtatttggctattattgatgtcttcgatatccaatagagtgttattgtctgtcggcctggagagaacacatactatattcacaatgtgatgaacactgagacaaataggcagtgccctgccccgtattaatactctcacttcgtatcacgttcgccctctcgcgctcccaccgcacccttccgcagctattgctagaattacgcgccgggatcgcctgcgcgtcctcagcctcctgcacacccagcccccatccttttcactccacagtgcaccctcgccagcgcgatgactacgcacctgcgtagagcggacgagcgctcacgcgagcggtcaaggagagctccagcgtcacg

SEQ ID NO: 563592 - DNA, 917 bp, Homo sapiens
  misc_feature (917)..(917): n is a, c, g, or t
atgaatcccctggccaacccgtcatctactctaccatctttgcaggcacactcatcatagcgctaagctgcgcaccgatttgttcccctgagttaggcctagaaataaatgtgttagcttgtattccagttcgtaaccaaaaaaataaaccctcggttccagcagaagtctgccattcaagtatgtcctcactggcagctgaccgcagtccagtaatccttcgtaatagcgtatcctcttcaacaatatactctccggataatgaaccataaccaatactaccaatcaatactcatcaattgaatactcgataatggcatatagcgaagtaaagttaggaatagcccccttccactttcctgagtgccctaagaggttacccaaggcttccttgctgacatcctgggctttgtgtcttctgaacatggaccaaaatagtagcccccatctcatggcatataccaatatccctcctctcaatacaccgtaggccttctgcctcagtctctgcaatcttaatccatcatagacaggcagttgaggtggagaaagccaaagcgcagatacgcaaaaatgcttagcatagtcgtcaaattactcacgtaggatgattaatggaggtctaccgtacaacctaacatagccggtctgtaatttaactattgatatgatcctaactagctaagcggatgctactaactcaagttaagttctagggcccgacctataatattcgcactgaaaagctaaattgatgaccccttgattcttcacctctctccctggggtggcccgtaccgttgtgccactgcgttgagattcaaaaatggtcttcccacataccagcctatattaagggtttccccaaaccttaaaaaaaaggggcgagaaatgggggaagaaagtggaaccgcatn

SEQ ID NO: 563593 - DNA, 831 bp, Homo sapiens
gcccaacctggtcctgtgtctgcagaggcggcttctccggcctcctgaactgcagccccgcggccctccgacggcgccgcccgcgttgcgaggcaaagcccgcttgccgcccggcggacagcatgctcaacgtgctcgtgcgggccgtggtggccttctgaggaccccgagcgggctgccggaggcccagagcgcgcgtcgaaccgtctgccccgaagggcgccagacctgaggcgaggcaccccgcctccatccctggggggaagcgcccgcgaaaaccgtggagagaagccgccgccgggctgctgagaggcccggagagggactctgttccccgggggagccatcgccttcagttgtgcagggacgggcaccgaggagtcttgagccggggtcgcgggcggccttccgcagagaccttgcgccacagggtgctgtcttagtggactggggacgtgaacctttcgtctccttctggacctgggcagaagggaggcttgcgcttgtcggtgtacccggtcaggtacgcccgtagttgcaaaggatctcctcagggtcggacctacaatttgctacctgcaggctgtgcttggcccttttcaacgggtttctcaacgaagtgggaataggcgtttcccaacactcgggaaaaaattccagggatcgcccttcccacatccgtatagcataatttgctctacccggcccaatcgttgcgtacatggggcaggggttgggaaccaaacctgacggcattcctggagttgggcctagcagaaaatctgggctgtgccccgccctgggacgggatgaaactggccaaaatttccc

SEQ ID NO: 563594 - DNA, 1168 bp, Homo sapiens
  misc_feature (542)..(542): n is a, c, g, or t
  misc_feature (703)..(703): n is a, c, g, or t
  misc_feature (736)..(736): n is a, c, g, or t
ggagcgagcacactggccgggtggcaaagaaacagcccccctttccaagaggccgcccccaaaggggggcccccgaaagaaaaagggggtgagaccccgctttggtgaggaaagaatgggggaaggaaagtggaagagccaccccgcggtagggtccccataataaagaatatatttgggaaagaccgcttcgttccaccagggaccccaagggacccgcaaatggcatctgatggtctcaaagaggtcctgtgttttgaagtggagtctttgtctgatatttgcccggaattgatgagagattgcccgttttagggaagaagatttccagcctggagtttatctcgaaaagaatgttacacaggggtataaaactctgccctgagctttaactgtgccccatggcacatgggaatcttatcccccgtggagccacaaatgtgtttccacatgggtccaaagaatatgggccacgagccaccatgaattgagaggctctcaccgcttggagatgtgcacaaagacactacccgcaatgggtntaactcctggctcttcgcttctcgctttctcgtgtttgtgtttgttatacgtatataaataaacgctcacactcacactccacgagtatctcggagaagagcacctctctgtatatgggctctcacagcacctcacacacacggggtccgcgcgcacacanattccgcgagaagaaagaaatgagatgtgaganaattcactcgagactccgcagagagagggtgtcacagagccacacacttgagactctggagaaagaaagtgggtcacactaaaagttgagttgtccacgcagccacgccacattgtgagaaaagagcacactatgagaaaaggggcttggccacacttctagatttagttcctctctcccactcgaatgttctcttcgcttatgagaaaagtataaaaatgctgaagaagcgcccaagtttgaaattgggagaaggctcactggaggcttcactggtgaaaggcacgtaagtttctggagaaaagccacctcggggaacgaagaacacggtggctaaaagttgaaacgagctgatggatatgaaccccccgtcccagaatctgtttaaagttcagacttccaatagtggccaataaaaagtgctatttgtga

SEQ ID NO: 563595 - DNA, 175 bp, Homo sapiens
tcgagacatggtctgtgagatggcactgtgaggtatgtgaccatggggctgtgggctgtgaggtactcaagcctgacgtgtgaggtgtgactgtaacggtgtgcctgtgacggtgtggactgtgcggtgtgactgtgaggtgttactgctaggtgtggactgtgaggtgtgactg

SEQ ID NO: 563596 - DNA, 718 bp, Homo sapiens
  misc_feature (66)..(66): n is a, c, g, or t
gcagccatagttgtatatgatatcacaaatgaggagtcctttgcaagagcaaaaaattgggttaangaacttcagaggcagcaagtcctaacattgtaatagctttcatcgggaaacaaggccgacctagcacaataaaagagcagtagatttcccaggaagcacagtcctatgcagatgacaatagttctcacttattcatggagaccatccgctaaaacatcaatgaatgtaaaatgcacatattcatggcaatagctaacacattgccaaagcaatgacaccacaacaatccaggagcaaacttctgccagaggcaagaggcagtagaccttacccgaacccacacaagcaaccaggaactcagtcgttgctagtaactaaagcctctagctccgaactagactggaaatagctctctctgcttcctaaactgtcaataaccacctggaattgagagcattctaaccagcccagtactgacctatccaaacagcacagacgcacttcattgcatcagcacgtccaagtcctctcacacttaccagcaactctcattccacaaccgctcggtcctaagaaaacctctcaactctctcccacactcacacccttgcccattcgcggtaccccttcctccaacctcacattgctcccgcaaaaccaacattaagaggcgcaacacaacaccggagccaacccttactagtcggcacca

SEQ ID NO: 563597 - DNA, 233 bp, Homo sapiens
tcggacaggacatgtggcacagaggggagaggtaggcaagatcacacggagtgtttagaaggctagtactgagtatcaagaatagtgaatttctatgccctgcttactcagtatagccattaggcttgtgtgagaatgctgatgtcctaggatggacactctgggaggggaatatgaaggaagaaaatcattatgaatcaaagagcacttccattcctggacactttatacat

SEQ ID NO: 563598 - DNA, 540 bp, Homo sapiens
tataattgcagcttgtttataattgaaataaaactataggaagtcaaaatgctctacatcagagtttatttctgaaacgtcctctttgattcaataaaaaactaaaataagataatttacccattgataacatctctaggcatcattagagagccaataatgatgtagtagaatggtatttactatacacacaatctaaactgtaatcttctttcctctatcactcatgaaatcatgacatggtgccatttcagatttaaatggagaaatacaatttaaaaaagttactatcagcacaacttacaaaatacatattttcattttattatactttaagttctgggatacatgtgtagaacgtgcaggtttgttacacaggtatacacgtgtcatggtggtctgctgcacccatcaacccgttatccacattaggtatttctcctaatgctatccctctcctagctccccacccccgacaagccacggtgtgtgatattcccctccctgtgtccatgtgttctcactgttcgagtccactta

SEQ ID NO: 563599 - DNA, 143 bp, Homo sapiens
agcctctaagagtgattataatgtttcactgattgtatagccaatccatatttcactggactcttaacttgtataatactattctttcaacatttataaatacatcataacattggactttacatcgcaccagagcaccagca

SEQ ID NO: 563600 - DNA, 353 bp, Homo sapiens
  misc_feature (201)..(201): n is a, c, g, or t
ctcatagagcatccccggtatacgtgtggaactacccttagcgactgcaatcacattttaaacacaaaccttacattcttaacgatattagagcaatggctttgtgagagtaaaactactttctatacaaagcatagtcatcagttgatcaagagaagctggataacgtgtatttgactacattttcttccacactgtgtntatagtgcttggcacgggaagagttgagaattcctagcttgcttaactataagttagtgttgtatttcatttatctttttctattatgataaattttatgtcttgttttgctacaaaattatctatctaatacattactaacttgtgagtgg

SEQ ID NO: 563601 - DNA, 403 bp, Homo sapiens
  misc_feature (18)..(18): n is a, c, g, or t
  misc_feature (255)..(255): n is a, c, g, or t
tatccagccttaaattanagttttccaggagttaaatgcatcctaactatgttacccctaccccgtggaaaaatactgcatgcaaagaaaagctagaactcctaaagataatccgtgggctgggcatggtggcttatgcctgtaatcgcagcactttgggaggccaaggtgggaggatggcttgagcctagaagtttgagaccatcctagtcaacatagtgagatgctgcctctacaaaaaattttaaaaagtancccaggtgtggtgaaatgagcctgtattcctagccactgggaggctgaggcagaaggattgtttgatcccaggagttgaaggctgcagtgagctattatatcgtgccactgcattccagcctcagtgacagagcaagatacgctcttc

SEQ ID NO: 563602 - DNA, 1294 bp, Homo sapiens
gggaggctgtcccgaggacgaaggccccacgtgtagtgctgaacccccgaccgagccttgtgtacaaggagatccggaaaggcgagagtcggtcggaggctctggctgtggatggagctggtgcaagcctgtggtgcttgcagtgcaggctcaggcacccctgcacagggcaagtggcagcaaccatggagctatcccagccagcaacagcaggcaggcaggcaggcagcatggccagttgtgtccctgccaagtgcctattcctgggcgtgggcaagcagctggaggaggctggcagcacggagcgacggacgctggctctccaaggacgtgggaggacatcccaaaacagctggacagcaacgctgggaccatacatgggccaacggacgctgacctgtgctggacgaagccggctgggcaggggcacgggacggcgcgacggagcgaccaacccgtgagaaaacagagttagcgaatcgacaaagcatcacatagcatatccacatgaagccacatgaggacgtaaacagacagaattaccaagtggagagacacaatggagcagacctgcaaggactttgcgaacagaatggggattaggaaaggaccaaatcgaataaaacggaaggaataggaaacaagagacatatagacaaagtgcaaggaggaaccaatggaaccaccagacaacaagggcaacaccggaagagcatataaccgacccggacataccacagacaacgaaaaaggccagtgaaaggaacggagaacaagagaaagagaaagaaaccgacgaagaagaccaaagaaagggaaagcacacgagaagaaggaggacgaaagaccacagagacaacgaagagacacaaaggagacggcagaaagagaggcgataggagaaacgcaaaacaggatgggacacaaaacagcagaaaatgaaaaagagaaaaaaaaacgaggagagagaggaagggagaaaagaaaacgacccggcagagaagcagacaacgaaggccaacgagacagaaaagagggaacgaaaccaagggagaagaagccagaggaacggacagagcaaggaagagccagagagaggcggaagagggtaacaaggaggcaaagagcgaaaagagggaaacgcgaaggaaaaggaagaggaataagaacagagacagaagaaaggggaaagagaaaaagcagggagacaaaagagaaagaagagaagcacgatacagagaacaagaaggcgacggagagaacaggagagaagtcagaggggacaaaacgtcga

SEQ ID NO: 563603 - DNA, 1328 bp, Homo sapiens
  misc_feature (218)..(218): n is a, c, g, or t
  misc_feature (398)..(398): n is a, c, g, or t
atggccacatgcagcgcaagtaggtctacgaagactgctacgttccctctatcagtagaagagcattatcaccattatcactagatcgacgcccatcataattcatttgtccattaatctgtcttccttagtccttgtgaatgccctttttacctaactacttcactaacaaaacttaacataatatctccatcgatctcagacgcctcaggagaaantggagaaccggtcgtgaactatcctgcaccggcgcgatcaatcacgtagtcactccatcgtgcccatcccatcacctgacggcatccttctacgagtaacaagacgtgatggtccaacggatccacttcccgttaccgatccaggatcaatttgggctctacctatatggatcacttganacactacgagaggtgagcaccgattcacgagttggaacttcaattctttctagagctcactgacgataacttaccccctcgatttcattgcctaagttaaaaccaaggccgtaacctggcgaacttcgctttgacagtccgcactaagtcgaatgttatgataaactaccccccgcattgttagaaaaagccgcaccaagtgtccggtcattaaaactaaaattaacgctcttcagaggaaacgtcatttgcagagttgccacttgaatgcttgtgccccccaagcggtgttatgggctctaccaaaaagccagggattggcaactttccctctgaggactggtctatgaatcccaataacacgagtttttaccaaccccgggtaagaacctgagtaccgagaggggatgaatgaaccgtaacggggtgccaggatggggcgttccgttggaaagacctgccttgggtggggaccggccaagagccacaacaaaggttggtcaattgggcaccccaagtcacagtcccctaaggacaactttcaatctgcccccgcttaatgcaaaaattccttttgcgaagacattaagaggggggccccccgcatactttcgtaaacccccccttaaatttaagcaaacccccccacccgtttcatataacccccccccttttcttaagacaaggtctccacactacaccacaccaatcactctacgatcatacaatcacaacaatcgacaacactcatcacacacacattatgattctatctgagacgccagcaacaccatgagatgacgacatcccctacaaagattcaaaaatacactatctggcttgacacgaccacgcatatacatgatatacgtcgacaaacaaccgatgacatcgaccaacatacataacagtgataacaacatcagagaa

SEQ ID NO: 563604 - DNA, 349 bp, Homo sapiens
cctatttcctccaatattttttagttgtggcctacctagtacaatttaaaatttgtttttgtggcctggtacagtggctcacatctgttgtccccacactttgggagactgagacgggtggatcacatgaggtcaggagttcaagaccaggctggccagcatggtgaaaccctgtctctacaagaaaacacagaaattgggcgggcatggtggcacatgcctttggccccagctactcaggaggctgatgtgagagaattgtttgagcccgggaggcggaggttgcagtgagctgagatcacgccgctgcactccagcctgggtgacacagcgagaccctgtttccaaa

SEQ ID NO: 563605 - DNA, 1229 bp, Homo sapiens
gcatctagcagcacctttcacaacatagaggatcctgatcactgccagaagtgcaagatgaagtttcgccacttcttcaggatcaacgtgaagtacatgcatgaggtgcaatcgcaagagagtagctcagccccttggaccctacggtgtggcgaacgatctctgcagtgtcgcccgatcgcagtgactcggaagactgggaaacatgagtgtagccagtggttgcgaagtggaaggaccctgtcagcactggcaggcgatgctggctaaacaaaggtcgcctagccgagtccattctagttcgttgcgtttagtgaggttgacgcgacgaaatccgtaacccacagcacgaaccgcgtgcacccgtgatgtatgactggacgtcatggaacccaaccggaactcttcacaaggatccttcgaatccatcggtccacatgatgccagggctcccctgtatgcactaaaaaacccttatccgcccagaacgacgcacattggaagacaccatagggaaaaagcgagaatccaaaaaggccacgaaacgactagctaccagaattcgtggacaccgatttgccaggttggaccactcgttggatgccagcgtcggtaaacgggacgtctgccatgtccccgctagctggcccaaggcccacttggcaaaagacaaagcggtgttccactggttccgaaacggttggcccaagggcaagttccatggggaatcccgcaagactccatttccccagggcttggcaaatggtaacctttggtagcctgggcgtaacggttttgaccggttttatgttcaccctgggaagcccagatgtggtcaagaacagccccattggatccaccccaacgggatagtaacacacctatgcaaagggcaaggtgtccaggaaagaacccctaactcttttcacctctcctgttggacagaccttccgttgtattgtgcggcgaaaacctacgttgtcaacactttcccagcagggggccccctaggctgtgggaagcagcgtgccaacgcccatggagaaaactcccttgaagacgcacgccccaacacaggggttgcagtggaccgccaaccggggcaaaaacaccccacggggacgcccggaacccacgcacccttccactaggcattgggcacggccaaggcgctcggaaattgcccaaaaaacaccgcccgaggaaggggccccgattgggaaaccccg

SEQ ID NO: 563606 - DNA, 619 bp, Homo sapiens
gtaactgaaagaggtctgattcgcctgtgtagatcggccacagcacatccgtcttgcatcagaatgtgtggacttcatattgtatgtacatgcagatgaattagaaagaacttatcaactaactatcaggatcgtaggctatatatgaagagctgatcaccatgttggacgcagcactgggacttgagcgagctcacatgggaatgtttactgaattagctattctatactctaaatataagcctcagaaaatgagggagcacctggagctgtcacaggtctagagtgaatattcccaaggtgctaagagctgcagaacaagctcatctttgggcagaactggtgtttttgtatgacaagtatagaagaatatgataatgccataattaccatgatgaatcatccaactgatgcctggaaagaagggcaattcaaagatatcattaccaaggttgccaatgtggaactatactacagagcaatacagttctacttagaattcaagcctctgttgttaaatgattagctgatggtgctagtatccacggttggatcacaatcgtgcagaccataattacagcaaggttaaacagctaccactggtgacaccgcatttggc

SEQ ID NO: 563607 - DNA, 1104 bp, Homo sapiens
gtaagccacttgcttggttatgattgtgtcttatcaggcaaaaggtgcccagctgccagcccagctccgctgctatctttgcctcactgtagtcatgtgcaattcgcgttgcagagtggcagaccattagttgctgagcttctgtcaaacacgtctgcatgtgctcagaagagcacctggcccaaagttggatctggttgttaatttaaaggacaaggctacatatattcagcttttggagatgaccaaagctagttagggtctccttgatgtagctaagctgcttcagtgatcttcacattgtgcaggctccagtttgtttctttccttatagaagagagagcggtttcgtacctctactatagtgcctgagtgatgatacaatcgctgttccagtatactagatgagcaaatccacaggaatgtggtacaagagtagaatctgaactatatcttgacaaagtattattcaagacttgaatgtaaatatatacaggtgtgtatagtttgtttaaagaagatttgcgttgcaatgagccttataagtgacatttgaatgtcatagcatgtaaagggtgcctgggtacatacaaaattataagaaatctgcagtaaaagaaccatgaaccataagacatcaccagatgtaaccaagaaactaccaagacatcttataaaccaacaagaacaatgtacgatcagtgggcaccagtataactaggacatcctaagtgccctactgggactcctggcactacacacattctaaacatctgtcccaatagaggcccaaattctaccacataacaggacggcaccacaaggcacaacacgttgaaaagcgaatgaggacgaaataaggcaaatccgccaagcgaaaaaatagggagaggaccaaccaaccgttagaagagaaaacccgaagagacaacaagagcgcacgagggaccccacattggagacccagcatgcgggaagacgagggaacagccctgaggcaacaacaacgaccacgaccgagaatgcagaagagcaaaacagaaagagcgacagcctgacaacgcaaacccagagaagtcactagaatagagacacagaacaaat

SEQ ID NO: 563608 - DNA, 139 bp, Homo sapiens
tcgatgagtctttgaaaagataaattgacaactttagctagaataactaggataaagaagaaaactcaaataaaattagaaatgaaagctgagacagttacaacgtgataccatagaaacaaaaagcatcataacaagc

SEQ ID NO: 563609 - DNA, 83 bp, Homo sapiens
  misc_feature (78)..(78): n is a, c, g, or t
cccacctggggactcttgcccccacatatttctccaggctcctccccacccccccagcatcaataaagtgtcataaanagaaa

SEQ ID NO: 563610 - DNA, 394 bp, Homo sapiens
gaatgtgggaagggttgaggaattccaataagaagattatcacccacaaagaatgccggagacaggtttttttccacaagagattaagtcattattcttaacccaagaggtgatggattgtctttctggtgcttactagtataatagctaagcagaaaataattgtctaatgtgaagtaggggagctggagataacatagaaaggataaaagtccctcaaattaaaaacaaaaaggcatcgacatgatttgtggtttcaaaaaaacttttttgggggaattgcctacatactattcttactggaaatggagcagtgtaggaagccacaaacatctaaatagtcatttctctctctttcttgtcagttgcttcaagtcacaaatgcagtttcaat

SEQ ID NO: 563611 - DNA, 107 bp, Homo sapiens
ggatgttatgctgctccctctacaccaactacagaggaggctctgagcacagagtccgggtccacggtcacccaagctccgtatcggaggccctaatccaggatctg

SEQ ID NO: 563612 - DNA, 190 bp, Homo sapiens
aagagattagaatgcagcttgagagttcccatgtggcacagtggcaatgaatccgactagtaaccatgaggtggcgggttcaatccctggccttgctcagtgggttaaggatccagtgttcccgtgagcggtggtataggttgcaagacatggctcagatgagaccgctctaccgagaccgctcttacca

SEQ ID NO: 563613 - DNA, 1543 bp, Homo sapiens
atctttttggtctgtgcttgttctgtgttgttgtggtcggttgtgctgtgtcgtgtctgcgtatacgcttggtctgagttttgtcgtgtcgttctgttgcgtttgcttgtgtttagttggtgtgtctgtgtttgggtgtgctgttggcttgtttgggttgagggttttgtgttgtggtctggggggcgtggtgggtgctgtgtgggtgtgggtggtattagtttggtgtgtttggttctgcttgtggttgtgtgctgtctgttctggtgtgtctgcggctgcctgcgcagcgcgctgggtgttgtgtgtgtgtgggaggagatcgcccgcgggcggcgcggtgagtgcgccaccgaagcgtggggtgagaatatttagcacgcgcctgggtgggcgccccccgtcttttatagtatgtgggggagttggcccgaatataggacacacccaatttggatcccggggtagttgttgtaagagggttgggaacgcgacgcgttggtatggtagtggtggctactttgtccgcggagaaaaggtgaattctccgccaccaccacgaacaagtgttgttggtgtggacgcccaaacatgttgtaataatgcgccctccaagtgccttttttgtggttgataagaaatagcgcggcgccacggggccccacaaaggtggagacagtgtatagtagcaccacggggttgcgccatcgaaaaagaggggtgtagaagccaccgaaaagcggcacatcgtggtgtgttgtggtccggaagtatttgttgcgcggcggcaactccacggatgagagaagattgtagggcttctcgcccccggcacaactagagagtaaaggtgtgttgtggcacagagtagagaaaaggataagtagagaggggcgacccctgttgttttgtgtggcgctactgtcgtctcttccggagaagagttgggtggtgagacacccccctgagtgatattgaccctacctctacttgcgacacgcactggtgtcgacacacagtagtgggacactgtcgacactgagggagaagtgtgaaggtctgtgtcacaacaagagtagtagactgtgtggcacacactgttcagagggcacacttcgtcatcagatagagagagtgttttcgcgaggaaatatgttgtgcgaccactctgataagagagagagtgtggggataactctccacagatgtgtggccgcgcacattgggacacacaccacagagcgtcgcgacgacacacaaacgctgtggtgtctgtgagcgtccacacaaggatataataagagaatgtgtgcgcgcactgagcccgaatgccgctggtggcaggctggtgtccacggaaaacgtgaatggagaggatggataagatgtgtcacccacaatgagagctgatgatgaactctgtgggtgtaacctgatgggacctggtgtgaccacctgtgtgcacaaaatgtgtcccagccccagtccaagtggatgtagaacttatccctgattgtcagatccaattaagttattaaagtgc

SEQ ID NO: 563614 - DNA, 275 bp, Homo sapiens
aaattttcccggggggccccccccgggggggggcccctttgggttgggggggggtttaccccaaaaaaaaaaaaccccccaacattttgggggttttgggcccccttgggggacccggcccccaaaagtagacaccccctttttgggcccccgggggaaaattttttttttttttaaaaaacccttttaaagtttttttttttttttaaaagggggcccgggcccttttaaaaaaagttcccctttttttaaggggtttttaatttccccgggga

SEQ ID NO: 563615 - DNA, 973 bp, Homo sapiens
cagaatatgtgtctgtgttagagaaagcgcccactgaataagcaagaatagggcaagaaaagaaatgatgtgattaccattcctagccaagtgtctccatcttggtacatgaacccaagttgaaagtggcacttaacgaaagtatctggcagaacctaagcaattctgcttaagacttatgcatttgcatgcaagacgagcgttcgcaatgcaaggttgtctgcacgagagttcacgagcaaggtccacatgggtacgagcacaatctttgcaaggtggaaaagcaacttgttttgcatatggccagacaggaacgtggcaagacacatactatgggcggagacctcgtctgggagaagcccaggaatgcatccaaagggatctatgccatggactcccgggacgtcttcctcctgaagaatcaagcccgtgcataccggaagttgggcctggaagatctatgtgacattacttcgagatctacaatgggaagctgttagacactgatcaacaagaaggccaagctgcgcgatgctggaggacggcaagcaacaggtgcaagaggcaggggactgacacggagcatctggttacatcagactgatgacagtcatcaaggatgatcgacatgggcagcgcacagcagaaacatctgggcaagacatctgccaaggtacccaaatccatcaccagaaacccacgcgtgcattccaaaagcactgctacagagactaaagggagaaatgcaatggacacagatactctaaagaccagactcaggcaagggaaatgacgcgagatcgccggaacaccatagccaggatggcatggacccgggtaagaaccccagacaatggaagagagaaagacagctccaacacagaagcctcgaaaccccctgtaaggaagaggcatagaggggaccacaaagcaacaggaaacaaggtacagacccgcgaacgagaaacaccag

SEQ ID NO: 563616 - DNA, 263 bp, Homo sapiens
ttttttcccccccccgggggggtggggggcccgggggggcccccttttttttaaaaacccccccccccttgggggggggggggccccccccccccccccccccccggggtccctttggtttttttttggggggggggggccccttgggggggggggttttttttttttttttttggggggggggggggggggggggggggccccccccccccccctttttttttttccccccccggggggaaaagttttttttcccttcccca

SEQ ID NO: 563617 - DNA, 955 bp, Homo sapiens
gaggctccgtctcaaaaaaaaaaaaaaaaaaaaaaaaaaggggccccggcgttgttttttaaaaaaccctttaagttttttaaaaaaaaccttactaatttacgaagtggttttacttcaacaacttacttaaaagagaaacaaccactccttttaaaaggaaattaaccggcggctcactaccacaaaaaccctttgtgttttccccaaactttgggtttctcaaaaaaagcattttttttccatctacccgagttcccccctttcatttaatttgggggtatttatcaaacaccctttttcttaagtgaacctcggtggagagcgcaggtgatatgttttagtccccccaatattaaggggattacccttttacacagcggtcccctctaaacatttttgcgggaggaagtgggtccccaaatagttaacatgagaaattacgaaaatgagtccgggtacacctcaggacgacattattttcaagggcaggggaacgcttggcagggtggtttcttattactctgtgaaaccacattgtcctgcggagagaaacccttttaacgagacaacatcttggccaatgtgacagcggcgccccgagaaatttaaaaatagaggggcgtgtcgaagggccaaaatatgtcgctctcaaagtggtcgtcacacattacctttagagggaatagatgcaccaaaaaggtgcccccttttaacagacggcgtacacgcggcatattaagtgtgcgaccccagtggggttaaccacagcgggggagagtataattataagctgcgcgttcaaaaatatgtgtgtgtgacagcaaacacaatatgaaactttttttctcaattatacaaacacaacacagactacagacagacaacacaacgacacaaaaagaacagagacaacagcaaaaacaaatacaaacagataacaaggatacgacga

SEQ ID NO: 563618 - DNA, 363 bp, Homo sapiens
aaaacttacaatagatctgcaccaagaaaaagaaagaaattgggtaagacatttcatacaaataaaagagaatgagccaactgtacgggcagagtgatacacgcctataatcacaacactttgggagacagacgcggacgaatcataagagatcagaggttcgagaccagactggaaaaaatagtgaaggtacatctttaccaaaaccacacaaaaaatagatggacatgatgcgtataccagtagtcccagctactcagaaggctgaggcaggagaataactacaacacaggaggcagaagatgcagtaagccgagatcgacaccactgcactccagactgggcgacagagcaagattccat

SEQ ID NO: 563619 - DNA, 119 bp, Homo sapiens
aatttttcccccaaagttttttaataacaaaagcaagcagttttttgtgaaatttcaaaaattgttgtaaaagtctgtttccattttaaaaaaaatccattaaaaccacccagggggga

SEQ ID NO: 563620 - DNA, 143 bp, Homo sapiens
ctgatgcattcaagtcatgagttggaagggtcatacaggacccagatagctcctcattactgtgacagagcagtagaatcccaggctctttcacgtatttaggctgataaacttcagcagcagtattggccttctctggtgga

SEQ ID NO: 563621 - DNA, 432 bp, Homo sapiens
tcaaggatcgcagccgagacccacagtgggctcccatgcagccaagcctccccgacaggtgctgcccctgctccgaggcgcccagtcccatcgaggcggccaagggctgaggagtgtgggcgcacggcacgagactggagggcagctccgcctgcagccctggcatgggatccactaggcgaagccagctgggctcctgagtcaggtggggacttggataacttttatgtctagctagaggattgtaaatgcaccaatcagcactctgtgtctggctcagggattgtaaatgcacccatcagcactctgtgtctagctaaaggtttgtaaatgcaccaatcagtgctctgtgtctagctaatctagtggggacttggagaacttttgtgtctagctagaggattgtaaatgcaccaatcagcactctgtgtc

SEQ ID NO: 563622 - DNA, 831 bp, Homo sapiens
  misc_feature (62)..(62): n is a, c, g, or t
  misc_feature (83)..(83): n is a, c, g, or t
  misc_feature (98)..(98): n is a, c, g, or t
  misc_feature (109)..(109): n is a, c, g, or t
  misc_feature (148)..(148): n is a, c, g, or t
  misc_feature (261)..(261): n is a, c, g, or t
  misc_feature (305)..(305): n is a, c, g, or t
gggacgacgggggcgacctcaccaacctcatccactagccaagttacccgcatggcttctgncaggctcgaggcatctctganggagaccacgactgngggtccacaancctctacaagatgatggccaatgggatcctcaaggtgtnctgccatcaatgtcaatgactccgtcaccaagagcaagtttgacaacctctatggctgccgggagtccctcatagatggcatcaagcgggccacagatgtgatgattgccggncaaggtagcggtggtagcaggctatggtgatgtgggcaagggcntgtgcccaggccctgcgggggtattcaggagcccgcagtcatctatcacccgagattgaccccatcaacgcaactgcagggctgccatggagcgtgctatgatggtgaccaccatggatgaggcctgtcagagagggcaacatcttatgtcaccaacacacaggctgtattgacatcatccttggacggacaactttgagacagatgcaaggatgatgccatttgattgatgtaaccaataggaacacttgtgacgtgagagatcgactgtcaagtggctcaaacgagaaacgccgtggaagaaggtgaaccatcaaggccgcaggtgaaacccggagatcgagacagaaaggaaaagggagcagcacgacaagacgagtccctgagatggacccgaagaggaatcagaacgtgagaacaaaacatgggactgggagcgccaaatggagaccaacacccaagaagtaacgcgaaagaagtaaaataccaataaaacaaaccaagagatgaatggcggacagaaatg

SEQ ID NO: 563623 - DNA, 198 bp, Homo sapiens
tacttgttggcgtttcggattcaggtggttgagccgcttccctgggcgctggggtgggggagaaagcccccgctgccgcgccgggctccctgcttcattctgtgatctgcggatttgccagtcgccaacctccgcgcccagagtcaccatcgcgcaggtttgggcaaaccatggagctcggagccagtcccacttagg

SEQ ID NO: 563624 - DNA, 837 bp, Homo sapiens
  misc_feature (10)..(10): n is a, c, g, or t
  misc_feature (66)..(66): n is a, c, g, or t
  misc_feature (75)..(75): n is a, c, g, or t
  misc_feature (116)..(116): n is a, c, g, or t
  misc_feature (152)..(152): n is a, c, g, or t
  misc_feature (186)..(186): n is a, c, g, or t
  misc_feature (189)..(189): n is a, c, g, or t
  misc_feature (191)..(191): n is a, c, g, or t
  misc_feature (199)..(199): n is a, c, g, or t
  misc_feature (201)..(201): n is a, c, g, or t
  misc_feature (209)..(209): n is a, c, g, or t
  misc_feature (213)..(214): n is a, c, g, or t
  misc_feature (219)..(219): n is a, c, g, or t
  misc_feature (226)..(226): n is a, c, g, or t
  misc_feature (232)..(232): n is a, c, g, or t
  misc_feature (234)..(234): n is a, c, g, or t
  misc_feature (276)..(277): n is a, c, g, or t
  misc_feature (279)..(279): n is a, c, g, or t
  misc_feature (289)..(289): n is a, c, g, or t
  misc_feature (300)..(300): n is a, c, g, or t
  misc_feature (302)..(302): n is a, c, g, or t
  misc_feature (312)..(312): n is a, c, g, or t
  misc_feature (349)..(349): n is a, c, g, or t
  misc_feature (354)..(354): n is a, c, g, or t
  misc_feature (360)..(360): n is a, c, g, or t
  misc_feature (394)..(394): n is a, c, g, or t
  misc_feature (403)..(403): n is a, c, g, or t
  misc_feature (406)..(406): n is a, c, g, or t
  misc_feature (408)..(408): n is a, c, g, or t
  misc_feature (420)..(420): n is a, c, g, or t
  misc_feature (453)..(453): n is a, c, g, or t
  misc_feature (486)..(486): n is a, c, g, or t
  misc_feature (490)..(490): n is a, c, g, or t
  misc_feature (502)..(502): n is a, c, g, or t
  misc_feature (545)..(545): n is a, c, g, or t
  misc_feature (547)..(547): n is a, c, g, or t
  misc_feature (641)..(641): n is a, c, g, or t
  misc_feature (652)..(652): n is a, c, g, or t
  misc_feature (697)..(697): n is a, c, g, or t
  misc_feature (753)..(753): n is a, c, g, or t
  misc_feature (764)..(764): n is a, c, g, or t
  misc_feature (766)..(766): n is a, c, g, or t
  misc_feature (796)..(796): n is a, c, g, or t
aagcggaatnaaaaaaggggaataaaaaatccatttagtgtattaaacatttttcactcatttgcnatagtgagngtgcaaatacaaatttgggctaaatgtacagattcttaagnaacaatgtacagcttttttcgtcctccatgctaagngatgtaaaagcttaagggtgaaacaataccaatngtntngggttgananaccatctnagtnnggggnttttctngttttngntaagatacacctgggacactgggaagtgatcacttacatagnntnatgtgaggtnaattttttggnanataaattttngtgggacaatcctggggggtaagaccgggggggtggnggggnaccggnggggggtgggcgaatttgttccggtgacttttgngtgcgtgtnctntnatctgaggtttnttctctttccctaagcggggggcttcctatgangtgagtgtgtatgttatggggaggggggggttngggngggaggtttttntttatggcaactgcggcattaattgcctaggacctcaacagcntnatgaaagtttgggaaatgttcatgcataaggttattgccttagctgatttaaaattgccccataaaatggtacatattaacccttagtgaagcnttttaaaaaanaaaaaggttgaaaaatgggtaaaagtaggaaatacagcatatctncctttagagccattaactcaggaattctctcaattatgaaatcttgcagataagtnatttttctttntnaaaatccaggtgatgacaatattccttacnccagacctggcattttttcatcatcactgttttgtgaataa

SEQ ID NO: 563625 - DNA, 385 bp, Homo sapiens
ttttaataagttgatattttttccctgtgtagatttaaataatttcctttaaaagccgtaagctttggctgggcatggtggccttatgccctgtaatccccagcactttgggaggcctacgatgggtggatcaccctgaggtcaggagttcaagacccagtctggccaacatggtgaaatgccgtctctactaaaaatacaaaaattagctgggcatgatggcgagtgtctgtaatcccagctactcaggaggctgaggcgggagaatcacttgaacctgggaggcagaggttgcagtgagctgagatcgcgctactgcattccagcctggcgccgagatagcgccattgcactccagcctgggcgactgaataaaactctgtct

SEQ ID NO: 563626 - DNA, 408 bp, Homo sapiens
  misc_feature (48)..(48): n is a, c, g, or t
  misc_feature (68)..(68): n is a, c, g, or t
  misc_feature (93)..(93): n is a, c, g, or t
  misc_feature (144)..(144): n is a, c, g, or t
  misc_feature (202)..(202): n is a, c, g, or t
  misc_feature (223)..(223): n is a, c, g, or t
aaaatccaaggaaatatggtccccatggggacccttacccagataagngccctattaattaaagaccntggttgggctgccgggatttattanccttagccctaattttcctttcctgagttaaatgaatcttgccttttttancgttacccacccctggcataatcccaatgggaatatagtatgaacccacatagttaanttaaaattttctttctttaantttgttttttgagacagggtctcacattgttgcccaggctggagttcattggcacaatcatagctcactgtggcctcaacctcctgggcttaagtgattcttctgcctcagcctcctaaatagctgggactacagttgtatgcctccacgcctggctcatttttacatttttttttgtagagaca

SEQ ID NO: 563627 - DNA, 1384 bp, Homo sapiens
  misc_feature (223)..(223): n is a, c, g, or t
  misc_feature (226)..(226): n is a, c, g, or t
  misc_feature (228)..(228): n is a, c, g, or t
  misc_feature (237)..(237): n is a, c, g, or t
  misc_feature (240)..(240): n is a, c, g, or t
tcatctttggcttgcaacattgccctggatgctgtcaagatggtacagtttgaggagaatggtcggaaagagattgacataaaaaaatatgcaagagtggaaaagatacctggaggcatcattgaagactcctgtgtcttgcgtggagtcatgattaacaaggatgtgacccatccacgtatgcggcgctatatcaagaaccctcgcattgtgctgctggatnctntnctctggaantancaagaaaggagaaagccagactgacattgagattacacgagaggaggacttcacccgaattctccagatggaggaagagtacatccagcagctctgtgaggacattatccaactgaagcccgatgtggtcatcactgaaaagggcatctcagatttagctcagcactaccttatgcgggccaatatcacagccatccgcagagtccggaagacagacaataatcgcattgctagagcctgtggggcccggatagtcagccgaccagaggaactgagagaagatgatgttggaacaggagcaggcctgttggaaatcaagaaaattggagatgaatactttactttcatcactgactgcaaagaccccaaggcctgcaccattctcctccggggggctagcaaagagattctctcggaagtagaacgcaacctccaggatgccatgcaagtgtgtcgcaatgttctcctggaccctcagctggtgccagggggtggggcctccgagatggctgtggcccatgccttgacagaaaaatccaaggccatgactggtgtggaacaatggccatacagggctgttgcccaggccctagaggtcattcctcgtaccctgatccagaactgtggggccagcaccatccgtctacttacctcccttcgggccaagcacacccaggagaactgtgagacctggggtgtaaatggtgagacgggtactttggtggacatgaaggaactgggcatatgggagccattggctgtgaagctgcagacttataagacagcagtggagacggcagttctgctactgcgaattgatgacatcgtttcaggccacaaaaagaaaggcgatgaccagagcccggcaaggcggggctcctgatgctggcccggagtgagtgctacgcaaggctacaattcaattgcgacagaaccagcagagtctccccttttcctgcagccagagtgccaggaacactgtggacgtctttgttcagaagggatcaggttggggggcagcccccagatccctttctgttccgagctcagattttcccaaagacactgacatgttaatcttctctattgtaaggatttccatttagtttgacattccgatgaattaaatctaaatcaatttgca

SEQ ID NO: 563628 - DNA, 864 bp, Homo sapiens
gatattacaaatgaagtccatgtcttttgatctttacaatatatctatttatcaaaggccagacagcaggaggctcacgcctgtaatcccagcagctagggaggcgggacagatcacaaaggtcaggagttctgcagcacctgggctggccaacagtggtgagaaccccgtctctactaaagaaatacgggaaacatttgctgggcaatggtggcgcgtggcctgtaagtcccagctactaggggggctgagcgcaggaggatcgctttgaacctgacgaggcagagggttgcatggctgagccaagactcactgccactttacgtccagtctgagcaacagaacgagacttagtcacaaataaatagaataaataagaataacatacagatgtactaactacaatccacactatcttttaatctttaagagtgtttaacattggtatactgctctgtagtcggtcgcatcagtcgtcctataaagggtcattttctcatgagtggaacaccctgaacaatcagttacctttgtgcctatgcccttctctctcctcagacagctgggatgtttatggtgcatctggccttgtaccgcgtttaactaagacccagcttacgcttgcatggttaatcaccacacattcttttctcaacaggggttcaccgtggtggccgattcttgtgcctaacgtatggtccccgggtgtcgcttccctgtggtccttccccaggtcataagtagctccctagatattcgggctcctccatttacttcctactgtggcctgcttggccgcgcgccgtttccctggcatcttgtggctccaacgggggggcggcgccttttcttctaccctttgcc

SEQ ID NO: 563629 - DNA, 217 bp, Homo sapiens
tgcggcccgcctttagtctacgcgtcctatggctgcctcatccgctcctcacgccaatagggctcaatattctctcatctgcctcttcctacacatcgggcgcggcttctattcacggctcatttctctactcagcacacctgcaccatcggcattatcctcctgcttgcacctttagcaacagccttcatcggctctgtcctccgtgagcctctat

SEQ ID NO: 563630 - DNA, 1174 bp, Homo sapiens
acgaaagaaaaagaacgaacacggactctattgctaggtacgagctggctggttattacggccgaggaggacttcacccgaattctccagatggaggaagagtacatccagcagctctgtgaggacattatccaactgaagcccgatgtggtcatcactgaaaagggcatctcagatttagctcagcactaccttatgcgggccaatatcacagccatccgcagagtccggaagacagacaataatcgcattgctagagcctgtggggcccggatagtcagccgaccagaggaactgagagaagatgatgttggaacaggagcaggcctgttggaaatcaagaaaattggagatgaatactttactttcatcactgactgcaaagaccccaaggcctgcaccattctcctccggtgggtgctagcaaatgagattctcctcggaagtagaacgcaacctccaggatgccatgcaagtgtgtcgcaatgttctcctggaccctcagctggtgccagggggtggggcctccgagatggctgtggcccatgccttgacagaaaaatccaagtgcatgacttggtagtggaacaattggccatacatgggctgttgccaggccctagaggtcattcctcgtaccctgatccagaactgtggggccagcaccatccgtctacttacctcccttcgggccaagcacacccaggagaactgtgagacctggggtgtaaatggtgagacgggtactttggtggacatgaaggaactgggcatatgggagccattggctgtgaagctgcagacttataagacagcagtggagacggcagttctgctactgcgaattgatgacatcgtttcaggccacaaaaagaaaggcgatgaccagagcccggcaaggcggggctcctgatgctggcccggagtgagtgctacgcaaggctacaattcaattgcgacagaaccagcagagtctccccttttcctgcagccagagtgccaggaacactgtggacgtctttgttcagaagggatcaggttggggggcagcccccagatccctttctgttccgagctcagattttcccaaagacactgacatgttaatcttctctattgtaaggatttccatttagtttgacattccgatgaattaaatctaaatcaatttgca

SEQ ID NO: 563631 - DNA, 278 bp, Homo sapiens
tgtgattctttactccgtgagatatttgtgtgggagaaacataaatcttgtctacgtgcacgtccaggcatagtaccttcccttgaacttaataatgatatggattcttttgctcacgtgtttgttttgttgttgctgttgaacttccccttattattaacctgctcccctactgcattcctttgtgctgtaataatgataaccataatcaataaaaactgagggaactcagaggccggtgccggtgcaggtcctaggtgtgctgagtgacgttcctc

SEQ ID NO: 563632 - DNA, 461 bp, Homo sapiens
  misc_feature (332)..(332): n is a, c, g, or t
gatttaaagagtttaggccactaaactataaattttttgaaaattttttatttattttaatttaaactctgagatacacgggcagaacgtacaggtttgttacataggtatacatatgccctggtggtttgctgcacctatgaacccatcatctaggttttaagccccacctggattaggtatttgtcctaatgctctccctcccctagccccccaacccccgacaggacccagtgtgtgatgttcccctccctgtgaccatgtgttctcactgttcatcttccacttatgagtgagaacatgcagtgtttggatttcagagtctctttgtnggagttttaaacagtgacaaagagatgtatctttcacccattttggaatacctaaattagtgcatttggagaagacaaagaaaaaaatataagactaaatgggtagtggttttgtagttttatgactcc

SEQ ID NO: 563633 - DNA, 812 bp, Homo sapiens
  misc_feature (748)..(748): n is a, c, g, or t
  misc_feature (791)..(791): n is a, c, g, or t
  misc_feature (799)..(799): n is a, c, g, or t
aaattagaactcaagattaaaaagcccactcaaaaccacacaactacatggaaattgagcaatctgctcctgaatgaatgactcctgggtaaataatgacattaaggcagaaatcaagaagttctttgaaatcaatgagaacaaagaaacaatgtatcagaacctctgggatgcaggtaaagcagtgttaagaaggaaatttatagcactaaatacccacataaaaaatctagaaagatctcgaattgacaccctaacatcacaactaaaagaactagagaatgaagagcaaacaaatcccagagctagcagaagacaagaagtaactaagctcagagtggaactgaaggagataagagtcatgaaaaacccttccaaaaaaatcaatgcatcccgtagctgttttttttttaaaatcaatgaaatagaccaccagcgagactaataaagaagaaaagagagaagatttcaaataaacaccatcagaaacgataaaggggataccactactgacgccacagaaatacaaccaaccatcagataataccataagcacctctatgcaaataaactggaaaatctagaagaatggataaattcctgcactcataaacaccctacaaagactgaaccaggaagaagttgaatccctgaatagaccaatacaagtcctgaaattgagcagtaataaatggcctccaatcaaaaaaagcccagctccgatggatttacagctgattcaccagangcacaagaggcctggaccatttgaacgattccaacattaaaangagagtantcctaccattatg

SEQ ID NO: 563634 - DNA, 635 bp, Homo sapiens
  misc_feature (68)..(68): n is a, c, g, or t
aggaaacttgttgggtgaagaccaaaggtttgaagcaactggcacaaaggttaagggctggttgaatnacccatgctttaagaattgggatgggtccccagtgagttcttggattctgctggctgaaagcaacagtgcagacgatgagaccgcgatcccagggaggtatcagaaatatggttacattggaacacatgagtaccctcatttctttaatagacccagcacactccaggcagcatccaccccacaggcagaagaggactggacctgcaccatcctttgaatgccagtgcattttgggggaaagggctccagtgttatttggaccagttccttcattttcaggtgggacttttgatccagaaaggacaaagctcctcagtgagttggtgtataatccaggacagaacccaggtttcctgactcctggccttctatgccctctatcctatcatagaaacattttcccaagccctcatttcattccccctattttttgaaaatattccctgagagagaacagagagatttagataagagaatgaaattccacccttgacttttttttgtgcccctgatgggagggtaatgtttaatgtattatcaataacaataaaaaaaagcaaatccca

SEQ ID NO: 563635 - DNA, 993 bp, Homo sapiens
gcataatggacaaagacctaactttatggttgggtgacacccccaaaccctttgcagataccactccccgccatcctatattatagtcgtgtgttatatattctcaggtaaataatctgccctgcccagtaggggttccaaggaccttttctagttgccctccttggtggtttactaactttggcagttaggaagtccttttggtgcctccgattttatgagtcatcaaggtttggcttcatactgtctgtttgcttctccaaggaagtagaacgcaacctccaggatgccatgcaagtgtgtcgcaatgttctcctggaccctcagctggtgccagggggtggggcctccgagatggctgtggcccatgccttgacagaaaaatccaaggccatgactggtgtggaacaatggccatacagggctgttgcccaggccctagaggtcattcctcgtaccctgatccagaactgtggggccagcaccatccgtctacttacctcccttcgggccaagcacacccaggagaactgtgagacctggggtgtaaatggtgagacgggtactttggtggacatgaaggaactgggcatatgggagccattggctgtgaagctgcagacttataagacagcagtggagacggcagttctgctactgcgaattgatgacatcgtttcaggccacaaaaagaaaggcgatgaccagagcccggcaaggcggggctcctgatgctggcccggagtgagtgctacgcaaggctacaattcaattgcgacagaaccagcagagtctccccttttcctgcagccagagtgccaggaacactgtggacgtctttgttcagaagggatcaggttggggggcagcccccagatccctttctgttccgagctcagattttcccaaagacactgacatgttaatcttctctattgtaaggatttccatttagtttgacattccgatgaattaaatctaaatcaatttgca

SEQ ID NO: 563636 - DNA, 635 bp, Homo sapiens
  misc_feature (333)..(333): n is a, c, g, or t
gcccagcctcggccaatggagcgatgagatcataggacataggccgtgtcccagcagatgcactaaaacacaaggctggcctctgcccactctcctactcttttcccctgccctgggaagcgagacccagatgggaactgctccttcagtcatggggagcagagccccctcccactacagccaccaacatgtaagatgagtgagaaataaactgctatgttttaggacatagcaatacagggccatttgtgactgcagcctcacctagcaaaagctgcatgacatgggaccttgttctcctcctaatcctccatctccaaagcagtgtctctngtctacttgcctgtggtccacagccagagaaccccatcctgctttctctgtcttgggcagaggcctcacctcacctacaggggccctcaggtctggctgtgctcgcttgtgatgctcagtgtaggtaggtggtcagtcccgggatgcttaggtatgggtcctgtgaccctgctgctccagccccgagaggaaagcttctcagcccaactcgcagccaattcccagcctcccgggggctcacatggacattccagagcccgagttcaagaccagcctaggcaacatagcgagacctcatctgt

SEQ ID NO: 563637 - DNA, 443 bp, Homo sapiens
gcacctgcctaactcccttgggtcctaaggttaagtaagaggatcctgagttaaatgaaactctctctcacttaacaaacttcccggtttagaaaccagcagtgcccatacactaagtttacacagttgggaggtccagtggaagaacagaggaatggaaacccatttgcctggggaaatgaaagacttcccagaggagacacaatatttgaactgagaattaggagtttgtcaggcaggcttggcagggtgaaaaagccacacactgggaagagcataaacagacaggcatgaaacagcatagtaaaggaggaagatagcaaacacctgtgtgtccgtacagcaaaagagcttgccctggagggagttgggggagatgggcaagaccaggtgaaagagggccttgaatataaagctaaggcatcttgagttgactgtacttg

SEQ ID NO: 563638 - DNA, 1330 bp, Homo sapiens
  misc_feature (223)..(223): n is a, c, g, or t
  misc_feature (226)..(226): n is a, c, g, or t
  misc_feature (228)..(228): n is a, c, g, or t
  misc_feature (237)..(237): n is a, c, g, or t
  misc_feature (240)..(240): n is a, c, g, or t
tcatctttggcttgcaacattgccctggatgctgtcaagatggtacagtttgaggagaatggtcggaaagagattgacataaaaaaatatgcaagagtggaaaagatacctggaggcatcattgaagactcctgtgtcttgcgtggagtcatgattaacaaggatgtgacccatccacgtatgcggcgctatatcaagaaccctcgcattgtgctgctggatnctntnctctggaantancaagaaaggagaaagccagactgacattgagattacacgagaggaggacttcacccgaattctccagatggaggaagagtacatccagcagctctgtgaggacattatccaactgaagcccgatgtggtcatcactgaaaagggcatctcagatttagctcagcactaccttatgcgggccaatatcacagccatccgcagagtccggaagacagacaataatcgcattgctagagcctgtggggcccggatagtcagccgaccagaggaactgagagaagatgatgttggaacaggagcaggcctgttggaaatcaagaaaattggagatgaatactttactttcatcactgactgcaaagaccccaaggcctgcaccattctcctccggggggctagcaaagagattctctcggaagtagaacgcaacctccaggatgccatgcaagtgtgtcgcaatgttctcctggaccctcagctggtgccagggggtggggcctccgagatggctgtggcccatgccttgacagaggccctagaggtcattcctcgtaccctgatccagaactgtggggccagcaccatccgtctacttacctcccttcgggccaagcacacccaggagaactgtgagacctggggtgtaaatggtgagacgggtactttggtggacatgaaggaactgggcatatgggagccattggctgtgaagctgcagacttataagacagcagtggagacggcagttctgctactgcgaattgatgacatcgtttcaggccacaaaaagaaaggcgatgaccagagcccggcaaggcggggctcctgatgctggcccggagtgagtgctacgcaaggctacaattcaattgcgacagaaccagcagagtctccccttttcctgcagccagagtgccaggaacactgtggacgtctttgttcagaagggatcaggttggggggcagcccccagatccctttctgttccgagctcagattttcccaaagacactgacatgttaatcttctctattgtaaggatttccatttagtttgacattccgatgaattaaatctaaatcaatttgca

SEQ ID NO: 563639 - DNA, 405 bp, Homo sapiens
  misc_feature (304)..(304): n is a, c, g, or t
gccctttggatgtggaggaaaacttgactgctgggaaggcagaaatctgtccctgggaggtgggtgctggagcaggggaggaaagggctttgggagctgaggccattaggaaatctccaaatgatacagtcaagggagctcttccttccagacatccttgtgtgcctcttgctagttttttagggggtctccccctcttcctgccctatctctcaccagtctccagagctcgtctcactggctcatttccttccccctagcttttcagcgctgccatcaacaggacctctctcttttgtcaagncaactggagtcaaggggaatctctggttctgatgcaagatccatccaccctcccccacccctccccgcccaagaatcattgctcagtaacaagaggcacat

SEQ ID NO: 563640 - DNA, 308 bp, Homo sapiens
gctgatccgcttaacgcaggaagaagcatcagccagtcattaggaagagtttcctctgtcctttctgagtcaactactgaaggagtcacagattctagtaagggaagcagcccaaggctgaacacacagggaaatacagctctctcctcctctcttgaacccagctatgctgaaggaagccagatgagcataagcatccctctaacctcatctcctacaactcctgatgtggaattcatagggggcagcacattttggaccaaggaggtcaccacagttatgacctcagacatctccaagtcttaagc

SEQ ID NO: 563641 - DNA, 159 bp, Homo sapiens
aggtcaaaacagtggtgagagccaatgctgctcacagacacccacttgatgccacagccatgcaatgaggcttcctcccagctgctctgttggcttgctgaacgccagctctgagtcacagggttgccttggaccctcgcttgtagggggtccggctgt

SEQ ID NO: 563642 - DNA, 176 bp, Homo sapiens
cctatcagaatccaatgagaactacaatggtgtgcccagacgtagagctgagaatagcattaccaaatggaacaacgtgctacagtcaggattaaaaagaacaatactacaaaccaagtatatcaggctattatagcaaaggctgccatgaacaatacaacactgaattactcggc

SEQ ID NO: 563643 - DNA, 591 bp, Homo sapiens
  misc_feature (161)..(161): n is a, c, g, or t
  misc_feature (301)..(301): n is a, c, g, or t
  misc_feature (387)..(387): n is a, c, g, or t
  misc_feature (395)..(395): n is a, c, g, or t
  misc_feature (420)..(420): n is a, c, g, or t
  misc_feature (432)..(432): n is a, c, g, or t
  misc_feature (437)..(437): n is a, c, g, or t
  misc_feature (463)..(463): n is a, c, g, or t
  misc_feature (477)..(477): n is a, c, g, or t
  misc_feature (499)..(499): n is a, c, g, or t
  misc_feature (501)..(501): n is a, c, g, or t
  misc_feature (506)..(506): n is a, c, g, or t
atttcagaagagatgtttggttgaaagctttttttctgtggaaattctgaagcggactagtggggaaaaatttttgattggattggggtgtttctagaggatgactggtctcgagatgtattttggctttgtgaagttttttttttaagagggtcctgctntagtgtagtcggtggtattcgagatggaggagtcgggagtatagctgctgctggaaatgctgatttttaatttatataagcgaatctctgtttttgaagctctgtagtacttttatctatataaggatgaaggtaattgngagtgagtaatggagtggctgttatggaaggaagaaaagctgttattttctttctggatactgagagggtaatctttgcttttatntttgaggntatggagggtcttcttttatttttntatagagattantttgntgctttaatgatattcccttcccacntttctttttgaggnttctctttctccttcccatttntntacantaaggggtatgttcccttttgtccctttccctacctttatatttggggtccttttttatacaggaaaaacaaaacaaagaaataa

SEQ ID NO: 563644 - DNA, 140 bp, Homo sapiens
caggcctctaacaggagacagctccaaagcacgctatgatcgtctgccaagcatttgagggaaatacgtatgcatgttttgagggctctgtttttctagaattttgtaccacctggcagcagatatggggatcctctgga

SEQ ID NO: 563645 - DNA, 229 bp, Homo sapiens
tgatgatggtcatactgtatacagatttggaggtgaggaggtggattgctgaggcaggagtcgagacaggctgggaaatggtgaaaccaatctctaataaaaatataaaattagtgagcatggtggtgtgtgctgtaatcccagctattgggaggctgaggtaggagaatcgctggaactggagagatggaggttgcggtgagtcgaggtcgagccattgcactccggg

SEQ ID NO: 563646 - DNA, 287 bp, Homo sapiens
cacgttctgctctcggagagagtatagagagagagagagagagagagatagtatatagcgagagtttctcccttcatttcctcttcccttctcctttctcttccttctcctctccctttttctctttctctttcctctcccttttttctcctttctcctcttctttctcccctctctcctcctttctctcttttccccccttttccctccctcttcctcttttcctttcctccctccccctctcttctctttctcccttcttcttcctcttctcttctcctctccct

SEQ ID NO: 563647 - DNA, 426 bp, Homo sapiens
gtcgaccatttcaacaatgttcacagtgtcatcaccagcagtagattccatctcaagaaaccattttctttaaaaagaaactgctcatctattgatggtatcatgaaattggaaccaatacatctttaggctccacttctaattctagttctctcgctatttccactacttctgcagttacttcctacatggaagtcttgagcccctcggagttatccgtgagtactggaatcagctcctttcagactcttgtcaatgttgatattttgacatcctcccatgaatcatggatgttcttaatggcatctagaatgttgaattctttccaggaaggtttccagttgacttttgcccagatctttaagcggaatcactgtccatgtcagttacagccttacaaaatatagatatataaatatacttttt

SEQ ID NO: 563648 - DNA, 225 bp, Homo sapiens
tttgggggttccccccgggcccctcccccggggccgggggttcccttaggaatttggggagggggtaaacggggtgggcaaacccccctttatggccctggaaagttttacctccccgggcccctttgagcctccaaaggtgggtttccttttttcaaaaatttattgtttgagtttttgttcagcccttgctttccaaaaataaactcagggggacatgctgta

SEQ ID NO: 563649 - DNA, 684 bp, Homo sapiens
ccgctctcgccaggctttcatgtgaaagtgacatcgtgtttaaaccctgcgtggcaatccctgacgcaccgtcgcgatgcccaggtacgacagtccgatctggaagtccatctacgtccttacgatcatcctactatccattgattacatccagagttttatcagagtctagtagacatgtgagcctccaagcagatgcaccgagctgcgatagagccttcaccagatggcaaatatgcattgggacctttacctcagatgcacaagctcataccagggcacctgaagaccagaccagacacctccttattggtgtgtcatcagagcgaggactgtgtctcgctattcactcctccattgctaaacaggtgcaatgtcaggttgctcccctaacagctgctggcaaagaacccatccctgccccaactcgtgaccaaattcgcggcatacctttatcggcctcactcttgccaatttcttggctccctctcaagcactcctcacgtaagccccccactttttgtacacgcttctactctttctcctctgacatactttcctcgttattacttctatctaactctccctctcaccttaattaattctaggtcttcccccttccttttttatcgatcctcagcccctcctttttcctctcaccctctttcacgtcctcgccccctc

SEQ ID NO: 563650 - DNA, 110 bp, Homo sapiens
  misc_feature (108)..(108): n is a, c, g, or t
atcagggtgagcatcaaactcaaactacgccctgaatcggccgaactcggagccagtagccaaacaaatctcaatataaggtaacctagccaatcattctacttatanac

SEQ ID NO: 563651 - DNA, 115 bp, Homo sapiens
  misc_feature (60)..(60): n is a, c, g, or t
atgctgtcagttattcttacaaatagaaaacagactgtgtacaacagtgaactctacagncactagcatccacaaggtaaaaatgaatgtttcatcattcacacattaccacacc

SEQ ID NO: 563652 - DNA, 115 bp, Homo sapiens
ctggtcccccgatctctctaggtctgcaccccaccaagctctccccaccctgcggcccaagagccctgctctaagccagtccgcagcagagataccccttggggcgggcagaggg

SEQ ID NO: 563653 - DNA, 353 bp, Homo sapiens
catgatcaaacagcacccaaagactcgattatgccgagtagtgcttgatgccaagattcgtatactgtgaactgttgacggataaaggcagaaatggatgagagtgcactctgtggccacatggggtctgatgaatatgagcacctggcctctagaaccctggaggctgcccgaatttgcgccaatacgtacattgtatgaagttcttgcactggatcacatatgcgtgcgcggctatacacattacacggaatcctgattgacaagatgtagtcctgagcacaggctgacaggctgcagacaagcatgtgaggcgccttaggacagacatatgcactgcatcctgttcactt

SEQ ID NO: 563654 - DNA, 159 bp, Homo sapiens
tcctgactcaggtgatcacccacttggcctcccaaagtgctgggatacaggtgtgagccactgcgtccagcccagattggttttacaaaacatttttgacacatcttagtcttcatgataggagagtttaatccatttacatttaaggtaataaaccaa

SEQ ID NO: 563655 - DNA, 429 bp, Homo sapiens
agccatggcggacttgagtttgttgcggcgggttttggttactgcggcggcagctctgtctggccgtccccttggcacatcgcctcggatttggggacttcctaactcgcggctttccgaaggctgctgctcctgttcgacacagtggagaccatgctaaaagactatttgccatcagaccttctagattctatgacaggcgtttttcgaagctattgggattctacattgcattgactggcattccaggagcaactttcataactgtggcgaaggtattcattgcacaagctgaactagcagaaatttcagatcggtatggcccagaacactgggacaattatcagcaccccatatcaggacgcttagcccgtacccttgctagtccccggactcttcacatcaccacgcgccggccctcacctgccc

SEQ ID NO: 563656 - DNA, 379 bp, Homo sapiens
agatactctatcaatactttgagttcatttaactaaacttatgaattagtagaataatagactacaccttcagaccttaaactagtaaccttaaacctttaccatattactagcctggtcccacgaggctcctggcaaccacatgggtgcaacaactgctttcatacattgtcaatttctcacagctcggttagatactagcataaccacagacatcagcatctagcagaatacccattagctatctaatatagcagcacatcaatatcttgacttgtcaaggcaaataaaaatctcatgagataataaagttgtactggtcttcagattttatttataattgggaactatcttacacttcccatcgtaaagcttggga

SEQ ID NO: 563657 - DNA, 338 bp, Homo sapiens
ggtcgacttttttttttgagacagtttcgctctgtgacccaggctggagtgcagtgtcgcgatctcggctcaccgcgacctccgcctcctgggttcaagcaattctcccgcctcagcctccgaagtagctgggattacaggcgcccgccaccacgcctggctgatttttgtgtttttagtagagatggggtttctccatgttggccaggctggtctccaactcctgacctcaagtgatctacccaagtcggcctcccaaagtgctggggttacaggcatgagacaccgcacccagccactaaatacaactgcttttaatacaagataagtcatcacaa

SEQ ID NO: 563658 - DNA, 190 bp, Homo sapiens
  misc_feature (69)..(69): n is a, c, g, or t
  misc_feature (79)..(79): n is a, c, g, or t
  misc_feature (88)..(88): n is a, c, g, or t
  misc_feature (127)..(127): n is a, c, g, or t
  misc_feature (177)..(177): n is a, c, g, or t
  misc_feature (184)..(184): n is a, c, g, or t
gaaagagggagcaacggcccatagcctgggggttggacatctctagtgtagcgccacattgatttttcnataatcactnggggtttgnacatttttggggggagagacaggattttcacactaaaanagggacctagcttgaggcaattttaatccctgcactaggcaggtaataanaaaggtngagttt

SEQ ID NO: 563659 - DNA, 1222 bp, Homo sapiens
gaggaccctccctgcttcagatttaccaacagcatgaatcaagaaaagttagccaaactatcaggctcaggtccggatagggggcaagggtacagctcgcagacaagcaagaaggtggtacatagaacagccacagctgatgacaaacaagcttcagagttctctaaaaaaactggctgtgaataatatcgctggtattgaagcaggtgaacatgattaacgcatgcatgggcacagattcattccatttcaacaatcccaaagtccgaagcttccctttctgctaatacctttgcaattactggtcatgcagaagccgaaaccaatcacagaaatgcttcctggaatattaagtcagcttgcgtgctcgacagtttcaacaagcctataggcaagttagctgcaaccagttcccacggcaagtcttggcccagtcaaagcgaccaacaacccagaagcacattgcatgcaggaagcatgcatgcatgtccgagcatcgtgtagcaaaatttggatgaggcatccaacgcactgcaagctacactcaacagtccggctctgctggaagcaggcatggactcagatcaacacaaatcagctatgtggttccaaaagtcctctacagaccatcggcgcaacatcacctgtacacaagttcagtcactctagccctctgcgcgcatcatttacatcacacggccggacagacacaagaactcacacacgcgaccaatcacgaaacaacgcacacagagacacataccctccccaggaatatacacaacgagccacacataatgaagcacggacagccacccgaacgcaagctcacaggcacacagcataccggcaaaacaaaggacaacccgatacgaagagaaaacagggagaaaagcaacaaacaacgcaaaacgcaagaagcacaacaataaatacaaggaaacagacacaggaaaacaacggaaagcagtagagccaggcgcccagaggcacgcaaaccagcccacccgacacggaaactcagcccagcacacgccgatgaagaagacagggagaagggtgacacggagaaaacgacagcacgacaagacaagcagcgaaaggcaagaaaggaccaacagagagcgcgagcaacccaggcaagcacgcgcgagaataaccagactggccaacggcgcacagatgcagaacacggaaaaacaaggcaagctgacacaacaac

SEQ ID NO: 563660 - DNA, 139 bp, Homo sapiens
gctgactatgtgttgtattagaaataaactgagaaaagagctaaatattattcatttacaagaaataccaattacatgttaacataaataacatgtgttaaatgaaaatagatattttccaaaatgaaagaggagggtg

SEQ ID NO: 563661 - DNA, 208 bp, Homo sapiens
ctcaacgcttttatacttcactacaaatattgaacccaggttagaaaatttgcatgcagatcaaaccaatgatcttcaatgctctagtaatacacgtgatggcggccgaactgagatggagaccacatcccatgtgacgtgcagcaagtcaggacatgcagggatgccttcctatggctcacgatggtttcaggagcaagtcgcacgg

SEQ ID NO: 563662 - DNA, 481 bp, Homo sapiens
  misc_feature (479)..(479): n is a, c, g, or t
accggacaaggatgccgacggtgccttcaccgccggccagatcctgcgcgatgacaacctgtactacctggccggcgacttcttcctggccgatggcttcagcctgcgggcgctggcctaccaccacgatgaccgtggcgaaggcctcaactggaacagcggcgcgtggtccaacaagggcaccgcgcaggagattccgatcatcttccgcaacaccatctacaccatcgaccgcgatggcggcacgctgtcgttcgactgggagctgggcgcgcaccgcatcgaaggcggcgtctggtacgagcgcaataccagcagcgccgagcgctaccagaccgccgtggacggcccgcgtgacctgagcggcatgaacaccctgccctccgatgtcggcgtgttcgcccagcgcacgcgctagaagacccaccagttcttcctgaaggacacctggcgcctgcttgatgatcgcctgaccctgngt

SEQ ID NO: 563663 - DNA, 124 bp, Homo sapiens
caccgtcaatcatcgggtaaaagagtcaaggtatatataaaaaacacaagctaattgtctcctcaaattcattttttctctcccactccctttttagtaagaccctgatatttaccacagtacg

SEQ ID NO: 563664 - DNA, 601 bp, Homo sapiens
  misc_feature (52)..(52): n is a, c, g, or t
  misc_feature (509)..(509): n is a, c, g, or t
acgatccttaaatttagagcgatcgcgacgcgctggctcagtcaataaaggntccgggcccaacacgcacattcacagtagttcccagggcagcaggtactagacgttttctattctagtaaatacatgtagttatctctagtagtttctctttgtttttatactagattatgtgaattaagggtagatacacagccattttcagtagatagtcttcgtatttataccttatgccgtttatgtctcctctcttttttcaatcccacgctcattttgtactttttttttattacttttccactccatccatcaatgttaccttcagtccgcactcaattccctatagcaaatttcctccaccgctacaacccctcttcctaacggttccaatctaacgccccccttcttaccttcgcatttgcttctcttactgcctctccctacttttctctttaatttctgctctctctttccatcttctctattcttcccacctttcttatctcctnttaacccttctttcttccccctctagtctatggtcgtttctttttcttttccactcttctcttttttatatttttcctcttttttactcttt

SEQ ID NO: 563665 - DNA, 291 bp, Homo sapiens
  misc_feature (52)..(52): n is a, c, g, or t
  misc_feature (122)..(122): n is a, c, g, or t
  misc_feature (148)..(148): n is a, c, g, or t
  misc_feature (180)..(180): n is a, c, g, or t
  misc_feature (224)..(224): n is a, c, g, or t
acgatccttaaatttagagcgatcgcgacgcgctggctcagtcaataaaggntccgggcccaacacgcacattcacagtagttcccagggcagcagaaagtactgaaatcccaccttatgtnatgaagtgtccgagcaatggtttgtntagcaggcttcctgcagactgtatagactgtncaacaaatttttcctgtacctatgggaagcctgtcacttttgantgtgcagtgaaaccatctgttacctgttttgatcaagacttcaaatgccaaaagaacttcatcatta

SEQ ID NO: 563666 - DNA, 117 bp, Homo sapiens
  misc_feature (22)..(22): n is a, c, g, or t
  misc_feature (48)..(48): n is a, c, g, or t
  misc_feature (69)..(69): n is a, c, g, or t
  misc_feature (101)..(101): n is a, c, g, or t
  misc_feature (113)..(113): n is a, c, g, or t
gatcttgcaggtctagtatttnaataatgcactattacccagggcagntattatgagaaactgtttctnctctaagggtttatggcagactttgctttttnaacatgtgaganatga

SEQ ID NO: 563667 - DNA, 266 bp, Homo sapiens
  misc_feature (7)..(7): n is a, c, g, or t
  misc_feature (249)..(249): n is a, c, g, or t
aaagggncgaatgggtgctgggcaggacaaagcatcagctgtccagttcaggcctttcctctttcccgggggttttcattttcccccgtttccctggtgtcccttaccctttgcccaatttttcattactcctggttttgggagttgccttttgaggaaactcccctgggggtacctgagcctggattaaagggcagggggaggatattgcctagccaaagtgggtgttcaataaaaaaccctttgganatggttttttgtttgga

SEQ ID NO: 563668 - DNA, 249 bp, Homo sapiens
gctaacctaaaagcattctgtcgcaccccagtgatctctccggcctcctgatacccacaagcatataagcattcctttctctctgcaacctagcccgcatctgtcattgacttttaaacaataggcattctgactggatgagatggtatctcactgtggttattctctgcattttcctactaattaacaacgtgaatattgtatacatgtgcttgtaagccacatgtatgtcttctttagaaaagtatc

SEQ ID NO: 563669 - DNA, 214 bp, Homo sapiens
tcaccgtgtggacaggatggtcttgatctcttgaccttgtgatccaccgtgccgtcatcatcccaaagtgctgggattacaggcgtgagcgatgcgcccagtatgttagacaatttggaatgcatcctctctgtgctgttgtggtctcaggtgtgagaggaatatgctggtggggaccaggttacagagttgctgtgagtgtctcatgacatga

SEQ ID NO: 563670 - DNA, 440 bp, Homo sapiens
tctagaggatcccgcgtgaacttctgctctggcaatcaggtatatcatgtctccagaggagcttctccttcaggctcaagcctgttggccaggtggacaggagggacactggaacatgttgtgcttgggaatgctcttctggtgcattggtccctgaaggcctcagggcaggtatgtggtgtgtgggcgaatccacaaagaactggcttccattctggcaggccagcctgaaaaccgttgcattggaggcaggcaggaagcggcaggggtggctggctctccaaggagcccaaactggccttgaagtttcctggcccaacttggggccccccttccccttgctgggggcaaatccttggggaaaggtcttggaaggggttccctggtggaaccttcaggggaaagccaaggggcaaggctggtcaagggccctgaaggaa

SEQ ID NO: 563671 - DNA, 564 bp, Homo sapiens
ttctaccactcagatggattaaatgcctctgaaggagccataagtccgcatttcttcaatgattccaccttcaaaatggagatgttgtgggcagcattcctttcctggcagccttggaatggatggctttggccaaccagttggcaatcttggacgccctgccacagcatatggattccgccctgatgaaccctactactatggctatggatcttgataaaggatctgtttccatgtgtaatctcagcttaaaaaaaatctgtgtgggttgggttaattttggatccttgcctaataatgccaggtaatggtaatggggggctgggtttgtttttatttttatatgttgttagcggcagattaaccccagcccctctgttttttgttaaggaccgttgatactggcattgttccctcctccaacccccttttgatggtaagtaacctttcccctgagccccaaaactgaatgctgaaaagcttctagactgggaaaccaaccctgccttatgtatgttaagtggctaatttaatttccattaaaaagcgttaagtggaaatgga

SEQ ID NO: 563672 - DNA, 685 bp, Homo sapiens
ggttaaagttcaggattgatcctagtctggccgagtaaggcccgtgtccccgtctcaggaaagtagctcggaggcttgaggcgctctaggagaccagaagcctggacgccacagcaggggcaggtgtctcctcaggtgctgtggtctcatctatagtgccacctcagccagtgtacaaccttgggcaagtcacgccccctcctggagactctgaaaatggaacagaaaggtgtggtcatctgtgtgttcctctgtgatctggaaatgctacaacctttgcttctaaggcaggtagtagccaggcatggggacggggcttcatgtcagctcccctttgattaagtagacctctggctcttagcaaagagatgtcctaggaaggaagggcagtaccttggtgatcctgtcttgcacatatagactggagcttcagcccattctcacctctccttcacctgagacctgtggctgcagaaccagaaactcatttccagaagcagcagaatgtctctctttccgcagggctcagaagtatgaattaaggccttccattaactgcatcttactcagctggaaacataaaaactcaggatgcttcttgacggtcaaagaagcatcctgagttaaaagtagagtgcacaaatccaactagtgtcattctgtataagcaaatatcatatagtgt

SEQ ID NO: 563673 - DNA, 941 bp, Homo sapiens
gggcgcgatgatggacgtgctctgccagccatgtgggaaggcagtgcctgcgctgcgcgggaggcgcgggaggatctaggggctctgcggtcactggtccctggctcggttccccgcgaccctggggctcacacttaccctgctgcggatgatgcagctggccgggtgtccaccccgcatcctgcgcccagtctcctcgattcccctcgctctgagcccgggagagcctgaacagctgaagagagttcacttgactccccagccccagtgtgggcccttgtgcacatcatgaccaagttttgaagatgctgacacagaagagacgagtaaacttgtctccagatgacggtttaccatcctggccagttgcagtgtggacatatttcagtcaataagtttaacagagagaaactcccttccagcgaagtggtgaaatttggacgaaattccaacatctgtcattatacttttcaggacaaacaggtttcccgagtacagtttactctgcagctgttaaaaaattcaacagctcagttctctccttttgacaataaaaaaatatgagtaaaaagaccagatctgatcgtggacagcagagagctgggctacctaagttaaaatggacctgccatacaggttgcattggtcagatttcgggagagtatcagttactgaatggagaagggaaagaatggcgagtcattggaattttttgagactcaatttattagatctccaaggatcactctttggcacgaaaacaatttggccacagacaaggcccataaccggagtaatggcacattatattcgctacttgtcctcccagagcagttactccgaaagacactggattacaaatgagtcattgaccaccggaaggtctaacaggaagaattctgctggataagagcctgtcaatgttgtataggacagtaaat

SEQ ID NO: 563674 - DNA, 608 bp, Homo sapiens
  misc_feature (151)..(151): n is a, c, g, or t
  misc_feature (154)..(154): n is a, c, g, or t
  misc_feature (260)..(260): n is a, c, g, or t
  misc_feature (298)..(298): n is a, c, g, or t
  misc_feature (405)..(405): n is a, c, g, or t
  misc_feature (414)..(414): n is a, c, g, or t
  misc_feature (433)..(433): n is a, c, g, or t
accccaataaatgtttgtcattgatgccaagaagatctctgtatagtccccaaatatgtgggaaattataacattcatctaaattactcactagacaaaggagaaatcaaaagtgaaattagaaattatttttaaatgaatggaaataaanacnacatgagaatttctggggaaattcttaattaaagcagaatgatacttaggggaaatttatatcactaatgcctatatattagaaaagaagaaaaatctcaaatcantgacctcggctttcccctttaagaaactaggaaaagangggggaattaaactctaagcagaagaaagaaaatgataaaggttgagcagaaatcaataaaattctaagcaaacgtgatagagaaataaaccataaactggatcttngggaagatngaagttttttgagaaaacnaaccataaactggctctttgagaagaaacctgtagcaagattaatatggaaaggaaaagacataatacaaatgaccaatctcaggaattagagaggtaacatcgtaacagagtctacaaatactaaaaatatcacagggaatatataacaactttatgcttatatttacaactta

SEQ ID NO: 563675 - DNA, 783 bp, Homo sapiens
cacgcgtcgaaggcagcaatccaggccaggcctgcgatagatgagtttgtctctgaggcaggatataaatacagccaaagttcctggggatgcgtgactgggagatggcagttgccctgcctttttccttgtaagggttttttttttttttgagatggagtcttgctctgtcgcccaggttggatttgcattggcgccaaactctcggtcactgaacctctgcctcccaggttcatgccattctcctgcctccagcctcccaagtagctgggactacaggcgcctgccaccatgccgtggctaatttattaggtatttttagtagagacgggttttcaccgtgttggcccaggattggtctcgatctttctgaccatctgtgatccagcccgggtttgcgccttccacaaaagtgctgtacattgtcggtcggtgatcaccaactttgcgtcaacttggctacttgaaaggcgcatacctctgcaacgaccactcgataagacctttcttttccacaattgaagcatgttctttacgaagtgacggcgccagtgtagtcgagaattatcgagtcccctattataagttgtggaaagcgtctcgaattccaattatagagtctgactggtactctgagagaagggccgatctccgaatcctttcggcagctaacccgaagcgccacataaacaaaagcctacacacacctcacacagttcgtcatctggtcgccctcgtaccactccccacacctcagccacatcagaaaaacaccacttcatc

SEQ ID NO: 563676 - DNA, 203 bp, Homo sapiens
gcagagatccaatatgtgcctatccataatgaagagttcgttaattgtaatagctccataccttccactaggcacaaactatctagaggtcattcctggaaagccggtccatgcatcagtatcacatttgtgcaaaggcagatttatcagataaattctttgcaacttctgagggcttcaattaagtaacttaaaactatgaa

SEQ ID NO: 563677 - DNA, 267 bp, Homo sapiens
cacagacagagagagaatagatcagtggctgccaggggctggggaaggaaagaggcatgacggctaatgggtatcaggtttctttttggggcgatgaaaatgttctggaattagacagtggcaatggctgaatctacttaaaaatcagggcaggcgcagcggctcacgcctgtaatcccaacactttgggaggccaaggtgggtggattgtttgagctcagaagtttgagatcagcctggggaacatggtgaaatcccatttttaca

SEQ ID NO: 563678 - DNA, 195 bp, Homo sapiens
gggcctgacgtgttgtgcgcgtgagtgatggtgcatggagtacatacagttcattgagatgccaggaagccaggaggtgagcacccttgggtctgggagtagctccctgaaccccaggaactggagtgcgttctggtgtgcattctcactagcaccggatcgggacacaatagtgcagcaggtcgagctggtccc

SEQ ID NO: 563679 - DNA, 684 bp, Homo sapiens
attttcgctgataagtttctgtgcctcagtgggaggagatgctttttgagacgcattatctttccatgaatctggaattatgtttttgctcaaattatcataagatattcctgactgtttggcaaggcgctttaacaatagttctattcgatcggtctcttgtctgttagcccgacactctgcacttaaagcttttgttaattgaagaagataatcgaaactatcagtaccaccgctattcatatttgcaaatcactatatatactgctctgtgcgaacttatgatggaaaaaacgagcaagaagtaataaatcacggttttactttcttcattaatcgccgaatgctagccggagctttgaatgaaccttttattgtcgttatattgtcatacaggtgtcaagataaacaataaaagttgaagcggtggctcaatggtagagctttcgactccaattaaatcttggaaattccacggaataagattgcaatcgaagggttgcaggttcaattcctgtccgtttcaatttattttttagccctgtgcttgagattatcgtcgacaatgaccagctataagctggcaagattgatgctctaaaacgcggggaataaaataatcaagatgattaattgttgggattccattgttgttagagcctacaatattaggtacacagaata

SEQ ID NO: 563680 - DNA, 165 bp, Homo sapiens
gagccggaccttcaggctgattgcaggcacctactcatgcacctattggaagcacaccccagcaatatcaaccattaaccttccctctacgcgttatcatcttcacaagttctaattctactgactatcctagaaatcgctgtcgcctgcaatcaagacctggaa

SEQ ID NO: 563681 - DNA, 467 bp, Homo sapiens
  misc_feature (423)..(423): n is a, c, g, or t
cagatcctaaagtctgatcgaataataatagcattcttacacattcacctcagcctgtcttaagattcagaaactttccaagactctagagaaatctttccagaccctaggccctagttaaagattagatgttgattgaatgcaacacttctgcttgtaggtgcagtcccacacataccgtggaccttaagatgtctataaacactagaaaaaaacttgtaactttgagttggtctggtgagttacttggcccttctccatgtaatcggttgcagaaataaactttcttctttcccagtctgtctgcatcctattggagaatcgcgacggactgactcagcaaactcctcttttgtgtggttactgggactcctttgggagggaacattttaaattttccatttcaaagggttccattggcancttgcactgttatctctgcctacctgagattgagtctcctggac

SEQ ID NO: 563682 - DNA, 271 bp, Homo sapiens
  misc_feature (11)..(11): n is a, c, g, or t
ttttggacggnggacaggctcacgctggccgactgcagtttcctgcccaagctgcacattgtcgacacggtgtgggcgcacttccgccaggggcccatccccgcggagctgcgcggggtacgccgctacctggacagcgcgctgcaggagaaaaagttcaaaaacacgtgtccgcacagcgccgagatcctggcggcctaccggccccccgtgcacccccgctagcgccccaccccgcgtctatcgcccaataaaggcatctttgtcgaga

SEQ ID NO: 563683 - DNA, 317 bp, Homo sapiens
  misc_feature (4)..(4): n is a, c, g, or t
ttgntgcacaacctagggtcagttttgcaggtggtaagccatttaccaagatagttgtaggtaaagaagggcagatttattagagaaattgtgaaaatatgttgcagtgggcagctcagcagagaaggggcttcctgcaaagaggcaagggctggaggaaagttttatagggtcctgctgaagggtgctacgtgtggaatgaggtcattgtgcccgcaggttgtttgtgattagctgtctctaacaattgttcatacaataattgttcattattgttctcaacttggggctctccccaacctggggacccttcctta

SEQ ID NO: 563684 - DNA, 480 bp, Homo sapiens
ggcggatcagcgcgtctcctgctcatccaacacctgacgtggatgatcattacccggaatcgaactgtcgatcagcgccagcaattgcgcacccagcgccgtcagaatgaaattctcgccattgccgccctcttcctcaggccgcgactcgataaagccacgcttgaacagcagcgcctcgtaatcggcagcggtcttcttgagtgcgtccaggttgccagtgtcctcgccggctgtcgccttctcggccgcttctggttcggcgtatttgcgcggggcaaagctgccttcgccgttctgcacttcatgcagcagacgttcgatcagatcccaattgtaagtcgtcatcctgattcctcctgcaggccgatggagttagcccgtcttagggagtgacacgttccggcacgggccgttcaaccaaacggacaggcgtcatttctctgaactttccagaggttcgccgcctcaactgcacat

SEQ ID NO: 563685 - DNA, 997 bp, Homo sapiens
tgcccaaaaaattccgcttttttttttttaaatccggggaaggaagggggggaaaagggccccttgagggggaggggccaaaaccaaaaggtagggttctaaagaggcccgggggtttgtgggcaagcgcggggacctgtaattgggggctcatcccggcaggccggttttggttttctaagcccggagcttgcgtcttctgtgggggggcttaccacgtggggggggtcctacccacagagggggcgggggtataccccctctccggtggcatcataaatgctccgtgcttggataaatggggccccttcttgtggggggacctgctgcgtgcccaagggtttctgttcttcaggagaagcccccaatctggttgattagccgagggacccccctctagagaggaagcagagaagtggggccacctccgggacttgggcctacacgtgggttgatgacccgaggggggggggaagacattactcccccgggaggaggcaagaggaaacatctttttgtggccccctgaaataacctatggggtccccccgagaaagtctgctgggcggggatacacacccacccttggaaatgttttcttcggcaactggcttaagaggcccaacagctttgtgcttccatggacccgctggaaagcctatgcgccccctataatatggtgggccggcctgtccccgggggggttatcctcccccgagaaaaacggagaatccgcggctagaacaggacaccccacttgttggcccccaaatggggtgtaaggggccggtatacaaagcggctggcgacactcccaggaggggccccaacacatttgggcagggcgctcgcccggtgtaaaagtcgctcggaaacgaggtcgcgaagactaccgcgtggccgcaggaaaacacgcgcataatcacgatggcggttgatgtgtcaccacagagaaaacgagctgcaggacacacacacagcaacagaacccgcccgg

SEQ ID NO: 563686 - DNA, 203 bp, Homo sapiens
gggggttttcccccccttttttttttaaacgggggggggttttgggggggggccctttttccccctttttttaaccccttgtttttgggggggttttgggggggcccccccccttttttttttttttttttgggggggggggtttaaccccctttgggggtttcctttttttaggcccccttttaaaaaaagggggtcccgga

SEQ ID NO: 563687 - DNA, 143 bp, Homo sapiens
tggtggtatcctccacttagcgggaaaaggctaatggcacactgtccacgtaggcatcaccccagcaagtggttatactaggctaaactggacaaagacctgcaaaaatgatcctcgaacggaaagccaaatctcgccaagta

SEQ ID NO: 563688 - DNA, 327 bp, Homo sapiens
  misc_feature (53)..(53): n is a, c, g, or t
cagcgacttgcccagcgtgagcacgcggacgcagtcgccgtacttttcgccgnacagcgccaccgcgccggcctcgatggcctcctgcggggccatttccttggtctcggccgggacgttctggcggatgacttcgttgacctcggcctcgatgcggtcgagttcgtcggccgtcagcgggccgccgtggctgaagtcgaagcgcatgcgctcgccatcgaccatctgccccttctgagcgacgtgcgggcccagcacatggtgcagagcagcgtgcacaattttcgaagacgagtggttcgagcgcgtggtgtggcgacggtcggc

SEQ ID NO: 563689 - DNA, 359 bp, Homo sapiens
  misc_feature (45)..(45): n is a, c, g, or t
ggggggggaacccttttcccccggggaccggttttgcccggtttngggtttttttccgcccccctttgggggtttgggccccccgggcccaaatttgggccccgggggggggggcagggggggggggggggttaaccatgtcccaaaaaggttcccccccgggggttttgggggggtttttccccccgggggttaaaaattgggggcccggcccggttttttaatttaaattttttttttttggggaccgggttttgggttaaatttcccagattgggggggttccctttgggggaaaaattggtttttggggcccgggaatttccttttggttttcccccataaggccttgtttggga

SEQ ID NO: 563690 - DNA, 363 bp, Homo sapiens
  misc_feature (83)..(83): n is a, c, g, or t
tctaaggaccatgccatactcccatctgtggctgttcttcatttctaatgtcttgctgtgcagaagcttaacttgatgtgatncttgtcattttatttgatgtctggcttatggagtattactgaagaaatatttgccactccaatgtctagagagtttctccaatgttttcttttagtagtttcatagtttgaggtcttagatttaagtcttcaatccattttgatttggtttttgtggcaagagataagggtctagtttcatccttctccatatggatatccagttttctgagctccatttattgaagagtatctttttccccaatgtatgttcttggcacctttgtcaaaaatgagttca

SEQ ID NO: 563691 - DNA, 615 bp, Homo sapiens
  misc_feature (119)..(119): n is a, c, g, or t
taaccccgggcatcacatagataccacaagcctcaggagattggtatattgccctattatcccatagaattgagttatgtggcctatgacccacaagcagagcgcaggagagctccttnctctggcatggattccacagtcaatccatatggcattattggctgtgtgttctttcacagatgtaagcatatcaggatgcctctcggttataaattctatccaagaatagatttcattaagtgagtgattctgttcatagtacgatgcggaggctcggggcctgactgtgtcgttgcaaatctgctgttgaataagatcttccacgtctgccagcaagactgtgcatggaattccgctccacatttaaatgggctttcacattgtcgacatcagaggcatttacaaaaaaatggtcttgttttttcttcacaataaggtcagctgtcccggctgcacagagaacattctcatatgtgtgtagtaagattctgtagaccttgaccttgcctagaggttctaggaagagcagatagaacgtggccactctgaaacgcgaagacattctgctcacaggagagcactatgggtacaaggtgtgcaagtctgcagagcttc

SEQ ID NO: 563692 - DNA, 188 bp, Homo sapiens
ggctcgcattggggcttggctaatttttaagatttttttttatagatggggtctcactatgttgcccgggctggtcttaaactcctgagctcaattcctgcctccgcctttcatagtgctgggattacaggtgtgagctaccacgcccagcctggcaacctttatttcagcaactccatgagctctga

SEQ ID NO: 563693 - DNA, 617 bp, Homo sapiens
  misc_feature (537)..(537): n is a, c, g, or t
cattgatgcagactgacaggcagtcgtagaggtcacagggcaacgtccagaagagtcccagactgagtcttgctctgttgccaggctggagtgcaatggcgtgatctcagctcactgcaaaccccgcctcccgggttcaagtgattctccttcctcagcctccccagcagctgggactacaggcacatgccacctcgcccagctaatttttgtattttcagtagagacggggtttcaccatgttgaccaggatggtctcgatctcttgacctcgtgatccgcccacctcggcctcaccaaatgctgggattacaggcgtgaaccacagcacccagccaagactagatttttaagaaaaggcaatccagatgtcctagaagtgacagaaaacagatcaatgtcaccggccgctggaactcctagggagtactcactgcaaaggagcccttctggagtgatgaaggagcccttctggagtgatgaagatgttctctctcgattgtggtggtcgtggcatgggtacagaacacttgtcanaaggcatggaattactcaagatgggagcatttttactgaatgttaaatataacctcataaaattgattttttaaaattct

SEQ ID NO: 563694 - DNA, 155 bp, Homo sapiens
ccgtggtgtggtgaagaagggcggcagcttcagctgaacgaactgcaaggtcttaagtcctgccacacagtgccttcgcaggaccgcgtgaatggaatgtcccgtatagggacacttacgtccattcttgaatctggacgggtccaccgtgagcc

SEQ ID NO: 563695 - DNA, 571 bp, Homo sapiens
  misc_feature (1)..(1): n is a, c, g, or t
  misc_feature (86)..(86): n is a, c, g, or t
  misc_feature (191)..(191): n is a, c, g, or t
  misc_feature (201)..(201): n is a, c, g, or t
  misc_feature (206)..(206): n is a, c, g, or t
  misc_feature (208)..(209): n is a, c, g, or t
  misc_feature (219)..(219): n is a, c, g, or t
  misc_feature (229)..(229): n is a, c, g, or t
  misc_feature (232)..(232): n is a, c, g, or t
  misc_feature (246)..(246): n is a, c, g, or t
  misc_feature (252)..(252): n is a, c, g, or t
  misc_feature (254)..(254): n is a, c, g, or t
  misc_feature (274)..(274): n is a, c, g, or t
  misc_feature (281)..(281): n is a, c, g, or t
  misc_feature (289)..(289): n is a, c, g, or t
  misc_feature (294)..(294): n is a, c, g, or t
  misc_feature (411)..(411): n is a, c, g, or t
  misc_feature (418)..(418): n is a, c, g, or t
  misc_feature (428)..(428): n is a, c, g, or t
  misc_feature (440)..(440): n is a, c, g, or t
  misc_feature (450)..(450): n is a, c, g, or t
  misc_feature (457)..(457): n is a, c, g, or t
  misc_feature (467)..(467): n is a, c, g, or t
  misc_feature (499)..(499): n is a, c, g, or t
  misc_feature (523)..(523): n is a, c, g, or t
ntggtagacaggttctatcttaggagagatcttccatccccacctctgcggacttttactcacttctcagggacctgcatgggatntcaggcccattcctgaagcagttgttggcagacagagtggaatagtgtttacagcaggcaggcagccttggagtggaggcacacagctccaagtctatcaggaanaaggggaaangggancnncacagagagnaaggaggatngtngatagacgcacgangatctnantctgaattggtgattattanaacaatnactccatngggtnatacattagaagtgctccagggtccagagatttaacatgtaatgaaagatgaacagaaaaataatgaaaaaaggtatgctccacaacaatagcaaaacaaaaatctcataatgcaanagcatcnagtgtttgantctgaggagcgncttgtatgcncagttantctcgttctncctcagctcttgcttgtgcttctccacctgcnattccactttggcctggtactgcntgtagtcttcctggcaggccccagctccagttctttggagcagctggg

SEQ ID NO: 563696 - DNA, 111 bp, Homo sapiens
tgtttgcagcgctgagcttttatttctttttggtatttacctaggagtggccttgctgagtcatacagtagctctgcgtttgaccttttgaggaactgctaaactattttc

SEQ ID NO: 563697 - DNA, 475 bp, Homo sapiens
tacattgtctgatgacagcagggaccccgacatgcagtggtattacatttgagaaaacaggccagccaggtgcggtggctcactcctgtaatcctagcacttcgggaggccgaggcgggcagatcacctaaggttgggagttcaagaccagcctgactaacatgaagaaaccccatctctactagaaattcaaaaaattagccaggtgtggtggtgtgcacctgtagtcccagctactcgggaggctgaggcaggagaatcgcttaaacccaggaggcggaggttgcagtgagtggcgcttgtgccattgcactccagtccagcctgggcaatagagcaagactctgtctcaaaaaaaaaaaaaaaaatctatctttttccacccacacttacacagacacaaaccaaactttcctgtcccatagtatgcctagtgtacggggtccaaaactggactttggactctcatactgtg

SEQ ID NO: 563698 - DNA, 384 bp, Homo sapiens
ggtaacctttattaccgttctttttctctatagctcggcttattccacgggagtgtttcgttgatatgcacacatgattgaggctgctcattgcgataaagattttatacatgacgatttcatagtcttggagatgagtgtcttagcttagtctcttcagcagtgttcatttcgaagatcatgtttaaatattggatgaatgaactgcatttgcgctcagtggagactaattatgcacagttgcatctcttcgtgaaagctatcgtgagatggttgactgctgtgcggttcacgatcctgacagtgaatgcttcttgccacatagatgacgacccagacttatcccgattggctagaccacaggttgttgtgatgagcactgct

SEQ ID NO: 563699 - DNA, 269 bp, Homo sapiens
agttcagtgaggatcacagtctataacagtatgtcgatattagacctgagcacacatcctataccagagatacacttattcactgctggaaaccaattctcacaaatatgtcagtttaccggtcgaacctttaaattcgctcataatgtttaccctaccaacctttattcccactcactgaattcatgaagatgtgcccccgcttggtcggctcaattttagtaaatgtgtgatagtggtactgtcatcatcattcatgtatctaaaac

SEQ ID NO: 563700 - DNA, 148 bp, Homo sapiens
ccgtgtatcatccctccttatgctcatccctccttagctattgtctgggaggagcagcccaggttttaggatgcattcaggtattgtcatgtcctatattacaaaccatggctgctcctcccagacaatagctaaggaggatgagcat

SEQ ID NO: 563701 - DNA, 369 bp, Homo sapiens
attcgcggccgcgtcgactgaattcaactgtccttttaaactaaggagttttactggtctcgcggctaaaattttaaagatgtatgccaggtgcagtggctcatgcctgtaatcctatcacttttggagaccaaggcggggatggatcacctgaggtcaggagttcaagaccagcctgtccagcatgatgaaactccatctctactaaaaatacgaaaattagtcaggcatggtggcacacacctgtaatcccagctactcaggaggctgaggcaagagaatggcttgaacccggtcgacggaagttgcagtgaggcgagattgcaccattgcactccagcctgtgcaataagagtgaaactctgtctc

SEQ ID NO: 563702 - DNA, 366 bp, Homo sapiens
  misc_feature (47)..(47): n is a, c, g, or t
gttttttttccctttaccctttggggcccccccctttttaggccttntttggggggggtttattttttttcttccccccccaagggggggtttttaccccttgggaaaaattttgagtcccttgggcccctttgggctcccctcccccctccccaaaaaattgaaaccaaatttttgttgaggggttctttgggggggcctaaaggtttttgggtttttcacaaagggaaggggccggttttttccccttgggggcttttttgggggggtttcccccccctaaaaaatttggggttttttttggggccttttttccctttttgggcccccggcccccggggcattaaggggggggggtttttttca

SEQ ID NO: 563703 - DNA, 474 bp, Homo sapiens
  misc_feature (30)..(30): n is a, c, g, or t
  misc_feature (65)..(65): n is a, c, g, or t
  misc_feature (214)..(214): n is a, c, g, or t
  misc_feature (231)..(231): n is a, c, g, or t
  misc_feature (238)..(238): n is a, c, g, or t
gacctcctcccaggtggcaaaatagctatntgagtaattgtcaaccgggttgaattcccgacacncttcctgtcaactatgtagcaaagtgaaaactaacaatttgagctctgtaattttgagcacgctctaacaacagctaatataaattagttagattttgcagtctacaatgagctcttgcaacgaactcacgctttttacttttttcccnaactttagcaatgtagnatcttgngccttaatttttgggtttttttaaatccagaaggtatatagaaaccttttcagatttttcatctgatttgttcttgcagatgttcttctatcaaataccttattttaccttacagatatttgttgcacaggcagatactgctgtatttagacatttctatttcagttcattaaaaactgcaaaaccaatctgtatcatgtaccaaactgacttaaaataaatctacatgtttattg

SEQ ID NO: 563704 - DNA, 125 bp, Homo sapiens
gacccagcaacagacaagttactattcaaaagaagctactcacatcaaatcaatttccagtttcttcccagtggcaggagaatgcctagaccataattttgatctcttctgtgacctaagtatta

SEQ ID NO: 563705 - DNA, 126 bp, Homo sapiens
ttacgactatttcctggaacgtcgacggtgacggtgcgcgccgatgcctatgccaaagaagcggtgcgcatggcgctggtcaatctcggagcggtggcggcgccggccggcaatatgccggtggtg

SEQ ID NO: 563706 - DNA, 323 bp, Homo sapiens
  misc_feature (5)..(5): n is a, c, g, or t
  misc_feature (191)..(191): n is a, c, g, or t
agatnctggtgctgattgtctactgtgggcaggtgttgagaagtcccccctgcggtgaagaacttcgggatctgctgcgctatgactccggagcgcaccacaacatgtactgtgaataccgggacctgaccaccgcagtcgctgtcacccagtgctaccgagacatgtgtgcctggcaccgtgcccgagcncactccattcagatcatgaaggtggaggagatcgcgggcagcaagtgcccgccgcgcgtttgtaagccagtccacgacttccaagatcaggttcccgttgccccaccagaatcgggtaccggggctcgaatt

SEQ ID NO: 563707 - DNA, 570 bp, Homo sapiens
atcatgccacggcactccagcctgggtgacagagtgagactccgtctcaaaaaaaaagagaaagaatgattgataaaccaactgggatactggcggatattttctcaaaaatgaaagaagggaagctgtctgttcagggaaagcaactgacaatatttgttgccaatgataaaatttgagctttagagtaaaaatcagaatttgagaaagtttgtatccaccactgtgagtctgacagttgtctaatattaatgattattaatgaaaccccatctctactaaaattacaaaaattagctgtgcgtggtggcacacgcctgtagtcccagctactcaggaggctgaggcaggagaatcacttgaacccgggaggtggaggttgcagtgagcggagatcatgccattgcactccagcctggcaacagagcaagactccatctcaaaaaaaaaaaaaaaaaggccgggttagttgcaatgtattcggcaggggaaattgtggtaccagataatttggcagatggttcaccgcaatggattggttaccgagctagattcggaacatggcatagt

SEQ ID NO: 563708 - DNA, 110 bp, Homo sapiens
gtttcatagaaacagtgtaacctaagttgtatagtttttcctcagtatctgtgggggattggttccaggacacccacccccaggataccaaatcccttctataaaatgga

SEQ ID NO: 563709 - DNA, 130 bp, Homo sapiens
ctgatggcaacgaggatcttcgggctgacgacttgcctcggccagccttcgagagctatgagttccatggaggcttgtcctgccccgtctggaggcgcagggcccaacgttagccgtcagcgacggggcg

SEQ ID NO: 563710 - DNA, 120 bp, Homo sapiens
aaaacaaacaaacaaacaaaaaaagaaaaatgaaagattaaaaatgggaccccaggactgtggctggactgggtctgtggcatggggctagtgcggcgaacgcgagacatgctaatggca

SEQ ID NO: 563711 - DNA, 421 bp, Homo sapiens
tgacagaataatggctgcattatatcatagtactgactatcaaatttagataatcttgactttactcaagccactgaacaccaagcagagtgtcatcatttaagtcagctttctttctttcttttttggagatggagtctcgctctgtggcccaggctggagtttcagtggcaccatcttggctactgcaagctcggcctcccgggttcacgccattctcctgcctcagtctcccgagtagccaccacgcccagctaatttttggtattttttagtagagacggggtttcaccagtgttagccagaatggtctctatctcctgaccttgtgatctggcccgcctcggcctcccagagtgctaggattataggcgtgagccaccaggcccggccaagtcagcttttcaatgaagcataattg

SEQ ID NO: 563712 - DNA, 433 bp, Homo sapiens
atcccagagaggctgtattgactgatttgtggatagtgtcttcgtgaggatgcctggagcagaggagcacagccagctcacgcgtcctgcagcacccatttgtcaggagtgccaccggagtgtcaatactgcgaggacttaattaatgaagccatggatgtgacactgaaacgccaggaatcccagctgggggaaatggaccatgccgaggccgacacctcagaaaaggatgaaatggattcagggacgatggttcgagcagtgggtgatgagatgggcactgtccgagtagccagcaacatgactgatggagccaatactatgatttgagcacgatgacacgttgccatcacaactgggcaccatggtgatcaatgcagaggatgaggaagaggaaggaactatgaaaagaagggatgagaccattcagcct

SEQ ID NO: 563713 - DNA, 441 bp, Homo sapiens
tgagcccagatgtcccagccaggctctgtgcacggagatggcctcaacaataacatttataacagccagatgtggaaactgattcctcaccccagacacagcccagcatgcactctcacttgctacatagatcggagcggcctgagatctatggactcctgggtcccaggacaggatagtcctgctttaaccagatgatgtcaaacacaggtgctttttcttcaggattcaaattaccctgcaaaaaagtctattggtgccctgccctgaagacactgggaggggggctgtccttgaacgaacatatgtcttctgctccagccactcacattagctctagagagagcatgtctttagagccctgaatcaaaacagtccaggagtgtggctggtactgcctgagggcaccgttgccgaagcaactgtttttcctcttggaat

SEQ ID NO: 563714 - DNA, 188 bp, Homo sapiens
actatacactaatcaagactattacaggattataaaaatccatgtactgttggatcaaataataaagatgcaaaaaaactttatagagatgtaaaaacaaaactataatggatctcctattttactttaaatacaaaaaataaaaaggtaaatgaactattctcctgctaactgctaaattccccatt

SEQ ID NO: 563715 - DNA, 364 bp, Homo sapiens
ctagaaaaatctatagtaaatggttttgttttcctttcattgcaaagtctcatacttgttcttccaaaaatcagttctatgagttgctttaaaattagcctgggacgtccaagaagtgttaagacatctgcagtaactggggcagccagtccctggaggccaactcagggaacaacaaactccttcgccaagccgtccacacatgccagctgatggtctaggacccaagtatgtgccaagagtgaggtgtcttacttctaaggagaggcaagcagtttgctatgcaagcgggtcgctggccctggacctaaagatcttctctctaactccatattctttaaataaacttgtcttttatgaggaa

SEQ ID NO: 563716 - DNA, 294 bp, Homo sapiens
  misc_feature (15)..(15): n is a, c, g, or t
  misc_feature (130)..(130): n is a, c, g, or t
  misc_feature (174)..(174): n is a, c, g, or t
  misc_feature (186)..(186): n is a, c, g, or t
ttagaggatcccggnctcagtgatctccatactactcattctacttacttttttctggagacaggactgctgtatgccaggctggagtgcagtggcgcgatcacagctcactgagcctcgacctcccagnactcaagggatcttctggtcagtccggaatagatagatggaagncacagacatgcnaccacatccccggataagtttggtatttttggtagagacgaggtttcgccatgttgcccaggcttatatcaaacatgtattatttcttggcattgagatactttgtgg

SEQ ID NO: 563717 - DNA, 296 bp, Homo sapiens
gatgtacaggcagtgaatcgagctcggtaccatctcgtgaccggcgattatagcagttccagtagtgactgattcacatttttttccacatgtgattgcagcactccatatgcgttcagaccgctctcccagtcatcacagtctggtttcttgatatcctgaaagaagatactgggcacctcgttggttctgtagcttcatcagtttctcacaatgtgccctctcctcatgagatagtgggaaaaaagtatttgggaaagttcttcaaagccacataatcgtccgggtcacgagat

SEQ ID NO: 563718 - DNA, 224 bp, Homo sapiens
cagccggctacttgtgtatttttaatggaggcaggatttctctgcttaacccagttgtcgtctactatgtagatttgttcacatgcatgaaaccagtgttttcccaggcaatgtcaggacaatggtgcaatctcggctcactgcaacctctgccacacgggttcaagcaattctcctgtctcagcctcccgagtagctgggactacaggcacacgccacaatgc

SEQ ID NO: 563719 - DNA, 766 bp, Homo sapiens
  misc_feature (35)..(35): n is a, c, g, or t
  misc_feature (63)..(63): n is a, c, g, or t
  misc_feature (69)..(69): n is a, c, g, or t
  misc_feature (87)..(87): n is a, c, g, or t
  misc_feature (92)..(92): n is a, c, g, or t
  misc_feature (106)..(106): n is a, c, g, or t
  misc_feature (113)..(113): n is a, c, g, or t
  misc_feature (118)..(118): n is a, c, g, or t
  misc_feature (133)..(133): n is a, c, g, or t
  misc_feature (138)..(138): n is a, c, g, or t
  misc_feature (140)..(140): n is a, c, g, or t
  misc_feature (170)..(170): n is a, c, g, or t
  misc_feature (178)..(178): n is a, c, g, or t
  misc_feature (180)..(180): n is a, c, g, or t
  misc_feature (184)..(184): n is a, c, g, or t
  misc_feature (189)..(189): n is a, c, g, or t
  misc_feature (195)..(195): n is a, c, g, or t
  misc_feature (197)..(197): n is a, c, g, or t
  misc_feature (205)..(205): n is a, c, g, or t
  misc_feature (242)..(242): n is a, c, g, or t
  misc_feature (268)..(268): n is a, c, g, or t
  misc_feature (338)..(338): n is a, c, g, or t
  misc_feature (358)..(358): n is a, c, g, or t
  misc_feature (755)..(755): n is a, c, g, or t
acactgatgtggcagtatacaccaaatccagagtnaggggtgttcattcttttattgggagtnagatanggtggggattaagaagangtttntggaggtttagggnccaaggntggtntcttttttccctccnaattncnttgatacctttctctgatcaggggaaaggngctgagtnanggangttgngttggngngggaaggnttccacttgatagagtgggacagactcctccagagtngagcttggagggagattgaaagtggngataatactgctgacacctcccttgaagctgagatgggaaatggacatacttagaaatttagtgactttnatagcctggattttcctctncaaaacttttagaatggaaaatcccatccccttccttatatagtgacttctacccactaccttctaccattttctactttgggcttaggatgatggccattatctacatgtgttttcagtatttggttggttctaaatgggatctggagacccagcttcttggagatttttaagaggaagtattaactggacaaatggaatgggcacagaaagaaatacagggtcaccagaatggcagaaacctaggtttcccagagtggaaagagagaggagacattcaacaaacaagtatttattgagcgcctactatgtgccaggcactgttctagacccccccagaagaaaaaacaaaaacaagatagaggcagcaacacaattctgagggagaggaaagggnagttgagtaaa

SEQ ID NO: 563720 - DNA, 336 bp, Homo sapiens
actaatctcggtatcgttagtagtagagacggtatttcaacatgtaggccaggctggtctccaacttctggcctcaagtgatccgcctgcctcggcctcccaagctttgggattacaggcatgagccactgctcctggccttaaactttgtttaaagaaagaaataaagcaatgggccagattggtttggacacagattgaacaatttaaacatttattgctcaaaagattaatgaagatcatgggccactaatctgcttcagacaaactgttaaaccagtttttaaaaaactaaatggaacattttctgaatttataccccttgccaagcttgca

SEQ ID NO: 563721 - DNA, 293 bp, Homo sapiens
  misc_feature (264)..(264): n is a, c, g, or t
tgagactgcatagggtcggcgtggtagctcatgcctgtaatctcagcactgactcagaccaaggcaggaagatagcttgagcccaggagttcaagaccagcctaggcaacaaagtgagaccctgtctctacaaacaaatttaaaaattagctggccatggtggcacgtgcctatagttccaggtacttgggaagctgaggtgaggagattacctgagcccaggaggtcaaggcagcagcaagctgtaattgtgccactgcactnccatcttgagtgacagagtaagactctag

SEQ ID NO: 563722 - DNA, 948 bp, Homo sapiens
ttgtgtggagccaatggagcaccttggacatctggagtctggcaggagtgatgacggtgctggaggggctagctcgaggcagtggctggtgggtggcctgaggccaggtgagtgagtgtggagtagtgcgcccaatgggcatctgtgcagacatgggcgacatcaagctgtgtggaccgatgggcctgagctagtggctggaagagaatgggggagccaggcattcatccctggtcactttttggttacaggacgtggcatgctggttggacgagcgggagctggtggggcagggtttgatcccagggcctgggcaacggcgtgtgtactctggcagcagcggtggcacggttgatgtgacccccagtcttgcccgtgtgcatgcgttgatgtccctctcccttccccaggtgcctccgctttcccccaagctctctccttgagacacgaacggctgggtttacggcggatccgagggtgcttgggctgtgtggcagggcaatgctcacgaacacgccttctccatgtccagaggggtgcatcgtgcacttggcgcggccacgtgacgacgttacgccaaaatgtgttgaccatccttcttccggggggggatggcccggacgaactttgctggcaagcgcttggccggtgcgttatcgcgggcccggcttcccagggcgatgaacacagcaggcaatgatggtgccatcggcgggtgcttgcccatgggctgttgtcgccagcgtaacggtgtcccaggcactggttggggggttggttacccccaaggccctgggagtcatgaccacggcggtccattgcgcttcggtgcacgccagcgcacatgagctcggttcccccaagcgttgccaagcctctacctcactgcaattccatttaagttagcaggcccaggcggctgcgtccggccgcgggttttctcaggga

SEQ ID NO: 563723 - DNA, 143 bp, Homo sapiens
ctctagagtgatccccccttaactagagaagaggaagagcgtccattgaaagatactgggaagagaaaagcctggctcgatagtccaagcgaatgatagttagcattcttggggtatccgagcgtcggaattccgtaatcagt

SEQ ID NO: 563724 - DNA, 1032 bp, Homo sapiens
  misc_feature (381)..(381): n is a, c, g, or t
  misc_feature (449)..(449): n is a, c, g, or t
  misc_feature (771)..(771): n is a, c, g, or t
gagaggctatgttccgtagtcagctcagatcgcatcacatcggttgcagacatgatagcgtcgacatggtgactcactgcggtcgtatggatgacgtagcagtgaggtcgctcctctgctgagttacgcgctgttgagtctgtggtgcacccgaagcgggtgtgctgcggtgaggatgctatagacagcctgcgaggatcggagatgttctgccccataccacttcactcgggtgtggtgctacccactggagtcccgagggttaggttgtgattcagatgcgtctactcgactgtgatgcacatacgcgatgtttccctactcgactagaataggcgagatcgcacggatgggctatctagtcaacgctggaaatgacanaggtctgtaccagaagacattgatatgatagccgctgtagtgctagtagtccaacgggaccgctaggnattctacttgattgtagttgcgcacatatggcgtcaaagcgatgctgagcaagccccctagagactatgtcttttaacgccgtgtacgacgtcgccagctagatgggcctttctcggtgaggtgagttgcctgcggcagggtgaatgacattagggacaaggtgccgactgagggggtgaacacccgccaactatcaggggagctatcctatgcttgaaggaacagaggacatcaagtttggatcctctgtgtgtgaggggattactctcctgacgagatttccctaggaactaacagctgcatgtgtagacggtagtgagnggaggctgggagacgattatggcacttagtgaatgactgtttgagcgataggggtgatgacaaaatagcgctgtgtactgcagtggtgcgcatagtggcgaggtgcaatgagtgtgctattctgaaacatgcacgttgaggtcacagggggtgtgacaacggggggtctactcggacagaaagaatggaatgtggcgtcggccagggatttttcatggtgataattgccggtcggaaggcgagtggaccgtaatattggaa

SEQ ID NO: 563725 - DNA, 448 bp, Homo sapiens
tgccacatgtcagtctgagggcctcaacgtgttattacggagtcccccaaaatgaggtttcctcagctttattccaccacgccctttatgtggccccagatatcccgcgaggagctctctggcagctctccgtcctcgatactggagacagagaactgtgcatgctggtcctggttctgtcatagccccttcgtcgccaccacagggttcgccagacagctcctcagcctacctgcgtgccctctttcccctcaatttcggaccctccacatacacagcagagtcttccccgaaatattcgtttgcccagcacgcgggtttcacgacaatgctgctcttagaaatgcatccaggtccctgcgaggagccaggcaatgggtgctcggtgattcttcccatggtatgggaagctctgcggggaccaggacgcgaacgtgagacctgagga

SEQ ID NO: 563726 - DNA, 540 bp, Homo sapiens
tctttcatgggtggcgacgcctgtgagcttctgttttcagaacatacgtccccaaatcataactgccaagtagttcgagtactatggaatctcctatgggttacctgtagctggtgccatttctcctcatcaacccaaatcccgcttcccagatggaccttgccattgtctaggatatacttgtccatgacaggcgcaggagcggggtaataggacgacgtatttgcttcctcactgaaagtgctccgtaactccggctcgggctcgagacattctgactttactttttccagatcaatggcgggaccgctgccaagcctcaggagcagcacgtcctggagcctccggttaaggtcacggagctccttcatttcagacacaagtgccccgtactccttgagcttctgggcctgttgtaccagctgcctccgagtccgctccagctcctgctggaggtggcgcatctcttcctgttgctgctggtagttgcgcagcagctcctcatacagagcccggggcaccacagcatcttctagactg

SEQ ID NO: 563727 - DNA, 678 bp, Homo sapiens
gatcgagtcggtaccgattacgctcatagagggggcaaagctttgatggtatgagaaaacagtgcgattatcttttctttaagggtgtacaatgaatctgctttattatagcattacataggacaaccaggctctaaggacttgggcagcccaatggaaggctctcaaaggcctgtgagtttagctgtcgggcttacgatggtgttaattagccacagggagaaaaaaagccatcctgatgtgggactcctgaagtgtgtcctactgaaagccaaatggagaacggaggaatgtcatcctctccagccagtcatgtacccaccacaagaatccaagcctcagtcccaagcttacacatggaaaagcactgctttcgctcttctccaggggtctacagatatttcctccttgcatgtcatcagatgggtcttcctcctaaatgcctctgaactttactaagatgatccattaggccaggggtccccaacccccagaccacagaatggtaccaatctatggcctgttaggaaccaagccacacagcaggaagtgagtgccagatgagtgagcatcatcacctgagctccacctcctgtcagatcagtgacagcattatattctcataggagcatgagagggatctaggctgcatgctttggatataggttgcatgctcct

SEQ ID NO: 563728 - DNA, 253 bp, Homo sapiens
acgtatatgtaccatgatttataattattaaattacttattataaaatagacacagaagttgctgtgggttttctggcatgagcccttggattctgtgtttagcattcatgatcattctctgggcactttattcttacacaacctttttttttttttttttttttaaaatacttcaggttctagggacccggtgcccaaggcgcgggttggttacatatgttcacatataagggggggacccggagcctcgaa

SEQ ID NO: 563729 - DNA, 407 bp, Homo sapiens
gtctcatatgccatattatgaatatgaaaataatgaagttaatttcctgttgcctttctgtgtcagccacaatatcaggtctaaccctaatccagggatgccagtaaactgaaggcaattttaggttgtagaactcagattaattgtagaaaccattaattttaattgctctaattttcatagtaatcataaaaagtatgccagtacctaatatataaactcaattgccaatgaacctccaaaagtaaatttttaatttttttttaattatatcaatacattccacgcgcccccccccccctcgcccccccccctagaaatggaaggtgtacaaaaattaaattaaaacacggtaaattgactaaatatttggtttttatataaataaaggtcataaccacaaaaaa

SEQ ID NO: 563730 - DNA, 549 bp, Homo sapiens
  misc_feature (247)..(247): n is a, c, g, or t
  misc_feature (257)..(257): n is a, c, g, or t
  misc_feature (348)..(348): n is a, c, g, or t
  misc_feature (352)..(352): n is a, c, g, or t
  misc_feature (431)..(431): n is a, c, g, or t
  misc_feature (456)..(456): n is a, c, g, or t
acaaccggtacattgccactatgatccagtgtttttatctcgtctgctgtgtccaggttgctcatggactctgtagtgtccaggtgctccagtcctgtgtgtcattctgtgtctcttccaccatgcagcagtcactgtcttaggaaccatggagaaggcacagacacacctcagcaccaatcaccagagtgtcaccagagtaacaaaaactgcaccaaaataggactgataacaatttaagattgtntgaggggaangaagtgtcctgagggtatatcccgcagtgtgtgcacatctagtcactgtgcttggaagtcattggaaggcctctcggtatgattatgccancaantagttacacattgtatttctggtttttgggaattgggctgtgtgtgtatatttatataaatttcaatttgttttgtaantatgtataatgatgtagtgtatttnacatacatttatggcaaagtaaaaagtaagcactatggatgtagttagatagctgcgactataggggaagcctcagctgatacctgaaccata

SEQ ID NO: 563731 - DNA, 150 bp, Homo sapiens
attgacgtgctgtgtcatggccttaagtatatctgtcacttttaaaatagatggcatgaaatacaaaaatgcctcttggattcccaaatctatcatgtgcaacctctttccagaattcacatcatagtcatttattgctaaatccatgag

SEQ ID NO: 563732 - DNA, 129 bp, Homo sapiens
caccatggtatcccggctgcctgtttccaaggatgagcctgacacactgacattgcgctctggtcccagccccacagaacgtttgggaatggaaagtagaggagcaagtagaacaaataacgtatgaac

SEQ ID NO: 563733 - DNA, 478 bp, Homo sapiens
tgggcaccgagtcctaggacacccccagctccacccaaggacaaatgtagaggtggggggttcttgtgggcctggttgcgtgctgttttcaggacagtgactgtgcagcgtctggacatgagtgacctgcagggtatatacgggggggactttgtccctgcagcccagcactgcaagtgctgtcaggaaaatccacagaccaactccatggatacagctattgctcctccgagagccaaaaatacatcaggatgtggctagagaacacgttcagactcccgcataggacaagatcaacaagatccagccccagaaacctcgctagcacgaagcccagcacagtagggtccgggtgatcctgctatgaaggtgggagactgaaccagtctgtcgccagcatcccacttccagcggatggcagagtgtatccccggggcaggcaaagctctctaccagctgcctgactgagagcaagggg

SEQ ID NO: 563734 - DNA, 253 bp, Homo sapiens
agaagacaagagtataccttcaaagaagaaaacactcaaagaagcagcagtcctgaatggtgtttcatacaactgacagacaagttcctaagtttacagttcttttacattacatatacaatagtgcttgtacaagcttgccaaagatagaatatggatcgccagtctttacatcgcactttcagttcctccatttggaattcaaaaaggggagggatcctgaagaaatcatatgttaaacatactttgacac

SEQ ID NO: 563735 - DNA, 948 bp, Homo sapiens
ctcacgcaagcaacagcatccataatccttctaatagtctatcctcttctaaaatatattctccggacaatgaatcataagcaatactaccaatcaatactcatcattaagtaatcataatggctatagcaatacaattaggaatagccccctttcactactgagtcccagaggttactcaagggcacccctctgtacatccggtccctgtgtcttcgtcgacatgactaaaaattagcctcgcatctctaggtcgatagttaccaaagtctctccctctactgaaatgtaagtccttctccatgcgctctcgtcaatcttatccatcatagcaggcagttgaggtggattaataccaaacgcacagtctaccggcagaagggtctatagccaagtacatccctcgaattatgcccagaatacggatgaatagactagacagtttctagcgggtagcaatgcctaaatgagtaaaccaattcttaacctttaagtactatagtataatcgctaactattgaccggagttcactactactcgatctgaaactccagccaaccacagaccctactatatctcgcacctgaaaacaagctaacatgataaacacccttaattccatccacctcctcttcctaggaggctgcccgtaacggttttgcccaaatggcattatcgagagtcaaaagagcatagttatatcccaagtatagcacatagcttcttaactttaatttaactaagctattgaatcatgataaataatccatattagacgaaataatgggtggagatgaacccccatttcccaaatggctaaggatctacttttcttttaattttaaaagaaaggagaaaaaaaatgggggctaaaaaagggggagaaagtgcaaatggggtgaacggcgaatttctgttggtcggaagagagaggagagagatagaag

SEQ ID NO: 563736 - DNA, 326 bp, Homo sapiens
  misc_feature (48)..(48): n is a, c, g, or t
  misc_feature (53)..(53): n is a, c, g, or t
  misc_feature (74)..(76): n is a, c, g, or t
  misc_feature (90)..(90): n is a, c, g, or t
  misc_feature (100)..(100): n is a, c, g, or t
  misc_feature (131)..(131): n is a, c, g, or t
  misc_feature (133)..(133): n is a, c, g, or t
  misc_feature (151)..(151): n is a, c, g, or t
  misc_feature (163)..(163): n is a, c, g, or t
  misc_feature (185)..(187): n is a, c, g, or t
  misc_feature (246)..(246): n is a, c, g, or t
  misc_feature (310)..(310): n is a, c, g, or t
gacgataggagtttgtggtataaagaagatagcgctaggatcaagtanagtgngattgtgtgcgcctagaggcnnntgagatgaatcttncgtgggctcntgcagattctataggccagcgcattctttancnccggctcttccttcatcntcaaagccagcnatagagcatcttagaatcttgnnngtctgaatagtattctgttgtcatatctcctctgtgtattaaggacttatgtgattatnttaggcccgtctggataatcatggttgatcttcacatctcaagatcttaatcacatctgcaaantctgttcgttccattt

SEQ ID NO: 563737 - DNA, 289 bp, Homo sapiens
  misc_feature (67)..(67): n is a, c, g, or t
  misc_feature (76)..(76): n is a, c, g, or t
  misc_feature (153)..(153): n is a, c, g, or t
  misc_feature (187)..(187): n is a, c, g, or t
  misc_feature (227)..(227): n is a, c, g, or t
caaccaacagcatagatgtatcttcaggaaaaatcccttcccttgtaaaagtcaattcaaaaaaaanttggaagangtgactgttacacccgaggtacagttatcaacgtaaaaacacaagaaaccaatccaggcaacatagcaaaccttgtntgtgctaaaattaaaattaaaatgttagccaggnctggcagcacactgcaggctatagtcctaattacttagcnggttgaggcaggcttgaggagtaggaacttgagttcatagtgagctatggattgataacact

SEQ ID NO: 563738 - DNA, 341 bp, Homo sapiens
ttggggctcattcagggtaacatttctgatgagagatgtagagatctgccttcatccttgtcccttcaggaccccccagcaatcaataagaactacagtccctgatctaacctcagagctaacataaaaattctgaccagcacttggcaacaggcaggggctacagaagcaatggggcccatgcagcagggctggggagagcctgaattaagctagagattcagtcccaagcaactcagccttctacttacaaagcaatcaataaaggatgaaagaaactaacattatcaagcacagaccaggggcccggttggggctaggttatctctttctcccctgaa

SEQ ID NO: 563739 - DNA, 366 bp, Homo sapiens
caatacgaaggacgaagaatatgcagaaccagaacaacaagtacgatacgaatcgagacagtgcagacacattacgcacgtaccacggacgcctaagtaagtataaggagagtcattcatatgcgcggagtagtgacgccaattatcgatttgcgcgagcggttcaggcattgaagcgaagccatttaatgagcagcacgcgcatcatcatatgttgcgctaggtgaaatggaagtagggcttattgtcgatgcggcgaacgactgtcctcgatcatcctataaaaagcattgagccgactacctgaaagtgatcgaggcagtgaaagccgaatatatattcacggtgtagcgaaagatcggaaac

SEQ ID NO: 563740 - DNA, 350 bp, Homo sapiens
aatttgggggggggggtttttccccttggcccccccccccccctttcccccaagggggacggggaagggtggttaaaaacccccttggcgggggttttgcccccccccccagggtttgggggttttgggggttttttttaaaaaaaaaccccccccttcccggggggggtatttttcttttccccgggggttttgggggggggatttccccctccccgggccccccccccccttttttttttttttttttggggggtttttagggggggggggggccttttcccgggggggggtttttttttttttttttggaaaaacccccccttttttttttttgggggcccccccca

SEQ ID NO: 563741 - DNA, 342 bp, Homo sapiens
gcgcactagcctacatgcttcgcgatgctagacagtatcccatcttttaattttggtccatctaatgggtgcaaaatggtatcttgtgctttcaactttattacttactagaggaactatacatcttatcattacatttattattctctgtcacttgtactactgtcactcgtttatctgtctctacttgtatctgtgtgtttttatccaataacaacactggtttgtgtcttaccaacaaacaaccccaccccccccacacaccacaccacaacccacacacaaacacacacacaacaaacaaccaacacacacaacaacaacacaaaacaaaacaaaaac

SEQ ID NO: 563742 - DNA, 265 bp, Homo sapiens
aataccccacgaaaacgtgaacaagtgacatgacaaacacatgcgtcaaaagaagatacacaaatagccaagaaacatgtgaaaaatgtgcaacatcactaatcatcagataaattcaaattaaaaccacaatgagatacaaccttaccccagccagaatggccattattaaaaagtcaaaaaacaatagatgttggtgtgaatatggcgaaaaaggaacacttatatgctgctggtgggaatgtaaattagtacaacctctata

SEQ ID NO: 563743 - DNA, 175 bp, Homo sapiens
ctgtcttagaaagatgtgtctatgcaggatgttctctgcaggagtattcctgatgagctaagctttgtctctgttggcaccagctaatgcagtggcaggtcttctgctggtggtgactctgcctactctacccacttaccaggttcgcgctgttcactggctgcttgggggttcc

SEQ ID NO: 563744 - DNA, 565 bp, Homo sapiens
actatgtcaatcacatttactccctggctgaatagaacgccttgctagtgttccctttcgtgatcttaatggtcacaagtaatatattcactatccagtaccctatccaacctgtaccgaatctctacatggttcatcatgatcactaacatgttatagatttctagaattggggtatgctagcagttttcagaatgactttgtagaaaagaatttagatttcaccaacttaatatactagtaaaagctccataatttaaggtgggtttaaaagttactttaatgaacttctagcgcttatgttacctatactttcatggttgacaaaagtcactatctctaggataattaatactaccttgggaggtattaagaaaatgctttctcggccgggcatgtggctcacgcctgtaattccagcactttgggaggccgaggcaggtagatcgcctgagctcaggagtttgagaccaccctgggcaacatggtgaaactccatctccactaaaatacaaaaaattagctgggcgtggtggcgcacacctatagtcccagctactcagga

SEQ ID NO: 563745 - DNA, 215 bp, Homo sapiens
gggtttttcagggggtttttttggggtttgggccccggaaaattttgggggggggttttttttttttaaaggggttcataaaaaaaaacaagggtttttttttttccaagggggggggggaattttttttttttcgggccccccttttttggggggtttgggggggttgtttttccccccccccgccccttcttttaaattttttgggggggcca

SEQ ID NO: 563746 - DNA, 361 bp, Homo sapiens
cagctcggtaccaaagagtgtcttcaacgaccgtaggacttgaccagcgagcaatcttaaggacaccttccccgtcgcagcataagccatagtgctttgataacctcctgtctggtatctgcgtgttcccgtgagaagtacgaattgcagcatcttacccatgtcgttgcaggcgtcatcccgagcctcgtccatgcgctctgcattctccggggcagagaacgcctggatcacctccgcgaggaccacctttgcttgctcagcgctcaaggccgccggttgggtcgaggcggacgccatagggcgtctgaagctctaggttcagcggaggtaaatggaaaactcacgaatgaagagccac

SEQ ID NO: 563747 - DNA, 108 bp, Homo sapiens
gtcatgtatgcgtcgcgtacatgagtggccatagaatgctgccctggagcaggtaggcggctgcaatgtcccgtggcactgccatgcccgccgcggtggctctgactt

SEQ ID NO: 563748 - DNA, 953 bp, Homo sapiens
tatgtttcccagctggcatgcacaggagaggacatcgctgaaatcacgagagatggaccactggataggtttccacctcagatcaccctcgtggctacgtaggtcttacgccaatgctctgtacagagaccatttacccgctgtccgaccatccgtgtctaggtcacgtcccagtagggggtcgagtcctctgaagcttgagatctatctcaccgactaggactttcggagtttcgcactatgacatgactgagggatgatatacatacgccctgcccgctgtaagctaggtgaagctgaagaaggcaaaaggcctgttctgagtggggagacgccagtaggagtcctcacgttcaggtccatgcataggtaccaatgctccaggcatttggctcttcgtggtgactggtgtgtttcgcagggtaatttcaagtcagaagtttcagaagctgttcgcttgtgaccggtactgcgttgtcccgggcgtggtagttctgtcgagtgttgcaaggggaaccttgttgacagctcctgttccaccacttctggcggtttctcacgattcctacacgtatcctgtgaatgctgcgctggagccgcggtgtgggtacttggagtaggcacctggccctttctgggttccaggctacggcaactgccgtagcgttgtccggaagaagaccaggcgcttcaaaagaaggtgaagtgtgcgcccggtgggcagcccaacatctgtagttctttgagggacgccgacaatagttaatcgttttccagacggcataggataggcccttcaaaaaggcttcggggtcacggacacagaaagacaacaggggtttgtggaatgtctgcccattgtttcacaccgggaagggtccgcacctgtgtatcacgtagagggccgtgtaaacacattttgtcgtgcgcactaacactctacacccagggtt

SEQ ID NO: 563749 - DNA, 632 bp, Homo sapiens
  misc_feature (590)..(590): n is a, c, g, or t
  misc_feature (600)..(600): n is a, c, g, or t
tattaaaactatcttttcgtatgctattttaagcttatgaactgaaagtcttttagagataatttacttcaatgaactattattatttattttatgcacaaattgtcacaacttggtcttagcaagctccactgttcgcttacagtctctaatgtttctgaaagcatccatgatttctgctacaaagatacttaggaactactctgttttcctactctgagacctaaaattgactggttcttcaatggaaatgagatccatatctaggcactaagggtatacagaaataattgtgggcaaaaggactaatgcgatttttgttgcactatattttgagatctctttaaggctctatgttcttattgatttattcctatttaatgtattacactattgcatcctactttttctttttaaatatattatgattgactgttaacagactttctgttaaactgacaggaagtttttataaacaataacagcacttacattttgaaagactggttcccattgttctcttggtccaattgcatctgaacgcccaacaacaagtccatttgaatttatacccagatattttccatagncagactttanggcgaatcttgaaataagattatttgacagcc

SEQ ID NO: 563750 - DNA, 521 bp, Homo sapiens
atgttaagaaataatgagtaagcactttaatttatggtgttagtgctttatctggtaactctgagtatagaggccatatatgttttaaaaatttacagggaggtttatatatttttttgtagcatattaaatttttattcatcaatttgccagattttgaggtatgtaggggttatcttgatttctcacgtcttgcaatttcagtcagtcctattacctgttagtctggaccctgcattgctttttacaagtttgtcttttgcttgcagtactttttcattgcttctttccttgggatcagagagccgagaagagtttcaggagatttgtgttaatagttaattgatccacatgtgaaggttgtgagtttaaattcccaatttgctgttccattgctacatctcgaagatttttcctgcaattagaaactacttaaactgttaacttttatctattattttgaaactagacatttttagtgtttaaacttttttaacattaatgtacaaatgaattgttag

SEQ ID NO: 563751 - DNA, 453 bp, Homo sapiens
atcccaagctctggtcaggaccataaggatagagaagaaataatggatattcaacatcaggaagagaggaagtcagatgtctctgtttgcagatgacactgatcatatatttaggaaaatccatcatctcagcccaaaatctccttaagctgataagcaacttcagcaaagtctcaggatacaaaatcaatgtgcgaaaatcacaagcattcctatacaccaataatagagaagcaaatcacgagtgaactgccattcacaattgctacaacaagaataaaatacctaggaatccaacttacaagggatctgaaagacctcttcaaggagaactacaaaccactgctcaggaaatgagaggacacaaactatatgaaaaaacattccatggtcatggataggaagaatcagtattgtgaaaacggtcatagtgatcagagctagtgtaccgag

SEQ ID NO: 563752 - DNA, 175 bp, Homo sapiens
attgtgtgtctcgaccagtgccgcagcgtgatcaggtgctgcatgaagctcaacgccgattccaacaaggccatgaccgaggtcatggccaaggtccacgaagtccaataccgcctgccgcaggacgcctacgacccggtgctggtcaagtccgccggcgaggcgacggccgtgg

SEQ ID NO: 563753 - DNA, 211 bp, Homo sapiens
tgactctccaggatctctctaagtggctgtatcatataagacagaactatgcacaaaaacagtatgattatctcaatagattcagaaaaagggtctttgacgaaattcagcaactcttcatgctaaaaaactctcaataacattacgtattgatgggatgtatctcacgataaataaagagctatcttatgataaacccacaggcatttag

SEQ ID NO: 563754 - DNA, 150 bp, Homo sapiens
actcctgaaaagaaaatgacgttggccgggcgcggtggctcacgcctgcagtcccagcactttgggaggccgagacgggcggatcacgaggtcaggagatcgagactatcctggtttacgcggtgacaccctgtgaatactacaaatcca

SEQ ID NO: 563755 - DNA, 247 bp, Homo sapiens
tgctggaattacaggcgtgagccactgcgcccagcccacgtacaggtttttgtgtgaacctaggtcttcctttctctgggataaatgaccagaagtgcaactgctgggtcatattgtagttgcatgtttagtttttgggttttttttttttttttttgggaaagggagtctggctctgtggcccgggcgggtttgcgggggccccatttgggttcattgaaagttcaactttttaatttaaggcaat

SEQ ID NO: 563756 - DNA, 120 bp, Homo sapiens
  misc_feature (5)..(5): n is a, c, g, or t
ggatnggaggcataggacatagggagggaaggtcccgtgggtgtcatgcagaagaataaaaactggacttcttcctttcacattatacaaatattacatcaagatggggtaccgagctcg

SEQ ID NO: 563757 - DNA, 994 bp, Homo sapiens
tgtgtggctggggtccagtgtggatggtcttgagtgctatcagatctggtatggcatttggcgtctgggccctgcaaggcgggcgctagctggctcctgtggcagctcgtgccttgtgtggtgcttcggggccccgcagactgcggtggcgtatgagtgagggctgtgctgctccactgcggaatgtcgtgagcctcctcccctggatagggtgtacgagatccctggactggagcccatcacctttgctggtgggaacgatgcactatcgtgccctgtgctggctgcgggccgaatctatatcctgcccctggtgaccagctggatacaatggacccgaagggttctacctgctcgccccctcttcacgacgcatccgctgtacaaagaccaggcctgcataatatctttcaccaccgttgcccgacttctcgagggtgtaaatgcatggccctctggctcaccaagaccacagttaatagaaggccttcccgagaaatgtgcttagccttgttgattgatccaaggaaccacatagagaacccaaggacgaagtgcgtactgaactgtgatctctcacgcccgtctctggccagagcacttgagtgaaatccccaaagagagagacctactggccggtcaatcgtggacaagctaatacagctgtgtcaatctcagattctcaagcatccttctctggccagtgaggatctgtgtccaagaattccagtatactgattatctggaaccgaagagtctcttctcctttcaagtccgtggttctgggtggagcccgactgagcacctaaggactcctcttgccccacacattcgcctccagaagagggagcatggacgctaactaagaagtcatgtactagaggaccttctacgccagatataagacaatgcatcgatcttcgtggcatgccatattatgcatgtgacacacatggacgcagggatcacaggaacggcaatccttaccgctatc

SEQ ID NO: 563758 - DNA, 82 bp, Homo sapiens
ggccacctggcacaacttccattcctccctttcttcccggatgatcacggggatctgcttgaccttgggggccggggagaac

SEQ ID NO: 563759 - DNA, 332 bp, Homo sapiens
acggtttatcctaaggatatttaaggatacaaacaaacagccagaggaagagagacatagggcgaggtctgagtgcaggagcttctgtccctgtagagttggggtttgccattctcctggcatgtggatgagttcttgttcacctttctgtcagtctccacatgttcagctccctggaagtgttcagctcctggaagttcactaaaccctgtcctcttgggtttttatggagtcttcactatgtaggcatgattgattcaatcatctaatggccattggcgatcaacttgaccttctccccttccttccttcctcccctcctcccctccttc

SEQ ID NO: 563760 - DNA, 324 bp, Homo sapiens
gaccccggaaattcggccataatggccggtaggagattgccggcaccgtggcttttgccatttaaaccttgaccctaatttaacggtccaatcaatataatcggggggccaaaattttccaacattcttttttgtgggggccaccatttttgggcctccatggcctgttgacctgccaagccaatggccagttaagaattcgaatttaattgggcctttcggaatgggttccttaataagcatttcaaaaggttttggggtttaatccataatggattaaagttggaacttgggattaaagaatggtttaaaggcaccaccagc

SEQ ID NO: 563761 - DNA, 410 bp, Homo sapiens
  misc_feature (19)..(19): n is a, c, g, or t
acagtgtattagtccactncagctgtacgtctctcctcatgagagggtgtgaatcgtgatcaaaaacaaatggaggacgggaactctttaactgtaagacgtacatctttagtgctgtgttaccagacgaagtacttattagctcctactccagtggtctgaaatcactgaaacagctcacagtccagggcaagccacaccgcctcggtgtatggatagcatttctccatttctctacatgctgaactttggtttttgagtcacataaacatatctggcctttaaatcactcatcctgtgattaaactagaaaaatgacttaaacttattaggtatctaaagaaaaaacttagggttaggttaggtttctaaagaaatgaatgctcagtcacgctatgcagatctcagag

SEQ ID NO: 563762 - DNA, 681 bp, Homo sapiens
gctcccggcaactttctccctcgcagcgccccgcccgccctgcggctccccagccccaggcctgggatggcccagatgggtggaaccccggtgctggtggcctgccctgtgactgatgtgcagctgtgctggactgtggcatgtgatgtgaatggcagtgatgtgatgggtacctggctgtgcagtgatgtgggtgcttggtgtgtgttgactgtgtggtgccctggatgcagatgtgggtgtgtggagcccagacattgatgcatgagcttccatgtgatggccctggccatctatccaccctgctggcctgcctggaaaataatttttgtcttgacttgaatggcaatgatgtattggtctggaatgaacttgatcgccctgctacatcaacgcttgagaactgtgggaatgaccctgaactctgaaaacatggtttctatgtcacatccagggtttttggccctgaagggaaatcaaggtgaaatccatgtccaatgtttgaatgtgaccatgtgtttccaaatggacaatggctttccagacaatggcaaccatgtcctctgcccagctcatctccgcgccttctctgcaggccaaacttgggtcccactggtcctcatggcctctgagcttttccagttttgtgtctggatggatctggggccccctgggaatgtc

SEQ ID NO: 563763 - DNA, 90 bp, Homo sapiens
tatctgcttacacgctacctcttccgtttgctatattcctttttctactacataattgtgaataactaataaacacagctattgactatg

SEQ ID NO: 563764 - DNA, 368 bp, Homo sapiens
tatttatttgagacagagtctcgatctatcacctaggctggagtacagtaggcatgatctctgctcacatgcagatccgcctcccgggtacacgccaatctcctgcctcagcatccagaatagccgggactacaagcgcctgcagcacgcctggccaattttatttttgtatttttagtagagacagggtttcaccgtgctagccaggatggtctcgatctcctgacctcgtgatctgctggcctcagactcccaaaatgctggggttacaggcgtgacaccggcgcctggcttgggtaaggcaatttcttatccatagcaatgcaaataaattttgtctgataaagatacaattggtcgacgcggcc

SEQ ID NO: 563765 - DNA, 136 bp, Homo sapiens
ggggtgacttgaggatccggcacaccgctaggacaccgtatgcacacccgtacggagctggtgtccccgctccggggctcacatattgatgcgaacttagtgcggacaccgatcgcatgcgcactacagcccggta

SEQ ID NO: 563766 - DNA, 448 bp, Homo sapiens
  misc_feature (7)..(7): n is a, c, g, or t
  misc_feature (38)..(38): n is a, c, g, or t
  misc_feature (45)..(45): n is a, c, g, or t
  misc_feature (216)..(216): n is a, c, g, or t
  misc_feature (443)..(443): n is a, c, g, or t
  misc_feature (445)..(445): n is a, c, g, or t
caaaaancccatcaaaaatccccctaaaactgtcccanaacccancccccctccccttcacacctgggtccccaaacttaatgaaaaaacccttcctgatgacctaataccagggtgctggcacccataatgaagtgttttgaatagcagaaatgggctaggcatagtggctcacgtctgtaatcctagcatttcgggaggctgaggcaggcggancgcttgagcccaggagttcaaaaccagtgggctgggcaacatggtgagacactgtctctataaaaaatacaaaaattagccgggcatggtggcgcacgcctgtggttccagctactcaggaggctgacgtgggaggatcactcgagctcgggaggcagaggttgcagtgagccaagatgacaccactgcactacagcctaggcaacagggtgagaccttctctcaantntta

SEQ ID NO: 563767 - DNA, 1590 bp, Homo sapiens
tggaaaatgaaagtggttcccctcatgggggtttttaaccacgcgctctctctcaccaagcgccacagagggccgctctctcttgcgactctcgccgcataattcccagccgcgaacggcaaacagggggagaaagataaggagggacacgtggaccaggggctgcgataacaagagccaaatggccgcgcaaatatacaaacgcggggtgttagaaacaccacagagaaagacaagcgggtctaacacaaagccggcatcaccgacaaaagtggggacccttcaaaaaaggagaggggtgagacaaaaaactcctacaacgatgaaaaaaagagcctgcagagaaacagtgggagacagacccaagagagaacataaaacagatctgatatactaaaaacacgcgcccaacgtgacacaacacagatactccccaacacaaatcaccacttaacaacagggaacaggagcgcgaccaaaaaaaacattggcgcacacgaacacatatacaaaacaacaaacacccgtggcgactaacataagaaacaacgcaacaacaaacaagggagcgcaatataaagaacacaagaacaggtagaccaaagagagaagacaacggcacaccaaaaataacgtagggaagatgaagagacaccactacaatgagcaacacacaaaccaccaacaccacagtgatgggagagaaataaaacacgaagtgacaaaacaaaccggagtcgttaacacaaatcaataaatgttgacacaaaaacaaacgaaaaactacacaaaacaacaagatcagagtaacacgaacaaaaacaagggtgcccaaaaacacacagtccgacatacatcacaacacacctcaacataaatagaatcagaggaagaacaaaaccaataaggacaaacacaccaaaacaacacaaaacaaaaaacaaacaacaaaaagactaaatcaccaacacacacacgacagatcactagaagtgagcacaacagcactactagacaacaaagcacaaaccaaagaatacagaactcacaccacaaggaagaacgaaaaaaacgacaacatcaacacgaaacagaaatgacacacaacacagaataccacaaaaaaaacagagcggagaacacacaaacaacaaccaaaacagaggcaaccgcaacagcaaacacctacacacaaccatgagcactcgcgcaaaatacctacaacccaaaactaaacgagcaggagaagacagctcataacacacaaacaacggatcaaaatcataaagatcaagaacagcaacgatcaacagagcataaccacacaaaaatccaacacccaccaagcgcaacaaacagcgaaacaagcccagcaagaaggacaacacagaacaagacaacagcgagaagccaacaacacaaagcaaacaggcgccacactaacaacacagccccaaaaaaaacaaataagaaaagcaacacacaagacataaacaagcaaccaacaacagagcacagcaacaaacaacgagaccacaaacaaaaaaataaacaagcaaacatacatcatcgagcaaagcaacaaaacca

SEQ ID NO: 563768 - DNA, 293 bp, Homo sapiens
tgaaaaatatagcggcgacaattttattgaaattaaaaaatcacaataaatctgctcgttagtctcgcattaaatcctaattccaacaagctgaaaacttcttgctggatggttaataaaataaaccctcagggccgaattttacgccagagacaacacgattaataaacttaatcctgattattatttgacaggatttttatattttgccccctaagctgtactcgtccatacatcgagctatagcttgaacgttgcactcacaacctatactggtcgtctctaatgataca

SEQ ID NO: 563769 - DNA, 269 bp, Homo sapiens
  misc_feature (97)..(97): n is a, c, g, or t
gcgcccttctgcactgcactttcgcttcgaacagcctgcagacaattccccaacgttgatgtgacatttaataccatgttcagagcctgtcctgctntgattactccctatgctggagtaccccggggacagggaaatgtaagaaaagttactatccaggagtcctagtttcgacaggacacagactcaaccagctcggtgtgggctggctggacggttgaggctgataggtggggctgggctggccatccatgcccagaatcgtgccc

SEQ ID NO: 563770 - DNA, 431 bp, Homo sapiens
ggctaatttttggtattttttagtagagacggggtttcaccttgttagccaggatggtctcgatctcctgacctcatgatccacccgcctcggcctcccaaagtgctgggattacaggcgtgagccaccgcgcccggccttttttttactattatatttttattttttcccaaatattattcatccatggttggttgaattggcagatgcagaacttgcagacccaaaaggtcaactgtatgtaaattattccatatttgttaaagttacagcatgattgttataaatttatgagctttagttaatatttttctattgtgttagtgacatgattgcatttatggacatttaccattggctccagttcaaatgatagatctttgataatgggactttgggaaaatggagatagacaaattttcacattatct

SEQ ID NO: 563771 - DNA, 167 bp, Homo sapiens
cttgggaccgcacacacttagcagcgcatgcactgacacattcattggcacctgtatatgttccctaggttcccagaagtctgattcttttttgagagagggtctcgctctgttgttcaggctggagtgcagtggcatgagcatagctcactgcagccttgaactcc

SEQ ID NO: 563772 - DNA, 405 bp, Homo sapiens
atttttcttccctcaaaactaaatggatatagacctcaaggtttcttgacaatataaaaagaaccctggaacatttatttattgcccattttatttctaaaagacccaagtgttcttttcataattaatcatgttaaggatttttgagtgcccccccacccttgaaaaaaggggattcaacccaaaaaaaccttttcctaaatggtgcttttaaaaatcaagtgtattgctggttctgctgcagtatgtagtcgaagaataaattagtaaattgcttctgagggtctgaaattgaataaagtaatggctttgtatttctataaaagttgtctccccttgtttcctttccattctggcacatgtagacatttaatttatgaataaaaccctttcctgtccttcaaa

SEQ ID NO: 563773 - DNA, 634 bp, Homo sapiens
  misc_feature (599)..(599): n is a, c, g, or t
attcctgaactaacatatctcaagtgctggggactgtctgtaatagtatacaacaaagtggagcactatgctttgaaattatcatccaagtgaatgctgaaggaactttaaaagtaaagatagggaaggagttagtcttataattctcataattccacagatgccgttggtattcaggaatactattctttaaagactatcaatattctacaaagggaaattcacttatagttcccaattgtgaatgaaaaggagtatcaataggcatgacccaaaaccttcttctacacagttaaacaaaatttctcaagacctgatttaagagcaaactttttaaactgagtacttatggccgggtgtggaggcttatgcctgtaaccctagcactttgggaagtaaaggtgggaggattgcttgaggcccaggaatttgagaccagcctgggcaaaatagtgatacctaatttctacaaaaatttttaaaaattagccaggagaggtagctcacacctatagtcttaactactcaggaggctgaggcaagagggtcacttgagcccaggagtttgaggctgcagtgagctatgattaagccacagncctctagcctgtggcacagagtaagaccccgcttt

SEQ ID NO: 563774 - DNA, 193 bp, Homo sapiens
tctagacgatcgcttagggtttgtgctcactctcccgcttctgtccggagtgcaccagcgtgattgtagaacgtcttggactgatgttgtgggccgtccagtgacaccgtgatatcaccataagtgcgtgcaaagtggaacaccatgcccgccacgatcatggtcttggacttggggctttcatcctccaggc

SEQ ID NO: 563775 - DNA, 110 bp, Homo sapiens
gcgtcatcatgccatcatgagtcccaatcatccaacagggcaatgcatcagccattgcaaggcatcggggcatggggcatccctctcacagtcgcacctgccaggccatg

SEQ ID NO: 563776 - DNA, 586 bp, Homo sapiens
tcttgttgcagtgaaataacctcctgctccagctcttggcatcgaggacaatagccttcctcgtcctcctcctcctcctcttctggcagtgtagatgaagatgggtggccatgggattcggacgttgctggggaagtccagccacctaatgtatgcacaggagaggttgacagaggatccacgtcggccagatggccatattcactggctgacgaggggtttggagttggaaagcttcccgagagcaggtaattttgtagagagtcagtgaaaaccctcaaaaaggcagaagtttgttgtttcctttgcatatactgcatctctatgtctacattgtctgaggtctgactgtggacccctttcccaatgtgacagtgctcctgtctttcgttgtaacttgagccttcctgctttacgcaagaaatcatggactgagaatggttggagtccaggagttttcctccacaatttaagaggctaagaactcgactgcactgctgggcaaaggcatccaagatcattcgactctctgcgctgagctccaggctggcgctgtcgctacccgtgccgccggtgccggcggccg

SEQ ID NO: 563777 - DNA, 180 bp, Homo sapiens
atctagaggatcccgctccaccgtatggggtggtcagatgttcgacattacaagcagtggaccttcaattacattctaccgggagcttgcaaaagtgcccaccacgtgccagtgtgcgtgctggggaactaacgggacatgggcgagcaccgagtcatcctgccggacgatgtgcgtgac

SEQ ID NO: 563778 - DNA, 224 bp, Homo sapiens
agctaccgttatccgagataaggaggcccgtgagatgtcaccagatactcagtgataacagtgcccctaattaataaaggagggatctcgatcctggaagatggtgataagcaggccattgatgacaagcttcccgttctcagcctagacggtgccatggaatatgccatgggtggaatcatataggaacatgtaaaccatgtagtagcggtcaaagaaggggt

SEQ ID NO: 563779 - DNA, 448 bp, Homo sapiens
ggtgctagagaccataccagctatcagaaatagatctgtataaagaaggtaggtagggaaggggagagtctacactgtcatatatgtaagggagcatctctttccccagaaaggagtatgtaccctcctgggaaacctggttggacccaaggccaacctaatacccatccaggcaggagtactgcctatgtagaggggcagaacaaaaacaaagggggtaatatgaaccaaaagtattactcaaatactttcgggttcctcctctaacagagaaaggcagaaagaaaacagtatttcaggatttgagtttcccccctatctgaaggcagagggattggactgtgcctttctcctttaccatcatcccattccaagacattgttaggaagtaggccagagtctcacttagacctcctttcttcatcctctagatgtcgtctacaagtca

SEQ ID NO: 563780 - DNA, 432 bp, Homo sapiens
ttgtgttttctctagtgtttatacttccacttttaggtcttgaatgactttattcaattccttcacctgtttatctgtgtttttctatatttctctgagcgagttattgatatcctccttaaaggactctattatcttcatgagataggattttaggacagaatcctgattttcaggtatgttggtatattcagggcttgctgtggtggaagaaccagtttctgatgatacccacatattttggcttctgttgcttctggttttgtgctttccttttgccatctggatatccctggtttttgttggtctgagtgactgtctggaatctgctccttttgtccctggattgctttgggcctcccagtaggcctgcagccctgactatatcagaaaacctgtgcggccttccaccgtagacgcgcccgcgaattt

SEQ ID NO: 563781 - DNA, 112 bp, Homo sapiens
acctactacgtttgtctgtcccagtgctgctcattggctttgaccgagatggtgacgtagatacgtgtaaagtgctttggtgctttcccatttggtttgaccctgtggaaaa

SEQ ID NO: 563782 - DNA, 775 bp, Homo sapiens
gcgaaggaggaaacagaaaagttatcatgccagagctacgccagcgagaaatcgagagagagagagagctagcgagagaagataccgggatcgtgccaaggaacgggagagatgcgagtgaacacagattatgaagaaaccgagcttatcaggacctacgagtctaaggtatggggtgtgttggacctccagatgttgaggctggacatatatctagagtgacaggagaagagaagacgagttgatcgaggagtccaaattcttgggtggtgacagtggagagcacacccatttggtgaaaggcttggattttgctctgcttcgaaaggtacgagctgagatgtgccagtaaagagagaagaggaagaggaactgatggaaaagccccagagagagaggcaagtaaaagatgaggatcctggaagaggataagaattgaattgaaaacgcgtctggggcgataatgtttaccgaatgcttgttaagagcaaagcgatatgagcggtaatgagtagttcctggcggggcgatggactatgtggtagagctggatgatgagtatgctgacacagatatccccacaatcttatgcgcagaagaggtgattgccccaccatggtaggtccagagcaaatgacacaagtgaggatgtcattagcaagctgaccgagatcctttcatacctgaggcaggaacccgtacagaagcttaagaagaaggctaagggaagctggaagagaaaaacttctgagggtgatgaattttttgagaatgg

SEQ ID NO: 563783 - DNA, 160 bp, Homo sapiens
  misc_feature (7)..(7): n is a, c, g, or t
  misc_feature (13)..(14): n is a, c, g, or t
  misc_feature (24)..(24): n is a, c, g, or t
  misc_feature (39)..(39): n is a, c, g, or t
  misc_feature (47)..(47): n is a, c, g, or t
  misc_feature (120)..(120): n is a, c, g, or t
ccggtcntaaganngaaggaaaanggaggaaacttgacntcaaacangcctccctgccgtgaaagttgctgaaatatcaacggaacatcgtttctagaaaggaaaaaatttctgcattgnaaaagcaagccaatcacattgttcagcaggctcagagaga

SEQ ID NO: 563784 - DNA, 987 bp, Homo sapiens
  misc_feature (178)..(178): n is a, c, g, or t
  misc_feature (832)..(832): n is a, c, g, or t
gagatctcgccggctttacgttcacgctcggtgtctgcagcaccctccgctatcctctcctagtcagacgagacccagtgttgctagaagtatcaccatagtctgattctcagcggatcgcatgccagggtagcatcgttttgactctgctgcgggaatcccactgtatgaggttgantcatcttcagcctcgagaacaggtcgtcttcagtagtcgtgctgtgcgccacgctggtgtcttcgaatctggttagtcgtactgtatggcccgtaaatgcctccgggtcctgagtgattaatacttcgcttatactggggaacgggtgtcttcaaacgtgctgttgtagcactgtccagataccacttattgcgtcgcttgccctggtctagcgagagacttggatgttgcacgcaacatacgatcatagattgaccagatacgtgtagtgagtctgcatgatggactgagaagcgagacatgataatctctaacgtgtgtgctcgccttaaacggccaattctggggtgtgtccctttggccgtcttgcgaaaggctggtgccggcttcgaagaatgcggcggcttgccctctgtgacctgccatgagtcgcctgaagtttagcggcattgagacaatctcttgtagagttcggtaccttgcacaaagatacccctgcgtcgtttcgagatggttccgagtccaatttgggccggttcatcaattgtctcgcttcgcaactaaatgcctgggcccaattgcagtgcatgcttcagttgaatcgcttccccaagtgctggctgcacgtcacacacatctttcgagggggaaggnctcagtggagcctgttttggagtcctagggttttacccaacaacgcttgagtgcacgtgttcatccaggggactacacattatgggcaacaggattgccaccaaatgtagagggagtaacggcggggtttgatccccaggatcctggacgaagtg

SEQ ID NO: 563785 - DNA, 133 bp, Homo sapiens
  misc_feature (21)..(21): n is a, c, g, or t
  misc_feature (57)..(57): n is a, c, g, or t
  misc_feature (106)..(106): n is a, c, g, or t
gccaggccgctccagaccatngaggagaagaaagcacatgggaccactgaagaaagnccgaattgcaaaggaagaaggagcttaatgccaggaacagagcagttgntggggtctcaataaaagttatccactt

SEQ ID NO: 563786 - DNA, 445 bp, Homo sapiens
  misc_feature (6)..(6): n is a, c, g, or t
tgatanatatatacacttactatgtactcacaaaaaataaaaattacaaaaaaatgatctgaagcgtttcttcaaggaatgaacaggagatgaaacatgactttaccactacaatcctgaagaaaaagcataatcaaagtaatggcaagccggacacacatgtggtccaattaaataaaaacaaacaggtcatgagcaaaggtcatggcaaaagttttactggatattcaaggcattttgcttgttggctttctagggggtcaaaggcaataacatgagcttactatgaaagtgttttgagaaaatcagccaaagccttagaagaaaagcactcaggaaacctttaccagagagtcctgctcaattctgtcatcaaacgagggcaattttgccagagttttgatgggaaatcattatatatttaaattacaatcctgatttgaaa

SEQ ID NO: 563787 - DNA, 887 bp, Homo sapiens
  misc_feature (1)..(1): n is a, c, g, or t
ngtttgtgttttttttttgttgtttttagagcgacagtcggcgagggtcgagagagaggagcgagaggaggactcgaggtttttggtccgatctgtgcggtttcacaacgggcccgcgcttgctattcggaccttttcgtgccagctgttaccccccccccagcagagttcaagcctgggtgccccccccaatttcgtgtgggacctggctttcagagccacacctgtcagacttaggtttgaaccaactcgatcacgtcccgtcagtggtgccatctggaagaccatcatccccctgatctctcagggcaccccccagtgggactttcccccggacccagctgacagcactcactgggcggatcccggaggccggccccgaggtggtcacaggcttaacccgagccaggctttgccaccctctccctggcgtatgccggcgccccctttgtcttctcccttgtggatgccatggatggaaaggaaggtgttgtggaatgttccttcgttaagtcaccggagaacgggatgtacctactttgtccacaccagctgtctgcttgggaaaaagggcatcgagaagaacctgggcatcggccaagtctcctcttttgaggagaagatgatctcggatgccatccccgagctgaaggcctcccatccagaagggggaagatttcgtgaagaccctgaagtgagcccctgtgacgggtggcccagatttcccttaatttatgaaggcatcatgtcactgccaaacccttgccagataaactttgtattttaatttgctttggtgatgattacctgtattgacatcatcatgccttcccaattgtgggtggctctgtgggcgcatccaataaaagccggtcccttgattttta

SEQ ID NO: 563788 - DNA, 915 bp, Homo sapiens
  misc_feature (466)..(466): n is a, c, g, or t
ggactttcccaggaatgggcttctgatgcctctcctgggtgtgagtcttctaaaagggcaaactctgtccaccgtaggaagagatctaggcaaattcatgaatgtgtaaggtgagcctatgatggagaggagcacttaatctatggggaatcccgtaagttcatcaccacaagatctggtgcaggagaaatatcgtgaagtgcagagacaggtgccctaacaagtgatccgcgccacgtcatatcaagttcactatggaggtcgcgaggagccatcatgcatgataacgctactccaagacatgatagagtccctccgaaggttgtttagggctcatagtaatcgaagtgtgtgcactatctcggccgccgtagtacttatcaccatcgcgcgaattattgacagatggcgtttcgacgacggattgacggtaatgaggacgcagcaccatatgtccagcatcgcngatgtctacgacgctcacggcggtcgtcatctgactggcacagctgaactattctagagacgcgcagtgtgcctaagagaccacacattgcgagccgaggtaccctcgcgcacgcaccatggtgcagagactcgatgcgcagcatgtgtctcacgtgttgtctatttcgtcggccaacgattgcccagagcttattcgagagtgagatgagacacggccagagactagtgggctacgagacgactcgagtcatagtatcatctcccctttggtgttgccctgtatcaacgcacttagatattctcttgcaagggtggttcttatcgtatttaaatacgacatggtgctcatgccaagacggtccgggagtcgtatggtctaatgaagccgcacatggactccacacatttaattgagtggctgccagactatttagccatacagaggtt

SEQ ID NO: 563789 - DNA, 473 bp, Homo sapiens
  misc_feature (131)..(131): n is a, c, g, or t
  misc_feature (137)..(137): n is a, c, g, or t
  misc_feature (161)..(161): n is a, c, g, or t
  misc_feature (170)..(170): n is a, c, g, or t
  misc_feature (177)..(177): n is a, c, g, or t
  misc_feature (185)..(185): n is a, c, g, or t
  misc_feature (187)..(187): n is a, c, g, or t
  misc_feature (190)..(190): n is a, c, g, or t
  misc_feature (198)..(198): n is a, c, g, or t
  misc_feature (206)..(206): n is a, c, g, or t
  misc_feature (222)..(222): n is a, c, g, or t
  misc_feature (240)..(240): n is a, c, g, or t
  misc_feature (252)..(252): n is a, c, g, or t
  misc_feature (257)..(257): n is a, c, g, or t
  misc_feature (261)..(261): n is a, c, g, or t
  misc_feature (268)..(268): n is a, c, g, or t
  misc_feature (287)..(287): n is a, c, g, or t
  misc_feature (289)..(289): n is a, c, g, or t
  misc_feature (327)..(327): n is a, c, g, or t
  misc_feature (333)..(333): n is a, c, g, or t
  misc_feature (347)..(347): n is a, c, g, or t
  misc_feature (361)..(361): n is a, c, g, or t
  misc_feature (378)..(378): n is a, c, g, or t
  misc_feature (394)..(394): n is a, c, g, or t
  misc_feature (415)..(415): n is a, c, g, or t
  misc_feature (439)..(439): n is a, c, g, or t
ccttaaaaaatggatgccaagacaacataaacaagacccagggacccccacagggtatggtgctgtgccccagagtcagggtcctgggtttttacccagggaagtgagaaataaaaataacttttccctgntccctntttcctcccctgacaatgattttnccaccctgnacctccnttttttgntnccnaacccccncccagtgntcagttgcagacatcnctgcctgcagggcatgcncagtgcagcccnttgcncccnaactacnaactcccagaaggtgatgncnatttgtgtttgggacgtttgattgtgaaaaagggaggncagggnacttgcagccccanagactgaaactggnacgtgatggaacggggntggaacgtgatggagntttgacataacaaacgtgtgnctttgtgtgaaatgtgcagatccntgtggaataaaacccagcctagcctgtgaaaaaa

SEQ ID NO: 563790 - DNA, 869 bp, Homo sapiens
gcaagagaatcgcttgaatctgggaggcggaggttggcagtgagccaggatcacaccattgctgtccagcctgggtgacagagcaagactgcgtttcaaaaaaaaaaaaaaaaaaaaaccctttaaaaaaggcctcctttcctccattctttcaacccctctgtggggtaacttgaaaagagttgttttcctctaaaatgtggggatggatatcgtgatttaatctcgcaataggtgggaatacccgggggacctgggttttgatttttgtgattgcacccagcaaatttatccttgagggtgtgatgggtagaaatagggaaaacaccaaaagaaaaacattaccaaaaaaagaaagtgtgatggctggggtgcagtgggctcacgcctgtaatcccagcacttggggaggcttaggcgggtggatcacctgaggtcaggatttcaagaccagccgggtcaacgtggtgaaacgccgtttctactaaaattttgcaccatttcgtggggtgtggtgggcatgcgcttgtagctctcagctactccggaggctgaggcaggagatttgcttgaacctggaaggcagatgtcgcatgagccgaatgggcccttgtactccaacctgggcgattgacagaatcctctcataaattacaggaagtctgatagggtaatggattttagctctgaggtggcgtgaacactagggcttttttttaatggtttcgcgattgcccctttgttggcctttttggccggaaaccttctggtttacggccgggaaagacacccaacacggctttgatgttgaggcgggcctccttatttccccccttgaagccgtgggaaatattccattggtagtactg

SEQ ID NO: 563791 - DNA, 243 bp, Homo sapiens
  misc_feature (7)..(7): n is a, c, g, or t
  misc_feature (202)..(202): n is a, c, g, or t
agctcgngcatgtaggactttgtttttttttgtgagaacagagctttgctcttgtttgcccaggctggagtgcaatggcgcgatctcggctcaccacaacctccacctcccgggttcaagcgattctcgctgcctcagcctcccgagtagctgggattacaggcttgcgccaccgcgcctcagctaattttattatcttgantagagactgggtttttcccatttttggctcaggcgtgatct

SEQ ID NO: 563792 - DNA, 479 bp, Homo sapiens
agaatgcgttacaaaccaaggaaaaacatcctgtaggagaaaacaaaaaaaagcccttcaaaataagctgggagtgggattccagttccacccttgtcacctctagctgtgtgaccttgaaggataaatttctctaactctcagttccctgatgggcagaatagcgcttaccatacagaagacattgtctataaggggtctctcaccaagcttaaccaacagggggtgctcaacaaatgtctatccatacgtatgtatcccacaatgaagtgcagtgttacacccttgttcctacaccttttcctacaaatgctgttgtgaccaggaactcatctaaaacattagatctctgccaacttcacacaaacacaaacctgattcacgacactgaaccacgggctaaaacaccttagaatacaattataacccaaacttgggcgggccacagggatccatgcctgtaataccagctcttgggc

SEQ ID NO: 563793 - DNA, 276 bp, Homo sapiens
gcggtcatctctagacggatcccccacattcgatcgcggagacagaggtaagtagtagctatgcctatcagtgtactatactgtattagattattaggaaactcaggatctcaaatcgtatgcccaggcggaattataggtggcataatcacgagcccactcctcccaaatcgctggaacgacgggtgcaagcaacaacaggcggttaacctaaaaatcccttcgcaaagataggttcttgctgttatcgcccaggatttttattcacctgtttgg

SEQ ID NO: 563794 - DNA, 860 bp, Homo sapiens
tagtagagacggggtttcaccagtgtggccaggctggtctttgatctcctgacctcgtgatccacccgcctgggctcccaaaatgctagtattacaggtgtgagccaccgcacctggccattttatgctttttcatatgactgattatggtgggccattttggtgcatcttttggctatcttatgcatgggaaattcagacacattttcttggagatggctacttgattggggggcttcgtgttcagtccaaacctaagtgcccatcagtggatgaatggataaagaaaatatggtatatatacacaggggaatactattcagccataaaaagaagaaaattctgtcatttggcagcaacagtgtataggacgtggaagacattatgttaagtgcaataagccaggctcagaaagaccaaatatggcatgttttcactcatatgtgggagtttaaaaagttgatctcatggaggctgagagtagaatgggggttaccagaggctaggaaagtgggaggggggatgacgaagaggctggttaatgggtacaaaaataccagttagatagaaagaaacaagttctacgtgtcgatagcacagtaggggcggatcattgggtagcggtaaatttattgtgatatttcaaaattagcagaaggaagaggatttcgaatgggtccctggcatccaagaatttcaccagtggtgtcaacctgggtgaattttcccagtcattctgacttggacacatgccattggtctggctatttggagagttcccggttgttccccaatactttggtaccgtttcatcacccgtcacatccttgattacttattaggggcgcacgtgtggaatc

SEQ ID NO: 563795 - DNA, 687 bp, Homo sapiens
  misc_feature (496)..(496): n is a, c, g, or t
  misc_feature (586)..(586): n is a, c, g, or t
gtggatttctatttgctgtggcttgctggggattgaagggattatggttgatgagaggtttgaaattcaaccagtttattattagtgggggcacatgaagtttgaaaatcttggttgtcttgatctgtcttttttccttttcttcctttaatctttccctccttaccccttccctcccctcccctacccttcccttccctttaaatgtaaggggaaaagggcacactggtcagaaatgcaatgagctagttgttggtttttgtcacaattattcatatgtccacttctattttttcccacttgatagttaaaccaaacatctagtttttactgccttctcaaagtacataattcatttaggttcagtgtacttattgagtgacttatgtgcaaagcattgtactaggtgttctagtactagtgtaaagagtaattcacattaaaatgggaaagatgatgacttgagtgaacttgggatgtcttggctcttgggttntcaacgagattgtggttactttcaatgacacgaaccaaagttcttacgtaaaggttgagggaaacacaagtaattggtttaagctatggntggagttggaaattcggaccactattacaggtggtccgagacttccatgaattggtattaagcctataattccccttattgcttgttatttcatggcgtgg

SEQ ID NO: 563796 - DNA, 481 bp, Homo sapiens
cgtgccccatattccgacatacacctacaggcttgaaagaatcatttctttccattaagaaaacctaactagctgggcgtggtggcatcatgcctgtaatctcagcactttgggaggccgcggccgggcagttcacctgaggtcaggagttcgagaccagcctaggcaacattgtgaaaccccatctctactaaaaacacaaaaaattagccaggcaaggtgacagccacctgtaatctcagctacttaggagactgagacaggagaatcgcttgaacccgggaggtggaggttgcagtgagtcgagattatgccattgtactccagcctgtgtgacagagtgagactctatctaacaacacaaaatattaacaaacctaatgcatatgatgggtcccttatctccataaaaatatatgtaactggaaacccttctcctaaagtacttatacagattttaaaaataatcaatataattact

SEQ ID NO: 563797 - DNA, 182 bp, Homo sapiens
aaaaacggacaaaagatctttatttctgagaactggcgtacaaaaggttaaggatggggggagggatttaaagagcgagcgtggcctggggttgatgccagcttaggggcctcaaactccaattagggaagctcggacaccggacagaaagagaaacccccaattaggaaaaaaaacaaaaa

SEQ ID NO: 563798 - DNA, 305 bp, Homo sapiens
gggggggccccccccccccccccaacaaagcaacaacagggtggggggccgcagctatttgggcctggcgcctgggcagggggagtccccccaaagctccacctgccggggtccgcattaagggggccccgtggagaaaaccgggggccccacagaagggttttggggtttaaaccccccccccccccccggggggttaaaggtgcggggtccccggggggggggttttcccccccccccagggggtcaagcccttttcccggccccccataaaccccccataaaatttttccttggccctccga

SEQ ID NO: 563799 - DNA, 296 bp, Homo sapiens
cacacaaacacggtgatggctcactctcagcatactaatgggaccatctgagttaacaaccctgttccaagaagacttaggtgcagaactttagtataaggtggtcataccttactcaccaccactttggaagacacagcctaatgctcgatgtcacttacatgtgcccctttcccagcatagcaaataatgtctcgggtaacagccatccaacaatccactaagcaatgaccattggcaatagctcatgcagcacacagtcagtagcagcaattgcattataaacatcatcaatt

SEQ ID NO: 563800 - DNA, 400 bp, Homo sapiens
  misc_feature (16)..(16): n is a, c, g, or t
  misc_feature (60)..(60): n is a, c, g, or t
  misc_feature (321)..(321): n is a, c, g, or t
ggaagaatgaaaattngtgttcggtagtatcaacatgaagggttttcaatttgaagaaangaagaaaacagataaacaacaatgctgtacaggttattgactgggtattagaaaagacaagcaagaaatgatacatactcattctctttaagacagttataaatcggatggagctattacttactacttcttttcttactgtgaccatgataaacatattttaagttgttttcgaagaatagatgttatatttctaaagaactacacgaatattcatccctatattcgcacaatccgccggatgctatgcaaatgcacccnaatcacatacactctctgcccccagctacactccccgcaacgcccccccccaccacccccacccccgacccccatccag

SEQ ID NO: 563801 - DNA, 150 bp, Homo sapiens
  misc_feature (17)..(17): n is a, c, g, or t
  misc_feature (47)..(47): n is a, c, g, or t
  misc_feature (53)..(53): n is a, c, g, or t
  misc_feature (76)..(76): n is a, c, g, or t
  misc_feature (128)..(128): n is a, c, g, or t
  misc_feature (132)..(134): n is a, c, g, or t
cgttttattcattctcngcctttcacccagaaccacctcatcatttnaaaggnaattccaccatatccttcaactnttaacagattgcctggtatattattggtttgttgttattgctaattatgttntaannngcttacattgaacaat

SEQ ID NO: 563802 - DNA, 630 bp, Homo sapiens
  misc_feature (593)..(593): n is a, c, g, or t
gtattgcttttacatagccaaaacatggctatagagtttagttttttttaaatcatttaataagcttttcttaatatcgtatagcatttcaatcatcattgcaaaaatcattcacatgcataaaccccagataggcaccttcttatgtcccagcaactaaggctcttctgtagtggccactcctctcttccatcatcttacttccctaaaggaatggttttagtagcacatcacttcagtagcaaattggcagggcacaaaactgacatcacattgaatgtaggttttcatgtaatcatatgagattgggaaaggctgttgcaccagccatctcccattcttttccttcagcagctgctctacattccctgcctctgcttcctggcctgcctgagaggttttggaatgacttgaagcagccaaaattccgagtcccttggctatatgattatgatgacaaaggggagagattaagatatccaagctataggcagagaaaatgatcggagtcctgacatctacaagtcttggggttaaaaagataaggggaaaaaaaatgatgataccagacacaatctctctcttatctcctncccttgacttcaaaaaatgaaaaaaaaaagtcgacgc

SEQ ID NO: 563803 - DNA, 575 bp, Homo sapiens
  misc_feature (506)..(506): n is a, c, g, or t
  misc_feature (518)..(518): n is a, c, g, or t
  misc_feature (551)..(551): n is a, c, g, or t
gtattgcttttacatagccaaaacatggctatagagtttagttttttttaaatcatttaataagcttttcttaatatcgtatagcatttcaatcatcattgcaaaaatcattcacatgcataaaccccagataggcaccttcttatgtcccagcaactaaggctcttctgtagtggccactcctctcttccatcatcttacttccctaaaggaatggttttagtagcacatcacttcagtagcaaattggcagggcacaaaactgacatcacattgaatgtaggttttcatgtaatcatatgagattgggaaaggctgttgcaccagccatctcccattcttttccttcagcagctgctctacattccctgcctctgcttcctggcctgcctgagaggttttggaatgacttgaagcagccaaaattccgagtcccttgggctattatggttatggtggacaagggggaggggtttaaggatttcccaaggttattaggggcaggnggaaaatggatnccggagttcccggaacatttttacaagtttttngggggttttaaaaaaggttagggg

SEQ ID NO: 563804 - DNA, 327 bp, Homo sapiens
gcgggtattggctgctctgggtgggctcagccaggtggccctgctccacctgtctccccctcctcctggccaagcaagtgtgcaagaggacaaatgagtacacaggacatgtcttaggtcctggcacgtgccagctttaagcccacttctgcctcattctgttgtccaaagtgagccacccaactcaaaccgaagggtggagaaatacgtcactcctgtagctgaaggccctccaaagtggcaaagaatgtgaacatgggaagaagaaaaaattgagaccaataatgcaatctatggtaaagagtaataaatgactatcaaattccc

SEQ ID NO: 563805 - DNA, 582 bp, Homo sapiens
ctggacgagcacggaatatctggggctttggagggaatcgtgaatcgtcggcgaggaggccggggaccacacacgagaataactagtcttggctacccgtactacttggcttgcagaagtgctgactatgagcacacacacgtacggagaataactggagaatacagctgctctgaacaagaactgagatcccgagagatgattactttggccctagaacaaacaaataaatacatgtttcagtcctgtgtcctcctgctatagtgtgtccggaattgggggggttcttgggctcactggatttcaagaatgaagctgcgaccctcccgggaccgtgtgtgaatgcctgctctgtgagccctcagaatctactgggcgaatgagtgcgtggaggaaatgtgctcagagctgctgtgtgtcatcctgtgtttgaagtgctcctgcaggtttcattcatccagttaagaatttgaagaagtgtgtgcaccaaggtgaccctttgcttatactttcccccaaattacagttcttaaattttcctatacaatccttctaaattggttgacagttgtccccttttcc

SEQ ID NO: 563806 - DNA, 137 bp, Homo sapiens
ctgataagtcccattgacgcgcagagaaggaggtcggttacctggagtatcacatgggccccacagaagcccccgaggctggacgcaacagatccatccatgcccacagctaacctggaccggacctgcatgacctg

SEQ ID NO: 563807 - DNA, 867 bp, Homo sapiens
tgagcgtgcctaccaaaagcagccgacctatctttcaaaacaaaaaatgagggccctgctgggagaaactggcaaggtagaagctcccggggtactacaagaacatcggtctgggcttcaagacaccccaaggcaggctattggagtggcacctacattgtacaagaaatgcgcccttcgctggtaatgtgtccattcgagggcggatcctctctggcgtggtgaccagagatgaagatgcggaggaccattgccatccgccgagactatctgcactacatccgcaacgtagcaaccgacttcagagaggcgccatcaatgacacatgtctagtacacctgtcaccctctggcttcacgggacgtacagtatcggatgagattcgtgacagctcgggcgacgtgccgggctcggacgcaagacagttagcggctgtcaatcggtgctcaaggtcaccagatggctgcgcgggacgcaaagcaagtcagttccagaagttgctgaggctggacatcggactccgatccacacagaatgacacttagaggttcatattactcatttccgcaggcccatgcccgaatgcacacacaaacaaaggaaattggtcacaatctgcacccgcctcgacatcctaaacacaaaccacacacctaggtaaaatacggtcacctcaacatcccgtacactccgggactctgacaccatagaaacatggcggaacggttctcagccccttgaatcactgaaacggtatctcaattattaaatgctacccacacacattagcacattcaaaaataggggcgatctgacacatcccggacaccaaaagggccggccacacacgaatgccctagccaacct

SEQ ID NO: 563808 - DNA, 318 bp, Homo sapiens
ggtgacagagaacttctcccatcacattcgagtttccgatcatgagatgatccacatgcactaccatctgagtgcgacccatgggcccaactcagtcgggggtgggtgggcatcctctatgatgccctctgactgggcctgctatctgtcacccaacagcgtatgctggaccaacaaaaacattgcgatgccaggccgctcttggaccgtgctcaaggtgtttcgactggcatccccacctgcccctacgaccaacgacaaaagccggattggttggttccttgcttgcccttcaaccgtccgtgcggtcctcggaac

SEQ ID NO: 563809 - DNA, 675 bp, Homo sapiens
gctgggctcaggtgcgaggggtctggacctctctcccatggcggaagctcctgcgcctctccccgtccctcgtcccacgggctgcttctggtgggagtggggctgggcgcttagggagccaggagatggacaggagccttcctcacagaggggagaagccagcccctggcccgctcaccttctcttatccggtgttctgccagtcccagctgctccagtccccactcgccctaagaccgccttcacccagcttccccgtgctcttccttgttctggggtgcttggcccgctatggagggggctgcatacctcgtccttggagatcccgatgccttcaggtccggaagctcttgacgtatttggcgtcgctggtctgagacgtggcgctcggggtggactgcggcctggatgcatcagtgtgtcgtggctcatggcgagactgactgcattatggatggccttgaggactccttattagaggcggccgcatctcaccctgcccgcttttaccacggacggacacgcatcccctctggcgcctcgccagagaatgacctcaagaccagagacctaagcaagagctattgccgtcccctgggaacagccatgtctctccctggaaaaggaagtcccaaccgagattgtatcgtccctgaggaactgaacccggtttgc

SEQ ID NO: 563810 - DNA, 164 bp, Homo sapiens
gtaccttcatcacattccaatatgattgtcgatttccaaacatatttttttctgctagacagaaaactgcctaataattgggaatagtctgtatttcctagtttgtaccacagtgcctagcaggtaggggttattcaaaaaaagtgtgaataaactaaatgacc

SEQ ID NO: 563811 - DNA, 293 bp, Homo sapiens
tggggctgcgaccttagacagcggaccccacatttcagactcacatatctccaaatatcgcataactccatgttgagtacagattttcaggctaggaaaatacattttcctgttctgaattgttccaaccctaaccaaaatgtcatctctgacagaagctcagggttgcctcgttttactttctgtgggtatctgttgttttcagcgaagcaatcacgttccatctagtgaagtaacctttgtggcaacctcaattacttgcacgacgtgcagaggggtccggcgtgtcatga

SEQ ID NO: 563812 - DNA, 223 bp, Homo sapiens
atctggcagtttgcgagtgttcgcaagagcagggccgaatttagcacgacagtgtgtcctgcgccttttgagaatcttctgcaggtcaaagctcagtgttaactagatattttatgacctggtcgacagataaataggaaaacaccagtagaaaagaagaagcctaaaaagaaatcatgtctgcagctctaggcccatagtcagcagcagccctaagccaaga

SEQ ID NO: 563813 - DNA, 159 bp, Homo sapiens
gatcgatctagaggatcccggcgtttatcgatgccatcaagtagctaggatcacaggcgccactaccatacccgtctaattttggtatttggagcagaggcaggtttcaccacgtaggccaggctggtctcggacccctgacctcaagtgatccacccg

SEQ ID NO: 563814 - DNA, 321 bp, Homo sapiens
  misc_feature (109)..(109): n is a, c, g, or t
  misc_feature (179)..(179): n is a, c, g, or t
  misc_feature (191)..(191): n is a, c, g, or t
  misc_feature (294)..(294): n is a, c, g, or t
  misc_feature (299)..(299): n is a, c, g, or t
  misc_feature (319)..(319): n is a, c, g, or t
tgcctcctagagggaggtctgggttcccttctatggctgaccagtgcctgtgtggtgactgccaagcaccaggctccctccctccctgtgacatggcctgggctgacanacactccctctcctgggaccctccttgcctcaaggtgggtgttcaaaaaactgtgccttccccactcgtntgtgcagaaggntgggcctgaaggtttcaagtgtggagaagcagcagaagcacccaggaaagccacagttggcttcccgtttttccctgctcccctgtgtgtgttaaaaattttnaacanaaatcccactttcataatanaa

SEQ ID NO: 563815 - DNA, 325 bp, Homo sapiens
tgttacctcaaacagagtgctgtgtgtgcatgtgtgtgtcgtgtgtgtgctgtgcgtttgtgtgtgatgttgtgtgctcatctgtgtttagtgtgtagctagtgggtctgtgtgtgttctgtatgctcgtgtttagttgggagcacgctgtgtgtgctgtgttcatgcgtgtgctgtgtgttgtgtgtgtgtgctgtgtgtgcatgtgtgtgctgtgtctttgtgtgtgtgctgtgtgctcgtgtgctgtgtgtgcatgtgtgtgcgtgtgctgtgcgtttgtgtgctgtgtgctcgtgtgtgtgctgtttgtggaggtagcact

SEQ ID NO: 563816 - DNA, 103 bp, Homo sapiens
cccagcttatagtccccttctagcttcaagtattcttctaatttggttctggtctacgtaaacaccctcatgggtcaagctttaccttctaacttctgcacca

SEQ ID NO: 563817 - DNA, 133 bp, Homo sapiens
  misc_feature (83)..(83): n is a, c, g, or t
aacaggtcaaaagaaccctttattactttttatgattgccacttatgcttcttgccagatgccttggagcaggtgcttttggnctgaagcttttgcccctttgtgtctctccagccgtatagtagtagtaggc

SEQ ID NO: 563818 - DNA, 128 bp, Homo sapiens
ttatcctacagcgcactgacgctatgtagcggcgtgactgtattttggtggaaggctggtagtggctttggaggtgtgctatggaggtggacttggaggtggctatggaggtgcgcctatggaggtgg

SEQ ID NO: 563819 - DNA, 904 bp, Homo sapiens
  misc_feature (93)..(93): n is a, c, g, or t
  misc_feature (96)..(96): n is a, c, g, or t
  misc_feature (162)..(162): n is a, c, g, or t
  misc_feature (166)..(166): n is a, c, g, or t
  misc_feature (168)..(169): n is a, c, g, or t
  misc_feature (218)..(218): n is a, c, g, or t
  misc_feature (231)..(231): n is a, c, g, or t
  misc_feature (260)..(260): n is a, c, g, or t
  misc_feature (262)..(262): n is a, c, g, or t
  misc_feature (265)..(265): n is a, c, g, or t
  misc_feature (268)..(268): n is a, c, g, or t
  misc_feature (280)..(280): n is a, c, g, or t
  misc_feature (285)..(285): n is a, c, g, or t
  misc_feature (291)..(292): n is a, c, g, or t
  misc_feature (298)..(299): n is a, c, g, or t
  misc_feature (309)..(309): n is a, c, g, or t
  misc_feature (318)..(318): n is a, c, g, or t
  misc_feature (326)..(326): n is a, c, g, or t
  misc_feature (358)..(358): n is a, c, g, or t
  misc_feature (393)..(393): n is a, c, g, or t
  misc_feature (411)..(412): n is a, c, g, or t
  misc_feature (425)..(426): n is a, c, g, or t
  misc_feature (444)..(444): n is a, c, g, or t
  misc_feature (454)..(454): n is a, c, g, or t
  misc_feature (466)..(466): n is a, c, g, or t
  misc_feature (470)..(470): n is a, c, g, or t
  misc_feature (506)..(506): n is a, c, g, or t
  misc_feature (512)..(512): n is a, c, g, or t
  misc_feature (619)..(619): n is a, c, g, or t
  misc_feature (701)..(701): n is a, c, g, or t
  misc_feature (726)..(726): n is a, c, g, or t
  misc_feature (764)..(764): n is a, c, g, or t
  misc_feature (771)..(771): n is a, c, g, or t
  misc_feature (791)..(791): n is a, c, g, or t
  misc_feature (793)..(793): n is a, c, g, or t
  misc_feature (797)..(797): n is a, c, g, or t
  misc_feature (805)..(805): n is a, c, g, or t
  misc_feature (830)..(830): n is a, c, g, or t
  misc_feature (840)..(840): n is a, c, g, or t
  misc_feature (893)..(893): n is a, c, g, or t
gggtggaggccgtctgtggtggcgcgggcgaggtggaggcccaggactctgaccctgcccctgccttcagcaaggccccggaagcgcggatantangaactgccgtggtctttgcaagggaaggaaatgtgcccaacatcatcattgcgggcctccaggaancggnannaccacaagcattctgtgcttggcccgggccctgctgggcccagcactcnaagatgccatgtnggaactcaatgcttcaaatgacaggggcntngangtngtgaggaataanattanaatgtnngctcannaaaaagtcantcttcccanaggccganataagatcatgattctggatgaagcagaaagnatgaccgacggagcccagcaagccttgaggagaancatggaaatctactctannaccactcgcttcnnccttgcttgtaatgcttnggataagatnatcgagccattnagtnccgctgtgcagtcctccggtacacaaagctgacgangcccanatcctcacaggctgatgaatgttatcgagaaggagagggtaccctacactgatgacggcctagaagccatcatattcaaggcccagggagacatgaggcaggcgctngacaacctgcagtccaccttctcaggatttggcttcattaacagtgagaaagtgttcaaggtctgtgaagagacccacccantgctggtaaaggagatgatccaccnctgtgtgaatgccaacattgaggaagcctacaagattnttgctcncttgtggcatctgggctacncnccanaagatatnattggcaacatctttcgagtgtgtnaaatttccanatggcagaatacctgaaaatggagtttatcaaggcaattggatacaccccctnaaaatagcgga

SEQ ID NO: 563820 - DNA, 192 bp, Homo sapiens
  misc_feature (56)..(56): n is a, c, g, or t
actctagagatcccggcgcacatttacaggagtacaggtggaactacgggtcatgngaaagaaagagcgagtggattattttggagcaatgaggctctgcctagctgtgaaggattacattcgaacacaatcatcagcaagaaaattaacaccaaatttttccagggaagaaaatacagacgaaattaaagt

SEQ ID NO: 563821 - DNA, 980 bp, Homo sapiens
  misc_feature (93)..(93): n is a, c, g, or t
  misc_feature (96)..(96): n is a, c, g, or t
  misc_feature (238)..(238): n is a, c, g, or t
  misc_feature (242)..(242): n is a, c, g, or t
  misc_feature (244)..(245): n is a, c, g, or t
  misc_feature (294)..(294): n is a, c, g, or t
  misc_feature (307)..(307): n is a, c, g, or t
  misc_feature (336)..(336): n is a, c, g, or t
  misc_feature (338)..(338): n is a, c, g, or t
  misc_feature (341)..(341): n is a, c, g, or t
  misc_feature (344)..(344): n is a, c, g, or t
  misc_feature (356)..(356): n is a, c, g, or t
  misc_feature (361)..(361): n is a, c, g, or t
  misc_feature (367)..(368): n is a, c, g, or t
  misc_feature (374)..(375): n is a, c, g, or t
  misc_feature (385)..(385): n is a, c, g, or t
  misc_feature (394)..(394): n is a, c, g, or t
  misc_feature (402)..(402): n is a, c, g, or t
  misc_feature (434)..(434): n is a, c, g, or t
  misc_feature (469)..(469): n is a, c, g, or t
  misc_feature (487)..(488): n is a, c, g, or t
  misc_feature (501)..(502): n is a, c, g, or t
  misc_feature (520)..(520): n is a, c, g, or t
  misc_feature (530)..(530): n is a, c, g, or t
  misc_feature (542)..(542): n is a, c, g, or t
  misc_feature (546)..(546): n is a, c, g, or t
  misc_feature (582)..(582): n is a, c, g, or t
  misc_feature (588)..(588): n is a, c, g, or t
  misc_feature (695)..(695): n is a, c, g, or t
  misc_feature (777)..(777): n is a, c, g, or t
  misc_feature (802)..(802): n is a, c, g, or t
  misc_feature (840)..(840): n is a, c, g, or t
  misc_feature (847)..(847): n is a, c, g, or t
  misc_feature (867)..(867): n is a, c, g, or t
  misc_feature (869)..(869): n is a, c, g, or t
  misc_feature (873)..(873): n is a, c, g, or t
  misc_feature (881)..(881): n is a, c, g, or t
  misc_feature (906)..(906): n is a, c, g, or t
  misc_feature (916)..(916): n is a, c, g, or t
  misc_feature (969)..(969): n is a, c, g, or t
gggtggaggccgtctgtggtggcgcgggcgaggtggaggcccaggactctgaccctgcccctgccttcagcaaggccccggaagcgcggatantangaactgccgtgaggttgaaataatataggccatgtaaagctagaatgaaattgtcaggagaatgacgacaccgtgagcaggctagaggtctttgcaagggaaggaaatgtgcccaacatcatcattgcgggcctccaggaancggnannaccacaagcattctgtgcttggcccgggccctgctgggcccagcactcnaagatgccatgtnggaactcaatgcttcaaatgacaggggcntngangtngtgaggaataanattanaatgtnngctcannaaaaagtcantcttcccanaggccganataagatcatgattctggatgaagcagaaagnatgaccgacggagcccagcaagccttgaggagaancatggaaatctactctannaccactcgcttcnnccttgcttgtaatgcttnggataagatnatcgagccattnagtnccgctgtgcagtcctccggtacacaaagctgacgangcccanatcctcacaggctgatgaatgttatcgagaaggagagggtaccctacactgatgacggcctagaagccatcatattcaaggcccagggagacatgaggcaggcgctngacaacctgcagtccaccttctcaggatttggcttcattaacagtgagaaagtgttcaaggtctgtgaagagacccacccantgctggtaaaggagatgatccaccnctgtgtgaatgccaacattgaggaagcctacaagattnttgctcncttgtggcatctgggctacncnccanaagatatnattggcaacatctttcgagtgtgtnaaatttccanatggcagaatacctgaaaatggagtttatcaaggcaattggatacaccccctnaaaatagcgga

SEQ ID NO: 563822 - DNA, 874 bp, Homo sapiens
ggtgggcgggaccgcgggcctgtgacaccgcacgctgagctctgtgatgtagccgcttgcggaagaactgcaaggcagccggggcgccccggcctccctcttccgtgccgccgtgggaatggaaacatttgccccagtgccggaaggccaatgtgtgtgcgacaaacatgggcgccattccggggcctaccggggcaggatccctctaggtgtgtccctcgggaagacaaaggctcacgcgaatatggccggggtcccacgtccagagggcaaactttgggaggggcacacttgggagtcacgtggaacctgtgcgggaatttttggctaagggaagcacgccatgggtggggcgtaaagggtgttcacggggcaaggaattttcttggaccttttcagggcaagaaaagggtaattacggcggtggcaccccccaggctggtaccaattggggaagggtggtccactggagattggggtggcacaggggttatcacattattacccaggaaatgtgttggggaaaaggttgggggttggcaaaccaggctttggtggcgaacggcgggcaattttctctccctttcaaggttgtgcaaacccaataacggggttacctttccaaaggttggacgttgccaagcggaggtggggccggaacgggacctttgaaagcgaaaagcgccacaaggagcaacgcctggaagattcggtagagaagcatcaagaataccttacgggagcgtcaggagccaacgctcgaggagcgtggtgcccattgtggcgacacgacaagactggtcctacgatacctggggggacttcacggagaggcattccctgcctgggatgggctccctaaggaagatgactc

SEQ ID NO: 563823 - DNA, 162 bp, Homo sapiens
cgtgcagggtattatgcatgtaggttgcatagtagatatgggctgttaattgtcagttcagtgttttaatctgacgcaggcttatgcggaggagaatgtattcatgttacttatactaacattagttcttctatagggtgatcgatcggtcaacttgtctgg

SEQ ID NO: 563824 - DNA, 552 bp, Homo sapiens
aggaaacacctatacatggttcacgacaacacgatgtgttgaccggactgccgtttgatggactttggtcaccctgatctagacaccttctgtgctcatgtttgcaaagctgaatacgggaaggacagctgtgccctcctgggagctcttgtttcccaagagctgtgctaacttccctttacagctgtttacagacaaggcaggcctgaggcagatggccactgctcttgtgatgtttgctcagaggaatatgaacattttatttttgaaaagggatgatgtggttttctgccaggtgtctataattaatcctttaatattatggttattaacctcttaaacatgaatgaattcttgattgttttaacacagtacctaagactaatgccttctgtggacaccactgagctctgcctcaattccaccctctgcgaccggggactaatgcccctagtaactgctgtcggtgtggacgctgtgctggttctgttttctaaaggagcagaaggacaggtctctgagacaggatcgttgtccctacaggaggaacag

SEQ ID NO: 563825 - DNA, 428 bp, Homo sapiens
  misc_feature (413)..(413): n is a, c, g, or t
  misc_feature (418)..(418): n is a, c, g, or t
tatctggagagaggagggctcaggactgtgttcactttatttggtcagatgtattttatttgaaaaccatttgagccccaaaatacaagtgtacccttcccacttctggctcaagcacccgtgagccgactagacgtaatattaaaacttactgatgctgggcgcggtggctcacacctgtaattccagcactttgggaggctgaggcaggtggattacctgaggtcaggagttcgagaccagcctggccaacacggtgaaaccccgtctctactaaaaaattaaaacattaggcgggcgtggtggcgggcgcctgtggtcccagctactcgggaggctaaggtgtgaacctgggaggcggagcttgtagtgagccgagatcacgtcactgcactccagcctgggcaacagangcggntccgtctcaa

SEQ ID NO: 563826 - DNA, 322 bp, Homo sapiens
cagccggaccgtcagaagcatctgagtttggtctggtgctgtcacagcataagtgacagcaacttggtagctgaattatgtgcactaagccacagcaaggaagtggacgcccgctctgagacaggtacacgggctggctgtaggattaatataatgattgctaataaaacatattctgtaccaggcatgggagctcatgtctgcaatcccagtacttttggaggttgaggcaggttgatcactcgaggccaggagcttgagagcagccagccaggcatggtggtgacagcctgtggccccagcaactcaggatgcttcttga

SEQ ID NO: 563827 - DNA, 278 bp, Homo sapiens
  misc_feature (155)..(155): n is a, c, g, or t
  misc_feature (177)..(177): n is a, c, g, or t
  misc_feature (187)..(187): n is a, c, g, or t
  misc_feature (205)..(205): n is a, c, g, or t
  misc_feature (273)..(273): n is a, c, g, or t
ttgaagagcaagacaaatttttacttttaaatgattataagcacaccaaaaacatgtaacaagttaagtcctagcatctagtgatttggggttaggttacactaacagcagccggaacaagcatatcggattgactggcccaaattatccaggcnagagtaccccaaggctggctgnttcctcaaangagttaccaatagctacntccacctttttccatagggtaacggcccctgaccctgttaagaaagggggaaggggaccaggttactncccct

SEQ ID NO: 563828 - DNA, 910 bp, Homo sapiens
gcagaggtagatcgtagggttgtcaatggccccgggacatttcttcgcgggccctgcggagaggtgaggcaaggcgtcgtgtcatagatgcctgagttgctctctagggagacgatgcccgtggggtcgcgcctgctctgagcgaacgggaagagaaggtgcctacggcccttccgtcctcggattcatcgccattgtgctggggcgacgcaggatgcgcatggtggacccgaaagtgtgcccaagctagccccaaggggcgacgaggggacttttgagggaaagcaaacattgccttttttcttgtacgtttaaatgcgaaccctttttggaaggcctggggcattcgaacccggattctttcctcagacccgttgttgcccggtctcttctggtgacaagaggcataggtaatctcgtcaaggagaccaaccgtaaaggtaactcctgtgtctcgagggtgtccaatgttatccttaagtggcctgaatcaaaactttgattacttgcatgcaaaagagtgctggcctcgagcccagggtttttggtaaacagatcataaagttctcaggccacgttatgccttattctcacttggcaattctcagcacaatttcagttccacgtgtaaagtttggggaaaactaagtgaattactggaacccacaagtttcaagcctgtggaacccttgtttaaagggtgtcctgacgacatctaacttatcaagaggccatggtctagggctaggaaatgtgcgcgatgatttcaacccaagtttcatacctccagatataaacgtaaggtgtcaaaacatggcatggcccttctttgtactctgaattcgagcagttaacaaccagggtagttggaggaaacctaaagaatttacgtgccatgacttcaacacat

SEQ ID NO: 563829 - DNA, 140 bp, Homo sapiens
gaggatcccctatcaaaccctatcgaggccggaatagaggtccgacaaatcccattcctgaagatggccgaggtcggcgcgggaccggaggcgtccgcccgactggcggaggccgcgcgcacctacgagggtttcgatga

SEQ ID NO: 563830 - DNA, 175 bp, Homo sapiens
tgtgtctatactaatataaacaagggagaaaggacagcctatcgagtctagctagctagctatctgagacactctcttgctctgtcacccaggctggagtgcagtggcgcgatctgggctcactgcaagttccacctcccgggttcacaacattctccttcctcagacacaccga

SEQ ID NO: 563831 - DNA, 432 bp, Homo sapiens
caatagcttctctaacgtagaaacatatcaaatatagtatacaccggcagacacggagacagtcttacaagatacactaaactgcactgtaatatagataacataacagagtctcacagtgatataacatgcgaaatccacataaattgtcatttaaccaacagatactgcacgagcgaacatctcgatatatgaaaactgcatcatcaattcaacgtcacggtacttgcaaactgcatcataaaatgcaacattgtcatatgtgaaaacgacaccctaagtccttctttttaaaaatgacatttgcgtctagcttattgtcagaggttgcacttaagtactaagtacctatctttaagctcttcagtttatacttcatatcaaatgccttttgtctatacaataaccctatattaatcagtgcatgaaatt

SEQ ID NO: 563832 - DNA, 342 bp, Homo sapiens
tgcattcacgctatcattcatacagaagccagacaaatgacgacaatggtatctgcatactcatctaacaaataatctaccttatagaaaaatataaggctacaaaggtaaatgtaaagccctgcagagatgaaatccaacagtttttctgattattgaggcatcaaatgcctgacattgtatttagaggtatcttgatattgtgtcataggtttatcagcaattccacaggttcctactccaactttaccagtcacactctcaggtgaagcaaaaatactcctctttacctggccttttttgtttttagaataggctctgttgttgaattgttgccatttc

SEQ ID NO: 563833 - DNA, 171 bp, Homo sapiens
gggaactgggtggagaggcactttttgaattctaaagaatcatatctgtgtatatacatactgagtggggaaggatgggggttggcaggggttgagggaggctgggaccaaaccagtgaggtatgggaccaggccagtccaccccggagtttcgggagtccactcgggtca

SEQ ID NO: 563834 - DNA, 595 bp, Homo sapiens
gagcacgccattaaggctcggggccgctacgagagtacaaggtagtgggtctctgcctgcccaccccaaaatgccacacgccgcccatttacggcatgtggatctttgagcctaatcatgtcgtcgccaagtcccgcttgctggtactttgtatctcagttaaagaagatcaagaagtcttcaggggagattgtctactgtgggcaggtgtttgagaagtcccccccacgggtgaaaatcttcgggatctggctgttctatgactaccggagcggcacccccaacatgtaccgggaatacctggacctgaccaccgcaagctgtgtcacccagtgctacggaaacatgtgttgccggcacccgcgcccgagtccactccattcagatcatgaaggtggaggagatctcggccagcaagttccgccggccggctgtcaagcagttcctcgactccaagaaccagtttcctcttcccccccgggtcctgggccgtcagcccaagccacgtttccccaccaagagggccaacacctttttttaggtgcagggccctagtccgggtgtgccccaaataaacccaggaacgccccggtga

SEQ ID NO: 563835 - DNA, 393 bp, Homo sapiens
cctctagattgaggatggggggaagaacgtcaatggtgaagcttctctgggaaattctgcaggccttgtagttctctaagacccctctagcaacatgtgagatatgggctattgatattcatggagtccttggatgaggctgttgctgcagctctgtgagagagagagctcttacgatcaatagaacttgaagagcttcatgccagatatcaacctccagagaacaaaacacatatcccagaggccaacatagatagcgtgaacgtatctgaggaccacatgtgtcaaacgaagaaagttacagacccaatatccacactgcatatataaactccagagtgctatagcttcctgagagtcagatcaaatgacaatttctcagattgaaaggta

SEQ ID NO: 563836 - DNA, 976 bp, Homo sapiens
  misc_feature (68)..(68): n is a, c, g, or t
  misc_feature (939)..(939): n is a, c, g, or t
tatgcgcctgtgggtttgttggctttgtgccttggggagaagccccatgggggctggcgtcccggccngtgtgttgcctggcccagccttgggagcccaatggttcgcagtcggcccagcccctgggggccgggtgtggcccccctccagggctcttgggtgggcgtccgagcctgttttgcctcggccatgcagccccagggggtgacaggcgaagagagcttttcttgtgcagccgggggccaggtatcgcccccccgggtgtgttccagcggtgcgctcctctgcgcccgacgtgacaccgtttgggccgcccttgggggccctctggtcttgcctcttcccgcagttggattggttgtccacgcccttgtccctgggttcccttttgtcgtgaccgctctcgtggactatgcgtcgtttggactcgactttggaggaagacgttgagttgtatgagtggccggcatgttgggaggtgcccggaccttccctgtggtcggagttttcttggggcctctccttattgaatgtgggaatgagccccacttgacggctaccagatcgccgactcctgaatgttgtcccctcggctgggtctgacttcaagggtctggcaacccgggagacatgggccgacggggaagcacaaacagaccttttccctgctgcaggtttctggcaccacctgggactgacctcactggaggggtatcgtcaccccaagtagtatgttatgaaaacctaatctaatcgaaccactacattttcaatcctatttttccccaaacacagggccctctgcaacccctcctttccttccgtccttttgaaaaccacataaccccacggcctccagccccttacttcacgccccacctttttgggagaaatatgaatgcctgtgtttaacattaaaaaaacaaaaattaaaaatanactcgagcatcatgtcggtcgaaagttaatactctcc

SEQ ID NO: 563837 - DNA, 366 bp, Homo sapiens
  misc_feature (73)..(73): n is a, c, g, or t
  misc_feature (133)..(133): n is a, c, g, or t
  misc_feature (136)..(136): n is a, c, g, or t
  misc_feature (176)..(176): n is a, c, g, or t
  misc_feature (264)..(264): n is a, c, g, or t
ctctacttattttactgtggctgctaggtggtgcaatatcaaaagtcccacatgacacgtctgctggggagantctttggggtgtacctttatcttaaatcatataaatatgagttcattgacatttagaatnacnattattattaagcaatatgctctaagacaaaggatatggnaaaataaaaacttttattcagaacacaatgaatagatatgtttatacaatacatagtatgagttaaaagtcttgggtaagatatttgnaaaaaaataatcaagattcggaatatctgatcttgattaattttaatagcaagagaagctaaataataaggttctgtagaaagagtttgaagaagatactgg

SEQ ID NO: 563838 - DNA, 491 bp, Homo sapiens
cagattcggcacgaggctaattgaaaatcatgtcctcacaatgtcacgtgtgtgtgtgtgtgtgtcgctgtcgcatgcgcacggtggtggtggttgtgatgaaatggaggaagaatatttgagataaagctaatctttgataaaattcctcctgttcagtggtgaaccaggattggagacagagaccaggggagctgcttcccaggcaaggagggcatttggtcactcaccttgtttagaactgctggctatgatacgaacacaaagcagactgacccttagtcagatctattattgttttaaattctctatagataatgtactgtcttatttctcacccctgggcagactgatcccaccaccaaccctgttctacctccaccccacactgcctctgggaatagcatatgaacaaatgtcattgttaattcctgatcagttgtggctgtgttatcaaagcaggagaatcattaggatgtatggattatggc

SEQ ID NO: 563839 - DNA, 402 bp, Homo sapiens
ggagtacgtcaacatagtgaaacctcatctctactacaaatacaagtacaaaaaaaaaaattagccagatgtagtggcacacgcctgaagtcccagctagaacctgggaggtggaggttgcattgagccaagatcgtgccactgcactccagcctaggcgacagagcaagactccatctcaaaaaaaaatgttatgtttacactatactgtagtctattaagtgtgtaataacattatgtctagtaaacaatgtacataccttaatcaaaaatactttattgctaaaacatgctaacaaccatcagacacttcagtgagttgtcatctttttccaagacccaccagcagggtcttgccttgatgtcgatggctgctaactgacaagggtggtgtttgctgaa

SEQ ID NO: 563840 - DNA, 669 bp, Homo sapiens
ggagaaaggagagttaaatgttgtgggaaggcagcaggatgctaagggtgcgggccccagcagggtgagacaccttgtgccctggtcttggcccagcaaacgcaaaaccagggagtgtgcagagcccggcaaacaggttttgttagcccagggcggcctcagaattgcgggtaattcatactttgtctcagtgagtggctgagtggttgcccatcgtgagtgtgcacaaagccgagggtctcggcactcataggaagtgtggccccgaggtgttggcccagcccgagtgtgccgcccgttcaccagcctctcgtgttccaccgtgtgtgcggtctctttctctcccggaaagtgtggggttgtgggattgttgtggccctcggcggaaaatcgaggcccccagcacccacaaccccggggccgtgggagctgatcggttcatttccaccagtttgcacaatgtgcgccttagagtgcccccgagttcaccttgcctcgtgcgggtgtgtcccggtggttgtgggtgcccacccagaccaccaaaatcttgggccggatgtgtgttccagtcccccattctccagccgccacagtacttgctggtgtgccggcaccaccatgtgccaaagttaacgtgcctgcggaggtgataagagctcgggccagatt

SEQ ID NO: 563841 - DNA, 366 bp, Homo sapiens
  misc_feature (98)..(98): n is a, c, g, or t
  misc_feature (167)..(167): n is a, c, g, or t
  misc_feature (188)..(188): n is a, c, g, or t
  misc_feature (207)..(207): n is a, c, g, or t
  misc_feature (308)..(308): n is a, c, g, or t
  misc_feature (332)..(332): n is a, c, g, or t
ttgactacctactactactaaaattcgcgggccgcgtctgacgtatttggttttgtttggtttctcaaaagtttttgggtatttatatttgtaagacnaacttgcccaaatttcaaagcctcaatttaccccctctgttttctttctgagaagtttttataagcttnttagttttttaagtttatttntatttcgatttttgaagtnttttttttgtattaaatgttttgagggttaaaaagggtcccaaacttttcatttctttttgcatttgtgggcttatcccttgttgtcttcaaccactattntgtagaaatattactgttctcttntctcattgaatttgctctgggaaactcttgtcaa

SEQ ID NO: 563842 - DNA, 300 bp, Homo sapiens
tcatatagtggctgtactagtaacaaaccgcaccaacaatgtgtacgtgtaccctatatctccagatcctccctagcacttctttatcgtctattttaattgtagacattttttctttccttttatattgagacaagagtctaagtcactcagactggagtgcagtggccatgatttcggctcactgcaacctccacctccgtgggttcaagtgattcttgtgccatcagactcccgagtagctggaattataggtgtgcaccaacaaaataggctaaattttcttatttttataaagat

SEQ ID NO: 563843 - DNA, 226 bp, Homo sapiens
taagcggcatttcttcacaatatttataaaatagttatgaagagaatgtcagtatactctacacacacacacacacacacacacacacacacacacacaaggtgttatctccagaggcatacatattctaaggtactgggagatagagcttcagcgtattaattcaacacaattctgctcataacggtagtggaaaactctttccataaggtttctcccagtatca

SEQ ID NO: 563844 - DNA, 943 bp, Homo sapiens
  misc_feature (4)..(4): n is a, c, g, or t
  misc_feature (6)..(6): n is a, c, g, or t
actncnctctataaatgtagagaaaacgaaaaaaaagagtccgccgattgacacatcattgtcagcctgcagtccctcttttatccacacaattgtcgtctgttattcaagctgtccctttgggtaaagcccccctggccctctcttaagttgacacctcctgtgctatggaaatccctttccttttgacgaaaatccgtcgtcttgttttagggtctgtgtctgcagttgagccttgcaattacagtccggtcaaatccccgccaatgtatggtcggtgacacactccgttcttccggcccccctggggccctcctttgttccgccccactggggggattttaaaaattgtgcaacccgaacggaatttacaaatgttttttaacatacagtatatactaaaatgtttgtgtacagtatacacaccccatacacgttcaattaattcttggtcttccttgtccaattaaagtctctccccccacaatggtagtatgctaagacgccacacgcacattatctttacgtaaacattcttgcggacaagcaaaaattcttcccaggagtgtgtgtgaatcctgcacccacctacacggtggctcaaagcagactccctaagctaagtatgagaagtacactaattcgcgcgccgaaacctccccggatcattgaggcagaaaagacatgactcagccatacaccagcgagaacaccgacacctcctcttttcattcaatacagaataacaaatgattgttcccaagacagagtcagccgcgcaggtttgaagaggacaaactctattccttatggaggggctaaaggagacgacgcgggaattattttgttatgaccaccagaatgacgacggttgcccctgggatgagtgaaggacacttacgccccccttcggaccaaaattattacccccgtccacatgaca

SEQ ID NO: 563845 - DNA, 199 bp, Homo sapiens
gggccgtactagcagcataaggaggttcccaggctaggggtcgaatcagagctgcagctgccagcctatgccacagccacagcaacgcaggatctgaaccatgtctgcaatctacaccacagctcatggcaacgccagatccttaacccactgagcaaggccagggattgaacctgagtcctcagggatactagttggg

SEQ ID NO: 563846 - DNA, 450 bp, Homo sapiens
tgtccctttgtctctaccaaaaatacattaaattagccagttgtggtgttgggcggctgtagtcccagctacttgggaggctgaggcaggacaatggcgtgaacttgaggtcaggagttcaagatcagcctagcccatatggtgaaacctcatctctactaaaaatacaaaccttagccactcatggatgctgtaatcccagttacatgggaggctgaggcagaattgcttaaacacgggaggtggagttggcatgaaaaagaaacagcacaaatgagagatacttgagagagaagtagcctgcacccttgagggagcagggtctctggagagatagtctgaatgtgatgaattttctgatgttccatacctgtataacttgtcactgaaaaataccaacaagtacatattcccacatatgtaactagacaaagggaaacaccggtaccg

SEQ ID NO: 563847 - DNA, 126 bp, Homo sapiens
gtgggccaccgcactcagccatgtttttattttaaaaataattattttcagaaaaaatagagggtaaccttatatttcctgcaaattttttttatttctggccttaatcaaggcaaatgggttctg

SEQ ID NO: 563848 - DNA, 1035 bp, Homo sapiens
  misc_feature (78)..(78): n is a, c, g, or t
  misc_feature (80)..(81): n is a, c, g, or t
  misc_feature (83)..(83): n is a, c, g, or t
  misc_feature (88)..(88): n is a, c, g, or t
  misc_feature (93)..(93): n is a, c, g, or t
  misc_feature (100)..(100): n is a, c, g, or t
  misc_feature (147)..(147): n is a, c, g, or t
  misc_feature (160)..(160): n is a, c, g, or t
  misc_feature (163)..(163): n is a, c, g, or t
  misc_feature (166)..(166): n is a, c, g, or t
  misc_feature (179)..(179): n is a, c, g, or t
  misc_feature (187)..(187): n is a, c, g, or t
  misc_feature (189)..(189): n is a, c, g, or t
  misc_feature (229)..(229): n is a, c, g, or t
  misc_feature (232)..(232): n is a, c, g, or t
  misc_feature (236)..(236): n is a, c, g, or t
  misc_feature (247)..(247): n is a, c, g, or t
  misc_feature (254)..(254): n is a, c, g, or t
  misc_feature (278)..(278): n is a, c, g, or t
  misc_feature (325)..(325): n is a, c, g, or t
  misc_feature (338)..(338): n is a, c, g, or t
  misc_feature (345)..(345): n is a, c, g, or t
  misc_feature (350)..(350): n is a, c, g, or t
  misc_feature (416)..(416): n is a, c, g, or t
  misc_feature (437)..(437): n is a, c, g, or t
  misc_feature (445)..(445): n is a, c, g, or t
  misc_feature (455)..(455): n is a, c, g, or t
  misc_feature (473)..(473): n is a, c, g, or t
  misc_feature (491)..(493): n is a, c, g, or t
  misc_feature (497)..(498): n is a, c, g, or t
  misc_feature (535)..(535): n is a, c, g, or t
  misc_feature (570)..(570): n is a, c, g, or t
  misc_feature (588)..(588): n is a, c, g, or t
  misc_feature (592)..(592): n is a, c, g, or t
  misc_feature (615)..(615): n is a, c, g, or t
  misc_feature (619)..(619): n is a, c, g, or t
  misc_feature (644)..(644): n is a, c, g, or t
  misc_feature (656)..(656): n is a, c, g, or t
  misc_feature (664)..(664): n is a, c, g, or t
  misc_feature (668)..(668): n is a, c, g, or t
  misc_feature (680)..(680): n is a, c, g, or t
  misc_feature (689)..(689): n is a, c, g, or t
  misc_feature (693)..(693): n is a, c, g, or t
  misc_feature (702)..(702): n is a, c, g, or t
  misc_feature (711)..(712): n is a, c, g, or t
  misc_feature (731)..(731): n is a, c, g, or t
  misc_feature (757)..(757): n is a, c, g, or t
  misc_feature (764)..(764): n is a, c, g, or t
  misc_feature (778)..(778): n is a, c, g, or t
  misc_feature (790)..(790): n is a, c, g, or t
  misc_feature (818)..(818): n is a, c, g, or t
  misc_feature (837)..(837): n is a, c, g, or t
  misc_feature (869)..(869): n is a, c, g, or t
  misc_feature (932)..(932): n is a, c, g, or t
  misc_feature (958)..(959): n is a, c, g, or t
  misc_feature (969)..(969): n is a, c, g, or t
  misc_feature (1025)..(1025): n is a, c, g, or t
tgtgcgggtgagaatccgagcctttccactgcctttcttgtactgtgttaaatcttctctcactcccttgggcttcgngnntntcctngtagntccgcantctccacacccgtcactgagagccgacctcggtcctcggcattgcgnggctcttgtcagnatngtnaagctgttcatcngaaacctncnccgggaggctacagagcaggagattcgctcactcttcgancantatnggaaggtgctngaatgtnacatcattaagaattacggctttntgcacatagaagacaagacggcagctgaggatgccatacgcaacctncacgcattacaancttcatngggtnaacatgcaacgtggaagcgcaggcaagaataagaggcaaaagcgctgcaagcaaagtttgcatttngggcaagcatgcagtcgccangctggcancagattaagngagcttgcgagggcaagntttggagagagatatggnnncggnncatcgaaatgtggacatgcgtggaacagatttattgncttgcgttacagcatgggaggcgggggcagcaggnatggcaggtgggagggcncatncaggggggcctctgaataaacancagnagttttcaaagggcaaagcgaaatngcacgctggcangtttgctncacncaggccgggctntagagactngcgncgcggggantggggaganncagaggcgggcttgctatncgggtggcggggaaaagaggggggcnctgggtncaaaagaggtgttncgatagattcgnttcagggccgcgctggcaggactttganccgaggcaatataaatgangcaatacggagcagttgcggtacgcccttagnaccatggagctatgggggatttcattgtattagcaacaacgccgtacgggagcgctccgatgnctactaacaagcgctggcggtgctgnncggtcctatngaggcagtggcagctgcagctgcttccgtgtataattacgcagagcagaccctgtnccagctggca

SEQ ID NO: 563849 - DNA, 225 bp, Homo sapiens
ctctagcggatgtttacctggtatcccaccctctgtaagagcgtacactttttctcagagacagggtttcaattccatcacccaggctagggtgcaatacgcgtgatcatagctcactgcatgcctcaaactcctgggttccagcaatcctcccacctcagcctcctgagtaacagactataggcacatgtcaccacaccccggctactatacaaaaattttttt

SEQ ID NO: 563850 - DNA, 302 bp, Homo sapiens
taaatagacagggtctcgatctgtggcccatagcttgttggatcctcaaactccttggcttaagcgatcctcccttctcagcctcctgagtagatggaactataagtgcaagccaccatgtctggttcctttttaaaaactttttgtagagataaggtctccctttgttgcctaggctggtctcaaattcctgggctcaagtgatcctcccacctgggcttctgaaagggctgggattataggcgtgagccactgcacccagacaaaattatttgtcgacgcggccgcgaatttattagtag

SEQ ID NO: 563851 - DNA, 100 bp, Homo sapiens
tttttatacctgtacacacacagacacacaagcagacacacacatatatacatacgcagttgtatatatatgctgagaaagttcacatagggtaccgagc

SEQ ID NO: 563852 - DNA, 359 bp, Homo sapiens
  misc_feature (9)..(10): n is a, c, g, or t
  misc_feature (24)..(24): n is a, c, g, or t
  misc_feature (200)..(200): n is a, c, g, or t
tcaggatcnnttagcacgaatgtnatgctcgccgagcaagctctgcgctatatacagttgctgtacgaaatcgaaagtgaaatccgcgatttggagcccgatgtacggcgacgaatacgacaagaaaaagccgtccccgtgatgaacatgctgcacacttggatgatcgcccagcgcgagctggtacacgagggtgtggncatcgccaaggccctggattacagcctgaaacgctggacggcgagtcacgtcactttatgacgggcggtgctattgctacaaccacatcgagcagcaaatccgggcatgggagctcggacgcaggaactggctctatgcagggtcgataacgcagaagg

SEQ ID NO: 563853 - DNA, 594 bp, Homo sapiens
atcccaacacttgggagactgaggtgggcaaatgagcccaggagttcgagaccagcctgaacaacacggtgaaaccctctctacaaagaatacaaaaattagctgagcatagtggtgtgtgcctgtaatcccagctactcaggtcaaaacgcgaggatcgcctgagaccaggaggccaaggctgcagtgagccatgatcacgccgctgcactccagcctgggtgacagagcgagaccctgtctcaaaaaaaaaaaaaggaaaaaaagaaagaagcggaggcttagaaagtcccggctctccatttggggtctaacggactcttctccaaaattttggttatcccaggcactccatctcaggaaactatcagaagatggtacaaggtggcttcacagaagtgtaacccaggaacaagaaagacttgggattgccaccacacgaataaggttacattagacttaaaggggtcctcagattcttggaaccggtgacatcccagggtgagagctttacaccagacccagagattgttcaggcttctggagccaggagcatacagactcagggaggatgtctgggcgaaacttagactc

SEQ ID NO: 563854 - DNA, 139 bp, Homo sapiens
  misc_feature (67)..(67): n is a, c, g, or t
  misc_feature (130)..(131): n is a, c, g, or t
gggagatctgactgttacaattagaacatacatatttttgggttcagtcattatctctggtccattnttgtcaaaattacgtatttaatagagaaggtgtttaaaacaaaaggagggtttgggtaccganngctcgaat

SEQ ID NO: 563855 - DNA, 621 bp, Homo sapiens
tgtggagacggggttcacactggtcacccaggtctgggagtacagtgggcataacctctgctcactggcagcctccaccggccaggctcaagcaattctcctgcctcagcctcccgagtagctgggattacaggtaagtgccaccacacccagctgattttggtgtttttggtagagacgaggtttcgccaggtttcccagacggttctcaaactcctgagctcaaagcagtccacccacctgggcctcccaaagggctgggattacaggtgtgagccacctggctcattctagtttaaacttgggagtggttggtgtctcctgatgggactcctgcaaatacagaatggatgctaggaagggtaccaggagatagacgcacacagatgggattggggaataggttgggttatccaaggagcagtgctgagctcctggctaaggggatatgggatgctggtgatttccagtaagtgacctcaaaattactcaggctaccatatagtgtggatggtgatgaattgccagttgaagcacctgtcctgcgagcttaggggtgtacaagttgacactgcagagtaaagatgatttgaagagggatgggaggatcttggaaggctt

SEQ ID NO: 563856 - DNA, 924 bp, Homo sapiens
  misc_feature (588)..(588): n is a, c, g, or t
  misc_feature (733)..(733): n is a, c, g, or t
  misc_feature (880)..(880): n is a, c, g, or t
  misc_feature (886)..(886): n is a, c, g, or t
  misc_feature (912)..(912): n is a, c, g, or t
agcggggtatgcagggtgggtcccctctggaggctgtcccaggcctctcccacatccagtgtcaccctcagccacatccctcgtgccaccgcctctgtctccacccggccgtctcctcccccatctccgcatcttctcttataaggaagccgggccttgattcaggtcccctagtcctgtttgttttttgttttttgttttttgtttttctgagacagggtctcgctctgttgcccaggctggagtgcagtggtgtgatctcggctcactgcaaccttcacctcccaggttgcagttctactgcctcagcctccctagtggctgggattgcaaggtgcccgccaccactcctggctggttttagtgtttttagtggagacggggtttcgccgcgttggccaggctggtctcgaactcctgacttcaggtgatccgcccgccttggtgtcccaaagtgccgagattgcagatgtgagccactgcacccggcctgcctaatcccatcttaactcatcttaactaacacatctgcaaagaccctctttccaagtaaggtcacgtcctgagattctgggtggatgtgagttnggaggacgtcattcaatccaatgtggcagccatcccacagtcacgggcgggaccctgtttccttgccgaggtaaagggtgttctgcgtgtctgtcaggggaaccacttcctgtaactccatcgcctgcccggccctcagcatttnactccgtcacccccatcacctgggaggcctccggtgactgttcccggaggcctgatccctcctgaagggacagaggctgcagctacctgggaggctgaggcaggaggaccacctgagccagaaggtcaaggctgactgcaccatgancgtgcnctgcactccagcctgggcgacagagnaaaaccttgtct

SEQ ID NO: 563857 - DNA, 182 bp, Homo sapiens
tgtgtgttcccagggtgtgtgtgtctgtgtgttggggggggtgcgtcgtgtgtgtctgtgtgtgtgcgcgcgcagtgcctgtctgtgtgcggacttctgtctctctctcacgtctctctctctctctctctctctctctctctctctctctctctctcccttctcgctctgtgcgggggggt

SEQ ID NO: 563858 - DNA, 185 bp, Homo sapiens
  misc_feature (185)..(185): n is a, c, g, or t
tcctgcattgaagaggcaggacaagcttccctctgtctgagtcccagactttgctctcttctgcccctgtgccagaggtgatgatgcccttccccgtgcctcttccagtgtttcgaaagccagtatgtgacgacggagaccctcaaaaagaaggggagccagggtccttttcgctgtagtcaaan

SEQ ID NO: 563859 - DNA, 204 bp, Homo sapiens
cgttggaaccatctaactagctggattatattctatctcctattgctggctatctccttttattttattattttacttttcagagacagcgttcttgctctgtcacccaggctggatagtgcagtggtgcaatcctagctcaccgtagcctcgaactcctgagctcaagtgatcttcctgctttagccacattagtagctggga

SEQ ID NO: 563860 - DNA, 132 bp, Homo sapiens
ggagaagagcagagatacacgtgccatgtgcagcacgaggggctcgcagagcctcaaccctgagatgggagccattttcccagcccaccatccccatgtgggcatcgttgtggcctggctgtcctggctgtc

SEQ ID NO: 563861 - DNA, 891 bp, Homo sapiens
ccgaacggccgggaccgggtcctttttcgtggccgaattttcccccgaggatatctgtcccaagggggaccaatgcctccaggaaggtgaagtggcgttcaactgttcttgggagggcgtgttgggaaaaccaatactctttaagccgttggagcacgtggggagttaccaccctacactcgggtttggtgaaaaccttttctgcacgttgtaattccggaggggccccaaaaaatgtgcgttttctactggcgcccgaggtgtgagatcccgtgtaacgccagagcattttaaatttagggggggcatccagcccacgtgatttatatataagaattctcccttttgccagaataaccagggatccacattctttggttatgataaccattttttaacaagaacccacatcggagaccattctcagaccgagggccatctgtgtgcaaccagcccgaggatagagttggatccagaaagtttttgggggagagatttattcccattgtagagaaaagaagaatggtcaatatggccacaaaactggggtatttctcacaagagggacattctgtatgctcgtgcgtggggcaccaagcgcctggacatctccccggaataacatggaacaatggcgctggataaaattttatgggtaaacttgataaattatattctcccagaggagtgagcccttaagaaacttttctcctccccgtttgccaaaatggtttttagaagatgacccctgatttttttttaacatgatttatgctgtgtttggttattttttaattggaccacactatggaggattcccggggtaatagtggaagtaattatagttgccccaaaaaaaaaaaaccctggaataaataaatgttagattga

SEQ ID NO: 563862 - DNA, 220 bp, Homo sapiens
gggtccaggcacattcctggtgttcccaggacaccagactgcaataactggaggcgcctccttccccctaccttcccaacaggctccggtgtgtgttctgcccctccgtgtccatgtgttctcattgttcagttcccacttatgagaacatgtggtgtttggtttcctgttcctgtgttaattggctgaagtttatggcttccagcttcatccatgtccc

SEQ ID NO: 563863 - DNA, 497 bp, Homo sapiens
ctagagctagaaagaggattctctccacagtctgagggagaatagcctgctaacaccttgattttagacttctagcctccgtaactgtgagaaaataaatttctgtttctgtaagacacatagtttgtggaactttgttaaagtaaccctaagaaatgaatgcaataatctttgccagtaatatactacatggaccagtctaactacagtcatgtgccatacaatgatgttttcaacaatgttcttataagattataatgaagctgaaaaattcccattggctagtgatgtcatagccatcctaatgttttagtgccatgtgtgactcatatgtttgtggtgatgctgatgtaaataaactggctgctctagcagttgtataaaagtctagcacatacaattatgtacggtacatcatacttgataaataaatgactgtattagtccgttctcatgctgctaataaagacgtacctgagtctgggtaatttaaaaaa

SEQ ID NO: 563864 - DNA, 129 bp, Homo sapiens
agattcccctccaagcaccactccccgtcgtccacacaccgagtgtgagcaccccgtgtcagggcctgcggccctcatgtgtgtctctagggagcagccctagacccggcgactagtgcatgctggcac

SEQ ID NO: 563865 - DNA, 228 bp, Homo sapiens
ggcgatgcgactctgtggtgcccacgaaggtgccgtgaaatctgcccagctgcttctgcaagtccagcatgtggcggtagcactgagcgtagtatgttgactgagacttgacgaactcgtggaggcagtgcaggtggatcacgtgagtgctactgattcccttcagcaagagacggggcacttctgcttgccgatcaaactctgtcttgcccacgcggagctcatgcg

SEQ ID NO: 563866 - DNA, 685 bp, Homo sapiens
  misc_feature (27)..(27): n is a, c, g, or t
  misc_feature (70)..(70): n is a, c, g, or t
  misc_feature (73)..(73): n is a, c, g, or t
  misc_feature (96)..(96): n is a, c, g, or t
  misc_feature (116)..(116): n is a, c, g, or t
  misc_feature (118)..(118): n is a, c, g, or t
  misc_feature (120)..(121): n is a, c, g, or t
  misc_feature (128)..(128): n is a, c, g, or t
  misc_feature (138)..(138): n is a, c, g, or t
  misc_feature (140)..(140): n is a, c, g, or t
  misc_feature (157)..(157): n is a, c, g, or t
  misc_feature (203)..(203): n is a, c, g, or t
  misc_feature (344)..(344): n is a, c, g, or t
  misc_feature (350)..(350): n is a, c, g, or t
  misc_feature (366)..(366): n is a, c, g, or t
  misc_feature (381)..(381): n is a, c, g, or t
  misc_feature (477)..(477): n is a, c, g, or t
  misc_feature (496)..(496): n is a, c, g, or t
  misc_feature (521)..(521): n is a, c, g, or t
  misc_feature (524)..(524): n is a, c, g, or t
  misc_feature (594)..(594): n is a, c, g, or t
  misc_feature (685)..(685): n is a, c, g, or t
agatgattggagagggagcacaggtcngcgtgggagagagggtcatggtggacatagggggggggtggtntcnccaactcctcacattatgcctanacgaacacagacacatgcangngnntttgaanaaaaaaagtnangaggttattcaagtcanaaagggaaggagcaggtaagagactcttgcctctcagtccctacanaaggcagctgtctcacactttacaagctgtgagagacacatcagagccctgggcactgttactggttgcagcctgagtgtaactccctccttttctatctttcaccccttctccacctgagctcttcctcctccacatcanggcagngaccacagctccagtnatcacagctccaagnagaaccaggccagccatgatgcccacgatggggatggtggcgctgcgcgaagacagctcccatctcagggtgagggggttggggagaccctcatgntggacatggcaggtgtatntctgctcctcttcagaaggcactancanagccgcccacttctggaaggttccatcccctgcaggcctggtctccacgagctccgtgtcctgggtctgntcctccccatcccgctgccaggtcagtgtgatctccgcaggctagaagcccagggcccagcacctcagggtggcctcatggtcagagatgn

SEQ ID NO: 563867 - DNA, 242 bp, Homo sapiens
  misc_feature (219)..(219): n is a, c, g, or t
taggagatgtggcgggtcaggagatgcggggtcagagatgtgggatcggaatgtgcggtctgtagatgtgcagagaaagaaagatgagctgatcgaatgccaggtccgggatccacgggtccggagagcgcgggtcggagatgcgtgggtccttgcagacttcgctccgccctgcacatctccggacctgcacatctcccatccacacattttcagatntgcacatctttggacccgcacat

SEQ ID NO: 563868 - DNA, 195 bp, Homo sapiens
tacataaattatgaaaatatatatatagttatacagttataaaagatacataggacataaaataccacattaaattaaaatgaccaccactattctgtaatgtcttattctacagttaatatctatgctcatttatttgttaaaaactgtgggaaaactggcatttatattggtacaatactaacgtttcttact

SEQ ID NO: 563869 - DNA, 384 bp, Homo sapiens
gagctcggtacccgtgagtagtccaagatccagtagggggagccattggatacttatgattgaggttctggtcgaggaaaattttcttgctggtgtaaggcagagtcatgagcaatgaaccagacggtgctaacgcagaataacgattagtctgctatttgggtgtgaagagccaatgtatatccgcattggatgaaagctgatggaaaggtggttgcaggaagcctactgaagcagcgaggtctatttcctattaaaacaactagtccagaggctgtctgcaacaaatagcttactatccatctctccatgagcgccaatttccacctctggaggctttaatattcttaacaagccagcaggagggaaagccattgcgacatc

SEQ ID NO: 563870 - DNA, 300 bp, Homo sapiens
gatcccccaggcaaacagctaaacagacagaaggattggctgccttttatacaggggctatggactaccagctatggtaagctagacactctagtagaagcagctgaaagaagcccaagtacagtatacctctccagacatttgcaattaggcataggaagacagccccgatttactaggctagctagaaaggtaggcagatcatataggaagtgaacatatatagaagtccttattaactctgaggaaggcattcaggctctggatgacgtcatagctgttacctaggggtaccgagct

SEQ ID NO: 563871 - DNA, 422 bp, Homo sapiens
  misc_feature (8)..(8): n is a, c, g, or t
  misc_feature (24)..(24): n is a, c, g, or t
  misc_feature (40)..(40): n is a, c, g, or t
  misc_feature (50)..(50): n is a, c, g, or t
  misc_feature (82)..(82): n is a, c, g, or t
  misc_feature (90)..(90): n is a, c, g, or t
ccccgacnggcctactaggccggnagcgccccctataccngggagagaanaccgtggtggatccaggcccacaggtgtatantttttaanctgaccccattaatttgggggagaaaaccccgccctttccacctcaaaaacatgaccccccaccttataactggggaatcaaagaaagcccctcgtttaattcctagctttgcaaacttactaatatctacttaggaaaacattatttttcaatttagactatgagttaaaatcactttgaaaatgaaaatgactgggtttttcactagatttactgaaaataaaaaataaactaggatctctgggtgggggctagctgagagggcttcaagttcatagagagacatataccaggaaacaacaaaacacagtaggttaccggtgctgcaata

SEQ ID NO: 563872 - DNA, 435 bp, Homo sapiens
aattgatcttatttttgatttcacttatcatagaacaaatatgtatcattatggcagtgtatctatgtaattatcaatttaatcatcaccaccggtgtttccatatttttcccaagtatttaataagctctcttatggtggggcctggtgatggggccgtctttttttactaccacatgaacaatcatatggtatttcaagggattttaagattcatcttttcagtttgatagtagcctagtaagggaagacctctttcattcctgccttcgggtaattcttctctgtagacaggtgttcatattaatgaccccattttttctcaccatggtagcagaattcatttttttcgtcaggatcaatgaatatgtgatttgctccagttcgttagaaaaaagaatgtgattgactacataatcaaccaaaaaaaaaaaa

SEQ ID NO: 563873 - DNA, 434 bp, Homo sapiens
  misc_feature (371)..(371): n is a, c, g, or t
gcgatgaacacacagtacgtgtgtctttttggtagaatgacttactttcccttgggtagcatacctagtaatgggattgctggctcaaatgttatttcaattcttaggaagacatggtgcatctataccatggaatactttgcacccattaaaaagaatgaaatcatgtcctttgcagcaatatagatgcaagaggaggccattctcctatgtgaattaacacagaaccaggaaactaaatatcagacgttctcacttcttactgtgaggtaaacatcaagtacagatggacataaagatgggaacaataaacactgagcaattcaatggggcaaggaagggatggggcaagggtttgaaaactattgagngctatgctgactacctgggtgacgggatccttgtgcttcaaaccttaacatcacacattatac

SEQ ID NO: 563874 - DNA, 705 bp, Homo sapiens
agcggataagatggcgtcctgatggcggtgcgacgacgcatgttccgcgtggggcatgtggtgctcagcggggcctggcacacggacccgtacctcttgtaatagattctcggggccgagggacaccgggcaaatccacgctggcgtagcagcataggccagacgggtcggcggtgacgatcgtcagcgctgactccatggcaggtctatgaaggccttagacatcatcaccaatcaaggtttctgaccaagagcagagaatctgccggcaccacatgatcagctttgtggactccgtcttgtgaccaaattacacagtggtggacttcagaacatagagcacactgctcgtgattgacacgcatactatttgcccgagacaaaagttcctattgttgtgggccggaaccaatatattaccattgaatctctgctctggaaagttcgttgtcaataccaaggagcttgcaagttttctgaagaaacaggaatctctcatagtgaatttactccatcgtcatcatacggaagaaggtggtggtcaccattggaggtcctctgaagtactcgtaacccttgcatcctttggcattcatgcttgaccagttctagatgagcgcattggataaaagggtggatagacaatgcttgctgatggggtcatggagtgaactaagagatttcacagacgctataatcagaaga

SEQ ID NO: 563875 - DNA, 127 bp, Homo sapiens
aaccaaggtctcatcactccttccaacatctcatgccccggcaagtgctgcgattattttgatagagatgaggtttcaccatgtggccaggctggtctggaactcctgacctcaagtgatctcccca

SEQ ID NO: 563876 - DNA, 538 bp, Homo sapiens
ctctcgaggatgcggcagctatccggttcaatgtaagagcacgggaagtatgaaaaagcaaggaaatataaaacctccaaagaaatataataatcccccaacatcggattccaatcaaaaagaattcaagaatttccagaaaaagatttcaaaagtatgatactaaaggaaagctcagtaagatacaagagaatcctgaaaaataatactacgaaataagaaaaagaattcaagatatgaacgagaaatttaccaaagagagaaatatagaaaagaaccaaagagaaatacagaaactgaagaattccttctatgaaatacaaaatacagtcaaaagcatcagtaatgaactagaccaagcagaagagacaatctcagaacttgaagaagggacttttaaaacatcccagtcagacaaaaataaagaaaaaagatatatgcaaataaactagaaaatctagaagaaatgggtaaattcttcgacacatacacccttccaagactaaaccaggaagaagttgaatctctgaatagacca

SEQ ID NO: 563877 - DNA, 811 bp, Homo sapiens
  misc_feature (8)..(8): n is a, c, g, or t
  misc_feature (15)..(15): n is a, c, g, or t
cggcacgngattgtnagcgcctgttttcctctgtccctgggtaattagggatctgttggtttccccaacagaacatatttaatggactgctactcagagaggtagaaataaataccaccaaggcagacagttctaccgtaattctctcagtcagttctccatgtcctgtaatccatttgacatttgaactccagttaataataaatccatttctttcgtttaaaatatggaaaaatatattcctgtaacatataatgtgcccgatgtagaatttttataggttgaataagaaaaatacgcgtgacccaaaaagtaacaaatcacagaaatatataaatgttaagctaaatggtaacatacaaatgttcgatctcactactaatgaaagacaattgatgcagggtttttttcggtgccgctttgccagctggagacctccgtggtcggcgatgcccctgcccaggcctctctcggcccaggttcgcccactaggcctgccgggccgcacctggcttgcgctttggcatatcccgtggcctcggtgactgtgctctcagcccccagcaggtgggttgtgcgagcaactgagtgtaggggtccgggggctgctccaaccgccagcataggagcaggctccacacggggcttgtagctggaccaggcgtgtggcaagtgactcccacagtggactcctgcgtccaggcgaggggaacaccgtggcgcccgaagagcaacgcccgcgaccccgaagcccgagaggggatgttacagcgtgcacacagctcttttcgacccgcatctgctgccggac

SEQ ID NO: 563878 - DNA, 360 bp, Homo sapiens
  misc_feature (38)..(38): n is a, c, g, or t
  misc_feature (92)..(92): n is a, c, g, or t
  misc_feature (127)..(127): n is a, c, g, or t
  misc_feature (134)..(134): n is a, c, g, or t
  misc_feature (166)..(166): n is a, c, g, or t
  misc_feature (200)..(200): n is a, c, g, or t
  misc_feature (278)..(278): n is a, c, g, or t
ctgtggtacctatttgttcttttgtcttttaatttaanccttggtggagccccttgtgatgaatattaaatccatacattttgggctgggtntggtgcctctagccctataatcccagcactttggnaggccgnggcaggcgaatcgtcaggtcaggagatcgagnccatcctgcctaacacggtgaaacctcgtctctnctaacaataccaaaaaattagccgggcgtggtggcgggtgcctatagtcccagctgctcgggaggctgaggcaggagnatggcatgaacccgggaggtggagcttgcagtgagctgagattgcaccactgcactccaggctgggcacagagcaagactcc

SEQ ID NO: 563879 - DNA, 814 bp, Homo sapiens
ggtagatgtgcggcggcggcggctgcagcgggctcggagtgcagcggttgggctcgcggcgagcggacgtgggtcgagtcaagtgcgttcgcgcgagttggaatcgaatgcctcttaaaatggcagatgacttggacttcgagacatggagatgcatgtgggcctcatgccaccttcccaatgcacgttgctcagcatttaccgtaagaagtggcttctgtgagtgctcaaatgtggccggccatgtaagatcgtcgagatgtctacttcgaagactggcaagcacggccatcgccaaggtccactctgagtttggtattcgatcatcgtttacgtgggaacgaaagtagtgaagatatctgcccgtgctaacctcatagatatggatgtcccacaaggatcgtacatatggaatgagcttccacgctgaatttgagatccaggacttggtgtaccgtatcacttgttccaggaacagcggtggaggtacgaagaggaccttcgttctccctgagggagaccttggcacaggatgattgagcaaaaagtactgactgtcggagaagacgagcctgatcacatgtgctggtctgtcaatgacataggacggcagcttgtggcaatcaatgtctattggcgatcattaacttggttcccaaggattggcgcgatggtgagcagtcgagttggtacctttggaaccttgcaacgagtgcgcttctacccgaagcctggtccttggtttgtcctggtcctagggcttggacttctaccaaccgagatatgacgcgggagaatctgggtatcgcagccg

SEQ ID NO: 563880 - DNA, 114 bp, Homo sapiens
gaggatccccggatgcggcgggggccaactcttggtagttcggcagctgggcgccccaagctcatacttccgctctcttgcgcggtggctgccggcgatcccccgcaagtactg

SEQ ID NO: 563881 - DNA, 542 bp, Homo sapiens
  misc_feature (14)..(14): n is a, c, g, or t
aacactttccttcntgttcgggtccgcggggcggcccggtgtctgggtgttgggcggggaattaaacaaccaccatggggaggaaaagggcgaagaccaagaccaccaagaaggggcctcaggggcgacatccaggggggttggcatggttggccaggcacagagtgaggaggtcaaagggggcttcaacatgaggggtcagaacaggggtgggttcatcggcaagggagatttggatgatatggttggttctctagggaagaatcccacgggtggataccttggtggcatggtgaatgaggggcccaggggcccatcaatttcaccatggtcctggccatggttggggaggaggtaaatgggacagatcctggagatggcatcagaaacgcctttggttggtttggtgaagaagcaacagggaccattcagggagattacctaagggaggtggtgagcaccatgggggatcggtttacaggtgaggaaggggatggcgtgacagggaacacctatgggcaggacaaggggacggaaggact

SEQ ID NO: 563882 - DNA, 488 bp, Homo sapiens
gcaggaagtaggtgatcatcgcgggagatgcaaaaacagggcatacaagtaaaatcagcatcccttcagtaaaaaaccatcaataaactaggtatgatggaacatacctcaaaataataaaagccattcatgacaaacccacagccaacatcatactgaatgagcaaaagctggaagcattccccttgaaaacaaacataagacaaagatgccctctctcaccacttcttttcaacacagtattggaaattgtggccagggcaatcaggcaagaaaatgaaaggttattcaaataggaaaacaggaagtcaaactgtctctgtttacagatgacatgatcctatatctagaaaaccccactgtctcagcccaaaagctccttaagctgataagcaacttcagcaaagtctcaggatacaaaatcaatgtgcaaaaatcacaagcattcctatacaccaaaaatagacaagcagagagccaaatcatga

SEQ ID NO: 563883 - DNA, 958 bp, Homo sapiens
  misc_feature (111)..(111): n is a, c, g, or t
tatcacttgccagaattttaatgattgatttgagagtgaataagttaatgttattaagcagttaagtaagtttatatgtatggcatataagtatagaatatgagattcatnataagttaacaaaggaatttggtttaactacagaagttggagacatggagaaatacatcttttagtgttcacttgaatttgggctagtagcgtaccgtgatgtattgtggacatattctgaggaggatttcgagatgttattctattgaagcgccacgatatacgagtctaccgttctagtcttatagtgatcggtaggtgcgttcatgtcagacttcttgctggtcagtgtttatatgtttcaccctttattcttgtgccacgcaagtgtcaaacagttatacggatataggaaatataaattgagatatttggtgattggcagcctcgtgaagatgttagattaagtttgatctagttctaaagtgctgtagtcatatatgaatttaagacctagtaccatccaaaagcaatgtaatggattggaagaatctgtaaggcgcttcttaggctttatacatgtcccgtacctgatatttgactgtccttcatgatcctgttcttgaaaacttcagtgtgaattcgagaatcctgtaaatctccttccaattggtaaactccctgaagtaatattaaaggaagtatttaagtggaagtttacggagtttaaaacattctttagaacttaatacagatagttagctattatctatgaaaaataaagtaacgtaaaaaaacgtgaccacttttacataatttcatattgtgtcattatagtctggaggtattacaaggttgataggttataaccacgggaatggagaacctttaaaagggtagtaagcatttggtccagttcaattagaacatttgttaacgaacggaatggaatgtgctaaggtaatat

SEQ ID NO: 563884 - DNA, 111 bp, Homo sapiens
ccacctcagacccccaagtagctgggactacaggcacgcatcaccacatctggctaattttttggtaaagacaggacttcgctatgttgcccagactggtcctcgaattcc

SEQ ID NO: 563885 - DNA, 431 bp, Homo sapiens
catgataaaaactcttcagaatctaagaattaaagtaacatacctccaaataataagagccatttatggccaacctgtagtgaacatccctctgaaagggcaaaaactggaagcattttcctggagatttagaacaagacaaggatgccccctttccctgctcatattcagcatggtagtggaagtgctagccagagccatcagaccaaagaatggagtgaaaggccacccaattagataaaaagtaggtaagctgtctcccttcccggatgatataattttatactcaaaaagccctaaagactccccccaaaagctcctggaactgataaataacttcagtaaagtttcagaatacaaaatcagtagccttttttaacatttgagagtccaaccaagaaccccatccccttttccatagcttaaactga

SEQ ID NO: 563886 - DNA, 298 bp, Homo sapiens
aacaaaatgcattatatccatgtaatgtaatattattcagccataaaaatgaatgaaatgatacttgttacaacatggatgaacttaaaagcattatgttaaatgaaagaagccaaacacagaaaggccatttatgtgtatgattccattaatatggaatgtccagaacagacaggaagatgattagtggttgcacagaggggggtaatgacaatgttctggacttagataatggtggtagttgcacacacattgtgaatacaccaaaaaccactgaattatatgattgtgttgtgtt

SEQ ID NO: 563887 - DNA, 902 bp, Homo sapiens
  misc_feature (38)..(38): n is a, c, g, or t
  misc_feature (529)..(529): n is a, c, g, or t
  misc_feature (558)..(558): n is a, c, g, or t
tagtccgtcccaatggatcagctgcatgatgcgatgantcggtgcggtgaatgcaaagaagataacgcttccgaccaaatcaaccctactggaatcgatggtgtctccggtgtgaaagaacaccaacaggggtgttaccactaccgcaggaaaaggaggacgtgtggcgagacagcgacgaagtatcaccgacataatctgcgaaaactgcaaataccttccaacgaaacgcaccagaaataaacccaagccaatcccaaaagaatctgacgtaaaaaccttcaactacacggctcacctgtgggatatccggtggctaagacgtcgtgcgaggaaaacaaggtgattgaccaaaatcgaagttacgaccaagaaagcgtcgagcgagctttaacgtgcgctaactgcggtcagaagctgcatgtgctggaagttcacgtgtgtgagcactgctgcgcagaactgatgagcgatccgaatagctcgatgcacgaggaagaagatgatggctaaaccagcgcgaagacgntgtaaaaacgatgaatgccgggaatggtntcaccctgcattcgctaatcagtggtggtgctctccagagtgtggaacaagatagcctcgaacgacgaagtaaagaacgcgaaaaagcggaaaaagcagcagagaagaaacgacgacgagaggagcagaaacagaaagataaacttaagattcgaaaactcgccttaaagccccgcagttactggattaaacaagcccaacaagccgtaaacgccttcatcagagaaagagaccgcgacttaccatgtatctcgtgcggaacgctcacgtctgctcagtgggatgccggacattaccggacaactgctgcggcacctcaactccgatttaatgaacgcaatatt

SEQ ID NO: 563888 - DNA, 244 bp, Homo sapiens
taggtctggacactccatccttgccaaacctctgcccaaaagtggccttaagcgccggaatgccaattaactagagaccctccagcccccaaggggaggatttgggcagaacctgaggttttgccatcctcgatccctcgtgcagggcctggctcacaaaaagaatgcaacagatggttttattccatagatgcggcattgctcggtgagttgagggcgaaaatgaaaaagtcccgcgtttcga

SEQ ID NO: 563889 - DNA, 401 bp, Homo sapiens
ttggccattctttcccctcccccaccccttttcttttgagggacttttaatgtttgctgctttaggtggatggagagtcccccagtccccctcaatggtgctctaactctacccccccccccctaattaggggtgctaataaaacctgctgaggtttagataaagacggggcataaggggaaaattccttccataaagctgaaatttggttttcaaggcctctgtggctttcttttgaacttacccccagccctggctggaaagtagattgtgtttttagtaatgtgtactgtgagctgttttctgtataatgtattttgtaatgtatttttttcctctccccaaggatgaaaccaataaaatttttttaatagtttggctctaataaaatttttttaaga

SEQ ID NO: 563890 - DNA, 462 bp, Homo sapiens
cgcaacatgtgggcctcagcgcatgggggtgctcggggaggaagcacctatgtttccaaaccagacacctgggctgagagaaaccgatgacctggaagagagaaggttccaccacttggcacaggaacgatgacacacgtgtattgggcgccttcaatatgagcggtccatgcttcccactggtacacgggctggtcgggaacccaatatcgaccggagccgactttccaaatcggcaccctacactggttgtctaggaaacctaccctatgatgttgccgaagagtccattcaggaattctttcgagggttaaatatcagtgcagggcgtttaccacgtgaacccagcaatccagagagggtggagcttggctatgctgaatttgagagacctggattccctgttcaatggcctgagtgtcaacgaagagtctctaggttacacgagttctagtggccttg

SEQ ID NO: 563891 - DNA, 388 bp, Homo sapiens
tggcccggtgagagtctggtggctggtgacaaggggggtaatactacttgaccccaggagcaaaactgactggaaaaaagaatcagaaaaaaaaaagggggaggagagatgaataaggtcctcccctcattggcaatagctagcaagaatggggagaaagggacaatctgggcctggggagaaatggatcttcagaaaagaagagaggctatctcttaaaaagggtccttaggtggttagatcccaaggtgtctagggagaagtggtagtggctccaatttaacttaagaaatactcggtaactgagggtctgaagcaagatttctttaaagagggtgcctggtactactataccctttaggttttagtagcacagggtagagccgag

SEQ ID NO: 563892 - DNA, 256 bp, Homo sapiens
tggaaatgaatccgaagtattacgcgttgagagtataaagcgttgaggaagtataaagcgttgagaagtatcaagcgttgagaaggtataaagcgttgagaagtataaagcgttgagcacagtatacagcgttgaggaagtataaagcgttgagcaagtataaagcgttgagaagtataaagcgttgaggaagtctaaagcgttcagaagtataacgcgttaccaagtatcaaagcgtggacaagtatcaagcgtt

SEQ ID NO: 563893 - DNA, 848 bp, Homo sapiens
  misc_feature (494)..(494): n is a, c, g, or t
ggcagcacagcgtccgcgagaatccgcagcaggagcagcaagctgagccgaaacaccgggggtattttgagcatttcgagaagacccttggggctaacagcatgatgccgcaaaacacagggggggacacaaaatgccccgcccacaaatgtgggccccccagcagcttcccacataaaagcgggcaataattggcccgaacagtgtcccgagaaatatggagcggcgcccgcaattacaaagaagtatccgacgggcccccatcattatatagcggagccatggataattgccgaaacggggttctctgaggaagtttatgctacggtactttctgtactttctgccgattttgtatcctctccccggaggggtcaaaattcgtcgcagaacaatgacgaggggcctgcgccaagaattcctctgtcaggcaggacccccgtgcggggcgaaattccatccctgcgtgcccaactactactctagggccatcnccacatagcatattactgtgcgaagtgacgccctctgtgcaataatttcatatactggagtagtggtccaccgcgagggacccactctgataatctagtgtgagataggttttctttatagaggcccctggagaccccccctggttaaacacagagacaacaagcgctgaaaaactggtgcgagctgaataaattttgttgagggtccctcatgacgtcactgttgttggcgaggttatactttccgtcagtttatgggttgatatgaagtctctgacagtcttgcgcgggaaactataccccacgggtccttggagcagctcagaaaagccggtttttcttggacggcaacaa

SEQ ID NO: 563894 - DNA, 475 bp, Homo sapiens
ctccacatcttcaccagcatttgttgttgcctgtttttggatataagctcttttaaccggggtgagatgatatctcattgtagttttgatttgcatttctctgatgatcagtgatgttgagcactttttcatatgcctgtttgttatttgcatatcttcttctgagagatgtctatttaaatcttttgcccatttttaatcggattattagatttttttcctatagagttgtttgagctccttatatattctggttattaattccttgtcagatgagtagtttgcaaatattttctctcattctgtaggttgtctcttcactttgttgattgttttctttgctgtgcagaagtttttagcttgatatgatcccatttgtccatttttactttggttgcttgtgtttgggaggtattactcaataaatttttgccctgaccactgtcctaaaaaatttccccagtgatttcttaaa

SEQ ID NO: 563895 - DNA, 935 bp, Homo sapiens
  misc_feature (327)..(327): n is a, c, g, or t
gttcttccgccgctccgccgtcgcgtttctctgccggtcgccatggcagaagagatcgccgtgctggtcagttgacaatggctccggcctgtgctacggctggttttgctggggacgacgctccccgagccgtgtttccttccatcgtcgggcgccccagacaccagggcgtcatggtgaggcatggagccacgaacggactcctacagtgggcgacgtacgtgccctagagcaagcgtgcgtcatcctgacccttatagtaccccattgatgcatgcgcatcttcaccaatgtggtgactgacattggctgaacgcatctggcacncacactcgtgtctatcagatcgagcgctgcttgcgtaggcccgcgagaggacgcacgcctatgtcgcttgctgatcctgatggaccccctcgtgagaccccgagatgggccaatcgagaggacgaacgtatgacgtcgagacttatggttctgatgagccttcaatcgaccccaggctcgatgtatcgatgtgctcatccatggcccgatgtcgtgtcaccatctacgctcgtctgggtcgcatccaactggcacttcgtcgatggagcttctggatgagcggggtcgaccgcacgacgggtgcccattctagcgaggggctatcgccactcaccccagcgcctatctctgcgattctggagcctgtgcttgtgccggtgcacctgagccagacctaccgtcactgaaggatccgtcacttgagtccgaggcgtacagtcgttgcaccgacgcacgagccgtagcgcggtacaatcgctgccgcgacagtctaaggcagaaagctagtgcctaccgatcgccctgggactctcgaggcacggagcattggccaccatgtcgcatccgtccttcgttctctgtgacgaagagctacgaagcttggccga

SEQ ID NO: 563896 - DNA, 94 bp, Homo sapiens
  misc_feature (59)..(59): n is a, c, g, or t
gtagaaggggaggccctgttgggccaaatgcccaaaaattgtaacttttgggatttttncggcatcaaaggcaaaaaaattttttggcccctta

SEQ ID NO: 563897 - DNA, 335 bp, Homo sapiens
cgagtgcagctgatgttgtggtgactctagaggaccccactgcgcactctcttccgggctgtcgcagccagcttcctcgcatcttcaccagcatcggagaggactatgatgagcgctgtgctgccgtccatcacaactgagaatcctcatgtcagtgcgtggctcgctgttgatgctaggagaactaatcacccacgagagagctggtctccaggaaggtgagcgacgatcttacagagcgagccgccacctttgggctcatcctggactacttgtccttcacacctctgaccttcgagaaggagttcacagaagcggtggaagccaaccaggtg

SEQ ID NO: 563898 - DNA, 306 bp, Homo sapiens
  misc_feature (306)..(306): n is a, c, g, or t
aacagcgtgaggaggacagaagcacccaacaggacttctcaagccacctgcgaacacttctgctaccatgcccaagagaaagggcaaaagggggattctaaagggttattaaggcaaagggttaagggttggccccaaagggggattaaactttggttttttttctaaaacgacttctttcaaaaacacgggccccgggccctaaaagggccctttgaaaaggggggggaaaaaggtttccccaaggggggaagggggaaagcgttttctgaaaggggggggaccacacccctacaaaacccccgn

SEQ ID NO: 563899 - DNA, 681 bp, Homo sapiens
caagaccctgcactgacatgtccccacgtgagggacctgtgtgtgtgtgatgtctaaatgggggatggaggggacgggctgtgcactgtgcaatctgctgtgcctcgcggcctccagcggggtccccctattctgcatggagcagtctgcggctgtgcgccccctgcccgtctattcaagctccctgttctcttgtcatctgtgttccctctaatgtgatgtcctacatgttttgtggcatgaatctggatgtgtgcatgctgaggctctgcttgagtgacctgatgaacactgacttgtgtgtcccttctctgttggtgactttgaatgtacactgcaccaagctatcctgctaactgtgtgacgatgactcgaatgcaacgtgacttgcatgtgtgcctatgtatatttgccttcatctgacatgcttcccaggggagactcggacgctcactctggcggaccttgatcccaagttgttgtcggcactgcgtgatttccatcccaggacggagcgctccctactcctggccctggactcggccccatcttccggggatttcggcttgatgcgccgttgtgtgcatctgagtcctttacgattcagttctgtgctggcttgtccgctgccggtcttgtttgtgcacgctatcatgatggggtttggtggtcgtgttgttg

SEQ ID NO: 563900 - DNA, 120 bp, Homo sapiens
cgctcagggtggaagtggccgggcgcgtcgaatgtgccgagctggtgcgagtgggcgagcagagcgccttgagggttgagcatcttctggatccagcagaggcctcccaggaggggagcc

SEQ ID NO: 563901 - DNA, 100 bp, Homo sapiens
  misc_feature (81)..(81): n is a, c, g, or t
  misc_feature (85)..(85): n is a, c, g, or t
ctcacaaaagagaagcccagctcttatggtgtcttgtaatcgcttgtgggtggggacaggaaatggtgtcattatctccancccnttgacagaaacaaat

SEQ ID NO: 563902 - DNA, 346 bp, Homo sapiens
tggagaaggagtctcgctctgtcacccaggctagagtgcagtggcgcgatctccactcactgcaacctccgcctcccgggttcaagcaattctcctgcctcagcctctcgagtagctgggactacaggtgcatgccgccacacctggctacttttttgtattttagtagagacagggtttcaccgtgttgctcaggctagtctcgaactcctgagctcaggcagtctggctgccttggcctcccaaagtgctaggattacaggggaaagccaccgtggcccagccctgggtatcttcttttatcttaggctctagactctgattcacaggctgaaccctatctcag

SEQ ID NO: 563903 - DNA, 358 bp, Homo sapiens
atcttgaggatcctcgaaatcatagcatgggagcattgaataggtggcaggactgtgaagaaagcccttgttttggatgatgtgacatgttctgactggctgagcaagccctgatgaatggtggtcaggaaaggctgagtgatgaagagctacctggtagtgtctggggcacaaggctgtcttgggggtaggaacagcagagacaaaggccgggaggcaggaacggctggaaggcatgtgttccctagatgggaggcagcagtcacgggggacagggctttgtgggcctcagggaagagttgtggatttttgttctatgccctatgagaagctgctgaagggtgccgatgaatagcga

SEQ ID NO: 563904 - DNA, 881 bp, Homo sapiens
  misc_feature (630)..(630): n is a, c, g, or t
agcaactccttgaattctcagttttgctggaggccgataagcaggtcctcgggccgcgcaccatgtatcgaaatcagtatgacaatgatgtcactgtatgtgagccgcccaggcctggatttcatcgaatctgagactatgcgatggcacgctgttaaacaaaggttcagtcacagttggtctgtatatcaaaaatgtcatgcagtttggggctctgtcattgtacaaagggcgcatatcagagctgtgcagactcatcaggaataatagaattctccatgttgactagcatatagttatctcaatggcgtggctaactgctgtatgctagactgtatgtagatcttatgcgtcaggagtgttgggattccagattcgtatgcgatagaccacggtctgtgtctcgtctggtatctctaattggacagcaaggaccagatatacaactaggatgatgtggacggaggaccactgatggtgttggtctccttaatgtggtcatgatgatctgggtgccttcccatttggccaaagctgtccatctgtgactattttgagtgagagccatgttcatagaagcctgtcccagtcaggtctgacttacttggagcgaccatatgtctgagttantggggttgtcactcacttgaactagttgagcatggtgtgggtggctagagaaagttctgtagaaaagacagataggaggagtcccatggaatgttggtacgacttgaggtagaagctgggagagaatgttccacactggggttgtaaagcaagagggactgtccctgtatacttaaagggtgcaggaaaggacgaatttaaatgagagggaggaaaatttaggaaggataataaagaacaaaatatgaaac

SEQ ID NO: 563905 - DNA, 1084 bp, Homo sapiens
  misc_feature (348)..(348): n is a, c, g, or t
  misc_feature (351)..(351): n is a, c, g, or t
  misc_feature (378)..(378): n is a, c, g, or t
  misc_feature (390)..(390): n is a, c, g, or t
  misc_feature (392)..(392): n is a, c, g, or t
  misc_feature (402)..(402): n is a, c, g, or t
  misc_feature (410)..(410): n is a, c, g, or t
  misc_feature (424)..(424): n is a, c, g, or t
  misc_feature (437)..(437): n is a, c, g, or t
  misc_feature (451)..(451): n is a, c, g, or t
  misc_feature (454)..(454): n is a, c, g, or t
  misc_feature (479)..(479): n is a, c, g, or t
  misc_feature (781)..(781): n is a, c, g, or t
gtctaatgactatttcatttaatccttcctgtgtctaaagcaatggtactggcattacaagatgttaatatggaacaccttgagaatctaaagaagcggttaaataaataattaaactaaaatagtattcaggaacaattaaaaacaagaaggaaatatttagaattggttcacaattttacttatgatacttgtgtgtaacaaagggaaaaatgaaatttcatagcttatttcagtttaattttaaagtgtttaatcatgttggttatatgtggagcttttgaaaataagttaatcttttttttttgttttgtaaagtggtgcagggtatggctctgtggcccaggntanagtgcaggggcatgatcataggttatnggcatcaacctntngagctcaagngatcctcnggccttagcctctngagtggcggggantataggcttgtacnacnatgcccagtaatttataatactatnatggttgtagggacagagttttggctatgtggcccagatgggtctcaaactccgggcctctcactctctgccgtcatggcctccaaagtcatacttttttctaaaagtaacggtcagatggaggaatatggtgacccactatggtggagaaccttggtttcccactgtggtcacgtcacttaagatgttggctaaacacttatggtacccgggtccggggggagctcatattctgaaagttactacttataaataggtaattcccttctaatatgtgcactgtctatggcatacacctgaanatgcctgatttgtcataaattgtgagtaccccaaagattggttcattttggtcaatcttcggggacaacatttacatcccggtgattcgaacatcggttccgataccaatggttacggggtaataggcgataataacttgcgacatcaggatcaggtcaagaaaggctccaagtattgggggtaacttttccgggcgttttaagggttggaaccatttaaccggggcattgggaaaggatattttggaggcccagaagagtaaactgtgaacgttaacacagcccggcgcaaggagatctaag

SEQ ID NO: 563906 - DNA, 186 bp, Homo sapiens
gtctcaaactctgactcaaatgacctcaaatgacctcaaatgatctggcctgcttggcctcccaaagagctgaaattataggcatgagccatccgcacctgcccacaagtgggttttttgttttttgtttcttggtttttttttttttttcttgagagggattctcgagcctccatctcaaaaaaa

SEQ ID NO: 563907 - DNA, 273 bp, Homo sapiens
tttccccccaaccccccccctttttttaaaaaaaagccccccgggggggttaaaaaccaaaaaaaaaaacccaggggtttggggggggagcccccgggggcccctaaaaaccccccgaggtttttttttggagggaaaccaaaatccggcttaatgggggccccgcccttttttaaaaaccaaggttttttgggacaaaaattaaataacccaatccggggggacccaaagggggaagaacccccccaaaaccctttttttttttttttttta

SEQ ID NO: 563908 - DNA, 181 bp, Homo sapiens
ctttaccataaaaagacgggtttgagggtttgccttttaaagtttgcaacttcaaaaaaaaaaatcgaccctgtggattgactttcccggtccctatataaagcaaataaacttaaaaccctttgtaaccatgtatttactttgccaggggcctatattccaataaaatgttcatccttga

SEQ ID NO: 563909 - DNA, 312 bp, Homo sapiens
  misc_feature (45)..(45): n is a, c, g, or t
  misc_feature (80)..(80): n is a, c, g, or t
  misc_feature (113)..(113): n is a, c, g, or t
  misc_feature (131)..(131): n is a, c, g, or t
  misc_feature (280)..(280): n is a, c, g, or t
aaattatctgcttccctgactattcctggaccatagccgcatctnattgatgcccttcttcccaatccaaagcctctttngcgtcctcctcttgtattcccccatcttaaccnacaagtataagatacctntactccctccttggcgaccgatcatgcaccccttaccatctcattaaaacctaatcacccttacctggctcaatgccaatatcccatcccacagcatgctttgaaaggattaaagccttgtttaacacttgccttcactttaggacttnaccctggacacccatttaggctcagcaaaatt

SEQ ID NO: 563910 - DNA, 435 bp, Homo sapiens
  misc_feature (18)..(18): n is a, c, g, or t
  misc_feature (69)..(69): n is a, c, g, or t
  misc_feature (76)..(80): n is a, c, g, or t
  misc_feature (82)..(85): n is a, c, g, or t
  misc_feature (88)..(90): n is a, c, g, or t
  misc_feature (164)..(166): n is a, c, g, or t
  misc_feature (169)..(171): n is a, c, g, or t
  misc_feature (174)..(175): n is a, c, g, or t
  misc_feature (178)..(178): n is a, c, g, or t
  misc_feature (182)..(182): n is a, c, g, or t
  misc_feature (187)..(190): n is a, c, g, or t
  misc_feature (247)..(247): n is a, c, g, or t
  misc_feature (282)..(282): n is a, c, g, or t
  misc_feature (284)..(284): n is a, c, g, or t
  misc_feature (293)..(293): n is a, c, g, or t
  misc_feature (298)..(298): n is a, c, g, or t
  misc_feature (327)..(327): n is a, c, g, or t
  misc_feature (345)..(345): n is a, c, g, or t
  misc_feature (357)..(357): n is a, c, g, or t
  misc_feature (361)..(361): n is a, c, g, or t
  misc_feature (375)..(375): n is a, c, g, or t
  misc_feature (416)..(416): n is a, c, g, or t
cccggcggcggccatcanccccctcggcctcggctcgaggggcggggagctgcgcgcgcccctcggtcngaccgannnnngnnnntgnnngcccgtccgcgcgccccgcggcccgcgcccgcagtccgccccgcgcgctccttgccgaggagccgagcccgcgnnnggnnngcnnggncggngctgnnnnggccctcccggcccgcgtgaggccgcccgcgcccgccgccgccgcatcccggccgcnccccgccgccgccgccgccgccatgggctgcctcngnaacagtaanatgcnaggaccagcgcaacgaggagaaggcgcangtgaggccaacaaaagancgataagcagcngcanaaggacaagcaggnctaccgggccacgcaccgcctgctgctgctgggtgctgganaatctggtaaaaccaccat

SEQ ID NO: 563911 - DNA, 253 bp, Homo sapiens
cacccgatgtcggttgttacgtgtcccggatcgagcccacgtgttcgtccaggtccataaacaggggttataaccggggcggcccaggtcgcgcatatcgtggctatccaggcattgaaaggttgcgccaggaggaccgctgcacaccataggggccccatacgcatcaccagccatgcgtaggcccccgggcgtttcgcatgggtacgcgaaagcgtgggtcgaggggaaaatgcaaaccgttgcccatcat

SEQ ID NO: 563912 - DNA, 584 bp, Homo sapiens
gggcatctcgatacaagtcatatatatatagatatacagacacacatatatgcatatcagtaagtcctcacttaacattatgacaggttctgggaaactctgactttaagtgaaaaaacatatgaggaaaccaatttggccacagactaattgatataaacaagagttaagctccttgggcgtatttctggtcacaaaaacattatgaaacatctaaataaagacctaaacacttgcaatattaaacactaaaataaatctgagctatacatacatttaagaaagattaataaaaacaagataattatttatccaatttctagtgagtgacaatggttgtggtagtgagttaaggaataaatgtttgcaaagaaaaaaatggtcagaagcacctcctgcccccatgcagttcaaaaacaatcaactccaaggccaggcatggtggctcatgcctataatcccagcacttaagaggccaaggcagatggatcactcaggtgacctcagggtcaggagttcaagaccagcctggccaacacggcaaaaccccgtatctaccaaaaacacaaaaaattagccgtgtg

SEQ ID NO: 563913 - DNA, 330 bp, Homo sapiens
cccaccaagcaaccacactaacccattttaattagtgtaaaagtatcgcccgggcgcggtggctcacgcctgtaatcccagcactttggaagcccaagccggccggttcacaaggtcaggagatcgagcccatcccggttaaaccggtgaaacccggtctctactaaaaatccaaaaaattagctgggcgtagtggcgggcgcctgtagtcccagctacttgggaggttgagcgcaggagaatggcttgaacccggagaggcgaagcttccagtgagccgagatcccgcctgtgcactccagcgtgggcgacagagcaagactctgtctc

SEQ ID NO: 563914 - DNA, 145 bp, Homo sapiens
tgtccatcccccttcttgttgagctggccctttattacaatgaatggatggttttaggaaattacaaaaactgttccggtcatgctatccttgctctttatctttccacataacgtttttccatcttcgtcttattatctctact

SEQ ID NO: 563915 - DNA, 1054 bp, Homo sapiens
atgtgtcctcctcccctacgcgttgtcggtgtgattcgggccctttttaataccgcttcctccttatctcggactttttcccggcattttgcctgctttttgccccaggctggtgcacgaagcgtttgccgtttctttccgggttttgtcacccccggttcccaatctgggcgttccccgggatcttggctatggtctgatacttttgacctttagtccccggttttgccatttgtgaagattctcaagctttcgttcacgtgtaagagccaatcagcactgagtaattcccggtaattccccgtcacaacatgggaagagaaggtaccgaggccaggaggattcccgcaaggccttcgcgcagctagaacgggactgaggctgcctcacgtgttgcacagaaccattttgagcccttgttaaccaagccctttttcttcacataaagtagttgattacgagggagtccaattttctttttaaaaaggagcttccatgatttgtaactgaaatatccggttctagaagaaactggcgctttaacccaatcgcactggatttctcttttcagtgacgcttcacagtgttttctcaccggatggaaattctaagtcaagctgcacaggcgggaaaccacaggcgggtggaagcccactgggaagcacaagggcgaagtggcccggtcccccctgtgccaaggtgggcaaggcacaggagccacaaggccttcgagggagggaacgggccgctccccgccacgccgccttccccacgcacgccccacggtggtgccacgccacctccaccacgaggcccgcaggggatgagtttatgcctgagttcctgcgtgtccgaaagaacttaacgtttttaaggtgattgtcaagtaactgtgtggggttttaatgccacgtttcctaattccactctcacctggagatgtttaaagttggcctctatcctaatgactccaaacttggtttttaactaccctgattgcttttgagggcccggaattataaatatatattatattttaattgtttgagattta

SEQ ID NO: 563916 - DNA, 544 bp, Homo sapiens
tgttaatagagtgtgcattcaggatgctagggcctgacctgatgagaaagtgggctagtagctcaagtagtgcatgaattactgaatattttactgtgctttcttcatgaagggtacatgctttgtactcttcacgtgaaagctgaaaacatttctggtaaccctcttaggtgccttttaatttagccaaccgtgtttatagaaaggacattactaatgacatttggcagattaaaaacattcatttgaacacagtagtcccctagaaaagacaactctacaaaaatttagcagccttattcattataattttaataaaattaacacaaaatcagtcaagaaggaaacatgtatattagtgaagtgttaaaggagactgtttgaatgagaccaaatgtggttctagttgacttcttttcacttgggcttatatcaactcttgagagttaatgtgatcatgatatagcaaacaactataaatggtctctaggccttacttagtgattatacgttatctctggctagaaaaaaaatcatggtagta

SEQ ID NO: 563917 - DNA, 267 bp, Homo sapiens
ctaaaacaaaaccaccacaactctgactcgattagttacgacaaaaccttacaaagcagacacctacataccagtctgacaatcactagatcattagtcagatgaacaacaaaggtttaaacttgccatttcaaacaactatctttccctatctgatacatggagctatgaaaatagaatcttgaaagctgtgctgcatttctcctccacttatcaatgaagaaaacgtgctctccagaaactacctgcggtagccactccaacagg

SEQ ID NO: 563918 - DNA, 784 bp, Homo sapiens
cgggtatgttctctctaattcgccattgctcccgctgttgctggtcttcctatcgatcttgagtgtgtcctcgttggttatttcctggggtgccccgcaatatgttctctcttatttgtttgtgccctctggtgcactttagtctgtggggtgtttgcctcctgtgcttgtgccatgtgtgcgggttggtcccccttcccctgtgggtccgttcatgtcatgtggcagtctgctcatataatccgggtgtctcgtgctctggcgatgtgtctttgcgatgttgttctggccaccgagggcgcggtccgccgacgcgttggtgcccgcttggtttatgtttgagtgtccctggtgtaggggaggccctggtctcccggcggtggtccccgcgtggtcgctccgtgcgccgtgctcgcgtgcaacagcaactgcgccctgtttcggcccctgccctggtgccccctcctgctggtgtctgcgtgctgcgcccatgctgggtgtctgggaacctgtgttggcacagtggatacgccatgatgtctccgtggttcttggtgatatgaccacccgctgcttgtagccttgtggttgttgtgttaatggtgagagaacaccagattgctgttgataccctgttcgtgaatgatttacgcccaaacccccagctctgccgatctgctgtgcttgctgccctcgtggcaccctgcgctgggtgccccgtccccgtcaccccgcccgttactgaaatgtataatctgacttcactgtaccaaaaataaaaata

SEQ ID NO: 563919 - DNA, 213 bp, Homo sapiens
tatggtcgttacctggaatgatagctagtttggcgtagatgttggccaactagatgacattctctacaaaccacaaagacattggaacactataactattattctgcgcatggctgttgagtcctgggcacagcatctaaacctccttattcgacgccgagctggcccagccaggcgaccttctaggttaacgaccacatctacaacgttatc

SEQ ID NO: 563920 - DNA, 221 bp, Homo sapiens
cgagtatcacaggtggtctagtgtaggagtccttcaggaggaggtctctgggtgtccctgatctggtctctgacttgagtcctctacatctggtatggtgacaagtcacgtcttcgtcagttcacatcattatctgtgcatctgcgctgcagctccagcagccagcaaggcacccacatgcgcagccaggaccagcagcccccacgacattcgcctggggg

SEQ ID NO: 563921 - DNA, 572 bp, Homo sapiens
aagccaagatggcgcataggggtctccaggctgcaatgttggctgccttatcagtatctaagcggagttgttttggaaggacgtaaacggggctgttggaaaacgccctctccgcctgtcatggcccggggcatcggaatgttcgagggctataacgtacgatgaaagatttctgcgacgcgattcgattggactccctcctaaaggggtgggccaatggtccttgggtaaggaatggggaattcggattcaatttggtaaattatccaggccgtgttccaaacatggctttgcctcaaaggtctaaacattctagtttccaacgtgggtggttgaccaaaaaccctttaccgtgtatgggagccttggttgggccactgaattagtgacttattgaacacgactctggacagaagcaattctttcccaaatttctggttttcaaaaacccaattcaagccttcaagggtgggacatcttgggatcaaaggacctccgtacattagaattcccattgccctttgattcacccttttgaaggaaggagggtcactgtgggagaattggctggc

SEQ ID NO: 563922 - DNA, 743 bp, Homo sapiens
accagtaatacatggtctctaactgatgataagggcctggatttgattgaaagtgttgcagttcctcttccgtagaatacagagtggatgaaaatgtttcaatgcacagaacaggatgaatcctttttctttatttagcgatttacactttagttactctattatatattcagttagtgtctgataagattttcttgcttaaggagaacggacattgccttggtatgtttttttttttttttccctccattttgggagcttatcaggtaaaaatctcaagccacttgattggttaacacctctgtggggaaaagccttggtgagtttgtaatgtactgggtcttggttttggttattcatccgtggtgtcctcccttcttcccgagtgtgcttgtttaacctaggagtaagtcggctttcggaggatctttatagagagaggctgtgaagtgctgaatcacctttaagtgatacagcacttctgccatctcagcatctacttaggacttacatagacttccggaatgtgtcttctccagatactaaagtacagtgggatcatttctatatctccttttctaaagcagaaacttggcgggtactcccctttgaaagccagaagttaaccattggggaatcttacttgtagacttgcgtaaagggaattgcctttatgtaagatctgcgagtacttaaaaagaaaggcctcagtgtgtgtgaacgtgcattgtcaacaccgtgtg

SEQ ID NO: 563923 - DNA, 522 bp, Homo sapiens
  misc_feature (114)..(114): n is a, c, g, or t
tgtctatgactagttgcttgttattctctacactaataaagcaacgcgccggtcggactaaaccgacgcgttcctgaatcaaactccaagatggaagttcatgaggttcattanctggaatcttatcaagcagtgagtccaagtcgagctcgtatatcaacattacgtccccgatcctgtaatttaactatttatattatcctaactactaccgaattcctactactcaacttaaactccagacaacaagacacctactactatctcgcaccatgaaacaagctaacatgactaacacccttaattccatccacacctcactctcccataggaggccatgaccaccgataagacggacttatttgcccaaatgggccattatcgaagaattcacaaaaaacaatagcctcatcatccccaccatcatagccagcatcaacctccttaagctctaattctagctacgcctaatctaatccagctcaatcacactactccccatatctaacaacgtaaaaatcc

SEQ ID NO: 563924 - DNA, 427 bp, Homo sapiens
cactcatcaaaaaaaaaaaaaaatgacaaagtgattggattcagggatttttggatttggaagggttttccaggatccaaaaaggaagggtttaaaaatttaccatcctcagcttggccagaaggatggctctattcccgtggttttctccttgtgtgtttgggtggtactctctatcgccaaactcttcccaccctcagaaaacttcacctgagttttttgtcagggttcacactggtggcaagaagtttctcctttatttgaataagagttggctgggcaaagtttgcagaaagaggagcccgtgcttgtctgcattcgtgccaggtttgcaggggaagcatactgaagtgtaggccaccccttagggaggaggaagagcacggaaaagcaaggattcagcctggagactgattccccaggagac

SEQ ID NO: 563925 - DNA, 166 bp, Homo sapiens
cacagagcaagacgccatctcaaaaaaaaaaaaaaaaactgagtttattttttggtcacacattacagggaagttctaggcagcccacagctctcatagcaacttcacagtgactttagaggctcaggatattctctttctgtcccaccttccccagtgcttcaaa

SEQ ID NO: 563926 - DNA, 526 bp, Homo sapiens
cgtaatcagtgtcgactagctgtgtctgggtcttaacatctggcctccctaatctgttcaccttccccaccctgccacaggagaaactattccttctctagttttcctttcctatcttttctattactcagggtgaccatcttgcccagagaccacgtgttgaaactcttaagtcggagtttggattaaagatgatggggcccatctggggacaaatttaagccttgccagtttgatattgggtgctaagcagagtggctaatgtctctgtttttatcacatggactttgctctggacagaacgaaaaaaaaaattttcctttatgatgcagctgggcccccatggatatggtgccacaagctggatcactagggctgctcagggaaagggaacccagaagcctggcatgccggcaaaagagtaagaatttcttaccagtcagatttcaggcttctctctctctctgtgcaaacggttgacctgaatggttgacaaaacaatcagtgttaatctcctctgtaaaat

SEQ ID NO: 563927 - DNA, 250 bp, Homo sapiens
gactctagcagatcccgagcccagatcagtagcacatgctgcctggtgcagtatgaacagatgttaccatatgctctgcactgagaacatttaacccccagtctttacatgtgccggtgattcatgagatattgacccatattacttcggtgaatataattactgctagaagcccactgacaatagttcttcatattttattcttacatataattaagcaaacattgaagaaagagactactgatcgggg

SEQ ID NO: 563928 - DNA, 1165 bp, Homo sapiens
  misc_feature (600)..(600): n is a, c, g, or t
  misc_feature (856)..(856): n is a, c, g, or t
agcgggtttcccggaacttgccagcgcggatgaaagggagtgaaaaaaagccactcctgccggtccgggtgccggcatctggtagacctgccgtctgtccgctcggcgcgaacactggctggcctggtcttgggatgtctctccccgacgctgcgcaccagactgtcctgccgtgcccagcctggaggactcagaggcgtgtcgtgtgtacggcccgagcgcgtctgcgggagtacgctagtggtctgcacgcgcatggcgctgttgtccgcggccgtccgtctgactggtagtgtggccccggtggcggcggcgtggagcaagcatgtaacagccgaatggagcgggcacatggagtttctgggcctgtgagcacctaccgatcaagattcaaggcacccgccgatgatagattagggcagcagtaactgtttgaatgagtgtaacattgcttgtcctcaatactggtgcccatgagaagttcaagcccaatgacctttgcctgtgcttgatgaatcgcagaaggtgccaggagagaaacaatcaacggacttgaggggtgatgtccccctttgtgagattcccatgacaatcttcacntgagagtggctggtcgtatccttctttgagtgacaccgtgaatacttgtcgtctgtggcgcccttgacacgaacagtaagcagagccttgtcgaaggcacctcctgcgacgaaggttcccgaaaaggctgctttcccattgtgggatacctcattttgctaggctttgacacaggtcaccgacgcccccccagagtcgcactctgactctaattggggcgcaggtcattgggccctcacaatgcggtttgagaacnccttgaattgttgtcccagacattggggctgtcgccattatgtggcggagagggcattgtggcggttgtcctctcccctaagacccccttttccacgtggatcatcctggcagccctctcccctcgagattgtgggggcgcccccccgctgggggccccagacctcattgcgtttgtaattggcccgaaagttttcagcgaccttaccctggagagagggccattctcccgtttggtcattcccccagggtctctcccattctcctcgcaccttggggcaggcccccttaggaaacgcccggttcctcg

SEQ ID NO: 563929 - DNA, 275 bp, Homo sapiens
gcaacctgtgcctcctggggtcaagcgattcccctgcctcactcagcctaccaagtagttgggattataggtgtgtgccaacatgcccagctaatttttataattttgctagagacagggtttcaccatcttggctgggatagtctcgaacccctgacctcaggtgattcgcctgcctcagcctcccaaagtgttgcaattgcaggcgtgcgacttgtgcctggcctattgattcttcttcactgaaacttacctatgagtcattattatttata

SEQ ID NO: 563930 - DNA, 168 bp, Homo sapiens
tgctgccagtggctccggaagttcctggtcacaacgtctaggagctgtgaaatgctgctgatttgcaacaaatcttacggtgccgactaatagcgaggtggcgataaataggcgaggtggcgatgaatagcgaggtgccgataaatagcgagggtgccgatgagagcg

SEQ ID NO: 563931 - DNA, 223 bp, Homo sapiens
gtgaatggcgcccaggtgtctgacgattacaggcatgtgccaccagacccagctaatttttgtattttcagtagagacgggatttcaccatgttgatcatgctggtctcaaactcctgacctcaggtgatcgacccgccttggcctcccaaagtgctggaattgcaggtgggagccaccatgcccggccactagtgaacttttaagaatctctgtttttgagg

SEQ ID NO: 563932 - DNA, 181 bp, Homo sapiens
  misc_feature (105)..(105): n is a, c, g, or t
gtgcgagcgagatcagcagaaaccaatgatatgcggcaagtcgtgtaggtgtgtagacgttcgtcaccgcgtgtcgtgtgagcaaataccgggttgattagctgntcaaggtgcaaagcacagtcgacatggtttgatctactcgccattttactacagacagtcggtacagcagtctata

SEQ ID NO: 563933 - DNA, 366 bp, Homo sapiens
tggtgtgtctggtacatacagcatcctaactaatacgaggctaaagcggtcagtagtagtatgcgtacggcacgatatctatcttaggagctagggaaagggagtggataaccaggtgactctaaaactttcttttaaaaaatgtgctgttaagttttgtatcagctaaaacttaaagtggtacagaaaccttttggtatgctagtgcagccagcctttgttagggcatgagcttattaactatttgtttctgggaaatgtcataagaattgatgacgatttggaaagaaggaacaaattcaagttctctacagaaattaattgctgttaaaaatgtgtcacatgctgggcataatagctcacacc

SEQ ID NO: 563934 - DNA, 87 bp, Homo sapiens
tcttagaaacaagtaagaatcacaatttgtggttgattataacattcatacataaaaaccaactactttattatacaggcagtgaga

SEQ ID NO: 563935 - DNA, 88 bp, Homo sapiens
ggatttgctggtgcagtacaactaggcttaatagggacatgccgttgtactccaacctgggcgacagaactagactgcatctccaaaa

SEQ ID NO: 563936 - DNA, 243 bp, Homo sapiens
gagacaggtgccctcttcccatttcacagctggtaacacggaggccctggctagtaagtgggcctggaaccgagcctccctcttgtcattatgtcctgctctttccagtgtctttccccagcaccctctcctccctgcagcatcatctctgctcacccttgcacccacaccgtgtgctgactggcccaaccttcccttctttggcttcagcaagggagagctgggtaggtatgatgaaggacg

SEQ ID NO: 563937 - DNA, 141 bp, Homo sapiens
ctctagagtatccaccctcaaacgcgccctggcacactgaacaggtagcgtggcacgagcccagactgcgcccaacctgggcagagcggccctcacgcaggcgcagcgtttccaacgccagggcccgggcaggacggcctg

SEQ ID NO: 563938 - DNA, 85 bp, Homo sapiens
ccttccaataacaacatgtcctggctctatgaaaaaactgatctgtgaagctgcagattgaggactgattgctttgagaatactg

SEQ ID NO: 563939 - DNA, 969 bp, Homo sapiens
ctgggggacagctgcagtagtgggcagcagcaatagcacatgacatgctgggatctgcctgggggagcccagctctgagccccagcacatggcccacctggtgagcaacaggtggggagcaacatgcatgggtgccatggatgacatgtggcatttgacttagttcaaaactctgagtggcctggtgctggggacacacagtggtggctcggccttgggccaccacatgtcccccggagcctgagtgtgcctggggaagaagacccagctgctgtggcattccagggttacctgagtgcagaccagatgtgctgaacgagaaggcaaccaagacatggctgcctggcaggaagaatctgcccttgaccagatggccttggccccaaattcgggaggatgcctggttgcatgaggcaggcttgcatccaccagccctggccaagggctactttgaaacacggatcctctagcaaatgactctggacttcctcatggggccccaacgggacagcggaaccatgcccactgaggaatggtcactcctgtccttgagcatcctgcacgtgacctgggaatatctagactggagctttgcccatgaccttgcccctctaggctgtgtggcagccccaggtggtctcatggtgcagctttaactcagacctggtcacccctgccccctcactctcttatccctgccgctcacatgctgatttgacttcgtggcttgccgacgctgcttttgactttaacggcattatcctatgcttccctttcttgccctgtgaactctatgcgaattgatctggtgcccccttgtcgtctcttgtaccagtttatgatctcgtatgtggctcttttgtgcgccactcttttctcttgtcaatgcttacactcctgtttgttccttgtccccccagtccaattggcccttttcgcacgtgtcttgtctccattggtctctctctt

SEQ ID NO: 563940 - DNA, 339 bp, Homo sapiens
tgctccccccctcccagtggtactgcttatatatcattgcttatatacctacattgccatttacatgggataaaggttgtttacccttaaagatattgtgtgtgtgtctttccttctcctttcaccccgcagcacataacaatcttacaaaaacaaaagcctgaggccagttgtcctggctcacacctgtaatcctagcactttgggaggccgaggcgggcggatcagctgaggtcaagcgatcgagaccatcctggccaacacggtgaaaccctgtctctactaaaaatacaaaattagctggacatggtagtgcacacctgtggtcccagctacttg

SEQ ID NO: 563941 - DNA, 399 bp, Homo sapiens
  misc_feature (77)..(77): n is a, c, g, or t
gaattccgtcagttggtaacacacttagttaataaaataagccaggctttgcaactaagtatctaactttaccaggnccccactcacatttgaggcaaggggctattgagtatgtggagagatgtagtgatttaaaattcagattatttaagttggatcagctgaaagtgtgttttagaccccaaaaccaatctgacccccttcgtttttgcctcagaggaagtaaaatgttcaccttaaaatgaaaattgaaaaacgccaatgtggcacccacaaaaagagctctctgtactttccccaatgctgcctcaaaaagttctgtgagtttcgggggtcagtgtcccacccttcactgttatactcgtgatgatactgaaacatatcataggatacaacacg

SEQ ID NO: 563942 - DNA, 587 bp, Homo sapiens
cgcttatctgaataaaaaaacaaagcactgggagagttccataaaaacccacatgggttaccagaggcgggaatagaaggactggggagatattagtcaaaggatataaaatttcagttagatagaaggaataaattcaagggatctacggtccaacagggtgactacaattaataacaatgtatcatatatttaaaaatggcagagagcagataatatgtgtactcactacaaagaatgatgtgtatatcaaatagctggatttagcccttccacaaggtatacatatcaaacaaatcatcatgtggtataccatagatttatacaatttggctggttcattcaaacatgaagaaacaaaaaacacaaactcctgagtcctcacggtgatatacttaatcagaatttccaaggtagacatctagtgatctgggtatttaacaaacacatctaggtgcttcatatcatggcgaacactggacccccagttctgaaacaattaattcctggagcatgacccagtatcattgggggctcagtttccttccgcatcaatgtaggtctggatatatcccttatggactcgt

SEQ ID NO: 563943 - DNA, 343 bp, Homo sapiens
  misc_feature (16)..(16): n is a, c, g, or t
  misc_feature (31)..(31): n is a, c, g, or t
  misc_feature (223)..(223): n is a, c, g, or t
  misc_feature (274)..(274): n is a, c, g, or t
  misc_feature (300)..(300): n is a, c, g, or t
  misc_feature (335)..(336): n is a, c, g, or t
  misc_feature (338)..(338): n is a, c, g, or t
gagagtctcaggcccnatttgacagcgagtncgttccttctgagcgaaattcagatctcttattaatttctctccgtcgcttctaaatttcgaagcgacgagctaactgggaaagggaacaagtactaaagaggtctggaggacctctgcccctatctgaggaaggtatgtttattactgggtttcatgacgctatttgcgattttcctccgtattgtttgtnggttttgtgttccataggtatgtgttatcttatggtattacgtggtattcnctttttgtgatatatcctttgttctnggcgatgggataattttgtttctgtcgcacgaaannanggaaa

SEQ ID NO: 563944 - DNA, 606 bp, Homo sapiens
tagcctacaggaattcaggacaggtacatggaaagccatttttccccccaaaataaagaaccggctcatgctcccgagtggtaaatcgtaaatttccagaccccaacaaagggcaagcttgggctggccaaccatttttccattcaaagattccctggccaagggctcctggtgccgaaatcggcaccagaaaaaacaactctccctttgttaggtcgttataccaacgccaaggcaatcaaaaaagcaacttaaacatgataaggatgtttctcatcctttgtagacagtacagcaaggcttcctattacgagacctgtttgccgacggagggtaacacacttgttagtgcaaagcaaactgctttaggcttataacttgacttttgaaagcatctccggtcaccttgataataagataaagcatatcaagatccaaagattcatcatctgagtctttgttcagtgggtgtaaagccagctgcgtgtctaagaaccataagtttctgtcatctgagtacctcgtttctctgcgcatcatgcagtaaaaaatggagaccctctacagtccctcaaaaataacaactcgggactagttctcttgggc

SEQ ID NO: 563945 - DNA, 434 bp, Homo sapiens
accctactatgctgcctggacactactgagaatagtcatagtccttactctaactagaaaatagcagcaacatttactgccggttagaatggcttcttcctctgaaagggaaatctgccactgagtcaccacgcctggctgccactgtcctatctatttaacgaatgattccttcatattcgtttcttacactcgacccttatacattccctccattaataagtctccttcgtgtagcccatcatatcacctcaaatccggcacttacttacagtgtctaattctttaaattattctgaaagagagtgcttgcttccctctcacctacacacgactccctggagctggttcgtatcatgcattaacaattcaaattacgtctttacacttacttggctgttgctctactttgggataacacgttcgcgaggggt

SEQ ID NO: 563946 - DNA, 840 bp, Homo sapiens
aaataccttgtgcaaggagaaccaaagctaagaccccgaaaccagagagctacctaagaacagctaaaagagcacacgccgtctatgtagcaaaatagtgggaagatctatcggtagaggcgacaaacctaccgagcctgggtgatagctggtgtgtccaagatagaatcttagtgcaacttctaaattggcccaggagaaccctctaaatcccctgtgtaaattttacccgggttagtccacaagaggaaccagctcttgggacactcggaaaaaaacttgtagagagcgtacaaaaatttaacacccatagtaggcctaaaggcagccaccaattaagaaagcgtcaagctcaaacccagttacctaaaaaaatcccaaacatataagtgaatcctcacacccaattgggaccaatctatcaccctatagacagaactaatgtaagtataagtacccctgaaaacattctcctccgataagcctggtcagcttaaaacccactgacactgacccattaccagccaaatatctaaattcaaccaacaagtcattattaccctcaatgtcaaccaacacagggatgtccatcaggaacggtcacacacaagtaacaaggactcggcaacatcttaccccgcctgtttccaacaaaattaacttagcatcaccagtattagaggcacggctgcccagggcccactgtttacgggcggggaacttaacgtgaaaggagctatcatgtccttactaggcctggttaggtccagaggtcacggtgccttcattaccggaatgcggcggacggggcttcacgaaagacacctagggtcattaacg

SEQ ID NO: 563947 - DNA, 377 bp, Homo sapiens
gtcgaagaacaacggcagatatcagtaatgaggatgtccagtccgtgggccacttatgagaatgactgcgccggttaagcttcagggggtttggatgagaatggctgttactactagggctatgtggctgattgaagagtttgcaatgagcgattttaggtctgtttgtcgtaggcagatcgagcttgttataattatgcctcatagggatagtacaaggaaggggatggctatgtgttttgtcagggggttgataatgagtgtgaggcgtattataccatatccgccttaattttaagagtactgcggtaagttctattgacccacgatgggggccttcgacatgggctttagggagtcattagtggatgtcgtca

SEQ ID NO: 563948 - DNA, 355 bp, Homo sapiens
acgaacacagaagaataggattgtccagtgtttattaccaataggcagtttagagtgtgagtgccctaagtagaacactgggtgctgggggagtacctaggatgacgagaagccccagaccccaatatggaaggggagggcaggatgaattctggtgatgcgagctggataggggtaccctagctccctgtgtggagggctgggggaatcctggagaggagagctggagagggggcaccctagcttcgtgtgtggggggctgggggaatcctggagaggagcaccctagcttcatgcatgaaccagcagcacaagtcccaggctcactacgagctcttattgcccaggccggagt

SEQ ID NO: 563949 - DNA, 534 bp, Homo sapiens
  misc_feature (10)..(10): n is a, c, g, or t
  misc_feature (37)..(37): n is a, c, g, or t
ccaaaccagngccccgtcccctgtttcccctttgagncacatggattcactagctgatagagaggtgcctgttttaagcactcagtgacatttgatgagtccctagttactttttgaagccggggagggttcagacatggtctgcaaattgctgagaagtcctggatcatttttaaaacgtagaaaatgagatcctgctgcatatattaggttgtcttagatcaacctggctgagctatagtgacactgctgttcatgaagacttatacgtccttctatcggatgattgtcttgttgtgccaaaagtgttattacactgtgtgtgaaaccaacctgcttcagggggaaaaattaaatcgcctgattgagaggtcactggtgaatagtaacacaagatctattaccgttattagagactctggaggacattcacccttttatggtctttcaactgctggaatgaaatattttagcggtaaatgacaccttccgggaaatccttctgaagattcattctttgctgcttgcatgtag

SEQ ID NO: 563950 - DNA, 893 bp, Homo sapiens
  misc_feature (154)..(154): n is a, c, g, or t
cagcacatacaagaaacatacagtgtacctcaaaaggggcccttgaaatgtcatcaaagggtaataacctagtgagtgagttgtgatgtcatctggaacataggaaatggggctcttagcgtattcggtacgaaggaagccaggctggtcctgncaggaagtaaatgataatctttgggaaaccaggaccctgcctcccagcccagaggtggaggagggcggtcagggtggggtctacagtggcacagcactgacaaaggtagagggaaatgtaatagcacatctacgctgcagtctggtgaaagtggccggggtggtccttggaaaacagttgggctgttcttggcaggaattagtgacagcctttccgtcacgggcagggacgccttgatttaaaaaaaataaataaataaaacgtctgggtatagacttttgagccttgagcagggcctcctacctggcagtggggaactgcagtcttcctcctggcaataaacctaaagcaataatgatggccccttctctgtaagacttcccaggtaactgtaaataaacctcagcttgatcctcacagtgtctaaagttgcaggggcttgggaggttagggtcacagtctcacttgtctggccctctcgccccctaacattagaaatctgctagcattagctttctctccattgctcattcaccttggtgacccaggcatcgggctcctagtcactgttctcatcaaggaccaagacaccagataccccaggccccagttttcttccttcagctaccacattccttagaacccagaaatctggcttcataattttgttcctcctctttctatgaaagacttagctatctgcctttatttgtttgtatttaaagtaatattagcctta

SEQ ID NO: 563951 - DNA, 116 bp, Homo sapiens
ggttcgtgctcactccgggtggctctggctcggcactggagctggtgatctcctcaggtcggcggcagattttttccccactcctgatgatgttgttgtaggattccgtactcccc

SEQ ID NO: 563952 - DNA, 150 bp, Homo sapiens
atatagcaaacttaacccctcataccttctgcataaagaatgaaactaggaagatcaaccaggtcaagaggagcacacacacacacacgacacatcaacgcacacacacacacacacacacacacacgagacgagggcgtaaaccctaag

SEQ ID NO: 563953 - DNA, 509 bp, Homo sapiens
ctgcagcttgattgttctggcttccctttcacaagcttataagtcggacgtgtccatgacaagctgaagactgatgcaataacttacgaatgccttcactgtgacatcgacaacgccataggtatgttaggatgtaagattgcaacagtgcgtgtgttccattgacgacgccatgccccaaccagacctccacaggggtggaggttaacacaagttgactgatctcttgtacgttgttctcccgtaagaaacggtactgcgaccaggtggccagtgacgatacgagtacatgatcgagccctccttcattaaaccgtgcgacgtaaagagcaaccgatatgacaggcatagattgaccatttatgcgacatcttatccgagatacccttccatgacaagacgaaaggcggtacaccgaacacgaaacgaaccatctaatgattcaccgttcttgttaccgcagggtccgaggtgtccagcctgtatcctttgtgatttttaaccgtttc

SEQ ID NO: 563954 - DNA, 439 bp, Homo sapiens
tacttttccacaggatgctgcaagacgatgaagcatgttggaagacgagcagatgctggaagccctgtgagatgcttggaagacctggagatataggcagacatggattcgttgcaacgacgtagcttagttggaagacatatgttttctggaacacgtggatttgctggaatacatggcttggttgaacagacctcgatttcctgaacatacgtacctctgttggcctacatacctttgttggaagacgtacctttgttggaagacgtacctttgttggaagacacaagtaggctggaagacattaatttgatggaagacatggctttgttggaagacgtggatttgctggaagacacggatttcctggaagacctggatttttcggaagctatggatttgagggaagacaaggattttctggaagacatggatagtc

SEQ ID NO: 563955 - DNA, 189 bp, Homo sapiens
tttttttttaaaaggggggggggggggggtccccccccccccctaaaaaacggggggggcccccccaaaaatgggggggggggtcccttggggggggggcccccccccccgggttttccccccggggggtttggggggtcccccccttcccccccccgggggttcccctttttttttttttttttggga

SEQ ID NO: 563956 - DNA, 692 bp, Homo sapiens
  misc_feature (58)..(58): n is a, c, g, or t
  misc_feature (88)..(88): n is a, c, g, or t
  misc_feature (270)..(270): n is a, c, g, or t
  misc_feature (279)..(279): n is a, c, g, or t
  misc_feature (282)..(282): n is a, c, g, or t
  misc_feature (288)..(288): n is a, c, g, or t
  misc_feature (293)..(293): n is a, c, g, or t
  misc_feature (295)..(295): n is a, c, g, or t
  misc_feature (298)..(298): n is a, c, g, or t
  misc_feature (311)..(311): n is a, c, g, or t
  misc_feature (317)..(317): n is a, c, g, or t
  misc_feature (319)..(319): n is a, c, g, or t
  misc_feature (337)..(337): n is a, c, g, or t
  misc_feature (369)..(369): n is a, c, g, or t
  misc_feature (499)..(499): n is a, c, g, or t
  misc_feature (672)..(672): n is a, c, g, or t
actcacagaacatgcatggacatttttacaggctttcaggagattctttgtgtagcanggttgagctacactacatctgagcctaggnccctgggaagaactcagagaaggcagcagtagaggctgggaaggagattgttatgaggtaggaggaatagcaagtaacgggggtgtttcaagaaccagagctgagtgctgctgagaagtcaaagtccttgttgcttttgttttggagaataaggttggtgactctaataaaagccacataangccctcccnccncccccngccantnaanccccgggcgactngcggtnanacagtggaaatgaaagtnatcaacaactcttttgaacagtttttgctgtnaagaggaacagagaaacagaggtggccgaagaggaatgtgaggtcaagggaaggtttaaaatgtgaaattacagagcatgtttgcctgtggctggaaaacctgctggtaggatgaatgggcgcaggacanagtggggacagctcaattttccaagctctgaggtgaaaggagccgggatcagagcacagctggggacagacactgtttctactgtaggggtaggaagaagacagatggatgccagtacacttgcagatacggtgggagagcctgacctgtttccccaatatgcctgtgaagangacattgggtggggatagat

SEQ ID NO: 563957 - DNA, 116 bp, Homo sapiens
ttcttaacacagttcagtcttctgctcgccctttcctcactgatgtctgcactcggttgagtactcctggagcctcacaggtctgactgttctccactcttcactgcattcaggcc

SEQ ID NO: 563958 - DNA, 207 bp, Homo sapiens
cgactcgataggaggactgatgtcaggaaataacttgacactgggtcaaggcatccatacggtaaataatcattttactcttcattagtagtaattggaggggagatacttggagactatgtcaatctctggtccctcatcaaacattaatccattgctttaaaaatccatggaggggtctggctttaatcagtttattactatgag

SEQ ID NO: 563959 - DNA, 137 bp, Homo sapiens
  misc_feature (1)..(1): n is a, c, g, or t
ngtcctacagtacaaaatgactggttgtttaaatagaaggctgtttaggacaagtcagacaagtacaagcatgtgtagatggtctatggaagttatgaaaggattaatgacaagaaatttatgcaccacaagtgaaa

SEQ ID NO: 563960 - DNA, 954 bp, Homo sapiens
  misc_feature (11)..(14): n is a, c, g, or t
  misc_feature (17)..(17): n is a, c, g, or t
  misc_feature (430)..(430): n is a, c, g, or t
tgacgaggaannnnacnaacttaggctaggtacggaggctggtggttgaactcgtggcctagctgacgataggcctgagaaactccacgtggagctcacggaaactgtctggacatgatggctcgatacgtgttctccaacttcacggctgtcccgaagaggtctcctgtgggcgagttcctcctagcgggtggcaggaccaaaacctggctggttgggaacaagcttgtcagtgtgacgagcagcgtgggaaccgggacgccggtcgttgactaggcctggagcctcgggggagtctgtcggtccggcgccggagtgcgagtctccagccccggggtgcaatgtgtagacagaccatgggaggctgccgggctaggctggtagtcccagcgctgggccagccaggtgtcccgtggtggcccgggatcgnggtccgttccgatgtcgtggggggcgccatgggctcttcgaggtttggcgccctggagcgtgcctgggctcctcccagttcgctgtggcatgtgctagcttctccaggaccactggactgcaccagtgcgcgaaatctgagaaggcctcagctgggacccgggttcctgtgcaggagaagacgaatctggtgggctatgtgcccctgctgacccggggctgggcggggatcctggtccgggagggccctgggaacgccatggtgtgtgatgagccttggatgaaaccgctcagccctttgtcctcggacatctaacaaattggccctgcaggagcctgcttaagcctcatgggggctgagcgcttcaagggggcggggaacaggctgttcagtcactgtcgtgcgggagcagggggcaaggcctcctcttggtcggtccaaagatcggcgggctggggggacggggggagccttttgttgggggcccccggttggggggtttggggctttagggccggggtaca

SEQ ID NO: 563961 - DNA, 141 bp, Homo sapiens
ggttttttccccccccccccccccgggggggttagggggggggggtcccgggggggggggttttccccccccccccgggggtcggggccttttcccggggctcttttaccccccctttaatttttttttgggttttcggga

SEQ ID NO: 563962 - DNA, 161 bp, Homo sapiens
ttgttccttttttaaaaacccaaaagccctgaatcaaaaaaattgagtttttactttttgttttttttaatgggtcagtattttacattgctaaatgtacaaactttatacaaaagcccacccttatcatttttaaataaaaacagggaaatggtttacca

SEQ ID NO: 563963 - DNA, 178 bp, Homo sapiens
cgggagtgcgcccagagcatgccccggccgtcagggaggactcccgggctcactcgaaggaggtgccaccattccacctttggcagccttccttcttcatttaaattttctaaagcccattaactgtctttgatgtttcttttgtgatgacaataaaatatcctttttaagtcttgta

SEQ ID NO: 563964 - DNA, 114 bp, Homo sapiens
gtgggaggacacaaatgtttgagactggagtgagctgtgatcaagccattgcactccagcctgggtgacgagtaagaccctgtctttctcgctcccctaccccaaaaaaaaaaa

SEQ ID NO: 563965 - DNA, 1493 bp, Homo sapiens
  misc_feature (1)..(1): n is a, c, g, or t
ngcttgattatttttataggggggggggggggctctcccaataaatagagatacttctttttgtgtgagaggatagaggaggggggaaccacctctatcctggggggagttgtagatgggttgagatatattagtgaagcagagattgtctcgggggggggggtaatgttgacccacaacctcgtggagggaaggttttgtatctcccaaaaggggagtgtgcatttgtatataaagagagaggctcttttgaaggggaagaatgatgaacatagggattggtcccacatggagaacccaagtgccccccccactatttggtcccgcagggggaagtaggaaccattcgtttgaagtacgccaacacccacaattaatgtgtgggggcgctttcattaaggaaaaaattgtcgtgttagttggctcgccccacgcgtgtgaatggttgttggctggtgtgtaagacctcttaaggagggcggcgcccttttgtgtttcgtcagaagggatgtcgcagcaagaagtgtgtgtggtgtgtccagacccccagcgaaggtgcccctgcgcttgcgccccccgtcttcaggtgaattgtcttgttctcgaggggcaccaccacgaggggccgtcccacacctcgggtgttgcgtcccgcgccggacacacgctctgggggccgtttgtccccacagggtgttcacatttagaaatgtgtcacaaagttggggcccccgcgcgcctcttatggtggcccccacgcgtgtgtgcacactgtggccctcttttgacacgcgctctctctcagagtgagagatttgtgtgtgttataagttgtcgtctatgaccccctccgtgataatatttttggactcttttaaaatttttagaataaccaccctctctctctatataacgactctataccccacatctatatacaatagagagattgtatttggtgtttatatatccacacacttgtgtctctccacacaaatatattctctctctgtgtgtaattgccacagggagagtaccacgtgttctcttgtgcacagtcacaacacactataagtgtccacgtgagaggtgtggcgtcttccgctcataactcgcacaaagcgcacattctccacatcttatagttgagagtatagctctcttcggaaagcaccgctcttgagagttatagagaagtataagtgtggttaacacccctccaccacattatagtggtggctgttgtggggcacagttcacaacaccacacaatgtaaccacacatgtatattttttgtgggaaatatgagagttggcactgtcacaaatgcactccttctatgaaaaaataaattagtgttatagttcttaagaatttgtttttctataagttgaataactgtgggttaatttttgtgaacacacgcctgaatgtttgggacccttttttcctccaaataaaccagtccttattataacccggaatttggaga

SEQ ID NO: 563966 - DNA, 929 bp, Homo sapiens
ggcctctttttccggctggaaccatggcatgggtgtagaagagaagaagaaggaggtttcctgctgtgccaaggaaatcccttaatgaaaaagctgaaggaatttcgcagagctgaatggatcaagctcctgagaacgacgttttgcccacaagatgcttcgcaaaggcaaggagtgaatgcttatctatgaaaaagcgaagcactatcacaaggaatatatggcatgatgtacagaactgaagattcgaatggcgcaggatgcgcacgaacaagctggcgacttctatgtacctgtagaacccaaattggcgttcgtcatcacgaactcaggatgggtatcattggagtgagcccaaaggttcgaaaggtgttgcagcttcttcgcgttcgtcaaatcttcaatggaccctttgtgacaggctctaaccaagggttacgattaactatgctgagggattgtggcagccatatatgcatgggggtatcccaaatctgaatgtcagtgaagatgagactatatctacaagcgtggttatggggaaaatcaataagaaggcgaacttgctttgacagataaacgctttggattgctcgatctcgttggttaatacgggcatcatctgcctggaggactcgattcatgagatctatactgtggtaaacgctcccagagcatctaccttctgcgggccctcaatgtcttccaccgagggaatgagaagcgacacattgttacgtgcgctctggcactggagactgatcacagtttggagaccgttcctcacgcctttatacctgcggtaaacggcagtctaatcgaaaaacaaaacaccggggccgaaataaccggggcgcgaataaacttgcagtaatgtcaccacggctgaacaggatgcgtgaacaccagaaaagaagccacaagaagag

SEQ ID NO: 563967 - DNA, 733 bp, Homo sapiens
  misc_feature (7)..(7): n is a, c, g, or t
  misc_feature (65)..(65): n is a, c, g, or t
  misc_feature (81)..(81): n is a, c, g, or t
  misc_feature (115)..(116): n is a, c, g, or t
  misc_feature (141)..(141): n is a, c, g, or t
  misc_feature (143)..(143): n is a, c, g, or t
  misc_feature (157)..(157): n is a, c, g, or t
  misc_feature (176)..(176): n is a, c, g, or t
  misc_feature (244)..(244): n is a, c, g, or t
  misc_feature (247)..(247): n is a, c, g, or t
  misc_feature (258)..(258): n is a, c, g, or t
  misc_feature (271)..(271): n is a, c, g, or t
  misc_feature (390)..(390): n is a, c, g, or t
  misc_feature (400)..(400): n is a, c, g, or t
  misc_feature (407)..(407): n is a, c, g, or t
  misc_feature (416)..(418): n is a, c, g, or t
  misc_feature (430)..(430): n is a, c, g, or t
  misc_feature (432)..(432): n is a, c, g, or t
  misc_feature (434)..(434): n is a, c, g, or t
  misc_feature (525)..(525): n is a, c, g, or t
  misc_feature (528)..(528): n is a, c, g, or t
  misc_feature (536)..(537): n is a, c, g, or t
  misc_feature (540)..(540): n is a, c, g, or t
  misc_feature (591)..(591): n is a, c, g, or t
  misc_feature (634)..(634): n is a, c, g, or t
  misc_feature (703)..(703): n is a, c, g, or t
cctcaancccagctgcaaccagtctggggccatacaaccagggacagagcccacagagcccatanacctgtctcccaccancggggccctcctggcagggatagggaaggaggannccgggcacccccctcagggcctgantnacgtactgtagttngcactggacgcccgaggcnctcacctgtacccaaagcccccttgaggggaactgtggctgctgaggggccaataaagctgatgtaanttnatcgatgggtntggctgggcgcangttctgaggggatgtggggtctgggaggtgtctcgaggtgagagctccaagtcacaggaagtttaagtcagacctcagtttccacatccataaaatgggacgacttccttacccacagntacacgtgtnttttaantttttaaannncccattaccaanananagggtcttgctttgttgcccaggctggagtgcagtgttgcaatcatatatatctgtagcctcaaactcatgggcttaagtgatcttccttnccnagcctccnnaanagctgggaatacaggcatgtgtcaccacattttgtagagatggagtctcgntaagttgcccacgctggtctccaattcctgggctcaagtgatnctttcacctcggcctcccaaagtgctgggattacaggcgtgcctggccacagatgagaggatctctgcngcagatagtacttgtgggtgcgagacctgt

SEQ ID NO: 563968 - DNA, 452 bp, Homo sapiens
  misc_feature (385)..(385): n is a, c, g, or t
  misc_feature (417)..(417): n is a, c, g, or t
aagacagtaagcatccctgctccatctctggccaggcaggaactgaccccaggcagtaaagttgcctcccccatggcccagcccctaccgtggccacaaagctctcagagggccatgggctcctgcccacacctgtgacatcgagcccccagcctggtccttgactcccagccccactcagggtgttgcctgcattagagcaactgggcccccaactcccagccagagccagccgaccccacctccgtggaccgtggcactgtgggggccacacacagagcacagcactcacacggacagggctgagactggacaggcctcactgctgggctgacatttctcagtagctgggattacaggcgcacatcagctctcattttttaanataagtgttataccaaatattgcgtcatacanagacctaggtacattcactaaggtggaccccagat

SEQ ID NO: 563969 - DNA, 890 bp, Homo sapiens
cccgggtgatgccgctgcttttgaggaggtgtgccgcgtgtcgtcgtgatccacacgggggcgttcaaggaggtttcgaagtggcgacgagccccccctgggggtaaggtcgttaccacaaccacatgggcggggcgcgttcctcttctgggcgcggtataccgcggacccccctggagttttctttgtgccattcacgccggtactcttcattcagcgtgaatgggcgacaccagcgctgttatcctgtggcaccgagagccctccgttggtacccccccgcttaagccctccgtggcggccggcagatttcacggccccgctcttcgggggggccctcctagttctgataaaggccggtccttccacgagcgcgacgtcttgcctcttctctccccccctgcctggctactatgggccagcttcccccgtactgaacctagtctcgggtccgcccgctgctttcacgcatgcggtgcggtagtcttgcgtcgctgcgcctcaccacgtgtccgcccggagccgctgttattccgcctcgatgggcgtgtggggacaccccgccccgcataagactgcgtgttccgccgtgtggggcccggcggacatttatacaaaaacccatcgtgttttggcggggggctcccccaactcccctgcaccctacgagccgtccccctgtaatacgggccattgtggcgtatcacccaccacctgtctcgttactgtttccggtgcgccaatattcctgttcctaaagagagcgcgcccctcctcacactcgattgttatgaaacttgtcatgctcgacgtatgttgagccacccatgcatgctgtcggtctaccgtcacgatgctccaaacaaatccgtttcccgccaacaaggtca

SEQ ID NO: 563970 - DNA, 205 bp, Homo sapiens
tcagacgctgaactatgttgggggtcacacattaggaaagcatgaggggaagagagggaaaaagggaacgaaagaaaagaagcaggatttgggcacaggaataacggcctcacagctgcaccattatgaccaaaatcaatggttgcctacgtacttacctgtcttcctaaatacatcattgcagggcacatagttcagcgtctga

SEQ ID NO: 563971 - DNA, 711 bp, Homo sapiens
ggcattcatggataccaaagggaaaatggtagagacggtgttcaccgtgttatccaggatgtcttgatctcctggcctcgagatctgcctgccctcggctcccaaagtgctgggattacaggcgtgagcccacgcgaccgtggccagggcaccacgtgttctcaccgttgacaggttggctgtgggacgctagtacccatgggctttgctgacttagccaaagaacgagttacgaagaaaatacacacaagttatacagagtgtccctagtttcctaagactttatctggcatattgtgcgataaaattagctgtgcaatgtgtggcttcttcattaaggatgctttcaatgtggtcttcacagatgtgtcagggatctgtcaaccagaagcaagggagcacaaacacaggccagttccttggaaatcacattcttaggcaaaaccttacactctctttgaaacaataaggaaaccaattttgcaggaattgtggagagtggatccttttcctaaaatgtggtaagaaacgcattagagattgttgtgcgtatttataggaagtggggatcaccgaggaaacaagagcacgggacaacgtgattttttttcccacaagattctggtagatgttatttcccattttaataaagcggactttaacaattgacacaaccttttattctggatatcaaaaggcaaataaaaaacc

SEQ ID NO: 563972 - DNA, 248 bp, Homo sapiens
tctctaggatcttggtcgctcggacacccgcatcaggctcggcaggaagttgctggctgatgagcacctcccggagcggtggggcggggcctcctcttctccagttccagcgacgctcatcagtcgtcctcctgctgatttctcttcagcttaaggaagtctattagcttgtgagcgtcctccccagataggagaggtcatacgaacggtccttgggatagccggataactcacaatagggagctggg

SEQ ID NO: 563973 - DNA, 344 bp, Homo sapiens
tagcaggcataagaggacttccgcctacaatggaagcacttccatctgatctcagcattgctgaaggcaccgttctaacagtagacctgtgcttacacgggtgagcctaccccagaagtaacatggtcctgtggtggaagaaaaatccacagtcaagaacaggggcggtaccacattgaaaacacagcatgacctgccaaccctgatcatcatggacgtacagcaacacgcagcatggtggactttatacccatgagtccaggcaatgaatatggatctgactctgccacatgtgaatatacatattcagatccatttaagagggcctgtgcccttatacatcg

SEQ ID NO: 563974 - DNA, 323 bp, Homo sapiens
  misc_feature (244)..(244): n is a, c, g, or t
  misc_feature (300)..(301): n is a, c, g, or t
ctttaaaaagaaaaccttttaaaaatgaaaagtaggtccaggcatggtggctcgtgcctgtaatcccagcactttgggaggctgaggtgggtggatcgcctgaggttgggagttcgagactagcctggccaacatggtgaaaccccgtctctactaaaaatacaaaaaattagccgggcgtggtggcgcatgcctgtaatcctagctacttgggaggctgaggcaggagaattgcttgaacctnggaggcggaggttgcggtgagccaagattgcgccactgcactccagcctgggcaannagagtgatactccacctggagg

SEQ ID NO: 563975 - DNA, 320 bp, Homo sapiens
ggcagtgaatcgaggtcgagagccctgactatcatcagggaggtgaggcttcgtacaaagtgttagacaggttaggaattgatgggcctgcgatagcaaaatgctctatgagaaaaatggtctcaccctccatcatgcataaaaacagattgtctcagtttacctagctttgaaaatgccatacccttgggagagaagaaggatgtgtataaggcgggtgagcaagtgacttacacttgtgcaacatattacaaaatggatggagccagtaatgtaacatgcattaatagcagatggacaggaaggccaacatgcagaga

SEQ ID NO: 563976 - DNA, 143 bp, Homo sapiens
  misc_feature (2)..(2): n is a, c, g, or t
angccatccccaacacatggaaaaagtacccaggctgacgaatttcttctcattattaaaacataaagatctgcattagtcagtgagtgttgtaaaacccacacaaattctacctttgggaaaggtgttgggcgataacatca

SEQ ID NO: 563977 - DNA, 122 bp, Homo sapiens
ggaagaggcagaaaatggaagagacgcccctcctaacgggaatgctaataaggaaaatggggagcaggaggctgacaataaggtagacgaggaggaggagaggttgggagaagagagaagaa

SEQ ID NO: 563978 - DNA, 110 bp, Homo sapiens
tcctccctcagttccttcatatttctctcaaatttaccttttacaacaattatgtgttctcattattctctcagccaattaaggcgagtggttgtgatctccacatgtgc

SEQ ID NO: 563979 - DNA, 505 bp, Homo sapiens
  misc_feature (197)..(197): n is a, c, g, or t
  misc_feature (388)..(388): n is a, c, g, or t
  misc_feature (457)..(457): n is a, c, g, or t
  misc_feature (459)..(459): n is a, c, g, or t
tttttttagatggagtcttgctctgtcaccaggctagagtgcagtggcgtgatctgggctcactgcaacctccgtctcacaggttcaagcgattctcccgcctcagcctctccagtagctgggactacaggcatgcaccaccacgcccagctaatttttgtatttatttatttatttatttatttatttattttganatggtgtttcactcttgctgcccaggctggagtgcaatggtgccatctcggttcactggaacctccgcctcccaggttcaagcaattctctgcctcagcctcccgagtagctgggattacagggcgcctgccaccacgcccggctaatttttgtattttcagtaaaaaacgggtttcaccatcttggccangctggtcttcaactcctgaactcgtgatccgcctgcctccgcctcccaaagtgctgggatcacggtgtnanccattctgcaaaggcatttcatattccgtgggtaggttctgaaata

SEQ ID NO: 563980 - DNA, 218 bp, Homo sapiens
ttcacatatgtcactagatcattagctaagtatgtgagcgggaagctcaatttttgggcgatgtgtggaacattaagagtaacattgcgcaagttaagaggattggcatttgtaggaatagtactgtgagcagcgggggaaatatgcaaacctgcgccattgccgacgtgcacttgctccgttgccgtggtagcgctcgcgagatgtgaaggcggtcg

SEQ ID NO: 563981 - DNA, 176 bp, Homo sapiens
taggctcagaccgcgtcagactgggatagtgatgggtcggaaaggcgacgaaggctggattctgaagggctatgctctgggcaggcagcctggccggtcagaatgattgctccctgtgaccggtcatctggccgacgactgacagcaacttgtgggcgtctccacatcccggtcga

SEQ ID NO: 563982 - DNA, 103 bp, Homo sapiens
ctgggaattccattattttgttccgttttatggctgagtagtattccaaaaaacctatccacataccaaacaccacctgttccataaaaactactgaaataat

SEQ ID NO: 563983 - DNA, 275 bp, Homo sapiens
tggttgaatgagtaggctgatggttatgataaataactagtatggggacgcggaggttgcagtgacccaggatcaccctagcctgggtgacagtgtgagactcaaaaaaaaaagaagaaaatgaacttttacctctgagagctccaggaagcggtgtgcattggtcatgatccaatgcaccccgcttccaaggctataacacaagcagagccccgaggaggcggaatatgctaatggattttatgtgtgtgtgagtatggagggaactggagagc

SEQ ID NO: 563984 - DNA, 370 bp, Homo sapiens
  misc_feature (5)..(5): n is a, c, g, or t
  misc_feature (18)..(18): n is a, c, g, or t
  misc_feature (65)..(65): n is a, c, g, or t
  misc_feature (83)..(83): n is a, c, g, or t
ccgtnaacccccaggccnggtatgccggtggtgtgaaccgtagcctcactgcagtcctcgaaacnccccgggttcaaagcgancccttcccaccttcagccctccccaagtagcctggtacctacaggtgtgtgcccacgacacccggcctaagtttttgaaatttattttttgtagagacaggattttcctatgttgcccaggctggtttcaaactccctggccgtaagcgatttttccggcctcccaaaacgttgcgattataagtgtgagccactgcacctggccccacattttctttatccatttgtacattgatggacacttaagatgattccatatctttgctattgtgaatagtgcttcaata

SEQ ID NO: 563985 - DNA, 199 bp, Homo sapiens
gcagtgtggtcaatcagaactgtaaacaccagtctacaccacagccacagacactcgtatcttagccgcgttgtacctacgccacagctcacagcaatgcagatccttaacccactgagcagagccggggattgaacccacctcctcatggatgagcatacggagttcccaggctaggggtccaatcagaactgcattg

SEQ ID NO: 563986 - DNA, 628 bp, Homo sapiens
cacgagctgtgctcattcttagagactgcgtctctcaaacatatcgcgttagccatgagggagtcggagccctgtgtccgaatggacccgcctgcggtctgcatcagcctctgtgaaaccacagcagtgatgccagctgggcacgtgaggaccttcccacacacccacacgatgccacaggtcaaggggctgtgcctgactagggagcccttccatatggcttcctgggccgggatagaagaggggaggtaagtctgggggctatgaagccgggcccccacaccctgtgtgaagtcagcttgacctaagtcttgagccttatacagcaagggacttgacagagccaagggtccctggaacgtaaggaggggctgtgggtcacttcagaccgggcctcccagaacaccaggcccgtgtgggtggcaccctgaggtcaggggatactaagggtgtgcttccagagacggtgtgttcagagggaggaacggccccgcttccagatacccggccccggctgtgactggcctgtgtcacccctggtgtgtgccataccccgtgtgtgcactaactgtaccgcacacggcatttaaagatgaaggcacaccgctgtgaaaatcctggccgccgt

SEQ ID NO: 563987 - DNA, 111 bp, Homo sapiens
ggtgaagcttctcccctgtgcttacttctaagaattttatagttagaggtcttagatccattttgaattaatttgggtatgtagtgttaggaaagagtccaacttcattct

SEQ ID NO: 563988 - DNA, 143 bp, Homo sapiens
cctttacagcttaaagttcatatagtaccagacaatgctgcatctgagaatttccatatgcatgaagcctattccacatgctgtaccagagtgcgggaggcatgccaggaggaatgcctgggggatttgctggtggaagggag

SEQ ID NO: 563989 - DNA, 1202 bp, Homo sapiens
tgggtaaatgcatgacttgtgtgtgatgagagaatgggagacagagtccctgggctcctctactggtttaacaacatgggctttcttattttggtttggaattggttaattcacagaatagcacaaactacaattaaaactaagcacaaagccattcttaagctcattgtggggaaacggggttgacacttcaggtgtggattgaggaagacagaattagaggtgattaggaagcgttcgtggcagattacctcctttgtgccacgtgcttggtgttgattagacaggcccaggtgagccgcggggcacattgcgtggccgcttccttcccttcagaaaaaaggcaggtggcctaaactcctttttataaattgactttggcctcgaatgcgtggtgggggacgtggcgtgggcgtgcgtgcgaggcccgtgtgttgttcgtgttcgagcccaacctttcacattcttgttcacgtttctccacagcgggggagaagacgcagttccggccccaggggtcccccggtttcctttgtggaggcagcagttcccccgcaggggcgtgacagtctggcagtacagagtgaatgggatctgtgatctcgcccttacttccccgtggtcatagaaggctgcagggggtgggacttggttcacaaggcttcgcttggaaaaaccttctggagaggtccatctacggactggtatccctggagaacataaaaaaggcctggtcattttccaaaaccacctggctttgtgggaccccttaactggggtttctcccaacacattatttggtccaggtttttaccatccggtcgtaccattaagcttggccaaacaggcattttgcccagaaaaaggccgacagtagagagagattgaagccgtcccgtggcagaaaacaccaagttgggtcttctgagggggctttgcccaaagccaagaaaacccagaaaccgtttgtgactaacaccggggacccatctccgggggaaaacacactgtacaatgtggcgctctgacaccacctttttttattgccccacttgagttgtggcggcagagataaaatttcccccctaaagggagggaaatcacacggagttatgtgagcgaaaaaagaatatcaacacaagatgatcctaagaggagtagaacaatataagagaaaacagtaagacaatcatcatatagag

SEQ ID NO: 563990 - DNA, 234 bp, Homo sapiens
gtgtgtgtataacttgccctcgtttgggctccgtttcacttgtgctctcagttctggtcctcaccatcatgacatgtacatcatacacaggacagatgtacatatgcttcaggcaacaaccagagtttggggcgctattgcgttgacacccgtgccaccgtgtgtgttccttcagtactagtactgtgtcggcgagcctcgcctataatatatgatttcaggcccaataggggg

SEQ ID NO: 563991 - DNA, 133 bp, Homo sapiens
gcaagagatgcggaccacccagcttggccctggcgcttccaaatgaccaaggagggagtctcgacgaatgccgtaatgtaaaacgtggtaactcaggacggacgctcggagtggaattgggcctggggataaa

SEQ ID NO: 563992 - DNA, 1490 bp, Homo sapiens
ggagtggggtcttagctgcagtcggagcctggtggagacagatgcatcactgtaaggcgataccgctccacctggaaccatgacccgtacctgacgctaccgatggaagaggagtgaggtcctacaggcgggaacatgaagggagactgcgatacccgatcgccgaagggaggccatcccccaaggaagatctcggtacccagagagccatgaccggctgagcctaccagaggaggtaccgggagcgccgagacggtcgatagcatagccggatgtgaagcagcggagcccaatccgttaggagaggactagctatggagccttcaggtgctcgctgatgcgatcggagagtcgcgggaaagggggccgataaccggacccgacaccgcatgcccaccagctgccacaaagcgccgagagcaggatcatgtagcaggcgcactccatcggagagaggccaatcagacgcggtacaagcgcagcgaggcccggcacgatgtggcacagcctagcacgacaggcgacggggtcaagcactaggggtggtaacacgagcatacgggacgaatatggacttccaagagacggacgactagctggagaactaggtgggagggaaaccatgggggatgaaaaggcaaacaatcagggagccacaccgctgagacggaagatggctatggaacacagggcgccaagcaagacgcgcaacgatccaacacgggacttcggccgcgcgtggacaatgcattgagtagcggatacaacgtagtgcgtgccaaatgaggtcaccccgcgcgaaaggggcactggcacagcggggacgacagagaacagcgtcctaggcggactggcagtaggaacagaaccaaggtcagcgggacaagacagggggtacacagcagcacacgatgacaacggagtaccagtggaaggtgggagtcttggaaaggaacacggaccgagacgaaaccagaaagaaggcaaacagagatgcgccaacacatagatgacacacatcgacacacaatagggcagccataccggtggggcgagaaggaccacacaccagaaaatggaaaggagatagctgagtgacaagcgcaacacacatgaacagacgacccaaagcagagtcaaccagccactagcacagacacggacgacgcggacaccgaaagtggcagcatgacagcagacgatgaagacgccagcggcaccacatagagaaaatagcaagggacaatgaaccaaacgacaagaaggagaccacgcaaaagcagaaactgggacagccacagccacagacaaaccacagacagggacaaactagcaggaggagagggacagacagccaaagacagaagagacaaacagagcagacgagaagaagacaggaagaggaaaggaacacagcagaggcacacgaggaggcatagcacaacgaagagaggaggaaaagaaagcgggacagagcacaggaccacaca

SEQ ID NO: 563993 - DNA, 189 bp, Homo sapiens
gaatattagtccacgatccccatgtgtcatgggagggacccaatgagagataattgaatcatggtggaggttacccccattcttttctcatgatcgtgaacgagttcccacaagatctgatggttttataatgggctttccccctttgctcagcacttttctttcctgctaccctagcgacagcaggca

SEQ ID NO: 563994 - DNA, 89 bp, Homo sapiens
aaacggggtggagggcagtcccagccccctgcccctttgaggtcctggggtaaagtaattttcctttttcagcccccatgactttttca

SEQ ID NO: 563995 - DNA, 893 bp, Homo sapiens
tgtatatgtaggtggttttgacggcacccggggcaacagttcccaaaaggcctgagccgccagaaccaaacatcaaacagaaactagcagggacattctggtactgggtcctactatgaaattcaaacatgatttcaaatctgtcacaatatttgaactggctatgagctgcttcagggtaacctgggggcaatatgcccttttcagttcaccactggcttagctttgggcaaagatgttggaaaccatatgttacagaagaataagctgtagtcactaagttcttactctactatctggcgttcaaaatggccctaacgggcaagactggctggtggtgggatctgggatttcagaaatgggcgaatctgggcacttaaaatacataaatcaagagagtattcagtcaaagtgcaacaagtacaccgatggaagaacgggggacagatttttacaaagttcagagaggctgagatgccctttcattcggggtcatcagaagataatctggcaacgatggaatgccagaagtgtgggcttaaatttttcttcataagcatgtgctagaaatgagtcaaaagcagatgctaggattaacagttgagctctctaactcatttagaattctaaggaagtggtgaaaattccagttcagaacagctgcatttgcttggagtgacttctgacaacccttttacaacaggcaaaactaacaggcaggttcatcctaggcatggaatctaaccaaaaaagggtccgatggactccagggcgggaggttttacaagtcccatttgtaggccctagcaaaaaggtctgggctttggaccccgcaacaatcgatagcgcgacttcatttccagttggaacttgggtgaaacgtgactataatg

SEQ ID NO: 563996 - DNA, 509 bp, Homo sapiens
  misc_feature (105)..(105): n is a, c, g, or t
ccaaaccttttataataccgtttgctaaccatggagtgtccagttatttcagctgagcccagggacttgtttaccacccagatcactttggctaaaccattccanggagcttacccatatggagtgatttaaaattgctgttggccagaggacgcttaaaatcattttaacaggattttaaaacttgtttgttgagaatgctactgtggacactcttgtcttttaaaatgttttagcccttcctgtggagtggttggatccccttcaggtagggtcccagtctttacaaatagagcctgtgaaggccagtagtgaaaattactgtgtttgggctggggagatggctcagcagtttacactgactgctcttccgaaggtcctgagttcaaatcccagcaaccacatggtggctcacaaccatccctaatgaaatctgactccctcttctggtgtgtctgaagacagctacagtgtacttacatataataataaatgaatcttgaggccgg

SEQ ID NO: 563997 - DNA, 375 bp, Homo sapiens
ttatgcacgtgtcagtgctgccacgtacacactgtggggatggtgtgggtaatataacaaggatcacttccccttggtcacttactgcctcaatggcaagggtgtccacttgcgtaggacaggaccgcctatactcacgccccagacaatccacaagagctgcttctacaggcagtgtgaaacggaggtgcactaacacttccaagattcgtcagatccaagcgggacagcacactgcgtgtgcaccttcccactgtttagcatccataaaacctacgcttccttgaccaacacactgctctggcatggaactgttctcagcaaatggaacacccaagcaaaccctacaatactggttcttcatccacaggtggt

SEQ ID NO: 563998 - DNA, 1363 bp, Homo sapiens
  misc_feature (409)..(409): n is a, c, g, or t
gggcagcgtgggtgagcgcgggtggcaccgtgacccagtccatctggggcctccaccacttggagataccgagctcaggaggccagatggtcaggggtcgctgacctacctctgagccgcagatgtcacgagtagcggcataggtctgtcgtggatggagagtgttcagtgatgacagactcagactcagcactcaccgagacatcaacactcttgcgctaggctcgaatacggcgaggcaccgcatgtcttctcatgtccctcgcaaacacgactagcaccgctcccgagggtgtgccccttgccctattgctccgtgaccactatattgaggggcttgtggctcgtgaggggtggagggacgaggagagggaaaagtcgacctatgggaggttggaaatgcgacgtnagagagagtgagaacgtgttttggtccgtattgtatataatctaacaagagtggcgcaaagggaatgtgattcactaaggccccgaatgggagagagaatgagagaataaaaatgatagaaaagaaattagaatagaaaatatcaataatgagaaacacaatttggagagatgcgtggtgggcgcagaagcgaaagagattggaggacacaatggtgaaggttcaaaagggaatagtgagagaaatacacaagggaaggacaaacaagatggtcatataccaaagagaagtagagatacagtgtagtagatagagtacaatagaaagagtagcgatatacctttatacagacggagaagaaataattgaggaatgaggaaacaagcacggaactatacggacgacgagacgcagttggaccgctggagactgtgtatgaattatggagacaaccctcaggtgtgcagtgaatatctagtgggggaaccacaacatttcaggaaagaaacattgagtgtagttgcgataccaaccactatgaaaaggaagaagttataaagaagagcacctcttctatgaaaccttatcccgtatggaatacagtaagaaactatcacaaacctatccatgtgtgtgggttcagaaaacaacaataaaacactatgaagaagaaaaaaagaacaaaaacagaaaagagaccccacacacaaaaacgagggatcaaacacaataacataacacaccacaaaaatagagacaagagcggagaaaaccacacgacgaacgaatgaacaaaacacaccaacgcaacggaccaccaacaacaacaacagaaccgaacaagaaccaaacccaatgggagacatcaaaaagaacacaagatacagagacacaacgagaaaaaagcacagacaaaaacaaccaagcagagagaaagctagaaaaaaaagcaca

SEQ ID NO: 563999 - DNA, 407 bp, Homo sapiens
tgtcacttctccaagcagtgttgtgtgatgaggttctattgttgggttggtagcatcatcggggcccaatatacacatctccagatatcggtgtaaatgaagcttgtccaccctttagggataggtaggggaaggtagggctccggggtccaatttgaagtccaaatataaggtgggggggcgagtgtaaagctgggactttatacccagggcttctccagaaatgacagcaagggtcacaccatccttacggggtgcagggacttccttcacttatcagtgcctgggtactgaggctccaccatcttctctgagctcctcaaatcaccccacagtggtaggccaggggctgggctcctctgaagcaggcatctcagtgtgcagaatgcccgggcccgaagtcatcc

SEQ ID NO: 564000 - DNA, 135 bp, Homo sapiens
cttggctttcattattttttgtagtacacccgatattgttcaattagaaattcttttgcatttaatgttgatactgtaagggatgtttcgttccctttaaatgatcacacttgcactctgtcagagttgttgttg

SEQ ID NO: 564001 - DNA, 275 bp, Homo sapiens
agcatgccgagagtctcgttcgttatcggaataagcagacaaatcgctcttggtcgctgtatcagggggcagtggtgtggaatgagagggaggtggagactgctgaggaagcgagtagggaaaaggcatgggaggaggcaaagaagaaggtgggggtgggagcaaggccaggtgctccccgaagtctgaggtctgcctatggcttccctggaatgaatgattcatctctgcccagtcctcaatccacgggtcagggggatagccacgcttgggca

SEQ ID NO: 564002 - DNA, 293 bp, Homo sapiens
gtaaattatgtggattgcgtcacagatttcttaaaatcactggttatcaaagctggaagatatcgtccataaggaaaccaagctgtgcagagattaaatgtttccatgttagttgcgttatagacctggaatccaagtgttttctgactagtagtccatcaagaaaaaaaaaatttaagagggatttttttttaatctaaaatcgctgatagaggttctttagtcatctattttatggaaaattgatttgatttgctaagtcgcaaaattagatattagaaaaccaaaaaaag

SEQ ID NO: 564003 - DNA, 126 bp, Homo sapiens
gcttacagaatcatgggactttagaagagggaggacagaggccttttcgcactaacgcttttgtggggttctgggcttttgtatctctgtaaacaaatatccccctaagggctctctggctgtgga

SEQ ID NO: 564004 - DNA, 484 bp, Homo sapiens
tggagggcccgcccggcgccgatcaccggatggccatggaacggtaagctgacggagctgatccgccaggccggtggggtcatacccgaggagcggggcggcgacccgactccgtcgcccttcgtcccgcaccatgacgccacggctcagccgactccgtctcagcccactgtcatcaacgatgacacggttcccatcgatgacatcgaggatccgctggggagcatcgatgtctagggatgagatagaccagcaggtggccgccgagggccatttcatgcagtcggtgtattccctcctggtccgaatgggggtggatccccacggtctggtgggcggctacgatgatgaggagacgggcgggcacgtgtccctcgccatcccctcatctcaggtggggatatccgtggagggtgatcgtccccagcccctcatcgatgccggatggtacatcgtgccgatgcagataggccaactggaggca

SEQ ID NO: 564005 - DNA, 1016 bp, Homo sapiens
gcgtgtgggtgtgtgtggtcccgggggtgtcgactgggtgtgttgatgtggtcagtgggtgggagtgggtgccagggtgggatttggggctgggtgtccacgtgcgcggttacgcggttggctgttgtgatgtcccggctgtggccggggggtgtatcagttgggagggcggggtgtgtggcggccagtggggctgggtggttcggtcggggcggggggcccggactgttgggccaagggggtcgaccgcattgttggcccagaatggggaaagtttgacactttggttgtgagaggcccacggttaggaccgtgttagtacagggtgatgagtgcctaaggcagtggttgatgagcaggagggagagagcaccccgagtaggaggggcacaaaagggggtagtgcccgggtggggcagaggttggcaaagcgggggggggagacgtgtgggagggtaaagccacgggggtgtggccagggagaattggggggtgtaggcgttgaagagtggtgtaagagggtgggtttgcgggaaggggaactttgcggttgttaagaaggtgtttggctgtgtatgagacgagatgcttgtgccaagcgtacgcgcgctggaaaaatgttggcctggaagaaggcactggtgacttggtaacacggtgtcagacgagtccgcttggcatgcgtcacttgcttgccatagctgttacgtcttcccacgcttgagacgcacgggttaagcgttgagaaggtggtatggaaaaggcctgcactgccgtgttcacatttttttgtttgcttctgcctgtccgccctaccgccctagcctgcgctgtgcccgctcaggctcctcccgctcgcttcggtcgctcaacctcttttgttcagtatgtgtaacttgaagctaagtttgtagctaccgtggatatctgactggaggccaccagatacagaatgctgctagttggtttcttaactgaagagcaccacgccactggagcagtgtaaccactgtata

SEQ ID NO: 564006 - DNA, 930 bp, Homo sapiens
  misc_feature (133)..(133): n is a, c, g, or t
  misc_feature (354)..(354): n is a, c, g, or t
  misc_feature (397)..(397): n is a, c, g, or t
  misc_feature (426)..(426): n is a, c, g, or t
  misc_feature (458)..(458): n is a, c, g, or t
  misc_feature (468)..(468): n is a, c, g, or t
  misc_feature (490)..(490): n is a, c, g, or t
  misc_feature (640)..(640): n is a, c, g, or t
  misc_feature (644)..(644): n is a, c, g, or t
  misc_feature (666)..(666): n is a, c, g, or t
  misc_feature (695)..(695): n is a, c, g, or t
  misc_feature (736)..(736): n is a, c, g, or t
  misc_feature (747)..(747): n is a, c, g, or t
  misc_feature (806)..(806): n is a, c, g, or t
  misc_feature (860)..(860): n is a, c, g, or t
  misc_feature (867)..(867): n is a, c, g, or t
  misc_feature (926)..(926): n is a, c, g, or t
gataggggggatggtgtgaggaggacaccccacccatggcgggggggaggacgcagagttccaggagtcacagggcagaaacacgcggggtgggtgggggcgtggccggagtggggaggggctgtgcccccancacctggggagtgggctcccacggcaccaggtggggctagagcgacgaacagtatgtacaggacgagcaatgctcctggagcctcggtgcggggcctggctggggccccattgctagacggcagggcgagctctggaggcacacgaggtctgagtcccgatcttgggcgctgcagggaccggcgagggcgctgtccagggcgaggctggacagcggggggnctttatctgggcccatcaggtggatgagaacggacactgcganccgctcaccacctgggccagggctaggcntatgcgggcaggggccgtccccacactgaatnctgcggtgcngcagaactgcaaggccggcgancctagggcagtgggaacgccccgcaggctgggcttgggtggcctgcgggcacgtgagcgaggtggggcccgtgtcctgataaacggacaggaacaaagaggagacgcaaggtctgggacgcgcacgcgctctggggagcacgcgccaccncagngctgtgctcctagcaagagaanatggggaatcgcaagatgcatctgcaatngtgcagtgaacgagactgcgaggggacgcccggcggcgcanccgccggacangacgaacgtggggcagggcgccctgaagctgcggggtgccgtggggccctggcccaggncgggcacagccctggtccctagttcctgaggggattgtctccacagggcctggncactggnctggccacctccccggctgccctgatccagcagccacactcgtggtgaacacagggcancccc

SEQ ID NO: 564007 - DNA, 980 bp, Homo sapiens
  misc_feature (477)..(477): n is a, c, g, or t
  misc_feature (488)..(488): n is a, c, g, or t
acagaagaaccaccggagtatataggtggattcatgctcatggatggtcatgtgtagaaggcaaggaaagcacctgatggttgtgtagcgactcaagtttaacgtctagatgtggggtgtttgataaattcgggagtacgactattcttttaacagtgggtatgagattgtcgtagttaccatggggaactgcttttcaatcgtgttcatgcatctttggtgtaggtgtgtggtcataggtcttagaatggctttacacgaaacaagtaatgttttggccatccatgaatagtaaggcatactattcattaggactcgactggatcgtaacttattggaaaaggaccgtcatcactactcttatgaggactcgttttaccattgcaaaatcatagggcggtataagagtataagattacgcaagccaagctatgaacaaatgtgtaggaagggcctctcttgcattgcaacactcgngctacactganttatacaatcttttttcgagtccgtctgtaacatagtcctctctgtttaatttcatgaccgtgggaaaatatttgcggttctagagagttcctatggcaaacagtaggcaatcataatttggtacgcatgaactatgaggaccagtgttaaatgtctcctggctaaagggagaatagttttaatggtcgaattcgtatggcaacattgctgtaaaatcagtcattctactttttagacaagagtcggcaagagttgacgtagataggtgtatctatagcatagattgtccataacacttgtaagttagagtttcatggtgaggccgagtgtgatattatctcatttcattaagtctaactgtagttgtaatgtgtgtttcactagcataatgtgctgtacgtgttcaatccgtattggtttaaggtgtgattttattcacatgccagcggaatggcttttgagaactataaggggcggtgagagtagaagta

SEQ ID NO: 564008 - DNA, 665 bp, Homo sapiens
ggtcgctcgctcgctcgctcggctcgctgactcgccggagcgctctgtggcggtcggcggcaggtccggtcgcgagagcgggctctgtgtgaagggggcgaggctatgtctgcggtgtgcagcccggatgggccggcaggggccgggagtaacgggacgtcgccgcggagcttcttcccccggatacagtgcggccgagcggaggccggggcctgccctcctgatcttgaaggatgtcctgctgctgctgcggagccctgccccctgcctgcgcaccggcacctgacgctggagcgaccagcccatgccagaccctggcccgtgcgcgggctgatctaacccagccatggcaaggcgaaatactagcccctctggagcacggagctccttccccaaaagacatgaatgctattggagaactcggagctttgaaagccatcaactcacagctgacttgtggagaccggagatgcccacatcattgtgcaggattgagagctactcattgtaagatgtcagtgagacagacaaacacatgtacaagcatgttctgccagggaggccatccccacgttgctggaggcactttctccaccccagacttccaggactgagccccagcagaactcaggcaaaagccaaggctgctgagggaggagggcccc

SEQ ID NO: 564009 - DNA, 1179 bp, Homo sapiens
ggttatgtcccgggtacactctctggagcggcgtctggcacagctcttgcttgctgcacattttcctcccaactggcagcaaggcaggcccatgcggctggaacgtctggcagctgctggcacaggggctcctggcccagggaggtggtggtggcctgcagccacgcaggcacaccctgtgcgctgctggaggggctcagtgcagccgccggtgcaagcgtgccactgcaaggcaggcatttccgcacagggcacaaactgcatgctcgacatcccaggcaagcaactgtctgcccgtgcagcagcagcagccatccagccacagcactccagcacagcaccatcttcgacagcacagcatctggtccgggcccctaccccagagcagtaccgcaggcatcgccatcccagccagactgcaagtccagacagtgggcacacaagccactgaccccagagagatccattccacggacgacgcatctgatgcaaggagcatgacggcgagctggaggaaccaagacgtggacacgagactgcaggacaggacgcgtggcaggctctggcacgtgacagcagaacgctcgcgtgagcggaacgacgtagggacctagcatgcacccgagacagcatccaggaccgatgcgaggacgacggtgggcactctcagaatcccgggactggatcaagctcagtatccttgcaccgagggtggaaggggggaccagagatgggggctcacttcagacgacgaggagatgacaagctcagcttgggaacagctggagagacaagactcatcaacccatgatggcagagaatgcaggggacacagtcgggacacgggaagcccgcggaccatccctgagccaggacagctggcgaacaggaaggagtgactcggaggtgaacacaaggcagcaggcggaaccacgacgggacgcaggcccggacgaggcaaaaggaagaccgacactgggcgtgcagacgcgcccagagaccagaagaggccagggaaaaaagaaacgaaagagagtgaagaacaagagagcaggaagggaagcataaacaaaagagaaacaagatgaacaaacacgatcgacaggaaccccagcgagagacacacacagcgggcaacgggagacaagaagcggagccaacgagagaacacgaaagaaa

SEQ ID NO: 564010 - DNA, 407 bp, Homo sapiens
  misc_feature (323)..(323): n is a, c, g, or t
tcagcgatccctttctacgtctcatcactggtcatcagagaaatgcaatcaaaaccactatgagatattatctcacaccagttagaatggcaatcattaaaaagtcaggaaacaacaggtgctggagaggatgtggagaaataggaacacttttacactgttcggtgggactgtaaactagttcaaccattgtggaagtcagtgtggcgattcctcagggatctagaactagaaataccatttgacccagccatcccattactgggtatatacccaaaggactataaatcatgctgctataaagacacatgcacacatatgtntattgcggcattattcacaaatagcaaagacttggaaccaaaccaaatgtccaacagtgatgagacgtaaaagggggtaccgag

SEQ ID NO: 564011 - DNA, 253 bp, Homo sapiens
gcggatccttaggtgaatgttgaaatcccacaaaacatattagataggcagaaataacaccatatcattatttcataacagaaataatagaccaaagaaaatacaaaattttgataaatacaggacaagaagaaaattacataacaagagagttagtattagaagaagaaattataaaaaaggacacatatgctctggattaccttgtgggatagtaaacataaatgaagaaacaaacattcaagccgtctag

SEQ ID NO: 564012 - DNA, 110 bp, Homo sapiens
ccttctctggcactcaaattcaggtgactcacatcgacatcacagtacgattactgccgtaactacggtgtagcatacgacatcggtgacctggactgactgtcctgcca

SEQ ID NO: 564013 - DNA, 363 bp, Homo sapiens
ttagatggatggtcggagacagagaatcaggtttgaacagtcataccctcccattagcggcgaactatcatcccaccctgtagcctccgtacacctaaccatcttctccttatcacctagcgggtgtcgtcctctatcttggtgggcatcgatttcatcacgacaattatcaattataaaaccccactgccatatacccaataccaaacgccccatctttcgtctgatccgttcctaatcacagcagtcctacttctccttatctctcccagtcctagctgtttgctttgttatagtattaacagaccgcaacctcaacaccaccttcttcgaccccgccggaggaggagaccccattctata

SEQ ID NO: 564014 - DNA, 86 bp, Homo sapiens
acggccgtgtattactgtgcgagagttctgacgggcacgatagggcttgcctactggggccagggaaccctggtcaccgtctcctc

SEQ ID NO: 564015 - DNA, 107 bp, Homo sapiens
ctccagtactcaagggaacggtgagaactcaacagaggcgaaagcagtagattctaacaatcagtcgaagtccccattggagaaatttatggtcaaactgtgtactc

SEQ ID NO: 564016 - DNA, 504 bp, Homo sapiens
ctctcaaattatactctcaactcttactgatacttcaaatcaacacttcttcaaactttatatgcacaaagtaatcagctggggatcttattaaaatgcagggtctgttttggtacgtcttgactgggaccagcctatcgggatttctactaaactcttaggtgatgctcaagcacactgtccatgaatcatattttgagtagcaaagttttattttattttgttttatttattctatttttcgagacagagtctcactctattgcccaggctggagtgcacgtggcatgatcttggctcactgcaactctgcctcctgggttcaagtgattctcctgcctcagcctcctgagtagctgggattacatgcatgtacaaccatgcctggctaatttttctgtatttttagtagagatggggttttgccatttggccaggctggtcttggactcctgacctcaggtgattcacctgcctcagcctcgcaaagtgctgggattacag

SEQ ID NO: 564017 - DNA, 637 bp, Homo sapiens
  misc_feature (236)..(237): n is a, c, g, or t
  misc_feature (243)..(244): n is a, c, g, or t
  misc_feature (249)..(249): n is a, c, g, or t
  misc_feature (256)..(256): n is a, c, g, or t
  misc_feature (444)..(444): n is a, c, g, or t
  misc_feature (494)..(495): n is a, c, g, or t
  misc_feature (498)..(498): n is a, c, g, or t
  misc_feature (500)..(500): n is a, c, g, or t
  misc_feature (504)..(504): n is a, c, g, or t
  misc_feature (508)..(508): n is a, c, g, or t
  misc_feature (547)..(547): n is a, c, g, or t
  misc_feature (549)..(549): n is a, c, g, or t
  misc_feature (564)..(564): n is a, c, g, or t
  misc_feature (574)..(574): n is a, c, g, or t
  misc_feature (579)..(579): n is a, c, g, or t
  misc_feature (582)..(583): n is a, c, g, or t
  misc_feature (585)..(585): n is a, c, g, or t
  misc_feature (590)..(591): n is a, c, g, or t
  misc_feature (602)..(602): n is a, c, g, or t
gcacgaggagaaaccttaccagcaaacacgatgggcagcaacgttaccaacacgacagatcctcgctccatgaactcccgtgtattcattgggaatctcaacactcttgaggtcaagaaatctgatgtacggctcctcttttgacttggactatgactttcaacgggactattatgataagatgtacagttacccatcacgtgtacctccttcttctactattgctcgggctgtanngccctnnaaacntcagcgngtatcaggaaacacttcacgaaggggcaaaagtggcttcaattctaagagtggacagcggggatcttccaagtctggaaagttgaaaggagatgaccttcaggccattaagaaggagctgacccagattaaacaaaaagtggattctctcctggaaaacctggaaaaaattgtaaaggaacagagcanacaagcagtagagatgaagaatgataagtcagaagaggagcagagcagcnnctncntgangaangatgagactaatgtgaagatggagtctgaggggggtgcngntgactctgctgaggngggggacctnctggntgnngntgatnntgaagatcggngggatgaacacctggagtttatcaaggatgatgac

SEQ ID NO: 564018 - DNA, 1017 bp, Homo sapiens
gcactaaagcaagccctacaggagtccctggtgcaggattctgcagccaccagcgtcgtgtagacatgctccgggacatcatggatgcccagcgtcgccagcgcccttatgtcgtcaccttctgcggcgttaatggagtggggaaatctactaatcttgccaagatttccttctggttgttagagaatggcttcagtgtcctcattgctgcctgtgatacatttcgtgccaggggccgtggagcatactgcgtacacacacccggcgtttgagtgccctacaccctccagaagaaagcatggtggccgaccaatggtgcagtccgtcctgtgaccaagggcgtatggcaaggaatgctgctggcattgccatgtaagccatcagctttctgcacgtaaccaatggctttgacagtggtgctgggtgagacacggcaggccgatgcaaggacaaatgcgcctctgatgactgtccctgggccaaactcattactgtcaatacactctgatgtgggggctgacgtaggagaagccttaagtatgcaatgaagccgtggaccagtggtccagttcaacagagccttggtgacatttctatggctcagacacctcggctcattgatggcattgtacttaccagatttgataccattgatgacaagtaaacgtgagactggagggtggatggggtctgcaagacctgaagctgacggccgcaggaaaacctgggtccatcgactacctggtccgagaggttgacttgaacagcgggctctgtggaagacggccacctatccaaaaagtgggacgcactcgatgaggaacatccagcaagccaaccatatgggggaccgccgaacactgtactgccccaagcaggtgtgggccacaagagcatacagctccacacaatggtcacaacctcgtcgtaacagtcaaggcaccctcaataaaggtgaggcacaccagccgcgggaaaaaccacataggcaacaagcgacacacccacacttgcgca

SEQ ID NO: 564019 - DNA, 670 bp, Homo sapiens
agcattgcagttccccaagccacgcttctggcagagatgccggggtgccaatgcccagcactgcagagcccagctcgagcccccaggaccctcccaatgcctgttgctgcgcacatgtgaaatgcatgcagccacaaatgggcaaatgagcctgccacctgacggagtgcagacaagcccaatggcatgaaactggtccccctcagccactgggcagagttctttcctgatccactggccctccctggaaaagtctctgagctgctcctccagcttccctgaaaccagtggcctggagttagatgtgtgcctcttgcatgccagcagctgacacctcttctgccaatggcctgcctggggtgcatgcttggagcttccagcccccagcaacagggaccatatggaaggctcatgccttgcctgtgggaatgggccgaacccacatgacaaagagttgactccctgccctccttccgggtctccaccctgcctctggagtcacaccacccctgacccaaacaccaatgggcggggccagccacctgtggacagtgctctctcggtgacttgccacctgtaggggaaaccaaagggaaggaccctgccccagcccagcctccccagctaggacacagaacgtgggcagagactttaccaagccatccccagc

SEQ ID NO: 564020 - DNA, 419 bp, Homo sapiens
ctggtgtcctccagctatcatccctcttactctccagatctacacttgccctgggatcactaaccttttcactgtcaccatatttttgccttttccataatatcacatagatggaatcatacacagccttttcaaattcacttctttcacttaccaattgacatctaagttttctccatttctatgtggcttggtacctcatttctttatatctctgaataatacctcatcatatggatgtaccacagtttatctatccattcacttattgaaagacatctcggctatttggaaattaaaaataaagctgctgtggacatttgtgtacgggtttttgcgtggacctacatttccaattcatttaggtaaatatcaaaaaacgcattttaaaaatttaataacaaagttaacacttgatt

SEQ ID NO: 564021 - DNA, 138 bp, Homo sapiens
ctgttacgcgctaacgcagctgacctaaggcgagatcagggagtacagacacctagcgtggcgcaaaatggcagaagctcgcttgatcttgattttcagtacgaatacagacacgtgaaagcgtgtgcctcacgatcc

SEQ ID NO: 564022 - DNA, 481 bp, Homo sapiens
  misc_feature (1)..(1): n is a, c, g, or t
  misc_feature (11)..(11): n is a, c, g, or t
natatagttantccttttgtaagagtgacctataaactgttttgaaactggcttttttaaacataacaatatatgtgagcacattttcccacatcccccaaatatttttgaaaaatatttccttttaaaatatcctgccataagtttttgtaccccattataatttggctctggaagaagttccaagatatgcccaaatagtcttggcacaatggctcacacctgtaattctgacacttttgggggccgaggtaggaggatcacttgaggccaggagttcgagaccagcttggtcaacctagcaagagctatttccacaaaaaagtgaaaaaactacccgggcgtggtaacactcccatagtcctagctacttaggaggctgaggtcaaaggattgcttgagcccaggagtttgaggctgcagtgagctatggtcgcaccactgcactccagcctgggtgacagagcaagaccttgtctct

SEQ ID NO: 564023 - DNA, 1411 bp, Homo sapiens
  misc_feature (352)..(352): n is a, c, g, or t
  misc_feature (359)..(359): n is a, c, g, or t
  misc_feature (371)..(371): n is a, c, g, or t
  misc_feature (384)..(385): n is a, c, g, or t
  misc_feature (393)..(393): n is a, c, g, or t
  misc_feature (411)..(411): n is a, c, g, or t
  misc_feature (418)..(418): n is a, c, g, or t
  misc_feature (554)..(554): n is a, c, g, or t
  misc_feature (556)..(556): n is a, c, g, or t
  misc_feature (558)..(558): n is a, c, g, or t
  misc_feature (609)..(609): n is a, c, g, or t
  misc_feature (641)..(641): n is a, c, g, or t
  misc_feature (715)..(715): n is a, c, g, or t
  misc_feature (736)..(736): n is a, c, g, or t
  misc_feature (802)..(802): n is a, c, g, or t
  misc_feature (1034)..(1034): n is a, c, g, or t
  misc_feature (1047)..(1047): n is a, c, g, or t
  misc_feature (1101)..(1101): n is a, c, g, or t
gcatgatcacccccgaaatactaggatggtagcccgcatacgatgaatcgtaaatcgactttctcgagctctgataggtcagatatatatgctgagtgcactaggaagtgtaggactcatgtattcatgctaggttccacgggaagatacaggtggtaattgcagacgatatgcctcccggcagagtctcatcgcctagtcctagacagcattggtagtagcatatgcattgatccatagtcaacctcggagtgaacatatccagggctatgtgatgcgtgtataatttcaatgccaaggtctttcgagtcatgtgcagaaaacctatcagaagaacagtgcaaggaacgtnatccacntgtcttctaggnttccgagtggatnnttcgcaantcactctatgctcagaantcgagcnttggatggcacagcaggttcttcagtctctttgtactttgcttgtgagtgtgcagttaactcctaggctactctaacttgcccttccacggaccacgggtggaatccctaggtattatacatattcgagaaggagnananatacattccacatgcgttccattgcacacgtagcactgcacatacgatatncaaatagtacgtaaccaaaactatgcgtctanagacacccaactaatcctcaattctatgcgaatacataacttaatacttctgacgtaacaagggtttctcattntcatactcggactacgcggcnttactctattgttgtcccaaggacgtatgcgtccctttaagatggttgttcataccttcacttatntagtaagattccaaataggccataagagaggtggttcaagcaacgtgttcattcccggtgctttaataaacaaattgatacattataccaggaaccattccctgtggacgtaataaccaatgtcacaaaccaatcacgggggctatgtaaagtcactaaacttctcgaacgtgggggggaggccctcgagaaagccccatattaacgtgggcccgcaataaaggagaggacncggggtgtcacanaggtcacacggtagcgacgcggacaggaatatggcgaactcgttccgtagaacntggggtgactacgccacgtggcggtttgtcgccaaacgataatgtacgtccgctgggtatgtctaagtcccccctttttggctggggtgagagcaaacaatgctatgccctaacagaacgacgctatccacgtagaagcgcgcacccaacgcgactgtgagcaaatcacaccgtgcataatagaggaacaggcgtcacatatgaacccggcgttgtgaaccaagagcgcgggggacacacatacaaggaaccgacgtgtagtgcgtgcacgctataccgacgcggagcacgtgcgtacccatggggttcc

SEQ ID NO: 564024 - DNA, 405 bp, Homo sapiens
  misc_feature (11)..(11): n is a, c, g, or t
  misc_feature (34)..(34): n is a, c, g, or t
  misc_feature (41)..(41): n is a, c, g, or t
  misc_feature (61)..(61): n is a, c, g, or t
  misc_feature (215)..(215): n is a, c, g, or t
  misc_feature (257)..(257): n is a, c, g, or t
ggggcaacgcnacaaggccaacgcgtacaagtancctcagnttgtcccaggggcacctggncggacggagagtacaataaattttattcttttaaaatccaggcctttctgtgaccctgaagcagcccctcctcggccccaggcttccccaaacctcttagctgcctccatgggccctgccaacgctgggtgctgctggtgcccagagaggcttnacccccaagaaggtagcgggttgaggacccggggggcctcangcctcgtgtgggtgtggatcagggcagcctgcctggaggaggaggcctcaaaagctgttaggggggtgttgctggaagaggcaaaggctggccagaatcctccctcccatggtgatgaccatgtctgccaacgtctggccctggttgg

SEQ ID NO: 564025 - DNA, 365 bp, Homo sapiens
gatctgagagccatctcatgtagtcttccatgaccctgcaattgtttggtctgcctcagcactctccaatttccaggtccgatctagagctgctgctcgatcactcaggcatactaatggactcatttagactgggtccacgctgcagtccatgaccaataacagactaccccagatactgcagtctcacgcagtgcttagtaaatgagacctctggaactaagttatcccttacctgaggcttcttcagaaagtcttcttttctgaccagttgatgtgaaagagggagcatgtgacacagccagtatggtggagtgctcgggtcatcctgtttccaataaaccgcctgaatttcaaaaaaaaaa

SEQ ID NO: 564026 - DNA, 378 bp, Homo sapiens
actgctaattacagaaggaactccttgtcacatagaacatcatttgagtctgatcccaaacatttgaagagacgagttatagcctgtattgcttaagaaacttcattacagttatgtttatctggtcttgtgcgtgtgtgtggtctgatcacaggtttgctgtagcgcggttcagctggctgaagccagagggtcgtcgctggtttagtaggcacgtgcactataacactgggccgaaaattgaagaacaggttgcctgggccctgacaaaatttccttgccttcagcttcagccccaggtaggagtaatttcatttttctctgtgtaataagataaatcacagaaactgaagcactgtggtaatcagggtgttaacg

SEQ ID NO: 564027 - DNA, 837 bp, Homo sapiens
gagtagatcccgctgtatagacaggagaacgaaaagaactatcttcatctgagagaggctagaatgttttcagctaggaacaaatcttcctggtcgaaagttagtaggatatgcctgctctttggcctgatgaccaattttaacttagagctttgtcttttaaatttggtctgccccaagtttggggaaattttcatatttcaattccaagcttatttgggcagagataggacaggtcatttccatgtatgcgtaataatcctgcaaagtacaggtacttggtctaagaaacatgggcaagcaggttacacggttcggtaaacttggaaatatatggtctaacggtttaagcagaatgggacaaagactaacgatcggttaacaaattaacaacttttccttctttatacctatcaggaccattggacagtgtgggggagttgggtcatagggtcactcggagctctactggatcacaaggttcgaaattaatggagggacaaccatttgtgacaggcacctacagctctaagagtgtacacactcacccttaaacaacgttaacctccataaaaaggggtgttacccgagtgtgaaccatcgtgtcacagcagcgcgctaaacaaacctgcgaacgcttctcgtgcgcaccccctggatagtgctcattcaacgggaagcaaacttgagggcacaccttgtggaacactgttccgcagttattcaccagggtataccctcttctacccttgggcaatcacacaacacacaaaggacatttgttaccacgtgggagaccacagaggtgggccaccttgtaattaacccagaacgtat

SEQ ID NO: 564028 - DNA, 224 bp, Homo sapiens
gaaagcgagtgggaggaggagaaggactgagccagggcaggtataggtgtgcctgtgccatcccctctgatccccatgggctcatagtcagcaaggggtggagagcagcttctctttcctcactcaggctggcagaggacataaaattgtccgctacaatttttgcaggatgccagaaggtgggactccctgcagcctcctaggattacctagaaggataatct

SEQ ID NO: 564029 - DNA, 408 bp, Homo sapiens
cacgaggcctcgtgccgaagcccttccagtagggctcgcgcagctcgcgcttcagcaccttgccggcgcccgagagcggcagcggcgtgtcgcggaagtcgatgctgcgcggacacttgtaccccgcgatctggctgcggcagtgctccatgacggcatcggccgtgagcgagacgccgcgcttgggcacgatgatggcgtgcacgcgctcgccccagcgttcgtcgggcacgccgatcacggcgacctcgctcacgccggccagcagcgagatcgcgttctcgacctcggccgagtagacgttctcgccgcccgagatgatcatgtccttcagccggtcgacgatgtagacgaacccttcgtcgtccatgtaggcgccgtcgcccgagtagtaccagccgtccttca

SEQ ID NO: 564030 - DNA, 508 bp, Homo sapiens
  misc_feature (1)..(1): n is a, c, g, or t
ngcacgagccaaacttaagtgtagagggaagggattgattcagaacctgaacgtaagcgtcaaatttttcgaatagtaatgactgttttaggtttaactctagccacagcttttcaaaatttgatttcgacataggcaatgaagagttcgtcaacaccgaccgcgagactatcttttcaaagtgcattattggttttcatattgattatatcgaaaatggccaacgacaaaacaacaatgacacacactccccatatcgctacaggagtacggtggcaatgacggggatgattcggaatctaatgttgctgtacctacaccaaacacgagtggtaacgggtattgccatgttgataaacaccataaaagtgtcgacatcttattatctcaagtatgcatgagaaaattgattgtagcgttcataagcacatcagcgacatagagtacgaatttatgacagtatgtcaaaaatgaaagggaaaataatagtattattatgtagaattat

SEQ ID NO: 564031 - DNA, 560 bp, Homo sapiens
agcgggtggaagggccagccacggccagacgcgtgagtcgcccgagccgggcccgatacagccccggcgaccgcccgtctgcccgtctcgccgcagatggtagcgctgggtgggtgcgcgtggacccgggcgtctcgagccgtcgcggctggggcgctgctcggctgtggtgcgctacagtactacccacgagcaggactgtggccttgggatgctgcgttaatttcgcattgccactttgctcgtctgtttggtttgcgttcgagtgctcgcgagtgacggatgcgcaggtcatctcacctctcagagaacgctagaggcagaggattcacagctaccaacggcgggacgtttgcagcacgagtgccacacctcgtcctgagagtgcgaccatagcagagaccactgctggcgcagagacgtagctgtttttcgcagcccgtccccgaaactgcagttcttcaggctatcacctacttgacgtttgatgttgagattcaccaactgacgatacgggacgtcccagcgtctagggtagagggaagcgcgaagaagtgggg

SEQ ID NO: 564032 - DNA, 291 bp, Homo sapiens
acccaaggaaatgagggggaagtacaaacccgtttttaaacccaatgcccaggattaaggcccccggtccctgtgggttggggtgatggtgtttcaccagtggggaaattggaatgggattactttggcccagggaagcccctggttttgtccctggaaactttggaaatccttttgcattaaaaggcctttacccccctgtgtaaaaggatgtgggaaaggagggtttgaagttgagctgctaaatgaaaatccctgctttgttggtcaataaaacgcttcctaatagca

SEQ ID NO: 564033 - DNA, 619 bp, Homo sapiens
agcgggctgtggctgcgccgggctgcgacactgcagtgtctacgcgggcgggccgggacaaggaggcgtggacgggtcgcatacgttcgtcccctcgcattgggcccgacgctgcgcaaggatccccgggcggggcgcgggcgtgaacgctctggggctcagccaggcctggcgggccgaggcccggagaacccggaatccggggtacggtttgacacagggcgcatatcttcaaagcactagtactcctacaatgtcacctgatacagaatcgttgtgggaaagactggggacacagcttgtaacatttgccaccctcagaagctgctgttcctgtgtcaaccaccttagcctcttgatcgaggaaagattctcgctgaagtctgtaattctacttttgagtactttatgaataaacacgtgtcttcaaaaccatctaccatgaagctaaaacattaccatcaaccctattctataatattttatacaattttctaatactcagcttatactatttttaaccatacaatcccgtttaatttttctccgaagtcaaaacaagacaaatcaaccgattaaagcaaaggcctgtaaaattccaaaaactgattcctggata

SEQ ID NO: 564034 - DNA, 1268 bp, Homo sapiens
  misc_feature (122)..(122): n is a, c, g, or t
  misc_feature (301)..(301): n is a, c, g, or t
gagcaaagcgctgagggagctcggtacgccgccggcctcggacccggcagtctcgcgcccggcgtcgcccgctgcccagagaagccatggagatcatggcagtgtgaccggtcctggccagntgcacggcacggcaccggctaggcgcattcggcacgaagtgctgagtcgtcgtacgtgtctcgagaatgcagtaatcacttcaaggccgtactgactccaacagagtctctgtatctgatgcagttctgatgcgctgtgcgtcgtgaccctgaggagacccactggcattccctcaggngcataccttctgaggaggtatggaggaaggaggaggcaaaacagattcgcagaatcctgcatagcaaagctcgtgccactcagtaacagactctacggtgcaggattgcagatgtgctcgctcgctcccacccacaccctagctggttaacacggtacggcatggcgacggtaggtggctgactacagacggctgacggtcctacagcggagggatacgtatgcggcagtccgtatgttaggaatacggattataccgaaaaggatttatccacgaacaagtgtgcccgactattaagccagacacgccatttgacaaagaatgtgctgtcttgtcacgattctggatgcatcaatgaggagagagtgcatgatctgctgatgccatgtttgcaggtctccttttatcgccaggcagcagacctgtgagtccagcccagggggacttcgcacgggggataaacgttcttagtgttgactctgacttcaagggcgcaggccggcactgtcctaatgcttagacccccttgaaagtgtgggcaaacctcagctggttcgcggcggacccgggacgggcggagccctatagggaagagaaacttgtctttgcagaacccactcgggaacccacccggatgaggcccaggccaccccgggcccaaggacccacggagaccccctggtcgcaaacattcgcgggggcgggctcgcagccggggaccagccgcactcggagagaatcccccatgggggagagccccccgggggaaacaccgaacgacagataccgcgggggaaacccctcggagaacgccctcccatctacaacgcccctcgtggccacacctgtggcgacccacccggcaccagctctcctgcgcccaccaacgcccgcactggcgcgacacaggcgcccgccactaccggcgacgagactcccacatacacaggcaccagcggacccccgc

SEQ ID NO: 564035 - DNA, 456 bp, Homo sapiens
  misc_feature (5)..(5): n is a, c, g, or t
tcatnactggcatttcagaatgtcataccgttagctctgtgaaatgtcctccccgaaaagttacaacgcacatgattactgaatgcttgacaacttaaaaattaaatacatcaatcatacctgttacagatcccgtataattttcataaagaaaccaatatattggccgggcgtggtggctcatgcctgttatcccagcactttgggaagccatggcgggtggatcaggaggtcaggatatcgacaccatcctggctaacacggtgaaacctcgtctctactaaaaatacaaaaaattagctgagcatgatggcaggcgcctgtattcccagctactcgggaggctgaggcaggagaatggtgtgaacctgggaggccgagcttgcagtgtgctgagatcatgccactgcactcagcctgggtgacagagcgagactccatctcaaaaaaaaaaaa

SEQ ID NO: 564036 - DNA, 892 bp, Homo sapiens
gctcgacttagcttgttcgtgagtctagcagcgcattgcgccgggtgggcccagtcgctgagcctgtcgcagcgaggtgcggcggtcagcagaagagtgcaaaccgagtcgggtggctcagtgatccaccgaccgttccccaggcagagcgcccacaaataccagttgcgactcctcagcgatctcgccaccaattcaagactcgtaggacactgacggtaggaagagcggacaggtgcggtcgagagcgtctcagacataagcctgatctttcatctagcaagttgattctataatacgaaagcattcactgcgtagtcctaccatgaagcggacagtttggagtctagatgtgggagagctagatcatcaaaggctcaagcttggggaggatattcggcgaattcctattcataatgaagatagttacttatgatgaacttagtgctaagtggaatgcgaacgcagttttgcgaccaggcaacacacttctcttgaggttacatgaatggacatgtgagctgactcaacagctcctcaagagcagtgcaaggattgcgaggaaccttacttagcgaagtctttgccgcactcagtgtccttgacccttttccctctagcgacattacaaagtctcggggtcatgtggaatgaccttgcacctaggtttggatccaatttcaagttctggtctacaataggagccacgggcgcaaggaaccactctttgtagaatcgaacgattccctgggttgagaagatgagtcctgcctggccgggagggaagacggggacatacgtacacttgttccgaagggttaggcagggtggacctccggtgggtacttgggggaatcaagcctgtgggacatcgcacttatgggagacacgc

SEQ ID NO: 564037 - DNA, 117 bp, Homo sapiens
accagatcccgaacctacctgctcctccgagcatttgagaaggatcgctttacaggcattgccaccagggaagagctggccagagagacgggcaccccggagtccaggattcagatc

SEQ ID NO: 564038 - DNA, 399 bp, Homo sapiens
  misc_feature (265)..(265): n is a, c, g, or t
gtgtgtacgagataagccccattttcccaatctttattatgcagttaacttcctatctccattcttacccaccaccatccactctccaaagggcagagtgaccttgttaaaaacaaagctgatgtcgctcctccgcttaggatctgaaaagctcacaatcactcagagtcctgagcacacgattcaagtcctttattcatcatcctgtggccccagccagcctcctgctcatcacagccactcccttttctgccagaggaccatnccaagcactgacctctcagaacataccatgctctgtccaacctccacaccaagcactctccacctggaacattctcctccccttcccttcctccctcttccttatctcgtacacacgggatcctcatagagtca

SEQ ID NO: 564039 - DNA, 105 bp, Homo sapiens
tgagacagatgattttatcttggggactgacccttcagcgtcaaagaaatacatatatactgtatccgccaaagtttgtgatgcctgcatagacgcttacttgta

SEQ ID NO: 564040 - DNA, 165 bp, Homo sapiens
tccaaacaccgcaatctaacccgcatctctaataaaatacaaaatatgccggggtggtggcacatagctgtaatcccagctactcaggaggctgaggcaggagaatttgcttgaaccccaggaggcagaggtttgcagttgagccgaagattgcattctttgtac

SEQ ID NO: 564041 - DNA, 461 bp, Homo sapiens
actgtccgttgaattgggccatgaactatccagaaccagactagctcctcggaaatgcattgccttcgatattgctcccctttgcctagagccctctaactgccactcaggattcctctcaaacttgggcactcttcttactgaaatagtctctcaactttcctttcccacttgttaacagcaccagccttaaatattccaactgggttttcagcttttcttgtatttcagtgtttcttaccctggcttcacatttgagaaatcagacacttgggccttaccttcaaagattggtctcattggcctagagtgtcctgattattagcatatagttttaaagctccccaggtaattctttataatgcaaagctggggttaaaaaccacagcttccttcctgcagcttttcccatcctattcctggagtgggtgtcagcccttttctactgacaaaggcctaat

SEQ ID NO: 564042 - DNA, 636 bp, Homo sapiens
  misc_feature (278)..(278): n is a, c, g, or t
aaccattacagggagctgggacacttaacagatgcaagtgctactgatgtttcatgcgaatcttttttagcataaaattttctactcttttgtttttgtgtttgttctttaaagtcaggtccaattgtaaaaacagcatgctttctgaaattagggcccaattaataatcagcaagaattgatcgttccagttcccacttggaggcctttcatccctcgggtgtgctatggatggcttctaacaaaaactacaccatgtgattcctgagtcgcgcaanactctttccccacacagatataggagggatatcccaccggggataaatagcgcggccgtggtccgctgggaggaacatgcgggtgggtccatgttgcccttccatagcctaatccctgggcattgttttccactgaggtggggggtggggtgtactagttacacatcttcaacagaccccctctagaaatttttcagatgcttctgggagacacccaaagggtgaagctatttatctgtagtaaactatttatctggttttgaaatattaaaccctggatcagtcctttgatcagtataatttctttaagttactttgtcagaggcacaaaagggtttaaacctgattcataatcaat

SEQ ID NO: 564043 - DNA, 178 bp, Homo sapiens
  misc_feature (56)..(56): n is a, c, g, or t
  misc_feature (59)..(59): n is a, c, g, or t
  misc_feature (92)..(92): n is a, c, g, or t
cctgtgcaacctgctgcccctgccagggataaagcatctcaaaacgggtcttcagnaancctgaccctggaggacatcaatgccatcctgcnggtgcctaccgccagggtccccctgcatccccgactgccagcccagagcccccgcctcctgaataaagaccttcctttgctaccgt

SEQ ID NO: 564044 - DNA, 153 bp, Homo sapiens
gcgccgcggtgttcaggtcttgaggctgtaccaacttctctctcgggcctcggaatcaacttcctcttcaacaaccctctcagggtccaaacctccgaatcttggagagaggctctccttcccggggcccacgggcaactttcgtgtctcaaa

SEQ ID NO: 564045 - DNA, 194 bp, Homo sapiens
cctagaggacccgctgatcggctagggggggtaagagctatatacatgaaaatgagtcttataaattaagtgagtgcaataaaagccttgtactataagacattctggaatgtttgtttaataagggtattatcccatttgatctatagccagtgtgattttatttttaaaaacgaaacagccgtgtgttttct

SEQ ID NO: 564046 - DNA, 229 bp, Homo sapiens
gattcacgcttgcacgctagacactagacaagctagataatagtcaattaaagactactaatcaggttgtgaacaaccatcagaggggaactagcatagaccatatattatcctcatagtctttctatatagtagatttgatcatcatcattttgtagatggccaagactcagagagggtaataacctgcccttattggttttctaccgattaggcggtaaaacgcttg

SEQ ID NO: 564047 - DNA, 1118 bp, Homo sapiens
cttcacctaaggtaccgcgatgctaatcggctatggccattcctaatgcttaccgaacgaacaatgctagtgctatatacatacctacagcaaaggccccaacgttcgtagtgcccctaggggctactacaaacccttcgcggacgccataaaagtcttcatcaaatgagcccctaaaacccgtgacagtctacgcgatcacacctcctatgatcagctcgactccacggagacttattgctctgcaccgaatgcagctacttgctaactagtgaaacctcactcgctgcacgccaatagagcaagctgccgtgggtacaatcttcaagcaaggacgctacgctactaggatggctaacacgcaggcttgtagctctagctcgatttactaaatatacctgtgactcagggcatgaagcctggagtgtccacccatacttgcgcgtgatcagtgcgccatgaaaaaagatgggccacatgacgaaatcgtcaattaagtgagagatacgtgcacgtgacgcacattcatggcgtgactgattggaactagtctatcatcatttgaagtaagcgacgcatcttatacttgcgttcgcgagcgcattatacatgacattaggatgcacactctgagttagctccgtgaccactgatggatgcttctatatgactgggtactaaagccctactttacgacaggaccattcgcaaataccaatccgctgtgttcctcagctgaattaaccaagcctagtgccgggactagtctagtacgaaaggtgaaactcgtgtgacgcaagatcgggcctagtccgatgctacaaacgcttgtatagtcccacacttaaacaggtaacatctgcgtaagagaagtttcaccggcagcagacgcggaagtcccaagctgagcctggtggacgcaaaaaacgggtcgaccctgctctgttgtgatgagtttgttgattttgcccgcgtcgctttgaacccatgtggacggcctctttgatcctctgcccaaccctggtttgttgtaaatatgccgcaactctaggagccacattctcgcggaacgaaataggagaaggcgagaaggccgcggcgcaattcccctataaaag

SEQ ID NO: 564048 - DNA, 1209 bp, Homo sapiens
taaacaacgggtcatcaatttattaaaatagttgacttaagcatctgcacagggggactcccccctcaactctccgtggcctcaaatacgtgatgtggaagtaactcgtgcttaacaatctctctcagaaaggactgtgtgtgcaagttcaagtgacgtcgctggtgtgaatttctctcactctgtggaaacagactccccgcgctcttataaacaccctctctcaccacacacaagcggcaggcgtcttcctctctgtgagaggagagatatctctctcacaagagctctatgtggagaggcgacatatctcagacacctgtgggcgtcctctatctcacctatctgtagaagatatctcttcttctctatattgtgacgcgcctctcttatatctcacagacgtcatcacagacacacacacacctctcatttcatcacacaggggagcagtatatctcacgccgccgtgtgtcgcgcgcgcgtcatagtgctgtctagagagcgcgtagactatctcgacaagactatcttcgcgagagagacactgtcgtcgcgcaccccctctcccccgtgacttctcccccaaccgagagaagcgtagacacgtcacatcatcaccgcggagagtatactctctcataatacaaaccagccgccccaatgttgacgcggagtagcaacgccgcgcggcgccgccacgcggcgctctcccacgagtagaaaccaccgaggagccctcttgtgtgtccccccccctcgagaggcggagaacagtagcgccgagacacacgacagcgcgcgagatgaagaagcatctccacgccgaagacgaacgacagagcgagccgcgcgttgcgcgggacgacccccacaaaacagacctctccctacaagagccccccttttccacgaaaaccgcggccgcgtacctctactacgccgcgcgccgaaacagcagccgcggcggagacagagagcaaccccgcccccctacgatgagacaacggggccccacttcgaacgagccacaagccgccccataaccgaaagacgaagttcctcagccacgaagagggatcagaagcggggcagaatcacaccgctggccctgtgggccccccaaagcccccccaaacaaaggaggccgcacacacagacgcccccggccccccctcaaataacccccggcctaggcgcgcaaaacct

SEQ ID NO: 564049 - DNA, 265 bp, Homo sapiens
aatataaatctacatctttatctccatgatatcaattttatatagctccaggggacgcgagtccataactgtggtctctatacatgaacctactgaactgaaatatggcccgctttgatttccaggagcataagctgctcatataagtgagaacatgcaatagttttctttctgtgcatggcctagttcacctgacgttatgacctttaattccacccaattagctgaaaatgacaggatttcatttttttatggctaaatacta

SEQ ID NO: 564050 - DNA, 278 bp, Homo sapiens
  misc_feature (16)..(16): n is a, c, g, or t
catttccttcctccantaaagtcttgaaatcctcaaagtcatccatgagggttggtatcagcttcttccaaactcctgttagtgttgatattttgacctcctcttataaaccacaaatgttaatggcatctagaaaggtgaattattcccagaaggttttcaatttactttgcccatactcatcagaagaatcaaagtctatggcagctatagccttataaaatgtatttcttaaagaacaagagttaaaatccgaaataaaaaatttgatccataaa

SEQ ID NO: 564051 - DNA, 127 bp, Homo sapiens
acctgaggttacctgatcgacaccggcctcgccacactgtttataccttgcctctactacaatgacacagcctacctgataccggtgccgcatgactgtcatcttaggtactactgtcttatgctgt

SEQ ID NO: 564052 - DNA, 3755 bp, Homo sapiens
ccgccgtccctgcgtccttcggtctctgctcccgggacccgggctccgccgcagccagccagcatgtcggggatcaagaagcaaaagacggagaaccagcagaaatccaccaatgtagtctatcaggcccaccatgtgagcaggaataagagagggcaagtggttggaacaaggggtgggttccgaggatgtaccgtgtggctaacaggtctctctggtgctggaaaaacaacgataagttttgccctggaggagtaccttgtctcccatgccatcccttgttactccctggatggggacaatgtccgtcatggccttaacagaaatctcggattctctcctggggacagagaggaaaatatccgccggattgctgaggtggctaagctgtttgctgatgctggtctggtctgcattaccagctttatttctccattcgcaaaggatcgtgagaatgcccgcaaaatacatgaatcagcagggctgccattctttgaaatatttgtagatgcacctctaaatatttgtgaaagcagagacgtaaaaggcctctataaaaaggccagagctggggagattaaaggatttacaggtattgattctgattatgagaaacctgaaactcctgagcgtgtgcttaaaaccaatttgtccacagtgagtgactgtgtccaccaggtagtggaacttctgcaagagcagaacattgtaccctatactataatcaaagatatccacgaactctttgtgccggaaaacaaacttgaccacgtccgagctgaggctgaaactctcccttcattatcaattactaagctggatctccagtgggtccaggttttgagcgaaggctgggccactcccctcaaaggtttcatgcgggagaaggagtacttacaggttatgcactttgacaccctgctagatgatggcgtgatcaacatgagcatccccattgtactgcccgtctctgcagaggataagacacggctggaagggtgcagcaagtttgtcctggcacatggtggacggagggtagctatcttacgagacgctgaattctatgaacacagaaaagaggaacgctgttcccgtgtttgggggacaacatgtacaaaacacccccatatcaaaatggtgatggaaagtggggactggctggttggtggagaccttcaggtgctggagaaaataagatggaatgatgggctggaccaataccgtctgacacctctggagctcaaacagaaatgtaaagaaatgaatgctgatgcggtgtttgcattccagttgcgcaatcctgtccacaatggccatgccctgttgatgcaggacactcgccgcaggctcctagagaggggctacaagcacccggtcctcctactacaccctctgggcggctggaccaaggatgacgatgtgcctctagactggcggatgaagcagcacgcggctgtgctcgaggaaggggtcctggatcccaagtcaaccattgttgccatctttccgtctcccatgttatatgctggccccacagaggtccagtggcactgcaggtcccggatgattgcgggtgccaatttctacattgtggggagggaccctgcaggaatgccccatcctgaaaccaagaaggatctgtatgaacccactcatgggggcaaggtcttgagcatggcccctggcctcacctctgtggaaatcattccattccgagtggctgcctacaacaaagccaaaaaagccatggacttctatgatctagcaaggcacaatgagtttgacttcatctcaggaactcgaatgaggaagctcgcccgggaaggagagaatcccccagatggcttcatggcccccaaagcatggaaggtcctgacagattattacaggtccctggagaagaactaagcctttggctccagagtttctttctgaagtgctctttgattaccttttctatttttatgattagatgctttgtattaaattgcttcctcaatgatgcattttaacttttataatgaagtaaaagttgtgtctataattaaaaaaaaatatatatatatacacacacacatatacatacaaagtcaaactgaagaccaaatcttagcaggtaaaagcaatattcttatacatttcataataaaattagctctatgtattttctactgcacctgagcaggcaggtcccagatttcttaaggctttgtttgaccatgtgtctagttacttgctgaaaagtgaatatattttccagcatgtcttgacaacctgtactcttccaatgtcatttatcagttgtaaaatatatcagattgtgtcctcttctgtacaattgacaaaaaaaaatttttttttctcactctaaaagaggtgtggctcacatcaagattcttcctgatattttacctcatgctgtacaagccttaatgtgtaatcatatcttacgtgttgaagacctgactggagaaacaaaatgtgcaataacgtgaattttatcttagagatctgtgcagcctagattttacctcatgctgtacaaagccttaatgttgtaatcatatcttacgtgttgagacctgactggagaaacaaaatgtgcaataacgtgaattttatcttagagatctgtgcagcctattttctgtcacaaaagttatattgtctaataagagaagtcttaatggcctctgtgaataatgtaactcagttacacggtgacttttaatagcatacagtgatttgatgaaaggacgtcaaacaatgtggcgatgtcgtggaaagttatctttcccgctctttgctgtggtcattgtgtcttgcagaaaggatggccctgatgcagcagcagcgccagctgtaataaaaaataattcacactatcagactagcaaggcactagaactggaaaagaccacagaaaacaaagaatccaaccctttcatcttacaggtgaacaaactgtgatgatgcacatgtatgtgttttgtaagctgtgagcaccgtaacaaaatgtaaatttgccattattaggaaagtgctggtggcagtgaagaagcacccaggccacttgactcccagtctggtgccctgtctacaccagacaacacaggagctgggtcagattcccctcagctgcttaacaaagttcctcgaacagaaagtgcttacaaagctgccttctcggatactgaaaggtcgagttttctgaactgcactgattttattgcagttgaaaaacccaaagctattccaaagatttcaagctgttctgagacatcttctgatggctttacttcctgagaggcaatgtttttactttatgcataattcattgttgccaaggaataaagtgaagaaacagcacctttttaatatataggtctctctggaagagacctaaatttagaaagagaaaactgtgacaattttcatattctcattcttaaaaaacactaatcttaactaacaaaagttcttttgagaataagttacacacaatggccacagcagtttgtctttaatagtatagtgcctatactcatgtaatcggttactcactactgcctttaaaaaaaaccagcatatttattgaaaacatgagacaggattatagtgccttaaccgatatattttgtgacttaaaaaatacatttaaaactgctcttctgctctagtaccatgcttagtgcaaatgattatttctatgtacaactgatgcttgttcttattttaataaatttatcagagtg

SEQ ID NO: 564053 - DNA, 1515 bp, Homo sapiens
ggcggcggggatagtggcttctcgcagactccgtgagctactgaccctgggcgactgacagggcgtccaagctaccacgggactcagtattagccttcgcctcactggctcctctgcacaagaggcggcttccgagagtagccctcgagatgaaagcccccagaccagcaagctactgagctcccgttcagctgtgatcgtctgctgcatggaaacatgttctgcactgtccagctcaagctaggtccaagcgatacgaggaagtgccatgagagcaatggtcttcgtggagtagagatggtatgagctgctatcggaagcgaagcatctatctggacgcagtactgcctggaactcgctcgtggacgtgatgggctgatactcctgagttgacaggaacataccaatgcttccatctgacgagggttattcgaccctgaatgcgacccctggactttcgagtaccatccttgccagacccacaaggaggatgaagtgggtggacccccgggcatgtcaaggcgtgtgcgatacccatcacggttctgcaacgatccaatcacgtcgaaatacccagtgtgagagccttgtctaaaacgtatgcaatcagagaagggggtgtctcccctcgaaaaggccgccgttggtacatgtgacttgtcccagttcccacatgggtgtgggccctgccattttgggcgccgtggaaggacgctggttagagaaccgcgttttggttcgaaccagagacccttgggtagaaaccaatttctccggagttaatccatcgcttgggccccccaaggggcaatttggccgtatactcccttatccccaatggggttggcacacgtgaccgcgtttgagggaacgaggataggggggatcagtaggaggccgttggacgcaggataatgtttaatgggaagaacctaacctcgtggcacaagggcaggacgtcttggccgccccaaaaggagggttcaattctgcggagaaagacccttatagaccggcccctgagttccgaacagctggaaatgccgttcgggtccctttttcagaccatgtcgccccagcacataagagacttgacgtaggcgtcggaacccagaagtgtgcccccccttggtggggccacaggtttggggagccttaggacgatccaacgtgcgcgccgcggggttggttggcggccaatgtaacctgaacacaggtgaatgcgggttcgagttggccctatgtgggatagtttagctcttggcccgttgtaagtgccggccttgagtacggggggaccaggaagcggtaatgtttatcctcacggacattatatgaaagacgcccccgagtttggtgcgggagttgtgtcaatagatgaccaccccgaaaggggtgctaagatacacgatcgttgtggtatatatgttcgcctggcggaaaaccatatattgacgggataggggcccgtaatgaaggtcccttctaagctataccatgtgtggctggtctacg

SEQ ID NO: 564054 - DNA, 349 bp, Homo sapiens
tattacttttattttgcagcctttggtttgttattagcgtaagagccagtataggatatggagaggcccctggcttcatgagaacaaaggcaggcccaggttataattacagctttctcctgccccttctttactttttctaccacaggtttttcccctggttgttttcctcttgcccccatttggtaacatttaaaaaattttcctgcccccagtagtttcatatcctgtagacatcctcttagggcattttccaatttccaaataaaaaatattcatctatggagttaattaaagttaaagtttttgcaggtcaactactccaacttcttaataccttttcctgaga

SEQ ID NO: 564055 - DNA, 200 bp, Homo sapiens
gggcagcgtgctatgatgctcagctaactttggtattttttagtagagatggggtttgccatgtcggccaggctggtctcaaactcctggccgcaaggtgatctgccatttgggcctcccaaagtgctgggattacaggcgtgagccactctacccagccaagtctaacattatttcaaaataaacattttttaaaaaag

SEQ ID NO: 564056 - DNA, 661 bp, Homo sapiens
aaagtttggacccccagtgcttacgacccggcactacgtgggctcagcagctgcttttgcagggacaccagagcatggaccaattccaaggcagtcctggtggtgcctatgggactgctcagcccccacctcactatgggcccacacagccagcttataagtcctagtcaagcagctcagagctccttcggcaattccctgcagtgcacgtacctatttcaagccaccaagccaccaagccctaatgctgtgcaatggccacactttcagcccacactcagacacaggtgttcctccacagcctggtggtgccctgtcccttgcacaaagcagatggaacaatgctaaccacgcagactggcttctccgactcatcctctttgcgccccatgcacccccacggctctgcatccacgcccctggagctccttgcttgccccccagcttccctgtgcagaatgcagccagcacggaaaagtcgggctttgcagctaaccagccaacctggccctcggctccccttcatccaacacagccagaacccgcgattttaccacacagtgaccatcagattatattttcaacaccacaccccccaccccattcgtgggtgagggtatcccctgtgtgtcccaggcccattaaatctacctgccactga

SEQ ID NO: 564057 - DNA, 675 bp, Homo sapiens
  misc_feature (16)..(16): n is a, c, g, or t
  misc_feature (78)..(79): n is a, c, g, or t
  misc_feature (235)..(235): n is a, c, g, or t
  misc_feature (241)..(241): n is a, c, g, or t
  misc_feature (261)..(261): n is a, c, g, or t
  misc_feature (282)..(282): n is a, c, g, or t
  misc_feature (452)..(452): n is a, c, g, or t
  misc_feature (492)..(492): n is a, c, g, or t
  misc_feature (506)..(506): n is a, c, g, or t
  misc_feature (518)..(518): n is a, c, g, or t
  misc_feature (552)..(552): n is a, c, g, or t
  misc_feature (555)..(555): n is a, c, g, or t
  misc_feature (557)..(557): n is a, c, g, or t
  misc_feature (568)..(568): n is a, c, g, or t
  misc_feature (571)..(571): n is a, c, g, or t
  misc_feature (587)..(587): n is a, c, g, or t
  misc_feature (591)..(591): n is a, c, g, or t
  misc_feature (634)..(634): n is a, c, g, or t
atctaccattatagangtgctggcggtcaatacaatgcattacaaccatgtccaacgcacagtctagtatcaaaatcnntctacactgtagagtctcacgaaactctcaatgacatcaaacactaagccctccagacaccattcttttttttctgccaccacattaggaacgtaaatggacaatccattccaactcgcagcctccatccatttctagtatgaaattaagtcattntctacntatacaataaagtatatctncacggttctcttgattttganccaaagcagccaaggcactctccataagccgacccacaaacttaaaagatttttaaagcattcaaacaaaaaataataaaaaaagaagtaacaaataaaagtttaacagcaacaacaacaacaaaaaagacaacacaatgtttctgggacaatggcacaccctgtttccntttcagggacatccaactcagacatggaaagaaccggagnaaagaaagccagtnctcatcccaggngaaaattcattttttgtttttttcagagggaggnctntnccaaacctccnctnccgttcttgttttgtnaaanaattaacttgcacagcagttggagttctccccataacttttcngcccccaaagagcatgccaaaaaataacccataatttctca

SEQ ID NO: 564058 - DNA, 147 bp, Homo sapiens
aaaaggccccaagagggccttgggccaaggtttttttgaaaagcctttccaaaaaattgtttttggggggggtttttcccccccccccccaattaaaaaaagggttttaaagggtttaaaaaaaaggtttttttttttaaaggggga

SEQ ID NO: 564059 - DNA, 493 bp, Homo sapiens
ccggtccgcacgatgcgtacggtagtgatgtcccataagatattacctgttttagcaacctttacacattttatgcactgtaataggtgctaagaggaaaaacaggatggggaaaggaggagtggcagtatcaatagactagagggtcatcctatttgtggaaaattatattgtctacttcaaagggtcctgaatattagtccagtccttactgcccagcacttaaggaagagaggtctaatgtgactgtatggggcgttagaattaggtaccagaggaaaagctgttgcccaacagctccaagggagaaggagctgttgctcttcaggaagacggatactcgtatggtagagtagacattaatgggcatggcacatatatagtgtcattctgctactcagagctcaatcttgtagtcaaatcgatcacagtcagtccaggaaatgagggggaatgatgccagatcccgtccaaacaataacagtttacctta

SEQ ID NO: 564060 - DNA, 437 bp, Homo sapiens
tgacccatgttgaatctgtttgtccgagtaaaccagtagagctttctggtaagtgtccagatcatgtttatgtctttatcaacagtgttatatggactaatacaatcactctatctaatgagatatattattcgcttaccactgacaaatctctctcggttcttctattcgatcatgttactgatagacgcttggctatcggtctcggttgtgtaacctgattcgtcatatgcttattgcttgaatagctgttcttcttttaattttacaacaattttactatttctccttacatgtttataagtcatatggagactccttctcatctaccctgaccccagaatattaaaacttttcagagtttcaggattaattccattatatggacatgattccttgagataggaaaaactgattggattgtgacattagactta

SEQ ID NO: 564061 - DNA, 480 bp, Homo sapiens
ccacgagatttgaagagatttattctgagcaaacatgagtgaccaatggcctgtgagacagccctcaggagaccctgagaacatgtgtccaaggtggtcagcctacaacttgttttttacattttaaggagactaagacatcaatcaatacatgcaagatgtacattagttctgtccagaaaggcaagacaactggaagtagggcttgcaagtcaaaagtcaaaggcagattcaaagatgttctgattggcaattggttgagttaagtaattgtctaaaggcttacgatcaatagaaaggaatacctcggttaagataaggggttgtggagaccaagggtttattaagtagatgaaacctcaagatatcaggcttctgagagactagattgtaaatgtttcttatcagattgaaagagtctcttctattagacttaagatctgtattggtgttaatgctggtcagctttttctgaattcc

SEQ ID NO: 564062 - DNA, 862 bp, Homo sapiens
  misc_feature (119)..(120): n is a, c, g, or t
  misc_feature (697)..(697): n is a, c, g, or t
  misc_feature (718)..(718): n is a, c, g, or t
  misc_feature (809)..(809): n is a, c, g, or t
aaccctcagttctggtaattgctcacacctttcccgggaaacttatgaataatctaccccttgtttagcatataatcaataaataaccataaaaataggcaaccagcagcccttggggnnactcttcctatggagtagccattctgtatttctttactttcttaatattaactactttcactttgtggactcgcccgaattcttttcttgagcaaggtccaagaactctctcttggggactggatcacgaccgctttctggtaacaggagcaatacaaatggctattagtaaacgaacgcttaagtaactctagtacatctatgatgaaataccaggccacagtttttttaaaaatgaggatgttctctatatactgacgcacagtcaccaagacatgcactttataggaaattataagctcctccttgcctaaatctccttaattttgcttaataaataacaagtgaagccagaagctgtaaactcataattttaatgaagaaatgggatccagaagatggagatgtttttcattctactttattagatgaggaaaaggagagtaaatacttgtatgccagctaccacaccttttaaagttaatgttaaccctgctaagaacagcaaggagattttatatcagccaggttttagttgccagaaaccacaccagttattttagcaaagccttatagnagtgtctatatttagtactanaaggcagagagatccagggtcttgagtacactgtacagtgcacccagatgggagctgatggctcgatgttcgtgctcgaacgttacgtcgntagtgctgtttgaacgtaaaccacgatctttgcagaggtctaggtcccgtgaa

SEQ ID NO: 564063 - DNA, 614 bp, Homo sapiens
agcggagatgttgtgggaggccgccccaggcggtggagctgcaggtgcagagggcctcggtggcggctcagcgcccttggggagcactgagttgccgggcctggtgtggaaatgtgaccggtttgtgcctggcctcgtcagtgttgaggacctggaggaaacgcagatcttgggtggggagacaaggcggagagaacgaggtgcattggaacagtccaggcgaggggtgctggcctgcttgggggcaactcagaggcctggaggatagatgaggaggggggctgtgggccttgtaggtgttggctgtggccgtgcctggagtggagggacccttgaaagtttggcctcagctcgggacactgatgttcccgggttggcccttcatgagagtttggcctcagctcgggacactgatgttcctggtttggcccttcacagctggtgggcggggggtgctttggggagaggctgccctgcgcatcagggcatcaagacacaggggagtgaatgaacctggggctgcagtttcacctgggtgtggccctggctgctggggaggggccgtggctctgaagcctcatgattggccaggggagctggcatttctgttctgc

SEQ ID NO: 564064 - DNA, 264 bp, Homo sapiens
gactcgcatctgcccttgtgctttctcacccttcactctccaacttctataaataacctgtacagtggccaggcaccgtggttcacacctggtaatcccagcactctgggaggccaaggcgggcggatcacctgaggtcaggagttcgagaccagcccggccaacatggtgaaaccccatctctaacaaaaatacgaaaattagccaggtgtggtggcgggcatctgtaatcccagctacttgagagtctgaaggcagtctgga

SEQ ID NO: 564065 - DNA, 250 bp, Homo sapiens
tggtacagatagagtctcccaatatggcccagtcgggtctcaaattccgggactcaggtgatccaccggcctcagccacccaaaggtgctaggattataggactgagaccattttattcacaacagtcttctaactcctacacttaaagtttaaggattggaaagggtactgtgtccacctcccggtgtccggcctccgccggatggctttcctttccaaaattgttacgggtgcacgacagcccaaaag

SEQ ID NO: 564066 - DNA, 299 bp, Homo sapiens
cgtcgacggtcacagtgagtatacatggtctcagtgagtatacatggtcacagtgggtctacatggtctcagtgggtctacatggtctcagtgggtctacatggtctcagtgagtatacatggtctcagtgagtatacatggtcacagtgagtttacatggtctcagtgagtatacatggtctcagtgagtatacatggtcacagtgggtctacatggtctcagtgggtctacatggtctcagtgggtctacatggtcacagtgagtatacatggtctcagtgggtctacagtcgacgc

SEQ ID NO: 564067 - DNA, 197 bp, Homo sapiens
ttctgacatggcctggataattttccccataggatttggggattaacattagactgtttgcatacttacgcaaatttctgcagccagcgttgaatttctcccagaaagtgggtttttcttttctatcatgtagtcaggctgcaagttttccaaactttcgtgctctgattcccttataaaactgaatacctttaaca

SEQ ID NO: 564068 - DNA, 1122 bp, Homo sapiens
tatcgttatttattatcaaaatcatgaccagggtgtgttagacgattacttgctgaaaatatacagcaactgggggcttataacacatgtgagcaaagatgacatttaacacgtgtgcacgtgtctcacatctctgtggggctctagaaggctcaagaaacaaagactccacagacaagaacgtttacttaaagcggacccctgtggcagataggctcccgaattgtgcaagaatctcattccaattctccagcatgtggttcaggcagcggaaattatttcacaagaaaagaaacccagacaaaggtcctctcgtgagcccgctaagagttcaacaaggcttttgtcattacacacttatgtgggaaacgcccacggccccacattaaccctgttgaggaacacaggttccagtgtcttgggctataacacgggcttcctcaccgctgtggccttcaaaaccccgtgggccagtgtttccctcgtggctcttccatccccaccacaagcgaagaagggtatgaccgcacgttatatatagtaaagaagaactttgaggccgcaggacagggccgcatgcagcaaagctctcggggtagggcctaacggttccacccacctgagcccgtgtccccaagtgcacaggagcttcccaaatcctagagacatgactgtacttagaaacgttggtccggttacgagaacctggtttactgacataatgtcccctcatggagattttgtcacacttcccctctaaacgagaaaagacaacgcccatgttggggcccgggacatactcgaggcatgtagcaggcatatccaaaccttatgggcacaaccgtggctttgtgtgcactgaaacccgcatgtttccaaaagtcctcccggaccaaggaccgtgtgacctagagttgtaaagacaccgtagcatcggtgacagcgcacccatatgtgcgggggcaaaaatcgtagacgcgactctacaatacagggcacctaaaacgccgtgatgaggacacgtgtggtgccaccacattatgtggtccccccactaaatgtatactaagacgctcatatacaggacccagctacacacttctaaaagaactagtcgacaac

SEQ ID NO: 564069 - DNA, 476 bp, Homo sapiens
  misc_feature (50)..(50): n is a, c, g, or t
agttttatgaaggaaaatgatttaaaggaattaaattattaatattatanaattaatatttttcacaatgtatatcattactttatgtttattcactttctctggaattgaattccacatttgaatggaattaaaataagactatcggtcttatggttttctggtttacagtgccaaatgttgatagaggctgggcatgatggcccatgcctgtagtcccaccactttgggaggctcatgcaggtggatcacctgaggtcgggagttccagactagcctggccaacatggtgaaaccccatctctaataaaaatacaaaaattagctgggcgtggtggtgtgcgtctgtaattccagctactagggaggctgaggcatgagaattgctggaacccaggaggtggaggttgcagtaagctgagattgcaccattgcattccagcctaggtgatggagtgagactctgtctcaaaact

SEQ ID NO: 564070 - DNA, 815 bp, Homo sapiens
  misc_feature (463)..(463): n is a, c, g, or t
  misc_feature (465)..(465): n is a, c, g, or t
  misc_feature (540)..(540): n is a, c, g, or t
caaaagaccgctctgtaacaggttaaagcaatgtgtggacttcatcaaaatgaacacttctgctttttcaaaggcctgttgaaaaaacgaaaagacaaaccaaagactgagatgtttggagatgatgtatgtaaggatttatctccagagtataggaagagctcttgaaactcagcaggaaaacaatccatttttttaaatgggcagaaaacaatttggaaagaccctttaccagggaagataggcggcaaacaagcctgtgaagaagacgctcggcgtcgttagtcatcggggaatgcaaaggaaaagcacacggaaatgccactgtgcctctcggactgctttcaattcaagactgagcgtaccggtgccgctgagagtgggaaggagcgcggactggctcaaacactttggaaaatggttggacagtttctaaaacagttaaacgtgcaccttccctgtngnccagccttccacagctggtatttgtcccggcacagtgaaagcccaggccacacagacttgccctggacaccattngaatgcttctccacagaggagcgggcactaaactggcatctccccagaacaggccacttcccaggttcagaaaggagcgggcacaggcgggcctcagaaaacgacgcagagtgaaagaagcggagaagggaggagagtgaacgagaggcttccacttgtgtcaggctctagaaagtgcagctcagtcacgggacagatccaggggtgccgggaagccctgagagcgctgcaggcacaggagcgccgcagcaggcacacgcgcaggtaaacacaca

SEQ ID NO: 564071 - DNA, 324 bp, Homo sapiens
tgtgggtagcaataaggtacgggtccccaggttggggagagccccaagttgagaacaataattgaacaattactgtatgtaacaatggttgagatacagcgtaatcacatgcaagctgcgggcacaatgacctcattccacacgtagcacccttcagcaggaccctataaaactttcctccagcccttgcctctttgcaggtagccccttctctgctgagctgcccactgcaacatattttcacaatttctctaataaatctgcccttctttacctacaactatcttggtaaatggctttaccacctgcaaaactgaccctagg

SEQ ID NO: 564072 - DNA, 125 bp, Homo sapiens
cccaatcacttgattgcgcaatatccttccgcatacaacggactgattcacctgcaatgactgtgggcgttgagccggcagccgacggcaaagtgtgtcgtggtggtcattaagactggagatcc

SEQ ID NO: 564073 - DNA, 138 bp, Homo sapiens
gagcactaggataatagcttatgcctgcggggtgctaatacctaggtgatgggttgacaggtgaagcaaaccaccatggcacacgtttacctatgtaagcaaacctgcacattccacacaattatcccggaaccacag

SEQ ID NO: 564074 - DNA, 145 bp, Homo sapiens
ggcacgagctattataaaactaccaaacataaaccattagaaccacaaatcagccaaggctggatgtggtggctcacgcctgtaatttcagtacttggggaggctgaggcaggtggatcacctgaggtcaggagttcgagaccag

SEQ ID NO: 564075 - DNA, 455 bp, Homo sapiens
  misc_feature (9)..(9): n is a, c, g, or t
  misc_feature (48)..(48): n is a, c, g, or t
  misc_feature (56)..(56): n is a, c, g, or t
  misc_feature (91)..(91): n is a, c, g, or t
  misc_feature (101)..(101): n is a, c, g, or t
  misc_feature (131)..(131): n is a, c, g, or t
  misc_feature (190)..(190): n is a, c, g, or t
  misc_feature (196)..(197): n is a, c, g, or t
  misc_feature (234)..(234): n is a, c, g, or t
  misc_feature (337)..(337): n is a, c, g, or t
  misc_feature (390)..(390): n is a, c, g, or t
  misc_feature (437)..(437): n is a, c, g, or t
tctcgcacnctgttcttccgccgctccaccgtcgcctttctctcccgntcgcaatncaataacagatcacccccctggtcattgacaatcnctccgccatntgcaaaccttcttttgcttgggacgacacncccctgaaccgtgtttccttccatcgtcgggcgccccaaacaccaaggtcgtcatggtncgcatnngccagaatcactcctacgtgggcgacgagacccagancaaacgtggcatcctgaccctaaaataccccattgaacatggcatcctcaccaacttggacgacattgataagatctggcaccacaccttctataaagagctnctcgttgtccccccaggaacacccattgcttgctgaccgagagcccctctctngaacccacaaggccaacaagattaaaaatatagacttcagattaatngttatgtagacctttcaa

SEQ ID NO: 564076 - DNA, 180 bp, Homo sapiens
tttaatggtgtgggtgaacatctggagtctgtggagatgctagagaccttgttatctgttgcaccgggaactcgtggagactaatggcttcctctttggtcacaaaaatagtggataatcttggacattcgggtggcaatgtctgctccatgttccttgcggggcatccccatcccgtag

SEQ ID NO: 564077 - DNA, 438 bp, Homo sapiens
aagcgtgataattccccaggtagcatccatacttggagaggataacctcccgttagaagaaagaagctgtagcactacataaatcaagcttagtgcctgtattacctgagtcgtgaatagagccaaatatgtcatataatctataccaataaaaccactggtccagaaacacgtctatcatattctttgtaagtaagactctattggctgtatacacccatgaattatggcatgggtatctatttttcatttttacattgaaaaaaatccagtggttgcttatgaatgcatcaagtaaagatgaagaaaagaatacatccgatgcgtagattcttgaccatgtagtaatctataaaattgctatatcctcctgatagccatgggaaaacattataagatggtcattttattttgcagttagaattataccacgatcta

SEQ ID NO: 564078 - DNA, 263 bp, Homo sapiens
ttgtctgctttcctaaggattcccatgagttcagctgtgacgttagcttcaagttccgccgcatcctcacagtgacgggcactacataaagcatgctgggaattggcctgagagggttgaccgatttacaggttttgtttttcagcattccgtcgttcttactgagtctgcagcgggggagtgaacaagtgtgcagatgtaagttcttacatgataagcagattgaatacaacaccagcagcagactcagtaagaacgacgga

SEQ ID NO: 564079 - DNA, 659 bp, Homo sapiens
  misc_feature (6)..(6): n is a, c, g, or t
  misc_feature (147)..(147): n is a, c, g, or t
  misc_feature (165)..(165): n is a, c, g, or t
  misc_feature (218)..(218): n is a, c, g, or t
  misc_feature (222)..(222): n is a, c, g, or t
  misc_feature (224)..(224): n is a, c, g, or t
  misc_feature (233)..(233): n is a, c, g, or t
  misc_feature (235)..(235): n is a, c, g, or t
  misc_feature (252)..(252): n is a, c, g, or t
  misc_feature (314)..(314): n is a, c, g, or t
  misc_feature (322)..(322): n is a, c, g, or t
  misc_feature (353)..(353): n is a, c, g, or t
  misc_feature (364)..(364): n is a, c, g, or t
  misc_feature (378)..(378): n is a, c, g, or t
  misc_feature (411)..(411): n is a, c, g, or t
  misc_feature (416)..(416): n is a, c, g, or t
  misc_feature (448)..(448): n is a, c, g, or t
  misc_feature (462)..(462): n is a, c, g, or t
  misc_feature (482)..(482): n is a, c, g, or t
  misc_feature (499)..(499): n is a, c, g, or t
  misc_feature (511)..(511): n is a, c, g, or t
  misc_feature (527)..(527): n is a, c, g, or t
  misc_feature (545)..(545): n is a, c, g, or t
  misc_feature (549)..(549): n is a, c, g, or t
  misc_feature (554)..(554): n is a, c, g, or t
  misc_feature (562)..(562): n is a, c, g, or t
  misc_feature (564)..(565): n is a, c, g, or t
  misc_feature (568)..(568): n is a, c, g, or t
  misc_feature (574)..(574): n is a, c, g, or t
  misc_feature (577)..(577): n is a, c, g, or t
  misc_feature (580)..(580): n is a, c, g, or t
  misc_feature (583)..(583): n is a, c, g, or t
  misc_feature (587)..(587): n is a, c, g, or t
  misc_feature (636)..(636): n is a, c, g, or t
tatgtngaaaagcaatttattccattttaagcacttacacagttagtcatggagagtaacaggccttctggtgaaacaggtcacccaaaatggagatggcatcaaactagtggtcaaggactaactcctaaaaaaaaaaagcaactnttatcaaggattaatttnatttttaaaacaaatacaagttattgattcactcttctcaacttgacagtttncctntngtataactntnaggtaaaaacatacatntttacaacttggtggtcccaagttaaaaaaaaaaaaaaaaaccaacaacaaaaaaaaaaacnccatttcncagacaggaaataaacaacatgaaaacagcncaagaaatacnctaacgggcaaaantttttttttttttgggggaaggggaacgttttnttttnacttaacttaagaaaccaagggggaactggtnttcgtttgaaaatntgcatcctggaaagtcaggngtcaagattttcgagtnggaatctatacnacttgaatctcccccnatttcctgaataaaagtnacanctttnagtttttntnnttnatggcncanacnccnaccncatttggctctattccttactcactctagcctttacttaaatgagtttnaaaaacttggggatatagcataa

SEQ ID NO: 564080 - DNA, 298 bp, Homo sapiens
gggtcatctagaggatcccgaaaaagtgtgtggttaagccagtcaaattatgacaaggttaaagaagtaactcggggaaaagatgaaaatcccgctctgtttcagggtcttttagttgaagcactcaagaaaatatactaatgcaggcccagacaccccagaagggcaagctctcctgggtatacattttctcattcaatcttctcctgacattaggaggaatctacaaaaagcagcaatgggaccttcaagtcctatgaaacgacgcttaaacatagcctttaaagtttacaacaac

SEQ ID NO: 564081 - DNA, 267 bp, Homo sapiens
ttaatgtatacgagaagactacgattatcggggtgagtgccgagagacgtgtgctaagtccacttcgagccacgtgagaagaatatactactagagtggcacagcagagctattgtgctgtgtgtctcaccctccaaacctaaccctgtctttaaagtgtttggtgcagcacctttggagaatgtggcgcgtaagtacaagagcatgtacaacgaggagctggagtcctgctctggcagaacacgcccctgcgccacaggaggttaa

SEQ ID NO: 564082 - DNA, 131 bp, Homo sapiens
agatgttcatgtactatactaacattagtctctataggtgatagattggccattggtgtagagtcagtatatgtagaatataaaggagtgggtgttgagcttgaacgctttcttaattggtggccttaagc

SEQ ID NO: 564083 - DNA, 455 bp, Homo sapiens
gactttggcagtggaggttcctgtgctctccggtcgctggaatcgggaacctcgcccgcttcggttcctggtcgcagagaaaggtgcccgcttggcctctctcgccctcgcgagctcttcatccgtttaagttcctagacgccgttgcgtttgcggaccgatctccgttttcagaagggagccatgtcctcggccgccatgtctaaatacgtgaacgacatgtggcccggctctccgcaggagaaagcctcgccgtccacctcgggctcgggccgctccagccgcctgtcgtcgcgctcccgcagccgctcttcgtcccgcagctcccgacgcgactcccgcagctctagccgctcgtcctcgcgcagccacagccggccgcggaggagcagacggtcccgatcccggtcccgcaggcgccaccagcgcaagtacaggcgctactcacgctcgta

SEQ ID NO: 564084 - DNA, 655 bp, Homo sapiens
cgccgatggttgggcccctacaagaccgagcccgccacctgacctcgcgcgctgcatgtgcgactcaactgcgatgagtggtgcctgttgcatgacgtggacctacctgcatggactgagctgtgccggcctgcgagcagaccgggcctggaaggccatactgccctgggtgcttggacaccataggaattagctttaagcgacttgcgccaaatgctccacacctgaccttgtgagtggggtgctcttgagactggtgactgacgattcttacagttgtgtgtgcttgcagtgacctgacgtggattgtgtgcacccttgtggagcagtgtcgttgtacttcactcgcgttatgtgacctcgagaccttgtatctacaccgtccgccaattggcactccattggtggacgccatcctccgttggagtttccgaaccattttgaacccacaaccctggattggtggcctaacttgacccaactttctcagcgattcctttggcgcccacaatggtcccctggtgggaattacacaaattggaacgcgtaaaaggaaggaatatctggttatgccttgggtaaacccctttggcctgttggtctcaggcgttgggcaatgacgtcccccattcgggactgtggttgggcctttggg

SEQ ID NO: 564085 - DNA, 229 bp, Homo sapiens
atcctcactcccttcgtactcatctcacatttctactccttcgttatggctgcatcaagtgccctatgaaatagaaactgccttcagataatatcaatttctatcatcagtcagctatccataatcagtacactcatctcaaattaccgcacgcacaagttgctccatatagcaagttatgctctgtcttttaacaggcactccacatcccacacaagccatgcaagcc

SEQ ID NO: 564086 - DNA, 1002 bp, Homo sapiens
ccagccctgtgtgtcacggtctctgcccccggctttgctgttggctggagctggtacagtgcagtgatctgccatctggtggtgggatgccaggtcgcccttttggcagtctgctagtgctgaggctgtatggacaggaacaccaggcaccctccgtgtgcttctgagctgaggttgcttcacgggaccgtggcttccttcctcaacctggctctgcctcccccgtgctactcggaggccgaaacgtgggcttcttgatgccttccccatccctggtttgcccaggatccccgctgcgcagggccctgcccttacctcacgcaccccaccggctccgacgacgcaaacaccgttcatgagtcactaagaagcattgggttccagggcaccttggtactatatgatctgggaagtacagaggagtaggagaatgtcattcccagagaaaatacataagctattatctgttctgtaaagtgatatctttgcatacttgatcaaagtacccaatagattcccaatcactgttctacaagctgtgattttgtctccccttccgagtcctccagtgcaaccgagcaatactgcccagagaggcaataggtgtgggtacccgggagcatcccgttctggagccaatgttgcatttcctgcctgaggaatggtgctcatcccagatcttgccttagctctcattaatggatgcttagtgacgcagcctaacacagtgggaagtggtggtgtgtagaaggtaggggggccaccgacagcttggatgatgtaagagggagccgggttctggaagctctcatgtccgacgcgggcctgggaaaccccccctctgatcccataatctaacttcatctctcgtagaaggggacacactgattctaagacctgcccgtgtgacataacaacttgccgggcgcaacatgcggccctttggggaacaccagcacgtttagaagactcaatcaaagaacaaaagcacgagagaacaag

SEQ ID NO: 564087 - DNA, 337 bp, Homo sapiens
cggtaacatttcattatcgtgatatagtgctgacttgtaaatgtttgaaattaaacagataggtaacctaatttgtgtcctcctgactttataaggaaaacgtgtgcagccattacacacagcctaaagctgtcactagattgactcggcattgccttcattccttcacattcacaacctacaaaagttggtgtacatttgtatatgtcatttaccttcagatctaaatggtaatctgaagccaaattagttttgatcgttctcatggcgcccagtctagataccccatctcgcgaatatctacatcaacacccgctctaatcaccacccaacaata

SEQ ID NO: 564088 - DNA, 889 bp, Homo sapiens
atttacaaaagatttcattcagctgctgcagaatacacattcttctcctcaacatatggatcattctcaaggacagaccatatttgagtcacaaaacaagtcttaaagaattcagaaaaaattgaaatcctatcaggtattttctctgaccacagtgaaataaaactggaaatcaataacaagaggaattttggaaactatacaaacacatggaaattaatatgctcctgaatgaccagtgggtcaatgaagaaattaaggaaatttttaaaatttcttgaaacaaatgataatggaaacaacatatcaaaacgtatgtcatacaatgaaagcagtactaagagagtttataggaataaacacctacgtcaaaaagtggaaaaacatctaataaataacctaatgatgcatcttaaagaactagaaaagcaagagaaaaccaaacccaaaattagtagtctgtgtcctgtgaggccagccagaaacatagaaaagcaagagcaaaccaaacccaaaattagtagaagaaaagacagaataccggtcagagcagaaataagttaaatggaaacagaccaaaaaaatccaaaagatcaatgacattgacaagttgttttttgaaaaactaacaaatagacaaaggttgccagatgagaaaaaagagaaagatcagataaatccgaagtggaaaaggggactactataccgaatgaaggttggtacgttcttgaccacgttaccatattggaactgatggtattctgaaccttacttcaaatgccgtaattgaacgagctttacaaggggggggaaagcctattccctgggaatgatatcccaacggcaacttttttaacccttaagggcccttaaacacccggggacaaaa

SEQ ID NO: 564089 - DNA, 902 bp, Homo sapiens
  misc_feature (1)..(1): n is a, c, g, or t
ncttgttgtcgcagctgtatgtcccccgcttggtgtctttatatgtagctggttagagcgatctatgggactatttcttttccgcagttgttggttttcgggcgcgcattctctctgtctcaacccccgtctctcaaattgggccgccgcccgtgtaactttcgccgcgggttcctctccgcaacgggccatatcccgttcctcaatggcgcccttctacgtctccccagggcaacgtcttgtactgttacccgcgggtttgcccctcgtccctcattggcgcgggtcttgcccctccctctacggtagtgcgccccttgggcgtcttatattttcgcaatgcgcgaccgggatgtcttagcaaccccctgggtcttggttggcccaaccgccgcgctgttaaattccgcctggggggtccctcatgcgctgtggccctcctcccgcgcgcgggcactgttagggtttctcccccgcctccaatcggatttattctacccccgggtgttccccaacgtggggtcccgccgcggaccacactttttttcctcacgggcatatccacgccccctctgtttttagaggtccacctactttccccaaagggtgtgagcccctcgatctggttcccggagcctccccattgggtcgacccctcgtctattctagcgcacggtgttgggtacccgcgtacgctcaacgactggttgtggttttccagccggggctacaacaccgcgggtgtttttacagcgatcacggatgattctgctccctccagaccgacggtatcacgacgagcctaaagtgccttccatcccgacagcggccgtggccccgctgaatcagtcgactccgccccccgcgttacccccccccccccccagaccgggttttacaat

SEQ ID NO: 564090 - DNA, 276 bp, Homo sapiens
ggtcgacataaaaactacacagaagcattctgagatgactcttttgtgaggtgtgcgctgaagtcggagtgttgaacctatcttttgattcagcagttttgaatctctctttttacagaacctgcgagtggatatttggagcgctttggggcttactgtggaaaatgaaatatcttcacacaaaaactacagagaagcattctgagaaacttctttgtgatgtgtgcattcatctcacagagttgaatgtctctgttgattgagcagttttgaaac

SEQ ID NO: 564091 - DNA, 1315 bp, Homo sapiens
  misc_feature (560)..(560): n is a, c, g, or t
  misc_feature (625)..(625): n is a, c, g, or t
  misc_feature (831)..(831): n is a, c, g, or t
tgattaaaaaacaagggggatgaccccgtgtggtgaagtagcccctccctccgtggatagtgccccccggcgggggggggggccccgcccccccgcgccccccgccgggggggggggtgtctccccccgggttttggcggcgccccacacaacgagaaaaacgaggggggccggtatatatcaccatccacgatcccaaccgggagaagaacccttcaggagtttatgaaagaccccccccccgtgttcctcagcagtgaggaagagatgggcttccctatcgtgcgcccacaagattatataaaaagggggggaaattttttcctctgcgcccccggtggtgccccccccctgtggaggaacacttccaactggacgccccaacaagccccgccctctgtgtgttgttacaacacgataatcggggcgtatcatagggggggaaccacgaccaaacgttggcccgccaacattgggggaggagctaccaccagctcttttggggagaccaccaccgggttaattatatctggaagagggaagctccctcttcggagagnggatatatattaagctctttctctcgcttcttatagagagttgtttcgcccccaccggctggggncgcattatgaccgccgcgtgtgagacggcgacaaaaggggcgctctccccaacacacaggtgaaaggttttccgcgtcacaacgggcccccgtgggctgatatgcacaccccgcacacacgcgtgggagacacacgcccacagggggtatacacacataagtgcgctcgtggagaagacaaacattcctccctgagagagggaganaaaagggtgggtcttgcccccgtgggtatatgaaatgtctcacagggagcccacattctgtgcggtctctcacacactctcacagaggccgcttcttataggagagagaacccacgacacactatgtgagataagtgcccctgtgagaacacacacacacagcgtggccgaggcttcgtggagaaaaaccccacccacggctctttaaagagagttacccgccacagagaaactctatactcacaaagacacggtgcacccacgccacggaggccctgagcccacggctgcccagcctgtgcccctcgtggtcgtctttttaatattttccttagagtggtgctgtgcctcttttgtggagtttcctgtataggaactctttattcttgaggctgtgggtgatattttgttttgtttttgtcttttaaattaagcctcggttgagcccttgtatattaaataaaagcccctttgtcctttttta

SEQ ID NO: 564092 - DNA, 154 bp, Homo sapiens
tgcctgttgttaaatcagtgtgcacactcttgtgattctcactcatccccaaattacactgtgtatagagtaaagtcgcactcttgccatggctacagaccctctctgctactggtcccatctaatactgtgacctgagcagcagggaaagaca

SEQ ID NO: 564093 - DNA, 125 bp, Homo sapiens
agcagataatacagactcaggttgtgattgatgcaggcgtctcgcgtctttcccagcctgctcaccaaccccaaaactcacattcagaaggaagctacgtgaacgagtgtcaaccatcacagccg

SEQ ID NO: 564094 - DNA, 873 bp, Homo sapiens
ggccagaggttggactcctctgctggggctcagctggtccatgaggtaacagacttgtctgattgctgtggacataacagatggtgaagttcaagtacgcttgagctgccatacatgtggttgtgctgttgctgcggggactcatgcagaacagctactgaggtcagtgctgagcgccgatcctcaggagtatctctagcatctgctgaagcgacgtagtgtgtctgggagcccggatgcatcgtggccgaagactccatgtccagttggtcctaggaaaagctggatggacatcatgtagataaacttcctgtttccctgccagagaaagctggagagagaagatcatggtcctgccgtacagctggttccgaggcacgatcgtaggagagcaggccagaggttcagggataccgcagagccgtgcccaggtcttccagtaggtggacctgctgtcatctttgagtgctgccagcatggttgaccctcgcggtgtgttggatggtgcaggtcgacttaggagtcttcagggtcccgttccgatggcatgtgtaccagcactccccgcgttcagcctgaggggtgtacagttaagagaagacagtttacagatctcattaatctacatttgacacgtgttccttctaatcacttgcacggaaggactgtctaccctggagaaaggtatatacaacgatggaatggccggaatttgcctacattgtccactcatccagggggttgaaggagaggggtggcaaccgtatgtcaccaagccataatctaacagggggcgatctctccaggaccatggagcaaaaggtacctggatgacaaaggcattcaaggtgaacacgtcgggtgcgaagcaga

SEQ ID NO: 564095 - DNA, 123 bp, Homo sapiens
actctgcttccctgatctttcatcaagcttcttcatctgttaacttctctccaagggtttgtcatcacatgagcgaagttctgcagatgaagaagtataaagcgttgatggggtaccgacgct

SEQ ID NO: 564096 - DNA, 394 bp, Homo sapiens
aagccggattggaggtgtgacgaggtttactcgcgtctagtggagacttcttcaaagcaatcactatgtcacacagacaccaggttgttttcccctttccctttcaataatgcaggggacagcacttccaagggagaattcataagaactttcaaatttcctggaaggaaaggctcttaacaatggaggggcaaacgcaaaatttacggggttaaaccccccatggttagtggggaaaattaagacgggggttatttgcagcaatttgtgtgcatatggagttaatataacacttgaaagagcaagggggaaatacttaaaaattgttgcattttcttcttgatccaacattgcgttgtgggcaagcccaaaggggagttatggtgggtaagga

SEQ ID NO: 564097 - DNA, 126 bp, Homo sapiens
taaaattttaaagggccaaaaaaaagcttttaaaaccccattttttggaaaaaccccttttttttgcccggctgggattttttttaaaactggcccttggccccccggggggccttggtttaaaaa

SEQ ID NO: 564098 - DNA, 425 bp, Homo sapiens
gcggcattgcaaatgcttgttcgtatctatggaaatgatatgatctttcttcttcattctgtaaatatggtgaattaccagtggctcacgcttgtaattccaggacttcgggaggccgaggcgggaggattacttgaagtcaggagttcgagaccagcctggccaacacggtgaaaccccgtctctaataaaaatacaaaaattagctgtgcatggtggtgcgcacctgtaatcccagctactcaggaggctgaggcaggagaatcgcttgaacccgggaggcggaggttgcggcaagccgagactgcaccactgcaatccagcctgggcgacagggcaagcctctgtctcaaaagaaaaaaaaatctacacatccctcaccacactgtacataggacagctgggtgtaaattacatctccattt

SEQ ID NO: 564099 - DNA, 204 bp, Homo sapiens
ttttatttcaaagttttttcaggggggctttttgattagtagggaattttgaacccctctttaaaaacaggtagaaaataaaacccatttgtaaagccccatttggatatgatgccagcctcacgcatttgtaaatttccaaaaattcagggaagcctccccaatttgcccgtttttaaaaaaattttgggttaaaatttgcca

SEQ ID NO: 564100 - DNA, 154 bp, Homo sapiens
tagacatgatacaatcagccggtaccctcataggggcaacttcagaagaactcagatagaatttctgcctgcagctccagtatcaaggatatggggcagcacagccacaacacagagctggtgctcctcacacgtcctcttggcccttatcgag

SEQ ID NO: 564101 - DNA, 888 bp, Homo sapiens
aggctaggatacgagcctgagtgttgaatccggcaccgaggccatgagtagctttggagctggcaaaaccaaagaagtatcttcagtgtggctattaggccatccacccagatatggtcaccatcgccacgggacaggtggcgggaaccactaaggaagggaagccgctagccgccccacgtgcgcatctgggacacaagtgtgacgctctagtggccggatcatctgagcgaagacggatgtgatgttagattcttgattgccggggatcaagtagagaattatcacctaatcttagatggcgagagcaggcctggctagaaaacagtgggtttgccgtccggttggacacagcaatcttcgcgttgagagagaaccgtggatggcaatatctgagctcattggcattgtgaaaagaagagcgggatatgcatccagcatgtgaagcaagaagattaattggactcactctggatcgcacccccatcagaagcctctcagcttgatttgcgataaatcgtcgcaatcttggtgagaaggccactcccattgcaattgttacatttggccacaacagacttattttggagtcccaacagaggtgtcaaacgtactagccgaacaaaccccacagcctttctgagctacacagtctacgatgcctgctgtgaataagaaggctgttttaaattggagccattgatgttgatttggagaacgcgtaacatttattgcatccgagattgggctattcaatgggattgtcacgcctcttgaatcaggatagactcttgaaaaagggtgctcgcaaaaacttcggcgcgggatctaattgcgcatgggatcagctccaccgttgggcaggccttggtcatggttacttggccc

SEQ ID NO: 564102 - DNA, 125 bp, Homo sapiens
ctcctccacacaactgtctcttctattctctctgctggagtttcctcctcctcctcctcctcctcctcctctcttcctcctctgccttcctactctctgtgctctcccctaggaaaggggaagag

SEQ ID NO: 564103 - DNA, 150 bp, Homo sapiens
ccccccccccccccgttataaggaggggggaagggggggggggaaaggggggccggggaaaaaagggggttttttgcccaaaaattttatgccctttaaagtcctggggggggggcccttttaaaaaaggggtaaaaccccttttgggca

SEQ ID NO: 564104 - DNA, 355 bp, Homo sapiens
ctagtagatgtgtagctaactagcttctgtcattgtatggagatgaaatttgaggccctgggtgcttctttcagcagatttctccagattacctgcaacagttatttctacggatgacttctgcataggcataggtggactctggtctgttggagcatggtctgctgaggaagcatgatcagaaagatcttgtaaagaaagatgttctttcttttcagagtttagctggaattcagctgaagacttcaaagccttcacagctttaggttcaatgcgatctgagtcactgggctagatagggcagactgaagcagagacagagcgagcaagactcataggattaccaacatcagga

SEQ ID NO: 564105 - DNA, 884 bp, Homo sapiens
gaccagtgcccgctgcgggtgctggggaatggcgccttacaggtgcccacctgcctcctcagggtgaaggcggggctgggtgtgagcgtgctgaatcagaactttcctggaaagtcgccacttggtgtggtcagaggatcactgaagtcaagtacgtaatcagaatatcccttctccctaattggtttccacctggctgtcgtggaggagggagaggcgaaggagaaggaatggtgcatgcactgaggagaggatccttggccggggatctgtctcgggtgtccacccccgtaatagaaccttgtcgccaaattctgggccaagttacagaaccttcgtcctcatttcccaaatctgagcggtttgagggagctctccctcttgttctgaccgccccgagcgttccttcaagcccctcatccaagatgtggcaagattctccgcgggctctgggccttctgccagtcttctctctccattgggcaagccaaatgattccctaaatcgtgttcttccctatgtaacaacgagtcacactgatgtccctcatgactggaggagaatacccaaggttcttaggctgactgttattcatgcctccttccttcaaaaactattttgggggcattccgggtaaatcaaatccaggatctattggtgaggttaataactaacagaacaggagtttcagggtcgtatatggcggaccggtagggacgcggggtaactttaaggtgcggctttgaatatacggtttggaattttcttgtgacctgggtgtgtgtttttggaggcaaattgagagagggtttgcacatggggaagtagggagagggggacacaaaaatgtgtttcgtgtgtttgtgttgtttgtttgtatggga

SEQ ID NO: 564106 - DNA, 1443 bp, Homo sapiens
gccttcatcttccgctctggcataatgctctgcttggaaaagacgctgagtccccgcgagctctggcacctggtgcatcgattgctacggctcagagctgggctctcacacagtgatggatgaggatatatgtctcccccttgcagctgaactggtctgggtgacccccgaaggaagtgggacgatgtgatcgccctgagcgaccatcacctcctcgtggggcagatgagctgcagacatggatccaatgctcagttgggttcgtgccgtgagccatgtcacgcccaaactttcccgagccagcttgcgactgcagaccatgggggcagatggaggaatagacggaggtgagcagcgtatgagcatgccagaccatgacgcctcctccaggccgagatcatggtgaaccaccggtgtgctgaatcccccgatgcacaggagacaccatcccatgctctgacggtggctccatccgaaacgcttgtggcaccctttgtgactccttggattgacccacgttggacgagacgcttcatttcggacgaagaactagcaggatgtaaaccttcgcttctttgacagtcgcacttggtgcgacgagacaggacatagaccttttggcgcattggaccgcttggctttcccccgtaacgcgttcttcccgtgggcacggcactattccgttcaagttcgaacacactctcgttggtacttgatcgcgaattagattgtggggacctggcactagaacgtctgcgggacttctataaggcgaagccaattgcctagtcatactaccgtactggcagaaaccttatgggcccccgtatcgcagatcgccaagagggggatcgctatctcccatataactaacgccatatgccttggcaagactggctatatcaggccaaggatactcgttgtaactccctttgaaatgtgcccactcattttgaggtgaagcttggggttggggaaaccacagggcaaacaacgttttgctcagatgcccaaaaggcggatcctcggtcgcgtttggcgcttgacgcggagttatcaactgcgaatttcgcagcgccgatattctatgaggagaagcctccagataatgtggtgatctggccctaatagttaatagcctgccactatatcctgtatgtgtgggtctggggaacgcccaccttactcatggcaacgtgcccttgttgatacacacagggtgcccggcactgatccctcccccctaaagggcaccgggcgacgcgcgtcttgtgtttgattttagggtgtgggacccttatccacgaatggtggttggccttgtcaccggtcgcagttggtggcacaatttctcgccccgatatcccatagttgtatctctatacatttccttaaaggagctgtggactgagcccgggcgcttattccttgtgaagtatctcc

SEQ ID NO: 564107 - DNA, 416 bp, Homo sapiens
gagaggggggggacgggggggctcaggttacaggggggtcttttaaatacaagcgttaatcatcgggtggatcaagaatggcaaggctcagtctaggaacagcagcagaaatagcgagagacaggggacttttatacaaaaaaattggtggcttacaaaacatatgcaaaaaaagcttaaaaaaaccagagaccaagggcagcatcctggctaatttttcatctacattaagaaaaaaaaatctggtaactaagggttttattttcccttaaaaaaaatatttcggcttagggcacaattggcgggggggctttagaagaataagccagggttccacagcatccccctggagtgatatgttcccatttctcggcttttaatagttaagggcatttttttctcccccggatacagcg

SEQ ID NO: 564108 - DNA, 413 bp, Homo sapiens
cactcaaaaagggccttctttttttaggcggttgaaactaagatggacaggttatcaacgaacttttacgcctctcgatggccttgaataaaaattgcacacctcaggggcagcaatatattcccagcaagaataaaaaagaaatccatttcttaaagaaacagctttcaagcgcctttttgcagtttttcaggagcgcaaaatagatttggaataggaataagctctagtttttaccacccgcccctcctccaagatttagaaaaaagtttccaccataatttagtttccagaaaaatcttgtgctagaatcctttttaaaaggtattttgaaacccattaaaaccgcttttttttttccagcaagtatccacccaacttggttctgcttcaataaatttttggaaaaccta

SEQ ID NO: 564109 - DNA, 112 bp, Homo sapiens
gccgcgatgagcggtcacgcttttctctcctttcattgtgtgtgcatgtgtgcgtgtgtgtgtgtgtgtgtgctgcgctgtgtgctttttctttctccaggacgtggtggtg

SEQ ID NO: 564110 - DNA, 237 bp, Homo sapiens
  misc_feature (33)..(33): n is a, c, g, or t
gtgtgacgctgcgggcgcggctagatcgctgancagaacagcgtcagcagatctcggtgctcagcggggcaggcaagtgctcgcagtctgcacactgcatgattggggcatgagtatcctggatgtgaagagcttgagtcagccttgaaggacctcaagatccaatgacctgtgaggaatatgtttgcttcatcctagctgcttgggaaggggggaagaggggtcagggaggctaag

SEQ ID NO: 564111 - DNA, 161 bp, Homo sapiens
ctttgcatgttgtgggacatggcactctcgacccggacagcagcgctcgctgacagcttgggaggacacctgcgatctgtgtttttttaaattgctcgtctcttcatgggggtcagccacgctggtctggagttgctgactgttgcattaattgtgctgtt

SEQ ID NO: 564112 - DNA, 119 bp, Homo sapiens
gaactagttctctctctctctctctcctcgtgccgaattcacaggggcatgcatgggaagtaacagttgctaggcttcaatgcctatcggtagcaagccatggaaaaagatgtgtcagc

SEQ ID NO: 564113 - DNA, 477 bp, Homo sapiens
ggcaaagaggggagtgcactgagccatgtacgcaaaatagttgaaaaacattttagagacgtggaaaaggccaacaaaaaaaaaaaaaaaaaaaaaaaaaaaaaaacttgtgtgccgggggcgggctctctcggcgccctctcgagaaagaaggcttttcatagaaccattccggttgggcgcgcgcggcgggcgcccaaggtagggataagtgtggacactgtgggccaaaagcgcgggttcccaaagggaaaactcccggggcgcaagagagaatcaagggagccgtgggggtcttctctcaaccaacattaaaaaaacaccgcgggggggaaccccaggggcggtgtccgtggaacaaaatctccaaagagggggaggtccgaggagggcccattacaggggcgttcttactaacaacggggaggccccaagggagagctcgaagatttcaaaataaccccccggcggtgtggt

SEQ ID NO: 564114 - DNA, 2589 bp, Homo sapiens
  misc_feature (2589)..(2589): n is a, c, g, or t
attgtgttgtgttgtgtgggtcatttagtaattgttttggtttatgtattttttcttgtttgattttttgttatgggtgttgtggttggtgtgtatgtgtggtatgtgtgttcggttggtctggtttggttggtttgttgaggttggtgtgtgggtttgtggatgggtgtttgtgtctggttgtgtggtggtgtgtttgtggtttggtggttgttgtggtgctgcgtctgtggcggtccttcgggcctgtccgcgttgtctttcgtgccttgtcccgcgttcgctcgtccgagcctcggtcttcgatctttccctgctctctgctctcgtgcgtggttcacgtgactacgccttgctgctctgttgtgtttctcttctctgcctcggctgctctccttccctcgtcatcgccctcctctgctcctagctcgcgcctcgcgctcctttggcgtcgctgttttccttgttgtgctttcgttttcgcgttgcttcgggccgtctgtcctctgcccgatccttcattcgctggtggtgcgttgtttgttctatgttgctctctcttcttctcgttgcgcgttggtctccgttttgtgtgtggagggtggttggtcgtggtgagtgggtgtgcagtgggtcggggggggcggtgtgggtctgattggtgggggtgggcgggggtggggtgggggtgtgtggtggtgggtgtattgatagagggggttcgagtgtgtcaggtttgaggatgatccgtggccgcgaggcggggtgtgtgggtggtggtggtgtgtgggggggcgctttctcactccgctgccatttatgaggttggcaagcgccgtcctcacctttgcttctggatgtctcaaccgtggccagctgtcagcaacagaccaggccagcacggtttcagggaactgcttcacgtggatgatttggaattggccagcggttggggttgtctgtcccttcgctgcgtgggaagttccaccgccactgtagttaagccaccaggatgaagcagggttaggtccagggacccagtagagccttgggaggcatgaggtgggggggtaaatgggcttggcagagaaatggagattggtaaggggtctctgattagaatacgagactgatgatgttggttcagcacgcgtgcaagatgaggaatggtgacatgcagcaaaccttagagcgttcccagaaggaagcaatgtgatgccgctccatctgccaagagggtacactccttcaagctccttggcacaagagccagaccaaggtgtcacagggaactccacaggacagaatgccactgccagaggttagggggatgctgggtgaaggaaagtcttcctggggcctgcagcccagtctcaaaacaaggtacaaggacatggctcactggtcctcatttgtgagctcagtaggcagggagcgagccttctctagggtagatcacatgcctggggaattttccttagggttaggatgcatccacggagacagacaggttagggccagtttccgggaagctcagtcaagtgctctgggctcctcaggcctctcaggcagaccttttctgtagggcagtgccccctaggctgcagctctgacctttaggaaaagatggaacgaagcttggctgatcccatgcccactagcatgcaccagggtccccaaaccaactagatgggcaggggctgggcccatggggtccggaatggagggtggggccactagacctggggtggggaggagatgggggcacagcccccagggtccatggtgttccagagtcccctgggggcacagcccccagggtccatggtgttccagagtcccctgagtttcaggttcagctgatgtagatacgatggaagtcgtgggcaccaaaggccgcgttgcacttggggcacttcctctggcgggcctcatagcggccccgcacgcactcgaagcagaaaacgtggaagcacttggtaaggactgcatccttcttgcgggtgttacagcaggggcaggtcaaccgcgccttgtactccttgatctcctcctggaggatttcgtcggcatctgcgtagacctccgacttcctctgcttttccagcttgcgccgcagccgtgagatgtcctccttgagccctcttgaggttgaagctctctttctcacgagcagccggtctctggcaggcagggttggatctcccgcagcagagttctgacgtgctccaggtggacttcaggtcctcgagcaactgagcggtactaagccatccgttgtagactccaggttgagtggcaaaggagtcttttaaacccgaaggtgctgaaggaggactatccctcaggttggacagcacgaagtgggcataacctgtgaattaggccagagccggtgtcacaacatcgtcacccgaaactgaacaccggtgcgcacaaccgagaaaaaaagggagtcacaatcacacgatgagaccgcctgcgtgctccaaggcaggacaacatataaccactaggacagagagatatcacacaaaagatctgtattagtgcagtcttgttgtgctcgtagtttactcttttagtcan

SEQ ID NO: 564115 - DNA, 315 bp, Homo sapiens
aatgggtcccattttccctataattccataggggttttttgagagggtcccttttatttcccctcccttattcctaacggacccccggggccccccttttgggaacctgggtaagttaccctttggggggaatgggggccaactggccttttgggttaggggggggatagaccccccccaatagggggggggggccctttattcagccccctgccgccggttttggtccaagggactgggccgattttgaacgaattgggggttggggttccccccccccgcttcccgagatttaaggttgggccaaacctttga

SEQ ID NO: 564116 - DNA, 1317 bp, Homo sapiens
ccaatgagaaattaagttcatgatagtgcttttggagaacttgtcaaagttagcagccaacggagaaacataaggagcctagcataccgtggagaacccagtgaacaaactttgaggacagaagaaacaacagaaaaagaacaacaaaaaccgggggggggagggcgccgaaagagtcgcccgccggagggggcacgcacgggtacataaagcgaggatgcacaccgggcacttggcacgcgtgcaacacaaagggggggcgcccctgataatcgagggagagccgtaatatataatacagaagtatagcaccacagaggggacggaggcaacatacaacaacacagtgcacgaggaaccggaggggaaacagcaacgtcgcggaacgaacgtcagggaaggccattgtgtgcgagaacaaaaggggaaaacaacccattatactctaccagggggggagggggaaacgagacacatacgatgcggggactaacaaagacaccaaccccacgacacaggagaataggacatctttaaaccacaggccggccccagagaggcaagacagataatactcaaaaaagattccatcacagagggaggcgaataagacagggggagagtgagacaaaagacatgaaagaagacagatgaatcacgaccagaggcgagaaggcgtgagaacaataagtccacacgggagaacccgcacgagaggaacagacgtagaaacccaaagagccaacaataaaagaaacgcgacccgaggacaacacaccaaggagaacaaaaaaaaaataaaagccaacagtaataccaccacagtgtgacgcacacaaggggacatacaacggatcgagaaaaaaaagaacaaacaggacaaaagacacacaaaaaacaagggaagaacaacagcaaaagagaagaacaaggacacgacaagaagagaaacatagagaaatgaataacagacaaatcacataagcaaaaagaaacaaaaggcgaacaaacaagggcaaaaaggaaatcgggaaaagctgagtaaccaaagacaagagtaggcacaatagacagacacgggaaatagaatgacaaggaaaaaaaacatcaacgaacaccagaagcgatagaaatagaagcaaaccaagacgacacaaaaaacagagacaaagagaaagacaataggaaagccaaaaaagtaaacaaccaaaaaaaaaccatgatgaaccccaacaaccataggcaaaggaagaaaggaattcacaaaaaaaaacaataacaaaggagaaaaataaacaagcaacgtaaagaacgcaa

SEQ ID NO: 564117 - DNA, 402 bp, Homo sapiens
  misc_feature (12)..(12): n is a, c, g, or t
  misc_feature (271)..(271): n is a, c, g, or t
  misc_feature (386)..(386): n is a, c, g, or t
ttgagacggagntggctctgttgcccaggctggagtgccgtggagagtctcggctcactgcaacctctgcctcccgggcccacaccattctcctgcctcagcctcccgagtagctgggactacagcggcccgccaccacgcccggctacttttttttgtattttcagtagagacgaggtttcactgtgttagccaggatgatctccatttcccgacctcgtgatccgcccgcctcggcgtcccaaagtgccgggattacaggcgtgacacncgcacccaagcctcctgtttaattcctgtaactgctacccttctcccactcgctgcctcctttctctgcttataaccacatatgtcacatgtcctgtgtctatgcccccactgcnctgtctgggcactctg

SEQ ID NO: 564118 - DNA, 176 bp, Homo sapiens
caaatatgtggaccaagcgggaagtaatccagaccaactcctatgacatgacaggcactcaagcctgatgaggcagaaacctggcagctgtagatgttggaaaggataatttatgtgttcaagtgactaggattctaagggctagatgctagctccaagcacggctggatcctagt

SEQ ID NO: 564119 - DNA, 239 bp, Homo sapiens
  misc_feature (17)..(17): n is a, c, g, or t
atgagaccacacacatnaatacacacatgtatatcgaatttgtaataacggatccttactgtacttcatgccacttcactgtacacttaaaacattattaaaatggtaaaatgtatgttacatgtatttaccacaataaaaaaaaacatttttaaaatggaagtagtagaggtgttgaccctacttaaagaaggaggagggcagtattttcgggatttttaatagaggatccccttagg

SEQ ID NO: 564120 - DNA, 342 bp, Homo sapiens
cgcgcagtctatagggctgaggcttctgggtcctggcgacagggctggcatgaccccggtggtcgaacatgccagttcgcctcacacgcagagggtgcctcggccagcgccctgtgagtggggcatatcagaacattggacagaagccccaagagcctcggacaattgtggaacccacattgggctgagatcccacagtgttatatactgcctcgccggagggggaggtctcgggggacttgccgaccagacccttgtgatcccaggattgcctatcccctgtgccactgaccatactgtgccgggctgtctgtctgacctccatgcctagtcggggtgtcc

SEQ ID NO: 564121 - DNA, 462 bp, Homo sapiens
gacataaatatgctgtctcagcctctgcgtagctgtatctacaggcacgcaacaccactaccagcataatttattgtatatttatagtaagagacggggtttcaccatgttggccaggctggtcttgaactcctgaccttgcgatccacctgccttggcctcccaaagtgctgggataacaggcgtgagccactgcgcccggccaagatatccttaacatttctaaaattggaaagttgtattcttgatatatgttgaataaaaaggtattacatgtaacagtatgtatagtaccatcccattaatgtaagaaaaagtgtatgcgtatttgtgcattgcagaggaatctacaagggtacatcccagcctgctaatagcaggacacaataggatagtagtagtcaactaggaaaatttgtggttccaacgtacttggagacagcatatcagggtaccgagctc

SEQ ID NO: 564122 - DNA, 113 bp, Homo sapiens
  misc_feature (77)..(77): n is a, c, g, or t
atgactctgataatagcggtccgcttaaagaagtcacaccaggtgggccgggggcggggggctgccccctcagtagntcagtcagcgcggccagcggggtcactgcagctcgc

SEQ ID NO: 564123 - DNA, 627 bp, Homo sapiens
ggtgctcaaacgggacgggcacacgggtgggcttggcagttctccaaggattcccgcctgctcccaagacccccgggagtcgtaggaacccgttcctggacgctgacgtcggcttttcagggatccctcgccggacgccgcggagggacagagcctgggaagccgtcgccccgccccgtacccttccccgcgcgcaggggcccggggcgctgagacccggtagagcaaaagcgcaatgttcccagggccccttgtgatcctcggtggcatgttccggggcaaatgtgtcattgcgaggggttcaggaagccccgtgccttgttgatctgtgagcgggaaacccccttccttggagtttccgccaaagccatggacacgcccctagtcttcgttgagcttcaaccaggcacttcttggcctgggaggtggccactagtaatttgttgtagaacccgctctttgccccagtatatggccttgtggcgcatggcattgaagcctttggggtgatcccccccttttaactgacgatgtaattgccccttttggcccgcagtattccccttgtacgcggtgttatggtcaggtttcccttgttcacccggtccttcttttcccttccgttga

SEQ ID NO: 564124 - DNA, 508 bp, Homo sapiens
cttgaaaggtacgacagacgaggaaggtacagcagaagaaggaacagagaaatatatctgtatgttataagaggccgaagtatataaaacaagaaggtagagagggttacaaagtcttaatacataagaataaataacaacctggtattctcttaacagtcaattttaagaacactaaagagaaaaaggcaaactgagaaaacaaagtataaaacaaacaatggccgggagcggtggctcatgcctgtaatcccagcactttgagaggccgaggtgggcagatcacgaggtcaggagataaagaccatcctggctaacacggtgaaacctgtctctactaaaaatacagaaaagtagccgggcgtggtggcatgtccctgtagtctcagctacccgggaggctcaggcaggagaatcgctggaacccaggaggcagaggctgccgttagctgagatcgtgctcctgcactccagcctgggcaacagaacaccgtcgaagggggatcct

SEQ ID NO: 564125 - DNA, 330 bp, Homo sapiens
tctcgaggatccccgagtgttctcaagacacattattgtcacatcaccacagttgaaatgacagcgaagaaatgttaacggcgcgagagagaaaggtcgggttacccacaaagggaagcccatcgagactaacagctgatctcttggcgaaagctctactagccagaagagtgggggccgagtattcaacattcttgaagaagagaatcttcaacccagaatttcagtatccagcctagagtaagcttcataagtcaaggagacataccatccttactgactagcgaatgctatgagatcttgcaaccaccatgcctgccctctaagagc

SEQ ID NO: 564126 - DNA, 139 bp, Homo sapiens
taacatccgtagtggtgtgggtagcacactgagtgaggacacaagagctggtccgtgtccgctgcacagggcaggtgtgatggccccacgagtctttgggagagacacgcagatatagcggctcccacggtctgacccg

SEQ ID NO: 564127 - DNA, 375 bp, Homo sapiens
  misc_feature (300)..(300): n is a, c, g, or t
  misc_feature (329)..(329): n is a, c, g, or t
  misc_feature (364)..(364): n is a, c, g, or t
ctctactgtaaaatgagagtgttcagttttaagaggcacattttcggagcatggatagagtctttccaggagaaaacagtctgtctggtgatggagtaattaaaatgatttgagacattatttaaggaattagaggctgggcgcggtggctcacgcttgtgatctcagcactttgggaggctaaggtgggcggattaccagggtcagaagatcgagaccatcctggctagcatgggtgaaaccccatctctacttgaaaatacaaaaaattagccgggcgtgggtgatggggcgcttgtngtcccagcttgctcaggaggcttgaggcngggagattggtgtgaacctggggaagccggctttnccagttgagcc

SEQ ID NO: 564128 - DNA, 105 bp, Homo sapiens
tcgctcggtcccacagctctgtacacatcaaacagtctcctctcctccacgcctcggggtctgggaagtctcacctcactgatttcacgtagaaaagaaggcgga

SEQ ID NO: 564129 - DNA, 240 bp, Homo sapiens
  misc_feature (148)..(148): n is a, c, g, or t
  misc_feature (198)..(198): n is a, c, g, or t
tcagctcggacccgctctcgtgagactgaattttttaaagcaggtctctaaaacaatatctgtattgttcaggatatgctccttcccccagcttaaaaaacaaaaagaaaaacaaaacaaataacaaaaaaaaacgccaactgtgtantaaagaagtatttatctcatgacaagaggtaggtatttcatcgtttcacnctctgaatgggggcgcgctcatcactgacatggactctatgg

SEQ ID NO: 564130 - DNA, 183 bp, Homo sapiens
atccctccccgacatcccagagtggactaagaatgccgactctcgatcggaaccgttccacccccaatctcggttgagagagtaggccccatgatatccaagagatctctaacgtgatgacccctgtaaactacgttagcaccgtcatggagaggaggtcagaccgcagagtacagacagaga

SEQ ID NO: 564131 - DNA, 812 bp, Homo sapiens
  misc_feature (780)..(780): n is a, c, g, or t
  misc_feature (792)..(792): n is a, c, g, or t
ccgacatcattaaatcacgtgcctgcttccccttcgccttctgccgtgattgtcagtttcctgaggcctccccagccacgcttcctgtacagcctgcagaactgtgagtcaattaaacctcttttcttcataaattacccagtttctcatagttctttatagcagtgtgaaaacagactaatggacccttctggttgaaggaatgcagccattctgcttgtttgactatgtcctttctattcatctctatttcctgggaggtgtttatccaagtgcaataggaggtattggtgaccgcacagtcccctcagtgttctgctagtaaatagttgaaggttgatcattgatcttctgcgttttcagtctggcatggaaaagcccctgtgcaactggtaaagatatcaataagcaccaggaggtatctaaatccaccaggagccataggcatcacgttgacgtccatttaccagtcttccctggcaagattcttctgaattgtgctgccttggccaaaagaggtatgggaggggctgggcgcagtggcttgtgcctgtaatcccaacattttgggaaaccaattcaggtggatcgttagaggtcaggggttcaagaccatcctggccaacatggtgacatcccatctctactaaaaatacaataagttagctgggtttggtgttgggtgcctgtaatcccagctactcgagaggctgaggcaggataatcgcttgaacctgggaggaggaggtggcagtgagctgagatcgtgccattgcactncagcgtgggcancaagagtgaaacgtcgtctc

SEQ ID NO: 564132 - DNA, 655 bp, Homo sapiens
ggcaaacaagagggaggatacggactcggacgtcgcgtgtcttctgcagccgctactggaacctccacctcgactccagcggcccgaagggcggaagcagtggataaagaacaggttagaaaggcagtggagcgctctcttgacgcattgcaagtccaggaaaaacgaaattatgggttgctgttgaatagagaatgaaaagtttatgtggaatggtaagtaattgatggaaaaattcgcccacgtaaagacactgaggggtcaggattagaccttggcctccgtagtatacgatcagattcggaacgatatctgtttagttacgaggggatgaaccccaattcagattcctgaaaagacagaacagtttgataagagcagctttcaacacaaggcatggaaataaaaaaccgttcctcagattatctgccctcccaagatctacacgacgggcttataaactcctatgacagccgagctccgccttcttgagcggttagattacttcccttactgatgccaggaattaatgcggtcctaaccctcactcatttgggagacatttcctccaacgaacgaaaggccggtatctgaaacctcctgccacagtatcaagagagcatccgccgtataggggacggctaaacattcacag

SEQ ID NO: 564133 - DNA, 659 bp, Homo sapiens
ttggactgaaagcttaagaaaacttggaaaattctattttgtgatctagtcaagccacagttatcaaaggctacattttcagtgtaagataaatggatgagtaaactcaaatatgtatcacgtgtgctttgtatcttaagatgtgtttccaagagcatctgaaattttgtttgtacatgtatcttgatttatagatcacagtggctttataaatgatcaagatacatgtacaaagccactgtgatctataaatcaagaaaatccattgtcataaccatttttaaaagtcaaaaattaagacatccttaattaaaaagtttcaaatctagacactaaatgtgtgtgaatgtacaaagaaaacaaaccattgcttatgctgttatatactagagaaattttgttttgcttgctgttttaacttgacagatgaaggactttagttgaacttcatattgtaagaactgttaataaaagttgtcaagtaaaaagcgctatatctaaaaagactttatgaacagttattctatcaacttttaaaggttttaaacctgcccagaaattaccttggtatctgaagtttccctctgtctcctcctctaattaagcttgttatttgtcatgcaccagcattggagataataaaatttcttgttctgtgt

SEQ ID NO: 564134 - DNA, 458 bp, Homo sapiens
  misc_feature (82)..(82): n is a, c, g, or t
  misc_feature (341)..(341): n is a, c, g, or t
aagtttttttttttcatatgctttcattcatttgtttttttttttgtggggggtgtataatgaaattactctgtttaggagnatgaactgatatttattttaacagcaccattgaggtatcacatttattacatggacctgagcttcaatcgtagtaaggaaaccagcccaggaaagtcgttccatcactagccagaagttacagggcaaaattatagcttaacttttggaaggcaaaatggagtctctgtcgcccaggctggagtgcagtggtgagatcttggctcactgcatcttctgcctcctgagttttagcagttctctgcctcagcctcccaagnagctgggaccacaggcacgcatcaccacgtctggctaatttttgtacttttagtagagacggggccccaccacccttggcaggccggtcccgaactcctgacctcgtgatccacccg

SEQ ID NO: 564135 - DNA, 972 bp, Homo sapiens
gcgcggtggcacatgcttgtaatcccagcactttgggaagccgaggcgggtggatcacgaggtcagaagattgagaccatcctggctaacacggtgaaaccccgtctctactaaaaatacaaaaaattagtcgggcgtggtggcgggcgcctatagtcccagctactcgggaggctgaggcaggagaatggtgtgaactcgggaggcggagcttgcagtgaggcaaaactgcgccactgcactccagcctgagtgacagagcgagaccccatctcaaggacaaacaaaaaacaaaaaccggaaaaggggttctccttcaacaacatttcagcataggagagatacgtggggtagacatcaaacaagatcgggagaactcgggctcattttggacagctaagtgatgggtaaggtacatggacagtcattccactattctactaaatttggcagtgttggaaacgtttccacagaataacaacggttcaggactatggtaatgcaatattttaaaacatttgcaccacattagcacctaaacacgggtaccaggagtccactaagctaacgccatatctacacatttgccgggcactcattaactcatacacttcaatggtggaggcagaaaacaaccagacggagcaggggttcacacgccataaggacaagctccacagtgccccaaggggacaaactgggccatttaggcagcgcaagaaacgagaagttggccccgcaaggttcaacgaaggacgcagacggggacaccaaggggggggaaccaagccaggtgggcgcagacaaggcgaaaacagcaagcaggggagggggtaacggcacagctgtggtgattgagcacaccggtgaacgccacgaccggaggacatgtagtggagggaccacaaaaacagcgaggtccccgtatgcgggaccagacaccctgggcaagaggaagacaagcgcacgaac

SEQ ID NO: 564136 - DNA, 126 bp, Homo sapiens
cacaacttggctaatttttttgtattttttagtagagaccggggtttcaccatgattgggccaggctgatctcggactacctaaatagtaggacatttcaaggattaggttatcaccgtgcagatt

SEQ ID NO: 564137 - DNA, 218 bp, Homo sapiens
aacagcatggggtgacaaataaaaaatctactttagaacccttagtaggaatgctttacactttccacagagccagaaacgaaaataccctgttatacgaataagtctcaaatacagatcctcgatgtttttgcccaatacacattgagtatttgtctaaatagcatttcttcttttgtagcgattctaggccctgtctagctcactgtgcattggtg

SEQ ID NO: 564138 - DNA, 209 bp, Homo sapiens
aaaaactacaaaaattagctgggcattgtgttgcatgcttgtagtcctggctactcaggaggctgaggtagaggattgctttagcccaggaggcagaggttgcagtagccaagatcgtgccactgactccagactgggcatagagtagaccctatctagaaaacaacaaaatcccaaaaccaggaggtgtttctagggtcagttccagg

SEQ ID NO: 564139 - DNA, 375 bp, Homo sapiens
acggaacgctgctgcgcttaagggccggcctttattccgtatttcgagtcgaggggacaggtcctagctatttctgatttcgaatcggaacaaccaggcatcgtccaggacgaactcgtcccggagaaaccttaccctccgctcaaggtcaggaaaggcgttatatagacattaaagcggccattatttagcggttttctcgggactaaggaccccaatcgatttagttaaagcccccgaatataatacgcgccaagcacgagacagaagtcagcaaacatcgggatataccccataagacctacaagaacaagccccctaaggactgcaaccggtcgccgagggaacccttcgcctccttagccgactattcgg

SEQ ID NO: 564140 - DNA, 326 bp, Homo sapiens
cgtggggcccggcctgcggagcccacagggcccggctgaccgggtggtctcggaccatgtctcccgcccaaagaccctcccgttgtctcttgctccccctgctcacgctcggaaccgcgctcgcctccctcggctcggcccaaagcagcaggttcagccccgaaggctggttacagcaatatggttacctgcctccgggggacctacgtaccaagaaacgagtgctcacccaagtcactctcagcggccatcgttgccatgcaaaagttgcagggctatgcaagtaccaggcaaagctgatgcagacaccatgaaggccatgaggc

SEQ ID NO: 564141 - DNA, 654 bp, Homo sapiens
tggggcttaagcacttgtggataatcagcagaggggtagggtagggtctcaagcctactccccaaacccgtcttaactcctaacactgggtcttctccttcttacaggattagaccttaacgtggcgttcttttcagctctccggggtggggccccttctgttggaaactcccttggttccccggcagcttcggagagtaagaatgtcgagactctccctctcaagaagaacaagaggtgggttgggggcggggatgtattagtgaaaagcgtgggtggaattagcgcgtggtctacaagagagcacaccacgcgggtggggggggccgtgcacgtgtgagacccgagcgcggcgcgcgcgagagtgggaaaaaacagcgtggatgtgggtgaagtggtagggatgagggacagatgcgcggagtgttgtctcctgtgtggagacgctctctctatcactatgagtgctctgtgtgcgcactgtgtggacactcgcgcgagagccacacagttcgcgtggggttggtcagcgtgtgtgtgtgagaagagggtgtgtgtgacagcagagcgcgcgagagcgcgccgagtgcgcgagcccgcagggtgatgagagagagagagagaccgagaggcccgagtgtgtagaagagggcc

SEQ ID NO: 564142 - DNA, 386 bp, Homo sapiens
  misc_feature (56)..(56): n is a, c, g, or t
  misc_feature (66)..(66): n is a, c, g, or t
  misc_feature (69)..(69): n is a, c, g, or t
  misc_feature (83)..(83): n is a, c, g, or t
  misc_feature (88)..(88): n is a, c, g, or t
  misc_feature (90)..(90): n is a, c, g, or t
  misc_feature (118)..(118): n is a, c, g, or t
  misc_feature (128)..(128): n is a, c, g, or t
  misc_feature (133)..(134): n is a, c, g, or t
  misc_feature (183)..(183): n is a, c, g, or t
  misc_feature (221)..(221): n is a, c, g, or t
  misc_feature (244)..(244): n is a, c, g, or t
  misc_feature (294)..(294): n is a, c, g, or t
  misc_feature (309)..(309): n is a, c, g, or t
  misc_feature (318)..(318): n is a, c, g, or t
  misc_feature (330)..(330): n is a, c, g, or t
  misc_feature (336)..(336): n is a, c, g, or t
  misc_feature (347)..(347): n is a, c, g, or t
  misc_feature (349)..(349): n is a, c, g, or t
catttgttcagtgggagtggggtccctgggattgggcagtgtggtggccctgtgtntcctcacctntgntcctgttttcatcnccttntntttggaagggaaaaggagttggaaggtntctggttttnttttnntttttttttttttgccaaaggtttacttccagcatttgagctttggctntcacccctgaaggtcagttatagtgccctgatgaactnaaaggatgggtgtggatgtgtgngcaagcctgagtgcgttttttggggaggggggtttatttttagtaccccnttttggggttttttnatgcagggnggatgtgaaaanatgggnccttttcaagngnagctctttcaaaaatagtcaatgctgggaaatgtgga

SEQ ID NO: 564143 - DNA, 274 bp, Homo sapiens
catcaggcaacactccaggagtctcaggacgtggccaaccgcttcgcccgtctaaggggcgctgaggcagaacaacgtgcacaatgtgaacgaccacaaattcatcgcgcgcttcttcaaacagcccatcttctgcagccactgcaccgacttcatctgggggtttgggaaacaacgcttccagtgccaactttgctgttttgtggtccacaaaaggtgccatgaatctgtcacttcttcttgtccgggtgcggataacggaccccacactgat

SEQ ID NO: 564144 - DNA, 181 bp, Homo sapiens
gaattccccccccccccccccccccaaggtgttatgtgaagaatttggggctgttacccaaatctaaattttgaagtgtcccgaatctccagcaacctagaatgtgttttgagatagaaccccttaaagggtgattaaatttaaaataaaggtgttaagagaggggtcccaatcaaactga

SEQ ID NO: 564145 - DNA, 481 bp, Homo sapiens
gcattattgccaagggtccaacaacatccatattttctctaaattttttttatataacccttctaaacacataaacattaagaagacttttttaaaaaacaaaccaacctccccattttcatattttaatccaaaaaaaacaaaaaatattttcactatttattacatttctacttctttccccttttcaatccgtataatcataatatacaaaaaaccttaatataaaatttcaacctaaatcctcttttacaaaattttttatttcaaaacatctaaccaacttaacccttttataaaacaaaaaaattataatattatcctcaaaaccaacaaacctacaaattttcatatattaaaattttcccataaaaaattttttctaattctaaaaatcccacattatcccttaaatatacttccatatttaccattaaatccttaacccttacaaatcttttaacaatattttaactcaacc

SEQ ID NO: 564146 - DNA, 396 bp, Homo sapiens
tgtgcaagcacagaaaccatactagggaactgtgtagacaggaaccatgccagactatccaaagggctttttatcagcactataaaattgtaaagctaatctcaattcctccaagcagtctggtcatctctgaaaatatgccattccagccaaagccttgataaaatagccagtgtatctaattatgtcctgttataaaacagatccttattgaacttatgcaaatcactattttgccataaattaagaatactcacagtttccaaatttgggagaaatccagtagtgagaaaggcaaatgcttcaaatttgcccacaaaggtatatttacccaatttttgtaagctatgaatagctcaaaagaaaaaaggtttattaactctggaagcaaaacat

SEQ ID NO: 564147 - DNA, 375 bp, Homo sapiens
ggatgcaaggctccccccatggcctagctttttgacagcctttagtgagcgggccccatgttttgtgcactcgacattgctggaaaaggccccttttttgcttgtttcgggactgtgctaaacagctgaagttgtcatattgtgactttgtataaaaaaggctttatcccattttacttttcatgaattttagctaaagcctttgattggactggggacttttttgagacaagggctgcccaccttttttttttattttcctaaaagtttagcaaagcttttgagggacaggggtcaaccctgtttgtttccctgctttgaaacaaattatgtttttatttattatgttttttattaaacaaagcctttaaagga

SEQ ID NO: 564148 - DNA, 992 bp, Homo sapiens
tatcaggagtttcttcccggagcaaggacccccaagacggaagaggatggccgcggcggctctgaggagattttggtcccggcgccgcgcagatggctgtgtgctgacgcggtagtgtgcgaagccgggagtgtggtgctgctgtgctggggtcctgggcccgcgcgctgctccgggactactgccgaggcctgcagggacgcttcggcggatgtgctaggtgccctggcctgtgggctgctgcctgctagttgtaattgttgtgtgtacttgcttggtgctgtgctgctgtgctgtgccttgctatcactgctagtgctgccacatgcgatggtgttgcctatctgatgtgatgtgctgctagcttgtgatgtgctgtctgtgggaccctaccttgcttgcttggctgcctgtgccaccctggcaaccgcggagtcctgaagccttccgttgcaggatggcttgctctggcttgctgtgggccgtggccgcctgcgctactgtcaaccttggggctctgctctgcttggtgtactgaggctgcccttcgacggcccaggccagcctctaccaggcgctgtttgccggctacctgcagccccgctggacctgacttcccctggcctgggtcctggactgtgggcttcgtgggtcgctggttgggtgctgggggcctggatgcgcgactgcgacatcaacgacgacgaattcctgcacctgcccggcgcatttgcgggtggtcgggccccagcagctgcattccgagaccaacgagcggctcttcgatgagaagtaacatgcctgtcgtgctcaccgacgatccggtgggaccaggcgctgtgggaggagcaggtcttgcagaaggctgatgaaggcaggctcgcccgtagccatgccactcgctggtgcaggcggaggccctggatgaaacactgagtcctccgagtcctggaactgcttgctgggttgtgcgaactgagttgcctccctga

SEQ ID NO: 564149 - DNA, 359 bp, Homo sapiens
gcctactactactaaattcgcggaaaaaaaaaaaccctctaccctttcacacactacggaggatttcatctcttgtatatgatgatctggatccaccccccaataaatttatgctcagggtcaatttcttttttcttttttttttttttttttctttttctttgagactgggtctcgctttgttgcccaggctggagtggagtggcgtgatcttggcttactgcagcctttgcctccccggctcgagcagtcctgcctcagcctccggagtagctgggaccacaggttcatgccaccatggccagccaacttttgcatgttttgtagagatggggtctcacagtgttgcccaggctggt

SEQ ID NO: 564150 - DNA, 267 bp, Homo sapiens
actatcatgaatgccaacatgcatccctaacaacccagtgctgttctccaaatattttcagttcattttttatgaacgtattctgactgttccatcccacccacttaaattttcccatggccacatgactttttttttttttttttttggccgatggaggttgagaagaaataacatgtgttgactttttgtcgggagaaattcctcacaagaaacagcgtttctattccgcatgtgttttttctctcttttcctttgagccatgtg

SEQ ID NO: 564151 - DNA, 170 bp, Homo sapiens
atgtgtctgaactggctgctgaatgtttatgatacgggacgaacagggaggatccgtgtcctgtctttaaaaactggcatcattccctgtgtaaagcacatttggagaaaagtaccagataccttttcaagcaagtgcaagttcaacaggattttgtgaccagcgcagct

SEQ ID NO: 564152 - DNA, 1158 bp, Homo sapiens
  misc_feature (813)..(813): n is a, c, g, or t
  misc_feature (1096)..(1096): n is a, c, g, or t
gggtgctccaacaccaagagctcggacagctgggattcagagaatacctttgcctcccacacctgcaccagaaacatacgaagattatggatatgatgatacatacgcagaacagagttacgaaggctatgaaggctattacagccagagtcaaggggagtcagagtattatgactatggacatggggagctccaagattcttacgaagcctacggacaagatgactggaatgggaccaggccatcactgaaggctcctccagctaggccagtgaagggagcatacagagagcatccatatggacgttattaaaaacaaacaggagggaaaaatatcagttatgagcaaagttgttactgatttcttgtatcccaggattcctgttgctttacccacaacagacaagtaattgtctaagtgtttttcttcgtggtccctttcttttccccacttcctccattcttaactctgcattctggcttctgtatgtagtattttaaaatgagttaaaatagatttaggaatatcgaattaattttttaagtgtgtagatgcttttttttcttggtggtttaaatataacagtgtaccttttataataaaaaaaagttgaggttaaaaaaaaacacaaacatgttagtttcaaagtggcatggttgcttaacaggttctgaagggctgttaacttttgcttagagttcgagtctcgagggaccccgtgaaagtccatagtgccagaaattccaaaatagggcacactttccacatcacgggcgcgtcaaactgtgaacccgatggtgcacaccgggtgngtgcccccaggtaatagggacccacaagtgccttagaaaaagctgcttatagagcagggctgggtggacgtaaaggggagagaataaaataggaaagaccccacgcgaatgatagaagacgggacaggacagagatagcggctctgaaccaaagcgatactgtgggagcggagcaacaacaggggtgggagatgagcaaccccccacggattgaaatggaatcagagaggaatacacggtgacgacgaacaagccagtgcgtagcgattagtcaagtaaagangggatccagcgggacgccccccctcgattagcgctatgcgagccatagatcgaagtacgcag

SEQ ID NO: 564153 - DNA, 123 bp, Homo sapiens
taggaccaggcttgagatagggtcatccttagggaagctcgtcgagcttacccacgatgcctgctgctgcgcgtccgaggcaggaagccgaggagacccatgatctgggagcggagaacttta

SEQ ID NO: 564154 - DNA, 191 bp, Homo sapiens
aacaaggtgaaactgtgtctctagtaaaaatccaaaaaattgtcggagtctggcggtgcacacctgtgatcccagctaatcgggaggctgaggcaggggaatcgcttgaacccggggggcagagattgcagtgagccgagatcgcaccactgcactccagcctggcaacaaagtgagactccgtctcaaag

SEQ ID NO: 564155 - DNA, 990 bp, Homo sapiens
ataaatattatactagcatttaccgatctcacttctaggaatactgagtatatcgctcacagctcatatcctccctactatgcctagagggaataatactatcgagtgttgatatatggctactctcatagccctcaacacccagtccctcttagccaatattgtgcctattgccatagtagtctaggccgcctgcgaagcggtggtgggcctagccctgacgttagtcgtcgatctccaacacatatggactagactacgtacataacctaaacctacgtccagagtgcgtaaaactaatcgtcccaacagagtttatattactaccactgacatgactttccagcaaaaccacgagttaatttgaatcaacacaacacccacagcctaatgattagcatcatccctctactattgttttaaccaaatcaacaacaagctatttagctgttggcacaacccttttcctcgggaggcgcctaaaaaggcaccctcctaatactaactagctgaagtcctaaaccgtacacaatacaatggaagacgaagcgccagtgttccagtgaaccagctatcacgaagaagaagtactacctctcgatactaaatctccatagagagcaccttaattatcaacaggtcaaggcaacagaataatcatatttaataatctgcttcgaaacaacttatgccaacttggatataatcagccgagagggcacaaagcagacggctgaaggaggaaatacgtgactaaggtaacacagagagatccgtacagaacatcgggggataaaatcaaaagcagcagaaaaattaaacagacaaggacagacagtaacggagagaagtaaataagaaaaagggaggcaggacagaaggaaagacaaagcagtcacaaggaaaaagcaaagaaaggcaaacagagagggaaaaccaaaaagaaaggaaagagggagaaccgagcaaacaccccagagaaaaggaaga

SEQ ID NO: 564156 - DNA, 313 bp, Homo sapiens
aacgggtgatgcggttgcagtgagctgagattgcaccactgtactccagcctggcgacagagcaacagcgagactcagtctaaaaaaaaaaaaaaaaaatttcgccgggtgtggttgggggccggcttttgtaatcctactcggggggctggggcaaaactgtttaaacccggggggcgggggttgcaaaaagccgatattgccccaccacactccatcctgggtaacagagggggactccgtctaaaaaaataaaaggcggcccctgtgtctcacgcctggaatcccagcactttgggaggcaaaggcaggc

SEQ ID NO: 564157 - DNA, 110 bp, Homo sapiens
tggtctcgcgggaacattcaagggggagatcatctgagtcacacaccctgacaaaattgaggtatttaggcatcatatcatggaagtcgtctgtgatgaataccatgata

SEQ ID NO: 564158 - DNA, 623 bp, Homo sapiens
  misc_feature (121)..(121): n is a, c, g, or t
  misc_feature (176)..(176): n is a, c, g, or t
  misc_feature (226)..(226): n is a, c, g, or t
  misc_feature (297)..(297): n is a, c, g, or t
aagtgcctcaagggcaaaagggtggccttctgtccgcccggcaaagggcttcctgagggttcttggtccaacgggaaacccagtggtttggaagggcacccgttatttagcaaaccggaanaggggagtcccttttccttggagaagtcaggggaccctttgctcccccagcttcnttgggagggggggaatattatccaggcctgcccgcagttatccaaaagcntaacccccccctgtgggggtggggttaaaggctcacgctttttgtccactttaaagctcctcccaaactcngggttggtttttgaaattcgtagtagaaaaaggtagaaaaaatagtgaaagttttaaagtttttgtttttttttataaaaccaaaaaaaaaaacgctgaggtatgcggccttttttttttgtttggggtccctaaaagggaagggccccctatcctgtaatcccctgacctggttccccttgtcaatcatttaaaaaattccccccccttcccccgcccccttgttttgtaaacaataaaaatcagggagcccacccatttggggccccccccggtttccgggtttttatggtaggggtccctggggcccacctgtttttttttta

SEQ ID NO: 564159 - DNA, 413 bp, Homo sapiens
ccagcgaacatcggcagcggcagctttattgaagaacaggccaggacaaggctgcaggtgatgatgaggccatgttcatagactgaaaacctcatgtactgccctgtgaatatgggcatgccccccaacagcatggctgggtgcatgggcatatgaatcgagtcgccagtgtttctcacggtactccaaacaacatcaagtgatgtacttcttgtttccttgcacatgaaaccctgaagacaagcaaggagaatgtagcaacccacttgatacacttggaaagcacaacatgttggcacttcttgtctcagaaaataataatttgccagttgtataactacaggcgtctttgcatttctgcgaaagatcaaggtctgcaagggacttcttgtgtgcttgctttccatttgaca

SEQ ID NO: 564160 - DNA, 424 bp, Homo sapiens
  misc_feature (423)..(423): n is a, c, g, or t
taactggacacactgggcttcttcagtccactttcaccacactgtatattttggtaacaaaccaaaagcatgcaaagaagccaattgttcctgtaaaaaggaagaagatcaaaaccattatcatagtataaccgaagtacaggattgtacttgctgtccccgtgatctgcagtttggagaagaagtagtgtatggcgtatatcaggaagtaaacagctgtgaagccgctggtaaggaaggaacgccactgccaatggtaatcctctgcacataggtgaaagtagcaaagaagtatagttgcttcggaacaggtaataaccaaaatgataaacaccagaaacaggaaaccaaacatgtaatacatctggtgggaccaaatgctattcagaatgaagaaaagctgtataaagatgcagccaaaang

SEQ ID NO: 564161 - DNA, 1048 bp, Homo sapiens
tctggtacctggcctgggagataatggatcggggattggtctgtggtcctctctcggctcctcgcggctcgcggcggcgacggttccgtggtgacacctgcttgcttgtgccctgtccggccggctcagtgacttctctgctgctgctcccgtgttcgctgtgactgtggaagaagggctggtgcctgtccctgtccctgtccccatctggaaccccgaatgtctgctgcctgcatgaccctgtctgcagtggctgatgatgatgctgctgtgacgcagctgggcctgtgtggtctgcctcctggccctgtgctcttgcttgccttggaggaagtggtcctgaacgggctagcggcgttcgcacctttgcactgtgtgtgatggaacgggcaatgattgtgtgccaagtacattcctgtgcttggtgtgatgccctggctctgcctggcctgaagaacgtgcggtggcttgctagagctgggggacctgggcttggtggcaggtgaacgcgcgaaacacgtggacgcacaggatgacccagctcaggcagggtgggtgaagccgcaatccgagtgacggaaatcaactgaccagttgtgcctagctggtggtcgagacgccagagacggagcgagcacgatgcaaggaagcgtcggcagtccagtgtccgaaggaggagccatgcatgacgcctgccacaaggaaaggcgcccagggggcaagaggccagaggaccggcagtggactgacgacccgtaagggtgcagtaggggggctgtaacaaacggaaaacattgatgcctcgcagaagtgacggaccaagtaggccaacccgggaacaaggcggagaaaggcttcagagacacagcctggacttcctacgaaccagtggaaccagaagggggaccccaaaggcaccataagtgggcgtacagaacagtttggacgacagcggagagaagtccagaaacaaagagcccaggcacgatccgaggcacagttggaaccgaacacatacacagcactagagcgatcaagaagtacacgg

SEQ ID NO: 564162 - DNA, 327 bp, Homo sapiens
tctcatacgccgactaattacgagctggtgcccttcggccgagcgcgtgggactctatccagtcatgaaagctgtatgaccgggcagtgagggccacgcctcccagcctggatgactgtgacgccggctgctgcccgccgagaggtggactgtgctgctacagcgctgtgatgtgtggcgtggatgccgcactgctgtatgccaagaacatggccaagtacatgaaagacctcatcagctacctggagaacggacgagctggagatggagttgccaagacctaaagatgtcacatgcaagaggtagcggaccaatggtcgtattacc

SEQ ID NO: 564163 - DNA, 850 bp, Homo sapiens
ggtgacccccaagtccaagtaccaatccactccggaatgagtctctgatcatcgctggaggaaggggcttgtgggtcctgccccccggaggaactgcctgccccatcagtgttcatcgcctggggcccatgctgcgctcctctggctgggtgacgatagtccaacactaccctgtgctccttcttcccaaccggatgagcgatctgagagctggccaaaccggcctggggggcgcccagtgtctaaggggcgagtcaggaagggcagctgatgatgtggtgagggtgatcgttaggggactgcccgatgccagagtaacgagctcaactaggcccgttcgctcctgtgacgtgatgccctgtgagctggaggggcgggcaggcgccggcatctaactcgttgtggacaggagggccatgcgtagggggagcggaggcagatggatcctcgtccgacgcgagagcttgccgtaataatacatcacagtgtggagggcatggcgtagatgtacacaagcgacctagtttattgagcacgcaggttgttacccgtatctgcgcgtcgcgtgcatgattcagcgcttcgcggtaccgcacagatgcttcgactgtgcttgtcaacgtgatctgcactgaagtgacgtaacggtgcaccctgattcagtcctgcggtgaggacatacgcggcgcgtgaagcggcgaacgtaatcggctaacaacgtttgaccgggcgatgcggtcaactcaaggctcggatggactccgaaggaaaccaatctcacattagattaacttccagccacaacacaaggcgccataaccgaaggacacaatgtgacatgatggtggct

SEQ ID NO: 564164 - DNA, 1897 bp, Homo sapiens
  misc_feature (303)..(303): n is a, c, g, or t
  misc_feature (1239)..(1239): n is a, c, g, or t
  misc_feature (1886)..(1886): n is a, c, g, or t
  misc_feature (1896)..(1897): n is a, c, g, or t
ggagacagggcttgcgagtgagttggacgcatacggcgtaataagtacagagagacgacgcgtctacaaactactctgtccacgtgccccagtagacgagcactggtcatgaccagcataggccaaggatatgggtgctaggtgctgatcctctgcattaccacggactgatactctgtcagatcatcggacaggctagactctgactgactgcacgatcatctgttcgactcgatgagaccagacatgtggaggatcccatcaagagatgcgtatagggcccttctaccgtgctactggtgnagaggtcttccatagtgaaatgtgaaaagggttctccatcacaagcacttctggggtggtcgtcaaccaggtctccgagaagcggtcgtccgacatgaaccccccaagaaagggcgtcggcgtacgggcacccgttgcccaattcgccaagagggcgatcacactccgtactctcagtctctagggcttggactttatgattcaacgctaaggggatttcttggggccaagtttgtgatcaatacccaaagagaagctctgtatcctaggtttatgacaaaccccagattgaaaatagcatgggaaaatatgcgtagaaccccccagggaatgaggggttggttgtaaccttattggtctctgtgtgccgacttgaggagaaatctctaaattaaccacgggtgccgggaggcaacttagattagttgcctccgccgagtgtccaccatgatgggtccccaaggttacactcaagaccagcgtcctgccgaggtggaacgcccaaccttaggacggtgcttagggaaaaagcctccttttctttgagaagcccacgccgaaggccagaaaatatgaaatatcgcccttgtgatggcgcccctcagacagtcaggtttgtgccaacagtctccgagctcgcggaagggttcccttcccagctgcgactgccacattccccaggcggagctaatccctccgtgggaaccgcccagaaagcttggtcccacattcaggccccataattggacaagcgcgccccgcgagtactgtgcgcgaaaattgacgcgtctcccttgaggactcgtggggggtgacgcgcacaggggatcaattgccacattacaaactgcacaggcacccgcacagacactccagggggcgcccccccggggaatatttcccccacggtggtgttggccctgtaaagaagagggncctccacaacaaggggggcccccacacgaacgggctccccacaattagtcaccccccggggggagtctggtcggcgatggtggggagagcccccacaataggcacatattatggggacgccaccaagggcaagacccatcggagggacacacggtcagcgagaggacctagtgagtaccgacgaacaacccgttgtgtgctcccgccgggaaggagaccccccacacaaccaccggagggggggcagcggagcagagccgcctaaatacaacagactagcccgaggtatggcttgacaaccaagcgagtcagatgaaccacaaccgcccgccccgtgtgccttgcggtccctcctctattacagacgcgcatcacacaaactgctgctcagtataggaacaagaagcaacagacgtcaatgaccatcaacgcggcaagcatgagcgacacatacccacacaagcacttactagcgaatcagagctcacacaactaagtcgattagatgatgataaacatacacactacatgtacccgacataccatcgacacgtacagagagatagcaggctcgtctacgtgcctttgtgctatgcgttcctactaatcgtctctgcttcgatgcctgttgtaacagattgaagggnggagacgagnn

SEQ ID NO: 564165 - DNA, 170 bp, Homo sapiens
ccggccctaattgtactcattgcggtcccgggagacgaatgaggaaccacgtcctcctactgctcatgtacacgtgagcctgggtcctggtaaatgggcagacaaagcctgagacgacaatggctgcaattactgatgatccgacctagaccactcgcctgactggacgt

SEQ ID NO: 564166 - DNA, 223 bp, Homo sapiens
atgtgaggtgatctcgcaggtcccggtctctgtctactctctccagagtcacacgacccaggtaatcagccacatagccctggtagtaacagccattctcatccaaaccccctggagcttcaccggcgcagtcattctcataatcgcccacggaacttacactcctcacttactattcgtgcctagacaacactcaaagctacaatacacatttcacgcctcg

SEQ ID NO: 564167 - DNA, 727 bp, Homo sapiens
tttgggctctagaagggggtaaagggggtgctatagggtaaatacgggccctattctcaaagattttaaggggaattaatttctaggacgaggggcatgaaactggggttggcctccacagaattctcagaagacaatgtgacaccggtagttatcaccccgcggctcggtgttagcgggtgaaaaggtggtttgtggttataaacgtctccgggaaatgtgctatcgtggttttataagcccttaagtggtggggcacgagctctccagtgaagtgtgacaagaagcgtctcttgggtgagtgtgtatatttattatatatatcaaaatggtgggggctctctcaaatctcgcggagagatatatctatactctcgagatgtgtgggtcacacgcgctctcagaggagagtctcgccgaggtctcgccccggtgggggtctctatgaggggacacatataagatgtgcggggggagaagagttatatgtgtgatagaggggagtgttgtgaaacacgacattttatagatctgcgcgcgccgcgagaaagactgcgaggtgggatcacactcgcgatgagagggttctccagaatcacccccagtgtggggtgggggccccacagtgtgagaattgtggagagtgagtcataagaggggggagaaggggaatctcgtgtgtgaaacctctcgggttgcggtggtatcagtgttttaaagagggaaa

SEQ ID NO: 564168 - DNA, 255 bp, Homo sapiens
gtccactgccagatagtactgagaagattgtttcaaacctgctctgtgaaagggaatgttcaactctgtgacttgaatgtaaacatccctaagatgtttcttagaatgcttctggctagattttatttgaagatattcccgtttccaacgaaatcctcaaagctttccaaatatccacttccagattctataaaaagaatgtttcagaacagttctgtcaaaagaaaggttcaactctgttagtggtcgacgcgg

SEQ ID NO: 564169 - DNA, 96 bp, Homo sapiens
tccccatcttttttttttgggggggtaaaccccccggggggggggggggggggaaacccccccccccaattccttcccaaagagaaaaaaaagaaa

SEQ ID NO: 564170 - DNA, 567 bp, Homo sapiens
tgctgacgagggcggcctgggcgaccgccggctggctgtgtcgtcacttaccctcattgtgcgcactgggtcagttggatgagcacggaccattcctgcactgtacatcagcctgtcgtacgtgggtccatgtggggtggtttggtatacgccggctgcacgtgataacggatggatcgtatggacagtctgttgtgctgctgggaaactattctgtggcgactgcgtgttggaggcaggtgtcatggagggtggagttggcgcaagccccgcgtggtaaatggctgactgctgctgtggactggccagatggagagcctgggcggcctggtgctgacggtgctgaacaggactgggtgcaggatgacttccaccatgttggctttgctgctgtccagtgggggtagctgaaggctgagggtgtggagtatgtgggtgcaggctagcgttagggtgcgcatactgctgagcaagggagcccgtggaaacatacatcgcatgcgtctgctcatgagccccgtactgagttgctgaagaagatactaaaccaggctgggcgtgtgttgt

SEQ ID NO: 564171 - DNA, 883 bp, Homo sapiens
ttctttgcgtcgccagccgagccacatcgctcagacaccatggcgaaggtgaaggtcggagtcaacggatgtggtcgtatgggcgcctggtcactgagggctgcttttaaactctggtagagtggatattgttgccatcaatgaccccttacattgatcgctcaaactacgagtggtttacatgttccaatatgattccacccatggcgaaattccgatggcgacctgtcaagggctgagaacgggaagcttgtcatcggaatggaaatcccatcaccgatcttccatggagcagagatcccgtccaaaagtcaacgtggtggcagatgctggcgctgagtacgtcgtggagtccactggcgtcttcaggcagcagtggagaaaggctgggggctcatttgcaggggggagccaaaagggtcatcatctctgcacccctctgctgatgcccccatgttcgtacatgggtgtgaaccattgagaaagtatgacaacagcctcaagatcatcagcaatgcctcctggagcacaactgttagaacccctggcaaggtcatccatgacaactttggtatcgtggaaggactcatgaccacagtccatgccatcacttgccacccagaagactgtggatgggccctccgggaaacttgtgggcgtgattgggccggcggggtctcccagaacatcatctctgcctctatggggctgccaggctggggcacgtcatcctttgactggacgggagcccattggattggcttccgttccccgttgccccgtgttttttggcctggccttgcgtaggaaacgcggctttttgctcttaatgtgggctgttgtgccccccaggctctctgggcacagccccggggtcctttaa

SEQ ID NO: 564172 - DNA, 935 bp, Homo sapiens
  misc_feature (129)..(129): n is a, c, g, or t
  misc_feature (348)..(348): n is a, c, g, or t
atatacagatctcggatgacagatatctacatataaagatcaatagtgtgttcctcggctagggttggtgcttccgcaaccatgatacatcgcgctagctacattaggtgcagactggatggctggganggatcatcattgaggtccgaggacgttcaagaaccggtgccttggggcaaactgtggcagtaaacgctcttgtgtatcgtctataacaaggaatcatattgggcatgggagtctgagggggatccgtcgcactagtcaaatctctcaacgacactgtgtgcgcgaggaagccgaggccgggtgtggatcaccgaagcgtcaggaagtttcgagaaccangctgtggccaaccatggttgggaaaccccatcttgtacgtggaaatacaaggcgttggcctgggcagtggttgggcgcgggccctgatagtcctagacaactcagggaggctgaggccaggagaattcgcttggagcccaggagggtggaggtttgcaggtgagccaagaatcggcgccacgtgccctccagcctgggcgaccagaagcgagactccgtctcaaaaaaagaacagaagagacaagagaacaaaaaaaatcgttggttcggggcgcaccacagggcccccgagaaagaagaacgtgtctgaagacacccaagcggtgggggcgagggggagcccccagagagggtacggtggacaccctggggcccaagacagggggttaccaccgagaggagaaaaaacacgggggcacgcacgaacaaaggagagggaaaatcgcacagcaaaatgaaaaaaacacgcccgggggtaaaaccacgagaacgtgttggaaaagactccccaaaggggaataagagagggccacaaaggggggaatcatacacagaggggtcacaaggggagcgcacataaataaccc

SEQ ID NO: 564173 - DNA, 1114 bp, Homo sapiens
caacattaaaaaagaatgcaaaacgaaatcctaaagtagatcccggagcatgctcgaaggaaattatcagccagaggaaattttagactgcagcaatcataattggcagcacaacagtgggcctagaatgtgtagatattctcagcgaactctttcgaaggggactcagacatgtcttagcaactcatttcagcacaactcagtgacatggacttaatcaatgtgtctaaagtgagcacaacttggaagaagatcctcagaagatgataagggggcattccagttgtcacagataaagcaatacaaagagttaccgaaacacaaccaatacattttcacctcatgcttcaacccagagactcatgtcatgtccagacacccagtggcattcatgtacagaaatcagacagccagacttctctcaaaaaagatgctcagccccaagttatcccaatcaaaggtgatcagaaacggttctacttcatcaggtcgaccacaaatgacatcctctgaggttgacaagcacattgcacacacgacacgaaagactcaaaaggctgtacttcgctgataatacaaacctgacaaatcatgattcgactactacacaagcgggcaacactgcaacacggagacacaggctgcggatatcgacccattggcaaccgaaagtgtgctcatgtaccatcactcattacctactacaaaggactggtctcacgattcgggacacagcatcacgtacaacaagaccaagttgtgacaaacaaagggtaacacctggagccggacaacgaaagacacaagcgaaccacgactatcccagaaagacaattgacgcgaataccacaccacacctacaagatcaacacaggtgaaccacgcactccacatgcacatggttacagcaaccaacaacatcggacaagagatgaaaacagtagacaacaaacaaccaggcaacacggaatgacaacatccaacaaccacaacgctgacaaaacaacgcggcaaaaaaaagacaaacaggcagaaaaaacaccaccacgaaacgccacagcaaggaacaaaagacccagagccgtaaagcacgcacaccaacaaaaaacacgca

SEQ ID NO: 564174 - DNA, 865 bp, Homo sapiens
  misc_feature (1)..(1): n is a, c, g, or t
  misc_feature (65)..(65): n is a, c, g, or t
  misc_feature (75)..(75): n is a, c, g, or t
  misc_feature (107)..(107): n is a, c, g, or t
  misc_feature (109)..(109): n is a, c, g, or t
  misc_feature (112)..(113): n is a, c, g, or t
  misc_feature (118)..(118): n is a, c, g, or t
  misc_feature (120)..(121): n is a, c, g, or t
  misc_feature (146)..(146): n is a, c, g, or t
  misc_feature (150)..(150): n is a, c, g, or t
  misc_feature (162)..(162): n is a, c, g, or t
  misc_feature (167)..(168): n is a, c, g, or t
  misc_feature (182)..(183): n is a, c, g, or t
  misc_feature (197)..(197): n is a, c, g, or t
  misc_feature (204)..(204): n is a, c, g, or t
  misc_feature (207)..(207): n is a, c, g, or t
  misc_feature (219)..(225): n is a, c, g, or t
  misc_feature (243)..(243): n is a, c, g, or t
  misc_feature (254)..(254): n is a, c, g, or t
  misc_feature (259)..(259): n is a, c, g, or t
  misc_feature (286)..(286): n is a, c, g, or t
  misc_feature (291)..(291): n is a, c, g, or t
  misc_feature (296)..(296): n is a, c, g, or t
  misc_feature (316)..(316): n is a, c, g, or t
  misc_feature (321)..(321): n is a, c, g, or t
  misc_feature (324)..(324): n is a, c, g, or t
  misc_feature (333)..(333): n is a, c, g, or t
  misc_feature (336)..(336): n is a, c, g, or t
  misc_feature (344)..(344): n is a, c, g, or t
  misc_feature (348)..(348): n is a, c, g, or t
  misc_feature (350)..(351): n is a, c, g, or t
  misc_feature (375)..(375): n is a, c, g, or t
  misc_feature (380)..(380): n is a, c, g, or t
  misc_feature (390)..(390): n is a, c, g, or t
  misc_feature (430)..(430): n is a, c, g, or t
  misc_feature (433)..(433): n is a, c, g, or t
  misc_feature (439)..(439): n is a, c, g, or t
  misc_feature (458)..(458): n is a, c, g, or t
  misc_feature (468)..(468): n is a, c, g, or t
  misc_feature (480)..(480): n is a, c, g, or t
  misc_feature (520)..(520): n is a, c, g, or t
  misc_feature (527)..(527): n is a, c, g, or t
  misc_feature (558)..(558): n is a, c, g, or t
  misc_feature (597)..(597): n is a, c, g, or t
  misc_feature (630)..(630): n is a, c, g, or t
  misc_feature (644)..(644): n is a, c, g, or t
  misc_feature (770)..(770): n is a, c, g, or t
  misc_feature (863)..(863): n is a, c, g, or t
naaaaataaaaaaaaaaaaaaaaaaaaaaaaaaaaaaataagaaaaaaaaaaaaaaaaaaaaaanttaaaaaaanaaaaaaaaaaagagagagaataaaaaaaaaangnatnngggtnannaaaaaggatacaaaaattccctgcnaagngctaagtggtcnaaacnnaaaaaaaaagggtnntctgggtggtgtcntagaaanatncagtgccggttnnnnnnnttagggactataagaaanaggggattaanaaatnaggctgcatattaacatgattttattngactntgtcntcacgcttttgctttattanttttnttngcccattgntanaagcttcnttananntttttttagcactgccatcaatgnttagntttttttttnttattcatttgttttcccagctctactccccattggtcanatntgtttnttttccaaatgatgccctnaacgaagatnttttgctcatanatggcgaccaaggctccaagcatgaatggtgtgagcttgntgaacanaataaagttggttgggcgatttccttcaaanaccttatgtggcagcagcctctcaaggtcctctggactnttgcccgcagcctggagctcctttcgggcctcntccgtcgattttcncctcatcagggcctctgtctgggccaagaagttggccaggaggatcttgtgatgcagacccttccgtatggggtgctgggtctggaccgggatgaggaagtcacagggtatcatcttggtgccttngtggatgagctggtaaaaagcatgctggccattggtccctggctcccccacacaatggggcctgtctggtggtccacacgggttttttttttngt

SEQ ID NO: 564175 - DNA, 800 bp, Homo sapiens
  misc_feature (328)..(328): n is a, c, g, or t
  misc_feature (336)..(336): n is a, c, g, or t
  misc_feature (346)..(346): n is a, c, g, or t
  misc_feature (358)..(358): n is a, c, g, or t
  misc_feature (363)..(363): n is a, c, g, or t
  misc_feature (366)..(366): n is a, c, g, or t
  misc_feature (388)..(388): n is a, c, g, or t
  misc_feature (417)..(417): n is a, c, g, or t
  misc_feature (425)..(425): n is a, c, g, or t
  misc_feature (428)..(428): n is a, c, g, or t
  misc_feature (639)..(639): n is a, c, g, or t
  misc_feature (730)..(730): n is a, c, g, or t
cgccgcctctgagtcccgcgcattcaccttctgggtactctgcttctggagcgtcggttgtcggttcccccaggttgttggaccgccccactggcccgctgtacatctctttggattgtttcattgaaggacccttatgggcgccggtcctttttttttttcttttgaaggaccggtttctctctgtcctgactcttggggtctgtggccctggccatgagtgttttctagtagtagattggagggaagctttgtggacactttacttggggttacccagcctcaactgggccagacccattaccgtccaccggcaccgttcctgccnaggccccnacccccaggnagtctctccgcngagcnttnttggtgttgccctaacttgccngtggcctttgctcagagcctcctcctgtnacatgtgnacnatgaagaggcctgcgcctcctgccttgccgcctgcaaagcaaagaaactgccttttattttttaaccttaaaaagtagccagatagtaacaagactggctggctgatgagcaaagcctttgctctcacgcagaggaaggcttggatgtacaatgaaactgcctggaactaaaagcagtgaagcaagggaggcaatcccactgaagcgggtnttcctccaggaacggggtcccccaggcgtgttgttttaaataacctgatgctgtgtgcatgatgctggtgcttgaccatgaaaggaaagtntcatccttaaaatgtgttgtacttcacaatcctggactgttggttcaagtaaaccatatcccctttttga

SEQ ID NO: 564176 - DNA, 996 bp, Homo sapiens
gctgccgttgcgtggtctggccgtctcgttcttggcctcgttgctctcgcgccttctcgctgtgcccctgcggtttgtccctccgccccgcgccttttacccccgagcgcgcccctgccctcttctgtctcaccgcttgcttttggcccgctcgtctctccccctcgcatcctgccatccgcccgccgcaagccatttttctcctcgtatccttcttctggcccacctgtctcttcccgctcgctccctcgactctcacgctgtcccccctggtcacctgcggtgtgtcgcgctctgttgttctctcttcttctgttgtcctcttttcgtttgtgctctttcgtttgcagttcgcgagtgttgtagttgtttgctgtgggatgttttccgcttgtttttttgtctgttgcctagttgtatgattgttttcgcttccgatctcatctcacttcttttagtgtgcattttgttgcttgtgtgtgcaaaaccatcctgaacagtggttcttagctcagattttgggtagtatatgcaacacaacgcaaccgttctctgccttgttttttgtttaatgagagaatttggaccatgtttgactgtgtttaaagtgcctggcatctctaccagccaagtaaagctggaagatctgttactggtagaacaggttgaggagacagtaggaatttgttgattagtcatttgatttataatctaacactacaaatactatgtgttatttataaaatgcataaagaacagcttgttgtcagactgccataaatgttgtatatagcttccaggccataagagttgagtggtattattgatgactttgtagattaagttagttatgtatgaaacaaagcaggtaatatatatattgagaagggatcgtgtttacagaggacttctttaaagtgtcacatttttaaaatgtaaacagtattgtttaatgcatacttaagtaatatttaagtaactataaaccgggggata

SEQ ID NO: 564177 - DNA, 391 bp, Homo sapiens
acgagcctgactggcgaagcatgggctgcagcatcgacgttcatacccacggacctgcgccactcagagaagcagcacatggtctcagcctgaagccatcaagcggcacggcatgcccttagccttcgcgagatcgatgggttgtagctatacggcgtagtgtcaacgagccggcctgacacaccggggcctgcggactcaaggcctatcgacaggaaagtccggtcgccggtcgcgcagcatctctcgcgtagatgtcgccctgcagggacccactcgcgtgggtaccctgacctaccaaacgatacctagttagcaatatttaataagcttgacacataggatagaagagctctgtgtttgtctacctgcctccagttcgccgggcact

SEQ ID NO: 564178 - DNA, 394 bp, Homo sapiens
  misc_feature (137)..(137): n is a, c, g, or t
acagtttccatggtcccaaatttttgaccttcccccggcccgggaggtgcagcctgggtttgcctttgttgtgtgtgctgatttgagtggcttagcttgccacagggcaaccttttttgtccctttcagtcatttgntggacttccctgtggcacgttaccatggaaaccgctccagggtgggtcagggtgcaaactgctggtaaggtttggaagcatcaggctcccgggtgtttaatgggggtttgggggggggggggggaacgggtaaaaaactgaagggtttgtacggaatgccctttgctagccatggggtggtccccaaattgttttgtaaagcccgccccttgcctcgatattgccagttttttgtgcaataaacaatcagcaggtga

SEQ ID NO: 564179 - DNA, 493 bp, Homo sapiens
  misc_feature (61)..(61): n is a, c, g, or t
  misc_feature (133)..(133): n is a, c, g, or t
  misc_feature (144)..(144): n is a, c, g, or t
  misc_feature (171)..(172): n is a, c, g, or t
tgcatttgccgcccctctactgctttgttaaaccaaagaaacacaaaatgtaagaactagntgggcagaatcatcagcagagagccccctcactgtccattggcccggggggcccccccccttttggggtggnaaggggccaanctttcccaaggggaaaaaaaaaaagcnntacagcagtcacttacatgacaacaccaactttcaatgtattggttcacatattttaattacatcttggtccctaaagaagcctgcagccagcaaacagacccaggcacgaaaagtaaatgagtctcaaactgattagcccaataggaattggacaaccccttaaggggctctagatggtgaaggacacgctgtttgccctgccattctgcagcacaaaaatccaggcaggtcgaagagggcggacaccctcgcgtggccaccagcccggagccgcagctcacacagcggcctccaaggcgtttcgcaggcagtccccaca

SEQ ID NO: 564180 - DNA, 658 bp, Homo sapiens
  misc_feature (15)..(15): n is a, c, g, or t
  misc_feature (68)..(68): n is a, c, g, or t
  misc_feature (111)..(111): n is a, c, g, or t
  misc_feature (137)..(137): n is a, c, g, or t
  misc_feature (154)..(154): n is a, c, g, or t
  misc_feature (159)..(159): n is a, c, g, or t
  misc_feature (164)..(164): n is a, c, g, or t
  misc_feature (168)..(168): n is a, c, g, or t
  misc_feature (186)..(186): n is a, c, g, or t
  misc_feature (194)..(194): n is a, c, g, or t
  misc_feature (204)..(204): n is a, c, g, or t
  misc_feature (216)..(216): n is a, c, g, or t
  misc_feature (221)..(221): n is a, c, g, or t
  misc_feature (224)..(224): n is a, c, g, or t
  misc_feature (246)..(246): n is a, c, g, or t
  misc_feature (275)..(275): n is a, c, g, or t
  misc_feature (283)..(283): n is a, c, g, or t
  misc_feature (286)..(286): n is a, c, g, or t
  misc_feature (497)..(497): n is a, c, g, or t
  misc_feature (588)..(588): n is a, c, g, or t
ttttgtgacaacttnagtcacgtgtgtttttgtaaggaaggaaattaattttggttcccaggatgtgnttagagggatcatttttgtacgtgagggttttttaacactttnactttgggtttcactcaagccgtccnactgaacaagacctatnaaacnagtcnaacnaggctaccgttcctgccnaggccccnacccccaggnagtctctccgcngagcnttnttggtgttgccctaacttgccngtggcctttgctcagagcctcctcctgtnacatgtgnacnatgaagaggcctgcgcctcctgccttgccgcctgcaaagcaaagaaactgccttttattttttaaccttaaaaagtagccagatagtaacaagactggctggctgatgagcaaagcctttgctctcacgcagaggaaggcttggatgtacaatgaaactgcctggaactaaaagcagtgaagcaagggaggcaatcccactgaagcgggtnttcctccaggaacggggtcccccaggcgtgttgttttaaataacctgatgctgtgtgcatgatgctggtgcttgaccatgaaaggaaagtntcatccttaaaatgtgttgtacttcacaatcctggactgttggttcaagtaaaccatatcccctttttga

SEQ ID NO: 564181 - DNA, 126 bp, Homo sapiens
ggatagctttaacctaatcgcacctacgtattacgcggctgtggcacgtagttagcggtgcttattcttcaggtaccgtcatcctcccggggtattagccagaagatttcttcctgacaaaagcag

SEQ ID NO: 564182 - DNA, 541 bp, Homo sapiens
  misc_feature (254)..(254): n is a, c, g, or t
ggctggtacggcccggaatgtaatggatcaagatggcagaagtatagcatgatagaagaagcggaccttccgcaagttcacctaccgcggggtggacctcgagcacgctgctggacatgtcctacgtagcagctgatacatctgtacagctgcgcgccaccggacggacggctgaaccggtggctctgcggacgagaagtcagacactccctgactgaagcgcctgcgtcaaggccaagaaggacggcgccgtncctatggtagaagccggaatgctggtagaagacgacagctctgctgtgacatgatcatcctatcccgagatggtgggtcaggcatggtgggctgtctacaacggcaagaccttcaaccaggtggatgatcaagcccgagatgattcgagcactagctgggcgagttctccatcacctaccaagcgccgtaaagcatggccggcccggcatcggggccacccactcctcccgcttcatccctctcaagtaatggctcagctaataaaggcgcacattgactccaatag

SEQ ID NO: 564183 - DNA, 92 bp, Homo sapiens
gggggccgggggggggccgcccttttttttttttccccccccttttttttcccgggggcgggggggtttatggttttgttgccctcccccca

SEQ ID NO: 564184 - DNA, 175 bp, Homo sapiens
gagagcccagcacgtcatcccctgatctgagtctactgaacacctgttttatggactacactgtcttttcctttgaatccccacttctcctggaactgtacttggaccaccaggaacatcgtaagacacaacccaatacactcaccgcattcagacaactgtccagacactgccc

SEQ ID NO: 564185 - DNA, 417 bp, Homo sapiens
tccgactcttccttggcttcaaccttagctggggctgcaacaacagcaggagcagctgtgggggcagcagccacaggggcagcagccacaaaggcagatggatcagccaagaaggccttgaccttttcagcaagtgggaaggtgtgattcggctccacagacaagggcaggactcgtttgtacccgctgatgatagaatggggcactgatgcaacagttgggggtggccatttgcagacagacactgtggacattgtgggcaccccttcaggaagcgggaatgccgaggttcctttgggatatcaaacaccttaaggggtgggaatggtgcccttggcgaacccccgctggggtggccccccccaaaaggaaaggggggggagtgttatcttttgtatggagtgggtgtttgcgtgt

SEQ ID NO: 564186 - DNA, 116 bp, Homo sapiens
tgaactcaagaaagtattcatagtacagcgacacagctggcagcagatctattaaataccatgctgatcatgtggtctaaaagcatttaaacttactggaagtagaagggaattta

SEQ ID NO: 564187 - DNA, 668 bp, Homo sapiens
  misc_feature (1)..(1): n is a, c, g, or t
  misc_feature (83)..(83): n is a, c, g, or t
  misc_feature (133)..(133): n is a, c, g, or t
  misc_feature (145)..(146): n is a, c, g, or t
  misc_feature (162)..(162): n is a, c, g, or t
  misc_feature (202)..(202): n is a, c, g, or t
  misc_feature (204)..(204): n is a, c, g, or t
  misc_feature (213)..(213): n is a, c, g, or t
  misc_feature (227)..(227): n is a, c, g, or t
  misc_feature (231)..(231): n is a, c, g, or t
  misc_feature (235)..(235): n is a, c, g, or t
  misc_feature (237)..(237): n is a, c, g, or t
  misc_feature (239)..(239): n is a, c, g, or t
  misc_feature (251)..(251): n is a, c, g, or t
  misc_feature (255)..(255): n is a, c, g, or t
  misc_feature (275)..(275): n is a, c, g, or t
  misc_feature (295)..(295): n is a, c, g, or t
  misc_feature (302)..(303): n is a, c, g, or t
  misc_feature (335)..(335): n is a, c, g, or t
  misc_feature (342)..(342): n is a, c, g, or t
  misc_feature (344)..(344): n is a, c, g, or t
  misc_feature (361)..(361): n is a, c, g, or t
  misc_feature (386)..(386): n is a, c, g, or t
  misc_feature (399)..(399): n is a, c, g, or t
  misc_feature (405)..(405): n is a, c, g, or t
  misc_feature (420)..(420): n is a, c, g, or t
  misc_feature (530)..(530): n is a, c, g, or t
  misc_feature (654)..(654): n is a, c, g, or t
nctgtttaaataccacatatgctaaaaaccgacgccaggccattctctaaatgagttacaaatcagtttccggaaaggaagtnctccatgaaaagcttatagcaagataactcacgctttcacgcggcgtatngcacgtgaatcnnccttacagtaattgtntacatagtatgtttagtcattattcgcaatcaaaacttcncngcggagtgnccttttttcaaggncatnacgncngnagaagaaccgtncaanatagccttttgttgcctgcngagggatctggcgcattgcngggcggnncaaatacctgcagatagaatattcaccgcagnctacgtnangttcagagtgttcaggntcatttctatataaaactacaattngctgaactatggnaaaggnccttgaacataaagnctttcttcatttcattgcatcttaataagtagaatgccactaccgtaaatgctgcttatatgtattttattcacatataagttatgatttttctaactaccctctgtagntataaatttttcccttcctgaaaatctctcttccacacctgttctgcttgtccctttgttccctaaagcctgtattttttctttaaggggatctattttcctttgaaacaattgctggaaagcnagcctcagaaaggt

SEQ ID NO: 564188 - DNA, 171 bp, Homo sapiens
aaagcatattcctttttggttgccttgtatgtagaaatcagttctccaagtgcctgtgaatggtgccacttaggagtagagcctgatgattgttgacatggcctctgggtggtctgacatagcccagtggaaacaggtagctttgtaggcaggaggccattagtagcaatg

SEQ ID NO: 564189 - DNA, 211 bp, Homo sapiens
gaagtatgtaatgacgtttggttttatgaaaatagttttgatttcccggataccctgaaagctgttcagaccccacagacgtcctcagactacacttcgagaccaccgttttagtttttgctctctctctgtcctggacgacggcactttcgcctctagctcagcccagcgcctggcagctgcacactggcgacgaatcctcgcgcctcga

SEQ ID NO: 564190 - DNA, 717 bp, Homo sapiens
ctgcgctgtaggctcagtctttgccggcgtggccgtcgccttcctgggcattggacgttctcggagtcgtttcttcgttcgcttcgtcggctgtgtgcgcgcccttctcgcgcctcggggctgcgaggctgggcgaaggggttggacgggggctgttgatcggcgcgtttaagttgcgctcggggcggccgatgtccggccgggcgaggtcgacgcgccgtagctgtcagtgagactgagcctggtcggtgaccggaggggtgatgaggatggaagacgtggtcgtctatgcgcggcccatgtggactgtgcatgtgcactgtgatttgtgcaaaggacctagactgaaagatgaagtggacaggccagaagaagagaatgccatgtgcctaagtcctccagtctggaattgacatgatgaatactgtgtgagaatactggtgtgaccagaaaccggaaggtgactgagaccgacgatgatagtgatacgtgacagcgatgatggactgacatgatgatgttgcatgtcactataggatgacgattaatagaggggacgcaccgacgaggtatgggaagtcatgggtacagcgacctgtgaagctcttaactagtcaatgaccgggggaagacgtttgatggacacttacgagggcacagagaatgtcgaacggcagtagaccttgatgcgacctggaagcgttaatgggagttcca

SEQ ID NO: 564191 - DNA, 975 bp, Homo sapiens
  misc_feature (6)..(6): n is a, c, g, or t
gagcgnactagaaaagagaaaggcacacgaacgaagaaaagagtagtgctgtgtgccgacagggaaacttcggtggaacgcgccgcgggtgacaaacacgtcggcagattggttcagcggcacacgacctgtgaggcctcctgggtctgcccgcccccagcaatagtggcccttgggcaacagagtcgtgttccgttgcaaggagggcaccccgtttccggtccaacgggccaggccaagggccggtgtgcaacgtggcgcagaccgcatcgtggacggggccccaccacggttctctcatgggggctttaaccgctgtgggtgccggtctactttcggggcaaaatttaatgcacgcgtgagtcgccaatgaaaccacaggggccagttgtttgtggaaagaccagctccgggtgcttgggccaaaaagataattaattactacgggccccatcaaaatgaggtaactattagtttcgccggggagcccccggcagtaattgtgagttttttccgaagggccaacagcttttgcccggagaagcccgcaaaaatatgtccccgcaatgctgttggcccgccgtggtcaacatttgtgagttgttccctcctgtcggtccgtcgatcccgcggccgaagtgtaaaacaagcatctcgggggtaaaccacacccgaggaagtgtatgggaagcgtgtggcaaacgagtgtttcaagtgctccaagaagggagttgtacaaacatgtgcgaaatctcaggacacaaccactgtggccgacacatatccttaagagtacccgcgcttgtattataaagcgacacgggcaccacaaatgggcccactgtgggaaaccaaagatatatggaccggcagtacatagaggagttggggagtaagctcgtgcaattgtttccgcggttcaaaatgccataatattttggattcgcaatcttgaagggaaaaccccacaaaaca

SEQ ID NO: 564192 - DNA, 749 bp, Homo sapiens
cgtgctcgcgttgggggcgcgtcagatcacgaggtcaggagatcgagaccatccttggtctaatcactggttgaataccccggtctctatctaaataataagaaacaataaaaattataccgggatattggtggcatgcagcctgtcgtccctagactacctcagtgaggtactgtcagtgcgacgcgatgaattggtcctgagacccagggacggcagagcctggcaggtgagccaagcatcgagccatctgctacttccaagcactgtggttgaccaggaaagatgtagcacttcctaattcatccataaaaaacacataacatacacaacatagactttaaaacacaatgagcgcgcgtgtgcgcgcgagagcgaacagcgccactttagttagctcaccgagctgaaaccctagctggagcaagagcgccgtgagagagacaagcgagacaatagggtgtcttgtttagaatccccgcggcgaaagcgcgtagcgcgcgacttgtgcccgttagtagtgagaagctctgaagagaaatcttcgaagtgcccccatttcgggaccattagttggaaacggctcagaggggcgcagaacaataccaaacgtgtggccaaaagcctcacaggttccagtcccatagattatacacaccaaaacaaacatagaaatacaacagtgcgcgggaacacccaaccgaggtaacaactgagaagacgcagcacccatctctgcgccccgtcaa

SEQ ID NO: 564193 - DNA, 294 bp, Homo sapiens
gtgagtgaagccatcaaagtactaatgggaagtgccggcgctttttggatgaactaaatgcggttcaaatggactgagcttggatgcttttgaggcaagctgaagctttgggttttgactgaccccccctacaggactgttgaacaaaaagcccagtgtgactagggatcctgagttttttgggacaattccagctttaatcaaaacattttgttaaatgggccataaaatgagcctttttacgcctttataaggccttagatgtaaataaactccccccaacaaaaaaaaaaa

SEQ ID NO: 564194 - DNA, 372 bp, Homo sapiens
ccttcccaagtgaggactcagtgtattacttgtttgcttcattttatgatacagaccttagaatttcagaattgccaaacccatgcctcccaaacacaaaattaagtcgaatttggcctttccttggtagtccttttatgtctttagattgaaagtatttattccaaaaagtattgtattccaaagttgggtacatttcttttttcttcctgtgtaggtattttaataagataaaatagaattcagtttatttgctttgtgtcctattttagtttttctcctacttctatttgattttactttatttcatgcataatatttaagttcccaaaagtcaaaacctctaaccctatagagaggtatactctgaat

SEQ ID NO: 564195 - DNA, 705 bp, Homo sapiens
ccaaagaccacatcatcgaaaccgcaaacatatcatacacaaacgcctgagccctatctattactctcatcgctaccgtccctgacaagcgcctatagcactgcgaataattcttctcacgcctaacagggtcaacctctgcttccaccacgcctatactaacaattgaacgagagaatagacccacatccgcgtgactaaatgcgccgagttgaaagcgcctgagcagccggagagcctattcgcgaggatttctcattactaacaacatttcccccggcatcccccttcgccagacaagcaagtccgctcctctaccatagaaactcacagcgcctcggctgtcactttaccgtaggagcttcgtaacaggcccgtagaccatcaatctacctaaccaacaaacattaaaagtaaaagtcccctacttatgcacattttagtttctccaacatactcggattctaccactagctatcacgacaccgcacaagtccccatatctaggccattcttacgagccaaaacctgccccgtactcctcctagacctaacctgagctagaaaagctattacctaaaacaatttcacagtcaccaaatctccacctccatcgatcgacctcaacccaaaaaggcataattaaactttacttcctctctttcttcttcccactcatcctaaccctactcctaatcacataac

SEQ ID NO: 564196 - DNA, 128 bp, Homo sapiens
gaatggagacgccattggatgtttggtccagggcagcatctctggtgcatgctgatgacgaaaaacgcgaagctgctcttaggggagaacccagaatgcagaccctgccggtggcctctgccctcagc

SEQ ID NO: 564197 - DNA, 157 bp, Homo sapiens
cggtgactttccgctggatctgagcatagacactaaccacatactccacatgtgggctgcaagcattcaatagtcatttctgtttgatctggacctgcagttatagtttttagttggtcctggatccattttatgggagtggtggttactctgtaac

SEQ ID NO: 564198 - DNA, 217 bp, Homo sapiens
atttgacaagcctattttcaaatgatgtaaattcatcctttccagggaagcagaaggtagaccagtgcaggttatcctcaaggccacatacatcctgcttccctggaaaggatgaatttacatcatttgacaagcctattttcaagttattggtggttgttgctgtcttggtttttgcagctaaaataaaaatttcaaagtacaacttttagttctt

SEQ ID NO: 564199 - DNA, 242 bp, Homo sapiens
  misc_feature (45)..(45): n is a, c, g, or t
  misc_feature (153)..(153): n is a, c, g, or t
gtctcatgagtggagtgtaaataatcatgctaggcgagatgaaancgatatcgcgatacggttgtatagattgttgaatgggtggtgtgtggcatctggtcgggcgtacatcactgatgaagcagaaggatataattcctacgccctctcagncgatgaacagttggaataagttgttagcggtaactaaagataagtatggtaattaggaaaatgagtagatatttgaagaactgattaat

SEQ ID NO: 564200 - DNA, 330 bp, Homo sapiens
agaggctggctgggcccagttggtgaaagccgtgtcctggtcccctgtggtccacgtgaagccgcgcagtgggcgctgcagctggcattgccgggcctgccgctgcagcccgatccacagcagccggctggctgggcccgcacccaccaggctgtccacacgctgggcctcctcgggggtccgaggagtggccaggtcgccccccagctcgcggcaggcccgccaggcctccaggaaggtgcggcgccgtgggaagagagcgtagcagctgctggggccgcaggcggcacggggctcagcagcccaggggtcctggcccagtgtgggccc

SEQ ID NO: 564201 - DNA, 121 bp, Homo sapiens
aggtgcagtagtttcccagggattacacagggatttagtacctggccttttaaggccctccaaaggtcaaaggttttgttttgcccctttcctagcaccccttttaccccttttagagcca

SEQ ID NO: 564202 - DNA, 272 bp, Homo sapiens
tgggtttggtttttgttttgttttgttttgttttgtttccaaaaaaattaagaattttaatgttgaaaaaccggcccaaatttttatggggcaaagcctagaaaaaagaaatgtagtttgaatcataatttaaatcatcgtatgataaaaaagggaaagttttggggccaaaatttttcctttccctggggttggacttaaatcagttgaaatgtatttttgtcccccaatttacgcttcaaaaaaagtttaattgtttagtgacattcaga

SEQ ID NO: 564203 - DNA, 728 bp, Homo sapiens
ggtaattacttcaacagcagagcgactcatacagccggcagtccacttgttcttctatagatcctgcctgtggtgtggatctaacagcttcttccctgacccaagattatgaaggatttctcctgtgttctcttctaaaaattttacatttaggtacataatccattgtgagctaattcttttaaatagtgcaaagtatggactgaagttcttttttttttttttggggagatactttttaaattttccagcacctttggtggaaaagatagggtttggccggaatagccttgggctatggttgggtggaaaatcagggtgcacacttgtacactttccagtggatctatgggcctctgggtggacaatactactattcgggagtaaatatatatcataggggagtctaaaaatcatatcttaaaaagatggtgggaagtatttacccttactcgggctttgacaaattgggtgcggggatatccaagatctcggggtgccatataacgttcgtataatccagtggggcaatttattcaaaatattcctcgggggatttggagggctattaccgtggaatcgagggatcgtgtgcgagacaagtgagcttcttaccaatttggagtcatctaccattgtgatccgggaactgggtccatttatttagatcttcttgccaaatctggaagcaggggttgcggtaccagcgcaataggattcaaatagag

SEQ ID NO: 564204 - DNA, 111 bp, Homo sapiens
aaaaaccgggccccccccaaaaaaaaattttggcccggggttttttgggggccaaaaaaaggcccccatttttttttttccccaaaaaacctttgggggggtcccttccca

SEQ ID NO: 564205 - DNA, 146 bp, Homo sapiens
tacacacactgtctctaggaaaggagaaagctacccatacggaaagaaccaagctacccatacggaaagaaccaagctaccatacggaaagaaccaagctaccatacggaaagaaccaagctaccatacggaaagaaccaagctac

SEQ ID NO: 564206 - DNA, 108 bp, Homo sapiens
tccatatttttccacagggagggtgatcagattgtttgtaccatatccggaaaagttgtagctttcaaggaagaactgtaggaatagtcacagcttgacaaccgaaca

SEQ ID NO: 564207 - DNA, 135 bp, Homo sapiens
aaccttgaatacctgtaagtctgaatctagagtatcccctgcaatcacgggtgacaaactgaactttatcatcacaaagcaaaaaaagaaaatcacatcttcacaaatcatacaatctattaaactgaacatgag

SEQ ID NO: 564208 - DNA, 518 bp, Homo sapiens
agatccccctttccatcgcgtgagaattccgggtcgaccttcaagatgatgaaagcctaaacgaacaggcacttgaccagttgtaattctccacaggtgacatgtagctgaggtggctcttcacagcctcggggaggcaggctccttctactcttgtcctgccttactatgaccttcacgcctaagatcattttctggccccagggtggtagctcctactccagccatctggtccacattccagagtgctggatggaggaaaggtgggggatgacgccttcccccttaagaacacttcctagaagctgcatataccacttctgttcaacatctttttggctagaatttggtcacaataccacacctaatttcaagagacactaggaaaataccttgaatccatgtagtcatctgcccagctaaaaatcagagcttctacattaggaaggggagaatagataccgagataactgatctatcttgccacagttctctccctagtaccgtcctgattactc

SEQ ID NO: 564209 - DNA, 366 bp, Homo sapiens
accttcaggagatagaactgcagtcccagctcagcatgaagcatcctggagggcaacctggcggagaagagaaccgctactgtgtgcagttgtcccagatccagggctgattgggaagtgtggaggagcagctggccagcttcgttgcgagatggagcagcagaaccaggaatacaaaatcctgcgtgatgtgaagacgcggctggagcaggagattgccacctaacgggcgcctgctggaagggagaggatgccccaacctgactcagctaacaagaaaaggaaccggtgaccacccggtcaggtgccttaccatttgtgggaagaggtccgaggatggcaagggtcaatcctcctccccgggga

SEQ ID NO: 564210 - DNA, 1682 bp, Homo sapiens
  misc_feature (2)..(2): n is a, c, g, or t
  misc_feature (921)..(921): n is a, c, g, or t
gntcgtatatagataaatgatatttgttgttagagaagactaccagtggaagtatgtctgtactcggtcacttgtgtttagtgtacgctcatgtgcttgcttgcagtgcatcgtttatcttggtggatggttgtttgcgcttggtagctgttgtctgttcgtgtggaggtgttatcagctctgtgggttgttctgtgaccgatatcgtcgttgtgttggtgtgtgtgctatctcctacgtcgatctgtttgtccgtggagggccgccgctgcggtgctgtctcgtccgcccgagggtgtcacgcacacggtggtggtagtggttgggatgccttcgttcctgtgcccccgtggggaacgctggggtgttcgaaccgacacaccggcggtgtgggggtggccaccaccctgggtgtgccccctgtgcagcgtttttctccccgcggatggtgtgaatttgctggtggtcgttagagcggccccccccgtggagtgctgttgtggggcggtggacctctcttcttcccctcgggggggaccacacattagttgggggccgttgcctaaatgcttcccagaggaatattgtgtgtgcattggtgctcacatgaggatgtttgtgtttcctgttcgtgtggggccaaaaccggtggtgcccttcgtgttgctcccacgcccccagttagtgtgtgtccgcccccccccctagtggcggaacgtcctcgccttgggctttttcacccttggcttctccagggtggacttttatgcccctcgggagcccccttgtccccgggcgccccttatttttagcgtcccccgggcttatttgccgccccctcgtgattttgggggtttgcccacaccacgggcgtgccacaccatttggggcactggacacaatgttttcgcctcggagggnctcggataagtgagaaaacagagtttgagttcgcccccttttctcgcgtataaaaaacagcccgtgagaagagtggcgcccctcccaagttttctctggagaagtttctcgcgtggagatgccctcgcccactctgtctagataatattggtgtttcctggggccaaaggcccccacatcgtgagtggttcgaggggagcttttctccacgagctatttccaccccctcttgtggtcgccttcttgctcgttttcctcgaatatatgaggaccacgaccacgctttccgcgttgggtggctcactcacaaagccccgctgtgacccacagagaagggctcgcctcgggaggccttggcccaaggtcacccccacagttctgcccacgagaacgtcttcacgaaggcctataaatgagatatttattcccttaatatcctgccacccccaccttcttataatcacgctggtggagaagaaccgggtttcacgagacctcgtttgtttccaattggccacatttatagtttagtagataaaaagaactggttaaatgagtaacccactgcactcgttaaaccctctcacgaaaggaaaaggagaaatgttttgtggagcccctcttggttttcttttttgcgtgtggccgcttttaagattattaggtttttataaatccgtactttttaatggaaaccaccttgcccccaaatttgtccccagaattttgagaccccctttaaaaagttctaatgaggaaca

SEQ ID NO: 564211 - DNA, 375 bp, Homo sapiens
atactattctgatctctcggtcacctgaagttatatctatatacctaccaggcttcggaataatctacccatattgtaactatactactccggaaaaaagaaccattaggatacataggtatggtctgagctatgatatcaataggcttcctagggtaatatcgtgtgagcacaccatatatataacagtaggactagacgtagacacacgagcatatctcaactccgctaccataatcatcgcataatcccaaacggcgtaaaagtatatagatgactcgacacactccaaggaagcaatatgaaacgatcagctgcagagctctgagccctaggcttcatctatcttatcaacgtaagtggcctgactggcat

SEQ ID NO: 564212 - DNA, 415 bp, Homo sapiens
  misc_feature (5)..(5): n is a, c, g, or t
  misc_feature (22)..(22): n is a, c, g, or t
  misc_feature (38)..(38): n is a, c, g, or t
  misc_feature (81)..(81): n is a, c, g, or t
  misc_feature (117)..(117): n is a, c, g, or t
  misc_feature (124)..(124): n is a, c, g, or t
  misc_feature (332)..(332): n is a, c, g, or t
cgggnataaggccgtgtactgncgatgctggaggttcntaaaaagttccccttctgcgatggggctcaccataaagcacancgaagagactggcgacaaacgtaggacctctgatcnatcaagnaaaaggaaaccttaatggacagttgcgaggctgcacccagcgtgttgtgatgtcacctgctgatttacgtagaatggcacccaacccaccgtctgattggcctccccggttctagatgtggttggtccctgcaaatcacagctctcatatccatggcatcggccttgctactgaaaccatgtggtgcacgtttgttgaaagaagaagnaaggctaaaccaacctcgtgctatatgggttattttggtcttgtaaggatccgttcctttaaaataatggtcttagaatatag

SEQ ID NO: 564213 - DNA, 248 bp, Homo sapiens
  misc_feature (27)..(27): n is a, c, g, or t
  misc_feature (77)..(77): n is a, c, g, or t
  misc_feature (127)..(127): n is a, c, g, or t
  misc_feature (131)..(131): n is a, c, g, or t
tctcccatcctgacatttgtcccctgnagaagttcttagcagggaggagaagagaaaagaggaagcaaagaatcacnaggacctctggctagatgatcctgatgttcctactgagttttctgtatcnaganttctgaaaccgagtaatcatgtctgtttgattgggtggtcatctctccatcccagtgaaatttacctgtagcccagtgaagggtgtgtttggacattcattaaatgatctaacatct

SEQ ID NO: 564214 - DNA, 305 bp, Homo sapiens
  misc_feature (166)..(166): n is a, c, g, or t
cccccccgggtaaaattttttttttgttgaaacggattttttatgttcccccggctggtttcaggctcctgggctcaaatggtcccccccccccagcttccaaaggcccaggcccagttgtagttttttcccctcccctcatgccccccaaaaggttttacacccntttaaagaattgcctttcaaaaattggttatgttggggggccagttttttaagctggaaattgtaaattcccccccaaatgttttttccccccgttccccttaactaaaacccccaaaaaggagggttttgggggtcca

SEQ ID NO: 564215 - DNA, 1087 bp, Homo sapiens
aaagttggtcgtctccgttacatgagaataagagatttattgaatacatgttaaatggatggtcctccgcaccatgacccatcgtccttttccatttaacatgggaaaaagtggtaggagggcccggccatggtagtctatgggcgcagtggctcatgtgtacctcagctttattgaaatgcatgtgtacctcaggcttggtacttagacatgtaaggcccaggattattaacccagcatgttcatacacctcacagtttggtcatgtcaaatatgtttgaggcagagccatgctaaagaggagatttaaaatgcccatggtgaccacgggtcagaggtccaacatgacggaacaggaggctactctgtcccatgctaaggtggttttttttctatattgaactgggaaaaaaatgtttgaaaaattaaaaactgaggtgattgagagcgtgtaggttaccctgtggaaaaagcggtgcatgaggcacagaaatactccgcgtggtggcggacgggacccttctattaaaagtgttacagtgacatagaacattatcgaaacgcatcttttcccccccatgtaaaccaggtagctgtatgaccagtgtagagaaacaacgcctattaacatgttggggcaccagggcgacgaaccaaggtttgtaatctctgtgagagaacgacaagtgtctgtgggaaaacatataccacggcactgtcgtgggaatgtcgcaccacaagttgacccacaaactgtgttcacaatcaaccgccaatatgtttcaccgccacaagtgtttcccagaaaaccctccgcgatgtcctatcagcgggcgaaccgacaagtgtagaaaacatagtcggagttgaggtggatcaacaacccacaaagtttttttcctcccccagtggtgggccatatattggcggccccgtgcgaaagcatcatccactctccatccgcaggggcgacattacatctacatcttataaatattatccgacagtttatacaaccgacttttcttgaaaagcgggtgaacacacaaatatacacaccacgccgacatgttagtggtattacacc

SEQ ID NO: 564216 - DNA, 565 bp, Homo sapiens
  misc_feature (346)..(346): n is a, c, g, or t
ggcattactgccgagtatctgatgctcacctatgccaacgacgccaaactgtatgttccggtgtcgtcactgcatctgattagccgttacgcaggtggcgcggaagaaaacgccccgctgcataaacttggcggcgatgcgtggtcacgcgcgcggcagaaagcggcggaaaaagtgcgtgatgtggcggcggaattgctggatatcttaacgcaacgcgccgccaaagaggcgttcgcgtttaaacacgatcgtgagcagtatcagttgttctgcgacagcttcccgtttgaaaccacgccggatcaggcgcaggccattaatgcggtacttagcgacatgtgtncaccgctggcaatggatcgtctggtgtgcggcgatgttggctttggtaaaacagaagtggcgatgcgcgcagctttcctggcagtagataaccacaagcaggtggcggtgctggtgcctaccacccttctcgcgcagcagcattacgacaacttccgcgaccgtttcgccaactggccggtacgtatcgaaatgatctcccgtttccgcagcgccaaag

SEQ ID NO: 564217 - DNA, 116 bp, Homo sapiens
gatggcagtgctcatcttaaaacatgagcataacatatatttggaatagcagaaggttaagtaatttcttactgtatcgttaaactaacgcagtacttcagtgggacttaacaagt

SEQ ID NO: 564218 - DNA, 709 bp, Homo sapiens
ggaagaaccctggggaaggaatgcattcctgggggtaggtctatagatggccgctctgggagtgtttgtcttatgcggttgagataaggactgaaatacgccctggtgtcctgcagtaccctcaggcttactaggattgggaaattccagccgggtaaattctagtcagagtggttctctgttctcaaaccctgtttcctgtgaagatgtttatcaagacaatgtgtgcacagcaggacatagaccctcatcagtaattctaattttgcctttgccttgtgatctttactgccctttgaagcatgtgatccttgtgacctactccctgttcgtacaccctctcctcttttaaaatccctaataaaaacttgctggttttgctgctcggggtcaccatcatagtcctaccactatgtgatgacagccccagaggcccagctgtaaaatttctgtctttgtactcgttctctttatttctcagaccggccgacacttaggaaaaatagaaagaacctatgttcaaatattgtgggctggttcccctgatagattggaaaagaatgagaccctgcaacttggaatggggaggtatgggaggacactggtgaagctggggtcactgactttgtaaactccaatgaactttttttgccagaagaaacaattcctccccaccagtagtgggcgcattctctcctaaccatgctgc

SEQ ID NO: 564219 - DNA, 136 bp, Homo sapiens
ctatatggagactatcttctggcctccacaggacaaccaagattgaggtcatttctttctcctgagttggatccaatggcttggctgtgaacttatctgattgtgctgtcagaaaataaagttgtatgtaacaggt

SEQ ID NO: 564220 - DNA, 285 bp, Homo sapiens
aatactatgtccatgactagacaagaccactgagtggctataataatagaagacagacaacaacacgttgtcaaggatgtggagaaattggaacattcagactggtggtgggaatgtaaaatggtgcagccactttagaaaacagtttggccgttcctcaaaaagtttaatatagaattactgtgtgacccagcagttccactcctagatacccaacgtaattgaaaacgtaagtctacacagaagctgtatacaaatgttcacaggattgatcattattcatta

SEQ ID NO: 564221 - DNA, 940 bp, Homo sapiens
tggagccaaacctcgccttgtttcgcgccaactgcgaaactgctcaagcgccgcctttttggagctggttcatctgtcggccctttaatatatcgagctgccgttgagcccggctttacaaagtaaagaccccctctagttgttacgcacacaggggtagcacaccgacggtgtcctcttgagagaaatcatttcgttgacagaggggccacgcaaggcacattccttttaaggaaaaggggtccccccgggccgccacttttatcagttgctcaggcgtattcccacaggggttatatcccccggggaactatgtttacgcgcgtaggtttcccccccgcggagccttttttgcggcgaaggccccgtaatctacctgattttttcctcccgttgaaccactggtcttgtggtctcccctccaagaatttacccaccctttcgcaaaatatttcaaggatgttaaaaattgtatacggtctaagagatatagtagtgtaacagccaataccccctgtgtctcaatagatattacttctgtgattactatatagaacgcgctgttttaaaaacaactgtctctttcaaaggaaaaaaaaaggacaatttgtgtgagagcgcggtcacgaccccagtggagtcccttgtcggcccgcgagattttcgggaaccagaccctgagccaaaatacaccggtcggtcaaattctgtgttgtaatagtaagtcaccccaagaattattaggcgtgagtgagagtgcgtggggctacaaatcgcctagtacattcctgacacagattgtgtggagggtgcaggttgtgggaaaaatttttctagcactataggagtaagattgaaggattgtatacgtagtccggtagtcaaggctccgtccagccccaccccgggaccaaaggggcagaccccccccccatttaca

SEQ ID NO: 564222 - DNA, 343 bp, Homo sapiens
tttttgcccctaacccctttttaaaaaggttttttttgcctttccccaacaagaagccatagtttcccgggccatataaattttcccgaaaaaagggttttttttttcccgaaaaagggttgtggggatcctttaaccctgggcccatttagggattttttgttttttttccctgttttatatactggggccaattcccccgattttttaatttttttcccaggggttgggtttttttttttaaatggggaaagggcctttttcggttttttggggtttttgttttttttcccaaatatggaaaaaaaatttaaatggggccataaattttttttagagggga

SEQ ID NO: 564223 - DNA, 172 bp, Homo sapiens
tgtgcagatgggtctcagaggagaggtagaatggacgaaatggtggaggggcaactcctctttcccgcccgagcctcagtttcctcatctgctccctcaggtggtgaggagtccagtgaaccacccgccaatgtgtcttgcatgtggcatggacatggcctgctggagtggg

SEQ ID NO: 564224 - DNA, 176 bp, Homo sapiens
gtcttatcgacggtaccaacacctagaaccaagtagtacttagcaaacatttgcgtgagccaatgagtaatggcacaaatatagggacaagaaagagaatgagccatttgttcttcatgacgacagtgcatgagaatgagtccagaggcacttggggtccaaattcccaacctcca

SEQ ID NO: 564225 - DNA, 152 bp, Homo sapiens
ggcggcaggagttttagttagaaagcggacgcttgtttctaaaaaaggtcttcctgccagatcttttcttggcttttattgacggaatatttattaaatgttgccttttcctgaagagattttttttagcttccaaagctttttcccatcgc

SEQ ID NO: 564226 - DNA, 284 bp, Homo sapiens
ttaacaaaagtgcactcttctactatctactggtatcatctccctggttcattcatggccttatcatgctcatctttttaaaaaggttttattaattttaattggcacataataattatacatattaatggggtacaatgtgatgttttgatacatgtatacattgtgtaatgatcaaatcagggtaattaggatatctgtcatcttaaatatttattgtttctttgtggtacgaacattgaaaatccttcattctagcgtagatatagaagagtgcacttttg

SEQ ID NO: 564227 - DNA, 126 bp, Homo sapiens
  misc_feature (29)..(29): n is a, c, g, or t
gccgcaacacaacccagggagactcaagnccacaggggccccccggctctgagggattcaccgtcgcctcccggtccccgaaggcccacaagggcagaaaggtgagccttatgcactgcctaaaga

SEQ ID NO: 564228 - DNA, 123 bp, Homo sapiens
  misc_feature (14)..(14): n is a, c, g, or t
  misc_feature (90)..(91): n is a, c, g, or t
ggacgaccgaagcncgagctggttcaggtggcagccacagcagcctcagggacctcagcatctatggcctcctgaacagactctgcctgnntttgggtgcttgctggctccgcgagcctgcca

SEQ ID NO: 564229 - DNA, 266 bp, Homo sapiens
gcttgtgcctaaactgaattgacaaatgcattgtaactacaaatttatttattgttatgaactgtaggtctacatataagggaaaagttatgtggaagctgatctacactcagctgatgccagcatacattaaggcggttcacgtgcagagaccaaagcagtgccaccattggccttagcattccgcatactataggtgcttaaaggaagggaaggctttgtgccttcctatcttgccatgatagcttccataatggaatatactg

SEQ ID NO: 564230 - DNA, 836 bp, Homo sapiens
gctggtgtcctacttgatgtcgggtacagatgcttagtctgccctgctggcagtacccacatgacaccaacagacttcgctgtggacatgtgagccctcgcgagctgtgtcgactgcaggattagaatatacctggtgtgagtccagtcagtcataggctggaaaacggtccggagtgtacccgcttccagattcacatgagatcgttgctctcacatcttgtgtctgcgctcattggacccttgcgaggattcttctggctaagttggatttcgatacgaagcctatacacagatcagagactttgccgagtaccattcctggccattggcatggcatcaaggatcgctttgactgccatgtatcatgatgggcacctttgtcaatgtatacaactcgccacgtattagtcacggaggctcgcataatccctagagctagatacttggattcagtgatgttcctgactttacggaggcagatcaatgcagcgtcctactatcgttctacacacagcgtgcggtctcatctgatcgactaagggatgctgatgtccaccacaagaggaacgaggtacgcgggccacccaggtctggaataacaggaacagaactgaacatggggcaggtcgtccaaggcgagtccagttggtgtgacttagacgatgacgaggcttgaagatcactgtgcttttgttggaatctctgaagggaaactctgtatgcgggggtgttcacataccctcgtttattcaggcaatgggttaaaaattcggggtgatcacccccccccttgggttggccaaaaaccgggttgaaacccctgggttttaacca

SEQ ID NO: 564231 - DNA, 495 bp, Homo sapiens
ctagccttactggaactctgtgaaaggcaagaagtcctgccacaccgccgtggacaggactgcaggctggaatatccccattggcctgctcttcaaccagatccggtggctcctgcagattagattgaatatttcagtcagagctgtgcccttgggtctgagctgagatctaatctctgtgctctgtgtattggcgacgagcgagggttagaataattgcgtgcccaacagaaacaaaatatagtacggctacactggggctttccgttgcctggatgacaatgctggagacgttgcatttgtaaaagatgtcactgtcttgcagtagctctgattgacataacagtgtaggctgggcttaggatttgaggctggcagactttgcgctgctgtgcctcgatggcgaacggtgtcctgtgagttaggctatgaagctgtcgtcttgccatggacccgtgtcatgccgtggtgtctcggatgggggggcggatctgg

SEQ ID NO: 564232 - DNA, 656 bp, Homo sapiens
tttctctctttaggtatctaagatctttgaacacctggacctttacatttgatccaaccctatcaaataatgaacttctcagagaggcatctggggtcctggaacttcatgttgatgaagtcatattatataatatgataaaaatattctcatgcagtattttaaataatttcaaattctagaagaagcaaatttcagcgacatgtcattgagtttttatttggtaaagctataattgtgcagtgtacaaagcactttttaaaaagatagtttattctgtcagggtatatgaagttagtatacagccagaacagccaagcctcaattcttgtaccttgtgtctttttattactgtttaatcaatagatatcatatgtttatgacagtttcaagaattgtttttaaacccaaacttaattttatgtttcagactattgttagaaaaacaaaacaaaaaacaaaaaaaccctcactaatttgccctaattggatagggcaatcagaacaaaatctgactttcgaatatttaaaagatatgtaagtttgattgcattttcgtacattttaagcaaactaggttaacaacaacatagcctagtcaaacttctcaggaaacttgttttaataaatatgtaaaaatacccaaaaaaaaaaaa

SEQ ID NO: 564233 - DNA, 1143 bp, Homo sapiens
  misc_feature (1134)..(1134): n is a, c, g, or t
agagatccactgttctaaaaaaaaaaaaaaaaaaaaacactaaatgtgtgccttctcccttaattttataagaagagtaattagtaaaaactggttttaaactatatttttctttttttctaattcccttctcagttctcctttagatctgcctccttacaaatgatcatgtggttggcatctgcctgattgagtttcccttgggtcaaacctctccctaatcacttatcagaagttggtccactaaatgtttttccctaatttcctttcatggtggattggactttataaagtcacctgggtaaacctttaactattgggctaaccttctcatgctttataactgacttggatcgaatgggcagtttttatattttaaccctttaacaacgttggtcagggaaacaactcagagctaagaacaaaatctaactgggaatccgtttcttcctttggctgctgaagcagcagcaagtcacgtaacctcatttagttctctggatttcacaaaatggtggataataacctacctcacagatgttgtgtgagcaactggtttgaaagcccttggtttaactcacgggtttatattccccaaatttccactgtaaaatttcgtcttttttttaaccaccaatcaacgtctctctgacacctcgaatagggaagaggattcccgacttcaggaacgaatccacgtttcccacactggtgcgcgtcgtcaacggtgaccttctatatttcttgggacctcccgtttttcacttatccactctgtccgctgtcgtcccatttctcgatcctcacaggtggcgcgagagcgcctttgtccccaatagcgtcttccaacggtcgcccattctgcgtgtcgccgctggcacatacgtacacatggtgggaaactgggcagcccagagggatctctcatgttgccgaacaacgcggcgtcctcgtcagcgataaaacaaacgggtgtgacgcacaataagacggccccgtgtgttgaaggcaccatatcactcctctttagccaccgcgatattctcccagagaaaaggacgatcgtcaatcaattccattgactctcgcacgctccctcccccacgcattacctccatttctattctttcgtgngaggggggt

SEQ ID NO: 564234 - DNA, 626 bp, Homo sapiens
  misc_feature (544)..(544): n is a, c, g, or t
aggcggcgagctcgggggccccagaaaatgaaactgaacccgtggtcacgtgacaggacatgtagtatatagcaggctgccagcgactcctgctcttgcttctggatctgcagggcagtcccagcaggacccatggagtgtccttcgtgccagcatgtctccaaggaggaaacccccaagttctgcagccagtgcggagagaggctgcctcctgcagcccccatagcagattctgagaacaataactccacaatggcgtcggcctcggagggtgaaatggagtgtgggcaggagctgaaggaggaagggggcccgtgcttgttcccgggctcagacagttggcaagaaaaccccgaggagccctgttccaaagcctcctggaccgtccaagaaggagctacatcagaggttttggtagatgctgctgtagacctcatatccgatgaatgggaagctgctaatgccatacccagcaagagaaggaagcaggatgcagccccgcttgaggccgccagcgtgccttctgcagactgtgagcagagcngtccactctaaatcctcccccccccactaccctcccctctccctcctcttttgcctcctcccccaccaccttccccccccgc

SEQ ID NO: 564235 - DNA, 435 bp, Homo sapiens
gtggggtctttgcgagtctactggagctgtgcgtgggtgacagccctgcctgtctgaagggggtcgtgtttcaacagggagctacatcagaggttttggtagatgctgctgtagacctcatatccgatgaatgggaagctgctaatgccatacccagcaagagaaggaagcaggatgcagccccgcttgaggccgccagcgtgccttctgcagactgtgagcaggtagtccgagtcaatagtttgggcagaatgctcccttgcctggtgcaatgctggacaggccgggaaggccaactcggacttccgggcccttgagtccctgccagtcggaggaaggctgcccaggatgggcgtatacgggtcacccttgggttgtgacagagcaacgagaaatcaggctggggtcctggtgactctgaagccacaatcgaag

SEQ ID NO: 564236 - DNA, 292 bp, Homo sapiens
tgccacaaagaacggttacataataaaaaaattctttttctagcataatatggtactactaacagttctggggggcaggaaactattcctggaacatgcagtagttcttaaatggtatcccatttagatgagaaaacggatagatgtatttagatggcttagtcacggattggacctcgtgggatgactttttacatgtggctgttaaaacggttctattttcatccaaagcacattcggtgacctttaggatcaggatttcaaatgcggtctaccatctaacagggtatct

SEQ ID NO: 564237 - DNA, 474 bp, Homo sapiens
aggcggcgagctcgggggccccagaaaatgaaactgaacccgtggtcacgtgacaggacatgtagtatatagcaggctgccagcgactcctgctcttgcttctggatctgcagggcagtcccagcaggacccatggagtgtccttcgtgccagcatgtctccaaggaggaaacccccaagttctgcagccagtgcggagagaggctgcctcctgcagcccccatagcagattctgagaacaataactccacaatggcgtcggcctcggagggtgaaatggagtgtgggcaggagctgaaggaggaagggggcccgtgcttgttcccgggctcagacagttggcaagaaaaccccgaggagccctgttccaaagcctcctggaccgtccaagaagtgagtgcactgcctcggctcccctccgcccccgtcactctgcgccaggaaaatctcactgcacatacagctcgaggtcgg

SEQ ID NO: 564238 - DNA, 189 bp, Homo sapiens
  misc_feature (92)..(92): n is a, c, g, or t
cgtgcagataacaacagtaaagacaggaagtctcagcccatgggactctggagcacaggtggaaggaatggcggattggacagcaggacagncaacttcagcaaggcagggaggacatctttatggagcacctgaaagacatcgtggagtattacaacgcaccagtaacgggtctcacgtattgcaggc

SEQ ID NO: 564239 - DNA, 578 bp, Homo sapiens
  misc_feature (496)..(496): n is a, c, g, or t
aggcggcgagctcgggggccccagaaaatgaaactgaacccgtggtcacgtgacaggacatgtagtatatagcaggctgccagcgactcctgctcttgcttctggatctgcagggcagtcccagcaggacccatggagtgtccttcgtgccagcatgtctccaaggaggaaacccccaagttctgcagccagtgcggagagaggctgcctcctgcagcccccatagcagattctgagaacaataactccacaatggcgtcggcctcggagggtgaaatggagtgtgggcaggagctgaaggaggaagggggcccgtgcttgttcccgggctcagacagttggcaaggagctacatcagaggttttggtagatgctgctgtagacctcatatccgatgaatgggaagctgctaatgccatacccagcaagagaaggaagcaggatgcagccccgcttgaggccgccagcgtgccttctgcagactgtgagcagagcngtccactctaaatcctcccccccccactaccctcccctctccctcctcttttgcctcctcccccaccaccttccccccccgc

SEQ ID NO: 564240 - DNA, 881 bp, Homo sapiens
cctttataaagcgcgctctctgtttatcccccctttttggagaggtgctctttaatcaagcttccccgcggtgttccccccgagggtcaacattgttgccggcggccccccctcttaagaggtggtcttctcacgggtggtgccccctctgtccctctcgctatggggcccacctaagtctcgtcggtgtggctctgttaaccaccgcgccgctttttcacccccgcgctagatggtcggcctgttctctcccgagacatgtttcgctcccgcagcgggtttatcacacgctcccccccccgccgtgtgcaggaacctcactccgtttgtgtgggatattttctcccctcccccctggtttgccatgcaacaattatctgctttcccatcgctccccccacgcgccttttcattactccacctacgagctctgtctccttctccaaccacgctctttatctctacactatataagcgccccccctgccgcctcctactaaatctatctctctactatctccctctctttgaaatatatcatcttcgagcatttccctcctacgattgtccatacatagtggtggcctaattatatagataaatacaaagtcgtcccatctacacacccctcgcaactatctacacgcacgagaatgtatgatgcccccccccactcatgcatcacacttggtatatattataataaacaacaacaaagcaatttctagtaaaatagaccactcacaagttattaagaataagaaatatttcggtccacaaccacccagaaggtgctataataacaatgtctgtagtaccactcatccattgtttctcgcttgttatgttttcccccccccgccccccaaacaaacaaaaca

SEQ ID NO: 564241 - DNA, 328 bp, Homo sapiens
acctttgcgctgtagccgcaatgctgcggcaggtgcaacaacatcgacagcataaaatgtgccaactctaaacaaggcatttctgaaaatcacacaaaacactaaaattccatccaagcttcctcccgactccagcagccacttcgagtcatcccgcccatccttctccactaccgccattgcacacatgactgattccttctatggctacgacgttatcgtcatcggtgctggccatgccggtagcgaagccgctctggctgccgcacggaacggagcacacaccctattgctgacccacaatattgaaaaccatccggtgcaatga

SEQ ID NO: 564242 - DNA, 348 bp, Homo sapiens
  misc_feature (44)..(44): n is a, c, g, or t
attcataatttaatgaatattaatattatcaaatagggactaanaagtaatgaaatcaggccggatgcagtggctcacgccctataatcctagcactttgggaggccaaggcaggcagatctcctgagctcaggagtttgcgaccagcccggccaacatggagaaaccccgtttctacgaaaaatacaaaaattatttgagtgcagtggtgtgtgcctgtgggcccagttatttgtggggctgagacaggaggatcacttgagtctgggaagtggaggctacagtgagccgagatcatgccactgcactccagcttggctggcagagtgagattctgtctcaaaaaaa

SEQ ID NO: 564243 - DNA, 170 bp, Homo sapiens
  misc_feature (162)..(162): n is a, c, g, or t
cgggttgaggttaggggagagagagcatgcagtaactagtaagttaatggagtgctgggagttaagtacatggtgatgaagttgatcagtgcagcaaaccaccgtggcagcagcattgtcttatgtaacaaacgtgcatatcctgcctgtaccccgcaaatntaaaataa

SEQ ID NO: 564244 - DNA, 332 bp, Homo sapiens
ggatgatgcgtagagacaggaatataatgacactggtacttattatataaatgacttggtctccactgtaaaatactatcatggtataagactaagtgttagcctgtagctcgttaaaacaatgcacagccacgaagaatggtctccggttaggattgatgatcaaattcattgtatgatatgtacttcaatccctgcattaaactcgcgttagctgtcatggaattggattgcgtgtagtacacatagtatgctcaccaattcttctcaggaggtcttgttccattctctagggtagcttccaggccataggggccaagcttgattgatcc

SEQ ID NO: 564245 - DNA, 457 bp, Homo sapiens
ctgtttacataaattctaggtttctcctatttacctcaagcacgtatggagtgaattcttaccttttaatattgccatggattcacattgaatgtaagttgaactctctcatatggtagctgggttcagattcccttgacaatttccagttctaaccctcacagttcctcagtgtggctggcccagatactgaccctacacagttgcctccccctggtgactacccgccatggaaccgttggatacaatctgcatgactcaccccacagacctcacagcccacttggacagcccccacacgccagagtgacctgctcagttgcagtggaagccaagaaatgtgcctgctggcactcaccccaccgactagagccccgtggaaaacttatttgggtactgttctgggcccaataaaggctggagtcccacagaccccttttctctctcttgctcccca

SEQ ID NO: 564246 - DNA, 198 bp, Homo sapiens
  misc_feature (11)..(11): n is a, c, g, or t
ccttgtgctgnatcgggtggcgagctgcgccgctacgcctggggctggctccccggggtccccgcctcacggtggtggctgtggacgctgacgtcccctccccgtacctctctgcaacggccacgcaccgggtaccgacgctcgacacttcgtacctactggtcactacgctgtttcctagtgtgccacttgttctcc

SEQ ID NO: 564247 - DNA, 397 bp, Homo sapiens
acattactgagcgtgaaacactcgggcgcagtcctattagttcattgtcatactgtaagataaagatacccaagactgcataatttatcacgaaaaacaagtttaatggactcacagttcctggtggctcggcgaggcctcataatcatggcagaatgcacaaggcagcatcttacatggcggcaggcaagagagaatgagaaccaagtgaaagtggaaaccccttataaaaccatcagatctcatgagacttattcactaccatgagaacagtatgagggcaactgcccccatgattcaattatctcccaccagttccctcctacaacacgtgggaatgatgggagctacaattcaagatgagatttgggtggggacacagccaaaccatattaga

SEQ ID NO: 564248 - DNA, 479 bp, Homo sapiens
ggtatggttgtggccactttttcccacatcggtcccttagatagggactgcatcctccttaatgtgataaagaggttcccataatttaaaaaaagtattcttttggtgcaatttggaggttggatttaaaatcgcggttagttgaaagcgtgtagtttctggcattttttaaacattaaaataatttacttttacagcatattataatattgatctttaaaaacaaaactggtttatttatttttttaatttttccattataatctaaatatcatgatggattttgaacgtctcaccaatgagcttttggcagtcgaatgttatgtcacttttcttttctttgaattttcgtttccatttcatttccctcacaaaattttatcctgttagcctggctgtcgtatgcctttgcaacagaaatagggatgtagatcgaagctgaaaaaatttatgttcctaaccataaggccctaagtgct

SEQ ID NO: 564249 - DNA, 109 bp, Homo sapiens
caagcagttactacatgactcactggtgaaggctatgctaaacgccaatgagggtgctatctgtggaggttgcactaggaatggtactacaagggacaatgctctttga

SEQ ID NO: 564250 - DNA, 574 bp, Homo sapiens
agctgggaagaagcagctacctcgtaggcaatgtggcgcgcaggcgggcggcgatgagagggggcgcatgccgcatgccccgcgctgtgtgagcccaccgctaaaccctgcagtccctatccacccctgcacaatgacgagcttgtctgggtagctggtcacgttagcctgggtgaccttcctcggatgtggaatccggccctgcgagcatcctcttcctcacttaggcttctgaagggcccgcggtgagctgtgagccgatgcccagcgtgcacgcctggtgctaggggctactccctcatgtttgcctagttataggatggatgagcgctgttctcaagtgctgcagcaggggtcatcccctgacctatccaggcgcagtgccctcttcccagcatcccatgggggaccaccgacagccacgctccgcgatggaacacacgatggatgctgaatgtagcgaaatggccggggacgacagatccttcccaggcccagttcccagtaaacagacgggcggtgccaactgcttggcagatccgtgatggaagacacactcctaatgatcccagaa

SEQ ID NO: 564251 - DNA, 130 bp, Homo sapiens
acatcgatacgacttttttttattttaatatcagtttatggagcagagaccataaggcatcttatttgtaaatatatgtattacattcctagaaaaagaatcacaggattttcccttctgtcgtcttctc

SEQ ID NO: 564252 - DNA, 1421 bp, Homo sapiens
  misc_feature (843)..(843): n is a, c, g, or t
gtggggagaaagcctcttgtgtgggagggggggagaggagcccccccccgcgtggtgttccgtatttcctcctgtccggcgggggcgcctctgtgtcgggggggttgtggttgggtggggcagcacccccacacatcggcccaccacctgctgggattatttctcctttcgggggggcgcccccccccaccaggggtgtccgccccgcacacaacagtcgtgttggtagaggaaggtgctcccacctgcccccgccggaaggaggggcccccggcggttgtttttttgttggccacgagcagcaacgtgggtgcccgtcggggccccaacgtgggctccgcccaacaaccacagcacggggtggatgaccaccaggacgtgttgttgttccttcttgggcgtcgcccgccccttctggtcaggtaggccgcctcctctccatctggcggccgcagcgtggtcgccccgccccaacattggtgtggtcgcccgcgacccgcccccgctctgggttgaaggccgcctgcgcgaactggtgccccccacctggggagaggaggcccccccctcctgggtggcgcccctctgggcgttctcttcttgtggtgggtgtgtcacagcccccctctggggtgaagaacacaagagacgcccctacaacgcctctccaacaggtttcgcgtgaggacacaccctcgccgcgggagtggagacacgcgagtaggggcgacgaggcacaagagggccccccttctgcgtggggcgccgcaacgaatagtctcgcgccgactagtctcgggtgggcacgacacacaggggtgcggccctgtgagaggttgtccncccacacgagagagaagtgtggcgccgccccacaagaggctcaagacgacacaggagtgtccccccgctgtgtctcgcgagacactctcacacacagcacagcgctctcgcacacacacacacacagtgctctcaccacagagacctcaaggggctctcacttgggacacagagagagatggggagaagtgcgcacacacagcgcgagagaaagggggagaatacaccgctcacacacactctcacagagaccccacaggcggctcgagacacacacaggctggagactcggtgcgctctctccaccctgcccacagccactcttggggcccctctcgcgctcttttgtaacgcgctcaatttaaccctcgcacaggcgttgagagccacctctcttctttccctctttcgcccacgcactcacctccccacacacaggaaagagagcccactatgttttgccacacccactaatcctctttctgccgacaccctagttccctctgctccaacccagacttggtatccagctttcagggccctggttccaccacattagaataaaaggtagtaattag

SEQ ID NO: 564253 - DNA, 319 bp, Homo sapiens
  misc_feature (212)..(212): n is a, c, g, or t
  misc_feature (251)..(251): n is a, c, g, or t
  misc_feature (273)..(273): n is a, c, g, or t
  misc_feature (284)..(284): n is a, c, g, or t
aagtgaaataagtctggcacagaaagacaaatatcccatggtctcactcatgtgggagcttaaaaagttgatctcatggagtagagataagtaccagaggctgggaaggtggagttgggggagggagggaagagattggttaatgggtacaaacgtagatagaaggaataagttcaagtgtttgatagcacagtagggtgactatagttaancaatatgttatatatttcaaaaataactaggagattagnaatgttccaagcacaaaattgntaaatgtttgngggtgataggtatcctaaacaccctggatttggtc

SEQ ID NO: 564254 - DNA, 124 bp, Homo sapiens
ccatatcagccttagaaaaacgtagggtacggtacagctctggtcacgtgttgttgatacatgaatctgtacgtctggctccctgagcgttctggcattcgcagacaacctatcggcagtgtgg

SEQ ID NO: 564255 - DNA, 249 bp, Homo sapiens
agccatcgtgtggtaccgaaccttggggcatcccaccatggtccaccgttaaaaacctcatgatggttcctgcttccctcatggtcttgcttttgaagcctacaagaaagtttgcctatttggagcgcctgtctaacaaggttgtttgtaagtaccagacattgacatccaccttgatggaaaatatgaaagacaaagccaaaatccattactcaaataaaaaacaccttatgaggtttcagaaacagg

SEQ ID NO: 564256 - DNA, 88 bp, Homo sapiens
  misc_feature (13)..(14): n is a, c, g, or t
agttggaattagnnataatcctttacaactgccaatttaaattgaaatatttaatgcctgtgaggttaggtcagtatcccagaatacc

SEQ ID NO: 564257 - DNA, 127 bp, Homo sapiens
aaatcaagtcgtgtataactcactgaatgcatacgtgggtactggtgggaataatacctgtgtactacgatcatctcacaggagaccatgagaagggcaggcacaaccaatcaaagcagtttcccca

SEQ ID NO: 564258 - DNA, 180 bp, Homo sapiens
  misc_feature (161)..(161): n is a, c, g, or t
gtagcctctatatttgatgtagtttggtgtttctcgaacctattattagttgaccttgtatgacagtgactagctatgatagattttcactcatcagcggatagtaagtcagcgcgactacttgagacatatctgtgtctttgagtaccactatatataanccgtgaaacttcaccttct

SEQ ID NO: 564259 - DNA, 930 bp, Homo sapiens
gtgtgctgagaccccaggctcgggagggcggagactgggagggagggagaagcccctttggcctgccttacggaaggcctgcgagggagggtggtgtccactgcccagttccgtgtccgatgcccagtgccggcgccagccggaagcagtcaaggacgtaagccgcggacaactcatggacgccgtgcgcgaagattatgctaagcgagacgatatgcgcaatatcttcaatgatacaatcacaagaaaaaccagatcgagttctggtccgggttagagacttgacaatacaaaaagctgatgaacgttgtgtgggtacgtgcaagagttcatacaagcagagctaacggggacacacgtgcttctttagttccctacgtcaggccacggccagtcttaatggtcccaggctctttgtgggcgggtgggagcaccatgcaaaggcaaagcacgaatggttcaacattttgccttgccaactatcaacaatagagagcattgtggactgtaggaaggtgctgtgaggacacgagttgacttcacgaaactttgggccacctgtacacagcacgcacgtcgagttacattgttcagcacagatttattgtgatcgaggttgtggttgaaacccgcgttcttggccccctggaaggcttgagattgaatgcttgtccgggcctgaaggggcagcaacgcgagacggaggaccgggaaggacgctactgttcacacccagggcttaccacgattcgcacaccagagttcatttgatcttaggaccatcaacgtcatccaggcccggtccttcgggctcccaggtctggcatttggcctcttttccggaaaacttttattcacccacggtttgggcgaaccccacccctaaaatattgagtgccgttcaacgggggcccaggtttccggggcaag

SEQ ID NO: 564260 - DNA, 305 bp, Homo sapiens
  misc_feature (16)..(16): n is a, c, g, or t
ggttcgacaccgcacngtctctggctgcgcgacgccaggacagcgccacgatcgacgttcaggcggcgggcgatgtcatccgggtgctggccactgagaaaggcagtcaccgtgtccaaggggctagcgatgggatcggtttgtcgttgcgtcgatctgttggcggaggagttcgcgatcgtcgactgcgcgcctggccgagtccgtcgctttctccggccatactgcctgatctgctcctcgacggtcagaggcctacctgtacgggccgatgtgatgggcctatcttcacggaccgaggtgtc

SEQ ID NO: 564261 - DNA, 639 bp, Homo sapiens
tatctcctgtgcgcacatgtgtgcagtgctctggcaaggacaagcagcagcagggctagaagcaagctgatcaacctgttgtagtcccagacacagcagtcagaaggttttccacgtaagaggccaaggcgtagaacaccttgtgggtgaactacactaagaatggggacagcaagtactagtgcagctgcaccttggttgtcaggcgctaggacctcaggaccttgaacaggtgttagcgcaaatagcgcagccgcagggggaaaacccctaccactaagacctgctgacgtagaggtatgctttagtgcagctagtggcgcagcgccagggctcatcacttctcggggacaagctggactaagcagaccactctctgtgtcaattggcttcgaacaccatccctaaccagaaggctgtagcagcgctgctcgatcaaggctatgtctacctgtcaggcagacacctctgtgtagaagcggcctcccagccaccgtcctcccaccacaaacgtgggatccgtgcacgttaacgattacaggacatcgaaaaacccttttggggttgtattttttttttttttttctctttttttagtgtgttttcttgtttcttcggttgttttttctgtttcttttt

SEQ ID NO: 564262 - DNA, 274 bp, Homo sapiens
aatcgagcgcggtacctgatcattgtgtcccacgcctatctactacagcatactactttatgctgctccggggtcatcatccacaacctttatcaatgaacagagatattcgacaagaataggaggagtattcaagaaccatacctctcagttcaatctccctcaccgatttggctgcctagcattagcaggaatacctttcctcacaggtttcttactccagtagaccactatcatcgaaaccgtaaacatatcatgaggacacgaatgttca

SEQ ID NO: 564263 - DNA, 329 bp, Homo sapiens
cttctgggttacatcttatgattctcttgagtctactttattccctaagagcacagtggccatagacttgataggaatcttctgggcttatctatcatatctgataagatgttttgacgtgtcttgtaccagattatcatagacaagcaaaacattttgaaatctcagccctgggaatttggtagatcacattcttttggctcagcttgtttttcatttttccctttgaggattgttttactaccaaagtaaattaaagagtatttggagacatagatatctcatagcataaaatgtacactgggctgtgagtctatatataaaggaag

SEQ ID NO: 564264 - DNA, 285 bp, Homo sapiens
ggttttttttttttaaaaggttccccccaaaaaaaccccccccccctttttttttttggggggcccccccccgggcccccgggggtggggggggggccccccttgggaaaaggggggggttttccccctttttacccccccccccccggggggtttttggggggggccccccctttttgggggtcccccttttttttttacccttttcaaagggaaaaatttttttccgcccccggggggtttggttttttttttttttgggggcccttttttacccccttttta

SEQ ID NO: 564265 - DNA, 419 bp, Homo sapiens
aggaaacgaatgagctcaagcaaagaggtccctgcaggacagtaggttcaggaacaattggcatgattggggaaaaagctggcttgatagagtaagtgtagggagtgggaggttctagacatacggtaatgtgagtgcaggcacatcccggctctggtcaccccagcttgcccagctctcacatcccgctcagcctttgctgcttttgtgtcctccagcttgagactcgagccaataccactaattgttttctctactggccaaatggtgggaatgaggggtcataaaggaagcaaacagcacattccatgcatccagcaattttactgttggcaatttgatacagaaaaataaaatgaggacagagctgcagggtcagtaaagggaagtacatttccaagtgattttcccttttactg

SEQ ID NO: 564266 - DNA, 275 bp, Homo sapiens
acctctgtcatcatccagcacattttggtggtggttctttacatggcccagttgccattgttctcctggccaaaagcacgaccaagctgccagaaatatcagactgtcctagatattctattcaccagccaaacttctagtttacctgagaacacatgagtaaagaccagcacgagatcagtctgagctcggcccatgtccagtaattgccccgaagagggatccgtctagtagctcgcaccgtgcaggacactgcaaggcttggtcatcgtggc

SEQ ID NO: 564267 - DNA, 175 bp, Homo sapiens
gcacgggtctgagcgcatcatggtgctgagctgcatcatggtgctgagctgcatcatggtgcactcctgtaatcccagctactcaggaggctgaggcaggaggatcacttgaaccaaggaggcagaggttgcagttagctgagatcatgccactgcactccagcctgggtgacac

SEQ ID NO: 564268 - DNA, 296 bp, Homo sapiens
  misc_feature (6)..(6): n is a, c, g, or t
  misc_feature (26)..(26): n is a, c, g, or t
  misc_feature (44)..(44): n is a, c, g, or t
  misc_feature (211)..(211): n is a, c, g, or t
  misc_feature (230)..(230): n is a, c, g, or t
cctcanaccccctggggtagagtttnatgtactttccagccccntcctctggaccctaaagaatgagatagggccaggcgctggtgactcacacccgtaatcctagcactttcagaggctgaggcaggaggatcccttgaggccacgagttctagaccagcctgggcaacataatgagaccctgtacctacaaataatttaaaaattaccngggtgtggtggggcatgtntgtagtcccagctgctcaggaggctgacgtagaaggatcactggagcccaggaagtttaggctgca

SEQ ID NO: 564269 - DNA, 2779 bp, Homo sapiens
ctttttcattaagtaactttcattattgttattttttgttactaccaatgttatccatgtttgttttagaaaatataggcactactgacaaacaaaaagcagaaaaattaatgttgcctattttcctcccactcagaagtgctgttagtatttgtatatgtaccaatgcatatgaatgcatgtatcagtgagaatttatatggatattatttttcctcataaaaataaaatctactgtttgggaatctaccttcccatacttaattttgtacagaggtattataaatatgcccccatattgtaaaatatcctatactgggtttttttttcagctgctgaatatttcattacagaggtgtttcatactttaattatcgttgggcatttcagctctttctgattcccacaaactttataaaactcttgtagttatgcacatagccatgactatttctttatacatttgtagggggggatcgctggttcaaagtgcacacagaacgttaagacacctatcccctaccttatctcctctcctaaaccttctttgccctagcctaactagtctaactgcctggttttctttctctttaaccacatgtactcagtcccctgccttccaaactctccagtgtgttttaagtggctcatgcctctctactcgtggaatagcctttctaggagtcctacctgtgggaattctgcctttcgtttaagacttgtttaagcctctgaagcccttctcagccttccagctcagaggaattgccctgctttattgagctcttatcttatcacatttagtgtctctaccaccttattgatcaccttactctatacctacctatataatgcagtatcttttttcatgtgtttatcttatcttcccaaaaagtcttaactctatagtgttagcactcagacatcaaagctatacctagtaggttaagtaaacatgcggcttttatgatcagactttcctgaaatctctggagttctctgttcttagtctacctgagacacctatgtgcatttgaaggttgatttgagttcttttagagcacttcctaagacactctctagtggagaggctgtttcattggtaccctgtagaagcagcagctacttggggtattagtttgctaactattcttggtctaattagtagtcatctattcatcactcattctagaaaacacattgagagatcacgtgaacatgcttgaagctatcctgctagcctgaggattgtaggtggtgttataggtgtgtgtgtgtgtgtgtgtgtgtgtggacattttacatctaatagtggtacatattaatgcctttctcaagggaatcttcttcgtgtttcagggtcatagtagtgacaaaaatatgcagggaataaatccagattggacttgttccaccttacctttttttttattattatcggcttgtttgtaatctttttttaagatgacaggttattaagaagatgattgtagcacgacatctagtgctgcttattctaggcaatcacaccgttttaatcttcgcctcccttaaaatggttgcttgctaattatggtggaagatattctccatcttccaactactcactctacaacttttgttcacaaagaaagtattctgttaggccttacaaaaacaatgcttcatgcctggcctattctctcaataggaaataaaacattgttttcatagcagagctgataataaggcagagttcaaagcatgatgaatcatatacttttctagcagagaaaaacctatagttacctggctaattaactatcacgtgatggctgtgtgtataaagatacaggcttttcacatgtgcggcctgtatctgggtttcttttcttttttttttaattgagaatgctcatttagttcccattgatttgtattaatgttttccatcaaagatttagaagaatgagcaaacacagaagctgccattttagggtagcttctttttgaccactgtactaaacctcagtagtcagttatgttgtagcggaaagagcatgaactttacaaagtaagatggacctggattgaagtccttgctccataaactgtatggccttaaaagctttcactctgctttgattgcttatctataaatcagcgttaacaatacccatctcacagttttgtctcccaggacttgggaagattacgttagatcatctataggggtacccaacacacagtgggagcacttggtcaacaatattagtttcctttcccctttcctttagaaaggtaaacccttactcaagaaagcaaagtgagtagatgcaacataaaaagaataccaagacagagattacagtagtatgttatttcattttatttaattcacaaacacttgagttatctattataagacattgaaattgattgagggttaagtgagccatgatcccagttctgtaggaattttgaagtttttaatgtgatttttaaaaaatataaatttcagccgggcacggtggctcatgcctgtaatcccagcaatttggaaggctgaggtggtggatcacctgaggttgggagttctagaccagcctgaccaacatggagaaaccccgtatccactaaaaatacaaaattagccaggcatggtggcgcgtgcctgtaatcccagctactcgggaggctgaggcaggagaatcacttgaacctggggggtgggggttgcagtgagccaagattgcgccattgcactctagcctgggcaacaagagggaaactgcatccc

SEQ ID NO: 564270 - DNA, 511 bp, Homo sapiens
  misc_feature (115)..(115): n is a, c, g, or t
  misc_feature (118)..(119): n is a, c, g, or t
  misc_feature (161)..(161): n is a, c, g, or t
  misc_feature (195)..(195): n is a, c, g, or t
  misc_feature (228)..(228): n is a, c, g, or t
  misc_feature (233)..(233): n is a, c, g, or t
  misc_feature (249)..(249): n is a, c, g, or t
  misc_feature (267)..(267): n is a, c, g, or t
  misc_feature (298)..(298): n is a, c, g, or t
  misc_feature (311)..(311): n is a, c, g, or t
  misc_feature (313)..(313): n is a, c, g, or t
  misc_feature (316)..(316): n is a, c, g, or t
  misc_feature (319)..(319): n is a, c, g, or t
  misc_feature (327)..(327): n is a, c, g, or t
  misc_feature (371)..(371): n is a, c, g, or t
  misc_feature (378)..(378): n is a, c, g, or t
  misc_feature (408)..(408): n is a, c, g, or t
  misc_feature (432)..(432): n is a, c, g, or t
  misc_feature (451)..(451): n is a, c, g, or t
  misc_feature (506)..(506): n is a, c, g, or t
ttactgggcctgctactcctggggcacctaacagtggacacttatggccgtcccaatcctggaaagtgccaagaagaagtgtaaaaaggaccttggaaaaggggaatgtgaaatnttnnctgcaacctaatgaccccctgcataaggctaaacccaaagtnttggtgaaagtggctggtaaaaaagtggcttaanaaacctgttaaacaatttttttaaagtgaactnttttngaagaaccaataattnaagcaaggcaaaagtaancaagggccgcctgcatgtgaagccaaaaaangtttcaggagatntnttnctncataattnaagcaccctggaaaatggaatagaacacggagcaaataaacgtntgaaatnaaatggaaaaatcctgatggaaaacaaatngtgaaagataagatttttgagctncgtgttcagaaaatttttntttttaaaacaaaagtgacaaatggcagcggttatggatttacaggtgccccaanagaat

SEQ ID NO: 564271 - DNA, 263 bp, Homo sapiens
ctgcgtatacagctggtttgaaaatgcagaggaggacttaacagaccccgtgcgctgaaactccttggaagaatcaaagctttgcgcgagcccacgatgccttctgctcctccctcagctctgcccaggatgacttcaaccagctgggcgagctgaacctgcagatcaagagcttccgtgtagcctccaacccctacacctggtttaccatggatggccttggagaagaccttgatgaaccttacagaaaatcatcaaggaga

SEQ ID NO: 564272 - DNA, 125 bp, Homo sapiens
ccgccttcatctgccaggcatgtagcactcacctgcaatcccagctactcatgaggctaatgcaggaagtcacttgagcccaggagtttgacgccagcctaggcaacaaagctaaactccatctc

SEQ ID NO: 564273 - DNA, 459 bp, Homo sapiens
cggccttgccgccgacacctagcggagaagccagccatgggcgccggcggctcctccacactggcgcgctttgacctactcgcgcaatcaaggcccgggtggctcgcggttgcctcgctggacctgaccgcggaggcactgggggctgtcgcctggcgccgtgcatggcccacgcggcgccggccgctgatgcagcaggtgggcacagcggtacagctctggatctaccctgtgaaatcctgctctggggtgccagggagcgaggcggagtgcacggccatggcgctgcgcagcggcaacctgcgggacaggcagtggcttgtgatcaaccaggagggaaacatggatactgctcggcaggaacctcctctggttctgagttgcctgacctgcgatggtgacgctctgactctcagtgcacactacacggacctactaatgcctattactgcccatcac

SEQ ID NO: 564274 - DNA, 1014 bp, Homo sapiens
  misc_feature (1011)..(1011): n is a, c, g, or t
gagcactgaagatagcggctgctgtaggtacggtgtggtccgagctgtcgctggcccgagatgtgatgctatatccttgaatggcagttctggcatgtactatcatggctgttgcatggtgtaagaacgagcttgataaggtttatggtgtgtcggatccagtgtcaacgcgagaatgttatatttcgagcagccatgtgcctcatggcatgtagcctggtgtctaccaaggatgcagccggtaatgttaggggtaaacgacgccgtggctactaatcgggggagtgcaaatcgtagcttaatgcccttgagagacctttacaggtgacggtataggatgctccatgtgctatcctttgtttggagccttgtgatgtgtattatgagccaatgtgttgcctttctaggtagacacaacgtcgtatcgaagtgacatccgtgcgtgagactgagtaaattcgtccgtgagttcctcagcggagttcgcctgatttacctcaatctcgcctggatccagttccaccaggcacacgacgctggtggtctgggccctgtgaacatcggacgtcttgctactactgagtaacgcacgagttcccggagtactagggtgggctgtcacacacgtgctgttcttgctgtaggagtgtcttgatggtttgagcccaatggagtcaatcgacctgtgacgcgtcaacgaatcttcgcaggtggggccgaattcgggtgggagaaaccttccaggttgggaaaagcgcatgctgtgaacacatttgtacttgtcgcgccgcgagtagaacccgggtcctagaaaagcaagtgccgtggcgccagaggcgttcccagggagacggagcaccggttttggccttagagaaaaaacacggagcggtgtatataacaagtggaagggccacctcgccatatacagcggagtagacaaatgtagcaatacgtcgcgtataatacgatctcctctctttcaactattctttttgtatcattctcggncgc

SEQ ID NO: 564275 - DNA, 826 bp, Homo sapiens
gacatactgtgctggtggccatgcccaggagatgtgtgggctgagcgcgcgcgcgccgaatcgcggtgggttcataccctgcgggtgcttcgccggtagacggccctgggctgccggcatgtccgtccgacgcgtgggtggcctacttccctgacgcgttggtggagtgtccccgaccgtcgttagtcttccgtgcaggagtttgcggattagacggatgtggcccgatcgtgcctccgggtcactcttctcttcgaggtcgtttcaaacacctgtggtgtgtctggggttcgttcgccttgggagctcggcgcagctcatggggcctcagggcgacttatcgcttctatggggattgttgtgagtatgtcgcctttcgctgggtattccctacggatacgtgactgcggtggtgttctcggtgatacccactggtattacttgggaacgggctggtgagctttggtcttgtttagctctagtcttaatcttttgcgttttaagcttttcccttctatcatggtcacgttgccgagaggacgcgtgccttgttacgagatgaggggtgtcagtgtcgtggggactggggagctaatcgtgttgcagtaaatgtggagcagtcgcggacaggtcgtggctcggggaacagtgtgtcgtcggtggaaggaaattgggtccaggcaattgagtgcaggagtcatggcgacacatgttgctcaccgtagtgttacccgagttgtcatagaatctttagtcctgttatctagtgacgacttggaagggtgcctttaatgaattcactctggggggataagccgggggtagc

SEQ ID NO: 564276 - DNA, 282 bp, Homo sapiens
actgatctagtaacacttaggagagtctggcgacatagtaagtgcccataaatgtgttattaaaaaaaaaaatttccatctgatcacttcacccttctgctgaaatcctttccttgttttccacttatgttggaactcctcagtacagcacagaataagcgcctcagagatggtgtcttcctggtctcaagtactgccattgtgggcttcataatattgctttagtcacggcacacaactcccaggtccacagacaagttgcacggttccaggccttgtcac

SEQ ID NO: 564277 - DNA, 171 bp, Homo sapiens
gtgacgttggccctgtttgcttttataaccaactctatctgaatccaacaaaaaatttaactcatatgtgtcctctcgttctaatctggtcaccagtgcaggtgacccacaatttccagttattattccaaatgtttgggaaccagttatttggacaaggaaatggtaact

SEQ ID NO: 564278 - DNA, 163 bp, Homo sapiens
  misc_feature (145)..(145): n is a, c, g, or t
ctagaggagctggagggtctcttcctcaataagcactcactgaatgtctactctggccgagactaagtgggacagtgggggatggtactagaggcggtactgtctggtgtggtttaccaaaacccacatccttctcttctccctngaggacacatggtagtcc

SEQ ID NO: 564279 - DNA, 813 bp, Homo sapiens
ggcagaagtcctggtagtctggtccttgttcccgtgtggatagcagcttgcttcagcgagagcaggcggtggtccctgaggcgccgtggaaggagtcaaacttgcgggaattatgcggaagtcattgtagtgtcgaaagaagaataacgcaagaattagaagaatgaaggtaaggagagagaggtagagcaggatacatagatgaaatccggtggtcaaagagtggaatggaaaacgagaagaatgaggagtgaaccaaagcatgaggcaagagccaaagccgtgaggaaaagccagtaagaggcaggcaggaagctagaggaggagggcaaagcacaaggagcgtcttagtagaaccggctgattcaatctctccaggagtttagagaagatgtaccacaactaggcattggacagcaatgaatgatatgttgtagagcaagtggatgaaatgagatgagatagggagagtcagaagtgaacttatagtgatgcgtcggaatggttagtcgaagaccagtcctgacgccctatataagtgtagttgtaccttgcattgcaatctgatattagcaataccatatagccttgcttgcctattagccatccccgtgatattccgtttgtccatatttctacgttataagcgtgtggctatcaatggtctcagatggtatctcttgtttatctgcatgctccattgtccactcgtagtccgaaccaaatctacagagtcttctgtcttcaataaaagacctttacacattgtaacagacgagggtcttggggccagcacttcgatggaaaacggta

SEQ ID NO: 564280 - DNA, 451 bp, Homo sapiens
cccccttttctctttaaaaagggcccccttgtgagcccgggcgcgtctttttttttctcggccccccctccatgcttttttctttaaggtttgggggggggaaaaagaaacctttttgtgtgcccgggggggttttttttaaccccccccgccccccccctttcccctttaagaaaggaaccccccccgggggggggggggggggtttcccaggggggcccttttttttttttcccccccctttttaaggggggggtttccggggggcccccccccccccgggggtggccccccccccttttttttaggggggggccccccccgggggcccccgggggttttcccccccttttttttccctcggggagggggggggggggggtggtttttaattttaaaccccccccccttttggggcccccgcccatttaaaccttttttttggggggga

SEQ ID NO: 564281 - DNA, 472 bp, Homo sapiens
cggtcacacccccgacccgcgccccgaccgccgcacgccccgcacgtctcgtctcccaaagacgggccggaaagaataaatacctaattcttcaatggccagacatcaataaacgtccacaagcatcaaaaccatccaggaaatcatgacttcaccaaatgaactaaataaggcaccagggaccaatcctggagaggcagagacatgtgacctttcagacagagaatttagaatagctgattagaggaaactcagtgaaaatcaagataacacagagaaggaattcagaattatatcagataaatttaacaaagagatttaaataattaaaaagaatcaaacagaaattctggaagtgaaaaatgcaattgatgtactgaagaatgcgtcagagtctgatagcagcagaattgatcaagcagaagaaagaattagtgagcttggatagactattcgatacacagaggagacg

SEQ ID NO: 564282 - DNA, 719 bp, Homo sapiens
aacccagctacgcgaaatcttagcatactcctcaattacccagcataggatgattaatagcagttctaccgtacaagcctaacataaccattctaaatcttaactcattgataataagtcctggaatgtagataccagaatgtcctgacatgacctcaactaaaactccagaaccagtgatcctagtactatctcgcacctgaaacaaggctaacatgactaacacccttagttccatctgagcctcctctccctaggaggcctgcccccgctaaccaggcttttggccccaaatgggccattatcgaagagttcagaagaaaacaagagcctcatcatccccaccatcatagccaccatcaccctccttaacctctacttctacctacgcctaatctatccacctcaatcacactactccccatatctaacagggtacaaaataaaagtgacagttgaacataacaaaacccacccatgcctccccaaagtcatcgccttaccaagactactcctagctatgtcccctttagtactaataatcttataagaagaaaatggaaagagaagggaagagaaaaaagaaagaaaagaaagttgggggggagggcgaggaaaagattagtaaccattggaggaggggcagcgaaatgaaagagaaagggaaagctctgaaaagtgggagaaggggtgttcaaaaaaaaaggggggaaggttga

SEQ ID NO: 564283 - DNA, 850 bp, Homo sapiens
  misc_feature (82)..(82): n is a, c, g, or t
gcgtatgtaggatgggccatgatggtgttaaatcgtcggtctcatggggatcttgcacggtttcgtgcggcgtgaacagtgncgtgttattgtccccatccaaatgtgtgggggcgtgcacgacgctgcagatcccagtgtggggtgggcaatgttgccgtggatcgttgtgcgacgaactttctctgactcgtcggcgcccccccctctgccccgtgggggggaccccccgcacccccagtgggggtttcccacctgaagaatgttctcgccggcggcacgcttgtcctgtgacccgggtgatgacccatgctggtttccccgatgtgcttttcgcacgcttttcgtggaaaccctccgtctggagccatgttgcacccttgaggcacacctgtttccccgcccggggggggattccacggtgctatctgggagcccgtcatgccacggcgattttcagccccctgttcaggggagcccccatagttggggcccccgagaattcccccccgcctcggcaatttttctatgattaacgaggcgatcaggacagccagcaggattaacggcgccccagacgagtcacccagggattttcgctacacgccacccctagtgatggcagcaccgccccgggtatgtcagtggccacttccccgagctaggagatacttgtgacaaaagagcttacacggtcgattcccgcgtaattgagggaaggggggctagcaaaactcgcaacatgcagagagccttagataccacggcggggtgctcaaaaagagacgcaaagcatgatcgaagccctcatcaaccggtttttttacaaaaccccccccaaccacataac

SEQ ID NO: 564284 - DNA, 190 bp, Homo sapiens
gcggatcccccttggttgacgtggtgtacgacactttcccggacgcactcggctgcagctccactttctcccgttctgtgggctcttctgtgttcttgccgatgctctgccggcgcagtggggtacttggtcacccgcatcacccgttcgcacgggtgatgcggttgccgttgccattatgagtcatgtt

SEQ ID NO: 564285 - DNA, 872 bp, Homo sapiens
gccttggctggatgtttcttgtccccctgggtcgcccactccccattgttgtcctccttcatctatgggggacctttgctgtacccgaagttccctggccagcctttccggggtacccccggctttttggtggtgtttctgagcccccgggggtggtacccccgccgccttttcccacggaggccatcttttatggttacacactcacgcgtacaccctgtgcgccgtggtgtacaccgcccaggtatttctctcttgcgcgtatttgttgggactcatttgcctcatccccatgctcaccacaccacagggggagctcctcacctcactacagtggggtttttaaatgatgtggtggaatgactgtgcttcggggaagatttttgcgcgctcaaggcgggtggcgcacccattttctccccgtggcaccaccccatggggaggtctaatagccctgtatcttgggacattctttcacacgagagatcccctgtagaagaggattgtttaaaagaagagccaggctctctgcttgagaagcgccagtgacacaggaggaatttctagggtgaatggactgcgtctcccgcctcgctgagttctactgctacatcacgccctgaggttcgccagacatggtcttgagaggtgtcacacaggtggcctctcttgtgcctattccacgccaattctcttacgtgaagacgtggggcggctccgcagccctcggcccccggaaaactggtttcagctcccccggctcaggcccctgaatgggtaggagccacccctgactggttttaaactgtttttgcaaagggttttaaacaccatggaaaaatggttgatgggaaataaacatccgtttctta

SEQ ID NO: 564286 - DNA, 321 bp, Homo sapiens
cattcagcgctaagcacgtccacagtgctgtgcggccactcatctcacggaactgaaactttgaatcctgcccatcagttagttttcgggttatggaatttcatgtgaacagaacccaggtgtttctggaaatccggctgctttcactcagcatctggtctttggagttcacccacgctgttgcagagagcagcagtctcttcctttttattgctggaatgcactacagtttgtctatctgttctgtagttttgatctattatgaatacagctgctataataaataaaacatatattaaaacatccaaagaaaactaaaaa

SEQ ID NO: 564287 - DNA, 187 bp, Homo sapiens
caaagggaagaagaggaagaagagaaggaacctgaagcagaacctcttgtacctccccaggtgtcagtagaggtggccttgccccgacctgcagagcttgaagtaaagaaagtgactaaaggagataccttaactcgacgtaccgttaaccagcagaagtccggagtttccaattaccattgataga

SEQ ID NO: 564288 - DNA, 486 bp, Homo sapiens
caacttattcgtgacgttccactcatggtagaagtgatccataatgcttttgttccgtggtagttgataaccatgtcagttttgctccgatacagattagaaatctagttcaatctagtctgtgttcagaatccagatttacactgacccttgtgtgtgagaagagatagattattttttatcacaagtggtttacacttcttattaattcagacggaagttaattcactcaacatttgtagggaacagagtgggcagggtgctaggacacagagataaaaacattagcaccctcgaggacatcttgagccattgagctttcagtcagacatcataaagactgagtaagaaatatcaaacctgagcacaaaaaagatactacccaagggactcttaaagtgcaagagatgaagcaaagataaaaccaagcccctgcctgtcagcccctggggggatgtgtaacgatgtgcactatgagatgtgtgc

SEQ ID NO: 564289 - DNA, 685 bp, Homo sapiens
gctatcatgaccctcggcataatatgatttatctccacactagcagagaccaaccgaacccgccttcgaccttgccgaaggggagtccgaactagtctcaggcttcaacatcgaatacgccgcgaggcccgcattcgccctattcttcatagccgaatacacaaacgataattcatcagataaacaccctcaacgcactacaatcgttcctaggaacaacatatgacgcactctgcccgtgaactctacacaagcactataatggtcaccaagaccctacgttactaacctcccgtgtgtcttatgacacttcgaagcagacatacccccgaattcacgctacgagccaactcatacagcctcctatgaacaaaaccttccgtacgcaggtcaaccctagtcacttacattactagtgactatggtctccagtagcccaagttacaagtctccagggattcaccccgtcaagaccgtaaggagagaaaacacacaaccgcagagaagaaaaacacacgatgacggagagcaaacaagcacgcaacacgcagaaaaggacgccacaacacaacaaaaataagggcacgcgcgacacgaagaaaaacacgaacaaggagaacagaggaaaagcacataacaaacaaagcaagacaacagggcaagggcaaaacacaaaagcaaaaga

SEQ ID NO: 564290 - DNA, 328 bp, Homo sapiens
gcagagtatcaaacccatctagatatcaatcttagcacccagcacagaactaatgggccatcaaatccaaacccaacccaaggtcaagttgggctgatgtaggccaggagtccatgtagggggaaaactttcctcagagcaagagcagctgagtagggtttctggcatctttctctgggctcggtcacaagccagtattcagcacaacatcttcttttggccacagggcagcagcaactccacacatacaacaatggcaatgctcaccatctttccaacattcagccacacactggtcctccagtgcaatgcatcacaaggtcatcca

SEQ ID NO: 564291 - DNA, 754 bp, Homo sapiens
  misc_feature (534)..(534): n is a, c, g, or t
agcggggcgtacggaggtggcatctgtgggatgaggcggtgtgtaacggtcagacggagctcaaagcccggatcaatccccacgttccgggtgcgcgaagcctgataccatgaagaagtactcgggaagacgaaaacggtccggatgggccgcctgagcccgaactcgggacgactgatggtggagcccccatgtcagctgagatcaggatgttccagcgtatcactgagggtacgtggagcactgtaggatcccaatgttcctgatggatcactttggtatgcacgcgtcagcatatgagcccgtgatgttgtcaggtgagctgtgtggatatagaactcattcactcagcgatctacaggatgtgcagactatgtcctatgggaacgcaggcacgtgaccaaagcacgctcgggaatgcagtcgggcgtggaggactgtatcccccttttgtggagtgctgggaatagtcgggatggattatcttggaccgagtgatttgggatgatgaagtgaggactgagttggagatantactgggatcacatgatatgctggaggcaatggtcagaacttactcatggttgccaactgttcaatcgtcctaattcgcaagtacgggtgatgcgtgcccgccatatgtctaccaaggggacatcaagtaggatgctgctcgggcagccatggcgggatcccgggagacacgtgaggaccctgttcagggatttcagacagttggaactgtagcacgatg

SEQ ID NO: 564292 - DNA, 905 bp, Homo sapiens
ggggtttcggggcgagcgttgggcgccgcccgcgccgcgctgggtgcctcggtccgactcagcggtggggagcgagccaggcctcccgccaaccgtgtgccgtcaccactgcgtcgggctggtgcagccccgggccaggccgcggccgggtcaggagcgcaggggctttgttatgcacctaaagccatatttggaagcttccagaagaaagagcaccccccggaatgtcaagcagggacaaccgctcgagaactcttatgaaccaccaaaaggcgtgtacattgatgaacacattgcaaaggttagccacatacatatcacgtgtcttttcctttcagcctctctcggtacagcatcatctcgaaagccattgtgggatcctttctccaaattgtctgggcagtatgagtgggaacgagtcctgtagagagcagtttgaattgttaaaaccaaaaggaattgcccattctgagggaatccaccagtgcgaaagaagagggaccactgaatatctgggctgttgtgaaaccgtgaaattcccaaggacacaagttggcattcttggatcccaccagtgtagtaccagcggttagggactctctgcaccactacaacagttcccctggaatattgagtgcgagcagcctctacgagcaaggacacaacatccagggcgcattcttaaaaaaggcaaggtacaggtgcgcacggctacgggacggttaccaggcgggttggtaccaacctgaagccttttggcatgtgtggatttgacaccgtgctgtgcccattgtacgtgaacgtcggaatggcgtcacgcagtagggcccgtacgtataacatgttgcccttgagcaaacacgctcttgcagtgtcaaaaggaaccccctacgtgtgagttgcac

SEQ ID NO: 564293 - DNA, 1787 bp, Homo sapiens
  misc_feature (714)..(714): n is a, c, g, or t
  misc_feature (947)..(947): n is a, c, g, or t
  misc_feature (1141)..(1141): n is a, c, g, or t
  misc_feature (1324)..(1324): n is a, c, g, or t
ctagagcagcgacttttttgttctggggagcacagataacgagtcgatcacttcgtgttggacgctagcaacccaccacggtgggtgtggcagcaccagcacccttgtggggtgcgcgcattaatagtcaagagggcgggtgttgttaaagcggcccgctttgtcttgctcacgcccagggcgtcgttttgttgcacgagagctagcgcacacgcccgcggggtgtggtgtgcgacgaaagccgacgccggcggcccggtttttaccacgcgccggccccccccgccgtctttcccgcgggcctatttttcttttttgagcgccgcaaaaatttgtacaaaacacttgtgttgtgtgacagaacaaagaagttgtgcccaccaccaaaccgttgtgggaagaaggcgagttaaaaaaaacagggttgttcccccacacaaggaggaccacctgctccctacctccctgttgtttaaaatattgggggcccaccccccccccccccgcgggtgatatagaagaaaaaaaggggggtttttccaacacccggggggataaatgagagtagtacgcccccatggagaagtgccgcccccccaactaggggccgtttggatggcacccccgggataatagtgggagtggcggatagggcatgaaaataaaatagggccgcggggcgtgttgtgccgacccccccacttggccgtcctnctcccggaattgatgaatggagaacgagatatttgggagtacgaaaataattgtgtgggggcgccccagggccgcgtcttgggtcttctgccttgtgaggagcccctcaccacagggccctcacaacagggaggcgcgccctctttccgccttgtcacacctcgggccgccgccccacaagagtagtgtagcctcgtctgttgtgtggtgtttggagtagtgagaaaattttnaaaaggcgccgcccacgttatatctcgccccacatcgagggggagaccacacacactctctctctcgtttggtgcacacactcgcgcccacatatatatgttctcgtggagagcacacactcgtgtgtatgatatatagggagcacgcgcgcttgggtgctcccctcgctgggtgatatcatctcacagagagntatattctgcgcggctgtccccccgctgagagagagacactctctactctctctcaggagacccgctttcacactgagagcgtcgtcacacatgcttctacactctacacgctgtgagaaatgtgttctcacagccgcagacttgtgacacacacagtcgtgagagagagagagagaatgtcnccttctctccacagggtgtgcactcccctctcttgtggagaccaccacaccactatagcacggctcaccacatctttctcggagagttctcgcgagttctcttccgcagcggccaccgcgagagcgtctggcctcctttttccccccgtcgagagtcccacaggcagattgtgccacgggcgcttgggagactatcacgagagtcacaaacacacactcggcgctgagaaacttggagtcctctggcacagccgagaggaggagacccacgagacgcctcggtgttcgaagaagtaactcttttcctcgggagagggggcctctccacgccacagttgggccaaagcctctccaatcccgggcaagtattttccagatggacaatcttttgccctcacctagctgccctgcccctgccccttcagggagatgggggtccatttaagggaactggacccttgtg

SEQ ID NO: 564294 - DNA, 123 bp, Homo sapiens
gctgactatatgtatggccgtgaaggtactacaatgctggtggtagataaccaaagagggactacatggaaggaaggcggaatgtcacacggaactataactattggctctattgggtagggt

SEQ ID NO: 564295 - DNA, 244 bp, Homo sapiens
  misc_feature (156)..(156): n is a, c, g, or t
agcatcggttaaattagccgacgaactcctagaagaaaacgtaggcaaacactctctgacatcaacattatgaatattttctcaggtcagtcccccaaagcaataggaattagagcaaaaataaacccatgggacgtcatcaaagggacaagcttnggcacagcaaaggaaacccaaaagaaaacaaaaagacaacttacagaatgggagaaaatagtttcaaatgatgccgtcggataatttt

SEQ ID NO: 564296 - DNA, 329 bp, Homo sapiens
  misc_feature (149)..(149): n is a, c, g, or t
  misc_feature (163)..(163): n is a, c, g, or t
  misc_feature (181)..(182): n is a, c, g, or t
  misc_feature (200)..(201): n is a, c, g, or t
  misc_feature (226)..(226): n is a, c, g, or t
  misc_feature (237)..(237): n is a, c, g, or t
caggagcttagcagctatcggttcaatgcgtatgtgttattacaatctagatttatgatcatgcctcttagtctccattccccaaattatttccatgtgatctcatctgcagtaccctctcaggcttcagttaggtgtcagttctccanatgggatggcctcnatactatgctctgtcgcnnagttcaggatatagactnnagataaagcccaagtgtaattcccnctttcctgaangcaatgtaaattccggtagttttagccgtgtccgtgttttcagccctcctggaaattgccttcaagtgaaggcattactgttctatagcttg

SEQ ID NO: 564297 - DNA, 478 bp, Homo sapiens
agtacgattattatttgaaagagagagatatatctacacatacacataaagtcatgcgttgcttacggacagtgataggattctgataaatgcatcattatgctctctccttttgcgaacatccatagggtctacttgcatcaatctagatggtatcacctactacacacctcagctgtatggtatagccttttttgttcctatgctgcaaacctgtgcagcattgctactgtactgaatactgtaggcagttataacacaatggtatttgtgtaaacgtagaaccattctaaacatcgaaaacgtacagtaaaactgtggtataaaagataaaaaatggtatacctgtctaaagcccttaccatacctggggcttgcaggactgcaatttgctctcggtgagtcagtgagtgagtggtgagtgaatgtgtgaaagtcctaggatactactgtggatttaataaacattgtatcctta

SEQ ID NO: 564298 - DNA, 164 bp, Homo sapiens
ttactagaggatccgtacgagcgctagggactcctcctatcagcatgaggagactaacaaactccgggcaaagttggggctgaaacccttggagtttaatgccatcaagaaggaggcgggcaccaaggaggagcgctgtgacagctgatgtcatcaaccctatg

SEQ ID NO: 564299 - DNA, 774 bp, Homo sapiens
  misc_feature (18)..(18): n is a, c, g, or t
  misc_feature (111)..(111): n is a, c, g, or t
  misc_feature (126)..(126): n is a, c, g, or t
  misc_feature (129)..(130): n is a, c, g, or t
  misc_feature (133)..(133): n is a, c, g, or t
  misc_feature (139)..(139): n is a, c, g, or t
  misc_feature (165)..(165): n is a, c, g, or t
  misc_feature (170)..(170): n is a, c, g, or t
  misc_feature (178)..(178): n is a, c, g, or t
  misc_feature (188)..(188): n is a, c, g, or t
  misc_feature (191)..(191): n is a, c, g, or t
  misc_feature (195)..(195): n is a, c, g, or t
  misc_feature (200)..(200): n is a, c, g, or t
  misc_feature (203)..(203): n is a, c, g, or t
  misc_feature (206)..(206): n is a, c, g, or t
  misc_feature (209)..(209): n is a, c, g, or t
  misc_feature (230)..(230): n is a, c, g, or t
  misc_feature (234)..(234): n is a, c, g, or t
  misc_feature (241)..(242): n is a, c, g, or t
  misc_feature (246)..(246): n is a, c, g, or t
  misc_feature (256)..(256): n is a, c, g, or t
  misc_feature (261)..(261): n is a, c, g, or t
  misc_feature (267)..(267): n is a, c, g, or t
  misc_feature (276)..(276): n is a, c, g, or t
  misc_feature (280)..(280): n is a, c, g, or t
  misc_feature (296)..(296): n is a, c, g, or t
  misc_feature (309)..(309): n is a, c, g, or t
  misc_feature (312)..(312): n is a, c, g, or t
  misc_feature (319)..(319): n is a, c, g, or t
  misc_feature (321)..(322): n is a, c, g, or t
  misc_feature (331)..(331): n is a, c, g, or t
  misc_feature (338)..(338): n is a, c, g, or t
  misc_feature (344)..(345): n is a, c, g, or t
  misc_feature (349)..(349): n is a, c, g, or t
  misc_feature (370)..(370): n is a, c, g, or t
  misc_feature (374)..(374): n is a, c, g, or t
  misc_feature (384)..(386): n is a, c, g, or t
  misc_feature (388)..(388): n is a, c, g, or t
  misc_feature (391)..(391): n is a, c, g, or t
  misc_feature (395)..(395): n is a, c, g, or t
  misc_feature (397)..(397): n is a, c, g, or t
  misc_feature (403)..(403): n is a, c, g, or t
  misc_feature (406)..(406): n is a, c, g, or t
  misc_feature (410)..(410): n is a, c, g, or t
  misc_feature (412)..(412): n is a, c, g, or t
  misc_feature (432)..(432): n is a, c, g, or t
  misc_feature (463)..(463): n is a, c, g, or t
  misc_feature (480)..(480): n is a, c, g, or t
  misc_feature (487)..(487): n is a, c, g, or t
  misc_feature (521)..(521): n is a, c, g, or t
  misc_feature (554)..(554): n is a, c, g, or t
  misc_feature (585)..(585): n is a, c, g, or t
  misc_feature (601)..(601): n is a, c, g, or t
taaaaagtgacccaaaantaagatttgaacatcacttgtagtttcttcctcgtaacatgagtgctttcagctggacagtagattacaaagcctctccgatcacgttaaggngggtgatcaatctgnggnngcntctgtnactcctcctggggaaataatcctgtnggggngggggggncttcccagtngtntggntagtnggnccnggnggggggggtcctggggcgggngggnggggggnngggncccacctgtnttgtnactggncgttctgcngggnctctgtcactgatgcngatacggggcccnggnccttgtngnnatcactgangcgcacncactgnncatnaactgagtccttccacagggngacnttattgtgtnnncnagngagngngagggngtngggngngggggggcagctcacatgcnacaccacatcgttgaacttgtgcaaaatttngggggccacgtattggntgggggntcatcacagggccaaatgaacacacgaccatccngggagcagcgggggagggggcgggggggcaggnggggggggggggcgcagggcacatctcgaanccagtcactgtgcgcntctagcttctgcgcctccttccactggccgtcctcctcctccttccacagcttgatgaggttgtcacagccacctgatgcaaacctcttgatgtaattgggtttctgccccgatgggtggtctatgaggcttccaggtacaacagcaggggcccagctgacggcattgcagcc

SEQ ID NO: 564300 - DNA, 266 bp, Homo sapiens
ctagcaggatcccatcagtgcgaagactgtggtacgtggagttgagggagattgggtaggttgatgttgagtggaacttgggcagtgcacatgtcacatcttggctgggattcgtgtagtgcttcactgttgcatgtcactggacttgcctggctagtgcacttgtgtggcctggcagtgtcagctggctgctcgtggtgtacagtgtcccctgtatggcatcctgtgcttgggtgtgagacagtttcttggctggcactgccctg

SEQ ID NO: 564301 - DNA, 577 bp, Homo sapiens
tcgctgctcacatcatactcaattactatacttgagtatccatgtctacacagactcgtaactataatattagcatattactaagcaattaattttctaacactacatttctatcactataggtaactattcttcttaaaatgctccctcagtcatagctatctggataattttcatttaataattacatatagaacacaacagcccaataaaagctgcagactaagttcactctgagcagtgtcggcaaactgtatatgatgtcagctgctacttcagatgtattagataaataaaacagtaaggtgataagacattggtacttcaagctaaaataatactgtgtaaaaacatattacacatatttacagtcacattaaaaagccacaggtaaaactatgttactaaccatcttccagtctgataagccatctgtacttctcatttctgtagctccgatgtataggccataagtcgagcatagacaccatgagattctaactgcatgtaaacttgatcttactgagtgctcagagacaggagtacatatccttctcgatcgatatctagtcacaaa

SEQ ID NO: 564302 - DNA, 530 bp, Homo sapiens
  misc_feature (19)..(19): n is a, c, g, or t
  misc_feature (59)..(59): n is a, c, g, or t
  misc_feature (106)..(106): n is a, c, g, or t
  misc_feature (143)..(143): n is a, c, g, or t
  misc_feature (170)..(170): n is a, c, g, or t
  misc_feature (179)..(179): n is a, c, g, or t
  misc_feature (249)..(249): n is a, c, g, or t
  misc_feature (272)..(272): n is a, c, g, or t
  misc_feature (299)..(299): n is a, c, g, or t
  misc_feature (323)..(323): n is a, c, g, or t
  misc_feature (486)..(486): n is a, c, g, or t
cagcgagaaggatgcttgnctcccgctgctggaaccttggcttctcgagttgctctccnctgtctgtctgttgttgagaagagctgaactcatgccgactggaccngctttcagcattgtttcgtcaaagtcctttggaaggnaagatgaggactaggggctcatgatgncagggatgnccccatagtcatgcccggggatggaggggagagagcatcactggaaactggcatgggtttaaaacgacanttggccaggcgcggtgatcacgnctgtaatcccaacatttgggaggtcgnaggcgggtggatcatttgaggtcngagttcagaccagcctggccaacatggtgaaaccctgtctctactaaaatacaaaagttagcctggcagtagtgatgcgggcctataatcccagctacttgggagactgaggcaggagaattgcttgagcctgggaggcagaggttgcagtgagctgagatcntgccactgtactccagcctgggagacagaatgagaccctgtctt

SEQ ID NO: 564303 - DNA, 247 bp, Homo sapiens
caaaaaaaaaaaaaaagcaatgttttaattaaagtgtgtttatataacatatatgcaataaactatagagctcagtgaattgtcccaaagtgaaccctcgcaggtaaccccagtccagatcaagaaatagaacccctccttcagtcagcatcccccccctacttttgaagacccccccctctctttcctgacttttagcattatttattagtttgcccctttttgaataagtaaatatttgcaagca

SEQ ID NO: 564304 - DNA, 165 bp, Homo sapiens
cggaaaaaaaaaccccccccccccccccctttggttccctttgggcacgggggggggggggcctgggaacaaccccccccccccccccttcccccccccctgggggggggggggggggggttttcccctgcccttcccccgggggtttttccccgccctaaatga

SEQ ID NO: 564305 - DNA, 114 bp, Homo sapiens
gcagagcagctccctcgctgcgatctattgaaagtcagccctcgacacaagggtttgtctacgaatggtttagcgccagtcgacgcggccgcggtcgacgcggccgcgaattta

SEQ ID NO: 564306 - DNA, 337 bp, Homo sapiens
ttggcccgggggtttttttggggcccccctcccccttgggggttccctttcccatgggggtttttatcctgggacccttcggtggggggttccaaaggcccttttttttccccgggggggttccccgttttttttttttgccaccacttttttattggcccgttaaattttggtaattgtttggaatgggtgggggttttaaaattttggttttttttggaaaaattttggattgaaattgaacccagttttttttttgggggttttgggccccttttttcctgccttcctttttcctggccggaaatttttgggggttaaaaattaaattttccca

SEQ ID NO: 564307 - DNA, 1788 bp, Homo sapiens
attggctcagtacgcagccctacggagtacggagacccgacggtccttgcggcactggacagtgcggccggagagctgtaagggatccgagtgacaggacagcctccagccagcagaggcagaggcgcggacgcagagacggaagagagcagaggcagggtgtaagagagacctagagccagtaagaaagagtaatgggggagacgaagaagagaaagaaccaggggatacccggataagaacacgagtaagcaagggtaaccaaagcatagaacgcagacagagccaccaggctagggacacgacgataacgaacagcattgagacagagaaccagagagacagcaagagaacaacaagaggaccaagcgacaacagtgagaagagcccaaggggagcggagcaaagaggagagacagagagcggcacagacaccagaacgacagggaaatgacgagcaatgcagaccgcacagatgcaacagaacaggataggacacccaaaaagcaaaagccacgggaacgcagaaacagcacgaaagaaagacacaacgaagagaaagtcaacaaaaagaggaggcacaacatgatagagaagaaaagcaggaaagaaaagacaagagcacaacacaagaacagacaagcaccgacccaggcggccaacgacacaacagaagtgaaaacgagaagctggaaaacggagggcacatgatgtacggcgaccacgcacaggggagtaatcacggagaggagatcgagtagcaacgacgccgggcaagacactagaggaccaatcacaatagagaggaaggaacacaggcacgcagcccagagcacaggaccagtcgtatagtgagccaacacgacaacagagagaacacagtggacagaggacgaaataagagagcgaggtacagcgcgtagtacgaggcagagaaagagagatacgcacatacgacagagagaaccgacgagaaaggcaacaagaacaactagacatcgtccgagagacagcagaagccccatgacgaggacagcgagagcacacaaacaacgagcaaaacgacgcacgtagggacgacaaagagacgtggagagacacgagcaacagaagcgagagagcacgtagcaaaggacaacaacgtcgacatagtaacaggaccgacacgcaggccacaccaaacgagatagaacataaatagcacacgatggaaagaagtagatacccacagaacagaaaaccaacaaaacaccgcaacaagcgagcacaagcgagaagacaagaacacaacacaacaaaacgagaactacagaaaaagaggccgagagtagagaaaaattacacaagaatggaacacaacaaaatcgtcagaacaaagcgacgagaagatgcagaaaagaacaagaaaccaacacaaaagcaacacagagccaagagaactacacgcaagaacacaagaaaagcagaaaaataagacgagggaagacgagcagaaagagaacagactagaacgaacaaaggagcaagggagcgaagagagagtagcgacaagacagcagagatagacccgcaagccgagatgcacgaacaaacaagacgaaacacgtcacgagcctagaaggcaaccaccaagagcaagagtgaggactaaaagacagggggcaacatcgataaacgacttagacaggagcaagagacagagtgcaaaagagcggagaagacagaccgaagagaagagagacgcaagagagaccgcaatacagacgtagcccacactagcaagaaggc

SEQ ID NO: 564308 - DNA, 149 bp, Homo sapiens
tcggagctccatcctagatccagccggcctcctccctggggcctcctgcgagttccccgtataaggctgggagtggggccccctatattatttaagtaaaatctaccatatactattggtgctcccgcatggttgccttccttcatgaa

SEQ ID NO: 564309 - DNA, 262 bp, Homo sapiens
ggggggtaagttccgattacggtgggggctagtctttgataaactgttatgtcgtgtctgttcggacatatatattaggaagagcttctgtgactgtcctttaatagcaggcttcttgtctctttgatcttgtggataaagtctgtttatcaaagactaggatgaaccccggcttttttggtttccatttgctggtagatcttcctccatccctttattttgagcctatgtgtgtctctgcatgtgagatgggtttcctgaa

SEQ ID NO: 564310 - DNA, 299 bp, Homo sapiens
ccatgtacaagtccttcatcaacgactacccagtggtgtctatcgaagctcacatagaacaggatgactggggcgctatggaatcagtacacagaccagtgcaggaatccaggtagtggaggatgatctcacagtgaccaccccacagaggatcgccaaggccagtgaacgagaagtcctgccactgcctcctgctcacagtcaaccagataggctccgtgaccgagtctcttcaggcgtgcaagctggcccaggccaatggttggggcgtcctggtgtctcatcgtacgggggcgact

SEQ ID NO: 564311 - DNA, 310 bp, Homo sapiens
tgcgacgcagtaggccgcgggggggggctcgagggggacgccttactatctttactgcatgtaactgtgtgtgctttgatgtgtacatatgagagacattgacaaaagtgagtgtgaggtatccgaattcctgtttcagtgagctttcacggagtaaattctttttgtctacttgcctgtgatctcttctaatatgacttgcgttaatgacctttaagaaatcttttaataaaataaaaaattttattaaaatctttttttaaaaaaaggggggttacaaccttctaataaaaaattttattaaaatctt

SEQ ID NO: 564312 - DNA, 527 bp, Homo sapiens
tacttcagcaaggcaaacgctcattcacacggggaggagctctatacccctcttcagcacggtcactgctgcaggctgctgctggcccacccctgttgctactatccaggccagcactcaactctacctgaactacacagcctactacccaaggtaccctgcagctaagagaatatcacagtcccactccctgtcccaatctggggaaaggtcacgatcccctttctggggcagataactcctcccttgagatgacaagggagtaaggtggcagctggctaatgccatctacaaaacagatcgaaaatgactctgaagaggctggggcttcagggaggaactgaattaagcacaaggcagaaacaagggaggagggaaacaggtctcggtctaggccacaggtggcatgcatgactaaaccttgtctctcccaccctagccccccagtctcccccaccactgtgggctacctcactacacccactgatgccctggcctctgctcccaactcagtgtggtcccagtca

SEQ ID NO: 564313 - DNA, 373 bp, Homo sapiens
  misc_feature (201)..(201): n is a, c, g, or t
cgtatgtcagcgataaaagcttggagcaattatgcgtatgaggttcattctgtactctcttctcaaaccacatcagtggtccatagtggaagaatcaagaataccaggctctctgcgttatgcaaggtaatatattgggttccaacctctaaaattcatcgtggaatctagctgcttccgtccttcatctcaagtctcacnttcatacgggacatcctttcataacctagtggttttgctcccagtccagcttctccttttcattcccttctccctttcattccctttcattcccttcttcctttcattcccttgtaagcttcctcctttcattcccgtgtagaaatctgtctgtgttctcagtggaggtcag

SEQ ID NO: 564314 - DNA, 448 bp, Homo sapiens
cagttacatcaatggagagaccgtagtagtgggggaggaaccccttctcgcctctgaggaccccagaaacagcctaccagggcaggtgtgtggggcgggctcagtccaccttgcctctgtcgcccttcgttgcccaccacctaacatcttgttcacctcacaaaatcagttctgcccagtgataagttcctgctttccctgtggtcgaagtgtggtcagatgagcatccttgctgttgctatggccttgaaaacggctttggggagggggcgggaagctgggggataggtagtgggaaaagggcttgctgagaagactgtggctactttagtgaagatcaaatccctctcatcctcgcctctggacactttgaggagagatagaagggacagacctgaacagagatagaaattaacaatttacgtataaggtacaaataaaatgaaga

SEQ ID NO: 564315 - DNA, 440 bp, Homo sapiens
gactgttgcaacttatttctactgcattatacaagcagggactgtgctatctggaggccagaccagactggtagagaagtatcttaagtgtttcctgacacacaaatccccaaacacacttgtggttcagtttctgctcacgctacccgacttaagtaacttgtgcaggactccaatcatctcagcattaagccctcctgcactcaaggccttgctgtgtggcctttgagcctcagcttcctgagctgtaaaatagagctagtaagacctttcctatagagctgtaggggaatgggttcacggcacggtggagctgacttgtactgactcaggagggttgactgatgattttcagaaatcattggagccagtttgtaaatacagccatcattaacaattaagttctatacacttacgattaaataaattatattaaaaac

SEQ ID NO: 564316 - DNA, 489 bp, Homo sapiens
  misc_feature (4)..(4): n is a, c, g, or t
  misc_feature (186)..(186): n is a, c, g, or t
cccnagtcccttgggcagattcgcactggttgtggaagtcctttcaactcaaaagaggcgggttttgggcacccccccaaagtttttggaagtcttttatctttctcgtgtgaacaggccccaacaaaaaagaccagggcgcttcccaagccagccagacaccttgggtctgagccataaactggngtagttaagctttgcagcttcccagtggattttatttaatcttttggtggggttttggttggttcttcttgtaaaaatggacaaaaacctttttaaaaaaattggatttgaaactggatggggatttggaaccccaaaaattttatttggggaatggttcttttaataattcaggtaaaattttacaatattttgcaaggatatttttttggacaaagaccctacatgttttcccaggatgatgtgatggaaaaatttttttttgcccccaggtttttttaaaaatttaacaaatttgcctga

SEQ ID NO: 564317 - DNA, 574 bp, Homo sapiens
atcgtggtctgtgccatggtcccgtctctatggtggttgaggagaaaggcggggaagcttcctcagccttgcagatatgtgtggcatttactagccagagctctgacaggcagtgctgtctgtttcttgtactgggaccaatagtaataatatccatagcacattccccttgcatttatgggtgaggcctattgccttctcataagcagagtattgcatgccttcatcaaactcagcccaaaactctgtttacatgggtggctgcagtatggagctaggtcaatgtacagagttgggatggtcaggacctggtccattgctaaccaataatggggacttcctgggtagcggaggtcactccctctactcactgagctatgattagggagtggttattgccccaaccattgctaatgggatgggtggcagggactaggctctaagactcctcattgtctaaatgaaggcctaaacatgtgtgaagtgcgtatttctgcttttgtgtaccccactcaacccattaccacagtttgcctttgtgtgtctgtgtcattaaaaagccaaatcctgaaaa

SEQ ID NO: 564318 - DNA, 220 bp, Homo sapiens
gcggccgcctactactactaaattcgcggccgcgtcgacgcgtggccgaggaccagcgcggcgcacagcacgccgagcttaagcacgttacgaggtttgaacatggaaaggactccgggtgaggggcaatcagaattcataatcgacactggcggtgagcgtgcgagcggcacctgggatgccgtagagctggaagccgtcgagggacgcgccgacctgg

SEQ ID NO: 564319 - DNA, 376 bp, Homo sapiens
ccagtctctagagtatcccctccgtcgaagaacaacggcaggtaaatccttcagccaattctaatccacttgggttttcagctgtatttacatctaatagcaatagactagaactgatttatcttctacatagtacaatcacaattgtggaattacaggaattctggtgattttaaggtgaaataacaaaatacaataggccctatttaacagtttgatgtgacagttagtttaattatgaacctgtaacttcactcttggaaattgcttctccaccacataatgggctttttcccctattttaaggagccagattgaatgaaagatgtggaaataggctgctgtagatcttgatcttccaggtaccccatgtacc

SEQ ID NO: 564320 - DNA, 476 bp, Homo sapiens
  misc_feature (417)..(417): n is a, c, g, or t
  misc_feature (461)..(461): n is a, c, g, or t
  misc_feature (476)..(476): n is a, c, g, or t
taaatcccaactaacccctttaaaaagtaccccaaactacttgaggagaaagtgcaggaaacatgattccctatggtgccttgcttaaaactatttggctaaatttaaaagcagtcccaagtgcaaaatgtaatttattggtgcaaaagggcacacggccaggtgcactcttaaaactatcgtcaatttactctatttaatagtgttggactctttaaatataccagtcttttaattttatgaaccctagcatgtagggggagggaggtccacttcagaaatatacattttaaaaagggtccaagacttttggcggccatttggctactttatccataccatagatcaggtcggtgttggtcaattttccacggtatttccagagagaaataatctccaaaatttcacctatggctnttcacctattttcctgtccattttataaaacttctgccagtgtnttcctgaataatccn

SEQ ID NO: 564321 - DNA, 194 bp, Homo sapiens
ctttcctttctcatccagcacagcaagaccaacgggatctcttctgcggccgcttttcctctccgtgacgacagggcagtcttggtgtgcagcccctctcctctctatcctggtagggaatgcctcgacccaccctgagaaagtgcaaaaaacactagcatgtactgataaccccgtgctcgcggggccgcaag

SEQ ID NO: 564322 - DNA, 132 bp, Homo sapiens
tctcatatatcactagtaaacctccacaagacagttgctctccgggagctttatcaataaactggctacaacggggacattcgctcaatttactccagcggtctgtatagaccccggcttttcataactgta

SEQ ID NO: 564323 - DNA, 631 bp, Homo sapiens
caaggtggctcactgtgatcctcagaactttgggaggccgaggcgggcagatcacctgaggtcgggagtttgagaccagcctgaccaacatggagaaacccccatctctactaaaaatacaaaattagccaggcgtggtggcatacgcctgtaatcctagctactcaggaggctgaggcaggagaatcgcttgaacctgggaggcagaggttgcagtgagctgagatcgcgtcattgcactccagcctgggcaacaagagagaaactccatctcaacaacaacaacaaaaagtgtggctgggcaccgtggctcgtgcctataatcccaacactctgggaggccaaggtaggtcgatcatttggggtcaggagttcgagaccagcctggccaacatggtgaaacctcatctctaataaaatacaatagctgggtgtggtggcgcgtgcctgtaatcccagttacttgagaggctgaagcaggagaatcgcttgaaccctggaagtgaggttgagtgagccaagatcaggccactgcacttcagcctgggtgacacagtgagacatgtataagctataactgaactccctcagtcattatgcttagataggaccactgttgacccgggccgct

SEQ ID NO: 564324 - DNA, 218 bp, Homo sapiens
tcaggcatatgtagtgagtgctgtgtcaaggtcaccaggaagcttgggcagtctttcctatctgctcctggtgctgcggctctgcctctcccttgcttcccatttttctaatggggacagatagtgcctgtctgtgtcttagagagcctgcccctcgtaatctgggaagagcttgtagaggcaggaaatggcacatatcagtcccatgatgaggaccc

SEQ ID NO: 564325 - DNA, 138 bp, Homo sapiens
agtcagcatgtctctctacttcaaactagtaaattgacctgcgcgtgcagaggcgggcataacacagcaagacgagaagactctatgaagctattaactttattaagtgcaaactcgtacctcacatagacccacagg

SEQ ID NO: 564326 - DNA, 284 bp, Homo sapiens
ggtcgctcttagcgctggagttttccaggagtctgtccacactgagacactggagataacctaagcaatatgtggccacacaccttagcctctttcatatactttcctttgctccttggttgagcagggtctgtctgctcgcattagagaaactgcccagatgactcaaatcctgaagggatctgctttagaagaaaaaaggaatctaggtactatactcaactccatactagtaaaacaacctaatccaaataacacttaaaagctataatcacaatacaaac

SEQ ID NO: 564327 - DNA, 226 bp, Homo sapiens
tttttcagggaaagggggctttgtttttagggacaggcccgttccccccagtcccagtgggcctgtcccgggggggatgtactgtgccacccccttggggggcggcaggacatattttgttgcccacatgataaattttttcctgccataaaatgataattttggatatattaaactggttttttttgttgtccgtaacagttcaattcattaaagtttttgccta

SEQ ID NO: 564328 - DNA, 530 bp, Homo sapiens
tctcatggagactgtaacatgagatagcagtcttcccgtgctccacaattagtgatttgctttggtgcttaatttgaagtggtgaataagctaccttaaaccaattcctgctgcatgtactatctcatcctgattctcaagagtgtcaggaactgggtttcctcacagatactaccctatgattatttggtgagtaatactttatacaattgactctcccccaccaatcatacttgttccagtacaatggttacttggtttctccaacatatatactcgttttactcatcattggcctgtttgtttatttagaaactaatctggattcactccctctggttgatacccactcaaaaaggacacttctgattaagacggttgaaactagagatggacaggttggtatcttttaaggaaaaaatagggtaatctcagacaggagttgatatattttaaaatcagtgaatctgaatctcagatacagctggctaatttgagaggttcaggtttcattcatgcctactaaaaaa

SEQ ID NO: 564329 - DNA, 118 bp, Homo sapiens
gcgacggtcccggggaggataaatagagacccagtaaaatattcataagcagggcttgaattattgggttacgggtggtcttctattagactatggtgagctcaggtgatggatactc

SEQ ID NO: 564330 - DNA, 1895 bp, Homo sapiens
  misc_feature (1)..(2): n is a, c, g, or t
  misc_feature (9)..(9): n is a, c, g, or t
nnacgcgtngctctcgctccgaggtccccgcgccagagacgcagccgcgctcccaccacccacacccaccgcgccctcgttcgcctcttctccgggagccagtccgcgccaccgccgccgcccaggccatcgccaccctccgcagccatgtccaccaggtccgtgtcctcgtcctcctaccgcaggatgttcggcggcccggggcaccgcgagccggccgagctccagccggagctacgtgactacgtccacccgcacctacagcctgggcagcgcgctgcgccccagcaccagccgcagcctctacgcctcgtccccgggcggcgtgtatgccacgcgctcctctgccgtgcgcctgcggagcagcgtgcccggggtgcggctcctgcagggactcggtggacttctcgctggccgacgccatcaacaccgagttcaagaacacccgcaccaacgagaaggtggagctgcaggagctgaatgaccgcttcgccaactacatcgacaaggtgcgcttcctggagcagcagaataagatcctgctggccgagctcgagcagctcaagggccaaggcaagtcgcgcctgggggacctctacgaggaggagatgcgggagctgcgccggcaggtggaccagctaaccaacgacaaagcccgcgtcgaggtggagcgcgacaacctggccgaggacatcatgcgcctccgggagaaattgcaggaggagatgcttcagagagaggaagccgaaaacaccctgcaatctttcagacaggatgttgacaatgcgtctctggcacgtcttgaccttgaacgccaaagtggaatctttgccaagaagagattgcctttttgaagaaactccacgaagaggaaatccaggagctgcaggctcagattcaggaacagcatgtccaaatcgatgtggatgtttccaagcctgacctcacggctgccctgcgtgacgtacgtcagcaatatgaaagtgtggctgccaagaacctgcaggaggcagaagaatggtacaaatccaagtttgctgacctctctgaggctgccaaccggaacaatgacgccctgcgccaggcaaagcaggagtccactgagtaccggagacaggtgcagtccctcacctgtgaagtggatgcccttaaaggaaccaatgagtccctggaacgccagatgcgtgaaatggaagagaactttgccgttgaagctgctaactaccaagacactattggccgcctgcaggatgagattcagaatatgaaggaggaaatggctcgtcaccttcgtgaataccaagacctgctcaatgttaagatggcccttgacattgagattgccacctacaggaagctgctggaaggcgaggagagcaggatttctctgcctcttccaaacttttcctccctgaacctgagggaaactaatctggattcactccctctggttgatacccactcaaaaaggacacttctgattaagacggttgaaactagagatggacaggttatcaacgaaacttctcagcatcacgatgaccttgaataaaaattgcacacactcagtgcagcaatatattaccagcaagaataaaaaagaaatccatatcttaaagaaacagctttcaagtgcctttctgcagtttttcaggagcgcaagatagatttggaataggaataagctctagttcttaacaaccgacactcctacaagatttagaaaaaagtttacaacataatctagtttacagaaaaatcttgtgctagaatactttttaaaaggtattttgaataccattaaaactgcttttttttttccagcaagtatccaaccaacttggttttgcttcaataaatttttggaaaacctcaatcgccccgaacgaaacacg

SEQ ID NO: 564331 - DNA, 757 bp, Homo sapiens
gctcggaccccggacctgatgtgtctcagtcctgaccggaagatggaagtggaggagctcagcgccccatgagccactaggtcgcttctctctgacccctgccacgagggggatactgagggaagatgatggatttgtgtgacagtcactaagagaacgttgacttcaacagtgagtgatcggatggcaaggtatccacaccacgggcatgaggagaaagtctcaatgtagataggcccccatctggatacaaagagcatctgagaataaagagcaagacggaaaagaggacactcattacaatgtaacagccaaggtggccaggcgggatctgtccagcatgctcgcgatcgccatgcacctgactagcagtggatcaccggacacacaatcgcttcaaagaaaggagctggaagctgggacaccaggggacaggggaacaacagccacgggaggcaggaataacgcgagaaggacgagaagcaggtcgaacgcgccctcacgtgagggacgacacgaaaagggaagagacttgaagcgagaacacctaaaaggcgcaccgccgaatacgtccccggcatacaacacagtcaagcatggagatccaccagcaactggacggcacccggacggaaacaccatacccatggacacagatagaacacaaaccagtagaaaggctagcacacagagaggaactcactccataaaggacccattaccatccctatacaagaaacagaaaagaccgggaaac

SEQ ID NO: 564332 - DNA, 1895 bp, Homo sapiens
  misc_feature (1)..(2): n is a, c, g, or t
  misc_feature (9)..(9): n is a, c, g, or t
  misc_feature (1386)..(1386): n is a, c, g, or t
  misc_feature (1394)..(1394): n is a, c, g, or t
  misc_feature (1397)..(1399): n is a, c, g, or t
  misc_feature (1410)..(1413): n is a, c, g, or t
  misc_feature (1415)..(1415): n is a, c, g, or t
  misc_feature (1430)..(1430): n is a, c, g, or t
  misc_feature (1441)..(1441): n is a, c, g, or t
  misc_feature (1445)..(1445): n is a, c, g, or t
  misc_feature (1457)..(1457): n is a, c, g, or t
  misc_feature (1461)..(1461): n is a, c, g, or t
  misc_feature (1465)..(1465): n is a, c, g, or t
nnacgcgtngctctcgctccgaggtccccgcgccagagacgcagccgcgctcccaccacccacacccaccgcgccctcgttcgcctcttctccgggagccagtccgcgccaccgccgccgcccaggccatcgccaccctccgcagccatgtccaccaggtccgtgtcctcgtcctcctaccgcaggatgttcggcggcccggggcaccgcgagccggccgagctccagccggagctacgtgactacgtccacccgcacctacagcctgggcagcgcgctgcgccccagcaccagccgcagcctctacgcctcgtccccgggcggcgtgtatgccacgcgctcctctgccgtgcgcctgcggagcagcgtgcccggggtgcggctcctgcagggactcggtggacttctcgctggccgacgccatcaacaccgagttcaagaacacccgcaccaacgagaaggtggagctgcaggagctgaatgaccgcttcgccaactacatcgacaaggtgcgcttcctggagcagcagaataagatcctgctggccgagctcgagcagctcaagggccaaggcaagtcgcgcctgggggacctctacgaggaggagatgcgggagctgcgccggcaggtggaccagctaaccaacgacaaagcccgcgtcgaggtggagcgcgacaacctggccgaggacatcatgcgcctccgggagaaattgcaggaggagatgcttcagagagaggaagccgaaaacaccctgcaatctttcagacaggatgttgacaatgcgtctctggcacgtcttgaccttgaacgccaaagtggaatctttgccaagaagagattgcctttttgaagaaactccacgaagaggaaatccaggagctgcaggctcagattcaggaacagcatgtccaaatcgatgtggatgtttccaagcctgacctcacggctgccctgcgtgacgtacgtcagcaatatgaaagtgtggctgccaagaacctgcaggaggcagaagaatggtacaaatccaagtttgctgacctctctgaggctgccaaccggaacaatgacgccctgcgccaggcaaagcaggagtccactgagtaccggagacaggtgcagtccctcacctgtgaagtggatgcccttaaaggaaccaatgagtccctggaacgccagatgcgtgaaatggaagagaactttgccgttgaagctgctaactaccaagacactattggccgcctgcaggatgagattcagaatatgaaggaggaaatggctcgtcaccttcgtgaataccaagacctgctcaatgttaagatggcccttgacattgagattgccacctacaggaagctgctggaaggcgaggagagcaggagggncccgcggnggnnngggggggccgnnnngnggggggggggggggnggggggagggngggngggggggggggngcgngggnaaaaggacacttctgattaagacggttgaaactagagatggacaggttatcaacgaaacttctcagcatcacgatgaccttgaataaaaattgcacacactcagtgcagcaatatattaccagcaagaataaaaaagaaatccatatcttaaagaaacagctttcaagtgcctttctgcagtttttcaggagcgcaagatagatttggaataggaataagctctagttcttaacaaccgacactcctacaagatttagaaaaaagtttacaacataatctagtttacagaaaaatcttgtgctagaatactttttaaaaggtattttgaataccattaaaactgcttttttttttccagcaagtatccaaccaacttggttttgcttcaataaatttttggaaaacctcaatcgccccgaacgaaacacg

SEQ ID NO: 564333 - DNA, 1894 bp, Homo sapiens
  misc_feature (1)..(2): n is a, c, g, or t
  misc_feature (9)..(9): n is a, c, g, or t
  misc_feature (113)..(113): n is a, c, g, or t
  misc_feature (121)..(121): n is a, c, g, or t
  misc_feature (123)..(123): n is a, c, g, or t
  misc_feature (128)..(128): n is a, c, g, or t
  misc_feature (132)..(132): n is a, c, g, or t
  misc_feature (137)..(139): n is a, c, g, or t
  misc_feature (144)..(144): n is a, c, g, or t
  misc_feature (149)..(149): n is a, c, g, or t
  misc_feature (151)..(151): n is a, c, g, or t
  misc_feature (155)..(156): n is a, c, g, or t
  misc_feature (166)..(166): n is a, c, g, or t
  misc_feature (168)..(168): n is a, c, g, or t
  misc_feature (171)..(171): n is a, c, g, or t
  misc_feature (176)..(176): n is a, c, g, or t
  misc_feature (178)..(178): n is a, c, g, or t
  misc_feature (180)..(180): n is a, c, g, or t
  misc_feature (182)..(183): n is a, c, g, or t
  misc_feature (186)..(186): n is a, c, g, or t
  misc_feature (189)..(189): n is a, c, g, or t
  misc_feature (273)..(273): n is a, c, g, or t
  misc_feature (312)..(312): n is a, c, g, or t
  misc_feature (332)..(332): n is a, c, g, or t
  misc_feature (336)..(336): n is a, c, g, or t
  misc_feature (358)..(358): n is a, c, g, or t
  misc_feature (368)..(368): n is a, c, g, or t
  misc_feature (394)..(394): n is a, c, g, or t
  misc_feature (401)..(401): n is a, c, g, or t
  misc_feature (421)..(421): n is a, c, g, or t
  misc_feature (438)..(438): n is a, c, g, or t
  misc_feature (442)..(442): n is a, c, g, or t
  misc_feature (444)..(444): n is a, c, g, or t
nnacgcgtngctctcgctccgaggtccccgcgccagagacgcagccgcgctcccaccacccacacccaccgcgccctcgttcgcctcttctccgggagccagtccgcgggagngggggggngnagggngatngggannntcggnagcgnangtgnnggaggggggngnggnggtgntngnannggngangttgggggggggggggaggcggggggggggggagggggagggggggggaggggagggggggggggggggggggggggggggggnggggggggggcgggagggggagggggagcgtgtaggggngggggggggggggggggtangggnggggggggtgtggggtgggggngggggggggngggcggggggggggggggggaggagnggggggngttgggggtggggggggggntgaggggggaggtgggnagangngggggggagggagaaggtggagctgcaggagctgaatgaccgcttcgccaactacatcgacaaggtgcgcttcctggagcagcagaataagatcctgctggccgagctcgagcagctcaagggccaaggcaagtcgcgcctgggggacctctacgaggaggagatgcgggagctgcgccggcaggtggaccagctaaccaacgacaaagcccgcgtcgaggtggagcgcgacaacctggccgaggacatcatgcgcctccgggagaaattgcaggaggagatgcttcagagagaggaagccgaaaacaccctgcaatctttcagacaggatgttgacaatgcgtctctggcacgtcttgaccttgaacgccaaagtggaatctttgccaagaagagattgcctttttgaagaaactccacgaagaggaaatccaggagctgcaggctcagattcaggaacagcatgtccaaatcgatgtggatgtttccaagcctgacctcacggctgccctgcgtgacgtacgtcagcaatatgaaagtgtggctgccaagaacctgcaggaggcagaagaatggtacaaatccaagtttgctgacctctctgaggctgccaaccggaacaatgacgccctgcgccaggcaaagcaggagtccactgagtaccggagacaggtgcagtccctcacctgtgaagtggatgcccttaaaggaaccaatgagtccctggaacgccagatgcgtgaaatggaagagaactttgccgttgaagctgctaactaccaagacactattggccgcctgcaggatgagattcagaatatgaaggaggaaatggctcgtcaccttcgtgaataccaagacctgctcaatgttaagatggcccttgacattgagattgccacctacaggaagctgctggaaggcgaggagagcaggatttctctgcctcttccaaacttttcctccctgaacctgagggaaactaatctggattcactccctctggttgatacccactcaaaaaggacacttctgattaagacggttgaaactagagatggacaggttatcaacgaaacttctcagcatcacgatgaccttgaataaaaattgcacacactcagtgcagcaatatattaccagcaagaataaaaaagaaatccatatcttaaagaaacagctttcaagtgcctttctgcagtttttcaggagcgcaagatagatttggaataggaataagctctagttcttaacaaccgacactcctacaagatttagaaaaaagtttacaacataatctagtttacagaaaaatcttgtgctagaatactttttaaaaggtattttgaataccattaaaactgcttttttttttccagcaagtatccaaccaacttggttttgcttcaataaatttttggaaaacctcaatcgccccgaacgaaacacg

SEQ ID NO: 564334 - DNA, 133 bp, Homo sapiens
caggcaaccgagagtgtaagttgaaatgtatggacataagtgactaccatgtagtaccaggactagagcaaggcaggctctccaccagacttaaagcattcaaccactctgcccccagagccgacactgacaa

SEQ ID NO: 564335 - DNA, 1924 bp, Homo sapiens
  misc_feature (1)..(2): n is a, c, g, or t
  misc_feature (9)..(9): n is a, c, g, or t
nnacgcgtngctctcgctccgaggtccccgcgccagagacgcagccgcgctcccaccacccacacccaccgcgccctcgttcgcctcttctccgggagccagtccgcgccaccgccgccgcccaggccatcgccaccctccgcagccatgtccaccaggtccgtgtcctcgtcctcctaccgcaggatgttcggcggcccggggcaccgcgagccggccgagctccagccggagctacgtgactacgtccacccgcacctacagcctgggcagcgcgctgcgccccagcaccagccgcagcctctacgcctcgtccccgggcggcgtgtatgccacgcgctcctctgccgtgcgcctgcggagcagcgtgcccggggtgcggctcctgcagggactcggtggacttctcgctggccgacgccatcaacaccgagttcaagaacacccgcaccaacgagaaggtggagctgcaggagctgaatgaccgcttcgccaactacatcgacaaggtgcgcttcctggagcagcagaataagatcctgctggccgagctcgagcagctcaagggccaaggcaagtcgcgcctgggggacctctacgaggaggagatgcgggagctgcgccggcaggtggaccagctaaccaacgacaaagcccgcgtcgaggtggagcgcgacaacctggccgaggacatcatgcgcctccgggagaaattgcaggaggagatgcttcagagagaggaagccgaaaacaccctgcaatctttcagacaggatgttgacaatgcgtctctggcacgtcttgaccttgaacgccaaagtggaatctttgccaagaagagattgcctttttgaagaaactccacgaagaggaaatccaggagctgcaggctcagattcaggaacagcatgtccaaatcgatgtggatgtttccaagcctgacctcacggctgccctgcgtgacgtacgtcagcaatatgaaagtgtggctgccaagaacctgcaggaggcagaagaatggtacaaatccaagtttgctgacctctctgaggctgccaaccggaacaatgacgccctgcgccaggcaaagcaggagtccactgagtaccggagacaggtgcagtccctcacctgtgaagtggatgcccttaaaggaaccaatgagtccctggaacgccagatgcgtgaaatggaagagaactttgccgttgaagctgctaactaccaagacactattggccgcctgcaggatgagattcagaatatgaaggaggaaatggctcgtcaccttcgtgaataccaagacctgctcaatgttaagatggcccttgacattgagattgccacctacaggaagctgctggaaggcgaggagagcaggatttctctgcctcttccaaacttttcctccctgaacctgagggaaactaatctggattcactccctctggttgatacccactcaaaaaggacacttctgattaagacggttgaaactagagatggacaggttatcaacgaaacttctcagcatcacgatgaccttgaataaaaattgcacacactcagtgcagcaatatattaccagcaagaataaaaaagaaatccccttttaaaatttttttccttcttaaaagatatcttaaagaaacagctttcaagtgcctttctgcagtttttcaggagcgcaagatagatttggaataggaataagctctagttcttaacaaccgacactcctacaagatttagaaaaaagtttacaacataatctagtttacagaaaaatcttgtgctagaatactttttaaaaggtattttgaataccattaaaactgcttttttttttccagcaagtatccaaccaacttggttttgcttcaataaatttttggaaaacctcaatcgccccgaacgaaacacg

SEQ ID NO: 564336 - DNA, 737 bp, Homo sapiens
  misc_feature (531)..(531): n is a, c, g, or t
  misc_feature (543)..(543): n is a, c, g, or t
  misc_feature (567)..(567): n is a, c, g, or t
  misc_feature (572)..(572): n is a, c, g, or t
  misc_feature (600)..(600): n is a, c, g, or t
  misc_feature (650)..(650): n is a, c, g, or t
agcggggctgctgcggatgtcggtgtgagcgaagcggcgcctgtaacacacggcggctgccgagcgcctgacccgggcctgctgccagagtcctgcacctgagctccggggccccacacccgtctacggtggccctgtcgcccgttgctactgaggcggcgtgctctgcattcttcgctgtccaggcctgccggctctggtgtcttgctggctcctccttgctctgcctgctccctcctgcttgcctgatgtcaccgccgccgtccgccgccacagccatggccgagtagtggtgaaagcggcggtcctccgggtctcccaatgtgatagtcgccgccggagccgtaaggtgctggcgtcccctcgtcgtgccgctgcctccgtcggagccccaaatatcagtgatacagtcaccgtgaagaaccccgagaggaccaacggacggaattcgccgtgccagagaatagctccgtccagcagtttaacggaacgaaatctctaacagcgttttaaatcacatactgacaactngtgttgatattngctggaaaattttgaagatcaganacctngagtcagcatggaattcatgatggactnactgttcaccttgtcattaaaacacaaaacaggcctcaggatcattcagntcagcaaacaaatacagctggaggaaatgttactacatcatcaacctcctaatagtacctctacatctggttctgctactgcaacca

SEQ ID NO: 564337 - DNA, 1873 bp, Homo sapiens
  misc_feature (1)..(2): n is a, c, g, or t
  misc_feature (9)..(9): n is a, c, g, or t
nnacgcgtngctctcgctccgaggtccccgcgccagagacgcagccgcgctcccaccacccacacccaccgcgccctcgttcgcctcttctccgggagccagtccgcgccaccgccgccgcccaggccatcgccaccctccgcagccatgtccaccaggtccgtgtcctcgtcctcctaccgcaggatgttcggcggcccggggcaccgcgagccggccgagctccagccggagctacgtgactacgtccacccgcacctacagcctgggcagcgcgctgcgccccagcaccagccgcagcctctacgcctcgtccccgggcggcgtgtatgccacgcgctcctctgccgtgcgcctgcggagcagcgtgcccggggtgcggctcctgcagggactcggtggacttctcgctggccgacgccatcaacaccgagttcaagaacacccgcaccaacgagaaggtggagctgcaggagctgaatgaccgcttcgccaactacatcgacaaggtgcgcttcctggagcagcagaataagatcctgctggccgagctcgagcagctcaagggccaaggcaagtcgcgcctgggggacctctacgaggaggagatgcgggagctgcgccggcaggtggaccagctaaccaacgacaaagcccgcgtcgaggtggagcgcgacaacctggccgaggacatcatgcgcctccgggagaaattgcaggaggagatgcttcagagagaggaagccgaaaacaccctgcaatctttcagacaggatgttgacaatgcgtctctggcacgtcttgaccttgaacgccaaagtggaatctttgccaagaagagattgcctttttgaagaaactccacgaagaggaaatccaggagctgcaggctcagattcaggaacagcatgtccaaatcgatgtggatgtttccaagcctgacctcacggctgccctgcgtgacgtacgtcagcaatatgaaagtgtggctgccaagaacctgcaggaggcagaagaatggtacaaatccaagtttgctgacctctctgaggctgccaaccggaacaatgacgccctgcgccaggcaaagcaggagtccactgagtaccggagacaggtgcagtccctcacctgtgaagtggatgcccttaaaggaaccaatgagtccctggaacgccagatgcgtgaaatggaagagaactttgccgttgaagctgctaactaccaagacactattggccgcctgcaggatgagattcagaatatgaaggaggaaatggctcgtcaccttcgtgaataccaagacctgctcaatgttaagatggcccttgacattgagattgccacctacaggaagctgctggaaggcgaggagagcaggatttctctgcctcttccaaacttttcctccctgaacctgagggaaactaatctggattcactccctctggttgatacccactcaaaaaggacacttctgattaagacggttgaaactagagatggacaggttatcaacgaaacttctcagcatcacgatgaccttgaataaaaattgcacacactcagtgcagcaatatattaccagcaagaataaaaaagaaatccatatcttaaagaaacagctttcaagtgcctttctgcagtttttcaggagcgcaagatagatttggaataggagtgtcggttgttaagaactagagcttattcctattccaaatctagtttacagaaaaatcttgtgctagaatactttttaaaaggtattttgaataccattaaaactgcttttttttttccagcaagtatccaaccaacttggttttgcttcaataaatttttggaaaacctcaatcgccccgaacgaaacacg

SEQ ID NO: 564338 - DNA, 1050 bp, Homo sapiens
  misc_feature (1)..(2): n is a, c, g, or t
  misc_feature (9)..(9): n is a, c, g, or t
nnacgcgtngctctcgctccgaggtccccgcgccagagacgcagccgcgctcccaccacccacacccaccgcgccctcgttcgcctcttctccgggagccagtccgcgccaccgccgccgcccaggccatcgccaccctccgcagccatgtccaccaggtccgtgtcctcgtcctcctaccgcaggatgttcggcggcccggggcaccgcgagccggccgagctccagccggagctacgtgactacgtccacccgcacctacagcctgggcagcgcgctgcgccccagcaccagccgcagcctctacgcctcgtccccgggcggcgtgtatgccacgcgctcctctgccgtgcgcctgcggagcagcgtgcccggggtgcggctcctgcagggactcggtggacttctcgctggccgacgccatcaacaccgagttcaagaacacccgcaccaacgagaaggtggagctgcaggagctgaatgaccgcttcgccaactacatcgacaaggtgcgcttcctggagcagcagaataagatcctgctggccgagctcgagcagctcaagggccaaggcaagtcgcgcctgggggacctctacgaggaggagatgcgggagctgcgccggcaggtggaccagctaaccaacgacaaagcccgcgtcgaggtggagcgcgacaacctggccgaggacatcatgcgcctccgggagaaattgcaggaggagatgcttcagagagaggaagccgaaaacaccctgcaatctttcagacaggatgttgacaatgcgtctctggcacgtcttgaccttgaacgccaaagtggaatctttgccaagaagagattgcctttttgaagaaactccacgaagaggaaatccaggagctgcaggctcagattcaggaacagcatgtccaaatcgatgtggatgtttccaagcctgacctcacggctgccctgcgtgacgtacgtcagcaatatgaaagttttgcttcaaggaccttcaagaggtcacttagatcccgagacagggtcagtccttaccttttaag

SEQ ID NO: 564339 - DNA, 1215 bp, Homo sapiens
gctcagcattcggggacgctctcagccttctcgtgcgctacggtcccagtcattccttctaaaatgtctactgttcactgatatcctgtgcaagctcagccttgcgagcgtgtgatctacatcgttacaccccccatagtggcatatgggtcgtgtcaaagcctatatctataggcttgtgatgctgagcagggagtgctttgtaacattgaaatcgatgtcatcataaggaactcacaaaggtgttgggatgaagggtcacgcaatttgtacaagcgattttgttgactccaactcgggcgagtcgaaatgcaacaggagcatcgacggagtactttgtccgttacgtccatatccaagaaggacaggacccaaatatatagggacaccttggcgttctggcaactagaaagttccatgcccttactctggttcccactcatggaggaccggtggacttttagggcctacttgatagacactctgtgcagacactgacgtcttcctgagtcttaactgcttccatgacggggcctgggaaactccgcttgagggaactctctgccttttgagatcaattcctgtctccccagaaatcaaatccctggagttctggcgcgtgtaatcttatacagaagttcctgaccaaggactcctgtgacccaggactggattcctgtggaagcattgcgaccactttattttcctgggaagagcctttctgagtttgagctttcccggccaaggcgtgcattggggtttgaccccttgggggatccgggcttagcaaaatacgcccagtaggcactgggctgttctgctcccattggagtctcatgagacctggagttgggagacaaagtacatgctcgcgggagtcttccttattgaacgtcggcgagggtggctcaccccaaggaaactggcgtgcgcttgtcctggttcccccggggtgggaattccagcattcatggaccggaatcgagataggatggcccaagctccagaaaaaggtatgcggataacgggtctccagaatggtaccagggccctttattgaccatggttgggaaaggcatttagggaacaagaaggtttacagggacgacccgggaaaaattcctttaccttggaaccctggttaccggaggcctttttataaaaccaaggcccctgagatatattgcgaggaaacgcggtgtgttagtgatttcc

SEQ ID NO: 564340 - DNA, 952 bp, Homo sapiens
  misc_feature (1)..(2): n is a, c, g, or t
  misc_feature (9)..(9): n is a, c, g, or t
nnacgcgtngctctcgctccgaggtccccgcgccagagacgcagccgcgctcccaccacccacacccaccgcgccctcgttcgcctcttctccgggagccagtccgcgccaccgccgccgcccaggccatcgccaccctccgcagccatgtccaccaggtccgtgtcctcgtcctcctaccgcaggatgttcggcggcccggggcaccgcgagccggccgagctccagccggagctacgtgactacgtccacccgcacctacagcctgggcagcgcgctgcgccccagcaccagccgcagcctctacgcctcgtccccgggcggcgtgtatgccacgcgctcctctgccgtgcgcctgcggagcagcgtgcccggggtgcggctcctgcagggactcggtggacttctcgctggccgacgccatcaacaccgagttcaagaacacccgcaccaacgagaaggtggagctgcaggagctgaatgaccgcttcgccaactacatcgacaaggtgcgcttcctggagcagcagaataagatcctgctggccgagctcgagcagctcaagggccaaggcaagtcgcgcctgggggacctctacgaggaggagatgcgggagctgcgccggcaggtggaccagctaaccaacgacaaagcccgcgtcgaggtggagcgcgacaacctggccgaggacatcatgcgcctccgggagaaattgcaggaggagatgcttcagagagaggaagccgaaaacaccctgcaatctttcagacaggatgttgacaatgcgtctctggcacgtcttgaccttgaacgccaaagtggaatctttgcagaagagaatcctttttgagaacctccacgcagaggaatccaggacctccagctcagatcaggacacatgtccaatcgatgtgatgttccagcttactcaggctgcctcgtacgtcgtac

SEQ ID NO: 564341 - DNA, 229 bp, Homo sapiens
gcgttctcctttaagtcactcagtctctaatggttcaccactaaagtggcccaggaaatgaggcgtgcagcagcagtggtgtgggaaagcacagaggagacaaggctgggacgtgctttatgggcttgtggcttaacccaacaaacagctgtcagagaacacagctcaagggggggcgggcagggtgctgttcttacagaactgcagaatggaagagccacactgttcc

SEQ ID NO: 564342 - DNA, 1002 bp, Homo sapiens
  misc_feature (182)..(182): n is a, c, g, or t
  misc_feature (316)..(316): n is a, c, g, or t
  misc_feature (925)..(925): n is a, c, g, or t
tcaataccggtacctgtacatgcaccgtggcttacaccactattttcgacacctgacttttctcaactcgatcactcatctagggggctatcttacttggacggttatctttatatgagacaccacgatgccttctcaacgcacatactaattagcttacacatactaatcatagcgatctntcgaccatgactactgattttccaattgcgttgctgacgcagactatgtcgcttagacacatgaccgctactcaccctttactaatacacgaatactacttctaaatctcatttacgcatgagattcatttctngtcattctacacatctaatgcgtacacctcaacacatctcgtgaaacaacttactctccatcgacccctatccatgatacatcattctcattctcattctctctatcgtcccacttatatcgttaacactaacaaagatttcacactaatgctcaaacttatatcttgcaccaaatgcctaaacgcagccaaactgtctcttgtcatacgaccaattctccgatatcatacaccgtaatatacgctccacagcatatacgtatcttaaagttcccacttcgattacatctactccatcctccttcttaccactactctcgtctacgtatatcaccatgtacattctattacactccttagaacccaaccacgtatcgtagcctactctctcgcactccttcatagagcgtcttctcgtcatctcacttccaatgtacactcgacgcctctacacgatatgaatgtctcctaatcaatggacggtctcacttatagatacaccactcctactacatcaatatcatactgactgctcacctctacatgccacacgtactctctcgtcgatcatgattctctgagtatccactgtatacttctatctactcnttcaccgtctatactcgattactcctcctctatacgccttctcaactccgttactatacaacatgtcgtcataccaa

SEQ ID NO: 564343 - DNA, 470 bp, Homo sapiens
  misc_feature (10)..(10): n is a, c, g, or t
  misc_feature (346)..(346): n is a, c, g, or t
  misc_feature (370)..(370): n is a, c, g, or t
  misc_feature (452)..(452): n is a, c, g, or t
  misc_feature (457)..(457): n is a, c, g, or t
cgcttttganattacagatttgcacccgacatcttcaaatggcgatctggacgtcaccatcgacgagcgcgatggcaatcagcagaattacacaattccgtattcaacagtgccaattttacaacgcgaagggcgtttcaaatttgacctgacggcgggcgattttcgtagcggtaatagtcagcaatcatcgcctttcttttttcagggtacggcactcggcggtttaccacaggaatttactgcctacggcgggacgaattatctgcaattacaccgcctttttattagggctggggcgcaatctcgggaactggggcgcagtgtcgctggatgtaacgcatgngcgcagtcagttagccgacgccanctcatgagggggattctattcgtttcctctatgcgaaatcgatgaacaccttgggaccaattttcagttaatgggttaccgntattngcaaaaggtttta

SEQ ID NO: 564344 - DNA, 154 bp, Homo sapiens
cagtgctagggaagaacacagccctcagctttagagtcagcagacaagcgcacatcagaggggaggggtttttggagggacggagggtacccccatatctgcagggtgccgcaaaacaacatgaagactcttccgccgggcgcattctgtgagg

SEQ ID NO: 564345 - DNA, 785 bp, Homo sapiens
gggtctccaagatggccgcttggggaaggaggcgtctggcccgggcagcagtggcggcagcgcccgagagagggtgagcttgtcggccacagactgctacatgtgcatgagatctacaatggggagaatgcccaagatcgagttggagtacagagctggagcgaggccctggaagcccagtacaagtacattgtgatggagcccactcgcatggtgcgacgagacgagcccgcgtggatcaccgtgggcgaacgtgccttgtaggcaagaatggcgtgcttggtgggcaccgccgtggccctcttcaccccgttggctgctgcccttagattattgcccactacatttccctgtcccgctggtgtgctgagccgtggcctgctgcacgcctctgatgggatctcctggcagtttttgacccttgctgcaagtagccaagtggagtacgacgctataaactgtcgcgccgtgctcgtgacaacactcacctcctccacccggtggtgctggtccggaaggacgacctgcgaccagaaagagactgcgcaatcacgatagcactggccgtctggggtgcaacgggcgtaaaggaagatttacggcactctatgccgtatgattcagccacaacgaggacgcgcagcaacacacccggccaacaagagacagcagagtctccagatcggcacactcgggagggcagcagagccggcaggttcggctagcatgccagaaaaaaacagtccggtggccagggttcagtcttaccagatggttccacccgg

SEQ ID NO: 564346 - DNA, 843 bp, Homo sapiens
  misc_feature (841)..(842): n is a, c, g, or t
gggggtcctaagatggctgctgggcgaccacttcctgacagctccagttaatgggactgccagcaggtagacatccttcgccggaatgtgcagcgctaaagttctgtgcccgggaggggcttctctctcttggggatggagtgtggcattgccgccagaaagcctgcagaattccgggttggtgcagccaagcaggaacggtgtacctttctagacccatcctcttgcaatcttggaccctaagaaacgatgtgccagtgcgctagtaacctcctggcctaaatgaaaggtgacgctgagtcaaactcggaaagatgaagctacgttggagaactctggattaatttacaggaggatacgaggattgagagcatcagaaaaacagaattcatagatttctcaaacagatgaccaaaaaattgaaacagagtcacatgtaatgcctatgaagagtgtcctttctgaattcccatagatttgtggaatacaattcaagaattgcttaaaaaatttttgaaagaaaagcaaactcaagatcaggggaaacgagaaagctccagaaagataattgcccagatgaacacgatacttagtgaccgctcagatgaaccaggggagggctacagattggagtcagatgattgcccgctgtaaagggacagtggagccggcctgaagaggtgacacgtggcgcgtggattggagcgggatagacatataccagctggaatccacgtccccatgaaccaggggatccgcccaaaactggtggcaacgacctgttatatcgatgcaccgagcgcgcagcacactttctctcttcttgtgtatgcgtcctcanng

SEQ ID NO: 564347 - DNA, 186 bp, Homo sapiens
ccggcagctatcggtcatatatgggtctagagtatattccatcagaaaaataatttccaaaacttaaggcctttaaaaaaataccagtacactgatgttgaaccattttaagtatatatatatcccacagcaaggctttaattatatggcatcttactttgggattgatttcatcctccaattctg

SEQ ID NO: 564348 - DNA, 129 bp, Homo sapiens
ctggcagttgttacggaaccttgggcgtaccacaaacccgccgcgcttatgggccctaagggggcgtgctgatgcgggttttttccttcgcactttgcgggtttaaaccccctaaacgtctcgttagct

SEQ ID NO: 564349 - DNA, 273 bp, Homo sapiens
aaaggggtcttttgtttgttcgtttctcttaaacaaggatcaaagagccccgcaaggggttccaaatagtgtttcaaaccggtccgcaagtccgcggattacatgtcctaagtgggtctctagtagttcgggccgctggccgcttggcgcccaggcgggtgggctccaccccagttctaagttgcgcccaccgcaggtcttttccgcagtctgggggggccaacccagcagcggttccccacggctggtcgttaaatatctgtacaacatgac

SEQ ID NO: 564350 - DNA, 691 bp, Homo sapiens
ggctgagaatgagaggaattgagaagcgagacggggacatgtgctttctgtgaatccgattcgttgtggctctttactcgttgttgagctacgtgctggagcctggtagacacgatagaccaggtaggtctgggctgagccatgatatccagtgagtcgtcgacattggatgaagcaaggtgatcgcctagagatcgatgattactggtagaccgtgtatttcagggcatcaatcgtcggaacctgagcggactcaatgatcttgctgcaaaattactgctggtatcagatgctgctgaatcgattctgtacgcattgacgacatggcccgggtccttgcatagcgtgactgtacgttatcatgcaggtccaagggtcatcgagcacagggagcgttggtcgcaatggcgcgcgaagctctgtgagcgcaacggacgatccgatatggcgttccggccagaagagtgctatgggatcgacgtctcgagattatcaactacgtaagtggccagtcgtggacgcacaggatgcatcgagtgtgccttcctctataggtgcagggaagcttggcgtcgttgcaagttgcaaagggaacatgacacggcgaccgggaaaagcatgggagaccgctacacagacgtgtcccgttaacaaagggaccgcaaggaaattatggcgcaacggtttgtac

SEQ ID NO: 564351 - DNA, 1756 bp, Homo sapiens
  misc_feature (1756)..(1756): n is a, c, g, or t
tccaatattgacaaaattcttgaaccacctgaaggccaagatgaaggtgtgtgtgatgtatgaacatttaaggcagttctgccttgcagctaacatggcacttgctcgtccaaacttccagagctgacatgccatccagcatacttgcactccaacatgaccagctaactgacaccaatggcattttatctttgctgcagcgtcataaaaactcccaacacagcagtcgtccatagctacatagcactccatcactcagcaccaccaccaccttgcactggctgcttgccatggtctttccttgcacatcagaccaatcacacatcatatttacccaagaccagcggcttcagctatcacaagcgcacatcgcatccttgatcagctgcacacacatcagtgcaatcgagatcatcgcccagttcagccgcatctctccaccagcacactcatctctctccaacaatggcgtctcaattatctcacatcccactcacggccaagcaatacatctctcgcattcgcaatccatcgcacacacaattgcacacccacatatctctttgcttgtcccatccaggctcttcacgtccacacgctcctacgtatgcaattgcacacatctacgacaatctcttggcactacgctccccacaacggccatacacaaccttagaatacagtacaccccacatctctatcacgcacactggcagtgcacacgtcaccacgaaatttccacaggtcaaccattgcggggcacacagctgccacagccgattgcacacgggcacacctccattacgggcacacccaacacgtggctacctcgcaattccaataatacaatatacaacccattctcatgctacctggtccagtcacttcactcccatttccaaggaaccacacactaccacgagtacactggtcaatacccaatcacttcaatcagccctccttccgcatcctaggctcatagcgcggcttctcactcggccaccatggcgactgggacgcctcatcggccccatcaatcacccaaccaactggcccgcaaaccatcacaccatcctcacaacgctcactttccacatagacagcctcggatagtaatttacacaccaccatagtcttgatcgaccaacgtcccacttgtgtcatacatccaaaactctcacacgacctcttaacccactcacctcctctagcctcagcattcacacactagccaattcggtagaaatcacacacatccacaagcatggccacaaggcgcacaggcgcgacacacacccacagggacacgagcacaacaccaacgcgcacacagcgcgcacgccacacgacgccagacgtaacagccacagacagccgacgcctggaggacaacaagcagacgaagaagagaacaaaaacagaagcggaataccagcagagagccagtcctaagatctacaggatccccacgtcatacaggacacgagaacccagcaagctcgcaacgcagccgcggtgcacccacggggctgagcgacgagcagcagccaatcacaccacgcagcagcctgacgagagccgacctcactcgaaacgacgatacgcagggaggcagtcaagcgcgcctcacgccccacacaacggaaaaccaaactaaaacagacaccacacgacaagcgacgtcgcgaacaaaccagagccgagacgcaggcactgcgccaccgtcgcgaacagaccggagcgaacaatcagatgn

SEQ ID NO: 564352 - DNA, 647 bp, Homo sapiens
aaaagaccccatggtgtgaggtttaaaaaacatgacattttataattatgttttttatcattataaagtgaagggagaatgttcaaggggttaataatggaaatcatgctcacagcttatttttttaaagatagtttaaaattaaatttatgaagaaagagagagattgaattacttagtatttagttaatatgaacttttatcacaaaatgccatagactacgtagcttaataccagaaacaaaattcttacagttctggaggatatgtgattaacgaaaacatgcaagacaagaatactataaatagcccaatatgattttaaataaatgttcaattcattaaaaaaataaaggtccacacaccatgccaattcttgcttaaggacaaggttatgaaccttggcaagtcacctccatggaaatattaatgtatatcatgcacaaggagtggaggatcatcactgggggtgattttttttccccaggggacattggaaatgtctggatgcattttttgttggcatgacttgggaggaggatgttaccagcattttatgggtggtcagccagaaatgctgctaaacatttgccaatgcataggacagccccttcaacaaagaaatatctcccctcaaagcaataggg

SEQ ID NO: 564353 - DNA, 184 bp, Homo sapiens
tcagctcggtaccgactgagatgtctgagcagaataagacacacttaagtatttttggtgatgggtgtctagattcttttttttttttattctttggcgcatggggattctacagttatcccagcaccattcgtggaaagattcatcttttctacttggaggtgtgttggtcccctgtgtaaaa

SEQ ID NO: 564354 - DNA, 172 bp, Homo sapiens
aaagtttggggggaacaaggtaaaaaaaattttttttttttggcaacaaatctttttgcctgcctttcagcgtggttcagaaaattttaaaaatcccaatagtaatcaaaacgttcataacctttgaacggaaggaaatgctgtgggccccagaactcccagaattttttta

SEQ ID NO: 564355 - DNA, 806 bp, Homo sapiens
ttcatgggcgtcggcagcgcaaaacgcaccgactctgccataggcccgggaagcgcttgggcgaagaggaggaggccaagggtaccgagactggagtggagctcggagagccgagagagcggtggaggcggatttcctgggcccggcctctggcgctaccatgtgcgtttggcaatgagtcaccgtggatcccatacgacgacctccgtgggccacctcagtagaaaaggctacatttgctggagttcagactgacgattggggccagttcatgcacatctgtgacataattaacactacccaggatgggccaaaagatgcagtgaaagctttgaagaacaaggatttccaaacaactacaatcataaagcaactccaacttaccttgtcacttattgacatgtgtgtgcagaactgtggtccaagtttcccagtctctgattgtgaacgacggaatctgttagcagaggaacttagttaagctactgaatcccagatacaactttggccattagacattcagacatcgaatcttgaatttcattaagacttggtcaacaggggcttcccaggagggtgtggatgtacagccgaagtccgaaagaagtatacctcgacctcggttaaagaaaaggcgttcaggataccgtcccatcgagaagcaggaggcgttgacacaggcaaggcagaagaagactggctaccaaatctcgagtcaagttcttcaaccaatctggcccttagggaaccagagttctaatctcctgtaataggctcccaagaacccgaatggtacattgggaccc

SEQ ID NO: 564356 - DNA, 262 bp, Homo sapiens
agagacagagagagatagttgagggaagcatgataaacaaatcacagtaagacaaaggaagaacctggggtgtttctaaccagtgagaaatcttcatggtggaatttcagaccttaggatggcctaataggcagggtacatgttggttagggtgactagcatatcttgggcctcttgaatcatgcttcataggtgcctcttccactcacattcaaattcctaattgtgggacaaaagaaaaagtccgggccgggcacggagg

SEQ ID NO: 564357 - DNA, 83 bp, Homo sapiens
tcaagcttctaacgatgtacggggacatggtgcactgagctgtaacttcttccttccctattaaaattagaacctgagtatga

SEQ ID NO: 564358 - DNA, 103 bp, Homo sapiens
aattttgtggggtctgtcttcttttggtaaatattgcccacgtgatattaggttggatgaagcacttcctaaaagtaaaaaatgttaaatctgtgcgtacata

SEQ ID NO: 564359 - DNA, 1301 bp, Homo sapiens
  misc_feature (191)..(191): n is a, c, g, or t
  misc_feature (195)..(195): n is a, c, g, or t
agttcgacggagactctcatataacatgcattagttcgttatatgagagtctgttttctttaatgtactgtaacttctcccatactctaccaatcctcctgcctcagcatccagactggctgtgattgcaggtgtgcaccaccacacccagctacatttttttttggtagagacagggtctcactatgttncccngtctggtctcgaactcccggcctcaagcaatcctcccactggcctcacaatgttgggattacaggtataagccactgcacacggccttactatgctatcaattccatatatggaaaggtgttttccctttcagagctctttaaagctctgcagaagatttacatgtgtttatagagctaagagaaatcagggcatggaaattgagtgtgtaataaaaattaaactcttcatgttatataatcatgcataacttctatcttcattctctgaagttgcctagagcaccatcacagctaggaagcttccatcatgaattaccttatttccaaaagcaagtactcaaataatgtctcaagagaggaaggacaaaactgttacaaagctgaaatatttggggatttgtttgacttgactagggaaccacaagttttcatataatgcctgatttagccctgtgcctaacagtttaaatcttaatgctaatgttaattgcttcccagttggttgaccttataagaaaacactgtgtggtattttaatgtggtaaacatgtgaatgaaggctctgtggctcagttaatcactcccacaactttgagctgtgagttttactggtggaaggaactttaacagggtcttccgtctggttcatttagaatttcaaagaactgaaattagttggaatggtaagcagtgaatagatgtgttgttagaatgattccatcacttatacattgtttaaaatgctaataaagtaacttgctttgtaaaaaaaaaaaaaaaaaaaaaaaaaaaaaaaaaaaaaaaaaaaaaaaaaaaaaaaaaaaaaagggggggggggacaaaaaaatactcccgcgaggggcagccaaatgtaatgagacaccgaattctcttttgggaaaaggagcgcccccgaagggggaggtatacaacacaacaggcgcgaccccgggcatacacacgcgggcacggaacaaagtggtaacagatacgttggagaagacctccctgcgggggacaaacggacaccacagagactacgccaggaaaaaacacgcgtgtacgtgcacccgcaatcggcgaagaatgcacgatatgaaatcg

SEQ ID NO: 564360 - DNA, 1361 bp, Homo sapiens
  misc_feature (46)..(46): n is a, c, g, or t
  misc_feature (251)..(251): n is a, c, g, or t
  misc_feature (255)..(255): n is a, c, g, or t
cgtggtggctcacgactgtaatcccagaactttgggaggccaaggncaggtggatcacttgaggtcaggagttcgagactagcctggccaacatggtgaaaccccatctctactaaaaatacaacagccgggtgtgatggtgcacgctcgtgatcccggctgctcagcatccagactggctgtgattgcaggtgtgcaccaccacacccagctacatttttttttggtagagacagggtctcactatgttncccngtctggtctcgaactcccggcctcaagcaatcctcccactggcctcacaatgttgggattacaggtataagccactgcacacggccttactatgctatcaattccatatatggaaaggtgttttccctttcagagctctttaaagctctgcagaagatttacatgtgtttatagagctaagagaaatcagggcatggaaattgagtgtgtaataaaaattaaactcttcatgttatataatcatgcataacttctatcttcattctctgaagttgcctagagcaccatcacagctaggaagcttccatcatgaattaccttatttccaaaagcaagtactcaaataatgtctcaagagaggaaggacaaaactgttacaaagctgaaatatttggggatttgtttgacttgactagggaaccacaagttttcatataatgcctgatttagccctgtgcctaacagtttaaatcttaatgctaatgttaattgcttcccagttggttgaccttataagaaaacactgtgtggtattttaatgtggtaaacatgtgaatgaaggctctgtggctcagttaatcactcccacaactttgagctgtgagttttactggtggaaggaactttaacagggtcttccgtctggttcatttagaatttcaaagaactgaaattagttggaatggtaagcagtgaatagatgtgttgttagaatgattccatcacttatacattgtttaaaatgctaataaagtaacttgctttgtaaaaaaaaaaaaaaaaaaaaaaaaaaaaaaaaaaaaaaaaaaaaaaaaaaaaaaaaaaaaaagggggggggggacaaaaaaatactcccgcgaggggcagccaaatgtaatgagacaccgaattctcttttgggaaaaggagcgcccccgaagggggaggtatacaacacaacaggcgcgaccccgggcatacacacgcgggcacggaacaaagtggtaacagatacgttggagaagacctccctgcgggggacaaacggacaccacagagactacgccaggaaaaaacacgcgtgtacgtgcacccgcaatcggcgaagaatgcacgatatgaaatcg

SEQ ID NO: 564361 - DNA, 1113 bp, Homo sapiens
ttggttttcttcccgtccacaggacgagacgtttactactgtgcccactcgtgcggtttctctatgcatagtgtgtcccgtgtgcgcccttccctatatgaagtccaagctggttttccctcctcgattacctctcgatggattaacaccacccctgcctttggcaggtggatcaccaccttgttgttagtatcgttctcctcaaggagaagtgcgaaacccgttgtactgtcgttagcgccacttggggataaaccggcgccgcgtttgcgaggaggtccatggacagcccgcgctgtcggatagcagaatatgggatattggataggtgggatttctttactccattctattggttgaacataaaccgctggttggttacccttgggggtttcgaagggggctctctgctacatgtgaattaatctccccttcacgctccctttaaaggtggggctcgtgcctgcctgtcgtctcctctttcgactataaagcctgccctttcccaccatagcgctcacccgaaagaggtcaatagattcccccatgggctcaaagtcctcgcgcatatagagaccttccattgacaaagtcattccccacacaagttcgtgagacacagttggttcatatgtgtcaccatgatgttgccatgccaaaggtcgacgagcctagtcttgtggctgaccacgcagcacctgatgtagcataaatccaagcaccatgtggcgcattcggttagtattctcctgcttctgggcgtagagctatcgtccctctctgctcgaggtcaaagatggaagatcggcacgccctccacctcacacacagatgctcgagatggtacgcatagtagaatagatggtcctgggacgcggtaggctcatcgcctgtcaatgcccagcactttgaggagagcactgaggacgggcggatcatgaggtcaggagatcaagaccaccctggctaacacggtgaaaccccatcttcttacttataaaataaaaaaaaaaattagccgggtttggtggcgtatgccgtgtaatcccagctactcgggaggctgaggcaggagaattgcttaaacctggttgatggcaggggcagtgagca

SEQ ID NO: 564362 - DNA, 222 bp, Homo sapiens
gccattgatgtggaaggatctacttctcctcacatagcagataaggttgaatcacgtattagtgacaaacagaggcctggacagaaggatgcaacttgtgtgcgactttgaggtcgtaattctaactccaagaggctctagggtaatgtggcaactctgaaggataattttggatttattgaaacagccaatcatgataaggaaatctttttccattacagt

SEQ ID NO: 564363 - DNA, 168 bp, Homo sapiens
cgtgggcacctggaatgggccacattggtgggtggggggtaacagagaacagatggtgtcacggaagtttctctaggagtaaatacatgtggatattcttaggtttcccgtctcctctcgccagctgacagctgtgttacgtgctgttgacactaattataaacatgt

SEQ ID NO: 564364 - DNA, 392 bp, Homo sapiens
tgcggggtaatctgagaaggaggaggtggctggtaaatattatggggtaaatggtacctatctatgcaaatagaaagaaccccttcattttcataaacccttctcaacaggcccagataggaccatacttagacaatgtaagctgtagcatcattcaataacccagtgaagcattcttgcaccaatcggtttcaatagttctcactaaacagaaccacctcttacatctactagcaggtgtaactgacaataaaatcctctcttatctacagttagatgtatattacaaagaaatggtttcaacgccctttcagaacactcgggatatgtatatcgataattatttgatatttagtgtacatctgcctccaaatcctttaaatgatatcatc

SEQ ID NO: 564365 - DNA, 388 bp, Homo sapiens
  misc_feature (58)..(58): n is a, c, g, or t
  misc_feature (60)..(61): n is a, c, g, or t
  misc_feature (90)..(90): n is a, c, g, or t
  misc_feature (159)..(160): n is a, c, g, or t
  misc_feature (211)..(211): n is a, c, g, or t
actcagaagagagagctagtctcccaggtctgctgatagagggtaacaaaatcaccanannaacaatctctaaacagagacagctataanaactaactacagagattaccagatggtgaaaggtaaacataagaatcttactaacagaaaccaagaccnntcaccatatcagaacccagcactcccacttcgcccagtccaggacaccccnacacacctgaaaagctagacctggatttaaaagcatatctcatgatgatggtagaggacatcaagaaggactttaataactcacttaaagaaatacaggagaacactgctaaagagctacaagtccttaaagaaaaacaggaaaacaaaaaaaagtcgtatcgatgtcgagcgatcg

SEQ ID NO: 564366 - DNA, 382 bp, Homo sapiens
agacaggcagtgaacccctgtgtttttatgccatatgaactgagaagtagacgcattctgtgtaatggatacacactgaggctgcaatttttgaaaagtcattgttttgacttccctatattcacatcgaataacgcttttagtctttgccctcagtactctagaaggggctatatagcctgtttttgtatttgtgggaaaaagactagaagctgggcaaaatgccaccaggaagactaacatggcgacgtgatcccaagggaaactgaggtctcacactgtccagcaacagaaggaggttgaattctggaggaggtttaattttttaaaaactcaaactaataaaagatgttcacaaatattaaatattcttatttggaaa

SEQ ID NO: 564367 - DNA, 260 bp, Homo sapiens
ccacccctgctacctgcgactatgctacacggcaccccctgctggattgagatacatctgcacggccgcattagtggttggataaagtacttactcaaatgggttcactcataatcctatttcatctgtatcttaaatggccccaggccatctgcctcttggaaaactaattgagccttgcatgtacttgaacggatggatgagtcagacacggattgagaactgacaaaaggagccttgataagtacttgacctctgta

SEQ ID NO: 564368 - DNA, 404 bp, Homo sapiens
ggatcactgcatgagatggcccaaagtgttccccaaaagtacgccatcacaagcatttccaggaccccagaggagatagagaaggaacttagagctcccgtctctaagactttttatactcttgcacctgagttatcaatcaagccttttatttgtaagagtaatctgttggcctctgtttcagatgttagggttgggaggaacctctaccttcatgggtttccattccagtgaagtcccccccaccccccagccaccgctgtccaagatgaagtaagactacagacagcatttccttggcttgtcctgagccctctccactcgcccagatggagtctgcctttctgggccatcatcttgaagcccagggcatgagccaccattgtccctttaatgatgaattc

SEQ ID NO: 564369 - DNA, 191 bp, Homo sapiens
cccccccccccccttttttttcccgggggcccttttttccctttttcccccaggggggaaccaaccccggggcccccttcccccgggggtttttttccccggggggtttttttgtttttctttccccgggggttggggggccccattaattttcccccaggggccggggtttttttttggggtttttttta

SEQ ID NO: 564370 - DNA, 263 bp, Homo sapiens
ctttggaaggctgaggtgaggggaagcttgaggcaggagtttgagaccagcttggacaacatagtgagactcggtctctacagaaagaaaaataaaatcagccaggcatgctggcatgcatctgtagtccttgctacttgggaagcttgagctggtggaccacttgagcccaggagctggaggtgacagtgagctataattgcaccactgcactccagtctggggacagaggaagaccctgtatccgctctaccatacacaag

SEQ ID NO: 564371 - DNA, 272 bp, Homo sapiens
tcatacataggtaccgactgagacgtcctctgcccctacgtgtactccttattcgactggccgtcccttctgggttactcgtctggctcagtccgggtctgacttggttcctcatgttagtatctctgcgcgtctgcgctacttccccagcacagaccgagtgctgtcctgccggtcctgacgcactgtccctgtaggccacgctgagtcatggtaagtcatgtcctcccacatttggcactggatcgtgcgattcttctcattctggtgtc

SEQ ID NO: 564372 - DNA, 911 bp, Homo sapiens
  misc_feature (32)..(32): n is a, c, g, or t
  misc_feature (63)..(63): n is a, c, g, or t
  misc_feature (66)..(66): n is a, c, g, or t
  misc_feature (85)..(85): n is a, c, g, or t
  misc_feature (113)..(113): n is a, c, g, or t
gaggaaggcgagagagaaaggggtggaccccntgggaggagccacgcacatggaaagacgatnggnaaggagcaagagaagaganaggggaagagaacacggggaaggaggangagaagggtaagagggaaggaaaggaggggaagttggggagaaggagggaagaaggaaaggaggaaagaaggagagagagaagaggggaacgaaaaaagcgaaagaggaggggaggaaggaagcaaggggggaaaaagacgagggaggaacgaaggagagcagagaggcgagagaggaagagaaaggggagaagaaaggaggaagaggaaggaaggagaaagagcaggaggagggagagaagagagggagggaagagaagaagggggagaggaaaggggaggagaggggggaaggaaagaggaagaggggggaaaaggaaaagggaaagagaagggcgaggaaagagaaaaaggagagagaggaagagagaggagagaaaaaggaagagaggggcaagaggaaggggaggagcaaagagagaaggagaggaggaaaggaggggagagagggggaaagaaggaggagaggcaaggaggaaggagggaggggggaaagaggaagggagggagaaagaaaggagagggaagggaggaaagagaggaagaggagagaagaaggaggggaagagggggaagggagggaaaagggagaggaaagaggaggaggaagggaagagaaagaagaaagagagaagggagagagcgggggagaaagggaaaaagagggggagaaagagaggagaaagagagagagaaaagaaggggaaagggggggaaaaagagggaaaaaggggaggaggagaagagggagaaggaaagagggaagagaagagaaagagagggaaggaagaaggggag

SEQ ID NO: 564373 - DNA, 218 bp, Homo sapiens
  misc_feature (109)..(109): n is a, c, g, or t
agacagccaatgctatgaatgcgcggacacgtcttgacggaaattaaaagtgctactccatgtgaacacacacaatgataacaaatgcaagaacaggccatggcacagntggctcaccacctgcacctttggtcaggcttgacggcgtgcagagtcaccctgaggtcagagagttcgacgaccacggctggccaaccttggcgaacagcccatctcca

SEQ ID NO: 564374 - DNA, 318 bp, Homo sapiens
tgcagtgtccatctccacattgatctcaccaccccacctggctcgcagtggtgtccatctcctcctctgtggttcttcttcagtgtaggccagctcctccttgcagtgttctcactctgcatctccatggtcgtgtctggccagtgtcagctcatccagcaccctgtgcagtgcattgatgtctggctccacactcagtgctgcatgtggcctgctctgtctcaacattggtgctggaagtcatcagcagccagatgggcattgtcaatccttgtaacaggatgttggcattgtcccactggtggatgtgagtgcatc

SEQ ID NO: 564375 - DNA, 646 bp, Homo sapiens
  misc_feature (63)..(64): n is a, c, g, or t
  misc_feature (88)..(88): n is a, c, g, or t
  misc_feature (97)..(97): n is a, c, g, or t
  misc_feature (159)..(159): n is a, c, g, or t
  misc_feature (237)..(237): n is a, c, g, or t
gcagtccaacagcacaaggcgggctatcacagtgatagggaggtggcaacgagtctgggcacnngggagcaccagttcggcgcatganatggataanacagggaatgggccgagcagctgcaaagatgggccggggcaagcacttcatcggagacttcntgcctccagacgagctggaaaagtttatggagaccttcaaggccctgaaggagggccgtgagcctgctactcagagtncaaggagttcaagctgactgtggagaacatcggctaccaaatgctgattaaaatgggctggaaggagggcgaggggctgggctcaaagggccagggcatcaagaacccagtgaacaagggcccccccccagtggacggcgctggttttggcattgaccggccggcggagctttccaaggaggacgacgagtattaggcgttccgcaaaaggattatgctggcctccgcttccggcccaaccccctgaacaatcccaggcggccttattattgagtgttttggaaatacatactttttgaatgaccacccgtccctggactgtggaatgttccggcctgcatttttgccccccccttccgttgtcccgagtgccgtgccgtgtaataaagtcccagtgctcatcccccca

SEQ ID NO: 564376 - DNA, 122 bp, Homo sapiens
tcttcccctgacaattaatttccaaattatactagaggaacgctcacgtgatacttcactgaaaacagaatagtgagaataatatatatgatgaccagattcagacatttaaatatcaggtt

SEQ ID NO: 564377 - DNA, 678 bp, Homo sapiens
  misc_feature (116)..(116): n is a, c, g, or t
  misc_feature (120)..(120): n is a, c, g, or t
  misc_feature (124)..(124): n is a, c, g, or t
  misc_feature (135)..(136): n is a, c, g, or t
  misc_feature (149)..(149): n is a, c, g, or t
  misc_feature (183)..(183): n is a, c, g, or t
  misc_feature (194)..(194): n is a, c, g, or t
  misc_feature (202)..(202): n is a, c, g, or t
  misc_feature (204)..(204): n is a, c, g, or t
  misc_feature (235)..(235): n is a, c, g, or t
  misc_feature (247)..(247): n is a, c, g, or t
  misc_feature (252)..(253): n is a, c, g, or t
  misc_feature (292)..(292): n is a, c, g, or t
  misc_feature (325)..(325): n is a, c, g, or t
  misc_feature (384)..(384): n is a, c, g, or t
  misc_feature (396)..(396): n is a, c, g, or t
  misc_feature (402)..(402): n is a, c, g, or t
  misc_feature (462)..(462): n is a, c, g, or t
  misc_feature (471)..(471): n is a, c, g, or t
  misc_feature (474)..(474): n is a, c, g, or t
  misc_feature (477)..(477): n is a, c, g, or t
  misc_feature (487)..(487): n is a, c, g, or t
  misc_feature (519)..(519): n is a, c, g, or t
  misc_feature (521)..(521): n is a, c, g, or t
  misc_feature (562)..(562): n is a, c, g, or t
  misc_feature (572)..(572): n is a, c, g, or t
  misc_feature (578)..(578): n is a, c, g, or t
  misc_feature (592)..(592): n is a, c, g, or t
  misc_feature (600)..(600): n is a, c, g, or t
  misc_feature (623)..(623): n is a, c, g, or t
  misc_feature (658)..(658): n is a, c, g, or t
  misc_feature (662)..(662): n is a, c, g, or t
  misc_feature (670)..(670): n is a, c, g, or t
  misc_feature (676)..(676): n is a, c, g, or t
aggaagcaaggaaggagtggggtgaggggaagaagaaggggtactgatttacccctattctaaatgctcctagtgccctgtaccttcccctcataagccttcattatcattgtgangatntgtngatgtaatatnntgattaatgtctntccttcactgacctagcagttctagcagggcagngattttgctgngttgcatncncagcacctagtctggtatgtggcattcagcntatgttgattgnatgannggccatgtgggtattcagagcgtgcgtgagtagtggggntgggattggggggggggtggcaggagcaggggnagtagtccgtgtcccctgtggatctgatacactgcccacactggcaacacacatacacntacagagaattntggctnagttagataattaacgtgtgcttggttgtgaaccaaaccactggttcttaaactgtcatnggatcaggngantgnagaattgaanagtggtgggtctggcctaatgtctggagcctngnagaggagtggatgagggcgtttgggatggagcaggcagccnttccctgctnctgggnctgtgatgaaggcnagttgaantggagtggtgcagccgtgcgtgnggctgtggcagagggatgtggtgggctgggggggngggnggcggggngggggngg

SEQ ID NO: 564378 - DNA, 675 bp, Homo sapiens
  misc_feature (166)..(166): n is a, c, g, or t
  misc_feature (170)..(170): n is a, c, g, or t
  misc_feature (174)..(174): n is a, c, g, or t
  misc_feature (185)..(186): n is a, c, g, or t
  misc_feature (199)..(199): n is a, c, g, or t
  misc_feature (233)..(233): n is a, c, g, or t
  misc_feature (244)..(244): n is a, c, g, or t
  misc_feature (252)..(252): n is a, c, g, or t
  misc_feature (254)..(254): n is a, c, g, or t
  misc_feature (285)..(285): n is a, c, g, or t
  misc_feature (297)..(297): n is a, c, g, or t
  misc_feature (302)..(303): n is a, c, g, or t
  misc_feature (353)..(353): n is a, c, g, or t
  misc_feature (360)..(360): n is a, c, g, or t
  misc_feature (381)..(381): n is a, c, g, or t
  misc_feature (393)..(393): n is a, c, g, or t
  misc_feature (399)..(399): n is a, c, g, or t
  misc_feature (459)..(459): n is a, c, g, or t
  misc_feature (468)..(468): n is a, c, g, or t
  misc_feature (471)..(471): n is a, c, g, or t
  misc_feature (474)..(474): n is a, c, g, or t
  misc_feature (484)..(484): n is a, c, g, or t
  misc_feature (516)..(516): n is a, c, g, or t
  misc_feature (518)..(518): n is a, c, g, or t
  misc_feature (559)..(559): n is a, c, g, or t
  misc_feature (569)..(569): n is a, c, g, or t
  misc_feature (575)..(575): n is a, c, g, or t
  misc_feature (589)..(589): n is a, c, g, or t
  misc_feature (597)..(597): n is a, c, g, or t
  misc_feature (620)..(620): n is a, c, g, or t
  misc_feature (655)..(655): n is a, c, g, or t
  misc_feature (659)..(659): n is a, c, g, or t
  misc_feature (667)..(667): n is a, c, g, or t
  misc_feature (673)..(673): n is a, c, g, or t
aggaagcaaggaaggagtggggtgaggggaagaagaaggggtactgatttgaaccctggagtcctaaggataatctaggaaccctcagacccaatccgatacccctattctaaatgctcctagtgccctgtaccttcccctcataagccttcattatcattgtgangatntgtngatgtaatatnntgattaatgtctntccttcactgacctagcagttctagcagggcagngattttgctgngttgcatncncagcacctagtctggtatgtggcattcagcntatgttgattgnatgannggccatgtgggtattcagatcctccttgatggggtggggggggcggtgtngcagaantggcgccaacacacatacacntacagagaattntggctnagttagataattaacgtgtgcttggttgtgaaccaaaccactggttcttaaactgtcatnggatcaggngantgnagaattgaanagtggtgggtctggcctaatgtctggagcctngnagaggagtggatgagggcgtttgggatggagcaggcagccnttccctgctnctgggnctgtgatgaaggcnagttgaantggagtggtgcagccgtgcgtgnggctgtggcagagggatgtggtgggctgggggggngggnggcggggngggggngg

SEQ ID NO: 564379 - DNA, 660 bp, Homo sapiens
  misc_feature (215)..(216): n is a, c, g, or t
ctgtgtcgttcaggtatactgtactataaaagctagaactagcacttaatgtcagagtagcagcagatgctctacaagttcctgtatgctctccacttatcagtatacagctcatcgagcatgtcgtagcgttttctacctccctatgcgtatacaccctttctctgagtctcatacactcagccgataacatttatgtggcgcagttactcatnntggcagtttgcatcaattcaactgcttcaatgatcatatcaagattcagagtatcagtaatagctgcatctagatcgtactgcttttccatatattcacgtcccagtctagggatgtgcagtcagctcttccagcctccagtttcagaggccttcaatgtacgtcctgataagtacatctgcccgctcattgttagacgcacataggcaggctacactgcaacatccacacagaccccatagctctcattgcaggagacaaggacagctgccagaccgtccagatttccaatggcctcacagcagaagtctataccagcatctgtcatatcgaatatatcttcttgaatgggtatctttaagtcctgagggttgaggctctcagtagcacccaattcctgtgccttcttaactttctccttgttgacatccacttcaatgatac

SEQ ID NO: 564380 - DNA, 799 bp, Homo sapiens
  misc_feature (1)..(1): n is a, c, g, or t
ntgttatctgccaccgtcttgcttaacctttttgtgtgttaccaccttcaccttaacggagggctttttacgccctccgggttttcccttccaccacttcgctgtttcttagcgaaccggaccgcgtggtcccacccgccccttgggttcgtgtcgattggctctatattaagggtgagtacacgcccattgggatcggatgtcgctcccctgtttccaaagcgtctttaggtggccacttccatctcgtgtcgacaaagttttgacacacatcctcgttggtcttcgcgctcgatgttcggcaccgctccttaagtagcttaccacgctttatgtgcgcgacgatttgcccagtgtgcaacttctccttgccatatgactgtgaggtagttgacattacatctgggtggcaccctgttcaggcttgtaatttatgctgcactctagtgtctcttcatagaaacacttgatgctcacccgttctaacgcaacattcaagacggctctctcagcatgaaaattagaatgttctggcctcatctcgacttggtcagaatgtgtggcaattctgatctgccttttcagaagtaggactatatcaattgaaacgtaagtatgggcctcttcttctatcttggcaagacttgtactctgttcacctcggcctgtcttcatttatattgctattatctgcctggtcccctgaggcgtctgggtctctcctctcccttgcagctttggatttgaagctgaggaactacgaagttcgatgatttaactccatggttatgcctgcatt

SEQ ID NO: 564381 - DNA, 563 bp, Homo sapiens
gtcagcagtcacacatcctctccattctctgaattcccacaaagactgttattgctggggctcataaaattatactccaaagtatgacgctttggcatccagagtgctttgaactaaaggagactgaaggccccagaagccaagtttccctctgaccttctcctgccttcctgtcttccaccccctacttttcccctgaagtgagtcctggaaaccagaattcttcttgcccaaagcaagccgtgacaccctggaaatatcactctaaccttccttgcctttccgtgtggcagctggccatgaagaaattctctgacctaccttgtttgatagcagatcacaagaccctggttccagagcggtcctgctttacaccgagggaaaggaatgtcatacagaaaggccaagaagaatctgaagagatgtccaatcacctttgcacgtggctgcccattcttcattgaacctaagcattaaaatagacagtttcccctgggtctttgggtcttcatttctgaagactccatgtcatgtaaaactttgattaaatgaatgtatcatgc

SEQ ID NO: 564382 - DNA, 152 bp, Homo sapiens
atttaacttatgttcctatgagaggttggagatcttggccttcatctgatttcattaatgttttgagtttcaaatgtagttattggtttcagtgtgattctgtcctcttaccttattgggtttaataatttttaaaagattataaaataata

SEQ ID NO: 564383 - DNA, 260 bp, Homo sapiens
tgcttgtctgctctgtagctctcgtctctctgtctctctctgttggcagatgtaaaactattattctcacgataagctttcactggccaggagcagtggcttatgcctgtaatcccaacactttgggaggccgaggcaggcaaatgacttgaggtcaggagttccagactggtgaaacccatctctactataaatacaaaaaattatccaggcgtggtggtgtacacctgtaatcccagctactccctgaggcagaagca

SEQ ID NO: 564384 - DNA, 121 bp, Homo sapiens
gatccacctgcctcggcctcccaaagtgcctggcattacaggcatgagccaccgtgcccagcccaaaaatgtaaagatatcttctgtttgttgatgctgcagaaatcacaaagcagtctca

SEQ ID NO: 564385 - DNA, 1173 bp, Homo sapiens
gctctcgtagtatgaaggacccgggtatatgtaggccctgtggttcgtcattctgaatattctgccaaatcataggccgcgacgcagtgctcgtacatacgcaagaagctaggtacaggacggtccatggcgcgagcgtagcttgacaaagcgtatatacccgtcgcgttaatgccgtatgagagtgcgaccgatgtagtgtctcctacgagaatataggcgccttcctgagtggatgaactggtgattttgttcgacaggctatcctagagttgaattctagaatttcggtgatcgaggtggtcctagagaaacgacgagtcaatctccctcatacaatcgtagaccgagacgaatcggacggacgaatatccaagcgaagcacgagcgctatatatgggttacctttagttgggtcctgccgagccgtgagagcttctagcagaggtagtttagtgcagaacggggtaacgaactttgcattgtagcaacttgagatgtgggggacattagcgttagaagaagctttttttgttgcggaaggtttacggtgtcaggggcacattggttaaccaatatagtctttttctaatggggctactatgtattgcaaggcacacatgatcggttgttgtggggaggaattgaaaaatgtgttacctttagagtggttcaatccgttgagaggcatcgggtggggtttggttgacaatttaaaatatgcctatcttaaggtaaggtggttgtcagttgtctaattttagtttagaattctacaatcagtagttattttctaaagagtgtaaccaattatctaaagacaagaaagacagtaaagagggaacgttggccacacaagacggtgggttcatatacaacaagggatatatggtaacacagagggcccgttctttcactttgtgtaacctttgttttagggaacacactttcggaccacccaagaggacaacattgggcaatacttgggtcgtcttaagaggagagcctggggaaggaatttgaattttgtggacgtgagcattaaagggttaagaaaacactatttgggtaacactctcggttgagagcagtccatgggggtgcagacaaactctcagaggtaattgacaggtggaagttttgtcgtacacacacattcgacaggaatcaatt

SEQ ID NO: 564386 - DNA, 1823 bp, Homo sapiens
gggagagcgagcatcgtgagctggctggatcgccgagcgcgagtgagggagccgacgtcggcctgtcgaccggctgctctcgcgctctctcccgtccgctgcaatcacggatgcctcggggccgcggggcccggtgcgccgccaccagggccagtccctcggcggtcatggccggtgatggtgtagctgctgtcgctgatgcgacgcgcatgggggcagtgcgcaagaacacaaccggacgccgcccgcgtgagtgcatgtgcgagagcttgtgaccagcagcagggtcgccacggcagcgattgtgagctgatcgcagacgggcatagccttgattgtgttgctgagatcttacctttgcactttgaaatttgtgcggaagatcagcatagccgtatatcaggcacaggcattttggcgatattcgacaagttgcatatgccaaatacagatgtgcaccgcatcattgcgcagggcacggccgcggtttcagaggattttccccggatccgatcctccttctaagagtgcccaggggaaagtcaatccccttgagcgaaaaggtgagaacgacacgtagatagcatattctacacaagtatgatggcgtcaccgggttacagcaattcaaacagccaaaaggagaaacggagacgagaacttggcaaagcttaacaagagacaataccattcattgcacatttgaccacaggaaagcaaccaacaacaggaaggaggggcacaacaggcccatagtggtggcagtgggttcaccaaagggaacgacgcgatttaggtctttttcaccaatggcaccattggttacccgccgtaatgggcaaatatagacagcagaggaagtaccgcgaaaaatggcaccgcgtggttacgcaaaccgttgcaacaagtcagtttataggagaccatccccctggaaagtatcaattggagtaacagagggatacaacgagcgcaacgagacatcttattgcgcgagttggggtttgggcacgtttttagaaggacagaacacagataaaggttggcgttaaccacttatttatcgtttccagttacaggcaaagtttaaaaagaggagggaacacacttttcggagtatagagcaaagaagggcccgcagtggcatgcgcactataagtttagtaacatttatagaaggtttatcaaaaccacacgcgtagtgcagtgagcaattaaacggattacagagcgatgtgagatcaaacagccgtactggaggcgagacacgcgataggcgtctgtattggagtagagcgacataataaagtattatatagagaagcagaaaccacttggaggtacggaccaccagaattgagttataaatagagtatacaagactatggccgacatatctagataaggagatataagaaaggcatgaggatcttagagaaaatagtaccatttataatgggcaccgagaagtacagcacggaggcagaggaagagcgaatagagagagaataatacagatccgggggagcgaagctaagcacacaacccgcgcgccgaggggacgaagcctaaacaggagaacgaaagcaccgcgaccgcagacgacgacgacacacacatcgagacagcaagccacagacaaacacatggaacacaagacagcaagaccacatacagaccgctgacaagtccacgaccagagacagagacgagagcaccacgaagcaagcacgagagcaggagcaacgacagcaaggaaccgaggtagagcagacgagaagaagtacgggaagcaacgaagcagcaagccacacaaacaagac

SEQ ID NO: 564387 - DNA, 750 bp, Homo sapiens
  misc_feature (494)..(494): n is a, c, g, or t
  misc_feature (531)..(531): n is a, c, g, or t
  misc_feature (559)..(559): n is a, c, g, or t
  misc_feature (681)..(681): n is a, c, g, or t
gagcggtctctgatccagcccgggagaggaccgagctggaggagctgggtgtggggtgcgttgggctggtggggaggcctagtttgggtgcaagtaggtctgattgagcttgtgttgtgctgaagggacagccctgggtctaggggagagagtccctgagtgtgagacccgccttccccggtcccagcccctcccagttcccccagggacggccacttcctggtccccgacgcaaccatggctgaagaacaaccgcaggtcgaattgttcgtgaaggctggcagtgatggggccaagattgggaactgcccattctcccagagactgttcatggtactgtggctcaagggagtcaccttcaagtgttaccaccgtgtgacaccaaaaggcggaccgagacagtgcagaagctgtgcccaggggggcagctcccattcctgctgtatggcactgaagtgcaacacagacaccaacaagatgtgcgagaattctgnaggcagtgctgtgccctcccaggtaccccaagctggncagctctgaaccctgagtccaacacagntgggctgggacatattgtggccaaattttctgcctacatcaaggaattcaaacccagcatcaagtgacaatctggagaagggactcttgaagagcctggaggtttagacaattattaagatnccccctccagagactggttaacactgtgtgagataggggctctcaaggattggtggaaggcaccctgtg

SEQ ID NO: 564388 - DNA, 1030 bp, Homo sapiens
  misc_feature (1028)..(1028): n is a, c, g, or t
aatgggctttaagtttgtcctcaatgtttttgaaaattagagaatagttttttaacaaaatatttaaacaacattatcagttatcattttggtacttaataactcttagacatcaaggcagatggagttattgccatggtgttaggacaagctgattgtgttaaagcatgtgacacacctaatttcagaaaccagaggggaaatcgccgctcattaaagttcaaggatttgaagattatcatgaagaaatattcccccaactccaccatctgaatcactgaatgatagttactattctagacttttgaaggactgtgtcttcaagaggcccttgttaaaataattcctatttgtagctttgaccaccctcgctgggtgagaatctgcacagtttagagggaaaaagtgtggcacattgggatgaaagcaatcctagaagatagaactctgggagttcttggtccggctccaacatgcaatggccaagcaaccttgacctcttggtaccgtggagatgaatgtacctcccaacctagcccacagactgttgttaatgtcctataaaataataggcaaagtggtatatctattagtttgacctttacatttatagctctattcttggaacccgagtcccagccttgatagccaacaatcaatcatcccaatgtcaatgcccccatggcattcattgttgtatctatgtaccttcctccctagttactccaactcaaaattggagtcatctttattttctgtttctgatgttcacttggtgtcttgtcttttagctacagtactaccaccctggtggttcatcattatacatttaagctaattacatgttgtttggccatttcttctctttctgatccacctcatgtacatgtctaaaatgttctccttatacttctctctctttccataccattctctgtctccctgttgcctatgggataaagttctaagttctcattctggttgttaaggcccatcacaaagaagtttgtccagttgctacaccctcntg

SEQ ID NO: 564389 - DNA, 696 bp, Homo sapiens
ggggaatatacggtcgactgtgtcagagtcctaggaaagcatgctggttattacacggacactcatgggtgtattgcgaaccggatgctggttatatacctcatgcaagccctcaggctgcgtgaacgcggtgacgcatgctaagaatacattgatactggtatgaaatcaggagtcgtgtacaccatgggcctatttgagcttctagagtatgtcggactgcatactgcgaagttcattgaggatggctggattgaaatggatgccgtgaacccattacataagcccagtcaatacttaaatgagctgatggctgataacacgttcggtatgaagactggatatggatttaacaaattcatgtgatgagcagctttctccggctctgagaagaacacctgagagcgcgtttcagccaatgctcctagtgcctgctggaatgctctgtgctcagacatttgctcacacagtacagcctaataaatgtgcactttgatcgtaatctatctgagtgattattacgccagttacagcagtgatagattcttcattcagaactactaccgtctctagtcagttgcattctgggtatttgctaaacagatatacaccattggttgcctagagcacccatgttgtacgaactcttgtcattgtgaccagtggcctacattcatcggtgatcaccgtggtctt

SEQ ID NO: 564390 - DNA, 365 bp, Homo sapiens
aagagggcatgaaggcatccaggcactcagacggcaaaggaaccaccctacccatatggcctctggagggggcagaagaaagacagcaacctcatcctatattggacaaagcatgtgaatgctggcattcgctctcataggagacccatgtgcttccttgctcagtgcaaaactgatgattctacttgctgtagatgaatggttaacacgaggctagttacacagtgccattgtttcgacagtgaagcctccaaacctaagccactgggacggaggacagagaatgccagcagactcagtcgcccttcgtcatatacccaaaatccagaccttatccacaacccggggcttggcccggaaggtat

SEQ ID NO: 564391 - DNA, 1285 bp, Homo sapiens
  misc_feature (214)..(214): n is a, c, g, or t
  misc_feature (481)..(481): n is a, c, g, or t
gctctaccgggcgggatttgatggcgtgatgtctcacagaaagttctccgactcccggagacatgggtcccgtcggcttatcctgcctcggaaagcgcagacagcagggaatgatgggaaaggtgaagagcttcccttgaggatgacccgtccaagccggtccacgctcacagccttccttgggagtacgataggctggctatgtactcactantcgtgcggggaacgtcgacgatggctcggggattctcagaggctgtaaactaagaagcgagagtgagctgtgatggcctgtagagcaatggtatgagatcaccatcgcatggtgggcttgttgaggcatttgatgcggactaccgtgggaaaattctcctgccgatggtccctgcccggagtaactctttgtcaaggaacttggttctgataagctgagagcgtcaccacttacagtgcgacttcgagatcgcgagagaagaggtcngtttcctaattaaacgacacttcagtgtcaattaaagatcctgataagagaaagggaaatggtcctttaagcctaaaggtaccgtggcatatgacagactggggcatggccagtgcaagtgcctcgggccacaggtataggaccaccgtgggatggaaagagacctgtcatgtcgaggccaattgaattaggaaacgctaccttggccaataggatacgaatgcccgtcggttcatttggcacgccatttaggcgccaagactgacctgcccgtggcctttaacctttacttgggcgagttccccaagcatagggaaacaggggacgcccatggcgttgtgactggtggggagagaagtccgccacgagggattgttaaaaccgggagggaagccgtgcccacaccttggctgtgggcacacgggtactgtacaaactgcactatggggacgctgggggggacccccgcgacggacaaaagaagcgccgtcgcgcaatgcaccatagggccacttgtggatacacccccgtgggatggacactcacccaaagcgcgtagggtttcccgggcgggaccactgggcattttgcgaggcaatttcggaaatccacgaacaccggcatgccattacagcggagggggtttgggaactccaaagtgggagaccaacatggggctttaaccaacaacgaaagggggatggttcacacacccaaccggacacgggatagttgtcgatcaccaccgccgcgagggcaaaaggcccttggctcgccacagcgcagaaagaagcccctagaccg

SEQ ID NO: 564392 - DNA, 974 bp, Homo sapiens
cgcgcttaattgaccccgcgggggggtttttccaaaaagacagtgttatttcctcgccgcgtcgtttttattaggggcgcttgatcaaaaagccttttgggggcaaaagtggttatattcccgtcagagcgttggttacccgggggagaagctcttactcgggcgagtagggccgctctcttcggtgtgtggtccgcccaccctcagcgcacaacagactgtgcgaatacctgtggggtggggagacacactaacgctccgccccgtttgtttatgatatggaacacactctcgtggccccacagatatatgtgggtggtgccagactcaacaacgaaagagagggggttgtaaaccacaggaagagcttctgcgttggagagcgccccacccctttcaaggagcgcacactctctggtggcgaatcacacacttgggagacgacacacccaggagggggtgtctctctctctctgagacatttctgcacacagcacgggattcacacacactcaactctcttctctctcacacacactgtttgtatcagacccagttggggcgtcgggcgcaattttgtcccctctccacagcggccaccaccttttgtctaagaggctcatttttctgtggtttgtacaacagagatttgtggtgataagcacaacaagaggaggtgtggtgacactctctggcgcgcccaacatgtgcgcttctcaacagagagattaaagaaaccctgggacccaccacgacccccaatccaatgatcaccatagatagaggaatgatagaggatgacccctcttcttttgtggggaggtcctcctgcccaccacatctcatttcccccccccccctgtattttcccctcttccaatttcccattgaccacccctttaaaaggggggggccttgggggccccccccttttatgtcccacccaaaaaaggtcaccggggttcacacccaca

SEQ ID NO: 564393 - DNA, 332 bp, Homo sapiens
agagcacatgaggagagcgctctgatacagagaggggctgaggactgtgggaccgagagctagcagacgcactttaatgcattatagctcttcctgctggaggaggaggtggtggtgtacttgatggtggaactgccgcctccaacagagctgaggccacccccaatggctctgccactgctggaactgaagccacctccaacgccaagaccactgccataggagtagctgcttcctccacccaggcctaagccactgccgacaccactggcaccgccatagccactggagacggtggactgcaccacagagatgttgcctttcggagaaga

SEQ ID NO: 564394 - DNA, 157 bp, Homo sapiens
aaaaaccccccttttatacccggatcatcagtggaaaattgtttttcaagattccaaccaaaaccagcaattaaacttttttttccaatggttttgtttgcgagtaggccttgggggtccttgggaaaaaaaaataaaaaattttccccttccttta

SEQ ID NO: 564395 - DNA, 132 bp, Homo sapiens
aatattgtcctgactggtttgacttttgcacccatgagattatttggtttgatagactgccaatatcctgaggttcaaatagaccgtccgtcacaagtgtcgaaaggggccagcattcttgagagttggatt

SEQ ID NO: 564396 - DNA, 808 bp, Homo sapiens
  misc_feature (70)..(70): n is a, c, g, or t
  misc_feature (79)..(79): n is a, c, g, or t
  misc_feature (108)..(108): n is a, c, g, or t
  misc_feature (110)..(110): n is a, c, g, or t
  misc_feature (119)..(119): n is a, c, g, or t
  misc_feature (163)..(163): n is a, c, g, or t
  misc_feature (219)..(219): n is a, c, g, or t
  misc_feature (254)..(254): n is a, c, g, or t
  misc_feature (258)..(258): n is a, c, g, or t
  misc_feature (260)..(260): n is a, c, g, or t
  misc_feature (269)..(272): n is a, c, g, or t
  misc_feature (278)..(278): n is a, c, g, or t
  misc_feature (280)..(280): n is a, c, g, or t
  misc_feature (297)..(297): n is a, c, g, or t
  misc_feature (327)..(327): n is a, c, g, or t
  misc_feature (344)..(344): n is a, c, g, or t
  misc_feature (375)..(375): n is a, c, g, or t
  misc_feature (378)..(378): n is a, c, g, or t
  misc_feature (382)..(382): n is a, c, g, or t
  misc_feature (413)..(414): n is a, c, g, or t
  misc_feature (416)..(417): n is a, c, g, or t
  misc_feature (423)..(423): n is a, c, g, or t
  misc_feature (454)..(454): n is a, c, g, or t
  misc_feature (534)..(534): n is a, c, g, or t
  misc_feature (536)..(536): n is a, c, g, or t
  misc_feature (542)..(542): n is a, c, g, or t
  misc_feature (549)..(549): n is a, c, g, or t
  misc_feature (552)..(552): n is a, c, g, or t
  misc_feature (555)..(555): n is a, c, g, or t
  misc_feature (557)..(558): n is a, c, g, or t
  misc_feature (562)..(562): n is a, c, g, or t
  misc_feature (594)..(594): n is a, c, g, or t
  misc_feature (605)..(605): n is a, c, g, or t
  misc_feature (608)..(608): n is a, c, g, or t
  misc_feature (628)..(628): n is a, c, g, or t
  misc_feature (637)..(637): n is a, c, g, or t
  misc_feature (653)..(653): n is a, c, g, or t
  misc_feature (668)..(668): n is a, c, g, or t
  misc_feature (678)..(678): n is a, c, g, or t
  misc_feature (680)..(680): n is a, c, g, or t
  misc_feature (686)..(686): n is a, c, g, or t
  misc_feature (734)..(734): n is a, c, g, or t
  misc_feature (746)..(746): n is a, c, g, or t
  misc_feature (794)..(794): n is a, c, g, or t
gagccttagccgacggcaaactggacactggaccggcagccgccactgagactcctcccccgcattgccngctgcttcncttacgtcgtgttccgctcgcgcactgcncntgtctccgnggcggccccacgtagcgctcgttagcagtggcacaagactcttncagagcgatgatacgaaaccagtagcaagtatctccataaatctgtagtgtatgangatgatggaacgccgaggtcacgaagtaagatgancccncngctttggtnnnngataangnggaagaagatgtgtctngtgaacctgaagcttcaccgagtgcagatncaactatactgtttgtnaaaggagcaacgcattttccagcatatcacnttntgcngttcctggtaggctttaccaacaagggtacnnannattttnttgttgaatccttagatgcctcattccgttntcctcaggtactaccagcttttatatccatgaagtttcacagtctcttgcctctgaaacactgtagtgccaccccaggananaggcancttgttnagnacncnntcantcctgcagagcccatgggcggacgaccatttngtttggtcatnaanctgaactacaaagatttgancggcaatgnattccaagatgcagtnttcaatcaaacagtnacagttattnanagagangatgggttagatggagaaacaatctttatgtatatgttccttgctggncttgggcttctngttattgttggccttcatcaactcctagaatctagaaagcgtaagatncccatacagaaagt

SEQ ID NO: 564397 - DNA, 452 bp, Homo sapiens
  misc_feature (367)..(367): n is a, c, g, or t
aaagagagaggagaggaagagatagaagagagagagaagagaaaagagagagaagcgaaagatcaatgagttaggctgaggggaggtaaggttgtgcaagtctcagtagaaaggtttttaacaaataacatgaggactaaaactttcaagacaacagatgtgtggggtttttaatagataaagctgcatttgcgttgtgtcaggctcttattaataattaagagaatgaactaaacatataatttagttgctacaactctttactggaaagttgcctaattttgcttttaaaacccatgaaattaattaaattttaacatttaagccagtcatcaatgttacaatgtttcgcccagcatgtcagtanaataatatgtttagaattctagaaccacttctaaaacacttgttgtagaactgtctatatactctgaagtttttttcaaagctga

SEQ ID NO: 564398 - DNA, 1074 bp, Homo sapiens
ggggcctcaccacccctcgtttgcacgcacgcacgttcattctccgtcctcgcgccccttttcctacactttcctcttctccccgcaccggaggagccgctctttccgcgctggtgcactctggggcccgaggtcgagccctgccgctgccgccgctcgcctgcacggacacgcgacgacgacggccgcgaccggacgcacgaacacaagcggagtcgccaccggagagaacgtcgactccctagcagcagccgccgccagagaggcccgcccaccagttcgcccgtccccctgacccgttcacaaatgcagcctgcattctgcaaagtggatacgatcgaagggactatgtcttcattgaacttaacgcgctcgcaagacagctaacggatgttaatgtaaactccgacaaaactccaagaccaaacatacacacgcactcgccagcgcacacgctgaccacactcacacaccactccaccactcgacacccgaccctccccccaccagcactcgacccccaaatgaccccccacgccccactccacccacaccggacaagactcacaccccactgaaagccaaaccccaccaacgccccacaacacgcgacaaccacactggcccacacggcccaacacacaccgcacccgcggcccacacagcacactcggcctcccccccgcccaacaaccaaccacccccgccaccccgacctggcccaccaccgacccccactcccacacactgcgctcactccccggcaaccaaaccacccgcaaccctccacacccacaccaagaccgaccgtgcagcacacaacagaacgcacacaacgagacaaccaaacacaccacaacccacccaccagcaggtgaagagagacccacaaggcaccaaccagagcgacgacgcaacgcccacacgcccagacgcgacgacccgcgcgcacacgcgcccacacacacaccgcgccgcctacacgagacccagagaccccagctccgctgacagacaacacacaacaccacacacaaccaagccaggcacgcgaccaaccacagacacggcgaa

SEQ ID NO: 564399 - DNA, 321 bp, Homo sapiens
  misc_feature (40)..(40): n is a, c, g, or t
  misc_feature (167)..(167): n is a, c, g, or t
  misc_feature (205)..(205): n is a, c, g, or t
ctttgctgggttgctgaaaaagaatcccaattggaaactncaaaacctgtggggtccaactgttgcctcctgccatcctctctggctggcaaagcactggtgctcccaggaccctcctcaagttggggttctaatccccctcccatcacagccggcctcgttgcctntctgcatgcaggcttgctcctgtctcaccctgtggccnacagcctctgggctttcccacactgcacttctctcttcccatgtcttcctccccagggacttcctatcctggccggccccctcagcttcctgcactctccacaagcccttcccacc

SEQ ID NO: 564400 - DNA, 481 bp, Homo sapiens
  misc_feature (31)..(31): n is a, c, g, or t
  misc_feature (33)..(33): n is a, c, g, or t
  misc_feature (99)..(99): n is a, c, g, or t
  misc_feature (347)..(348): n is a, c, g, or t
aaagtgaaggaatatataatgaaatatcagntncttttaatctatcataagtatgtgagcataacttagtattttgaaatagataaatgaatactgccnacaattcatgtattacctataatagatatcatacatataacatttaataacatacagttcttgttcctgaagacttaacctagaaaataactccataacaagaagaatctctgtcataataaaccaacagcagacattttctaaaggcattaaaagtatatctgatgctggcccttattaatgtgaaattcttgtggatctgcgaaaaaagaggaagacttttctttcggttttaaaaaaaaaaaaanncaagcttatgcatgccggccgaaattcgagctcacttgggcaaattgccccaaaagggagggggataacaaatcaactgcccggcggtttaacaacggcggggattgggaaaaaccccgggggtacccaactt

SEQ ID NO: 564401 - DNA, 212 bp, Homo sapiens
gtctagaggatcccggcaccaccccgctacgtggataatattatggagaagtagtctagttgaagcttagggagagctgggttgtttgggagtggctcagtgtcagttcgagactaatacgtgcttgggctaggcacctaactctagttgggagtcatagacttagcataaagcgtgcgtaacgtggtgatgcggaatcccgaggcacgacg

SEQ ID NO: 564402 - DNA, 777 bp, Homo sapiens
cacgcgtcgggactgtgctgtgatcacatgcctttggaccacatttgtgttctgttcttagagatcgagctcctcagatggatacctgaagcctttgctatccggaaacgcgcggtgagggttcgctagggtagggcttagctagtgctacgggcttacgtagggtagcgggtagtgaggtaggagctagatagggtagcggttagccggtcgcggtgtagtgagcggtaaagggttcggataacgtagggagctagtaaggtaggcgtgaggtaaggaacggagtacgtgatggtaggggtcggagtcgtaagggtagagatgcttaagtgtgtcgtccagttcgggtgtagctaggatgcagtgttacgctatgaggtacgtgcgattagcgctacagcaaagagcgatgccacacaacgggcaggggatttccaagcgttgtgccacacaatatcgggggaacctcggtagaattgactccgatcgtactcccctagaatacgcgcggatcgaaagagagaaaacgaaacgcagtgactcgtgtgcaagatacgtgttccaaaggtaagagcctaaactgcacagcgacatgatgggttcacgggttggccgaaataaggctcccacgaggaggcccttaggcgaaaacccgtagctatagtcatcgggtagtggagattaacgaaggcgatcgagaagcctggcgcatccgttatttaccgccacatagcggggtttagagcaaaaattccgtccgtccgggctatacgtggt

SEQ ID NO: 564403 - DNA, 114 bp, Homo sapiens
gaagaacgcagggaaaggaaattaaattattgcaagccaaggaggatttcaaaaaaatgatggaggaggcaaattttattccaggagcaccttttaggtattttgcagccaggc

SEQ ID NO: 564404 - DNA, 309 bp, Homo sapiens
aaaggtggttgtaattgcggaagaggctatgggcttctagcagataccagtaacatatttcttgatctgagctagtgatacatgagtgtacacagtataataatttattctaggtgtatatttatattttaggcatttatttataatacgtaatcttattattttcacaatataaagcttaaattctttcagaaaatactactacattgacttgtatggtccattaaccttacggcagatacgaggttgaagcatttgggtaggggtataactgagcaggatttttattgtgtaagtatactgaattag

SEQ ID NO: 564405 - DNA, 319 bp, Homo sapiens
ccctggtgcctgcatccctgccgtctctagttccagccatggctgacacgctgcaccggtacatgcttgcctcacgcttcagcgagtgtaagcttcacgacttgttggcttccccctagtgttaatgccagccggtgcaccgcgcaaccactctcacaggcttgttgcagcctttgtctcagactcccagcagtctctcagcgcaccaacttgcggtttctccaggtcacaagcttttcccaagcaggctggagcctcgctgggcgtgcctttccttggggcatgtgctgagacaggatacatgtcaaggattggggtc

SEQ ID NO: 564406 - DNA, 806 bp, Homo sapiens
  misc_feature (59)..(59): n is a, c, g, or t
  misc_feature (61)..(61): n is a, c, g, or t
  misc_feature (71)..(71): n is a, c, g, or t
  misc_feature (87)..(87): n is a, c, g, or t
  misc_feature (90)..(90): n is a, c, g, or t
  misc_feature (94)..(94): n is a, c, g, or t
  misc_feature (96)..(96): n is a, c, g, or t
  misc_feature (102)..(102): n is a, c, g, or t
  misc_feature (105)..(105): n is a, c, g, or t
  misc_feature (107)..(107): n is a, c, g, or t
  misc_feature (120)..(120): n is a, c, g, or t
  misc_feature (158)..(159): n is a, c, g, or t
  misc_feature (166)..(166): n is a, c, g, or t
  misc_feature (178)..(178): n is a, c, g, or t
  misc_feature (191)..(192): n is a, c, g, or t
  misc_feature (194)..(194): n is a, c, g, or t
  misc_feature (198)..(198): n is a, c, g, or t
  misc_feature (203)..(203): n is a, c, g, or t
  misc_feature (206)..(206): n is a, c, g, or t
  misc_feature (222)..(222): n is a, c, g, or t
  misc_feature (250)..(250): n is a, c, g, or t
  misc_feature (259)..(259): n is a, c, g, or t
  misc_feature (271)..(271): n is a, c, g, or t
  misc_feature (286)..(286): n is a, c, g, or t
  misc_feature (297)..(297): n is a, c, g, or t
  misc_feature (303)..(304): n is a, c, g, or t
  misc_feature (320)..(320): n is a, c, g, or t
  misc_feature (322)..(322): n is a, c, g, or t
  misc_feature (332)..(332): n is a, c, g, or t
  misc_feature (343)..(343): n is a, c, g, or t
  misc_feature (352)..(352): n is a, c, g, or t
  misc_feature (412)..(412): n is a, c, g, or t
  misc_feature (438)..(438): n is a, c, g, or t
  misc_feature (451)..(451): n is a, c, g, or t
  misc_feature (463)..(463): n is a, c, g, or t
  misc_feature (465)..(465): n is a, c, g, or t
  misc_feature (491)..(491): n is a, c, g, or t
  misc_feature (568)..(568): n is a, c, g, or t
  misc_feature (620)..(621): n is a, c, g, or t
  misc_feature (623)..(623): n is a, c, g, or t
  misc_feature (628)..(628): n is a, c, g, or t
  misc_feature (630)..(631): n is a, c, g, or t
  misc_feature (657)..(657): n is a, c, g, or t
  misc_feature (661)..(661): n is a, c, g, or t
  misc_feature (675)..(675): n is a, c, g, or t
  misc_feature (726)..(726): n is a, c, g, or t
  misc_feature (728)..(728): n is a, c, g, or t
  misc_feature (759)..(759): n is a, c, g, or t
ggggcccggaaggaaactgcgaggcgaaggtgaccggggaccgagcattttagatttgntnggtagacctngtgcaccaccaccatnttngctntnaggctngtntntttttggacactncctttttgggttttttacccagcttttaccaaggcctnnccttttnttaagaattttnttacgaagaattnntngttntttanacnttgtagggaattttcnaccaaaacaagaatttggttttggcgtnggagaactngccaagaacttnaagaggcagcatttnaaccattgatngaaaanntttttttttttttttngnttggaagatngtttttttttngaggggctnttttttgtttttgagcatttttttttttttgttttggactttttttttagatttgagctntttaaaaggctttttttttgctttanttttttaaggatngaattttttttncnttttttttttttgcagggagtttttnttttcagctttttttttttttgcaattagcagaacgccttttttttttaacttttttttttgaggctcttgggtganaattggtgtgacctttgcagccatggttggagctggaatgctggtacgatcnntnccatntnnccagagcccaggcccaaagcatcttncttngttgctacattctngtgtgatgggtgcagtggtggctcctctgacaatattagggggtcctcttntnatcagagctgcatggtacacagctggcattntgggaggcctctccactgtggccatgtgtgcgcccagtgaaaagttt

SEQ ID NO: 564407 - DNA, 1055 bp, Homo sapiens
  misc_feature (1055)..(1055): n is a, c, g, or t
tgggggctgctcctggcgagcgactgagtcgtccgtgagggaaaaatgaggcgaggcttttcccagagatcgtctcaagctgatggcagcttcggtcgcggttaaggggagtagtccacggttttggcagaaaccctggtgtgcaggttcgcaagcccctgttcaaccatgctcctgagccctgaagagcagaaaaccttgacatgtgggacccttgctgcgacaaagtgaaggcttgtctgccccccaagaaaattcaccaaaccgggaaacccccctggaaaccttgggagctatataatcttggtagccagtgaaaacgagcgggggcttggcggggaccggctgtttcccctccccggtgagttcctgggcacagtgtttgcggagttatcaaggtgactcagccatcattgtagaaaaggccactttgttggagcattcagaaattgcgcaacggtttgtggtatcaggacctccacttcggtgaatgttggcctaatttaccaaaaggcacccttttattaggtacccagaacaattgtggtggcgctttgctgacgaagtatacgggaccgaggttgcgtggcaccagaaggaattgcttaagagaggcggggacatcaacctttccagtgggttctaaaccaaaccaaggcgcccgtggggcaggccatgccttccaagaacctcggattgaaacagcgaacttaacaaatggtgcccattgaccagacagggttgggtggtagggatacataacggggaaacccttcaggaggaagtcctatgaacttacactgcgacggcatttaaacttgggtcttatcgaccactgtgtacaccttactaagctcctttgtcaagagccagcataacaatggcccatccacaaaagaggaacgcatctttggaaaaagaaccggaccatggctttggcaacggcttttaccagcgcgacattagttcgttgcagcttgggcaccaataccctccgggagggtggacggggcacagccatcactccccatatcttggtgtatcaaagacacaan

SEQ ID NO: 564408 - DNA, 197 bp, Homo sapiens
taaggatccccgtggtccagtacggatgtgggggtgggctggggcagactggctggatttgaggcagtgacctaaccccggaagtggcagaaaccccaaccccccaatgctgacctttcagtgcatgcagctgtgccaatgacaggaggctacagggaactgaggctctccatgccgggcccatacggatgtgcggg

SEQ ID NO: 564409 - DNA, 317 bp, Homo sapiens
  misc_feature (245)..(245): n is a, c, g, or t
  misc_feature (265)..(265): n is a, c, g, or t
  misc_feature (307)..(307): n is a, c, g, or t
  misc_feature (314)..(314): n is a, c, g, or t
gcaaccctacttcagacccaggtgtaaggtacatggatgtgctttggtcaaggaataggccaaggcagagatccatgcctgcatgactcagtgggtttggtgcacaggcacacacctccacttgttatataacctgtttgtgtaagttcatacttggtctgagccactgttgtctgtaaaaggtaattgtcctgctaatgctgttacaggggctcttgggggttcggcttcagctcaacatgggnttgacatgggtggggcacantgggcgcccagttaaggaggaggaggaggaggaggccaaagntgttccnttt

SEQ ID NO: 564410 - DNA, 477 bp, Homo sapiens
  misc_feature (160)..(160): n is a, c, g, or t
  misc_feature (251)..(251): n is a, c, g, or t
  misc_feature (265)..(265): n is a, c, g, or t
aggcgatctagaggatcccggagctggttttctctaaacctactttaagaggttcatggcaggcgcagtggtcatgcctgtaatcctagcattttgggaggcgagaagggtggatcacctgaggtcaggagcacagacacgctgggcaacatagcgaaanccagtctctactaaaaataccaaaattagctgggcgtggtggtacgagaagggtggatcacctgaggtcgggagttcaagaacagcttgancaagatggagaaancccgtccctaggaaaaattcaaaattagccgggcgtggtggcacatgcctgtaatcccagctactagggaggctgaggcaggagaatcgcttgaacctgggaggcgtaagttgcggtgagctgagatcatgccattgcactccagctgggcaacaagagcaaaactccatctcaaaaacaaacaaaaaactcttatctaatggtcatgccac

SEQ ID NO: 564411 - DNA, 978 bp, Homo sapiens
gcggagcttgcagtgagccgagatcgcgccactgcactccagcctgggcgacagagcgagactccgtctcagaagaaaaaaaaaaaaagagttccctttccttaagttaagtctagttcaagacaggagatttaacctattaaattggcacataaacatactggtaattaccatatttagaagtttgacagcagctcgtattggggagcacaaaggaaggggccagtacctttgaaacttagacaaacggatttactgatcttacagataggtgatcaaactaacctaatggggtcctgaacgaaactgcttgacttgagacacaggtgagacggtcacaggcaattacacacgtggttaatctcctggaacttgtagccacacaagccattaacattgactgataacgagaaacagttgcttcactacagcaggctgggatggggctcaagcatatggcgatgagctgaaactttaccacaaattaaaggggagcatcactggtgaatgggtgggtacaccaccacacctacacaaccaccccacaccacaacactacaacatcaccacagcacccgaacgaccaacatcccacccatccacaacactctccacacacacccacacccactctctctcgtcccaacctcacgccctcaccaaggaaacctgtgaggtacgtaacagtggaactgagcgctgccgtgggggaggtgcgcgaaacactagcagatgctgactattgtacagtcgctaaagcctaactactcatatcaccaacactaatagtagctcatcatactactacacttcacccacctatacatcccaatcacccacacattataccatcccatctgctcgcatgctccaaataactgaacaaacaaaaaattcattctcatattataccaaacggactacataaaatctctttattccaccagaatccgtccctctcccataatataccactat

SEQ ID NO: 564412 - DNA, 582 bp, Homo sapiens
gaagccacatggcatcccggcctcgcccaggcattcgcctcggtctgaaggaagggaacaggaggtcattgagttcagggctcagacgcagccgctcagcacaggaggggtggacgggaaatgagagcttctctggtagcagggatccctgccattctgcagcccggcgaagtagcggtgcggctggagctcctgttcccagcgtcttgccagaggtggccacttcagccaagcccggagaagtgtgggcagaagcagtgaaggttctttctgtgggtgccctgcccacgccctccttgcctggtcctcccggcctggatccatggctgactctgcctggaggccatttgtgcctgcatatgtgctgccgacaggatgggcaggccgcaagtggggttaggtggggtggtacggtcagcacggtgcagcggtgcagtggcaaggggggctacttgtgtggcataagctagaggagccgtgccgccttgaatgccgagctaaatctgtgccactctcctccccagactatgaattcctggagatttttgtacatgcactgattacacgtgggactgatatttt

SEQ ID NO: 564413 - DNA, 758 bp, Homo sapiens
tatgggtccagagcgtatacaagttatgcagaaggtactgtgatcttgctgccagctcgtactccatcagacgatccacgccatagagcaaaaggatatggcattgaggccagcagactgtcgggtgcatcgaaaaggagatcaatggatgagtttggcgagtatggcatcgtggtcgacgccgtcgaccttctctccctggattgctgataatatattgcttcgatgggtgttacatatccactgaatcgctttgtagatccgttcaaatctcttgcctgttacatgcagatgacatttgaagccagctgacatgttactgaatgcaagtcattcattgctgggatcccactgataagctgaggtctccttctgcctgccttgtggtcgggaaggtcgtcaggggcgggacaggcctgttcgagctcaagcagcctctgagatagcagctaccccggcaccatctgcccagctccaaggacccttggtgagggcgtggcccagcctgccttctgcatgagaggaccaggagactggaatccagggcagttccaagtgacagtacagagcacagcagcgaccttgggcctgaaagcagttgggcctctgagctgggcagcttcacctggaaagtgacagagttgctcatccttgcccctccctgtctctggatttttatcacggtttaccaaagtcttctgagtccccctgagatgggtggggcctcacctgtgctgaggagcctctgtggataacct

SEQ ID NO: 564414 - DNA, 537 bp, Homo sapiens
ctgacgagttccctgggaggtacataagagggatcatgttaaggcggtgagtaccctgcccgagtccctaggtaagccaagacagaagtctcactgtccgccattgccatgtgtaccgtagaatcacttgcaggcgctccctacactagaaactcctcgcctaccagcagcccgacttgcgagcttaggtctccatccagcgtagagtgaactctggttgtatgcaaaacccatccctctggcgcaagcccagcccctctcctagggagactgcagaaccacactgaaccacagcgggatgtgtggaccctcttccaggtagatcatgccactaatcgtacccagtttggggagaaaattcacaactttgggctgatccaggagaagctggcacggatggttatgctgcagtatgtaactgagtccatggcttacgtggtgagtgctaacatggaccagggagccacggacttccagatagaggccgccatcagcaaaatctttggctcggaggcagcctggaaggtgacagatgaa

SEQ ID NO: 564415 - DNA, 423 bp, Homo sapiens
atagagttaggtcctagccttatctattagctcttagtaagattacacatgcaagcatccccgattccagtgtagtttcacccatctaagatcaccactgatcaaacagggacaatgcatctaagcacgcagcatgtgcagccccaaaagcgcttagtcctagccacaccccacacggtgacacagacagtgattaagcctttagctaataaacgcaaagtttaactacagctatactaaaccccagggtttggtcaagtttcatgccagccaccgcggtcacacgattaacccaagtcaatagaagccggcgtaaagagtttttagatcaccccctccccaataaagctaaaactcacctgagttgtaaaaactccagttgacacaaaatagactacgaaagtggctttaacatatctgaac

SEQ ID NO: 564416 - DNA, 374 bp, Homo sapiens
gctcctaacctgtgatgagtaaagaatgtcactttctaacaggtccaggagccccaagttatcttgggacctcaagaagagaggaatttacccaactcataggtattggagggtacaaacccattgctgggcttgactttaaaaagtcttttctgatattccttatggaacagaattccatcagagccaattttaaaagcatatgtgaaaaataattattcttgctgtactttatgcaaataatcaggccaagtataagactaaagtttattttgcaaacaatcctattatgatttgtttttaacaaaaatgaagactggagagtttcaaaacttatcacacttgtcattaaattctagttttattagttgtta

SEQ ID NO: 564417 - DNA, 106 bp, Homo sapiens
ggatttgctggtgcagtacaactaggcttaatagggacatgcttataggacgtagttggagcccggagacgtcctactgtactctcactttcagcttttaaacaaa

SEQ ID NO: 564418 - DNA, 853 bp, Homo sapiens
tccccaacttctcctccgacccctaacaaccccctcctaatactaactacctgatcctacccctcacaatcatggcaagccaacgccattatccagtgaacatatcagaaaaaaatctacctctctatactaatctccctacaaatctccttaattataacattcacagccacagaactaatcatatttatatcttcttcgaaaccacattatccccacctgtggtatcatcacccgatgaggcaaccagccagaagcctgaagcaggcacatacttcctattctacaccctagtaggctcccttcccctaatcatcgcactgatttaacatcacaaaccctaggtcataaacattctatactcatctcagtgcccaagaacttatcaaatcctgagccaacaacttaatatgactagcttacacaatagctttctaatagtaaagatacctctttaggactccattatgatccctaaagccatgtcgaagccccatcgtgggtcaatagtattgcgcagtactcttaaaactaggggtaaggtataatagcctcacactcattctcaacccctgaaaaaaataggctacccttcctgtataatcctatgaggcatattataaaagtcatcctggctaggacaaagacctaaattgcactgtatcctcatcagcaattgcctcgagtacagcattcatcaaacctggaagtcacgggaggattcatatggcaaggtagccctagtaatgcacgacccaaacgaggcagggacaactctaggtaatccccaagtggtcagacgacgtaccataaggagctggcagcggatcccggaaagagcttaaggacacac

SEQ ID NO: 564419 - DNA, 741 bp, Homo sapiens
  misc_feature (62)..(62): n is a, c, g, or t
  misc_feature (728)..(728): n is a, c, g, or t
tatagaggaccccgcattgtgttttgcagctgagaccctagggccagtcaaagctgggctcnaacctcactgctcactgttagccatgtgatcccgaacaaatgattgagcctgtctaagcctcagttttcatatccttaaaataaggctagtaacaatgagtgccttgaggaactaatgcccataaaatgctttgtctagggaatactatattcaatgaatggcagatattatcaataaccattctctatttttattgtggtaaaatgtatgacaaaattcaccattttaatcattttcaagtgtacagttcagtggaattaagtccattcacattgtggtacaaccatgaccaccacccatctccagaatgtattcacctttccaaactgatcctttgtgcccattaaacactaactctccattcccctctccctccagtcctgggtattcactattccactctctgcctctatgaatttggctactctgggtacatcttataagtggaatcatacactatttgtcctgttgtgtctggcttttttcacttagcatgatgtcctcaatgatgttgtagcagtatcagaatttcattccttttaaggctgaaaatattccattgtatgcctgtatatcactttgtgtttatccaattcctccatcaacaacatttgggttgttctaccttttggctattgtggctaatgcagctgcaaaaacaatgncggggatcctcta

SEQ ID NO: 564420 - DNA, 460 bp, Homo sapiens
  misc_feature (441)..(441): n is a, c, g, or t
  misc_feature (450)..(450): n is a, c, g, or t
ctcatgggtatgtgatggagaggttaaggtactgcagcattaaaaagacatgaatcattcataaatttactcaaataatcttattctttgcactttaattcctcaagagatgttaaataacccattggctactttttcttttggtgttcataaatggcaaatcgccagttggcttctaacctaaaatttcagaaaaggagccctttaatctttgctaattacagaaccagttgactccaatcttcctgtcacatgggaataacttggagtataagtttttaaaaaagaaaaaaagatgtggttggagggcttatgcttcctctgatctttgacttgtttcctatacattttttgaatatacttttattctttactcttctttcttcctgttttggaagaattattggagtaattttcaatgtatgcatctaccactctggnagatgcagncacacaggca

SEQ ID NO: 564421 - DNA, 931 bp, Homo sapiens
ggactcactgtccagtaacatcccatcctgaagactagtttatcatgagtgaaagtggggagtcagtgtgaggtcctagcatcactgtaaatcttcactctcaagggtgcaaaagccagatagagactcttgaagacggtgaacattttgaaaatagtctgtcatggctgggtggtcaatggatgattgtcagatggaccattttcttcgaggctggacatggttgaagggttcatcacattggttagatatttgcttttgatgatggatatacctgcataatgtactggtaataggaattggaatatatcttagtactttacgtcttccctaatgtgcttcattgggtagggtacatagtgtaaatcggagcaaagctattagtgtacgttgtcggttggcgtgacaaactcgtccatagaagtctgaatggtggtggcaccgtcaagattcaaatctgtcttcctaatgaatattaagagggatacacctatgggtatagccctgactggttctattatttacgcagaagaggttcaatgaggagaaatcgcgctttttgaaccaatcctagttcaagtggaaagtctgttgaccaatgtggttgtccattctcgtcgggggatacctatgtaatattctttgtgggacatggccagttaccaaagcctttccatattttacctcataagagtcttgcatgttgctgggagaatacttgtgaaggggagtctaccaaaactgtggtcattatagcaacaacggaagggcggattcagttacctttggaaggggtaagcaagcaggttggtcattttacttggtatattcaagccaacgtcagggggttaagaccagtcccgggtaagcctctacactgctggtctgcgagtccccctcctggttacgaaacgggacattactttaatcg

SEQ ID NO: 564422 - DNA, 143 bp, Homo sapiens
cctacgggcggtgcgtcgtggcgcctcgtgagccatgcgtccctctgctcgcccccgcttccgttcggctcgctacctctgtgtcgcttgcgcgtgccggccgcactggtcgcgtgtcctgtctcttctcctctgcctctggg

SEQ ID NO: 564423 - DNA, 823 bp, Homo sapiens
  misc_feature (176)..(176): n is a, c, g, or t
  misc_feature (227)..(227): n is a, c, g, or t
  misc_feature (251)..(251): n is a, c, g, or t
  misc_feature (268)..(268): n is a, c, g, or t
  misc_feature (277)..(278): n is a, c, g, or t
  misc_feature (293)..(293): n is a, c, g, or t
  misc_feature (312)..(312): n is a, c, g, or t
  misc_feature (330)..(330): n is a, c, g, or t
  misc_feature (342)..(342): n is a, c, g, or t
  misc_feature (345)..(345): n is a, c, g, or t
  misc_feature (352)..(354): n is a, c, g, or t
  misc_feature (358)..(358): n is a, c, g, or t
  misc_feature (376)..(376): n is a, c, g, or t
  misc_feature (392)..(392): n is a, c, g, or t
  misc_feature (401)..(401): n is a, c, g, or t
aggcattaaagaaaatagcaaatattaaaaaataaaactgttacttttttccttctttcttttcacctttaggttaatatccagtattatgtgttatccctttggataagtatgctttattttacctctgttaaaaattaaaataaatgattctattcatatttgtcagtaattcnaaacttatatgtgtaactgaacgcgcatgtaaggtatggtttatttatttnttttttttttggaggaaatttaantgctaaagaaacaacgnaattgaaannggttcaggaaaaaanagatcaggaagttgtatcnaggtacaaatcttttttnaaataagtattntgntggaggnnngaangaattgctggcaattaanaagaatagagctaatnatgggcttncatcattcatccatgttatttatggagcacctacttatatgggtgctcaacacttgtactgcaagctaccttaattccccaagagtggtgccttactctgtttcctgatatggtctcccaatcagtgtgtgtaaccatacctgttgttttatcagccatgtgtagggtggctgtgtcttgtgcatcatccataaagaagttaagctttgtggctctggataaaatgtgtgttcctgtaacaagacgggtcacgtagggatggaaacacgacaaaccataatttttcacacaattggtcaacttctagacaaagcgctcggttctggtacaccaattttatggattcccttgtccatttgcgggaatgcctgaaaaaatctcaaaaggtatatccggttgggacattggactctaatcggcac

SEQ ID NO: 564424 - DNA, 112 bp, Homo sapiens
ctctacaggatccctgcgctatatcagtacgagagcttggacgcagcccaggccgactgtgctacaatgaggggttttcccttgggtggaccagaccggaaatatccacggg

SEQ ID NO: 564425 - DNA, 138 bp, Homo sapiens
agcggatccgtgatgtattgccaacacattaacaacatataacctcattcacacgagaaaacaccctcatgttcatacacctataccccattctcctctatacctcaagcccgacatcatttaccgggtttttctctt

SEQ ID NO: 564426 - DNA, 521 bp, Homo sapiens
cttagtctccccagtaactgggattacaggggtgcatcaccgtgcctggctaatttttgtattcttagtagagacaggtttcaccatgttggtcaggttggtcttgaactcctgacctcaggtgatctgcctgcctcatcatgcctggcctctccctcatttttgaaaggaagtttttttggggaaatagtttctctcaacattctgactctatttattcttcagttttctggcttcccttaactggttttgtgagacttggcctaattttcatccttctttaatcgggcttttctcttggtctgcttttaagaggctctctttgtatatgtctttctgctgtatgtttttatgaggatttctttttcttttcccagttggaattcattggacttttgaatttgaaggttatttttcaactatttctcttcatatctaatctcctgcttaaccgtactgtggaatttagggacaataaattggattgggtattggattatttcttggtttatgacacttat

SEQ ID NO: 564427 - DNA, 252 bp, Homo sapiens
cgcatgtccgcccatgatgcgaccgtgcacgcgcaccaagcttcgggtggacccggtctacttcatcgctcctaagccactggcatgtctggtgaccctggccagcccacctccccgccgagttcacccctgcggtgcacgcctgcactggaccaagattcctggcttctgtgaccgcaccgtgactgacctacaaataccgttaagcatggagcctcggtggacaatgcttctcgccccttggattacccc

SEQ ID NO: 564428 - DNA, 844 bp, Homo sapiens
ggacagatgaggcgagaggaggaggaggaggaggagaaggctctgggctcctctccaaaaaaaaaaaaaaaaaaaaaaaaaaaaaaagtgggcggcgcgcgccctcgcggccccgcgcgaaaaagcttttatatagaacacacattcgcggtgtggggcgcgcgcgcgggcccacaggagaggaaagaggaaacacgagtgggccaatagcggtgttcccatgaggagagaaccgcgggggcacgagaacacataaggcgcgcgcggggatttctccacacacacaatatataacaacacgcgcgcgcggcgggggggacaacaacgcgcagaggcgtgtgttctcgtgacacacacatatctccacagatatggggaaagatctctgcgaggagagggctcctcccatatatgagcggggggagaatctcttatatatacgacacgcgaggggagagtctctacacaagagaagaagagaagcacctctgcaataatatattttccaaaactatatatacgacgacacgcgccgaattgtgtggttggtgtttagcacccaccaggactcgagccagcagcagacgccagacaccccaggcgcccacgcacacaccaccctcggtcctcgaacccacaccacaccatccacagagcacaccaccgcaacaaagagggcaatcacccacacagacggaccccaccgaccgcacaagcacaacccccagcacaacgcacacaagaggaccaagaccactgcacacaaacaacagcatcaaaacacacacgctggccgcgaacacaatcagaacgtagagcacctaaaacaacgccaacaaaatgg

SEQ ID NO: 564429 - DNA, 1184 bp, Homo sapiens
  misc_feature (1)..(1): n is a, c, g, or t
  misc_feature (5)..(5): n is a, c, g, or t
  misc_feature (503)..(503): n is a, c, g, or t
nagtnaagtacgacagttacgcgtcagtagatgacgcatggatttggtccttcttgtttccgtgcagtatatgaggtcgaactcttttcgtcggcatgacaggagctgcttctccactgcgatgttcctcgtattgtggtttctctttctctccggcccgacctgttttttttctccgttggcccctctgttggtcgccccgtgtctcgtgttcttagcgctgacgcctgctgattcgccctctgcctcgcatgttttcccccgccctgtgtgcccgttgaaacctaggccccctcgtggtctctggccctcgagtttgggacatccctggtgaccacgggctgtttgtcccacacctccgccatttttttgtccaaccgacactcccagagtcccgggtgacctggccttcgatggcacctttcgccaatgggacctccatgccggttaagagccgttcaccgtattgcccggcccccatgccttaatcatcctggcacacnctggaggggccgcctggatggagaggatcatggccccccagctttacgtcctgttatgagaaaggccggtaccccttccccgtgagcatttccgtggcccaaatccgtgtctatgggaccctttgagactgggcccctgcccaacggggtattctcgccttcaggactctgccttcaggaacccgggtctgtagagggttcttctggagacccctgaaagaccggtccatcttcctttagactccaacccttggccaaatcacccttccctcttaaccacgggagaatcaccttcctcttaggaccttaaagctaggcgtcctttccccccaaaaatgtcctcgccctcattctgagaatactgtctttcccaaatggcttaagatgtggccccccccaccctctcttgccctcccgggcaccattgattggtccctgtcttgggccaggttttgatgagactgttgaaattgaatccaatgtgaactccagggaactggggaaggctgagcctcctctttggtgttgccggtaagataaccgaccgggctggtgaaagtcccccagatgcgccaggatatttggtttccagagtaaggactaggtgccacccacccatgactgactatccatccaaatgtttgtaacttaaaattttttatgaaggataatgaatattta

SEQ ID NO: 564430 - DNA, 1694 bp, Homo sapiens
  misc_feature (190)..(190): n is a, c, g, or t
ccacgcgtccggcaagactccatctcaaaaaaaaaaaaaaaaaaaatttccacaacattaggtttaaaagtagagggctaaagttaacaccccttcttaagccatttgtgtttctcagttactttcctaggagtgtggttgtgcatttgtgggaaatgtggaattgtgttaaaacctgtgagtgccttanggagccgttattgcgtgacctatttcaccgtggcggtgggttggggttggaagaggaaggaggaggttatgccagggaagaaagggttctctggtgccccctgtgagtttagaattttagtccagaatgtggttctaacccattgtgttcctattgttattgccatttttaaattgtggtgttataaatattggggtgttatttacaagcggattaacacaaggttctttaatgtggcctcacaagtttattgtttacaaaatatacgaatgtgttagtgtggaatctcaggtctcccctttttggtgaaatgtggttcccatattgggggtaaagatttttataggcgaaaaggccgctgtgtctcttctccgtgggaaggttggacccctttatattatagtctccccaccttttcttgtgggaagcctataagaaaccgtctcgctatatatactttataggctccaacgtggggggggaatgtgggcgtgcacacacgcacggggacgaacacgcacggacacgcgggccgacaagggggacacgggggcccctctatctgggcgcatagatatatttcttccccattgtttccttacgaaacaagacaagtggcggtctctcaagcgacgtggcatttataccccacacacggggtccctcaattatgtgaacgccaatttttttttaacgctcaacaaagtgttggccccctgtggtggctccactaattggtgtgggggccaccagacaacggtttttttctttatcacttcttctcggggcaacaacacatttctttataaacccgtcgtttttcattggcacactatacttctctgggacaggcggggttggacagacaaactgtgtgtgtgcgttgtatatttaaacaacaacctttatacaagccaactaataacgtgtgggtgcccaagaggcgcgcacgagaggagggcacacaaattggagccccggtgtttgtaataccccccacacaacacatttttagtgtggagaaagggcgctgtacaaggcagaggaggcgagacatacacccaaaggtgtttctgtaagagaataatcttctcgcgaaaccaactctccggttgtgttcacacacatggtgttgggtagtaaacccccccatcttcttgtttaacaacaaatacaacacattggggggagggcagtcagtagaaagtagctcccctttgatggagccgccacccttttatgagggctcggcccagcccagtattgatgttaacacacaaagtgagacccgcatggatcgagggggcttagtgaattcatatgaaacataggatcgccgcgtgagtactcacaactgtgcgtgatgaagacgagatatcaactgccatcacgtgtaataagaagataaataatatgtagtaacttattgagagaacaacacaaacacaatcaggcattaatacagatagtaactgtatgcactcatttccgcatctcagatatg

SEQ ID NO: 564431 - DNA, 833 bp, Homo sapiens
  misc_feature (31)..(31): n is a, c, g, or t
  misc_feature (75)..(75): n is a, c, g, or t
  misc_feature (88)..(88): n is a, c, g, or t
  misc_feature (90)..(93): n is a, c, g, or t
  misc_feature (99)..(99): n is a, c, g, or t
  misc_feature (111)..(111): n is a, c, g, or t
  misc_feature (122)..(122): n is a, c, g, or t
  misc_feature (124)..(124): n is a, c, g, or t
  misc_feature (148)..(148): n is a, c, g, or t
  misc_feature (153)..(153): n is a, c, g, or t
  misc_feature (156)..(156): n is a, c, g, or t
  misc_feature (172)..(173): n is a, c, g, or t
  misc_feature (175)..(175): n is a, c, g, or t
  misc_feature (192)..(192): n is a, c, g, or t
  misc_feature (202)..(202): n is a, c, g, or t
  misc_feature (232)..(232): n is a, c, g, or t
  misc_feature (240)..(240): n is a, c, g, or t
  misc_feature (248)..(250): n is a, c, g, or t
  misc_feature (252)..(253): n is a, c, g, or t
  misc_feature (255)..(255): n is a, c, g, or t
  misc_feature (282)..(284): n is a, c, g, or t
  misc_feature (287)..(287): n is a, c, g, or t
  misc_feature (298)..(298): n is a, c, g, or t
  misc_feature (397)..(397): n is a, c, g, or t
  misc_feature (471)..(471): n is a, c, g, or t
  misc_feature (503)..(503): n is a, c, g, or t
  misc_feature (521)..(521): n is a, c, g, or t
  misc_feature (602)..(602): n is a, c, g, or t
  misc_feature (696)..(696): n is a, c, g, or t
  misc_feature (735)..(735): n is a, c, g, or t
  misc_feature (741)..(741): n is a, c, g, or t
  misc_feature (755)..(755): n is a, c, g, or t
  misc_feature (831)..(831): n is a, c, g, or t
ttcaaacaagcaacgacaacaaaatagaagnaattaaactattggcatatttaacagcattgaacagaattctgnatcctgtaaaaancnnnncttatntccccatgtggntatatgccaancnctatacacacatatccccctaggngggcnaanccctattctggcaatnntntcctctacccaattctncttggctatntctgtggatagtgtttggtgtgtgtttttntccatttnccataacnnncnncncctggccaattctaccaaagcgttttnnnggngggggtgtggngggggggggggggggggaagacatttatctcagtttttcacctgagcttttgtacaaggcaggcaaattgcctcctgacctcaggcagatgtttaagtnttcaccaactaagaaagctctgttattctggcctgggtgcttgctccagactcaggaacatctggtcaagacangcatcactgggctggggaattgtgtgtctccngcatcatctccgactctnttgtagttccttccttccctccctcactcttacatgcagacacagacagacacagtttggttgggacatgcagtggcagcncctggtgtataacatctttcacacaccttgagtttatctgcttgctgcctttgactgaacctgaaatggttggcctttcagcaagtaccttgtntgtttcctttatgtattggaggagaagggcaaagggaanagggtntgggaaatggtgangtggggaagaagcaagaagggtgggaattacaatcctcaaatggagtagtttttcatttttgttttcctaaaaaanag

SEQ ID NO: 564432 - DNA, 602 bp, Homo sapiens
  misc_feature (44)..(44): n is a, c, g, or t
  misc_feature (224)..(224): n is a, c, g, or t
  misc_feature (234)..(234): n is a, c, g, or t
  misc_feature (239)..(239): n is a, c, g, or t
  misc_feature (264)..(264): n is a, c, g, or t
  misc_feature (269)..(269): n is a, c, g, or t
  misc_feature (274)..(274): n is a, c, g, or t
  misc_feature (313)..(313): n is a, c, g, or t
  misc_feature (326)..(326): n is a, c, g, or t
  misc_feature (473)..(473): n is a, c, g, or t
aggataagctctttaaagcaaaggctttattttatctctcatcntttgttctcctagcgcaatgtaaaaaagaatagtaatatcagaccaggagggaggaatggcttgctggggagcccatccaggacactgggagcacatagagattcacccatgtttgttgaacttagagtcattctcatgcttttctttataattcacccatatatgcagagaagatatgntcttgttacnttgtntccacatagcccccaaatagtaagntcttnctagntaatcctagatgaaatgttaaagatgctatatgatacanctgtggccatgantgaggaaaggagctcacgcccaaagattgggctgctctcccggaggccaaacccaaaaaggtttggcaaagtcaggctcagggagattttgccctgctgcagacctcggtgtggacacccgctgcataaagctctccttgaaaacanaggggtctcaagacattttgcccacctattagcttttctttatttttttaactttttggggggaaaagtatttttgaaaagtttgtcttgcaatgtatttataaatagtaaataaagtttttcccctta

SEQ ID NO: 564433 - DNA, 629 bp, Homo sapiens
atctattctagactccatataactatagtgtcacgagctcgatgttgtatcagtacatcccgatggtgcagccgctatgtaaaggttcgttacgtacaacgattaaagtcctacgtgatctagagttcagaccggagtaatacagcgtcggtttctatctactgcaaattcctccctgtacgaaaggacaagagaaataaggctacttcacaaagcgccgttcgccccgtaaatgatatcatctcaacttagcattatacccacacccacccaagaacagggtatgttaagatggcagagcccggtaaatcgcataaaaacttaatcaaaatcaaagacaaacaaaatgcaccacaagaaaaaataaccaacaacgaagggcggcgcagcataaccagtaattcacccacagcagcgccctacagctaccaggcaacaaccgacggatatgtcaacaagacgcccggacccgaagaatgagacaccgcaaataccacagccgcaagggacgaccgcatacaacaacgagcggtacaaggagaacaccagcaccacctactacctctcgacgcacccccatctcggcgagccacatggcgacccaccacaaaaattactccgagcaccaa

SEQ ID NO: 564434 - DNA, 249 bp, Homo sapiens
acatcgatacgactttttttttcctccttcttcttcttctccttagttctttcttctcctcctcctttcttcttcttagttcttctccttcttccttctccttcttcttccttcgtcaccgtcttctccttcttcttactttcttcttccttctccttccttcgtcttcttctccttctcctcctccttccttctccttcgttcttcttctccctcttttctttttcttccttcttcttcttcctcctc

SEQ ID NO: 564435 - DNA, 620 bp, Homo sapiens
  misc_feature (100)..(100): n is a, c, g, or t
  misc_feature (162)..(162): n is a, c, g, or t
  misc_feature (197)..(197): n is a, c, g, or t
  misc_feature (254)..(254): n is a, c, g, or t
  misc_feature (278)..(278): n is a, c, g, or t
  misc_feature (494)..(494): n is a, c, g, or t
  misc_feature (523)..(523): n is a, c, g, or t
  misc_feature (525)..(525): n is a, c, g, or t
  misc_feature (533)..(533): n is a, c, g, or t
  misc_feature (571)..(571): n is a, c, g, or t
  misc_feature (595)..(595): n is a, c, g, or t
  misc_feature (605)..(605): n is a, c, g, or t
  misc_feature (612)..(612): n is a, c, g, or t
gactgcaaagaaggagtaggaacaaagaaaagcagagagagagagatgaagagagggaggaattacgtggtgaaggatgaagtgaacagcggtgcttggnatataagccagccctcaaacaagggtaagtgttactatccttattattattattaaggctantgtgaacactaaatgatataaattatgtaaattanctgataaggttcctggcactcagtaagtgttagttcccttccttcctcccttcaggngaggactagggagtaagtactttnagtaagttagttctcctgggttgaagggagggaaggaaaagctccaaggaggagagtgcctgtactgtgggtggtgtccttcatcagtacttcctgggagatatgcggtgtgacagctcccaccaactctctctgcctccctttgtacccctacgtcaggactccatcagcaaaggcctggatggagcagaaagcaatgatgatgggaaagccagnccctctctacgggttgaggttcacttggncncatagtgngaacactattctacttccctctcagtatggtggagtanggccctggagggcctgggctagcnaggtgcaatnctagctnggctctgt

SEQ ID NO: 564436 - DNA, 406 bp, Homo sapiens
tttggcaaaacaaccggagaaagcactttgattgataaaggggcccaggccagatcctgggtcacaccaacatgttgaatactgcccagaggaaaatgctcaaccagagaagtatgaacaaacacgataaggcagggcatgtaatcctcaacaaaaaatgcatttcatggaaggagtggtcaaccatttttttttttacagaaagggcctgcttctgttgtgcacgctggattgcagatggcgtgatcatggttcactgcagcctcaccctaccggactcaagccatcctcccacctcagattactttgtagctgggaccacaagcatgagtcacaacgcccggctaatttttctattttttgtagatagggtctcactatgttgcccaggcaggctggtcctgaa

SEQ ID NO: 564437 - DNA, 952 bp, Homo sapiens
  misc_feature (61)..(61): n is a, c, g, or t
  misc_feature (65)..(65): n is a, c, g, or t
  misc_feature (67)..(67): n is a, c, g, or t
  misc_feature (72)..(73): n is a, c, g, or t
  misc_feature (110)..(110): n is a, c, g, or t
  misc_feature (576)..(576): n is a, c, g, or t
  misc_feature (811)..(811): n is a, c, g, or t
  misc_feature (828)..(828): n is a, c, g, or t
  misc_feature (847)..(847): n is a, c, g, or t
  misc_feature (859)..(859): n is a, c, g, or t
  misc_feature (887)..(887): n is a, c, g, or t
  misc_feature (891)..(891): n is a, c, g, or t
  misc_feature (899)..(899): n is a, c, g, or t
  misc_feature (908)..(908): n is a, c, g, or t
  misc_feature (918)..(918): n is a, c, g, or t
  misc_feature (928)..(928): n is a, c, g, or t
  misc_feature (940)..(940): n is a, c, g, or t
  misc_feature (945)..(945): n is a, c, g, or t
gccagagcagctctttggaaactagggcagcagggttaggaggccggaggccctggggtcnccgncnagccnnacaggcaccgttttcagatgtccacttctcattgggnacatcaatcttttaactttgggggtcacagttttagccacctttcggggggtgactggagcagtaggaggtgtggggtcattttatgaatataataaaatggagctgactgtggacgaggactaagtgtgggggagaggggacgatacagggtgtgtgtctgggagtgcctgggggacagggaccccccggtggtcctatggcaggatgagaagggagggacttggctcccccagagcccggtggaagctactgttctctccagtgtctcgagcgtagccaaaataaggttgggaggctcccggcctgtctgctgtggtctgagctggctgcaagcccaggtgggggagcgagtctgggaagattggctttgactctctgttgccagaggagatgccatcccagcacggccccactgtagtccaggctcgtggtggcagcgggggcaaggggaggggcaaggctgnccccaacccacgcaccaagtcacgccaagtctcagcaggtaaaagcacgtgagcctagggcgagcggagggagtcctggtggccccgcaggtcaggagggaaagcagggctcagagggcatcgtggccccagggcagggtcctacctgggggtcaggagcaccttggtcttgatgattgattgattgatagaatggagctgggtctgagcctcccaggcttgagctccgggagtncttgtgcggtgagctgngcagctcctgggtaggtcnggcaccagcggncctgtgtggcgagtcctcagaggagtgntganaaggtccngtgtagtcntaggtcacantgctggcggntcagccggggtnggcancagaccg

SEQ ID NO: 564438 - DNA, 224 bp, Homo sapiens
aatgtgtcattgcactccagcctgggcacagagcacgactcagtctcaagagaaaaaaaaaaaaggttaaaaaatttaaaatgcaaaataagaaagaatcgaacggggtgctggtcttacttaaaacactggcagagctctcgtgtgtgcctagcatgtaagtcagatgcctctggtcgtttggagacagagtctcctaccgtcccccaggctggagtgcaggg

SEQ ID NO: 564439 - DNA, 428 bp, Homo sapiens
ctccataatgtgtgcccaggctggagtacagtggcaagatctcggctcatagcaacaaccacttcctgggttcaagcgattctcttgcctcagcctcccgagtagctgcgattacaggcacgtggcaccatgcccggctaattttttgtatttttagtagagacggggtttcaccatgttagccaggatggtctccatctcctgacctcatgatccacccgcctcggcctcccaaagtgctgggattataggcatgagtcactgcgccccacctttgttttttttttttttttttggaaacggattctcactccgcaacccaggcgggagtgcaggggcgcactctcagcccagggcaacctcggcctccgggcctccaagagatcctccaatctcagcccccaggtcgcggggattaggggcacaca

SEQ ID NO: 564440 - DNA, 350 bp, Homo sapiens
gagagagagtgaagattagaatagtagagttccttccattatgttccctgaaaagggcaagagggagaggataacccagtatagatagagatctgtgttccctttacttaatctccatcttctgtttctatgtaaatgagaaatgctggggaaggaagaaatctatatgtaactgaagtggactcactgtttcctggcaggtggcagtgccaagccacctgcctccagcctcttgctgtttttagcaatgggatttattgctgttctcatcctaagtccatagcctgggagaacccctgaggcatgagtgggagctgctctgtcactgctgtcactttccactgaggtcc

SEQ ID NO: 564441 - DNA, 900 bp, Homo sapiens
cggaaaagttagccttccatgaccgaagttgacgagtaatgatgacacattatgatctagattcatggtatacaaataacgagaattatcctgaaagaacggatttcgtgatgcttctgatgctttagataagataaggctaatatcactgactgatgagaatgctcttatttctggaaatgaggaactaacgagtcaaaattcaatttgttgataatggtagatagaagctggtgtatgttggcagataccgggtgtaggaatgacctataggaaagagttggttgacaagacctgtggtaacccatagtccataagtctgggtggacatagcagagatttttaaatcaaatatcgacttgcaagctacaggaagatggccagtcaacttctgtaattgattaggtcgagtattggtgtcgggattctatccacgctcttccttgtggcagatcaaggttagttgtcactgttcataaattaggcaacagcgtataccacatcacatctgggattctgcactccaatgaattttctgtaattgctgacccaagaggaaacactctaggacggggaacgacaattacccttgtcttaaaagaagaagcatctgattaccttgaattggatacaattaaaaatctcgtcaaaaaatattcacagttcataaactttcctatttatatatggagcagcaagactgaaacctgttgaggagcccattggaggaagaagaagcaggcaaagaagagaaagaagaatctggatgatgaagctgcagttaaaggaaagaaagaagaggaaaaggaaacaaagaactaaagagttgaaaaaatctgtctgggactgggaattactgaatgatatcaacaatttgggagagaccatcaaagaaggtta

SEQ ID NO: 564442 - DNA, 135 bp, Homo sapiens
tttcgcgagcgcgggccgagcatgagtgtggtggcggcggcgagatcttggctcgggttgaggagttggtatttgtgtggaaggaggcggggcgcaggaggaagggggaagcggagcgccggccctgtcgggctc

SEQ ID NO: 564443 - DNA, 289 bp, Homo sapiens
  misc_feature (26)..(26): n is a, c, g, or t
  misc_feature (45)..(45): n is a, c, g, or t
  misc_feature (70)..(70): n is a, c, g, or t
  misc_feature (102)..(102): n is a, c, g, or t
  misc_feature (225)..(225): n is a, c, g, or t
  misc_feature (264)..(264): n is a, c, g, or t
aattcgcggccgcgtacgactacggnctgcgagaagacgacaganggggggagagttcggttgctgcggnggggcctgcacgttgactgtgggaaactcggnaacaagctcacatcttcctgtgggccttctagcaacagggatgagtctgcagtggactgcagttgccaccttcctctatgcgaggtctttgttgtgttgcttctctgcattcccttcatttcncctgatggcaagaagattttgcaagtcccggctggtggnagttgttagtgttcctatggcccct

SEQ ID NO: 564444 - DNA, 87 bp, Homo sapiens
gcctgggggaaccccccccaaggccggggagggttggtttttttatttggtttttttaattttgaaaattaaatgtttaccctttta

SEQ ID NO: 564445 - DNA, 123 bp, Homo sapiens
ggatctgacttatgacaacatagaccctttcttcttagtcttcatcctgaaaatggtttacaaaaaatgtaaagattagccagcatggtggcacacacctgtggtccagctgctcaggaggca

SEQ ID NO: 564446 - DNA, 190 bp, Homo sapiens
acgctctctctgtgggggtggcagactgggagctggccggcaggggtgcagtgtggtgagacaggacggccgaggggaccggtggaggcggtggttcctttggggggaaaggcactagcagtcgggtcgggccccggggtgctgtccttggctccgcgtccagtgcccgacacatttagaggcaccacgg

SEQ ID NO: 564447 - DNA, 381 bp, Homo sapiens
  misc_feature (15)..(15): n is a, c, g, or t
  misc_feature (79)..(79): n is a, c, g, or t
  misc_feature (95)..(96): n is a, c, g, or t
tgctaaccccagttngatgtaggacctgtctgtggagaggacacagaggggtactggtcagcggtggggggaggtgcangcccagtgtaggctannggacgcgtccgcgggctacacaggcggcctacgatgagcgttcagctaggccataatcgctatcactttgtggcccgaggccatatcacgagcacccgtgcccacggtgccttgtacagagaggagctgacaggagggatgggtgggtgtaaatacagggtctagccatgcacatggggacaggcagctttgccttctcaccatgggcagttagatgagcaactggcccaagtcatttcccaccacactttggaaggtcattctatatagcacaataccccaaac

SEQ ID NO: 564448 - DNA, 1053 bp, Homo sapiens
tacctgtaccctttagtaaggacgagcttgtgccctccaccgaccccttaccaatggcgtgatgctgtgtggagtcgttggagtgggccatgacaccccttggcgggcaaggagacaaacagccacactgtgctgccggggaagagaagaagaaggaacgggccagacacacaggtgctgtcgtgcggatgcggaaggattccgttcctgcagggggcggagggatattgacagcacggtaatttccggaaaagtcctgaacctcagtcgaaaagccttgcaagaaacaataacaaagtgggaggaggaagcgattctggggtttctagtgttgaacggatcttgtccgccgaagatgcgcttcggcctctgtcaggggacttgacacgggcttagtgggcttcagcacagcttactccaccggttccccacggggaccccccccccaaggcagaacgctgcaatgagaaacgaacagataggaccaggaggcgaaaaaacgccgagcgagaaaacacggagcaaacacggaaaagaaaaaggaccgagatataagagcagcagacgggaaacgagagaacacagaaacaacggggcaccagattagcacagcgacagaaatcaccgggcaaaagggaacgaacacacacacacgggacacaacgtgacaacaacacaggccgaaccaaaaggaacagggaaaacacacaaataggccatgaaacaaataacaacagcatacacgggagcaacaaacccaagacgccacaggacgagagaaattgaacccaagcatgccacagataacacaaagtgacgaaatgggcgaaaaaggaaccagcggcaaccccaagcatcggggccaactagaacgagaatcgtagcagagaaagcacccagtggcaacaagcaacacaccaggacatgaagacaagaacaaacatgtagccacaaggcaggtaggcacaggacaaagaaaacaacgacaaaagaggaggagagagaaaggcgagaacgaagagacccaggagagaacgagaagaacacaagcgc

SEQ ID NO: 564449 - DNA, 359 bp, Homo sapiens
ctctacacggattactaaaaatacaaaaattacccgggtgtggttggaaggtgctgtaatcccagctacttgggaggctgaggcaggagaatatcttgagacctggaggcggaggttgtagtgagccaagattacaccaatgcactccaggctgcgtgacagagcaagactccatctcaaagaacaaaaaaagaaacattaagagaataaaaaagtcacactacagactgggagaaaatatctggcacacaaagaacttttatctagaatatataaagaacttctataactccatttaaaaaaataatccagggactttttccctcataagtcccagattgcggtgtttggggtaccga

SEQ ID NO: 564450 - DNA, 1189 bp, Homo sapiens
  misc_feature (198)..(198): n is a, c, g, or t
  misc_feature (311)..(311): n is a, c, g, or t
gatcttgcccggcgcgagctgcgctgtctctgtgctagcctcgctcttctccctcttcccttcgtccctacttccgactccgggcgttatcagagagtgcgagtccatctgatcgcgtacgtgcatacgagcgatgccgacacatagagcccgggcgaggtagagtccacgtatccaatctcagggctctcacgcgtnagccgctgctttatgtacgaagcgccgggcaacatgcgccgagcgcagaatgcatgtagaaaggacttgctagctcgctcgttctctccacggatcgacacccatgacgacangattgggatctcattgtcgcctgcgtacaacaccatgaaccttttgtgtgcccacgtgaactccttgtgaggcctacgtccggggtatggagcgcgcacgtctccctgcgctggcctcgcgcccatgcgggcccagatgacatcggggaccgggtgattgcggaccacagggaagttgcccgacccacccgggttcccttggtgggcctcatcgaccaatgtctcccccttgatggcatcaggtaccatcgcctcatgcgctgagaacgcgaccatacctgacataacgttcactctgcacatggtgcgcatctcgaggtgtaacctcgaacatcgatctactcagatgctgcgcgagaatccccgcgatctgagaggagtcctttggattcgtctgccctcccctcgtgcggaacgcccccgctcaggtccaaacccatgcgccatggggacccaagcactccaaaatggcgatagttgggggtcaatgtcgttgaggcacattgggccacaagccccaacatggccctatgtacatcggcttgccatggactgccatgttggcacgcgttctcggttcgcacccacgcgggtggcattgccactagcggtgggttgggtgagccctgtttggcgccgccaacctttgcgtgagaggccagagagaacccacttggcctagaaccaacactgtcgcgcgaacgagtgaaagtgaatgcccaaccccggatgaacccagaaaactttcttaccccggttcgtttgagcatccttgcggcaggccccggaacaaattgggtaccgccccttgccaataaatcggtggtcctccctttggctcgggtggaattaacgggagccgagtagggggaaattcc

SEQ ID NO: 564451 - DNA, 250 bp, Homo sapiens
ctttccttgacctatcgcggcgcccgcggctctctctcggactcgcggcgtcgctgtcgaacctcacgaactgtgtgttgtccacgtagcccactgcgatgaagcggggctccccgtggccgggccgggacatggcggtgtagaaatacctcatggagtgggagccggcccaggtctcggtcagggccagggccccccagagcagcaggaggagggttgggggtgccgtgacccgcagggtacggagctc

SEQ ID NO: 564452 - DNA, 982 bp, Homo sapiens
tctgctgcagaacattaatggagttgctttattcgggctcgtgtgttgtgatgctgtaatcagaacatgcttccctgttattccagcttgaaatgcaaattcaccatcgggctcatttctaatcgtcgcagtgtttcctgctttgggccagcaaagaagcctgatgactgcatagggtttgcttaggcaatacttagacgcaccgtgtttgtgactactacagcaatcaccatagctacgagatgagattttactgtcttatttaaattttatgaatctgtctgttttttacactaattttcccaataaagccaacttggtctacaagacgccacatcccctattatagaagagctaataaatttccatgatcacacactaataattgttttcctaattagctccttagtcctctatatcatctcgctaatattaacaacaaaactaacacatacaagcacaatagatgcacaagaagttgaaaccatttgaactattctaccagctgtaatccttatcataattgctctcccctctctacgcattctatatataatagacgaaatcaacaaccccgtattaaccgttaaaaccatagggcaccaatgatactgaagctacgaatatactgactatgaagacctatgctttgattcatatataatcccaacaaacgacctaaaacctggtgaactacgactgctagaagttgataaccgagtcgttctgccaatagaacttccaatccgtatattaatttcatctgaagacgtcctccactcatgagcagtcccctccctaggacttaaaactgatgccatcccaggccgactaaatcaagcaacagtaacatcaaaccgaccagggttattctatggccaatgctctgaaatttgtggatctaaccatagctttatgcccattgtcctagaaatggttccactaaaatatttcgaaaactgatctgcttcaataatttaat

SEQ ID NO: 564453 - DNA, 154 bp, Homo sapiens
attgaaaatactgaatcctgggtgacatggatacatagccaagtttgagaagtgctgttctgtagacccggtcctctcgatgcatttccctggagtcctcacaggtgcactgtagggcacccgttgtgtgtgcacacaattctgcaagtgctgg

SEQ ID NO: 564454 - DNA, 172 bp, Homo sapiens
cctagaagcgtgtcaaaaatacttttctgggaaaatggacgcggtaccctcgtggcccggtacggtttcggactcacctggaagccgtcgaccaatcccccgacgccgacgtgctggacccggtgccccaacgccggtccacacatccgcctcaggacgaggtcgatccgcg

SEQ ID NO: 564455 - DNA, 333 bp, Homo sapiens
aataaggatgtttcagtcatgtgctaggaactttgttgtcacatatgtataaatcaagggtgtccctggacttcggcctccctggacttttggcttccccacattaaaagaattgtcttgggccacacacaaaatacacgaacaataatgatagctgatgagctaaaaaaaaaaaaaagaaaaaagaaaattgccaaaaaaatctcatgtttaagaaagtttacaaatttgtgttgggccacattcaaagtcgtcctgggccgcatgtggcctgtgggctgtgggttggacaagtttgatataaactgcccatctttggagtctacaaacatg

SEQ ID NO: 564456 - DNA, 1000 bp, Homo sapiens
actcatcaggaagcgcggggtcggtaggagacaggacggcttaatgccagaccggtgagttggacggtgtccgatctcgagattgggatccagcaaggccttctcagccagtcaacacgcacagacaccattccagcagagatttgatgcccggcaagaagattggcctctcagtatgcccggctcaaactgggagtcaaggatgcccgggcagaagcttcatgccgaacaggttgccggatttcaaactcaaagggaatgctgcaggatgccagagagatgttgaactcatcgcacagcagcagaccacgagtgccccagaagacacccgacaggtatgctgatgcccgggagaagatcagcttgacacgaggagttcccctgctgccttcataaaacgcacccattgggacagtgacccactgactctgaagctcaccaaaaccatccaggttccacagacagaaagccatggcaacacttcatacccatactgccggaatgagactcaatgtcgtcaataaccaccaggccaaaccagaatccatcatgacctggatgacgatgacgatggtcatagcttccgttccctactaaacagatgacagatcagaagcgccaagagagagcatatacgtatcacaccgcagtgggaatggcgcatataaccagatacccaagcataaaccagatgtcccaaggccgatccatattcacacacagtggatcagacattatgaaataccaggatccatgccactcccattaacatcctaatacggcaagcaacgaagtactttgaaccgacagcatggtttctgggcataacgtggaagaccttactggaaagatgcaccacccaaaaagaagctttagcacatactcgcctacacctcggattcctacaagccgtgatggtaccggacccacagaaaggaattggacaacatacactgaccgtctagaaatcatctgacgagagcacaattgtcaaagtata

SEQ ID NO: 564457 - DNA, 300 bp, Homo sapiens
tttttttccccccccttttggggattttccccccgggccaaaaatttggccggggcccccaatttttttgttcaaacagggggggccccaattgggttttttggggcccccccccttttttttttccttttagggttttttggggggggggggggttttcccccgggaaaaggggggggggaaaaatggggcctaattttcttaggcccggggccccgggggtttggcccccagggggccccttgggggttgcccccccccccttttggactttttaattaaacccttttggccccccca

SEQ ID NO: 564458 - DNA, 830 bp, Homo sapiens
gctctggcctgcgtcaggcgcctgcgtgctgggtgagcgcacgcgaggcggcgaggcggcagcgtgtttctaggtcgtggcgtcgggcttccggagctttggcggcagctaggggaggatggcggagtcttcggataagctctatcgagtcgagtacagccaagagctgggcgcgcctcttgcaagaaatgcagcgagagcatccccaaaggacatcgctccggaatggccatcatggtgcagtcgcccatgttgtgatggaaaagtcccacactggtaccacttctccttgcttctggaaggtgggccactccatccggacaccctgaccgttgcaggtggattggagttctcatgagacttacggatgggatgacacagccagaaagtcaagaagaaagacgggaaagaatggaggagtgacaggacaaaggccaggatggcaattggatagcaaggcagcagaagactctgggtgactttgcacgcagcagtatgccaagtccaacagaaagtacgtgcaagggggtgtactggacgacacagatacgaaacagggccaggtgccgccgtggacccaaaggaacgcatggttggaaacacggagaaaagaccacaggcatagggccattgatgggacacagctgggataacacaatccaagggcatggcataggtcaaaaggaaacaaggagaaggagctaggcgttacacggacccgaagataacacgcggcgagatccagtcaaagggcaacaaggctccctggctacagagggacaaacacagcccctgaagaaacgagaaccacaggagcacagagtgaagca

SEQ ID NO: 564459 - DNA, 603 bp, Homo sapiens
atagtcccagcactttgggattccagcactcaggaggctgaggcaccggctggatcactggaggtcacgagttcaagaccagcctgggcaacatggcgaaacctcagctctactaaatgatacaaaagttaggtgggcatgacaggtgcctgtaatcccagctagttgggaagctgaggtagggagaatgactgggaagttgggaggcagaggttgtaagtgagctgaaatggaggcatggactcgaggctgggtgacgaagagcaagatttgtcaagaaatataggatgaactaaatgaagggagagagaacgatcgaaagaaagaaagaaagaaagaaagaaagaaagaaagaacccgaacagaaacggaagcaatatgcgtgctcaaaggagaaaagttccatctgaggttggggaaagtggctcacatctataatcccagcacttgggaggcggaggtgggaggatcacttgacccaggaatttgagaccagcctgggcaacttagcaaaacccagtctctacaagacagtttacaaccaacattatctgggtgtggtggcacatgctatagtccctaatactcaggagctgagggtgg

SEQ ID NO: 564460 - DNA, 203 bp, Homo sapiens
cccgggagtgtgttttagtggatgctgggatccttcgcttgcccttgagtgggaagttgggctccaatgtagatgacgaaggtgcggacaccgccattggtccaacaaaggctgttcttttccacctggcccaggaccctgtgggccagcggcgcctccccgtggcatgaaccccgcagggtactaaaccctgaaccacctga

SEQ ID NO: 564461 - DNA, 338 bp, Homo sapiens
cctttttccccggcaaagaggtgtggggggccttaaaggggccccccaaacaggcattttcccaggggggttttaagtttttgggcccccttctcggttttttgggacccctgggcccgggggttccaggggttttttaaattgttaaaaaaccccccccccccccccggggttccccccttccccccccaaacgggccccccgggtttaaaaaaaaaaaggggggtttttcccccggggggttcccccccggttttcggccccccaccccttttaccccttttttttttttttttccccaaaaagttttttttttaaaaaaaattttgggcccccca

SEQ ID NO: 564462 - DNA, 911 bp, Homo sapiens
agaacaatgtgctatgtgaatgagtaacgtcaagcctgtcgctgactagtttggagtgttccccttccactgagggcagtcgatagagctgtattaagccacttaaacatgtcacgttttgacaaaggcaagcacttgtgggttgtggtcttgtctttgcattcagtcttacgaatacttttgccctttgattaaagactccagttaaaacaaattttaatgaagaaagtggaaaacaaggaagtcgaagcaaggagactatgtaacatgtaggaagtaggaagtaaattatagtgatgtaatcttgaattgtaactgttcttgagtttaagtaactctgtagggtaattagtaacatgtgttaagtattttcatagagtatttcaaacttggagcttcatggcagaaggcaaaccctatcaacataggaattgtcccttaagacaagagaattaagaactcctcaatccagcgtatgttcatagttgaacaaaagtagagcctgacgggatctttactagttataaggatacagaactctttcaaaacctttgtgaaattaagcctctcactataccagtataattgagttcttcagtggggcagtcattatccaggtaatccaagatattttaacacatctgtcacgtagcaacttggactgtacctgtccccaatccatgaaccaagaccattgaattcttggtttgcaggaaacaaatgattacctaaatcttcgactacagtcaggcaaagggactcatttctatctctcctccatgggacgacaaattggataagaagtagaaactgtgaggacaaaatttttgcctaacaattcgtctagtaacatcacgtccttccctgacactgtccaattaagcaatatggcctttcaatcaaggttccca

SEQ ID NO: 564463 - DNA, 191 bp, Homo sapiens
agaaaactctagcatgatagagtaactcacagagctgagcatatgttagctggcgcatttaccaaacacaccttttgtggaatatgcaagtggatttagggacttctctgagaatttcgttggaaacgggataaacctcgcgtaactgaagaggaacattctcagaagttcttggtgatgttggcattcaa

SEQ ID NO: 564464 - DNA, 3243 bp, Homo sapiens
gctgtgggagccgtcagtggctgagctcgccaagcagccttggtctctgtctacgaagagcccgtggggcagcctcgagagccgcagccatgaacggcacagagggccccaatttttatgtgcccttctccaacgtcacaggcgtggtgcggagccccttcgagcagccgcagtactacctggcggaaccatggcagttctccatgctggcagcgtacatgttcctgctcatcgtgctgggcttccccatcaacttcctcacgctctacgtcaccgtacagcacaagaagctgcgcacacccctcaactacatcctgctcaacttggccgtggctgacctcttcatggtcttcggaggattcaccaccaccctctacacatcactccatggctacttcgtctttgggcccacaggctgtaatctcgagggcttctttgccacacttggaggtgaaatcgccctgtggtccctggtggtcctggccattgagcgctacgtggtggtctgcaagccgatgagcaacttccgcttcggggagaatcacgctatcatgggtgtggtcttcacctggatcatggcgttggcctgtgctgctcccccactcgttggctggtccaggtacatccctgagggcatgcaatgttcatgcgggattgactactacacactcaagcctgaggtcaacaacgaatcctttgtcatctacatgttcgtggtccacttcaccattcctatgatcgtcatcttcttctgctatgggcagctggtcttcacagtcaaggaggcggtgcccagcagcaggagtcagccaccactcagaaggcagagaaggaagtcacccgcatggttatcatcatggtcatcttcttcctgatctgctggcttccctacgccagtgtggccttctacatcttcacccaccagggctccaacttcggccccatcttcatgactctgccagctttctttgctaagagctcttccatctataacccggtcatctacatcatgttgaacaagcagttccggaactgtatgctcaccacgctgtgctgcggcaagaatccactgggagatgacgacgcctctgccaccgcttccaagacggagaccagccaggtggctccagcctaagcctggccagagactgtggctgaaagtaggagtctcctgtccccacacaccccagccacagcccccaccaggagcagcacccgttgggatgaggtcatgcaggctccctcagtgttcttttctttgtttttaatgaattcatgaaagcaaaatgaggctccccactcaatggggacagcttgacaaagggcatccatccaccaagaccatcctcaacctggagtccccaattcccggggggccagcgggatctgtacccctccctcagcttgtctatcaggaacatgacaagtgtcccggcttagggctaaatgtctaggacagaatggaacacatagtagctgattaataaatgctagctggatgaagggaggaatgagtgactgactgagtggatatatgagtgaagggattaatggaagggaacatggatgtcctcaggtgcccaacctggcagatccagtcatgtctggctggaatctataagcagttttacatacctgccctggttttctctgcccccacccccaccccagttggatctcccaaatccagggccctgatagaatatggctgcttcaaagacagagagatgaggggagggaggggggagggagagagggagggagggagacacagagagggaatatgtgtgatgcgtgtgtatgtgtgtatgtgtgtgtgtaaacactttgtatataaagagtacagctggtagttatgttacaagtaacaccgactaatataattaattaaccatcctaatggtctctgcttgttagtgactgcttgggaattaggcagggcccaagcactcagataaggtatttccctcagcctcagtaggcttttgcaaatgacccaggccttcaggcctgtgcagggctagagctggattacagagataaatgacagtgacagcaacgtgagctgcagcccttaggactgagaaagcatcgagaccaggggtctccggcaaggcctaggtcctcccttcagtatggaaaccttgcctcatgtctctcagcctccttggcctgtggagatccagcccttcctcttggcttctggatacatttgctcttctacaccagcaaccaagtggcaacagttccaggccagtatggagttttagaagccatgccaatatgcccaccttcagggagcagctgagtccttgatgccacccttgttctgaagagttcagaaacacagtgcaagacatgaccaggcctcatccttaggatgctcatggatccagttcttagctcccttgttggatatgctgttttccttggcctttggtcttttctttatcccagagggttttggctttaaggccaacaggaactatggggtaccgaattgggcagctcagtctgcatccctcctctatagaaccacagctgggccctcagcaggcccaactctgcatggggacagaggcattaaaagctcagctcctacacttggtggcagtggtggtctgttgctctcaagctctttcaaaatggatggaaactgggacgcttccctgacccctggttatgaaagactagactgtgtggggacaaacagtccagagtcccggggaatgtgatagagcagctccatcatttttagaaacccaatttgaggcagtatagagagatggtgacctctataagcctctgtatctgcaaagaggagcttagacctgcccttgaggggattatatgagatttaagggacttatgtggccagcctacttcctggcatgctgaagacattggcacactctggtattctagaccttggctcagagctgcctttactaggatactgtcacttagcaaaagaatgggatggagcctcagatgtggagtgacaccatcttccaagaaggaaagggtgccagggtctgggatgaaagccctttggtgctatgttgggcaagggcgagtgccagcaaggggttatttgcttgctctctccatcagtgatgaggttccatttggtcacaagaaattcaccccaattgctgaaacagaggctgactattggcttataggcatgaaaccccactcccctccacttcaggctggctagattaaaagctcagacctgtg

SEQ ID NO: 564465 - DNA, 3884 bp, Homo sapiens
gctgtgggagccgtcagtggctgagctcgccaagcagccttggtctctgtctacgaagagcccgtggggcagcctcgagagccgcagccatgaacggcacagagggccccaatttttatgtgcccttctccaacgtcacaggcgtggtgcggagccccttcgagcagccgcagtactacctggcggaaccatggcagttctccatgctggcagcgtacatgttcctgctcatcgtgctgggcttccccatcaacttcctcacgctctacgtcaccgtacagcacaagaagctgcgcacacccctcaactacatcctgctcaacttggccgtggctgacctcttcatggtcttcggaggattcaccaccaccctctacacatcactccatggctacttcgtctttgggcccacaggctgtaatctcgagggcttctttgccacacttggaggtgaaatcgccctgtggtccctggtggtcctggccattgagcgctacgtggtggtctgcaagccgatgagcaacttccgcttcggggagaatcacgctatcatgggtgtggtcttcacctggatcatggcgttggcctgtgctgctcccccactcgttggctggtccaggtacatccctgagggcatgcaatgttcatgcgggattgactactacacactcaagcctgaggtcaacaacgaatcctttgtcatctacatgttcgtggtccacttcaccattcctatgatcgtcatcttcttctgctatgggcagctggtcttcacagtcaaggaggcggtgcccagcagcaggagtcagccaccactcagaaggcagagaaggaagtcacccgcatggttatcatcatggtcatcttcttcctgatctgctggcttccctacgccagtgtggccttctacatcttcacccaccagggctccaacttcggccccatcttcatgactctgccagctttctttgctaagagctcttccatctataacccggtcatctacatcatgttgaacaagcagttccggaactgtatgctcaccacgctgtgctgcggcaagaatccactgggagatgacgacgcctctgccaccgcttccaagacggagaccagccaggtggctccagcctaagcctggccagagactgtggctgaaagtaggagtctcctgtccccacacaccccagccacagcccccaccaggagcagcacccgttgggatgaggtcatgcaggctccctcagtgttcttttctttgtttttaatgaattcatgaaagcaaaatgaggctccccactcaatggggacagcttgacaaagggcatccatccaccaagaccatcctcaacctggagtccccaattcccggggggccagcgggatctgtacccctccctcagcttgtctatcaggaacatgacaagtgtcccggcttagggctaaatgtctaggacagaatggaacacatagtagctgattaataaatgctagctggatgaagggaggaatgagtgactgactgagtggatatatgagtgaagggattaatggaagggaacatggatgtcctcaggtgcccaacctggcagatccagtcatgtctggctggaatctataagcagttttacatacctgccctggttttctctgcccccacccccaccccagttggatctcccaaatccagggccctgatagaatatggctgcttcaaagacagagagatgaggggagggaggggggagggagagagggagggagggagacacagagagggaatatgtgtgatgcgtgtgtatgtgtgtatgtgtgtgtgtaaacactttgtatataaagagtacagctggtagttatgttacaagtaacaccgactaatataattaattaaccatcctaatggtctctgcttgttagtgactgcttgggaattaggcagggcccaagcactcagataaggtatttccctcagcctcagtaggcttttgcaaatgacccaggccttcaggcctgtgcagggctagagctggattacagagataaatgacagtgacagcaacgtgagctgcagcccttaggactgagaaagcatcgagaccaggggtctccggcaaggcctaggtcctcccttcagtatggaaaccttgcctcatgtctctcagcctccttggcctgtggagatccagcccttcctcttggcttctggatacatttgctcttctacaccagcaaccaagtggcaacagttccaggccagtatggagttttagaagccatgccaatatgcccaccttcagggagcagctgagtccttgatgccacccttgttctgaagagttcagaaacacagtgcaagacatgaccaggcctcatccttaggatgctcatggatccagttcttagctcccttgttggatatgctgttttccttggcctttggtcttttctttatcccagagggttttggctttaaggccaacaggaactatggggtaccgaattgggcagctcagtctgcatccctcctctatagaaccacagctgggccctcagcaggcccaactctgcatggggacagaggcattaaaagctcagctcctacacttggtggcagtggtggtctgttgctctcaagctctttcaaaatggatggaaactgggacgcttccctgacccctggttatgaaagactagactgtgtggggacaaacagtccagagtcccggggaatgtgatagagcagctccatcatttttagaaacccaatttgaggcagtatagagagatggtgacctctataagcctctgtatctgcaaagaggagcttagacctgcccttgaggggattatatgagatttaagggacttatgtggccagcctacttcctggcatgctgaagacattggcacactctggtattctagaccttggctcagagctgcctttactaggatactgtcacttagcaaaagaatgggatggagcctcagatgtggagtgacaccatcttccaagaaggaaagggtgccagggtctgggatgaaagccctttggtgctatgttgggcaagggcgagtgccagcaaggggttatttgcttgctctctccatcagtgatgaggttccatttggtcacaagaaattcaccccaattgctgaaacagaggctgactattggcttataggcatgaaaccccactcccctccacttcaggctggctagattaaaagctcagacctgtgaccccttgtgtctctcttctgtgttgacttcactcacaggcctaacctcagaggtgtctgtagcagtcccaggccagacacccttccagaaaggggctttccttccctttataatcgtggtgacaggtcagattcttattgggcagacctaagttacctgattatccttaagccaatcatcatgtctaagacagagattcatttgattggccaggctgagtcacttgtttacctctaagtcaatcaacaggcctgagatggagagtcatcttctgattagctagacctgggtcacctgatcacctctaagccaacacttatgtctgatatagggctccctcatttgtaaatgttgttccccacaacttacaaggataaaagtttgactcccacatagttaggaagccttgtagggattgtttgttccccaaaaagcaaaagggggaaccggatcaggaccagcctgaaggggtgtggaattgggaagggcgtaacaaaaggtcccggggtcatggcataaagggatccatggggcgaactttggtggtctaagctatgggcagaaagcctttgaaggaaataaggcggtgaacccaaacaggcgaagacggggggaaacagcgtcagcagaaaccaaaagg

SEQ ID NO: 564466 - DNA, 362 bp, Homo sapiens
  misc_feature (138)..(138): n is a, c, g, or t
  misc_feature (150)..(150): n is a, c, g, or t
  misc_feature (155)..(155): n is a, c, g, or t
  misc_feature (158)..(158): n is a, c, g, or t
  misc_feature (162)..(162): n is a, c, g, or t
  misc_feature (164)..(164): n is a, c, g, or t
  misc_feature (175)..(175): n is a, c, g, or t
  misc_feature (181)..(181): n is a, c, g, or t
  misc_feature (184)..(184): n is a, c, g, or t
  misc_feature (190)..(190): n is a, c, g, or t
  misc_feature (199)..(199): n is a, c, g, or t
  misc_feature (202)..(202): n is a, c, g, or t
  misc_feature (221)..(221): n is a, c, g, or t
  misc_feature (228)..(228): n is a, c, g, or t
  misc_feature (246)..(246): n is a, c, g, or t
  misc_feature (253)..(253): n is a, c, g, or t
  misc_feature (272)..(272): n is a, c, g, or t
  misc_feature (280)..(280): n is a, c, g, or t
  misc_feature (286)..(287): n is a, c, g, or t
  misc_feature (291)..(291): n is a, c, g, or t
  misc_feature (306)..(306): n is a, c, g, or t
  misc_feature (352)..(352): n is a, c, g, or t
gaagttcatctatttgaaataagacaccttcgggggaaaaaattcctgtgaaaattttttttcaattcagcaaacatttgaaaatttatgatgggcaagttaaattgttgatttcagtacaagattttttaaatcagntgctacaaaaantgatnggntttngncacttcatttnttcacnaanggaganagctttacnctntgctttaatagatttaagngggcccnaatatttactaaaattgntagtttnccgttcagaagtataatanaaataatntttagnnggtnttttttaaccattgnaatttttccctttttccctccccctttccttcattgaataaacctntgttcaaaga

SEQ ID NO: 564467 - DNA, 216 bp, Homo sapiens
ccttggtgtagcagaacgccacgcaggaggccgggcggaagtgcgccagcaccttggtcacggcgtcatgcgctcttccggggagatctcgtagaagcgttgttcgatctggtcgtcggagtggaacgcttcggctttcacttgctgaggcgcacgcatgaacttggaggccagttgcttgatgctcaccgggtaagtggccgagaacaggcaggg

SEQ ID NO: 564468 - DNA, 1535 bp, Homo sapiens
atgtcgctcgtattggtcgtgttttcagcacctttgcttcctgggggggcgccgaagcagtcggtttgtttcgtgcgtgtgttccctgggggggggctctattttctgcgcgatatttcggttgtagagcgcgtctccccgccgtgttggctacccactctttgtgcggggcacaaattgtgtaggcgcggcgggagcttccggcctagagagggggtgccgccctctttctcagatgggtggggtggcccccacaacattgggtggtgttgtcgcctcgccccttttcgtgtggcgttcttttgtccgtccgcgctgcgttgtgtagttgctccagcacacccgcaggtgtggttgtgtggggcgtccttggtagtggtctcccctcctccgtctgtgggtgagtggttctccgggcgcgtagttccatctatacatcttgttggtcgccgcacgtgtatgagccgtgtgtgtggtggtcgccgccccccctgtgtgtttcatgaatacgtcggctgcgtgctcttcggcgtggtaggtggacgatcttgtttttgtgatcagcagatatgatagattatctgcgcgactggggtggtgaccgccacccccccacacagatacgggtggggttgctaagaatagtggtagtaagaaggaagagtgttcatcctaacgaagagtgttggggggcggcaagatcttggttcgtcataatcataagtgagagttgggccgcagatagtggttggctatcatcacactgctgtaatgcttctgagtgtgggtgtgctgcagtggcacacagctccgtcagagattgttctcgtcttggcgtgttctcccctcgtgtgtgggggagaatagtgtgtgcggcgcgccgcgccctgctctgtttgtgagagtcctctgtgtgtctgagagcgactgttcttctccccgcgagagggggtctgtctctctctagtgtgctctttgtagagagcgtgtgtgtctctccccccacagtagtgatgcgctctggtgcgcgatatctcgcctcttctccacagatatgtctccgctgtggcgcggcgcgatatctttctctctctgtgggtgctccgcccgcgcctgtgcgcccgtgtcgcgccactctcgtctcgacgcccctgtgttgtgcgccactctcgccgcccaccgggcgcggccttttgcgcacttgttgtccctctcgcgcccgcgagagagtctgtgggctgctggggggggggcgctctgtctctctgtgcgctcttcttgtgttctcccccacagagaggcgtgccttctgaggggcggagcgcgacgactgttcttctcggagagagggcctcggagagtactctctgcgtcccactatgtgtgcctccctcctctatcttctcgcgcccaccctggacccccagacaagtttccacacacaatgtttttttgttttttttttcctctttttttttctttgtttgtgttttagaaaaaaagttttggggtaaaaaagatggtagaaatcttta

SEQ ID NO: 564469 - DNA, 3840 bp, Homo sapiens
  misc_feature (10)..(10): n is a, c, g, or t
  misc_feature (16)..(16): n is a, c, g, or t
  misc_feature (41)..(41): n is a, c, g, or t
cccccccctncccccntattggtgttaccagattgaggtcncagacatgttggcacagagggccccaatttttatgtgcccttctccaacgtcacaggcgtggtgcggagccccttcgagcagccgcagtactacctggcggaaccatggcagttctccatgctggcagcgtacatgttcctgctcatcgtgctgggcttccccatcaacttcctcacgctctacgtcaccgtacagcacaagaagctgcgcacacccctcaactacatcctgctcaacttggccgtggctgacctcttcatggtcttcggaggattcaccaccaccctctacacatcactccatggctacttcgtctttgggcccacaggctgtaatctcgagggcttctttgccacacttggaggtgaaatcgccctgtggtccctggtggtcctggccattgagcgctacgtggtggtctgcaagccgatgagcaacttccgcttcggggagaatcacgctatcatgggtgtggtcttcacctggatcatggcgttggcctgtgctgctcccccactcgttggctggtccaggtacatccctgagggcatgcaatgttcatgcgggattgactactacacactcaagcctgaggtcaacaacgaatcctttgtcatctacatgttcgtggtccacttcaccattcctatgatcgtcatcttcttctgctatgggcagctggtcttcacagtcaaggaggcggtgcccagcagcaggagtcagccaccactcagaaggcagagaaggaagtcacccgcatggttatcatcatggtcatcttcttcctgatctgctggcttccctacgccagtgtggccttctacatcttcacccaccagggctccaacttcggccccatcttcatgactctgccagctttctttgctaagagctcttccatctataacccggtcatctacatcatgttgaacaagcagttccggaactgtatgctcaccacgctgtgctgcggcaagaatccactgggagatgacgacgcctctgccaccgcttccaagacggagaccagccaggtggctccagcctaagcctggccagagactgtggctgaaagtaggagtctcctgtccccacacaccccagccacagcccccaccaggagcagcacccgttgggatgaggtcatgcaggctccctcagtgttcttttctttgtttttaatgaattcatgaaagcaaaatgaggctccccactcaatggggacagcttgacaaagggcatccatccaccaagaccatcctcaacctggagtccccaattcccggggggccagcgggatctgtacccctccctcagcttgtctatcaggaacatgacaagtgtcccggcttagggctaaatgtctaggacagaatggaacacatagtagctgattaataaatgctagctggatgaagggaggaatgagtgactgactgagtggatatatgagtgaagggattaatggaagggaacatggatgtcctcaggtgcccaacctggcagatccagtcatgtctggctggaatctataagcagttttacatacctgccctggttttctctgcccccacccccaccccagttggatctcccaaatccagggccctgatagaatatggctgcttcaaagacagagagatgaggggagggaggggggagggagagagggagggagggagacacagagagggaatatgtgtgatgcgtgtgtatgtgtgtatgtgtgtgtgtaaacactttgtatataaagagtacagctggtagttatgttacaagtaacaccgactaatataattaattaaccatcctaatggtctctgcttgttagtgactgcttgggaattaggcagggcccaagcactcagataaggtatttccctcagcctcagtaggcttttgcaaatgacccaggccttcaggcctgtgcagggctagagctggattacagagataaatgacagtgacagcaacgtgagctgcagcccttaggactgagaaagcatcgagaccaggggtctccggcaaggcctaggtcctcccttcagtatggaaaccttgcctcatgtctctcagcctccttggcctgtggagatccagcccttcctcttggcttctggatacatttgctcttctacaccagcaaccaagtggcaacagttccaggccagtatggagttttagaagccatgccaatatgcccaccttcagggagcagctgagtccttgatgccacccttgttctgaagagttcagaaacacagtgcaagacatgaccaggcctcatccttaggatgctcatggatccagttcttagctcccttgttggatatgctgttttccttggcctttggtcttttctttatcccagagggttttggctttaaggccaacaggaactatggggtaccgaattgggcagctcagtctgcatccctcctctatagaaccacagctgggccctcagcaggcccaactctgcatggggacagaggcattaaaagctcagctcctacacttggtggcagtggtggtctgttgctctcaagctctttcaaaatggatggaaactgggacgcttccctgacccctggttatgaaagactagactgtgtggggacaaacagtccagagtcccggggaatgtgatagagcagctccatcatttttagaaacccaatttgaggcagtatagagagatggtgacctctataagcctctgtatctgcaaagaggagcttagacctgcccttgaggggattatatgagatttaagggacttatgtggccagcctacttcctggcatgctgaagacattggcacactctggtattctagaccttggctcagagctgcctttactaggatactgtcacttagcaaaagaatgggatggagcctcagatgtggagtgacaccatcttccaagaaggaaagggtgccagggtctgggatgaaagccctttggtgctatgttgggcaagggcgagtgccagcaaggggttatttgcttgctctctccatcagtgatgaggttccatttggtcacaagaaattcaccccaattgctgaaacagaggctgactattggcttataggcatgaaaccccactcccctccacttcaggctggctagattaaaagctcagacctgtgaccccttgtgtctctcttctgtgttgacttcactcacaggcctaacctcagaggtgtctgtagcagtcccaggccagacacccttccagaaaggggctttccttccctttataatcgtggtgacaggtcagattcttattgggcagacctaagttacctgattatccttaagccaatcatcatgtctaagacagagattcatttgattggccaggctgagtcacttgtttacctctaagtcaatcaacaggcctgagatggagagtcatcttctgattagctagacctgggtcacctgatcacctctaagccaacacttatgtctgatatagggctccctcatttgtaaatgttgttccccacaacttacaaggataaaagtttgactcccacatagttaggaagccttgtagggattgtttgttccccaaaaagcaaaagggggaaccggatcaggaccagcctgaaggggtgtggaattgggaagggcgtaacaaaaggtcccggggtcatggcataaagggatccatggggcgaactttggtggtctaagctatgggcagaaagcctttgaaggaaataaggcggtgaacccaaacaggcgaagacggggggaaacagcgtcagcagaaaccaaaagg

SEQ ID NO: 564470 - DNA, 551 bp, Homo sapiens
  misc_feature (248)..(248): n is a, c, g, or t
  misc_feature (442)..(442): n is a, c, g, or t
  misc_feature (465)..(465): n is a, c, g, or t
agcgggggctgtgctcgcggcgcgcgtgcgaccgcgcgcgggcaggttcggcttgtccgcccgtatggccgcgcgtgcgtccgcggctcggtcggctcgcctcgttgcagctgctgatgggctgggagcgtcctgcgcctagcatagtgggttgcttggatgcggaagcttagcagggcggacgactcgaggcgtcgctgaccatccactgcgattcacgctgtgtaacacctccgtgggaagtaccntacagttcagcaccatctgagcggcagagtccctcgtgcctcgcatacgttcggagtgctagttcatcacttcgcgtaggtatttgagagagacagagtcgattcgctacccattggtaggcaaaagctcttgattggctagggtccctttgttccaacagcaactagcgttcgcgttggcgtgcgacatcatngagaaccttgctgacctgtatgnctttgagcgcagacgaagcaacgtgtggtagaccgcggcgtaaccctcgagtgatcaggtctagctcgattcagaaaggagcgaac

SEQ ID NO: 564471 - DNA, 319 bp, Homo sapiens
ttgtcactgcttcggatgaggtagacgtgttgatggtggcagctcgtgaccagtcttaccgatggtgggtattgtgggatgtgtgactagagtagttcataaggatgtagtcagtgccatggggagccaggagcggtgggtgatgacatcactggttcttcaggtgcttgggacacctccaggagtaatagcccacgtcagcgttgactgtcaagcgggcgatgtcaaaagtctcaatgacgttgctgtcccatttcttgcggtactcaatgtcgtgtaggacgtcgtagagtgtctcggctggcacatcacagcactc

SEQ ID NO: 564472 - DNA, 1459 bp, Homo sapiens
  misc_feature (524)..(524): n is a, c, g, or t
ttggggacacacttctgtatgatgagcgcctcccttccttgatggtagaacagctttataattcctgccgctttgtaagtgccgtacgaaaactgtctcttgcagagagaggcgacggatgtaggaaaatctctttgctggggggaacaacaacagaccccagaacgctgtttccctcctgggggagaggttttcacctccttccttccgccgctggagaagtgatccttctagagaactctttttaggagagactacaaaaggggggaacagaaaggacacccccccctttgtgtcttggttcctttaaggatgagaagactcggttgccaaaaaaatgtaccccaggaaaatggcccttcctttttgttgggaacgtctcttattttgtcaattggggggggttttaaataggtgtccccccaaggttgtcaaacccccccgtatttgggggaaaatgatgctcaaaaaaattcgtccccaatgtttttggtataatgtatcgcccccccgctggggaacgngtgggggaacaacaccccccacccaatgcgttttgtagaccccctcctggttccccccaacacgcccctgtgtaaagaatagttgtaacactctctagttgtacaacacatttttagagaatgttggccccaccacacagcatttggggccccaggagaattactcatttcgtttgagacacacccacacacattcgtgtatatttgtggaaataaattcggggagatgttttgtgacatatataaatacgcaatagctctaatatttttatgtgtgaaatatagtttcggtcacacagtttgaatggtgtgtgtgaataatttgtccacacccccacttgtctcacacacacccactgtggtgataagagtccccccaaatattctcagagaaagacttgtgagaggacactgtgtctctgtgtcacacactagagacacacttgtgaatctcacacgtgtgaatggggatattaacttagagggcctcggagagggggtgtgcccgctcttcttctgagagaaaaatagttagagagattataataataattctcttcccggggggctgtgtgaatatccactaatctctagatttatccaaataatattttaaggatccattctctggtgataataaacataatatttaaaatattaagccaagccacaacattagggagaggagaaatagcgccaatattttggaggggatacccttaatattgcgcatatccggtttagggggataatattttccaacctcttgctttataactctgataatggggtgtgttttatggaacattgttaatagtttatattgaatccaagccaggatttcccagtccagtgtattgctccatttactggaccacaaaaggggaaataaacgaaacaccgaaaaggggaaattaactgaccttttataatga

SEQ ID NO: 564473 - DNA, 622 bp, Homo sapiens
gaggcacgactcatctttccgtacagggctctgcctgcccacagccccagcccacaccatgggcttggacctgacggtgaagatctgcgggccacgaattccaggtgtccctgagcagctccatttcggtgtcagactgaaggccccgatctaccccgaagatcggcgtgcacgccttcccgcagcgtcttggctgtcccacccgagcggtgtggccgctgccggaccagggtcccccttgcccgcccgggcctgggccccggcagcacggtcctgctggtggtggaccaatgcgacgacctctgagcatcctggtgaggattaccagggccgccgccagcacctacgaggtgcggctgacgccgaccgtggcccccctgagagccgccagtgagcgggctggagggtgtgccggacgacctgttctggctgatcttcgaggggaagacccctggaggacccgctccccctgggggagtacggcctcaagcccctgagcaccgtgttcatgaatttgcgcctgcggggaggcggcaccgagcctggcgggcggagctaagggcctccacccagcatccgagcaggatcaaagggcccggaaattaaggctgttgttaagaga

SEQ ID NO: 564474 - DNA, 283 bp, Homo sapiens
  misc_feature (5)..(5): n is a, c, g, or t
  misc_feature (36)..(36): n is a, c, g, or t
  misc_feature (83)..(83): n is a, c, g, or t
  misc_feature (115)..(115): n is a, c, g, or t
  misc_feature (144)..(144): n is a, c, g, or t
  misc_feature (174)..(175): n is a, c, g, or t
  misc_feature (178)..(178): n is a, c, g, or t
  misc_feature (182)..(182): n is a, c, g, or t
  misc_feature (189)..(189): n is a, c, g, or t
  misc_feature (197)..(197): n is a, c, g, or t
  misc_feature (205)..(205): n is a, c, g, or t
  misc_feature (209)..(209): n is a, c, g, or t
  misc_feature (220)..(220): n is a, c, g, or t
  misc_feature (230)..(230): n is a, c, g, or t
  misc_feature (232)..(232): n is a, c, g, or t
  misc_feature (242)..(242): n is a, c, g, or t
  misc_feature (246)..(246): n is a, c, g, or t
  misc_feature (250)..(250): n is a, c, g, or t
  misc_feature (273)..(273): n is a, c, g, or t
ctccngagcagcctgcaccttctctcctcccatccngcaacagtctgaaagtacgcggaggacgggaccggaagacgagaganggctggacatcctgcccaccgtgtcccagccngggcagggagggaccatggcccgcaggtncacggggccccgatgtgcacagctgccacnnggngggnggtctcngggagatnggcagtcnggtngcccgtcctcngtgagtgcananactggcgggnacanatcncggccttcccgggttctcccggncccacgggtc

SEQ ID NO: 564475 - DNA, 119 bp, Homo sapiens
tgcaatgaaaataaatgttctttattaggcagaatccagatgctcaagggcctccataaaatcccccagttaagaagctggacttagggaacaaaggaacctataataaaaattggaca

SEQ ID NO: 564476 - DNA, 115 bp, Homo sapiens
gcacggagcatcagtaagggagctcagtaagcgtcagtaatgcggagcaatctatgccacctcctcgcctcctcttcttcctcaacacaacatacccccagcaggcgtgaccgct

SEQ ID NO: 564477 - DNA, 535 bp, Homo sapiens
  misc_feature (1)..(1): n is a, c, g, or t
  misc_feature (75)..(75): n is a, c, g, or t
  misc_feature (79)..(80): n is a, c, g, or t
  misc_feature (84)..(84): n is a, c, g, or t
  misc_feature (86)..(88): n is a, c, g, or t
  misc_feature (99)..(100): n is a, c, g, or t
  misc_feature (104)..(104): n is a, c, g, or t
  misc_feature (108)..(108): n is a, c, g, or t
  misc_feature (117)..(117): n is a, c, g, or t
  misc_feature (119)..(119): n is a, c, g, or t
  misc_feature (121)..(122): n is a, c, g, or t
  misc_feature (125)..(125): n is a, c, g, or t
  misc_feature (127)..(128): n is a, c, g, or t
  misc_feature (131)..(131): n is a, c, g, or t
  misc_feature (135)..(136): n is a, c, g, or t
  misc_feature (141)..(141): n is a, c, g, or t
  misc_feature (169)..(169): n is a, c, g, or t
  misc_feature (173)..(174): n is a, c, g, or t
  misc_feature (181)..(181): n is a, c, g, or t
  misc_feature (187)..(187): n is a, c, g, or t
  misc_feature (190)..(190): n is a, c, g, or t
  misc_feature (214)..(214): n is a, c, g, or t
  misc_feature (217)..(217): n is a, c, g, or t
  misc_feature (220)..(220): n is a, c, g, or t
  misc_feature (242)..(242): n is a, c, g, or t
  misc_feature (254)..(254): n is a, c, g, or t
  misc_feature (309)..(309): n is a, c, g, or t
  misc_feature (311)..(311): n is a, c, g, or t
  misc_feature (313)..(313): n is a, c, g, or t
  misc_feature (315)..(315): n is a, c, g, or t
  misc_feature (321)..(321): n is a, c, g, or t
  misc_feature (337)..(337): n is a, c, g, or t
  misc_feature (359)..(359): n is a, c, g, or t
  misc_feature (368)..(368): n is a, c, g, or t
  misc_feature (370)..(370): n is a, c, g, or t
  misc_feature (377)..(377): n is a, c, g, or t
  misc_feature (413)..(414): n is a, c, g, or t
  misc_feature (516)..(516): n is a, c, g, or t
nttcttttttatttcttttttattcttttcttttcgccacttcaattgcccccaggtgaagatggtttgcggctnttcnncttntnnnttttctgctcnngggntgcnctggggtcncngnnagnanngtnttcnncttgnggtgtgtgttgttctagtgtatggtgtnctgnncctgggncttgangtncccgtggagatttcttcttctgangcnggngtggaaaccagtggctgtggtngggccagaggtncttgagggggatctgatccagcgggaaccagcatgggcgcatttcgtcgctctcnangngngttccntgggtgctgtttgttncgacgaaatgaaagtaaatganaaaaggctngnaaacganctcaaacacgatctggcccaccttgtgcagggcgtnnactgtaagaacgctcttctcctgccgccccctcctagccccatcctcgatggtcttttcttcttgcactttgcccccaaagccattccaccggccggccccnaagcctcgctttttcatgc

SEQ ID NO: 564478 - DNA, 249 bp, Homo sapiens
agggaattcgtgctggtgctaagggaattcgtgctggtgctctccaccatcacactctgccctacctacctacctacctccaccatcacactctgtcctacctacctacctacctccaccatcacactctgccctacctacctacctacctacctccaccatcacactctgccctaccagtagatggtgtaaacaggactggcctcagaccaccctgcattctgattcaataggctggggtaccgagct

SEQ ID NO: 564479 - DNA, 541 bp, Homo sapiens
aatgctttgcacttgactatactattatctggatatacccgggtttatttgtccatttacttactgaaggacatcttggttgctccctagtttggcaatcgtgaataaagctgctataaacatcaaacatctgtgtgtgtgtcttttgtgtggacataagttttcagttcgtttgggtaaatagcaaggaacacagttgctggatcatatggtaagaatacctttagttttgcaagaaacctctaaactgtctttcaaagtgatggtaccattttatattcccaccagtaatgaatgggagtttctgttcacattctcaccagcatttgatattgtcactgttaatgggttttggccattctaataggtgtgtagtgttattgttttaatttgcattttcctgattatgtgactttttttcatatgcatactcgccatctttatatcttctttagtgaggtgtccgttaaggtcattgtcctgttcttaaagtcaggttctttgttttcttattgttgaggtaatccgtgaggggggtacc

SEQ ID NO: 564480 - DNA, 494 bp, Homo sapiens
tgtggagaccaggctgagacaggtggctggtcaggtactcggggggcagctcagtggtggaagtggcctttccctccgctttcctgtgggcacaaggaatgctgcaggtcaccatgcgctgacaccgccctgcccccgccaaagctctcaaccacacctctgcgggctcctctaagtgtccccacagagggaggacagtggttccacagccacaggtgtccgaatggccacactccagagcagagcagggcaggactcgagggcatcacaccagccacaagggctcgggtgagtccctcagggtaagccccagttcctctcctgaaaatggacattcaggacaccagcccggcctgcgaaggaccttcctacggcactcgggaaaccaaacacagcaccgccactgtgggacgggccccacccaagaaggggcaaacaggtcagtgactgtcatgcccagtaagctcttccggggcgccccaggcagtccaagg

SEQ ID NO: 564481 - DNA, 225 bp, Homo sapiens
gcgcatgactcgacaaacagtccttctatcttcacacatctgctcaacatcagtgaagccctgcagcagtgttgtgacctctcccaggtctggtaccagagaatactgcctggagtaagccatgggccgacgaatccagttccccatcgagagtgtccatgccctgcattctaccggaccatatcctggaaaacaaagaacctaccattatggcgtatgtcctct

SEQ ID NO: 564482 - DNA, 1217 bp, Homo sapiens
  misc_feature (174)..(174): n is a, c, g, or t
ggcttcgctgtctccttggaccactgcaccatgtgtgctagctccgacgtacccggcgcgctagcggcggccggcccacgatcgtgtgtatgccttctcgggcgctgccacgctggaccgcgcgagggtagcctgtgagcctggtgctccctgcggggctaaggtagctacttnatccgagaaattgtgggcgtccctcttgaaggctaccgactggtctcgggactacacctcagtatgaacccgaagacttgcaggcttggtcgcccttctgcgaaccacctgtgtggactcttgagttgagtagcctcggggtcttccccggttggctaatggcaatgttttgggggcattcaagcgagaaaactggccaagagaaaccctgagacgaagactttcttgaaacttttccccctttcaaaagggtacccgattccccggcgacccgtcggaatgggtgttagaggggttattccggaaggacgcgcaaaagcgtttttcaattggcctgtccattttccgcaagcgaaaatggattgtccggaatggggtttggaagagccgtggatagtacagtgggagcgttgaacctgaccaaatccccccattccctttccttgtttccggagcgctttttaccctcttttgccctgtagggcgaataggggacatcccccttttgatcacccaaaacgagagcaatccccgccgctcgagaggcccgagtaaaacaggaataatccggacccttccagaacactgggggccgaccacactttgtcaacttcggaaagcctccaggtagagccaccccccactagttaggaaggcgttccgaaagtttccaaagcggccgtttggtgggcttcacagttccgcacgtgtagaggttagtcattgggattccagggccactagcaaacccagttaatacttgggagttatatgcgatacccgtttgcggtggcaaaacaccgttttttgtcatggcgaatggcaaacaggtggctcctccctccttttggacgagtgtggttgggtggtgcgcccccttttgtggaacgcgggcggagatggcactttggtcccccaactccatttaaaaccgggacccaaaggcgggtacttcaactataggatcaccccgtgacccccgttgcagtttgctcgcccgaatgtgaaactcccgacaggttgttgtgcaatccaaattcctg

SEQ ID NO: 564483 - DNA, 1214 bp, Homo sapiens
  misc_feature (503)..(503): n is a, c, g, or t
gcgtgggtggagcgttccactgagtctacttcaggacacagaaggcccatgcttgatgggggaggaggagggacgtgggcatttgggagcaccatggaggaaagtggatacatgcgtggttctcaaaacttaattgcctttccatttcttacctagtcaggcctttgacacaaactctgagtagaaagaagcctgataaagttgagggcacttgatacacctccctgtgcccccagaaggttcttggacgagaagtgcaagaatttggtgaacacgggcggtgggacgcgtgccggcgccggattgtggcatggagctgtggccatcacgatatcacgtgcctgctacagctctgctagtggatgccatatattactggatactcattgtatgaactagttaccagacgggactgcagtcgattaacgatgcccaggaggctcccgaattcccgaagagacgtgatagtaggcacatttgatggaggattcggtcgtcgtagncactacttttcgatacagtagctagacttgtgatccgtagcggtgtaattggctaagtcctaactctgtcctatcaagagactggcgataggatactgtctggctatgcacttgtgccaagatgacacggttgagttgtggcctagcagtcacgggccatcctgaccactagtgacggaggcgagaatcacgaccaggttgatcccaccgtatacctaggtgacacgcttgggacgtggaaggaccgatctttggcctaggtcccccataaaccctggcccccttagggacggcggtaaagtaagggactcgcccctcgtgttccgatgcactactaccccgggtggcagggggacctaggcgaggcgaatcccacaagctaagttgtaagaagggtgcggaacaatctgtgaccactccacaagatcgggcgacaccaagggggctcccataccaggctatgaagttgacaacacggtcgcccgctttcactcctggtttgacaaaggttttctcgatcccattgcaccaggcgctggctgcaccagacctggtgcgcaaggatttgcaggccgttcggcctgaccgccaacagcggccttttacacgcctggaacaccccgcacgactggcgtaaggaatgcgggcatgtgctggggcacccaaaggaccccctcacttagaaagcaggggcttcccgggttacggaaa

SEQ ID NO: 564484 - DNA, 365 bp, Homo sapiens
cttttcccaggggggaacctttggggtgttttggtgaaccccttttttaacattggtccccggggggattccccaccctttgggggccccgggatttttaaaaaaaaggttttggttttttcccccctggccggttttaaccaggccttttggtttttttgcacaggggttttttgggttccctttcggaacttttaacccttttttggggggcggggaaatgggttttttaattttgccaggggttttttgattttttttcccttttaaaaaaagggggggttggggggtgtggccaattccccccctttttttttcccgtttttgcccaataaactttttttccttttgggggggccccccca

SEQ ID NO: 564485 - DNA, 202 bp, Homo sapiens
aaagcggaccaagaccacagaggactaaatcgtggaacaaacgaactttaatagcggctgcaccatcgggatgtcctgatccaacatcggaggtcgtaaaccctattgtcgatatggactctagaataggatggcgctgttagtccctagaggtaacttgttcgcgttggtcacagttatggggatcacattgatgtatagt

SEQ ID NO: 564486 - DNA, 144 bp, Homo sapiens
ggtactttagatctattggtcgcagagagaagaacgcagggtgatgtggcgggcaggacaggcaggagggaggcaggctgcttgcccgggacgagctgccgtgctgtctgtagactcaggaccgtggtccagaactcctgtgcc

SEQ ID NO: 564487 - DNA, 102 bp, Homo sapiens
ttatgatgccacccatcataatgagtatatcaaaacatcagaaaataaccaagtgtggtaaagatttggaatcctcgttcattgctggtggcatcgataaca

SEQ ID NO: 564488 - DNA, 1501 bp, Homo sapiens
ggctttgttgggtgagcttgtttgtgtccctgtggggtggacgtaggttggtgatttggcaggatcctaggtataccagcaaacaaatacaaaaagcatatactaacataaaaacccgtgaaccggcaaaagcagacatcccaagatgaaggaagcccaagatacgaccagacgaaaaagatgaagagccaagaaccagggaaaagtgaaggcaaaccccccaaccagcagaaatcacgacggaggacaacatagcatgaggaatcagagccgaacgacaaacaaaacaacgagcatgaccagaaaaaagacaagccaacaccagagaccgaacgcacgagatgaggaatgtaaatgcaggagacagagcggaattagaaaccgcaagaaccagtcgattacgcatgcgaggcgaggtgaaggaaggatcgtcgagaatgacgaccgaggagacaaagagagaatgaaaggttcccacaggatacgcaaggagataacagacggacaagaggcatgacccgatccccaatcgcaggcgagaagagccagcagacgaaagaggcaggaggcaagagcggtggcaaatagaagaaaagtagtcagcagcagcaaggagcgaaaacatatctaacaagacccttgaaataagaattagcgagtcgcgcaagcagggcctaataagagccccaaagctttacggaaaatcgagggagcgaacatttcgaaaaccgatagagatcgagaccggaatagagtggaatccgcaaaggaattcagattttaaagaataggtcccgattgcgactctaccgagagaatttagcagagtatttccacaaatttgaacttagcaaaagaccgcattggggctataaacacaatggctcgaaaattaatttcgagaggtaaatgacaggaaaaaagcaaaattcacgcagcccagaaaggcaaaagggagaaagattgagcgcatagctaagagagccgacagaggctcaacgcacaagtctctaggacaaaagaacggaaagcgcctgcgagcagctagaaaggcgaaaatagcctaaacgaaggcatgaacgcaagacaagaagagagaggatacgagctgcccggggcgaggccgaatagagcccgagggaggcctaaaacagaagtggagcgctggaggggcagaagacaaatactcagtgtacacgtgaagcggacacccgccgtgaaaggccccatatggggtagagagtgcggaaaactcacgaggcggggaagaacgtccccgaagaagagtccaccctgagacgagatgagtcgagacttaccgaagacgagccggagtggtagagagcacccaacaacagacagagaaacactcaatagaaaaccacacaacgagacaacagcgcagcgagtcatacaaaggagcccgtaaatgtagtaagagatacggagaacggagcaacggagcacggagacaggagataggaagcacccgcgcgacata

SEQ ID NO: 564489 - DNA, 427 bp, Homo sapiens
agcggggaatcacttgagcacaggagggggaggctacagtgagctgagatccctccactgcactccagcctggaagacagagtgagagtgcagtggcgcaaactcagctcacagcaacctccctttctttcttttttttttttggaaaggaattctggctttgtggcccaggttggagtgcgggggtgcgatcggggctcagtgcaccctctctctcgtggggttcagggtagattctctggcttcagcctccgtgagtatgcgggaataccggggggtgataccacaaggccaagcataattttctcatttaattaagagagtgggtttcacaaggtgggcaaggcgggttctggacttcggggctccaagtgatcaaccaacttcaacttcctgggaattacgggattaagcaacaaggccaagc

SEQ ID NO: 564490 - DNA, 592 bp, Homo sapiens
tctgtacattaaagtggacctgtggagtgaaaacgctggtgataatatttagcccccgcagattcacacctttggaatactctgtggcccctatcacactggttccccccacggctcttcgcataattatttttacaccccgcccccgcgtatttgcagagtggtgtgttgccaccacccacaggagcccacacttgtttttctaccaacatcttctcggagtttaccctatatgttgggtctcccacacatatgtttcacaacacctcgttagaaatttcaccaaaagctcgccacctttcttctctcacacttcctcgcaccacacaataatattttctttttaaagagacatgcccccaccccccccccctctatggatgtttttacacgagacacaatagtagagagaagaccacacacgagtcctccttctcacctgatctctcagatttctctgccccatatatccccaattcgagacggattggtgtgccccctttggtcacccacccctctctaaaatatactgaagtcgatctattaccattttccaccgccccccgatcaaaatagacacacacaatataac

SEQ ID NO: 564491 - DNA, 225 bp, Homo sapiens
  misc_feature (37)..(37): n is a, c, g, or t
  misc_feature (182)..(182): n is a, c, g, or t
  misc_feature (217)..(217): n is a, c, g, or t
aattcgcggccgcgtcgacagaagacgacagaaggangggcaggggggacagagtctcgctctgtcacccaggctggagagcagtagcgcgatctcggctgactgcaacctccgactccccggttcaagcttcttctgccccaccctcctgagtagctgggactacaggcgcccgctgccangcccggctatttttttgtacttttttagcagaganggggtttc

SEQ ID NO: 564492 - DNA, 112 bp, Homo sapiens
gggtgtctccccacctcgctcacattatgcctacacgaacaccgacacatcaggtcctttgcagaagcgaagtcagggttcttcaagtcacaaagggaagcgcagagtaatg

SEQ ID NO: 564493 - DNA, 192 bp, Homo sapiens
atgtagatactgtggcattgatgatgcttatatccgggggggcccgatcctcggtacagctgtcaagagccgtccttctgacggatgcaggtcctgtgtctagcacgtgttagcctaggataatccgcaaatagcgagagctatgtcggtccaaagtagcacctcgttcttgcgaattacaccaaagcaagg

SEQ ID NO: 564494 - DNA, 620 bp, Homo sapiens
  misc_feature (331)..(331): n is a, c, g, or t
  misc_feature (362)..(362): n is a, c, g, or t
  misc_feature (373)..(373): n is a, c, g, or t
  misc_feature (414)..(414): n is a, c, g, or t
  misc_feature (455)..(455): n is a, c, g, or t
  misc_feature (464)..(464): n is a, c, g, or t
  misc_feature (597)..(597): n is a, c, g, or t
cctgtaactcaaaacaaaggaactcaccactgtccctctatcccatcaacagagagcaccatgagtgattctagggccccatgcaatggcttacggagcttattatgaggattggaataaatcctgagtgacacagacaggattcagcaacctgagagagggcatctagaaacatgagcttctgccatgtgaatggtctctgctatctttcaggtggtaactgtgtcgaggctaggagggagatgacaatcctgtacagctcatctactttgtaggaggatcaagatggagaaagactcagtgcagtcaagtcttcggacctgattaacanaatggacctccagagagcagccatcatcttnggttaccgaantcaaggtgtcattgcccagcgtaagtccctgaggtgttgtngtctgtcctgtgctgtgctgggcaccaaagccaggctcgtnctgacagtnagctctgaatgtaaagcattccgatgtgtgtataaccctgatggtgaagtgccagttgttaaaattcattcaccaagaccttctttatttggatttcaattgcttgtaggtttagcctccactgctgtttttnctacctagcattttgtaggtggg

SEQ ID NO: 564495 - DNA, 714 bp, Homo sapiens
cgcagacggaacaagatgactcagtacatcacggagctctccgacatggccccacatgcagcgcactggctcggaagccagacaagctcaccatcctccgcatggccgtctcgcacatgaagtccatgaggggtacagggaacaagtccaccgatggcgcgtacaagccttccttcctcacagagcaggaactgaagcatctcatccttgaagcagctgatggatttctgtttgtggtggctgctgagacagggcgagtgatttatgtgtctgactccgtcacccctgttctgaaccagccccagtcagagtggtttgggagcacactgtatgaacaggtgcatcctgatgacgtggagaagctgagagagcaactgtgcacctcagaaaactcaatgacaggtatgcagacctcccatgctttgttcatggcaacaacttcttagggaagggatctaaaacagaagccaacctgggcattgcaagaccggaagaggaggcttgcccagtaatgtcactgaatgactggattttccatgcatgatgccaggactccactccatttctgtgaactcgactgtaccatagtgaagttcagacatctgtctttcaaaagctaccctgatgattccagtgtggaccaactactgctccccaatgcgacccctgccaacaaaccccacgcataaataaaataaaataaaataatacaaa

SEQ ID NO: 564496 - DNA, 101 bp, Homo sapiens
ctctcaaaaactgctttgtagatgtcttgtgtacattcaagaattgcactttcctactatgacagagcatgctctaaaccctctaattctagaatcttgca

SEQ ID NO: 564497 - DNA, 454 bp, Homo sapiens
cgcagacggaacaagatgactcagtacatcacggagctctccgacatggccccacatgcagcgcactggctcggaagccagacaagctcaccatcctccgcatggccgtctcgcacatgaagtccatgaggggtacagggaacaagtccaccgatggcgcgtacaagccttccttcctcacagagcaggaactgaagcatctcatccttgaagcagctgatggatttctgtttgtggtggctgctgagacagggcgagtgatttatgtgtctgactccgtcacccctgttctgaaccagccccagtcagagtggtttgggagcacactgtatgaacaggtgcatcctgatgacgtggagaagctgagagagcaactgtgcacctcagaaaactcaatgacaggccggatcttggacctgaagactgggacggtcaagaaagaagggcagcagtc

SEQ ID NO: 564498 - DNA, 135 bp, Homo sapiens
cttgacctcaagatctgcccgcctcagcctcacaaaggtgctgggattacaggtgtgagccaccatgcccctgccaacagtgattctttacagtgggttagggccttataatgaaccaagctgcttcacctgtgt

SEQ ID NO: 564499 - DNA, 865 bp, Homo sapiens
ggttaactagtgatttctacctcaaccgcgagagctatgcaaggacggtgtgtaccaattcgcgcccgtgacatggtgcccgccggcctgccggtctcccacccctggatcggcagaggccaggacggacgggagttccactgtgaatcggtggcacgcgccgaggatgctgacactggccagtctgctacgtgtcgatagttcgtagataaagtctttatccagttcgttaaatacagtataaacaattctgacttatacattccatctaagtggtaaaaggcaacttattgagcaacatataaatatctatatatgagagctctatataaagacacgtgtctgcagggcgggcccgcccaagcggattcgccacagcctgcccgggtgctatctcgtccccaggccgcggctgcttccacccgcttggtgctgactagacgctgacgacggcctgaacccgttctcggaaacgccgccggccggttcccccgacgcgctgctcccgtaccaaagtgaggcccgtcgccacacattcctcggaggcctccccgggctgagcccccttcctgagcgcctggcgccgtgccgtgagcttcttcacttttaccccggcattgtgaacccccgaggagtgttcaccctccggggcgtgggttgccgccttgctttgtgagcggcctgcgcggtgccgcgctggcatgtgtgcgcgtagcttctgtatgacggcgcggcccttgcccccgtgcttactttgctttcccggggccatgttcgagatccctggatgggcagcctgggggccttgggttcgtcgggaacccctatggggggctactacggggataatcaagtgggctttcgg

SEQ ID NO: 564500 - DNA, 219 bp, Homo sapiens
acgccagcgtgtccgcgcgcatccaggcctttgccgagcaggcgcagttccagctggtggaaaccttcgccgagcgcctggctcaagtgttgatgagtgaattccagattccctggctgcacctcaagctgaccaagcctggcgccgttccggctgccaagggcgtgggcgtggagatcgagcgcggatgtcgctaactcaggtttaccttggtcttgg

SEQ ID NO: 564501 - DNA, 660 bp, Homo sapiens
ggggcggagcgggatcgagcctcccgaggctgcgcatgggcccgcgccgcgcgcgctgtcacccgggcgcgcgggcgtgagcgtcatggctttgccggggccctgcgggcggccatgcgcgccggcgctggaggccctgctcggggcggcgcgctgcggctgctcgactcctcgcaatcgtctcatctccgccggcaggacgccagcgcccgcggtcccaccggcccgcggcgcccgccgccggcccctgcgacctgacctgctgctcttcgccacaccgcaggcgccccggaccacaaccagtgcgccggggccgcgctcggcgaccgcggtgaagcggaggctggacctggaaactgaccatcagtaactggcgagagcaatgggccagctcggggcagaggccgccatccagtgaacaggtgtgaacatccccggggtagaagtcaacgctatgagacctcactggaatctgaccaacaagcgcttcctggagctgctgagccactcgactgaccggtgtcgtccgactgaactgggctgcgaaggcagcagaaacgtgcagaagcgagcgccatctataaatcacaacgtccttgaagggcatacaatcaatgccaagaagtccaaaaacaaatccagtgaataggtcagcaaaca

SEQ ID NO: 564502 - DNA, 907 bp, Homo sapiens
  misc_feature (245)..(245): n is a, c, g, or t
  misc_feature (401)..(401): n is a, c, g, or t
ggaggaagatcgggtgtgatggtctttcgggagtaccgactccggatgtatacggagaggagaggactgcaccatgcggatcaggagacgacagcgtaccggagatccatggctcgtgactagctggagtgctgtcacacggtagagatgacagtcgagttgaactgttcttgtgcctggcaccccaagatcggcagagctcgagttgtggtgtgcaccaggagacgtgggctgaattgcacatngtgggaaggttgaagaggtgactgagaagggagctggacgtgatcacatgtagacacacgtaggtcatttaatcaagatgagagcgcaccaatcagttgaccgaggtcgcacttatgtgtctgcctgtgcaatctatcaaacggactcatgggtantgctactggagaatcatgacggggggcaattggatgacgagggtgacccagctcatccccaagactaagatccctggccaggggcgctgagcgcccatgcagtgtcgggttcagccccgattgcacgactcctcgccaacctggctcgggctgactcagacgtgcgaagatctggaggacgtccaacttgcgtccctgcatgactggagctagaagggataaaagagcgggaaccccggggagtcctcccgcggctggatgtggggctgcgccttctcgggggactcccagtacatcgtcactgcttcctcggacaacctggcccggctctggtgtgtggagactggagagatcaagagagagtatgggggcacccagaaggctgtgtctgcctggctttcaatgaccagtgtgctgggctagcctgtgacccctcgggactgctggtgcaggtgggtggcagctggagggacccatgcagcacccaggtcagagcagaccttccc

SEQ ID NO: 564503 - DNA, 204 bp, Homo sapiens
gtgtatccgaattcgatgagttgtgcgattcagcctggcctcgttcgaaggttgtcttggccagagagattgcctcctcgtgggctgttggcgatctcgtagtggacagacggaaaagttcatgtgccaggcccaggcggagtggggttgcgtgggctggcatctcgcttcttgctagatgtccagtggcctcctggttaggct

SEQ ID NO: 564504 - DNA, 165 bp, Homo sapiens
gtcgttctcatcttagagctttgcttggggcaaggtccctagtctgggctgggagactcagtcagaaattggtttgcttatcctctgggactatgacggcccctccctggggttgggggtgtgacaggcacagaagccgacccagggggatcacataaagagccc

SEQ ID NO: 564505 - DNA, 171 bp, Homo sapiens
ctaaagaaaaaaatgatataataaagtctatcatcaacttcagaatacagtagagttaatgacagtgtagtaactgtttataacagtttggaagtcactttgtatataagatggaattttggacaaaatcttaaatgatgagtggaatttagagacatagactgaaaaagc

SEQ ID NO: 564506 - DNA, 145 bp, Homo sapiens
cacgacagacataaacctatactaagtccataaacacatggacaggtagtgtgactgtcgcgactagtaaaatagtaataatctatcattatgttcctgacctggttgacgatccctactttacggctatactgacctcattctt

SEQ ID NO: 564507 - DNA, 202 bp, Homo sapiens
gcaccttaactgtttttaagtgtgcggttcagtggtgttaagtatatttacattgttgtacacccaatctgtagaactttttcatcttcccaaactgaaattctctatacgtgaaataataactcctcatttaccctttcccttagcccctggcaaactccatgctactttgagtccctatcaaaagacgagggtaccgagt

SEQ ID NO: 564508 - DNA, 1623 bp, Homo sapiens
  misc_feature (1600)..(1600): n is a, c, g, or t
agcgggttctggcagcccattccgagactagcggaggcgggcagggagggtatataagcgttggcggagcgtcggttgtagcactctgcgcgcccgctcttctgctgctgtttgtctacttcctcctgcttccccgccgccgccgccgccatcatgagggaaatcgtgcacttgcaggccgggcagtgcggcaaccaaatcggcgccaagttttgggaggtgatcagcgatgagcacggcatcgaccccacgggcacctaccacggggacagcgacctgcagctggaacgcatcaacgtgtactacaatgaggccaccggcggcaagtacgtgccccgcgccgtgctcgtggatctggagcccggcaccatggactccgtgcgctcggggcccttcgggcagatcttccggccggacaacttcgttttcggtcagagtggtgctgggaacaactgggccaaggggcactacacagaaggcgcggagctggtggactcggtgctggatgttgtgagaaaggaggctgagagctgtgactgcctgcagggtttccagctgacccactccctgggtggggggactgggtctgggatgggtaccctcctcatcagcaagatccgggaggagtacccagacaggatcatgaacacgtttagtgtggtgccttcgcccaaagtgtcagacacagtggtggagccctacaacgccaccctctcagtccaccagctcgtagaaaacacagacgagacctactgcattgataacgaagctctctacgacatttgcttcagaaccctaaagctgaccacgcccacctatggtgacctgaaccacctggtgtctgctaccatgagtggggtcaccacctgcctgcgcttcccaggccagctcaatgctgacctgcggaagctggctgtgaacatggtcccgtttccccggctgcacttcttcatgcccggctttgccccactgaccagccggggcagccagcagtaccgggcgctgaccgtgcccgagctcacccagcagatgtttgatgccaagaacatgatggctgcctgcgacccccgccatggccgctacctgacggttgccgccgtgttcaggggccgcatgtccatgaaggaggtggatgagcaaatgcttaatgtccaaaacaaaaacagcagctattttgttgagtggatccccaacaatgtgaaaacggctgtctgtgacatcccacctcgggggctaaaaatgtccgccaccttcattggcaacagcacggccatccaggagctgttcaagcgcatctccgagcagttcacggccatgttccggcgcaaggccttcctgcactggtacacgggcgagggcatggacgagatggagttcaccgaggccgagagcaacatgaatgacctggtgtccgagtaccagcagtaccaggatgccacagccgaggaggagggcgagttcgaggaggaggctgaggaggaggtggcctagagccttcagtcactggggaaagcagggaagcagtgtgaactctttattcactcccagcctgtcctgtggcctgtccactgtgtcacttctgttttcctgtccaatcatnctgttgtctgctagcaggtaccg

SEQ ID NO: 564509 - DNA, 409 bp, Homo sapiens
taccgacggggtggtatggtggagctggtgacaatggtttcgtgtactacatagtgcacatgataaagtggccttaaactgtgattctttctggtaggataatgttatacataagactcgaccctaaatgaatgccatggcttttaaactcgcagttactgtgttcttaatgaagcaatacccaaagctctgttcttttggagcacttgaggggagcttgaatgaaaggtgcagataagagcagtaccttgatcttatgctttctgagtgtcctgccttgttgccatctgcatggatgagtgaatgcttctatgcacgaggagactcaagcctactcagagtctgctttttccatcgctcttcccaggtttcttttgcaaagcttggtcttttggcccaggtcttcctg

SEQ ID NO: 564510 - DNA, 1572 bp, Homo sapiens
agcgggttctggcagcccattccgagactagcggaggcgggcagggagggtatataagcgttggcggagcgtcggttgtagcactctgcgcgcccgctcttctgctgctgtttgtctacttcctcctgcttccccgccgccgccgccgccatcatgagggaaatcgtgcacttgcaggccgggcagtgcggcaaccaaatcggcgccaagttttgggaggtgatcagcgatgagcacggcatcgaccccacgggcacctaccacggggacagcgacctgcagctggaacgcatcaacgtgtactacaatgaggccaccggcggcaagtacgtgccccgcgccgtgctcgtggatctggagcccggcaccatggactccgtgcgctcggggcccttcgggcagatcttccggccggacaacttcgttttcggtcagagtggtgctgggaacaactgggccaaggggcactacacagaaggcgcggagctggtggactcggtgctggatgttgtgagaaaggaggctgagagctgtgactgcctgcagggtttccagctgacccactccctgggtggggggactgggtctgggatgggtaccctcctcatcagcaagatccgggaggagtacccagacaggatcatgaacacgtttagtgtggtgccttcgcccaaagtgtcagacacagtggtggagccctacaacgccaccctctcagtccaccagctcgtagaaaacacagacgagacctactgcattgataacgaagctctctacgacatttgcttcagaaccctaaagctgaccacgcccacctatggtgacctgaaccacctggtgtctgctaccatgagtggggtcaccacctgcctgcgcttcccaggccagctcaatgctgacctgcggaagctggctgtgaacatggtcccgtttccccggctgcacttcttcatgcccggctttgccccactgaccagccggggcagccagcagtaccgggcgctgaccgtgcccgagctcacccagcagatgtttgatgccaagaacatgatggctgcctgcgacccccgccatggccgctacctgacggttgccgccgtgttcaggggccgcatgtccatgaaggaggtggatgagcaaatgcttaatgtccaaaacaaaaacagcagctattttgttgagtggatccccaacaatgtgaaaacggctgtctgtgacatcccacctcgggggctaaaaatgtccgccaccttcattggcaacagcacggccatccaggagctgttcaagcgcatctccgagcagttcacggccatgttccggcgcaaggccttcctgcactggtacacgggcgagggcatggacgagatggagttcaccgaggccgagagcaacatgaatgacctggtgtccgagtaccagcagtaccaggatgccacagccgaggaggagggcgagttcgaggaggaggctgaggaggaggtggcctgtcccactgtgtgcacttgctgttttccctgtccacatccatgctgtacagacaccaccattaaagcattttcatagtgaaaa

SEQ ID NO: 564511 - DNA, 1648 bp, Homo sapiens
  misc_feature (1503)..(1503): n is a, c, g, or t
  misc_feature (1509)..(1509): n is a, c, g, or t
  misc_feature (1539)..(1539): n is a, c, g, or t
  misc_feature (1569)..(1569): n is a, c, g, or t
  misc_feature (1581)..(1581): n is a, c, g, or t
  misc_feature (1587)..(1587): n is a, c, g, or t
  misc_feature (1603)..(1603): n is a, c, g, or t
  misc_feature (1605)..(1605): n is a, c, g, or t
  misc_feature (1627)..(1627): n is a, c, g, or t
  misc_feature (1647)..(1647): n is a, c, g, or t
agcgggttctggcagcccattccgagactagcggaggcgggcagggagggtatataagcgttggcggagcgtcggttgtagcactctgcgcgcccgctcttctgctgctgtttgtctacttcctcctgcttccccgccgccgccgccgccatcatgagggaaatcgtgcacttgcaggccgggcagtgcggcaaccaaatcggcgccaagttttgggaggtgatcagcgatgagcacggcatcgaccccacgggcacctaccacggggacagcgacctgcagctggaacgcatcaacgtgtactacaatgaggccaccggcggcaagtacgtgccccgcgccgtgctcgtggatctggagcccggcaccatggactccgtgcgctcggggcccttcgggcagatcttccggccggacaacttcgttttcggtcagagtggtgctgggaacaactgggccaaggggcactacacagaaggcgcggagctggtggactcggtgctggatgttgtgagaaaggaggctgagagctgtgactgcctgcagggtttccagctgacccactccctgggtggggggactgggtctgggatgggtaccctcctcatcagcaagatccgggaggagtacccagacaggatcatgaacacgtttagtgtggtgccttcgcccaaagtgtcagacacagtggtggagccctacaacgccaccctctcagtccaccagctcgtagaaaacacagacgagacctactgcattgataacgaagctctctacgacatttgcttcagaaccctaaagctgaccacgcccacctatggtgacctgaaccacctggtgtctgctaccatgagtggggtcaccacctgcctgcgcttcccaggccagctcaatgctgacctgcggaagctggctgtgaacatggtcccgtttccccggctgcacttcttcatgcccggctttgccccactgaccagccggggcagccagcagtaccgggcgctgaccgtgcccgagctcacccagcagatgtttgatgccaagaacatgatggctgcctgcgacccccgccatggccgctacctgacggttgccgccgtgttcaggggccgcatgtccatgaaggaggtggatgagcaaatgcttaatgtccaaaacaaaaacagcagctattttgttgagtggatccccaacaatgtgaaaacggctgtctgtgacatcccacctcgggggctaaaaatgtccgccaccttcattggcaacagcacggccatccaggagctgttcaagcgcatctccgagcagttcacggccatgttccggcgcaaggccttcctgcactggtacacgggcgagggcatggacgagatggagttcaccgaggccgagagcaacatgaatgacctggtgtccgagtaccagcagtaccaggacgccacggccgacgaacaaggggagttcgaggaggaggcagggcgaggacgaggcttaaaaacttctcanatcaancgtgcatccttagtgaacttctgttgtccncaagcatggtctttctacttgtaaactacngtgctcagtttngcctcngttagaaattcacacngntcgatcgtaatggatcgtcggnactcctctaaaaaattacang

SEQ ID NO: 564512 - DNA, 1739 bp, Homo sapiens
agcgggttctggcagcccattccgagactagcggaggcgggcagggagggtatataagcgttggcggagcgtcggttgtagcactctgcgcgcccgctcttctgctgctgtttgtctacttcctcctgcttccccgccgccgccgccgccatcatgagggaaatcgtgcacttgcaggccgggcagtgcggcaaccaaatcggcgccaagttttgggaggtgatcagcgatgagcacggcatcgaccccacgggcacctaccacggggacagcgacctgcagctggaacgcatcaacgtgtactacaatgaggccaccggcggcaagtacgtgccccgcgccgtgctcgtggatctggagcccggcaccatggactccgtgcgctcggggcccttcgggcagatcttccggccggacaacttcgttttcggtcagagtggtgctgggaacaactgggccaaggggcactacacagaaggcgcggagctggtggactcggtgctggatgttgtgagaaaggaggctgagagctgtgactgcctgcagggtttccagctgacccactccctgggtggggggactgggtctgggatgggtaccctcctcatcagcaagatccgggaggagtacccagacaggatcatgaacacgtttagtgtggtgccttcgcccaaagtgtcagacacagtggtggagccctacaacgccaccctctcagtccaccagctcgtagaaaacacagacgagacctactgcattgataacgaagctctctacgacatttgcttcagaaccctaaagctgaccacgcccacctatggtgacctgaaccacctggtgtctgctaccatgagtggggtcaccacctgcctgcgcttcccaggccagctcaatgctgacctgcggaagctggctgtgaacatggtcccgtttccccggctgcacttcttcatgcccggctttgccccactgaccagccggggcagccagcagtaccgggcgctgaccgtgcccgagctcacccagcagatgtttgatgccaagaacatgatggctgcctgcgacccccgccatggccgctacctgacggttgccgccgtgttcaggggccgcatgtccatgaaggaggtggatgagcaaatgcttaatgtccaaaacaaaaacagcagctattttgttgagtggatccccaacaatgtgaaaacggctgtctgtgacatcccacctcgggggctaaaaatgtccgccaccttcattggcaacagcacggccatccaggagctgttcaagcgcatctccgagcagttcacggccatgttccggcgcaaggccttcctgcactggtacacgggcgagggcatggacgagatggagttcaccgaggccgagagcaacatgaatgacctggtgtccgagtaccagcagtaccaggacgccacggccgaggaagagggcgagatgtacgaagacgacgaggaggagtcggaggcccagggccccaagtgaagctgctcgcagctggagtgagaggcaggtggcggccggggccgaagccagcagtgtctaaacccccggagccatcttgctgccgacaccctgctttcccctcgccctagggctcccttgccgccctcctgcagtatttatggcctcgtcctccccacctaggccacgtgtgagctgctcctgtctctgtcttattgcagctccaggcctgacgtcttacggtttcaagtggt

SEQ ID NO: 564513 - DNA, 563 bp, Homo sapiens
  misc_feature (369)..(369): n is a, c, g, or t
gccgaatatgttcattgtaaagcccatatacccttaaaagtcactggacgtccacgtatggtaatgtggtcacaatcagtattgtttctctttagtgaattcatgatttattcaaggtaacgtccaaggttcagaattttcagaaacaggtttgccaacgacagggttatattgcaaaactttgccgtgaagtttactcgtaggtgcagaagtaagagacaacttagatcaagtgaaggaaggggtaacagagttagaaatggctatctacactgatggacagtaagtatactaatgtagagcaggtaacaagtccccacgatgtataacatattcttctctaaaagctcacaaggaagttatgtgccnacttccgatcccctttcccagcagatggtaatggatgcaatttgcagaatagaacacttcgattgacaacaagtcactggaggtcctctggggatgcaggttaaaagcccaggatcaggccaggtgtggtggctcacgcctgtgtaatcccaggactgtgggagagtgagacgggcagatcacctgaagtcagg

SEQ ID NO: 564514 - DNA, 691 bp, Homo sapiens
  misc_feature (430)..(430): n is a, c, g, or t
  misc_feature (668)..(668): n is a, c, g, or t
gcagaaaagtcatccacgcccgtggcgataatcgccagcatactgacaataaacaccaatgcataggcggagaaaaatccccaaacggcttcgaggatacgttccggcagtgcgcgattccccagcttaatgctatagacggcgttcggatgcaccagtcgtttcagctcacggttcccctgcttaaacagcagcaggatgcggatcaccttcaggccaccgcccgttgacccggcgcaaccgccgataaaggctgaacataaaagcagtaccggcaaaaagagcggccagcgggcaatgctgtcagttgtaaacccggcggttgtcgccatcgacaccacctggaaaaacgcctggttaattgtcatcagcgccgaactgtagacattatgaaaccacagtacgagggtacaaataaccaccagcgtanactgtacgccgataaacatgcgaaattccggatcgcgccaataaaccttcagactacgcccacttaacagtgaaaagtgcagaccgtagttacagccggagatcagcaggaagatagcaatgatagtggtaataagtcggctatcgaaataaccgatacttgcatcatgtgtcgagaagcccgcaataacgatagtcgcaaagctttggccgttgggcatcaaagcattcatttcggnaaaaacacaacggcagggcacaa

SEQ ID NO: 564515 - DNA, 1647 bp, Homo sapiens
agcgggttctggcagcccattccgagactagcggaggcgggcagggagggtatataagcgttggcggagcgtcggttgtagcactctgcgcgcccgctcttctgctgctgtttgtctacttcctcctgcttccccgccgccgccgccgccatcatgagggaaatcgtgcacttgcaggccgggcagtgcggcaaccaaatcggcgccaagttttgggaggtgatcagcgatgagcacggcatcgaccccacgggcacctaccacggggacagcgacctgcagctggaacgcatcaacgtgtactacaatgaggccaccggcggcaagtacgtgccccgcgccgtgctcgtggatctggagcccggcaccatggactccgtgcgctcggggcccttcgggcagatcttccggccggacaacttcgttttcggtcagagtggtgctgggaacaactgggccaaggggcactacacagaaggcgcggagctggtggactcggtgctggatgttgtgagaaaggaggctgagagctgtgactgcctgcagggtttccagctgacccactccctgggtggggggactgggtctgggatgggtaccctcctcatcagcaagatccgggaggagtacccagacaggatcatgaacacgtttagtgtggtgccttcgcccaaagtgtcagacacagtggtggagccctacaacgccaccctctcagtccaccagctcgtagaaaacacagacgagacctactgcattgataacgaagctctctacgacatttgcttcagaaccctaaagctgaccacgcccacctatggtgacctgaaccacctggtgtctgctaccatgagtggggtcaccacctgcctgcgcttcccaggccagctcaatgctgacctgcggaagctggctgtgaacatggtcccgtttccccggctgcacttcttcatgcccggctttgccccactgaccagccggggcagccagcagtaccgggcgctgaccgtgcccgagctcacccagcagatgtttgatgccaagaacatgatggctgcctgcgacccccgccatggccgctacctgacggttgccgccgtgttcaggggccgcatgtccatgaaggaggtggatgagcaaatgcttaatgtccaaaacaaaaacagcagctattttgttgagtggatccccaacaatgtgaaaacggctgtctgtgacatcccacctcgggggctaaaaatgtccgccaccttcattggcaacagcacggccatccaggagctgttcaagcgcatctccgagcagttcacggccatgttccggcgcaaggccttcctgcactggtacacgggcgagggcatggacgagatggagttcaccgaggccgagagcaacatgaaatgacctggtgtccgagtaccagcagtaccaggatgccacagccgaggaggagggcgagttcgaggaggaggctgaggaggaggtggcctagagccttcagtcactggggaaagcagggaagcagtgtgaactctttattcactcccagcctgtcctgtggcctgtcccactgtgtgcacttgctgttttccctgtccacatccatgctgtacagacaccaccattaaagcattttcatagtgaaaa

SEQ ID NO: 564516 - DNA, 230 bp, Homo sapiens
aagacaataggagaattgaagacgagacttagaaagaactagacacaatcgtaagaggggttcgttgaggcacgtcggcttctgatgtctagatgagtcccctgtaggtcagagacaatgtcaactgtttacgtatcaggtcagtgaggggacagcgcaccagtgatgagtgagagattcgaccgttatcgcagtttgagttcccagtgtgtgtcgtgtagtacacacac

SEQ ID NO: 564517 - DNA, 118 bp, Homo sapiens
gactatgtgcgctgacggaactcaggtctgaacatcaggaaggtggtgactgtcagacatcaggctgtgacccggaagaaggacaaccgctttgctgtggccgttgactcagaggggt

SEQ ID NO: 564518 - DNA, 849 bp, Homo sapiens
ccttttgttcgctacatcctctctgttgggtctggtcgacaacccctcctcaggtgatctggccaaccaactcgcggcgtttacatccggctccccccatctcagtgagtgcgccccaacaaaggttcgtcactctcttccctcggggggttttaatcgctcgcgcctaatgttgtgtcccctctcgtatattagagccccccccttttccgtccagggggccacacgaagaacctctctggccactagaaccctgggggggcccccccccgaaaatggcggttctcctaggaagtagtgcttgtcctcgcgttcgcctcgctgtcgctcccagtctttcttgccacgcagtagcgttgctaccccgagacgaggttcctcctgcgagaatccccactggtactgctcccacggcgctctcgttttctaccccgcgctctattgcttcttcttccggagactactttggggcgcccacccctctaatactcgtctctaccccttcttctccttgtgtggcgcggcgcaccgcccgccgcggcatacccccagagcttctcctcgtaaagaacataagagttgtttcaccccctggaccctcagaactgcaccattcgtgactcatattgtgtccccccctgctaggggggagcctgcggctgcctctcgacttaagagcatccttctgtgcccgccgcgcgcagtagcccctcctcacaaatgtggggcgagcgcccgcccttggcagagacgaacaactgccgcctccccctgggtggataaccaataacccgcgtccccctggggtttttgcccataaaaaacccctttttttttcccaacaaaaca

SEQ ID NO: 564519 - DNA, 1462 bp, Homo sapiens
  misc_feature (1308)..(1308): n is a, c, g, or t
agcgggttctggcagcccattccgagactagcggaggcgggcagggagggtatataagcgttggcggagcgtcggttgtagcactctgcgcgcccgctcttctgctgctgtttgtctacttcctcctgcttccccgccgccgccgccgccatcatgagggaaatcgtgcacttgcaggccgggcagtgcggcaaccaaatcggcgccaagttttgggaggtgatcagcgatgagcacggcatcgaccccacgggcacctaccacggggacagcgacctgcagctggaacgcatcaacgtgtactacaatgaggccaccggcggcaagtacgtgccccgcgccgtgctcgtggatctggagcccggcaccatggactccgtgcgctcggggcccttcgggcagatcttccggccggacaacttcgttttcggtcagagtggtgctgggaacaactgggccaaggggcactacacagaaggcgcggagctggtggactcggtgctggatgttgtgagaaaggaggctgagagctgtgactgcctgcagggtttccagctgacccactccctgggtggggggactgggtctgggatgggtaccctcctcatcagcaagatccgggaggagtacccagacaggatcatgaacacgtttagtgtggtgccttcgcccaaagtgtcagacacagtggtggagccctacaacgccaccctctcagtccaccagctcgtagaaaacacagacgagacctactgcattgataacgaagctctctacgacatttgcttcagaaccctaaagctgaccacgcccacctatggtgacctgaaccacctggtgtctgctaccatgagtggggtcaccacctgcctgcgcttcccaggccagctcaatgctgacctgcggaagctggctgtgaacatggtcccgtttccccggctgcacttcttcatgcccggctttgccccactgaccagccggggcagccagcagtaccgggcgctgaccgtgcccgagctcacccagcagatgtttgatgccaagaacatgatggctgcctgcgacccccgccatggccgctacctgacggttgccgccgtgttcaggggccgcatgtccatgaaggaggtggatgagcaaatgcttaatgtccaaaacaaaaacagcagctattttgttgagtggatccccaacaatgtgaaaacggctgtctgtgacatcccacctcgggggctaaaaatgtccgccaccttcattggcacaggcaggccatcaggagcgtcaagcgccttcgagcagtcacggcangtcggggcaaggctctggcaggtaccggggggtgggcaagggtcggaggcaacaagagcgggcgtccggccggtcacggggggtcgggggcagggcaccgggaggagaaaccggcaggtggcccgcttaaaactgggcgcccactttgtggacg

SEQ ID NO: 564520 - DNA, 1739 bp, Homo sapiens
  misc_feature (1146)..(1146): n is a, c, g, or t
agcgggttctggcagcccattccgagactagcggaggcgggcagggagggtatataagcgttggcggagcgtcggttgtagcactctgcgcgcccgctcttctgctgctgtttgtctacttcctcctgcttccccgccgccgccgccgccatcatgagggaaatcgtgcacttgcaggccgggcagtgcggcaaccaaatcggcgccaagttttgggaggtgatcagcgatgagcacggcatcgaccccacgggcacctaccacggggacagcgacctgcagctggaacgcatcaacgtgtactacaatgaggccaccggcggcaagtacgtgccccgcgccgtgctcgtggatctggagcccggcaccatggactccgtgcgctcggggcccttcgggcagatcttccggccggacaacttcgttttcggtcagagtggtgctgggaacaactgggccaaggggcactacacagaaggcgcggagctggtggactcggtgctggatgttgtgagaaaggaggctgagagctgtgactgcctgcagggtttccagctgacccactccctgggtggggggactgggtctgggatgggtaccctcctcatcagcaagatccgggaggagtacccagacaggatcatgaacacgtttagtgtggtgccttcgcccaaagtgtcagacacagtggtggagccctacaacgccaccctctcagtccaccagctcgtagaaaacacagacgagacctactgcattgataacgaagctctctacgacatttgcttcagaaccctaaagctgaccacgcccacctatggtgacctgaaccacctggtgtctgctaccatgagtggggtcaccacctgcctgcgcttcccaggccagctcaatgctgacctgcggaagctggctgtgaacatggtcccgtttccccggctgcacttcttcatgcccggctttgccccactgaccagccggggcagccagcagtaccgggcgctgaccgtgcccgagctcacccagcagatgtttgatgccaagaacatgatggctgcctgcgacccccgccatggccgctacctgacggttgccgccgtgttcaggggccgcatgtccatgaaggaggtggacgagcagatgctnaccatccagagcaagaacagcagctacttcgtggagtggatccccaacaacgtgaaggtggccgtgtgtgacatcccgccccgcggcctcaagatgtcctccaccttcatcgggaacagcacggccatccaggagctgttcaagcgcatctccgagcagttcacggccatgttccggcgcaaggccttcctgcactggtacacgggcgagggcatggacgagatggagttcaccgaggccgagagcaacatgaatgacctggtgtccgagtaccagcagtaccaggacgccacggccgaggaagagggcgagatgtacgaagacgacgaggaggagtcggaggcccagggccccaagtgaagctgctcgcagctggagtgagaggcaggtggcggccggggccgaagccagcagtgtctaaacccccggagccatcttgctgccgacaccctgctttcccctcgccctagggctcccttgccgccctcctgcagtatttatggcctcgtcctccccacctaggccacgtgtgagctgctcctgtctctgtcttattgcagctccaggcctgacgtcttacggtttcaagtggt

SEQ ID NO: 564521 - DNA, 126 bp, Homo sapiens
taaggatcccccgtccgcgaagcacaaaatgatcgccccacgctgcgccatcgcggccggcaagctcgccatgcgtgggccctctgccgccgcctccaacactctctccctcgcatgcagcaggcg

SEQ ID NO: 564522 - DNA, 1585 bp, Homo sapiens
  misc_feature (1146)..(1146): n is a, c, g, or t
  misc_feature (1568)..(1568): n is a, c, g, or t
agcgggttctggcagcccattccgagactagcggaggcgggcagggagggtatataagcgttggcggagcgtcggttgtagcactctgcgcgcccgctcttctgctgctgtttgtctacttcctcctgcttccccgccgccgccgccgccatcatgagggaaatcgtgcacttgcaggccgggcagtgcggcaaccaaatcggcgccaagttttgggaggtgatcagcgatgagcacggcatcgaccccacgggcacctaccacggggacagcgacctgcagctggaacgcatcaacgtgtactacaatgaggccaccggcggcaagtacgtgccccgcgccgtgctcgtggatctggagcccggcaccatggactccgtgcgctcggggcccttcgggcagatcttccggccggacaacttcgttttcggtcagagtggtgctgggaacaactgggccaaggggcactacacagaaggcgcggagctggtggactcggtgctggatgttgtgagaaaggaggctgagagctgtgactgcctgcagggtttccagctgacccactccctgggtggggggactgggtctgggatgggtaccctcctcatcagcaagatccgggaggagtacccagacaggatcatgaacacgtttagtgtggtgccttcgcccaaagtgtcagacacagtggtggagccctacaacgccaccctctcagtccaccagctcgtagaaaacacagacgagacctactgcattgataacgaagctctctacgacatttgcttcagaaccctaaagctgaccacgcccacctatggtgacctgaaccacctggtgtctgctaccatgagtggggtcaccacctgcctgcgcttcccaggccagctcaatgctgacctgcggaagctggctgtgaacatggtcccgtttccccggctgcacttcttcatgcccggctttgccccactgaccagccggggcagccagcagtaccgggcgctgaccgtgcccgagctcacccagcagatgtttgatgccaagaacatgatggctgcctgcgacccccgccatggccgctacctgacggttgccgccgtgttcaggggccgcatgtccatgaaggaggtggacgagcagatgctnaccatccagagcaagaacagcagctacttcgtggagtggatccccaacaacgtgaaggtggccgtgtgtgacatcccgccccgcggcctcaagatgtcctccaccttcatcgggaacagcacggccatccaggagctgttcaagcgcatctccgagcagttcacggccatgttccggcgcaaggccttcctgcactggtacacgggcgagggcatggacgagatggagttcaccgaggccgagagcaacatgaatgacctggtgtccgagtaccagcagtaccaggacgccacggccgacgaacaaggggagttcgaggaggaggcagggcgaggacgaggcgtagatgcccccgcgagacgggttagggaaagcggaggaggaaagcgagggggtggggggctccccgggacgaaaacccnccaggggaaggaaagaa

SEQ ID NO: 564523 - DNA, 1052 bp, Homo sapiens
  misc_feature (956)..(956): n is a, c, g, or t
agcgggtcgcttccacaggcaagccgtacagcgccggcggttgtggtgccatcatgctgtctcctgatccctgaatgagtcccatgcttatgctgctgagtacgtcaacaccgaacatcggagtggcgcggacgggaaaatacccttatgacgatcattgaccgatgtgactggatggttgggcctgagactagtatatctacacttgtgcggtgcttgcagcgcaaatgactgatcgagttgcacacttcgattcgatacaatcgcgacgagacacggcaagctccaggtgaaagagcactcgtacgtgttcgtgtacaacagttgggtcgaactcccagctcgatcttattggccaggaaattgcacgacgtctctacgcttaagccaatatggaatccgccgatttacctcgcgctctacctgtagacagagcgattgaccgaagcatcccggagtcgtactacgcgcattggcccacagaaatttagtagagccgcagcggaacgcctagggtctcataatgcgctccttggcgccaagcaatccataagccatccagcgcatagccaaacgaacccccttggccgcagcccgaaaacattgtggaccgccaacgccattccacgcgggcccccctctaacgttgaggggcccctcgagcgattccaaactttctcactgggtcgagcgctaggccttagacggatttcgctacacagaaaaagcgcaggcgaacgagcgaatccaacaaccgcgatggccaacggcgagcattgggcatgccggacgcccgtctgaagccaccctggagcaaccacacggttttgacgccattgacttggttccccccaccagggaacaccgagaagcatcatattgacaaacgattcaccttcagtttgacaatgaggccccctggtagtggctcaatcccatagagagtcgcaacaccncctgacggacgaaccattcagcggcacttgcgcatcaactgttccagtttaaacggcgcaacaagtaatatgagcaacgagagcacacagcctcga

SEQ ID NO: 564524 - DNA, 1333 bp, Homo sapiens
agcgggttctggcagcccattccgagactagcggaggcgggcagggagggtatataagcgttggcggagcgtcggttgtagcactctgcgcgcccgctcttctgctgctgtttgtctacttcctcctgcttccccgccgccgccgccgccatcatgagggaaatcgtgcacttgcaggccgggcagtgcggcaaccaaatcggcgccaagttttgggaggtgatcagcgatgagcacggcatcgaccccacgggcacctaccacggggacagcgacctgcagctggaacgcatcaacgtgtactacaatgaggccaccggcggcaagtacgtgccccgcgccgtgctcgtggatctggagcccggcaccatggactccgtgcgctcggggcccttcgggcagatcttccggccggacaacttcgttttcggtcagagtggtgctgggaacaactgggccaaggggcactacacagaaggcgcggagctggtggactcggtgctggatgttgtgagaaaggaggctgagagctgtgactgcctgcagggtttccagctgacccactccctgggtggggggactgggtctgggatgggtaccctcctcatcagcaagatccgggaggagtacccagacaggatcatgaacacgtttagtgtggtgccttcgcccaaagtgtcagacacagtggtggagccctacaacgccaccctctcagtccaccagctcgtagaaaacacagacgagacctactgcattgataacgaagctctctacgacatttgcttcagaaccctaaagctgaccacgcccacctatggtgacctgaaccacctggtgtctgctaccatgagtggggtcaccacctgcctgcgcttcccaggccagctcaatgctgacctgcggaagctggctgtgaacatggtcccgtttccccggctgcacttcttcatgcccggctttgccccactgaccagccggggcagccagcagtaccgggcgctgaccgtgcccgagccttcctgcactggtacacgggcgagggcatggacgagatggagttcaccgaggccgagagcaacatgaatgacctggtgtccgagtaccagcagtaccaggatgccacagccgaggaggagggcgagttcgaggaggaggctgaggaggaggtggcctagagccttcagtcactggggaaagcagggaagcagtgtgaactctttattcactcccagcctgtcctgtggcctgtcccactgtgtgcacttgctgttttccctgtccacatccatgctgtacagacaccaccattaaagcattttcatagtgaaaa

SEQ ID NO: 564525 - DNA, 1660 bp, Homo sapiens
  misc_feature (1637)..(1637): n is a, c, g, or t
agcgggttctggcagcccattccgagactagcggaggcgggcagggagggtatataagcgttggcggagcgtcggttgtagcactctgcgcgcccgctcttctgctgctgtttgtctacttcctcctgcttccccgccgccgccgccgccatcatgagggaaatcgtgcacttgcaggccgggcagtgcggcaaccaaatcggcgccaagttttgggaggtgatcagcgatgagcacggcatcgaccccacgggcacctaccacggggacagcgacctgcagctggaacgcatcaacgtgtactacaatgaggccaccggcggcaagtacgtgccccgcgccgtgctcgtggatctggagcccggcaccatggactccgtgcgctcggggcccttcgggcagatcttccggccggacaacttcgttttcggtcagagtggtgctgggaacaactgggccaaggggcactacacagaaggcgcggagctggtggactcggtgctggatgttgtgagaaaggaggctgagagctgtgactgcctgcagggtttccagctgacccactccctgggtggggggactgggtctgggatgggtaccctcctcatcagcaagatccgggaggagtacccagacaggatcatgaacacgtttagtgtggtgccttcgcccaaagtgtcagacacagtggtggagccctacaacgccaccctctcagtccaccagctcgtagaaaacacagacgagacctactgcattgataacgaagctctctacgacatttgcttcagaaccctaaagctgaccacgcccacctatggtgacctgaaccacctggtgtctgctaccatgagtggggtcaccacctgcctgcgcttcccaggccagctcaatgctgacctgcggaagctggctgtgaacatggtcccgtttccccggctgcacttcttcatgcccggctttgccccacttgacaggcggggcagccaggaccgtgcccgagctcacccagcagatgtttgatgccaagaacatgatggctgcctgcgacccccgccatggccgctacctgacggttgccgccgtgttcaggggccgcatgtccatgaaggaggtggatgagcaaatgcttaatgtccaaaacaaaaacagcagctattttgttgagtggatccccaacaatgtgaaaacggctgtctgtgacatcccacctcgggggctaaaaatgtccgccaccttcattggcaacagcacggccatccaggagctgttcaagcgcatctccgagcagttcacggccatgttccggcgcaaggccttcctgcactgtgtcaccatggctaacatcagtgagtcgaagagagccactgcgactgtagtataggatgattcactgcgtggtccgagtacgcaatcatgatatgtacctggtggtcagagtaccagcagtaccagagatgtccacagtccgtacggtacggatggagcgagttccgaggaggaagtgcctgaggagcgagtggcctagagccttcagtcactggggaaagcagggaagcagtgtgaactctttattcactcccagcctgtcctgtggcctgtccactgtgtcacttctgttttcctgtccaatcatnctgttgtctgctagcaggtaccg

SEQ ID NO: 564526 - DNA, 204 bp, Homo sapiens
  misc_feature (93)..(93): n is a, c, g, or t
  misc_feature (154)..(154): n is a, c, g, or t
  misc_feature (183)..(183): n is a, c, g, or t
ccacatcccagctaatttttgtatttttttgtagagatggggttttgccatgtccaggctagtctcaaactcctggcagattcaagcagtctntccgcctcagcatcccaaagtgctgggattacaggcacaggcatgagccaccatacccggncgtccagttctttttaatgcagtatcctntatcatattcatagggtcaaa

SEQ ID NO: 564527 - DNA, 1555 bp, Homo sapiens
  misc_feature (1046)..(1046): n is a, c, g, or t
cttcttcgcttgttgtgtggttgacctagttggcgttggtgttcaggctctctatggtgatctgttagtgggtgttgctcctgctggctcccagtgtgtgttcctgcttggggagttgtggtactgtgttttattatctcctgcttgtgggggctcctccgcgctgattgttggtggtgcctcatactgtctgttgggtcccccactgatgatatggtgggtgtgttactaattttttccgggagcgggattgtggaatgttttgcggctagaagcttggccccatagtttttggaggactgctccccgcggagggcaccctggtggtgccggggccgctgctattgttgccccgctgtgcctgaatcccctccgcttgtgtttttatccgttttgtttgggatggaggatcctcccctgtgggtgccccccccatcaatgtgttttgcttcaccaggggttgaccaatagtctgtgtcggcgccggatattggctcttttgaaagttgggggggtcgttccttttgctccttgttggggggtggctcccgcgcccacgcgcacaaggtggtgtgtagtagaacacccgctatcgtgtgggtaccgtttggtgttgtgcgccccgtctatagggggggggctacgagttttttttgcccctcttagaaaaaggagggcttcttcttgtacaaatttttttgcctctctttggtgtttgcgcgcagaaaacacagagcgtgctgtgttataaaatgttataaaattttcgcgggggtaaagtaagtttatacacccagcttaacacatgtgtgtgtcaccacagtgacccctcacaataaagagaataaataagatcccccccccgtatagaccgccacgctgtgtgatgtgtgttataagcattagtctcaatgttgtcacacagagagagacactttgtctcccagagagactttcacacacacacagtgtccccagtctctattatgagttgtcgcacagacccccctgggtcccacagattttgagagttctctttacacacncccccactgtgacactctctcttgtccgctctgtgtctgtgtctctctggagaaataaaaaactgtagattgtagaaatttggctctgttgctctgtgttgtttgtaacactcgagagtgtgaaattgagagagattgaatggtggtgttgttcacactcggagagtttgtgagtgcttctctcacacacttccctgccacctcttaacccacatattgagaaatatgaaacctctttggtgctttatctgaagaatgaggaataatgtttgaagagatgccacccgcttggagataaatgtgggagaaatgaccatctaagctttacctggtccacccacgtgatagtgatccagaagccttgaaatttaacaccttttccaccttggttctttatactgaatgcccgactctgctctgtgttagagatatgaaatggtgtttgatactgtttgagaccttatggagagatttaattatttgtaataacaagatttgctcccgtctga

SEQ ID NO: 564528 - DNA, 203 bp, Homo sapiens
gctggcggtcgagttctatgaggatccccccagatgctgcttcgtgaaatacacagaacgagtacagtccctcatctggtagctaaaatcatgaagatcattgttgataccctaagggcttcttcgaatcaatgtggactgtgtcttccctggagccctgagtggctgaggcgggagttgatagctgtaacaatggggattca

SEQ ID NO: 564529 - DNA, 156 bp, Homo sapiens
tcatagctggcacagcttcgtatgcctctatataaaaccatacaccttaacaatattaaaacaacatctgactccaagtaaactaatgctctatacccactccaatattacataagagtatctttggcccaaagagaaccaggtacacacttacag

SEQ ID NO: 564530 - DNA, 573 bp, Homo sapiens
tgtgattattcaatttcatccaaagacttccatcgctgagaatattcgtactcaaatcgtgccatagctgaggcacaaacgaggaaggagtttctctctcctttagatacattggaaacatctgggcaagtttttcagagaagaccatcttcatcatctagttgttaaagtggatacacaatgactggaagaagagttgtcgtcagtaagaaaacaccttcactgacatcgttcaaatgcatatcttgctgatggcatagaagcaaattcaacaatgcctttccctgtagatcttccacgatcatccactattacaacagcacttatcaataggaccaaattggctaaaggcttcttccagaagttccatggaaacatgaggtgaaagatatcggacaaaaaaggggaaagagaaattttggaaaaagcgaatccgaaagcgtagtacctctcaaagggggatacatccagattcggctttggcaatttcaggcgaagctctaagattccagcttaaaaaatccgaacccaatgcctatgtttgataaaacatctcctgggtccccatattta

SEQ ID NO: 564531 - DNA, 1176 bp, Homo sapiens
agtggaggccggacgacaggaacaggttgagacatgtctatccctcccttatctagggaagtactcccacccgtggagccgtcgctgtagacccatcaaaccaatcttctccgttacaccttagcaggtgtctcctctatcttaggggccatcgaatttccatcaacaacgattatcaatatgaaaccccactgccataacctcgaatcagcaaacgccccatctacgtctgatcgcgtccgtaatcgacagcaggcctagttctcctatctctcccagtccttagctgcgtggcgatcgactatactagctaacaggaactgcgaacactcaaaacacaacgttcttcgacccctgccggaggatggagacgccccgattctatagcaagaacctattctgatctgattccggatgcatcgcctgaaggttatatatagcgtatagtactaccaggctgtctgtgactaatcttcccatattgtaacacttacttactaccggcaaaagcgacagaaccacttttggataacatcaggtatcggacatgaggctatgcactatcacatctgggctaccacgaaggggtttcattgcgtgatgaagcaggcacccagatatacgtacacagcagtagggggatatgaccggctggaagacaaagaaggcaatacttgacaacatcccgtataccaactagaatggagtcgcatattcgcccgacgcggacgtacacaagctaagtttagcttgacttcggccaagagttccgagacaaaagcaagcagtacaaatggagtcacggcaatgccacggaggcatctgaaagaccccataaggcaacacaaaagaagacctgagcacagcccggagggctggacccgacagcggagcaatgaccacaacccgcaccacactacagccggaagaaataggaacaaccccaggaacacgggagcggaccggggtagggaaaacggacgaaaaaggtcccgaaagagacagcagaggggcgcaggacaagccaaggagggaagagagacgtgacaacccgaagtacaccaggcaccaaactaagaagagcccgacggcgaacaccaagcgaacataagaataagcgggggaaaaagaaggaacagccaagcacgtccgcgatccgaaggccgagatagtgcc

SEQ ID NO: 564532 - DNA, 367 bp, Homo sapiens
  misc_feature (359)..(359): n is a, c, g, or t
tgagatggagtctcactgtcacccaggccggagtgtagtggcgctatctcggctcactgcaaccgctgcctcccaggttcatgcggttctcctgcctcagcctcccgagtagctgggattataggtacgcaacataacgcctggctaatttttgtatttttagtagagatggggtttcaccgtgttagccaggatggtctcgatctcctgacctcgtgatccacccacctcggcctcccaaagtgctgggatcacaggtgtgagccaccacgcctggccgcctaaatacttttcaattcatctttgtaactgttaactgttcaggaacagtatgcacttctcaagggctgtcctgacangtggattc

SEQ ID NO: 564533 - DNA, 123 bp, Homo sapiens
agacatcgagcataacttcatctctttcttagttacagaaaaatcctctcgtaaccgacatgcacagggttatgggatccgtcacccaacgctctcatcaacctgcgggggaaactgtgttct

SEQ ID NO: 564534 - DNA, 558 bp, Homo sapiens
aaaccatataggctaggtagagctggtgtgatcggagaggttacgcggcggtgcgctctttacctcgtgatcggttgtctggcgcgcgagggctcacggtcgcagtccgagaacctgccggtggtgcgcatccagtgctctacagggcgttggacagcggcgagcaggcggggacctccgaggcggtgctggtcgaccggacgtgctggttcggcgcggcggcggagttgaccagccggcgcgcctcacactgtgccgttgggagcgcgcgccgtagcctctcaaggctggaagagtcgacgcgcgcgtcgggaccacttctccatcgagcgcgcgcaacaggaggcgccagcggtgcgaaagctctcgtctaagggcagctttgctgaactgggcctggagccccgtgttgctgcacgcaactacaggaggctgcgcctgaagtcgttcaggcccacaaccgtgcagtctagcaccatcccctcactacttcgacggccgccatgtcgtttggcggccgcagaaaacgggcagtggcaagactctcaactacctcct

SEQ ID NO: 564535 - DNA, 165 bp, Homo sapiens
agattacatagcaagacttactactgtcaacacgttgatagtgacccgctcattttcgtgcggagggaccaatgtggatgtcaaaacgaactgtggcgtgcaccatctgtcttcatctacccgccatctgatgagcagttgaaatctggaactgcctctgttgtg

SEQ ID NO: 564536 - DNA, 337 bp, Homo sapiens
  misc_feature (288)..(288): n is a, c, g, or t
ctctactttgtaagatgaccataatactctcactctcttaaatcactatctggcaggcggctgtcgcacgcctgtaatcccagcactttcggaggccgaggcaggtggatcactggaggtcaggagttcgagacgagcctggccaacaccgtgaaacccccatctttactgaaaatacaaaaaaattggccgggcatggttgcgggcgcctgtggtctcagctactcgggaggctgagacaggataatcgcttgaacccgggaggtggaggttgcagtgagccgagantccaacgctgcactccagcctgggtgacagagtgagactctgtctcaaa

SEQ ID NO: 564537 - DNA, 398 bp, Homo sapiens
  misc_feature (53)..(53): n is a, c, g, or t
  misc_feature (75)..(75): n is a, c, g, or t
  misc_feature (104)..(104): n is a, c, g, or t
  misc_feature (107)..(107): n is a, c, g, or t
  misc_feature (118)..(118): n is a, c, g, or t
  misc_feature (122)..(122): n is a, c, g, or t
  misc_feature (128)..(128): n is a, c, g, or t
  misc_feature (132)..(132): n is a, c, g, or t
  misc_feature (156)..(156): n is a, c, g, or t
  misc_feature (160)..(160): n is a, c, g, or t
  misc_feature (258)..(258): n is a, c, g, or t
  misc_feature (260)..(260): n is a, c, g, or t
  misc_feature (262)..(262): n is a, c, g, or t
  misc_feature (269)..(269): n is a, c, g, or t
  misc_feature (295)..(295): n is a, c, g, or t
  misc_feature (316)..(316): n is a, c, g, or t
  misc_feature (336)..(336): n is a, c, g, or t
  misc_feature (368)..(368): n is a, c, g, or t
  misc_feature (371)..(371): n is a, c, g, or t
  misc_feature (379)..(379): n is a, c, g, or t
  misc_feature (389)..(389): n is a, c, g, or t
  misc_feature (392)..(392): n is a, c, g, or t
gaaattcggccataagggccgggaaactcggggggggccattgggcaaaccanacttggttggaactcgggcgcntggtttggtttttcttcggaaaccatgtntgncaaacccgatngggntgaaancganaaattcgataggtcgaacctgaanaagncggagacgcaggagaaaaatccacggctttccaaggaaccgatggaccaggagaagcaggcaggcgaatcgaaaggaggcgtgcgccgccaatatgcncngnccattcnacaggcatggccttctaatttaactnctttaagcggttaaactttgnaggaggcaaagaggttggancaggtttgcctttccaatcggccaatcaatcngcntgccaggnaaggaagganctngcttgt

SEQ ID NO: 564538 - DNA, 2885 bp, Homo sapiens
  misc_feature (657)..(657): n is a, c, g, or t
  misc_feature (1758)..(1758): n is a, c, g, or t
gagagggaagtggcgtggcttcaacagactttcttttgcctgtctttgtcccagagcctcttccctggccctgctgagaccactgctctaagaagagaccaccagactgagagaggactcccagctgccctcagagcggaggccgagtgctgcacagccacagctgctctgaagcccttccatgaatccccggaagaaggtggacctgaaactcattatcgtcggagccattggtgtgggaaagacctccctccttcaccaatatgtgcacaagacgttttatgaggaataccagaccacactgggggccagcatcctctccaagattatcatattgggtgacacaactttgaagttacagatctgggacacgggcggtcaggagcggttccgctccatggtgtccacgttctacaagggctccgatggctgcatcctagcttttgatgtcaccgacctggagtcttttgaagccctggatatctggcggggtgatgtcctggccaagattgtccccatggagcagtcctaccccatggtgttgttggggaacaagatcgatctggcagaccggaaggtaccccaggaagtagctcaaggctggtgtagagagaaagatattccttactttgaagtcagtgccaagaatgacatcantgtggtgcaagcgtttgagatgctggccagtagggctctgtcgaggtaccagagcatcttagaaaatcacctcacagaatccatcaagctctcgccagaccagtcaaggagcagatgctgctgacctccagacgcctgctctggaagcccagaaacagagcctgccccgagcctggtcaccccaggcttgagaacaggtgaccatccccctccagccccactgcctgcccaagcacagtgcagggggcctaagctctgcggcagagcccttgaccctggtgctgggcccagagtcagagggcagcccctggctcaggctgagtatagtgagagcgtctggatgaagcccggaatgtcagagccaaaccctggtcctgcagaagtcacagtttccgcagtggctccagctttccccacccatccacccctcaaacactcccgctccagaacacacatctccgcagaccggccactgattggagtctggttacatcctcctgtggacagaccttcctcacccgctcccacctcacacccctcagccacaagcaaagctttggacaatggcacagctcagcctccttcaacgagcagactaaggagtaaaggtctggaccccacatgctgggcccgcctcagctcctggcagaagctgtcgtgcctgagaccccctctgctccctccagggtagaagactgagggagcacaggagaagccacaagggaccatggctcattcctccttgctgggtgctcaggcaactcacataaatctctgagtctcaatttgtttatctgtcctgtgggggtgagatgtgccttgccccctgtatcacagtgtggttttgaggaccagaagctgtgcttaaatccagtagctgttgtcaatatgcatttatttacttctttgacaagtttatttttgcgtatctactatgtacgatgcattgaagtccagggacaaacaaaacacagggactctgccctcctggagccgacatctggtgagggagagacgcagactctagacagatatttccaaatagcaggtaagtgctataaacaaagggaaacagggtaatgggatagagtgacagggggngggatgagttgctattttagatgaagtggtccaggagggcttccctgaggaggtggcatttggtctgagggctagagaatgagaaagcagctgtcacctgagagctggagaaagaacattccagggagagggagcatcaagacccaaagccctgaggcaaaaacaagcttgccatgttccaggaacagtgaaaggacatccattgacctaatctcaaagctgctgtcccaaagacaaagcaaaggggacccagctcccttgggtggctcctagatgctctgctgcctgaccaccagagggcagcagtgctccttctcttccaggctgagcagaaagtggatgctcatgaacgttttaggagctggggttttgtccttcagatgctcaaagcttgttcatgggcttggaggcatgtttagccctttgggatttgtaaggcagagaattccaatttcttaagcctagtaagaaatgagcaaaaacttcaatatatatgactcaggcaagaaatcagcatctgtggcaaatactagaatgaaatgcaagaaagctcactgcaaggagtctccctccctgcagattccaaggctggaatctttttcttctggctccaggcagcacagacagggcctagcctggagagggtggacaagatgtcctctcagggtcttcaatggccaagtccaagcccactgcagaatctttctgtctacccgtaagtatcctttcctgagttccaggcaaagctggggatgttagcctatgactgtcatctgacttggaaggtacacctaggggccggggggaggtcagcaggggagtttgggagccacttctccccccacgtggcactggagtgtgaactggctcattctggacaccagcatggagccagcacgggaacaggggggcagcctagagcacaagctctatctgtgtccttcagagctcctgggaaacatgatgcgccctcatgggaatggcattttgcatatcacacaggctgtcctgggagtcaggcagactggattgtcacgtgcggtgtgcatgcagcagcttgtgcactgcagtggacctgtggaccatttctaaaggtgcacaacaaataataaatgtgtccttctttg

SEQ ID NO: 564539 - DNA, 166 bp, Homo sapiens
ctgagatgagtaggcaatacatgtccccgcctctcattcgtcgcccttcccggacggttccggtgacgattcttgccgtcttgctcgtggcagccggggtggtggccatcattgctgccattcaacgactccagcacggatccttgccgggatggttggcctgggg

SEQ ID NO: 564540 - DNA, 2759 bp, Homo sapiens
  misc_feature (1632)..(1632): n is a, c, g, or t
gagagggaagtggcgtggcttcaacagactttcttttgcctgtctttgtcccagagcctcttccctggccctgctgagaccactgctctaagaagagaccaccagactgagagaggactcccagctgccctcagagcggaggccgagtgctgcacagccacagctgctctgaagcccttccatgaatccccggaagaaggtggacctgaaactcattatcgtcggagccattggtgtgggaaagacctccctccttcaccaatatgtgcacaagacgttttatgaggaataccagaccacactgggggccagcatcctctccaagattatcatattgggtgacacaactttgaagttacagatctgggacacgggcggtcaggagcggttccgctccatggtgtccacgttctacaagggctccgatggctgcatcctagcttttgatgtcaccgacctggagtcttttgaagccctggatatctggcggggtgatgtcctggccaagattgtccccatggagcagtcctaccccatggtgttgttggggaacaagatcgatctggcagaccggaagtaccagagcatcttagaaaatcacctcacagaatccatcaagctctcgccagaccagtcaaggagcagatgctgctgacctccagacgcctgctctggaagcccagaaacagagcctgccccgagcctggtcaccccaggcttgagaacaggtgaccatccccctccagccccactgcctgcccaagcacagtgcagggggcctaagctctgcggcagagcccttgaccctggtgctgggcccagagtcagagggcagcccctggctcaggctgagtatagtgagagcgtctggatgaagcccggaatgtcagagccaaaccctggtcctgcagaagtcacagtttccgcagtggctccagctttccccacccatccacccctcaaacactcccgctccagaacacacatctccgcagaccggccactgattggagtctggttacatcctcctgtggacagaccttcctcacccgctcccacctcacacccctcagccacaagcaaagctttggacaatggcacagctcagcctccttcaacgagcagactaaggagtaaaggtctggaccccacatgctgggcccgcctcagctcctggcagaagctgtcgtgcctgagaccccctctgctccctccagggtagaagactgagggagcacaggagaagccacaagggaccatggctcattcctccttgctgggtgctcaggcaactcacataaatctctgagtctcaatttgtttatctgtcctgtgggggtgagatgtgccttgccccctgtatcacagtgtggttttgaggaccagaagctgtgcttaaatccagtagctgttgtcaatatgcatttatttacttctttgacaagtttatttttgcgtatctactatgtacgatgcattgaagtccagggacaaacaaaacacagggactctgccctcctggagccgacatctggtgagggagagacgcagactctagacagatatttccaaatagcaggtaagtgctataaacaaagggaaacagggtaatgggatagagtgacagggggngggatgagttgctattttagatgaagtggtccaggagggcttccctgaggaggtggcatttggtctgagggctagagaatgagaaagcagctgtcacctgagagctggagaaagaacattccagggagagggagcatcaagacccaaagccctgaggcaaaaacaagcttgccatgttccaggaacagtgaaaggacatccattgacctaatctcaaagctgctgtcccaaagacaaagcaaaggggacccagctcccttgggtggctcctagatgctctgctgcctgaccaccagagggcagcagtgctccttctcttccaggctgagcagaaagtggatgctcatgaacgttttaggagctggggttttgtccttcagatgctcaaagcttgttcatgggcttggaggcatgtttagccctttgggatttgtaaggcagagaattccaatttcttaagcctagtaagaaatgagcaaaaacttcaatatatatgactcaggcaagaaatcagcatctgtggcaaatactagaatgaaatgcaagaaagctcactgcaaggagtctccctccctgcagattccaaggctggaatctttttcttctggctccaggcagcacagacagggcctagcctggagagggtggacaagatgtcctctcagggtcttcaatggccaagtccaagcccactgcagaatctttctgtctacccgtaagtatcctttcctgagttccaggcaaagctggggatgttagcctatgactgtcatctgacttggaaggtacacctaggggccggggggaggtcagcaggggagtttgggagccacttctccccccacgtggcactggagtgtgaactggctcattctggacaccagcatggagccagcacgggaacaggggggcagcctagagcacaagctctatctgtgtccttcagagctcctgggaaacatgatgcgccctcatgggaatggcattttgcatatcacacaggctgtcctgggagtcaggcagactggattgtcacgtgcggtgtgcatgcagcagcttgtgcactgcagtggacctgtggaccatttctaaaggtgcacaacaaataataaatgtgtccttctttg

SEQ ID NO: 564541 - DNA, 401 bp, Homo sapiens
  misc_feature (53)..(53): n is a, c, g, or t
  misc_feature (75)..(75): n is a, c, g, or t
  misc_feature (104)..(104): n is a, c, g, or t
  misc_feature (107)..(107): n is a, c, g, or t
  misc_feature (118)..(118): n is a, c, g, or t
  misc_feature (122)..(122): n is a, c, g, or t
  misc_feature (128)..(128): n is a, c, g, or t
  misc_feature (132)..(132): n is a, c, g, or t
  misc_feature (156)..(156): n is a, c, g, or t
  misc_feature (160)..(160): n is a, c, g, or t
  misc_feature (204)..(204): n is a, c, g, or t
  misc_feature (206)..(206): n is a, c, g, or t
  misc_feature (208)..(208): n is a, c, g, or t
  misc_feature (215)..(215): n is a, c, g, or t
  misc_feature (241)..(241): n is a, c, g, or t
  misc_feature (262)..(262): n is a, c, g, or t
  misc_feature (282)..(282): n is a, c, g, or t
  misc_feature (371)..(371): n is a, c, g, or t
  misc_feature (374)..(374): n is a, c, g, or t
  misc_feature (382)..(382): n is a, c, g, or t
  misc_feature (392)..(392): n is a, c, g, or t
  misc_feature (395)..(395): n is a, c, g, or t
gaaattcggccataagggccgggaaactcggggggggccattgggcaaaccanacttggttggaactcgggcgcntggtttggtttttcttcggaaaccatgtntgncaaacccgatngggntgaaancganaaattcgataggtcgaacctgaanaagncggagacgcaggagacgaaaggaggcgtgcgccgccaatatgcncngnccattcnacaggcatggccttctaatttaactnctttaagcggttaaactttgnaggaggcaaagaggttggancaggtttaaaggacggggctgcccttttaacatcaaggaactactgacaccgaaggccgggcctgcctttccaatcggccaatcaatcngcntgccaggnaaggaagganctngcttgt

SEQ ID NO: 564542 - DNA, 3005 bp, Homo sapiens
  misc_feature (777)..(777): n is a, c, g, or t
  misc_feature (1878)..(1878): n is a, c, g, or t
tggcactccaggctgcctccaagagcaggttggtagagctgagggatgagagatttgcctgtcctggagagtcaccacccttccagctttggggaggcccccaggaaagtgagggagaagatatatgaagattgctgaattacgtgcctccttcggagaaccccacccagtcccgggcccaggcagtaacttgcccattggaaaggggaaagcagaggccacactcagtgacaatggccacaaggaacattggctagcatgtggatgacctctgtttccttacaggctctgaagcccttccatgaatccccggaagaaggtggacctgaaactcattatcgtcggagccattggtgtgggaaagacctccctccttcaccaatatgtgcacaagacgttttatgaggaataccagaccacactgggggccagcatcctctccaagattatcatattgggtgacacaactttgaagttacagatctgggacacgggcggtcaggagcggttccgctccatggtgtccacgttctacaagggctccgatggctgcatcctagcttttgatgtcaccgacctggagtcttttgaagccctggatatctggcggggtgatgtcctggccaagattgtccccatggagcagtcctaccccatggtgttgttggggaacaagatcgatctggcagaccggaaggtaccccaggaagtagctcaaggctggtgtagagagaaagatattccttactttgaagtcagtgccaagaatgacatcantgtggtgcaagcgtttgagatgctggccagtagggctctgtcgaggtaccagagcatcttagaaaatcacctcacagaatccatcaagctctcgccagaccagtcaaggagcagatgctgctgacctccagacgcctgctctggaagcccagaaacagagcctgccccgagcctggtcaccccaggcttgagaacaggtgaccatccccctccagccccactgcctgcccaagcacagtgcagggggcctaagctctgcggcagagcccttgaccctggtgctgggcccagagtcagagggcagcccctggctcaggctgagtatagtgagagcgtctggatgaagcccggaatgtcagagccaaaccctggtcctgcagaagtcacagtttccgcagtggctccagctttccccacccatccacccctcaaacactcccgctccagaacacacatctccgcagaccggccactgattggagtctggttacatcctcctgtggacagaccttcctcacccgctcccacctcacacccctcagccacaagcaaagctttggacaatggcacagctcagcctccttcaacgagcagactaaggagtaaaggtctggaccccacatgctgggcccgcctcagctcctggcagaagctgtcgtgcctgagaccccctctgctccctccagggtagaagactgagggagcacaggagaagccacaagggaccatggctcattcctccttgctgggtgctcaggcaactcacataaatctctgagtctcaatttgtttatctgtcctgtgggggtgagatgtgccttgccccctgtatcacagtgtggttttgaggaccagaagctgtgcttaaatccagtagctgttgtcaatatgcatttatttacttctttgacaagtttatttttgcgtatctactatgtacgatgcattgaagtccagggacaaacaaaacacagggactctgccctcctggagccgacatctggtgagggagagacgcagactctagacagatatttccaaatagcaggtaagtgctataaacaaagggaaacagggtaatgggatagagtgacagggggngggatgagttgctattttagatgaagtggtccaggagggcttccctgaggaggtggcatttggtctgagggctagagaatgagaaagcagctgtcacctgagagctggagaaagaacattccagggagagggagcatcaagacccaaagccctgaggcaaaaacaagcttgccatgttccaggaacagtgaaaggacatccattgacctaatctcaaagctgctgtcccaaagacaaagcaaaggggacccagctcccttgggtggctcctagatgctctgctgcctgaccaccagagggcagcagtgctccttctcttccaggctgagcagaaagtggatgctcatgaacgttttaggagctggggttttgtccttcagatgctcaaagcttgttcatgggcttggaggcatgtttagccctttgggatttgtaaggcagagaattccaatttcttaagcctagtaagaaatgagcaaaaacttcaatatatatgactcaggcaagaaatcagcatctgtggcaaatactagaatgaaatgcaagaaagctcactgcaaggagtctccctccctgcagattccaaggctggaatctttttcttctggctccaggcagcacagacagggcctagcctggagagggtggacaagatgtcctctcagggtcttcaatggccaagtccaagcccactgcagaatctttctgtctacccgtaagtatcctttcctgagttccaggcaaagctggggatgttagcctatgactgtcatctgacttggaaggtacacctaggggccggggggaggtcagcaggggagtttgggagccacttctccccccacgtggcactggagtgtgaactggctcattctggacaccagcatggagccagcacgggaacaggggggcagcctagagcacaagctctatctgtgtccttcagagctcctgggaaacatgatgcgccctcatgggaatggcattttgcatatcacacaggctgtcctgggagtcaggcagactggattgtcacgtgcggtgtgcatgcagcagcttgtgcactgcagtggacctgtggaccatttctaaaggtgcacaacaaataataaatgtgtccttctttg

SEQ ID NO: 564543 - DNA, 106 bp, Homo sapiens
tcttgactggatttcttgaatctcctctctctcttttcttagacatttaagacacttatggatttgttccctatagggagcaaatccataagtgtcttaaatgtct

SEQ ID NO: 564544 - DNA, 2970 bp, Homo sapiens
  misc_feature (657)..(657): n is a, c, g, or t
  misc_feature (1758)..(1758): n is a, c, g, or t
gagagggaagtggcgtggcttcaacagactttcttttgcctgtctttgtcccagagcctcttccctggccctgctgagaccactgctctaagaagagaccaccagactgagagaggactcccagctgccctcagagcggaggccgagtgctgcacagccacagctgctctgaagcccttccatgaatccccggaagaaggtggacctgaaactcattatcgtcggagccattggtgtgggaaagacctccctccttcaccaatatgtgcacaagacgttttatgaggaataccagaccacactgggggccagcatcctctccaagattatcatattgggtgacacaactttgaagttacagatctgggacacgggcggtcaggagcggttccgctccatggtgtccacgttctacaagggctccgatggctgcatcctagcttttgatgtcaccgacctggagtcttttgaagccctggatatctggcggggtgatgtcctggccaagattgtccccatggagcagtcctaccccatggtgttgttggggaacaagatcgatctggcagaccggaaggtaccccaggaagtagctcaaggctggtgtagagagaaagatattccttactttgaagtcagtgccaagaatgacatcantgtggtgcaagcgtttgagatgctggccagtagggctctgtcgaggtaccagagcatcttagaaaatcacctcacagaatccatcaagctctcgccagaccagtcaaggagcagatgctgctgacctccagacgcctgctctggaagcccagaaacagagcctgccccgagcctggtcaccccaggcttgagaacaggtgaccatccccctccagccccactgcctgcccaagcacagtgcagggggcctaagctctgcggcagagcccttgaccctggtgctgggcccagagtcagagggcagcccctggctcaggctgagtatagtgagagcgtctggatgaagcccggaatgtcagagccaaaccctggtcctgcagaagtcacagtttccgcagtggctccagctttccccacccatccacccctcaaacactcccgctccagaacacacatctccgcagaccggccactgattggagtctggttacatcctcctgtggacagaccttcctcacccgctcccacctcacacccctcagccacaagcaaagctttggacaatggcacagctcagcctccttcaacgagcagactaaggagtaaaggtctggaccccacatgctgggcccgcctcagctcctggcagaagctgtcgtgcctgagaccccctctgctccctccagggtagaagactgagggagcacaggagaagccacaagggaccatggctcattcctccttgctgggtgctcaggcaactcacataaatctctgagtctcaatttgtttatctgtcctgtgggggtgagatgtgccttgccccctgtatcacagtgtggttttgaggaccagaagctgtgcttaaatccagtagctgttgtcaatatgcatttatttacttctttgacaagtttatttttgcgtatctactatgtacgatgcattgaagtccagggacaaacaaaacacagggactctgccctcctggagccgacatctggtgagggagagacgcagactctagacagatatttccaaatagcaggtaagtgctataaacaaagggaaacagggtaatgggatagagtgacagggggngggatgagttgctattttagatgaagtggtccaggagggcttccctgaggaggtggcatttggtctgagggctagagaatgagaaagcagctgtcacctgagagctggagaaagaacattccagggagagggagcatcaagacccaaagccctgaggcaaaaacaagcttgccatgttccaggaacagtgaaaggacatccattgacctaatctcaaagctgctgtcccaaagacaaagcaaaggggacccagctcccttgggtggctcctagatgctctgctgcctgaccaccagagggcagcagtgctccttctcttccaggctgagcagaaagtggatgctcatgaacgttttaggagctggggttttgtccttcagatgctcaaagcttgttcatgggcttggaggcatgtttagccctttgggatttgtaaggcagagaattccaatttcttaagcctagtaagaaatgagcaaaaacttcaatatatatgactcaggcaagaaatcagcatctgtggcaaatactagaatgaaatgcaagaaagctcactgcaaggagtctccctccctgcagattccaaggctggaatctttttcttctggctccaggcagcacagacagggcctagcctggagagggtggacaagatgtcctctcagggtcttcaatggccaagtccaagcccactgcagaatctttctgtctacccgtaagtatcctttcctgagttccaggcaaagctggggatgttagcctatgactgtcatctgacttggaaggtacacctaggggccggggggaggtcagcaggggagtttgggagccacttctccccccacgtggcactggagtgtgaactggctcattctggacaccagcatggagccagcacgggaacaggggggcagcctagagcacaagctctatctgtgtccttcagagctcctgggaaacatgatgcgccctcatgggaatggcattttgcatatcacacaggctgtcctgggagtcaggcagactggattgtcacgtgcggtgtgcatgcagcagcttgtgcactgcagtggacctgtggaccatttctaaaggtgcacaacaaataataaatgtgtccttctttgtttttaaagaaaacaacatcatattacacaacagatcaaaaacaagtacaatacacaaaaagaggggagcgaatcaaaaatcacg

SEQ ID NO: 564545 - DNA, 520 bp, Homo sapiens
ctacacgtcatcttccttcagtcgctgagtattcacaccggcaccaagagcctggtggttgggtgcaatagggaaagcatcttagccccatagaacgtgctggacagtgcagatctggaggcctgctgaggcaccgcgtgccagcctctccacagtgtggccagcagggtggggtcaatatgtattgacacccatctctgtccacatacaccattcctaaggaccggagggtgcgtctcctaaaatgacgggcatccctcgcatgcacccaccgtcagcacgccggacagcggctgcagggaatcccgtgtcatctgtgtccaggccgtgttcccagctccagaattgtctcacaagtgtctctcatagctggtttttctcagactggaatccaaggttcatattccatctggttattaatgtctctctagcttttcttaagatataatgggcacgtagtaaactgcaccacttgaagattctgacccatacaaacactcatgaaagcatcccgaacgtt

SEQ ID NO: 564546 - DNA, 137 bp, Homo sapiens
ccagaaccgccgacgcgcgaagcgcaaggacagggctcgggcttcctcatttcgtccgacggctacatcgtgacgaacaatcacctggtgcagggggcccgcgggtccggcacggtggatcgcgtcacggtgacgct

SEQ ID NO: 564547 - DNA, 1232 bp, Homo sapiens
  misc_feature (657)..(657): n is a, c, g, or t
gagagggaagtggcgtggcttcaacagactttcttttgcctgtctttgtcccagagcctcttccctggccctgctgagaccactgctctaagaagagaccaccagactgagagaggactcccagctgccctcagagcggaggccgagtgctgcacagccacagctgctctgaagcccttccatgaatccccggaagaaggtggacctgaaactcattatcgtcggagccattggtgtgggaaagacctccctccttcaccaatatgtgcacaagacgttttatgaggaataccagaccacactgggggccagcatcctctccaagattatcatattgggtgacacaactttgaagttacagatctgggacacgggcggtcaggagcggttccgctccatggtgtccacgttctacaagggctccgatggctgcatcctagcttttgatgtcaccgacctggagtcttttgaagccctggatatctggcggggtgatgtcctggccaagattgtccccatggagcagtcctaccccatggtgttgttggggaacaagatcgatctggcagaccggaaggtaccccaggaagtagctcaaggctggtgtagagagaaagatattccttactttgaagtcagtgccaagaatgacatcantgtggtgcaagcgtttgagatgctggccagtagggctctgtcgaggtaccagagcatcttagaaaatcacctcacagaatccatcaagctctcgccagaccagtcaaggagcagatgctgctgacctccagacgcctgctctggaagcccagaaacagagcctgccccgagcctggtcaccccaggcttgagaacaggtgaccatcctctccaagattatcatattgggtgacacaactttgaagttacagatctgggacacggaacaggggggcagcctagagcacaagctctatctgtgtccttcagagctcctgggaaacatgatgcgccctcatgggaatggcattttgcatatcacacaggctgtcctgggagtcaggcagactggattgtcacgtgcggtgtgcatgcagcagcttgtgcactgcagtggacctgtggaccatttctaaaggtgcacaacaaataataaatgtgtccttctttgtttttaaagaaaacaacatcatattacacaacagatcaaaaacaagtacaatacacaaaaagaggggagcgaatcaaaaatcacg

SEQ ID NO: 564548 - DNA, 644 bp, Homo sapiens
gactgactctgagtgacaaggccctcatgaagcggctccgagacgcaggttcttcgtgagttcctcgcaggtgccggtcagatgctacacattgagaacctgaacatgtgaggccgacccctggccagtacctggtgcaactggcaccatgctccaatggagctcctgaccaggccatcatcacgcatccgcgtgcgcaggtcaccgtggacgccctctggcccttccgtgggcatcgtggctgacggtgctgggtgctggtcaccaatcatcttcatctacgagaagcgcccggaagccctgaggacgtcctggatgatgacgacggccggctctgcaccccgtgaagagcagcgggacagcaccaggaaatgacaaaggccaacgaacgtcctgccagagggaactcttcctgaagggccaggtggcccggaggacgcttcccatggtcctgcgtctggcagccggccgcccaggagttccacatcccaagtgcttgcacagattccacagttctcacactcttagccgcaaacacccaaccaccgtaaatgcccatcatacaccttcacttctacatgcaaaaaaagtagggatactctccaattcaggattctgttccttaagaattattaccttctgag

SEQ ID NO: 564549 - DNA, 186 bp, Homo sapiens
tccctactcgatccgtgatccagcagaggcacatcaggagggtgtgattgctgtagagtccctggtgaaagcgattatcaagtacctccttcaggaacaatacaggtaccttatgtaatcctaataagaagatgtttgttgtgctatatgacctatgagatatttgctggatcagcggatcgagtt

SEQ ID NO: 564550 - DNA, 181 bp, Homo sapiens
catctacttcgaaccaaagccatctgagcatgcagattgtggtgtggccgcgggcgtagcagtcctggacacaccataccctgtgtgagggcacaaccacggccacggacacccttctattcctcgtgtattgtgtcatctccctcttcctagcccctccttgagggggtactccttcctt

SEQ ID NO: 564551 - DNA, 288 bp, Homo sapiens
tgggggggcggggttttttaaaaaccaggttggggttttttcccccccgggcggttttaaccgggccttttggtttttgggcccgggggtttttggggttccttttcggaacttttaacccttttttgggggggggggggatgggttttttaatttggccaggggtttctctaattcttttcccttttaaaaaaggggggggggggggggggggggcaggtccccccctttttttttcccgggggggccccttaaccttttttgccttttgggggtggttccccccca

SEQ ID NO: 564552 - DNA, 1050 bp, Homo sapiens
  misc_feature (974)..(974): n is a, c, g, or t
  misc_feature (996)..(996): n is a, c, g, or t
  misc_feature (1006)..(1006): n is a, c, g, or t
  misc_feature (1008)..(1008): n is a, c, g, or t
agcgggttctggcagcccattccgagactagcggaggcgggcagggagggtatataagcgttggcggagcgtcggttgtagcactctgcgcgcccgctcttctgctgctgtttgtctacttcctcctgcttccccgccgccgccgccgccatcatgagggaaatcgtgcacttgcaggccgggcagtgcggcaaccaaatcggcgccaagttttgggaggtgatcagcgatgagcacggcatcgaccccacgggcacctaccacggggacagcgacctgcagctggaacgcatcaacgtgtactacaatgaggccaccggcggcaagtacgtgccccgcgccgtgctcgtggatctggagcccggcaccatggactccgtgcgctcggggcccttcgggcagatcttccggccggacaacttcgttttcggtcagagtggtgctgggaacaactgggccaaggggcactacacagaaggcgcggagctggtggactcggtgctggatgttgtgagaaaggaggctgagagctgtgactgcctgcagggtttccagctgacccactccctgggtggggggactgggtctgggatgggtaccctcctcatcagcaagatccgggaggagtacccagacaggatcatgaacacgtttagtgtggtgccttcgcccaaagtgtcagacacagtggtggagccctacaacgccaccctctcagtccaccagctcgtagaaaacacagacgagacctactgcattgataacgaagctctctacgacatttgcttcagaaccctaaagctgaccacgcccacctatggtgacctgaaccacctggtgtctgctaccatgagtggggtcaccacctgcctgcgcttcccaggccagctcaatgctgacctgcggaagctggctgtgaacatggtcccgtttccccggctgcacttcttcatgcccggctttgccccactgancagccgggcagccagagtacgngcgctgacgngnccgagtcaccagcaaagaacacacgccagcacaagaacaggg

SEQ ID NO: 564553 - DNA, 204 bp, Homo sapiens
ccccccgggggggggggggttttttttcagggaaattttgtgccccccccctgggcgggccccgctgggggcccccctttttacccaatttcctttaaaaccccttttacctggggcccggccccccttcccccttttttttttcccatttttccaaagggggttagttggtttttttttttaaaaggaaaacccccttgggga

SEQ ID NO: 564554 - DNA, 1639 bp, Homo sapiens
agcgggttctggcagcccattccgagactagcggaggcgggcagggagggtatataagcgttggcggagcgtcggttgtagcactctgcgcgcccgctcttctgctgctgtttgtctacttcctcctgcttccccgccgccgccgccgccatcatgagggaaatcgtgcacttgcaggccgggcagtgcggcaaccaaatcggcgccaagttttgggaggtgatcagcgatgagcacggcatcgaccccacgggcacctaccacggggacagcgacctgcagctggaacgcatcaacgtgtactacaatgaggccaccggcggcaagtacgtgccccgcgccgtgctcgtggatctggagcccggcaccatggactccgtgcgctcggggcccttcgggcagatcttccggccggacaacttcgttttcggtcagagtggtgctgggaacaactgggccaaggggcactacacagaaggcgcggagctggtggactcggtgctggatgttgtgagaaaggaggctgagagctgtgactgcctgcagggtttccagctgacccactccctgggtggggggactgggtctgggatgggtaccctcctcatcagcaagatccgggaggagtacccagacaggatcatgaacacgtttagtgtggtgccttcgcccaaagtgtcagacacagtggtggagccctacaacgccaccctctcagtccaccagctcgtagaaaacacagacgagacctactgcattgataacgaagctctctacgacatttgcttcagaaccctaaagctgaccacgcccacctatggtgacctgaaccacctggtgtctgctaccatgagtggggtcacctgcgcttcccaggccagctcaatgctgacctgcggaagctggctgtgaacatggtcccgtttccccggctgcacttcttcatgcccggctttgccccactgaccagccggggcagccagcagtaccgggcgctgaccgtgcccgagctcacccagcagatgtttgatgccaagaacatgatggctgcctgcgacccccgccatggccgctacctgacggttgccgccgtgttcaggggccgcatgtccatgaaggaggtggatgagcaaatgcttaatgtccaaaacaaaaacagcagctattttgttgagtggatccccaacaatgtgaaaacggctgtctgtgacatcccacctcgggggctaaaaatgtccgccaccttcattggcaacagcacggccatccaggagctgttcaagcgcatctccgagcagttcacggccatgttccggcgcaaggccttcctgcactggtacacgggcgagggcatggacgagatggagttcaccgaggccgagagcaacatgaatgacctggtgtccgagtaccagcagtaccaggatgccacagccgaggaggagggcgagttcgaggaggaggctgaggaggaggtggcctagagccttcagtcactggggaaagcagggaagcagtgtgaactctttattcactcccagcctgtcctgtggcctgtcccactgtgtgcacttgctgttttccctgtccacatccatgctgtacagacaccaccattaaagcattttcatagtgaaaa

SEQ ID NO: 564555 - DNA, 1079 bp, Homo sapiens
  misc_feature (973)..(973): n is a, c, g, or t
  misc_feature (997)..(997): n is a, c, g, or t
  misc_feature (1041)..(1043): n is a, c, g, or t
agcgggttctggcagcccattccgagactagcggaggcgggcagggagggtatataagcgttggcggagcgtcggttgtagcactctgcgcgcccgctcttctgctgctgtttgtctacttcctcctgcttccccgccgccgccgccgccatcatgagggaaatcgtgcacttgcaggccgggcagtgcggcaaccaaatcggcgccaagttttgggaggtgatcagcgatgagcacggcatcgaccccacgggcacctaccacggggacagcgacctgcagctggaacgcatcaacgtgtactacaatgaggccaccggcggcaagtacgtgccccgcgccgtgctcgtggatctggagcccggcaccatggactccgtgcgctcggggcccttcgggcagatcttccggccggacaacttcgttttcggtcagagtggtgctgggaacaactgggccaaggggcactacacagaaggcgcggagctggtggactcggtgctggatgttgtgagaaaggaggctgagagctgtgactgcctgcagggtttccagctgacccactccctgggtggggggactgggtctgggatgggtaccctcctcatcagcaagatccgggaggagtacccagacaggatcatgaacacgtttagtgtggtgccttcgcccaaagtgtcagacacagtggtggagccctacaacgccaccctctcagtccaccagctcgtagaaaacacagacgagacctactgcattgataacgaagctctctacgacatttgcttcagaaccctaaagctgaccacgcccacctatggtgacctgaaccacctggtgtctgctaccatgagtggggtcaccactggctgggctttccagggcagtcaatgtgactggggaagctggtgggaacatggtccgttcccggtggacttcttatgccggtttgcccatgacagcggggccaganacgggcgacgggcggcccccgatntgggcacaacttggtggtggaccccaggcgataaggcgggaggnnncaagggggcacccacaacgcttggccagagggaccg

SEQ ID NO: 564556 - DNA, 517 bp, Homo sapiens
  misc_feature (49)..(49): n is a, c, g, or t
  misc_feature (61)..(61): n is a, c, g, or t
  misc_feature (65)..(65): n is a, c, g, or t
  misc_feature (68)..(68): n is a, c, g, or t
  misc_feature (73)..(74): n is a, c, g, or t
  misc_feature (79)..(79): n is a, c, g, or t
  misc_feature (82)..(82): n is a, c, g, or t
  misc_feature (109)..(109): n is a, c, g, or t
  misc_feature (121)..(121): n is a, c, g, or t
  misc_feature (164)..(164): n is a, c, g, or t
  misc_feature (205)..(205): n is a, c, g, or t
  misc_feature (254)..(255): n is a, c, g, or t
  misc_feature (258)..(258): n is a, c, g, or t
  misc_feature (260)..(260): n is a, c, g, or t
  misc_feature (267)..(267): n is a, c, g, or t
  misc_feature (271)..(271): n is a, c, g, or t
  misc_feature (282)..(282): n is a, c, g, or t
  misc_feature (286)..(286): n is a, c, g, or t
  misc_feature (300)..(300): n is a, c, g, or t
  misc_feature (321)..(321): n is a, c, g, or t
  misc_feature (329)..(329): n is a, c, g, or t
  misc_feature (332)..(333): n is a, c, g, or t
  misc_feature (340)..(340): n is a, c, g, or t
  misc_feature (369)..(369): n is a, c, g, or t
  misc_feature (372)..(373): n is a, c, g, or t
  misc_feature (376)..(376): n is a, c, g, or t
  misc_feature (382)..(382): n is a, c, g, or t
  misc_feature (395)..(395): n is a, c, g, or t
  misc_feature (400)..(400): n is a, c, g, or t
  misc_feature (410)..(410): n is a, c, g, or t
  misc_feature (422)..(422): n is a, c, g, or t
  misc_feature (426)..(426): n is a, c, g, or t
  misc_feature (442)..(442): n is a, c, g, or t
  misc_feature (448)..(448): n is a, c, g, or t
  misc_feature (469)..(469): n is a, c, g, or t
  misc_feature (476)..(476): n is a, c, g, or t
attttattttttgtgccataccagagtacagtatcagctgatgctgacnttactctgaggnttanctnttttnntggangtngtttctgatttatagcttcttggtttntccttagacatnttggtggtgagagattttggtttttaaggggttgttagatggngtaaattttcttttttttttttttttttttttttttttaantaaaaaggggtgacagaatttcagcagttctttgatttttatattttannccncntcctaancaanccctgcctttngagnccaggggggaaggncaggggcgggaaggggggggngggttttnttnncaaatgngtttttttttttggggtactgtaccctgnttnnagnggtgtncccgggatagggncatcnctggagaagncattttaggagnaccnggaggcccaacggcanaagccncaccaaaaaagcgaaatgggnacaccanagggaagactttaatccggtttcttctcccctctgggaagt

SEQ ID NO: 564557 - DNA, 140 bp, Homo sapiens
aatcttgtgatccccccgctgtacagttgggatatggtacggccgggtgagatatacaccctctcccccggattttagtgggcagctgagagtcagggatgcgctgaacgcgacgttccaaggcagggccctctctcggg

SEQ ID NO: 564558 - DNA, 1326 bp, Homo sapiens
agcgggttctggcagcccattccgagactagcggaggcgggcagggagggtatataagcgttggcggagcgtcggttgtagcactctgcgcgcccgctcttctgctgctgtttgtctacttcctcctgcttccccgccgccgccgccgccatcatgagggaaatcgtgcacttgcaggccgggcagtgcggcaaccaaatcggcgccaagttttgggaggtgatcagcgatgagcacggcatcgaccccacgggcacctaccacggggacagcgacctgcagctggaacgcatcaacgtgtactacaatgaggccaccggcggcaagtacgtgccccgcgccgtgctcgtggatctggagcccggcaccatggactccgtgcgctcggggcccttcgggcagatcttccggccggacaacttcgttttcggtcagagtggtgctgggaacaactgggccaaggggcactacacagaaggcgcggagctggtggactcggtgctggatgttgtgagaaaggaggctgagagctgtgactgcctgcagggtttccagctgacccactccctgggtggggggactgggtctgggatgggtaccctcctcatcagcaagatccgggaggagtacccagacaggatcatgaacacgtttagtgtggtgccttcgcccaaagtgtcagacacagtggtggagccctacaacgccaccctctcagtccaccagctcgtagaaaacacagacgagacctactgcattgataacgaagctctctacgacatttgcttcagaaccctaaagctgaccacgcccacctatggtgacctgaaccacctggtgtctgctaccatgagtggggtcacctgcgcttcccaggccagctcaatgctgacctgcggaagctggctgtgaacatggtcccgtttccccggctgcacttcttcatgcccggctttgccccactgaccagccggggcagccagcagtaccgggcgctgaccgtgcccgagccttcctgcactggtacacgggcgagggcatggacgagatggagttcaccgaggccgagagcaacatgaatgacctggtgtccgagtaccagcagtaccaggatgccacagccgaggaggagggcgagttcgaggaggaggctgaggaggaggtggcctagagccttcagtcactggggaaagcagggaagcagtgtgaactctttattcactcccagcctgtcctgtggcctgtcccactgtgtgcacttgctgttttccctgtccacatccatgctgtacagacaccaccattaaagcattttcatagtgaaaa

SEQ ID NO: 564559 - DNA, 1055 bp, Homo sapiens
  misc_feature (869)..(869): n is a, c, g, or t
  misc_feature (934)..(934): n is a, c, g, or t
  misc_feature (960)..(961): n is a, c, g, or t
  misc_feature (968)..(969): n is a, c, g, or t
  misc_feature (976)..(976): n is a, c, g, or t
agcgggttctggcagcccattccgagactagcggaggcgggcagggagggtatataagcgttggcggagcgtcggttgtagcactctgcgcgcccgctcttctgctgctgtttgtctacttcctcctgcttccccgccgccgccgccgccatcatgagggaaatcgtgcacttgcaggccgggcagtgcggcaaccaaatcggcgccaagttttgggaggtgatcagcgatgagcacggcatcgaccccacgggcacctaccacggggacagcgacctgcagctggaacgcatcaacgtgtactacaatgaggccaccggcggcaagtacgtgccccgcgccgtgctcgtggatctggagcccggcaccatggactccgtgcgctcggggcccttcgggcagatcttccggccggacaacttcgttttcggtcagagtggtgctgggaacaactgggccaaggggcactacacagaaggcgcggagctggtggactcggtgctggatgttgtgagaaaggaggctgagagctgtgactgcctgcagggtttccagctgacccactccctgggtggggggactgggtctgggatgggtaccctcctcatcagcaagatccgggaggagtacccagacaggatcatgaacacgtttagtgtggtgccttcgcccaaagtgtcagacacagtggtggagccctacaacgccaccctctcagtccaccagctcgtagaaaacacagacgagacctactgcattgataacgaagctctctacgacatttgcttcagaaccctaaagctgaccacgcccacctatggtgacctgaaccacctggtgtctgctaccatgagtggggtcacaactgnctggcttccaggcagtcatgctgactgcgaagctggtgtgaactggccgttcccggtgacttttntgccgttggccatgacagcggagcgnnacggggnncggccgntcccgtgtgtccaaattggcctggccctgcaataggagcgtgggttcacaggacttgcgccacttgggcccacgtgccg

SEQ ID NO: 564560 - DNA, 101 bp, Homo sapiens
aaaacaaaatgtaaccatggggaagtatgtatggttaagaactatatgaagctagaaaaataaataggccaggcacagtagctcacacctataatccagca

SEQ ID NO: 564561 - DNA, 540 bp, Homo sapiens
ctacggcatacaccatcagccatcactgctgcattccggtaccgccaatctgtcgttcttgatgtcgtactttaatgaaagggaggacatgtgggacaatgtcatcttcgcagacaggcggccagaagcatgaggcacacccctgctgctttgcaggggttccagtcatcgtcatcatcattttcgtcctgtttagttagtgtctgtgtgaggattggaaccagatactgtagtgctcccttcgcataaaacttgctggtgtgctcagggggccgtccttgttctgctgcctctgaagcttcaatggccaaatccatttcctcatcacagacattggaccagaattctatcccttgtaaagccacctcatcaatgtcacttttcattgcttcgattgtgattgcaaaaagagcaggacccatatatgtctccatgtactgataatataaggacattatcttcaccagattctgtaaagcagccactcgtaccctcgtatctggacactgtgtggcttcacagaccacctgcataataaag

SEQ ID NO: 564562 - DNA, 1012 bp, Homo sapiens
  misc_feature (912)..(912): n is a, c, g, or t
  misc_feature (953)..(953): n is a, c, g, or t
  misc_feature (975)..(975): n is a, c, g, or t
agcgggttctggcagcccattccgagactagcggaggcgggcagggagggtatataagcgttggcggagcgtcggttgtagcactctgcgcgcccgctcttctgctgctgtttgtctacttcctcctgcttccccgccgccgccgccgccatcatgagggaaatcgtgcacttgcaggccgggcagtgcggcaaccaaatcggcgccaagttttgggaggtgatcagcgatgagcacggcatcgaccccacgggcacctaccacggggacagcgacctgcagctggaacgcatcaacgtgtactacaatgaggccaccggcggcaagtacgtgccccgcgccgtgctcgtggatctggagcccggcaccatggactccgtgcgctcggggcccttcgggcagatcttccggccggacaacttcgttttcggtcagagtggtgctgggaacaactgggccaaggggcactacacagaaggcgcggagctggtggactcggtgctggatgttgtgagaaaggaggctgagagctgtgactgcctgcagggtttccagctgacccactccctgggtggggggactgggtctgggatgggtaccctcctcatcagcaagatccgggaggagtacccagacaggatcatgaacacgtttagtgtggtgccttcgcccaaagtgtcagacacagtggtggagccctacaacgccaccctctcagtccaccagctcgtagaaaacacagacgagacctactgcattgataacgaagctctctacgacatttgcttcagaaccctaaagctgaccacgcccacctatggtgacctgaaccacctggtgtctgctaccatgagtggggtcacacctggctgcgcttccaggccagtcatgtgcctgggaagtggtgggacntggccgtccccggtgcttttatgccgggttgcccctgaccncgggggccagccggggggcggncgcccccaatggggcaaatgggccggcccggcgccgg

SEQ ID NO: 564563 - DNA, 1455 bp, Homo sapiens
  misc_feature (1301)..(1301): n is a, c, g, or t
agcgggttctggcagcccattccgagactagcggaggcgggcagggagggtatataagcgttggcggagcgtcggttgtagcactctgcgcgcccgctcttctgctgctgtttgtctacttcctcctgcttccccgccgccgccgccgccatcatgagggaaatcgtgcacttgcaggccgggcagtgcggcaaccaaatcggcgccaagttttgggaggtgatcagcgatgagcacggcatcgaccccacgggcacctaccacggggacagcgacctgcagctggaacgcatcaacgtgtactacaatgaggccaccggcggcaagtacgtgccccgcgccgtgctcgtggatctggagcccggcaccatggactccgtgcgctcggggcccttcgggcagatcttccggccggacaacttcgttttcggtcagagtggtgctgggaacaactgggccaaggggcactacacagaaggcgcggagctggtggactcggtgctggatgttgtgagaaaggaggctgagagctgtgactgcctgcagggtttccagctgacccactccctgggtggggggactgggtctgggatgggtaccctcctcatcagcaagatccgggaggagtacccagacaggatcatgaacacgtttagtgtggtgccttcgcccaaagtgtcagacacagtggtggagccctacaacgccaccctctcagtccaccagctcgtagaaaacacagacgagacctactgcattgataacgaagctctctacgacatttgcttcagaaccctaaagctgaccacgcccacctatggtgacctgaaccacctggtgtctgctaccatgagtggggtcacctgcgcttcccaggccagctcaatgctgacctgcggaagctggctgtgaacatggtcccgtttccccggctgcacttcttcatgcccggctttgccccactgaccagccggggcagccagcagtaccgggcgctgaccgtgcccgagctcacccagcagatgtttgatgccaagaacatgatggctgcctgcgacccccgccatggccgctacctgacggttgccgccgtgttcaggggccgcatgtccatgaaggaggtggatgagcaaatgcttaatgtccaaaacaaaaacagcagctattttgttgagtggatccccaacaatgtgaaaacggctgtctgtgacatcccacctcgggggctaaaaatgtccgccaccttcattggcacaggcaggccatcaggagcgtcaagcgccttcgagcagtcacggcangtcggggcaaggctctggcaggtaccggggggtgggcaagggtcggaggcaacaagagcgggcgtccggccggtcacggggggtcgggggcagggcaccgggaggagaaaccggcaggtggcccgcttaaaactgggcgcccactttgtggacg

SEQ ID NO: 564564 - DNA, 139 bp, Homo sapiens
atcggggtacacagggagggggacagagacccagagagacggggacagagacccagagagagagggacagagacccagagagagagggacagagacccacagagacggggacagagacccagagagagagggacagaga

SEQ ID NO: 564565 - DNA, 2186 bp, Homo sapiens
agcgggttctggcagcccattccgagactagcggaggcgggcagggagggtatataagcgttggcggagcgtcggttgtagcactctgcgcgcccgctcttctgctgctgtttgtctacttcctcctgcttccccgccgccgccgccgccatcatgagggaaatcgtgcacttgcaggccgggcagtgcggcaaccaaatcggcgccaagttttgggaggtgatcagcgatgagcacggcatcgaccccacgggcacctaccacggggacagcgacctgcagctggaacgcatcaacgtgtactacaatgaggccaccggcggcaagtacgtgccccgcgccgtgctcgtggatctggagcccggcaccatggactccgtgcgctcggggcccttcgggcagatcttccggccggacaacttcgttttcggtcagagtggtgctgggaacaactgggccaaggggcactacacagaaggcgcggagctggtggactcggtgctggatgttgtgagaaaggaggctgagagctgtgactgcctgcagggtttccagctgacccactccctgggtggggggactgggtctgggatgggtaccctcctcatcagcaagatccgggaggagtacccagacaggatcatgaacacgtttagtgtggtgccttcgcccaaagtgtcagacacagtggtggagccctacaacgccaccctctcagtccaccagctcgtagaaaacacagacgagacctactgcattgataacgaagctctctacgacatttgcttcagaaccctaaagctgaccacgcccacctatggtgacctgaaccacctggtgtctgctaccatgagtggggtcacacacctgcctgcgcttcccaggccagatacaaatgctagcacctgcggaaagcataggcctgtgcaccatggtcccgaaaccccaggctgcactaacatcatgcaccagggactatagccacacaaactgaaccagcacggaggagacaagacaagccaaaaaacaggaacagcatagaaccccggcagacccacggaagcctccaacccacccaaacacggataggtcacggcaccggcgcccaccagaaaacaatcgcactggcgcagacctggcaaaccccccccggcaccacatctggcgcaaccggcacagacaccacagaaccccgcgcgcacaggcccaggcaccacgtggacccacaccaccggacgaggcgaccaacacaactagctcacacaatggagcaaaccgcgacaacagccgccgacgcacccccacaaccccccacaacaactcgcgccaccaccacacacgggagcacccacaccccaaaaagacacacaacaagacacccccccacgcccaaggcaccgacaaaccacgaccaacacgccagagcgacccgccctggcgagacagacccccaacaagaaaacaaacaacgcgcccgcaaacacacacaccggcaaaggcaccaaagaaggaggagaaccaacttgagccacaccacccaaaccagaaacgaccgaaccccaacacacaacaactgaaacaccgagcaaaagccgaacacaccccaaagagaggagcaaaaacaaacgccacaaccacggcaaccacaaaatgcacaaaagaggccaaagcagaacaggacacaccaccacggccggaaaaaaacacaaacaatacccgaaagagaaccaacggaacatcacaagacaaggggcaagaaaagagaaccaaaaccgagcggaaacagaccaaacagagggaccacgcaacccacgcaggacaacacccgggacacaaacaacaagggagaagcatcacaagacgagcacacgagagacaacgaacagaccggaaccgtacaaaaaccaaagccacaacaaagaaaacaaagagaccacaacacacacaacaaaacgacagcagaagcaaacacagactaaagaaggatgaacacaataagcaccggacgaaaaacaacaaagacacgagggacaagggtgcgcgaaaacagaagaacaggagagagcaaaagccatcacacgaataaggcgggagagacgaagaacgagagcagggaagcagctacaagaaaatagaaacaaggaaagagtacggagatccaaccccccaacagaagacagaagaag

SEQ ID NO: 564566 - DNA, 500 bp, Homo sapiens
actcctggtcgtatgctgcaccaaggaagagacgcttgtaggccttgtcatctgctccaagaagataaggtcaggacggtgtggtggccaggcggacatagtacggtgtgaagcctttccacaggctgaagaagccctcgtagcggacaactttgatcagcacgtccagcccgttcttgtattccggtttcccatcagtcatccgcatgtcctgcattcgggtcttggcaatgtccacaggcattgaggcagcagtggtgacaagaccgctgatcatgctggcacagaaaagtgagacaagaatgtggtcagcagaagtagcctgagtccagtaagaactgcttggattgggagtgggaggcgagctgggcagcattgacgacgacggccggagccatggtagggaatgcagccccgccaaagtgtgaggacatcctcttaccgggtgatccgaatcagggcgttaaacacatttttgtaagcctcggcgcccccggacg

SEQ ID NO: 564567 - DNA, 1727 bp, Homo sapiens
agcgggttctggcagcccattccgagactagcggaggcgggcagggagggtatataagcgttggcggagcgtcggttgtagcactctgcgcgcccgctcttctgctgctgtttgtctacttcctcctgcttccccgccgccgccgccgccatcatgagggaaatcgtgcacttgcaggccgggcagtgcggcaaccaaatcggcgccaagttttgggaggtgatcagcgatgagcacggcatcgaccccacgggcacctaccacggggacagcgacctgcagctggaacgcatcaacgtgtactacaatgaggccaccggtgaggccccggccccttccccgaccgccctccggggaccccgcggcccctgccttggctgacgccctcccgtccccgcaggcggcaagtacgtgccccgcgccgtgctcgtggatctggagcccggcaccatggactccgtgcgctcggggcccttcgggcagatcttccggccggacaacttcgttttcggtcagagtggtgctgggaacaactgggccaaggggcactacacagaaggcgcggagctggtggactcggtgctggatgttgtgagaaaggaggctgagagctgtgactgcctgcagggtttccagctgacccactccctgggtggggggactgggtctgggatgggtaccctcctcatcagcaagatccgggaggagtacccagacaggatcatgaacacgtttagtgtggtgccttcgcccaaagtgtcagacacagtggtggagccctacaacgccaccctctcagtccaccagctcgtagaaaacacagacgagacctactgcattgataacgaagctctctacgacatttgcttcagaaccctaaagctgaccacgcccacctatggtgacctgaaccacctggtgtctgctaccatgagtggggtcaccacctgcctgcgcttcccaggccagctcaatgctgacctgcggaagctggctgtgaacatggtcccgtttccccggctgcacttcttcatgcccggctttgccccactgaccagccggggcagccagcagtaccgggcgctgaccgtgcccgagctcacccagcagatgtttgatgccaagaacatgatggctgcctgcgacccccgccatggccgctacctgacggttgccgccgtgttcaggggccgcatgtccatgaaggaggtggatgagcaaatgcttaatgtccaaaacaaaaacagcagctattttgttgagtggatccccaacaatgtgaaaacggctgtctgtgacatcccacctcgggggctaaaaatgtccgccaccttcattggcaacagcacggccatccaggagctgttcaagcgcatctccgagcagttcacggccatgttccggcgcaaggccttcctgcactggtacacgggcgagggcatggacgagatggagttcaccgaggccgagagcaacatgaatgacctggtgtccgagtaccagcagtaccaggatgccacagccgaggaggagggcgagttcgaggaggaggctgaggaggaggtggcctagagccttcagtcactggggaaagcagggaagcagtgtgaactctttattcactcccagcctgtcctgtggcctgtcccactgtgtgcacttgctgttttccctgtccacatccatgctgtacagacaccaccattaaagcattttcatagtgaaaa

SEQ ID NO: 564568 - DNA, 154 bp, Homo sapiens
gagcgagattccatcttcaaaaaaaaagaaagaaagaaaataacaaggttaccatgtagatcctgcagtcacggggccattctcaaacatcacaaggatgggagtcaaaaattgaaacctggaaaaagaaacctggactatgatggtggaataa

SEQ ID NO: 564569 - DNA, 1634 bp, Homo sapiens
agcgggttctggcagcccattccgagactagcggaggcgggcagggagggtatataagcgttggcggagcgtcggttgtagcactctgcgcgcccgctcttctgctgctgtttgtctacttcctcctgcttccccgccgccgccgccgccatcatgagggaaatcgtgcacttgcaggccgggcagtgcggcaaccaaatcggcgccaagttttgggaggtgatcagcgatgagcacggcatcgaccccacgggcacctaccacggggacagcgacctgcagctggaacgcatcaacgtgtactacaatgaggccaccggcggcaagtacgtgccccgcgccgtgctcgtggatctggagcccggcaccatggactccgtgcgctcggggcccttcgggcagatcttccggccggacaacttcgttttcggtcagagtggtgctgggaacaactgggccaaggggcactacacagaaggcgcggagctggtggactcggtgctggatgttgtgagaaaggaggctgagagctgtgactgcctgcagggtttccagctgacccactccctgggtggggggactgggtctgggatgggtaccctcctcatcagcaagatccgggaggagtacccagacaggatcatgaacacgtttagtgtggtgccttcgcccaaagtgtcagacacagtggtggagccctacaacgccaccctctcagtccaccagctcgtagaaaacacagacgagacctactgcattgataacgaagctctctacgacatttgcttcagaaccctaaagctgacacgcccactatggtgacctgaacacctggtgtctgtaccatgagtggggtcaccacctgctgggcttcccaggcagtcaatgtgactgggagctggtgtgaacatggtcccgtttccccggctgcacttcttcatgcccggctttgccccactgaccagccggggcagccagcagtaccgggcgctgaccgtgcccgagctcacccagcagatgtttgatgccaagaacatgatggctgcctgcgacccccgccatggccgctacctgacggttgccgccgtgttcaggggccgcatgtccatgaaggaggtggatgagcaaatgcttaatgtccaaaacaaaaacagcagctattttgttgagtggatccccaacaatgtgaaaacggctgtctgtgacatcccacctcgggggctaaaaatgtccgccaccttcattggcaacagcacggccatccaggagctgttcaagcgcatctccgagcagttcacggccatgttccggcgcaaggccttcctgcactggtacacgggcgagggcatggacgagatggagttcaccgaggccgagagcaacatgaatgacctggtgtccgagtaccagcagtaccaggatgccacagccgaggaggagggcgagttcgaggaggaggctgaggaggaggtggcctagagccttcagtcactggggaaagcagggaagcagtgtgaactctttattcactcccagcctgtcctgtggcctgtcccactgtgtgcacttgctgttttccctgtccacatccatgctgtacagacaccaccattaaagcattttcatagtgaaaa

SEQ ID NO: 564570 - DNA, 795 bp, Homo sapiens
ggcttgtggcttgccgacattccactacctttatccgagagttactcccgttgtcccaagtggttcccagagcgagcccttgttgcgtggcattgcgtcgtgcgaccctggccgcgatctgaggttccctagtctgtcctggaatggaccgcaagcgtcgtttcgtctgctgagatcccatggtggtaaccggtgtgtctcaatgcgctctcgcacatctcatgaagccgcgatgccagaacgacgacgacgccactgtggcacatcgcgggtggcattagtgcgctaaaccacgccctggacttgggacttggactcctggcgcaatttgtggacccccttagtgtgccaaccctgaggcattacgcgtttcccattgcgcggcttttgagggagattcgcttgtccaaagccgatttgcgtccaatccggggattgtgcgaggaatttacctcagttccaagagcagattcgtatcgcggaggagacgcccggagagagttaacgcccttcccaaagaacatatttccgagattgggtttcggccttttttgccccgggagctgttggccctctatggtgggcctggggcccgtctcatgggggggttataccccgggagtttttctcccggggggggttgcgctgcggacattgtgttcccagcgcggggccctctatgggaggtggcaacgggtgtcccccttatggcgggggttttcgtgggcctgcgccccttttgtggtgacctcgccacccgtggtcggccgttattggagtcgtggtggcctttgg

SEQ ID NO: 564571 - DNA, 454 bp, Homo sapiens
cgggagtcaccccttacttcctggataggtaggcttttttaagttgtgtgttttgttttggagaccagtgtctccactttgtagctgtggctatcctggaactcaatcagtagatgcccagagatgatgtgcctgcctctgccgtccaatgctgggattgaaggtgtgcacagccacaccagcttaaggttttgttaaagaagacgataggtatggctggattatatagtcttcaggttcacatgaacttggctgtattctgataacattgagaccgttttccaccaagttagcctcatttgttcagtaacacatcttaccgaggaaaggaggcaaggaagtgcccttttgtgtctcctcattgttcacagcctgttggtctcgaacactcaacatatgattgctcgatcactttagatagtaagtaggctatttacataatgagctaacctca

SEQ ID NO: 564572 - DNA, 169 bp, Homo sapiens
tagaggatccgagatgactttgctctggccctggtctgtctgttctcagcatgatgtgttgaggctcctggaggctctgcaatgacagttctgacagtgacactgatggtgctgagctaccccactggacttactggctggggacaccaagaccacgtacctatggaag

SEQ ID NO: 564573 - DNA, 438 bp, Homo sapiens
agtggggggcgggatatagtttggcgagctaatgtaccacggaatagttgcgtgatagatggtgagggagggaggaggttgtcgaatagtgtcggcacattggggggcaaacgggtgttaagatatgaatagacgccttgctgatgattacgcgctggggttgggcgacaggtggggtagagcgatgcagctttatgcctgcgattgggggagacaggtggggagaacttggcatggtggtgagaaggggtggaggcgagatgacgtggcagacctaagaagaatagcgggtgaggcaacgaatggtgaaacggggcgggggatggacgggtatgttgagacggcgcgaacggggggggttgagatgatatggggcgactgcgggggctgaaaggtggcgaaacatgatgaaagaccggtattggctgaattccggga

SEQ ID NO: 564574 - DNA, 164 bp, Homo sapiens
cggtgcggttcagcgtgcctagcacccagtctcacaccagcagctggtgctccgtgttggcccccctctggcgtcactgcgtggtttgcctttcctccggtgactctgcctttggtctgtcctgctcctggcctccacacatctctcttttttttttttttttt

SEQ ID NO: 564575 - DNA, 226 bp, Homo sapiens
  misc_feature (39)..(39): n is a, c, g, or t
  misc_feature (47)..(47): n is a, c, g, or t
  misc_feature (213)..(213): n is a, c, g, or t
agggaaggtgggagttacagtgagccaacattgtgccancctgggtnacagaaggagactctgtctcaaaaaaaaaaaaaaacaaaaaaaaaacaagatggtcttgcccaggtatggtggctcacacctgtaattccagcactatgggaggctgagatgggaggattgcttgagcccaggagttcgagaccagcctgaccaacatggcgagancctgtctccattt

SEQ ID NO: 564576 - DNA, 370 bp, Homo sapiens
tatgaatcttagtcatttatatctcagcagaagtaaaccaggcaaaagtatcgaatgaaaagataaagttaatacacaaactgggtataaaatccaagtgcttaaaaattaacaaggtgggctgggcgtggtggctcacgcctgcaatcccagcactttgggaagccgaggtgggtggaccgcgagatcaggagattgagaccatcctagccaagacggtgaaacccgtctctaccaaaaatacaaaaaattagcagggcaaggtggcacgtgcctatagtcccagctacttgggaggctgaggcagaagaatcacttgaacccagaggtgaaggctgctgtaagccgtgacagcaccattgcaccccag

SEQ ID NO: 564577 - DNA, 290 bp, Homo sapiens
tttgattgttaattttgtgaagtaagggattccaggccagaaatcacttgccatcagcttttgaaggcacgctttgtgattggttagctgccctctttgtgttgagaattctggagctattctcgttcctgctcttttttatggcacctggaaacttggggaaacattttttttttttcttcagtgatttacttttcaagataatgtgccttgatatgaatcatttccatcgattttgtggacaatttggaaacttatttctggaaaaaaatattaagtaaaaaaaaaaa

SEQ ID NO: 564578 - DNA, 121 bp, Homo sapiens
ggcgctgtaacacatcaccagtgctcctgggccaaccctgggccctgaatgaggcccaggtgcaggcctcagtgggtgcaggtcctgactgagctgctggaacaggaaagaagggtaccga

SEQ ID NO: 564579 - DNA, 130 bp, Homo sapiens
tcccgggcggggaaacggcggctggggaagagggaaagacggcgaggacaggcttcgtatcaattcgccttttctgcatcttaatatggcagtgtagccccctttgtaagccccctcttccccagcccag

SEQ ID NO: 564580 - DNA, 166 bp, Homo sapiens
cgagctcggtaccccatgccaccatgctcaaccaatttttgaaatgtttgtagaaacagggtctcactatgttgcccaggttgttctcgaactgttgggctcacatgatcctcctgtctccacttctcaaaaagtactgccatccgagagagagggatggatggcc

SEQ ID NO: 564581 - DNA, 368 bp, Homo sapiens
gctgtagctgtttggatgtgaggagaatgaaactaccaaaaaaaataaattgggccaggcgcagtggctcatgcctgtaatcccagcactctgggaggctgaggcggacggatcatgaggtcaggagatcaagaccaccctggctaacacggtgaaaccctgtctctactaaaaatacaaaaaattagctgggcatggtggcacacgcctgtaatcccagctactcaggaggctgaggcaggagaatcgcttgaacccgggaggtggaggttgcagtgagctgagattgcgccactgcacccccctaggcgacagagcgagactctgtctctaaataaataaataaataaataaatacaaactggaaa

SEQ ID NO: 564582 - DNA, 355 bp, Homo sapiens
atctgctgacctcggtcatacaacctccatctcccaggttcaagtgatcctcctgtctcaagctcccgaataggtgggactacagtgtgcatgcgccaccactcctggctgattatgatatttttagtagagacgaggtttcaccacgttggccaggctggtctcgaactcctgacctcaagtgatctgcccgcctcagcctcctgaagtgctgggattacagtcgtgagccactgtgcctggcaagactttcaagaattgtgaaagatctgagattctaccctacttgcaagctaccaagttactctgccacaatttcatatggtcataagacgtgaaactcttaggtcacaga

SEQ ID NO: 564583 - DNA, 184 bp, Homo sapiens
agggggggtgttctccacccccccagcattgaggaaaaaggggggtttttttatttcccccccccctttttccccggcccccaggaatgggccatttttggggggggcagggggtcccaaattggctccccctgaaaatgtaaaaactccaaacaaaatttttattaaattaaattttgggtca

SEQ ID NO: 564584 - DNA, 143 bp, Homo sapiens
ctgacagcaccatggcggttgcaagaccagcgcttacgaaggcggcaaaaggagccaaggaggaagtggttgatccattttttaagaaagattggtattatgtgaaagcacctcctatctccatatagaaatattggaaggcg

SEQ ID NO: 564585 - DNA, 521 bp, Homo sapiens
gtccggggaaaaaacatgtgcgagagatgacagcgaatcctagccaaaatcggtcagtcattatatccattctcttagccatgaatatgacatagcacttaataaatgaatagattgtctattcgcgaggggtgaagtgtatcagtctgttctcacgctactataatagagctgccagaggactggttaattaattcaaaaagaggtcacactgactcatagttctgcatggctggggcaggcctcaggaaacttatattcatggtggcaaggggaagcaaacatgtcttcttcacatggcagcaggaaggatcagtgctgatcagagggggaaaagacccttataaaaccatcagatctcatgagcatttcactcactatcacaagaacggcatgggagtaactggctacatgattcaattacctcccaccatgtccctcccatgacgagagggataatgagaactacaattcaagatgagatttgggtggggacacagcgcaaacatatcataaagtct

SEQ ID NO: 564586 - DNA, 918 bp, Homo sapiens
aagagctgagccgcttcagactgcggggcaagcgggccgcggctcccttcgcctcaccctcacctgcggccgtagaggcaggatgagtccgagcagcacgtagaagaagaaaggatgaaaagaagaccaccagaacggacgatacgaaccaaccgaacacacagaaacaagagcacataacacgaactgaaaagaagaagacgacaaaaacgaagaacacacagaagcacgacacaaggagcacaaagcacagaacgagagcaaaacaaaaaagcagcaagacaagaacaaagacacacacacagagaagaaacgaacaccaaaaaaacaaaaacaataaaagacaaagactaaaaggcacagaaagaggaaccaccacacaacacaaacacacggaacaaacaaagaacaacacgaaaaagagcaacaaacgacacgaacaagaaaacaaagcacaaagaaaacaacaaagcacagaaagaacaacacacaacacaacacacgacagcaaacaaccaacacagacaaaaaaaatacagcacaaacaacaacagaaacagaacaaaaacaaaaaaagaaaaacaagaaagaaaaacaaagaacagcaatcaacgaagaaacaaaacaagacaaaacagaaaaacagaacaacaagaagcaacaagaagacaggaaagcaaaaaaacacaaacaaagcacgatcaaaccacagaaaacacatcaaaaaaaacaacaacaaacaaacagaagaaacgaagaacacaaaaacaagacacaccaaaaccccaacgaaaaaaagagcaaacaaaaccgaaacacaccaaccataacagaaaaggcactacgaaaaaacaaacacagaacacacaaagaaaaaacccaaacaaacaaaaaaaagccaaacaacacaaaaaacaa

SEQ ID NO: 564587 - DNA, 389 bp, Homo sapiens
  misc_feature (23)..(23): n is a, c, g, or t
gaccgcgccactgcactccagcntgggccacaagagcaaaactccgtctcaaagataataaaaataatgacattggttttcaacttttagaatcaccctatagacaaagcatagaatgatataatttttaaattatagggaaataaaacttggactcaaaaaagggaggttgggaaatggttaagtgagcttggttctccttgccatagcagggcttaaacaaaagttgataaaacaagaaatagcagtataagaaattaccctggccgggcgcagtggctcatgcctgtaatcccagccctttggaaggccgaggcgggcggatcacctaaggtcaggagttcaagaccagcctggccaacatcgtgaaaccccgtctacactaaaaa

SEQ ID NO: 564588 - DNA, 197 bp, Homo sapiens
cctataatcgacggtttctctggggctggggtactgtacaggataagaagcaagtgaggttgggcacggtggctcacgcatgtaatcccaccactttgggaggcgagatgagcagatcacctgaggttgggagttcgagaccagcctgaccaacatggagaaaccctgtttctactaaaaatacaaaaaaaaaaaac

SEQ ID NO: 564589 - DNA, 199 bp, Homo sapiens
cccttttttggggggggggggggggggccgggcacctttttaaaaatttttagaaatttttggcccccccccttggaaaattggccgggggtttttgggcccccccccccctccccaaaccccccccgggggttttttttctttttttttttttccccctaaaagaaagggggggggaaaaacggtttttttgggccca

SEQ ID NO: 564590 - DNA, 326 bp, Homo sapiens
aggcaggctgggctggggcagacggtggtcacacgtcatggtttcactctcacaaatatctgggactatggttcaaggttcgtgagcagcgagtggaccttgtggttatttacaaggctgggccatatacaaagcattgacaacatggagtggagaggatccttggcgatgagctggttcactcactcctctgaccaacaaggaaacaaaggcccacgagaggagaaggccgtgcctggccagacgtgggacctgaacccagccagggctctgactcccagtcccccagtaccctctctacctccttgtcctgccctgggtcccat

SEQ ID NO: 564591 - DNA, 821 bp, Homo sapiens
cgcggtggctcacgcctataatcccagcacttgggaggccgaggtgggtggatcatgaggtcaggagatcgagaccatcctggctaacacggtgaaacctcgtctccactaaaaatacaaaaaattagccgggcatggtggcgggcgcctgtagtcccagctactcgggaggctggggcaggagaatgttgtgaatgtgggaggcagagcttgcagtgagctgagattgcaccactgcactccagcctgggcgacagagcgagactccatctcaaaaaaaaaaaaaaggtttttaaatttaacctttgggatataatgggattggggaataacgtggtttataaaaataacttttccagtggtacctttcaaatcataagggttatggctatggtactttgaaattaaaaaacatctcatgcaaagtggtctggggtcatttccattaaaattaaggaaccaattgggctggaacttaaatatatggtgggtttccaggttcctaaatatatgggagtctataaaacttggtttctagaatttttaaaataggttcttattacaaatgctgatctgctgccgagaatccaaattgtggacttcctaggttctccctagaacttaggtgctaacaataaatcctattactcaatattatttgttttcccgggtttatcctttcaggtgcggataagccttccaaggtattttacgacagagctcggccacatccgggggggggcccaacagggggccagggatacgggggagaaagggcaccaggggcttaaccaaccggccttcgcaagggcggcgccatc

SEQ ID NO: 564592 - DNA, 1139 bp, Homo sapiens
agcggaggacgggagtggaccagttcaggtccctagggggaatccgtcgcctccctctgagccgtgctatgtcttcgcctccctattatcgcagattagtcccgaggattacgtccccagcttccaaatcaggaggatcagaatatgtctcagtgattaagtgatcacactatgactgcaagagaacagtcctggagtgcattgacgcctcgctgcctaggtgagagctgacacgcaagtctggaaccagtgatgccggctggaatggtttgacatagagacaggcatgagtaccggagagtcgcccaggaggctccctcagttgggtctcatgggccccacactcccctcggaacgcctattgccccgtggtcgtctctgagcccgcttcttgtagtttcgtggccggcggatgggtagcggacctcgtaattgccatgggttggatccacgagtgcctcgtttgggtggaaaccgcatttttgcgctcccctgtgtactggagtgggtgtccatggagggcctcggtctggccctctgggtccactcccgacaggttgtcccctgggcagcccgattgcagcatggtgtgttcgtgaatcaaccggaagaggacggggtcgtacgtctgcctgagtgcgttctcctggaccaacccggcagtggaccggaaagacttggtcgatgaccaaggcgcatatccttccgggtgcttcgcacgttgctcccaccttctttcttgtcatgctcgtgtgccatccacgctaggcaccagaacttttcacgtattggacatggacactttcgtgcaaggcgcaattgctacgtgcctgatcgccggaaggaaaatggggtttgcccagatcttatcttcggcctccgcattaccttctattttaagtaccatgttactacacttgaaataatattcctcgggaacgcgcaaagtggggttggcgtcaggcatgactctcgcctcaaagcagagcctcttggcgagcacccccccagtgccgtatggggagggctaggaagaaaggtaggaacttcgcccagtgcgaattacttggcgaaagacttggcaacaagcgtaagcgtcccactccccaagtatttgtggggaccccataaactccctg

SEQ ID NO: 564593 - DNA, 366 bp, Homo sapiens
atatttatagtttgacaagatgagtgtaagggcatgcgagctgttgttggttcgtggctccaaatcgtccgtgacttggtcagtctggggttcctctcaccccagcgtttggggccttctctgcacatattgccataagaggacagcatgtttgtttaccatctgcccaggcaccacggctacaatcacatctagctgtatcagacagaagacaaagaacttactttctgtggtcattagttgtaagttaacttagcaatccctgattcaagttcaaaactttgctacctccagctagctttgttccttttaacgcacatgttaagtgaatgcggaacagaaaataaatgtaaaaacgagcattac

SEQ ID NO: 564594 - DNA, 1483 bp, Homo sapiens
  misc_feature (1380)..(1380): n is a, c, g, or t
agatgacacagagggatgcagtgcttctctttatgcaagatgtaagggaaatataagttcacttacattaaaaaagaaacaatcacacacgcaaacccttcaccagaagcttcacactacagtccgtcctcctccgtcctgctgccccagcctctcaccggcatcgcctttcagacgccaggtgtcactgacaagtgggcatcctggtgctgtcccgactcaacatctagcacacaaactgttgtcgaatgccaggcgtgagaacgacagaaaccaaagcgtgcgcaacccccgtgtgtgtatttacttgtgtgtagcactagtatcactttacataataacaactaaagattctgatgatagaactatgagaagaaaaaaccgaaatatacataacataacaacaagacggagaactcataaacatacacacacagaaatacaatgacgaaggaggtggcgcgcgaccgtaattaaagaagtgtgtctgccccgggcgtggcccccaacagtaagtgctggctgctcacccactgctggggggtccccagaggaacgcggaagggcctcttgacaatccgagtcacccagcatgtttgagagagaaagccacagtagtcgcgtcgtggcgcagggttcattcctaaaaaggccagagaaggggtgcgtgaggaaaaacaagggcaattcccatggtttcgtggaggccacttttgtggtaaggagagcatgtaacacctttttccttcccccgcgaggtgtgggcgcgccgccccaaattctttttttggggggtgtaggcccctctttcaaacaccaacgaaagaattcattctttaaggacttgccacgcaaattagaagtcgcgcccctatgcatccaacttatttttttcgccccctttggggataggttgggcgcgccccataaatttaacggccttccgtttatattacctttcggcgcggccagtttcccttataaagacctatggttttcactttcacacaccacacgttattactttcattcatataataacataaaaggtttttttcttcccacgcagcggtggctcgctcgatttgtcttttcttctctgccgccccacccacttccaccctgggaaagttaaagcggttgcgggacgggatggagggggggaaaaagcgaaggacaaaaacctaaccaacaagcggaatataccgattgggtaggtgagtaagtagtagagacgagtctctacagtacaggcctactacaccacaaaaacgaccggcgtgggcccaccaccacacatcgaggtagtgctgcacccaccaagagagcacggacggaacaactcgacgcagctacgagtccagtcaggaacaacccagngcaacactgcagagtgacgcacccccaccccacagcaccccaccgcgggcaagaaccaacaggacacagcccacccgcacacccacagcagaccccacccaaa

SEQ ID NO: 564595 - DNA, 394 bp, Homo sapiens
gactctagaggtatcccctctctgtcctcccagatcacgatgtctgggatcttctgagcatgggcagcaaagaatacaagttcatgttattatatacttgaataccatgtaatgaaaataattaagttatctgggtggaagagttcaaatacacatatatttaatcacacacactgacaaaatataaagcacacttctataatatcacatattgcagtatttctcagagtggcccccaagccggcacaggacatctacctggaacttggaagaaacgtgtaaatcttgggctccagcaaaatgtgttttaacaagccctccaggacactgtgatatgttatagtttgagagctactaattgatctgttcggaatacttctgtctgtagataatt

SEQ ID NO: 564596 - DNA, 218 bp, Homo sapiens
tcatgtaacagaaatctaaattcctaaataccctcgaacctctttctgaatactgttgtgttagtatatttctctttttttttttctttgaaaacacttttctcgcctttttcgtcggggcgagtgcgaaattcttttattcttgtttcagcctccccccttttttttttttttttcccaaaaaaatctatctcttggatcttgggcttatcgagggt

SEQ ID NO: 564597 - DNA, 1536 bp, Homo sapiens
agcgggttctggcagcccattccgagactagcggaggcgggcagggagggtatataagcgttggcggagcgtcggttgtagcactctgcgcgcccgctcttctgctgctgtttgtctacttcctcctgcttccccgccgccgccgccgccatcatgagggaaatcgtgcacttgcaggccgggcagtgcggcaaccaaatcggcgccaagttttgggaggtgatcagcgatgagcacggcatcgaccccacgggcacctaccacggggacagcgacctgcagctggaacgcatcaacgtgtactacaatgaggccaccggcggcaagtacgtgccccgcgccgtgctcgtggatctggagcccggcaccatggactccgtgcgctcggggcccttcgggcagatcttccggccggacaacttcgttttcggtcagagtggtgctgggaacaactgggccaaggggcactacacagaaggcgcggagctggtggactcggtgctggatgttgtgagaaaggaggctgagagctgtgactgcctgcagggtttccagctgacccactccctgggtggggggactgggtctgggatgggtaccctcctcatcagcaagatccgggaggagtacccagacaggatcatgaacacgtttagtgtggtgccttcgcccaaagtgtcagacacagtggtggagccctacaacgccaccctctcagtccaccagctcgtagaaaacacagacgagacctactgcattgataacgaagctctctacgacatttgcttcagaaccctaaagctgtgtgaacatggtcccgtttccccggctgcacttcttcatgcccggctttgccccactgaccagccggggcagccagcagtaccgggcgctgaccgtgcccgagctcacccagcagatgtttgatgccaagaacatgatggctgcctgcgacccccgccatggccgctacctgacggttgccgccgtgttcaggggccgcatgtccatgaaggaggtggatgagcaaatgcttaatgtccaaaacaaaaacagcagctattttgttgagtggatccccaacaatgtgaaaacggctgtctgtgacatcccacctcgggggctaaaaatgtccgccaccttcattggcaacagcacggccatccaggagctgttcaagcgcatctccgagcagttcacggccatgttccggcgcaaggccttcctgcactggtacacgggcgagggcatggacgagatggagttcaccgaggccgagagcaacatgaatgacctggtgtccgagtaccagcagtaccaggatgccacagccgaggaggagggcgagttcgaggaggaggctgaggaggaggtggcctagagccttcagtcactggggaaagcagggaagcagtgtgaactctttattcactcccagcctgtcctgtggcctgtcccactgtgtgcacttgctgttttccctgtccacatccatgctgtacagacaccaccattaaagcattttcatagtgaaaa

SEQ ID NO: 564598 - DNA, 1010 bp, Homo sapiens
  misc_feature (1010)..(1010): n is a, c, g, or t
ttgctaggtacccatacccgtagtgccgtacgaaccaatgacaacatttgttgtctgtaatgaatgtggaaatcgatggaagttctgctgagctggaagaattgcaaaaatatctggaccattcataaaactgatccttcacatatactaaacacctatgccaatcaccaacatcctactgccaccccacatacttaacgtcacttgtagtccgaccacaaccttccccactccacctccctcttttacacccgcagcagaccactttccatcgccccgccgccccattcttctcacctccatccacccccttccccacccgattcccctcccaacactcatcactccacccaccaaacctcccccccctctcatgcctacacacaccgtcaccccccccctccccacccacgcctcacacctaatttataccatactcaccccctacaaacccaccacccctcaccatctaccacccaacccccctcccccctacgccctcacctcaccatccccaccacccccctcaccactcgccttatatgtcccccccgccctctccccctagtactaacttccgactatcccctcttacatctctcactatccacaacataccttatcctgctcactcactcctcccccgatcccacaatatattataccacatcccacccccaccacccatattcctacatactgtcaccacacaccctctcctacattcatcataatatacacccactctcaccaccactccacctccaacacacctccctccactcccaccaaacttcgcacacttacctccccctcttacctatactcacccgatcctacctcatctctatcagtactacatctaatcacacctgcctgtaataaaccgctacatccatactctcacctcccacacccaaaaacacatcctcctcaccacccctacccctcctctcgcacgccacactatcccccccaccacaaacgcattcttcgactccctcatactn

SEQ ID NO: 564599 - DNA, 1601 bp, Homo sapiens
agcgggttctggcagcccattccgagactagcggaggcgggcagggagggtatataagcgttggcggagcgtcggttgtagcactctgcgcgcccgctcttctgctgctgtttgtctacttcctcctgcttccccgccgccgccgccgccatcatgagggaaatcgtgcacttgcaggccgggcagtgcggcaaccaaatcggcgccaagttttgggaggtgatcagcgatgagcacggcatcgaccccacgggcacctaccacggggacagcgacctgcagctggaacgcatcaacgtgtactacaatgaggccaccggcggcaagtacgtgccccgcgccgtgctcgtggatctggagcccggcaccatggactccgtgcgctcggggcccttcgggcagatcttccggccggacaacttcgttttcggtcagagtggtgctgggaacaactgggccaaggggcactacacagaaggcgcggagctggtggactcggtgctggatgttgtgagaaaggaggctgagagctgtgactgcctgcagggtttccagctgacccactccctgggtggggggactgggtctgggatgggtaccctcctcatcagcaagatccgggaggagtacccagacaggatcatgaacacgtttagtgtggtgccttcgcccaaagtgtcagacacagtggtggagccctacaacgccaccctctcagtccaccagctcgtagaaaacacagacgagacctactgcattgataacgaagctctctacgacatttgcttcagaaccctaaagctgacacgcccactatggtgacctgaacacctggtgtctgtaccatgagtggggtcaccacctgctgggcttcccaggcagtcaatgtgactgggagctggtgtgaacatggtcccgtttccccggctgcacttcttcatgcccggctttgccccactgaccgtgcccgagctcacccagcagatgtttgatgccaagaacatgatggctgcctgcgacccccgccatggccgctacctgacggttgccgccgtgttcaggggccgcatgtccatgaaggaggtggatgagcaaatgcttaatgtccaaaacaaaaacagcagctattttgttgagtggatccccaacaatgtgaaaacggctgtctgtgacatcccacctcgggggctaaaaatgtccgccaccttcattggcaacagcacggccatccaggagctgttcaagcgcatctccgagcagttcacggccatgttccggcgcaaggccttcctgcactggtacacgggcgagggcatggacgagatggagttcaccgaggccgagagcaacatgaatgacctggtgtccgagtaccagcagtaccaggatgccacagccgaggaggagggcgagttcgaggaggaggctgaggaggaggtggcctagagccttcagtcactggggaaagcagggaagcagtgtgaactctttattcactcccagcctgtcctgtggcctgtcccactgtgtgcacttgctgttttccctgtccacatccatgctgtacagacaccaccattaaagcattttcatagtgaaaa

SEQ ID NO: 564600 - DNA, 1112 bp, Homo sapiens
  misc_feature (994)..(994): n is a, c, g, or t
agcgggttctggcagcccattccgagactagcggaggcgggcagggagggtatataagcgttggcggagcgtcggttgtagcactctgcgcgcccgctcttctgctgctgtttgtctacttcctcctgcttccccgccgccgccgccgccatcatgagggaaatcgtgcacttgcaggccgggcagtgcggcaaccaaatcggcgccaagttttgggaggtgatcagcgatgagcacggcatcgaccccacgggcacctaccacggggacagcgacctgcagctggaacgcatcaacgtgtactacaatgaggccaccggcggcaagtacgtgccccgcgccgtgctcgtggatctggagcccggcaccatggactccgtgcgctcggggcccttcgggcagatcttccggccggacaacttcgttttcggtcagagtggtgctgggaacaactgggccaaggggcactacacagaaggcgcggagctggtggactcggtgctggatgttgtgagaaaggaggctgagagctgtgactgcctgcagggtttccagctgacccactccctgggtggggggactgggtctgggatgggtaccctcctcatcagcaagatccgggaggagtacccagacaggatcatgaacacgtttagtgtggtgccttcgcccaaagtgtcagacacagtggtggagccctacaacgccaccctctcagtccaccagctcgtagaaaacacagacgagacctactgcattgataacgaagctctctacgacatttgcttcagaaacctaaagctgacacgcccacctatggtgactgaacacctggtgtctgtaccatgagtggggtcccacctgctgggcttccaggcagtcatgtgacctgggaagctggtgtgaaatggtccgttcccgggtgccttcttcatgcccggtttggcccctggacagcgggcggccgcagaccggggctgacggccgatcaccngattttgtccccactttggtggtggtaccgcagggcgcactatcgtgcgcggtaggcgcgcctaaggggggccctttccacaaccgttggcccccagacggttcccccgagcgccggg

SEQ ID NO: 564601 - DNA, 1010 bp, Homo sapiens
  misc_feature (963)..(963): n is a, c, g, or t
  misc_feature (968)..(969): n is a, c, g, or t
agcgggttctggcagcccattccgagactagcggaggcgggcagggagggtatataagcgttggcggagcgtcggttgtagcactctgcgcgcccgctcttctgctgctgtttgtctacttcctcctgcttccccgccgccgccgccgccatcatgagggaaatcgtgcacttgcaggccgggcagtgcggcaaccaaatcggcgccaagttttgggaggtgatcagcgatgagcacggcatcgaccccacgggcacctaccacggggacagcgacctgcagctggaacgcatcaacgtgtactacaatgaggccaccggcggcaagtacgtgccccgcgccgtgctcgtggatctggagcccggcaccatggactccgtgcgctcggggcccttcgggcagatcttccggccggacaacttcgttttcggtcagagtggtgctgggaacaactgggccaaggggcactacacagaaggcgcggagctggtggactcggtgctggatgttgtgagaaaggaggctgagagctgtgactgcctgcagggtttccagctgacccactccctgggtggggggactgggtctgggatgggtaccctcctcatcagcaagatccgggaggagtacccagacaggatcatgaacacgtttagtgtggtgccttcgcccaaagtgtcagacacagtggtggagccctacaacgccaccctctcagtccaccagctcgtagaaaacacagacgagacctactgcattgataacgaagctctctacgacatttgcttcagaaacctaaagctgacacgccactatggtgacctgaacacctggtggtctgctccatgagtggggtcccactgctgggcttcccaggcagtcaatgtgactgggaactggtgtgacatggccgtcccggtgcttttagccggttgccctggcaccgggccgacgggggcggcnccccnntttgcaaagtttcgacccgggaaggcgtgggcagggccttg

SEQ ID NO: 564602 - DNA, 558 bp, Homo sapiens
gggtatatctttatgtgccaggcagagattcctaatgaaccctgtgttccctgagcgtcgcttcgtctcttttctggggagttaaattactattcactagaagaaacttcttggtggctcctcctgtgcacagaatcacaaagaggtgtagggccgtgtaaatgtggcagagggcttgtgggagaggtccgtggaaggtgcattttgtcccttttgcagactctactggttgagtctgtaacacacgctgtaacacacatgtgtgttgtgaaacacagctggttgatcttaattttggcctcgggctcagtttccctggcctctgagtgatttaagtacacctgatagaagggatgaaaaaccctttggggggtccctgcctgggctatacccgtctctcttgggaatgttccctcttgaacccctgtgtgaactctgtgacaagttcacaagcccagcttgggaaaagaaaggccatcccattagctgagcagtggaccagtctctccctctcttttcagaatcttgagaccaaccagaaataggggtcagtcccat

SEQ ID NO: 564603 - DNA, 408 bp, Homo sapiens
cagcagaggacgtgatcgttttatcattcaagagatggatacacacctcttcttactttttattagagacagggtctagttctgtcacccaggctggagcccagtggcacaatcatagcttactgtaacctcaaactcctgggctcaagcgatcctcctgcctcagaatcccaaagtgctggattacaggcacatgtcaccatgcccatctcatttttaaattttttactttttcttttctttttttttttggagatggagtctagctttgctgtcagggctggactgcaatggcatgatcctagctcactacaaccaccgcctcctgggtccaagcgattcttctcaggtttgagacggaacaggctctgcgcatgaccttgaaggccgacttcaacggcctgcgca

SEQ ID NO: 564604 - DNA, 911 bp, Homo sapiens
agcgggttctggcagcccattccgagactagcggaggcgggcagggagggtatataagcgttggcggagcgtcggttgtagcactctgcgcgcccgctcttctgctgctgtttgtctacttcctcctgcttccccgccgccgccgccgccatcatgagggaaatcgtgcacttgcaggccgggcagtgcggcaaccaaatcggcgccaagttttgggaggtgatcagcgatgagcacggcatcgaccccacgggcacctaccacggggacagcgacctgcagctggaacgcatcaacgtgtactacaatgaggccaccggcggcaagtacgtgccccgcgccgtgctcgtggatctggagcccggcaccatggactccgtgcgctcggggcccttcgggcagatcttccggccggacaacttcgttttcggtcagagtggtgctgggaacaactgggccaaggggcactacacagaaggcgcggagctggtggactcggtgctggatgttgtgagaaaggaggctgagagctgtgactgcctgcagggtttccagctgacccactccctgggtggggggactgggtctgggatgggtaccctcctcatcagcaagatccgggaggagtacccagacaggatcatgaacacgtttagtgtggtgccttcgcccaaagtgtcagacacagtggtggagccctacaacgccaccctctcagtccaccagctcgtagaaaacacagacgagacctactgcattgataacgaagctctctacgacatttgcttcagaacctaaaagtggcacagcccccttattgtggcctgacccctggtgttttgctcccctggtgggggcccccgggtggcttccggggccatgtgtactccggaaacgtggtaaagtcctcc

SEQ ID NO: 564605 - DNA, 722 bp, Homo sapiens
agtgaccgccgagggaatcttgccggggtgcaaccgacaccgcgaaacaggaagtgttgaacgaacagcggacctgtgaccagagtgcggtgtcgggcgcgaaccgctggccgtgggagcacgccgtagccgccccgtgagaacagaccggggcgcaattggcgacacagaccgtggggaccccgcccgaagaaattgttccctccacgaggggggtcgtaaaaaagagtgtcgtatggagcttgtagaatcaccactagcggggcttgttcatttagctctacaccatcagttggggaccacctcccacctattgtggtcctcccacgctcttgcccgctgtagccaccccatatggccgctctatcactttggggaggcccacgtggtaccacactgttgtcgtcgacgcgcgccccgcgctgttgtttgtctataagacgctggggtctcttgtagatgcacacaagcaaaaggaaaagaagcgtgatagtttagacgcgcgccttgaggtaataaaatacgagctttgtctgcgcgcctttctatccaaatgttcatttgaggcaaccctcttgtgacagagaggcagccaactttataaaaatagttctcaccccacggggattttccccgggaaattggtcgcggtggaagatttgctaaggattctcgtgatatatatcgagcccaaaatgccccctcctcccgcccacaaaaca

SEQ ID NO: 564606 - DNA, 1037 bp, Homo sapiens
  misc_feature (1014)..(1014): n is a, c, g, or t
agcgggttctggcagcccattccgagactagcggaggcgggcagggagggtatataagcgttggcggagcgtcggttgtagcactctgcgcgcccgctcttctgctgctgtttgtctacttcctcctgcttccccgccgccgccgccgccatcatgagggaaatcgtgcacttgcaggccgggcagtgcggcaaccaaatcggcgccaagttttgggaggtgatcagcgatgagcacggcatcgaccccacgggcacctaccacggggacagcgacctgcagctggaacgcatcaacgtgtactacaatgaggccaccggcggcaagtacgtgccccgcgccgtgctcgtggatctggagcccggcaccatggactccgtgcgctcggggcccttcgggcagatcttccggccggacaacttcgttttcggtcagagtggtgctgggaacaactgggccaaggggcactacacagaaggcgcggagctggtggactcggtgctggatgttgtgagaaaggaggctgagagctgtgactgcctgcagggtttccagctgacccactccctgggtggggggactgggtctgggatgggtaccctcctcatcagcaagatccgggaggagtacccagacaggatcatgaacacgtttagtgtggtgccttcgcccaaagtgtcagacacagtggtggagccctacaacgccaccctctcagtccaccagctcgtagaaaacacagacgagacctactgcagtacacgggcgagggcatggacgagatggagttcaccgaggccgagagcaacatgaatgacctggtgtccgagtaccagcagtaccaggatgccacagccgaggaggagggcgagttcgaggaggaggctgaggaggaggtggcctagagccttcagtcactggggaaagcagggaagcagtgtgaactctttattcactcccagcctgtcctgtggcctgtccactgtgtcacttctgttttcctgtccaatcatnctgttgtctgctagcaggtaccg

SEQ ID NO: 564607 - DNA, 1136 bp, Homo sapiens
gggcgctggggccctgggcagcgcgggctcgatgtgtgtcagccaagtagctggtcccactggagcggtgaggtcgccacggatagtgttcctgccccattactagcgatctgtgaccttgaggacagtgattttactgagtcttgcttccctcatctttaaaatgtggctaatgcctgccttagggaaccgttgtgaggcattcacgtgcagacatggtatatcaaaacgcactccttctggcataaacttgaggtggacagcataccttgaggcatgcttgaaggtctgctaggcagcttcacagccgttatcatattcctcattctcatatcaggaggtctcttatggaagcaagtaatgatgactaataacaagaaccttatcgtagctattgcaagcattcttccgccgtacagagttactgattacatgatactggaggattccatgtatgccagggcagaaacgagagagcgcgacaagagagcaggatgtctctctcaagacatggcacctgtctggtgaaagctggctggaccaagacgagtatatcgcaaagattaataacgttcgagaaggacagagcacagacaagtgtgagagaaatacgtcgataagagaggagatatagataatatatcataacttgaaggcaagctttatggaatgtgagaaggaccccagggaagactggaaccagaacccccgaaacaggacagagcctagatcatacctgaagagacggaacagcgcaacaggatgacaccagaacacgagcacctcccacgtggacctacaaccctggggacccacagggaccaggaactggcggaaaaagtcacagaggacggaagagcgagcaccggaaaaaaacgggaagaccgtggtggaacacacaagttggcatgcccatgacgagcagaccagacgggaagaaaacatgccccgcaacagaaaaacacaagcacaaggaaagaggaaccacaaagaaccgaaaaaacaaagagcgaaagagaagaaacatgtggacacccgagccgcaaaggccaccaaggacggcgacaacagaaagacaataacagaaagggaaaacagacatagaaaagaacaaaaaaacaaagagaaagaagaga

SEQ ID NO: 564608 - DNA, 1532 bp, Homo sapiens
agcgggttctggcagcccattccgagactagcggaggcgggcagggagggtatataagcgttggcggagcgtcggttgtagcactctgcgcgcccgctcttctgctgctgtttgtctacttcctcctgcttccccgccgccgccgccgccatcatgagggaaatcgtgcacttgcaggccgggcagtgcggcaaccaaatcggcgccaagttttgggaggtgatcagcgatgagcacggcatcgaccccacgggcacctaccacggggacagcgacctgcagctggaacgcatcaacgtgtactacaatgaggccaccggcggcaagtacgtgccccgcgccgtgctcgtggatctggagcccggcaccatggactccgtgcgctcggggcccttcgggcagatcttccggccggacaacttcgttttcggtcagagtggtgctgggaacaactgggccaaggggcactacacagaaggcgcggagctggtggactcggtgctaccctcctcatcagcaagatccgggaggagtacccagacaggatcatgaacacgtttagtgtggtgccttcgcccaaagtgtcagacacagtggtggagccctacaacgccaccctctcagtccaccagctcgtagaaaacacagacgagacctactgcattgataacgaagctctctacgacatttgcttcagaaccctaaagctgaccacgcccacctatggtgacctgaaccacctggtgtctgctaccatgagtggggtcaccctgctgcgcttcccaggcagctcaatgctgactgcggaagctggtgtgaacatggtcccgtttccccggctgcacttcttcatgcccggctttgccccacttgacaggcggggcagccaggaccgtgcccgagctcacccagcagatgtttgatgccaagaacatgatggctgcctgcgacccccgccatggccgctacctgacggttgccgccgtgttcaggggccgcatgtccatgaaggaggtggatgagcaaatgcttaatgtccaaaacaaaaacagcagctattttgttgagtggatccccaacaatgtgaaaacggctgtctgtgacatcccacctcgggggctaaaaatgtccgccaccttcattggcaacagcacggccatccaggagctgttcaagcgcatctccgagcagttcacggccatgttccggcgcaaggccttcctgcactggtacacgggcgagggcatggacgagatggagttcaccgaggccgagagcaacatgaatgacctggtgtccgagtaccagcagtaccaggatgccacagccgaggaggagggcgagttcgaggaggaggctgaggaggaggtggcctagagccttcagtcactggggaaagcagggaagcagtgtgaactctttattcactcccagcctgtcctgtggcctgtcccactgtgtgcacttgctgttttccctgtccacatccatgctgtacagacaccaccattaaagcattttcatagtgaaaa

SEQ ID NO: 564609 - DNA, 850 bp, Homo sapiens
  misc_feature (746)..(746): n is a, c, g, or t
  misc_feature (766)..(766): n is a, c, g, or t
agcgggttctggcagcccattccgagactagcggaggcgggcagggagggtatataagcgttggcggagcgtcggttgtagcactctgcgcgcccgctcttctgctgctgtttgtctacttcctcctgcttccccgccgccgccgccgccatcatgagggaaatcgtgcacttgcaggccgggcagtgcggcaaccaaatcggcgccaagttttgggaggtgatcagcgatgagcacggcatcgaccccacgggcacctaccacggggacagcgacctgcagctggaacgcatcaacgtgtactacaatgaggccaccggcggcaagtacgtgccccgcgccgtgctcgtggatctggagcccggcaccatggactccgtgcgctcggggcccttcgggcagatcttccggccggacaacttcgttttcggtgagccgtggctggggactgggcggcggctcaaaggtcaaggggctgctccaagggcaccgccgtgggaactgcgcagccggggcccctggacgccctcctcttctctgagccactcaatcccctctactaaatcggctttgggagcaaggtccagctgtctgccgaggcgaggagccgcacacacgtaatctccctgcagggagctgagctggggcagtggctgttcctctgtccttgggaattggcagtggccccccggggaggggtttgtaagctgtcaggtttggcctgacttaattcgtacagggcaggnggcggctttgggttgaaggnccgtgtctaactcccgggattctgggcccgctccaccagtgcccgggtttcgctggggggccggtgcgctcccggcgccccgtg

SEQ ID NO: 564610 - DNA, 931 bp, Homo sapiens
  misc_feature (827)..(827): n is a, c, g, or t
  misc_feature (847)..(847): n is a, c, g, or t
agcgggttctggcagcccattccgagactagcggaggcgggcagggagggtatataagcgttggcggagcgtcggttgtagcactctgcgcgcccgctcttctgctgctgtttgtctacttcctcctgcttccccgccgccgccgccgccatcatgagggaaatcgtgcacttgcaggccgggcagtgcggcaaccaaatcggcgccaagttttgggaggtgatcagcgatgagcacggcatcgaccccacgggcacctaccacggggacagcgacctgcagctggaacgcatcaacgtgtactacaatgaggccaccggtgaggccccggccccttccccgaccgccctccggggaccccgcggcccctgccttggctgacgccctcccgtccccgcaggcggcaagtacgtgccccgcgccgtgctcgtggatctggagcccggcaccatggactccgtgcgctcggggcccttcgggcagatcttccggccggacaacttcgttttcggtgagccgtggctggggactgggcggcggctcaaaggtcaaggggctgctccaagggcaccgccgtgggaactgcgcagccggggcccctggacgccctcctcttctctgagccactcaatcccctctactaaatcggctttgggagcaaggtccagctgtctgccgaggcgaggagccgcacacacgtaatctccctgcagggagctgagctggggcagtggctgttcctctgtccttgggaattggcagtggccccccggggaggggtttgtaagctgtcaggtttggcctgacttaattcgtacagggcaggnggcggctttgggttgaaggnccgtgtctaactcccgggattctgggcccgctccaccagtgcccgggtttcgctggggggccggtgcgctcccggcgccccgtg

SEQ ID NO: 564611 - DNA, 1132 bp, Homo sapiens
ttgatgttcggcgaccgatatgactattctctacaaaccacaaagacattggagacattatacctattattcggcgcagtgagctaggagtcctatgtcgacatgctcataagcctccttattcgagccgagctgggccagtcgcaggcaaccgttcgtaggtaacagagcctacaatctacaacgttagtcgtcactagcccattgtcactttgtaactatatcttcttcactatgtaatagccctatcagtaaatcggacggctattggtaatctgaactagttcccgctaagtacatcggtgccacccgaatatggcagttattcccgacattaaatcaacataaggcattcttggacatctgtaacctcacctactcatccatacgtctctgactccgctagttcgtagcgtaactagttgcgacgtgaccctggagtcgagcgtacacaagggcttagagatcgagctcttaacgcacatactcgcttgtgagcatgtggcaatcattactacctcgcaacactcttgtgaatggccttccagtaagaaacctaaaacacaattcattactcactttaacaaccttaagcaaggagtagttcttcacattcattagtcatatacgagggaggccaaatcagactttacagttcagcgagagcaagatgtagtccacattataacagatacacccaccttggccaattaagccccaaattatcacatatacggcacccatacattaacgttctcgaattccaggtccctaatattctacacgacatgtacactaacgcttcttccataatcttctgcgccaagtctctaagacttggctggggcattcacacaatagctatttaacaagagcacgcaagactcaaaggagcaaccatatactatcggaagccacgacgggcagagagcgaagacacccaattcctattaccaaagaaacgttaatatctggactattttcacggtccaccctggaaagtcgtataatactttaatcgcttaccagcgctttcgcgacatacatcctcgcaatattggctaaccttaacatactcccggcaaaacaaaagagacattttgggataacatagggtaatcgagcctgagca

SEQ ID NO: 564612 - DNA, 202 bp, Homo sapiens
cagtctatggagatgactgagcagatgaaggcatcagatgccttcatcagctggtattttgcctaagatctatctaagataacctattattaaatattttacttaatatagggcataatcgtatcattcaaaattaagtctgcgttatttcttagataagaactgaatgtggccgggagcagtggctcaagcctgtaatccc

SEQ ID NO: 564613 - DNA, 194 bp, Homo sapiens
gcgctgagggggctgttgagtggctcacgcctactacctcaaacatcagttctaccccagtgtggtgtaccttgaccaagtaccagccccagcattggaagtcctgtacatccaggcctttgtccttgtcttccattctgggcaaggctgataggcaaggtgttcttgggtcaactgagggcagcagagatgga

SEQ ID NO: 564614 - DNA, 287 bp, Homo sapiens
  misc_feature (131)..(131): n is a, c, g, or t
ggggggggggggggggggggggggggttttttttacccgggtttttttttttcccccccgttttcctggggggcccccccccccttttttttcccccctttaaaacccccggggcggttcccccccccggnttttacctttggccggggggggggttactttttttccccggggacccgtttttccctttggcccttttttggggccccttttaccccgtttttttccaaaaaccggggggggcccggcccggttttcccgggttttttttcccccccgggccccca

SEQ ID NO: 564615 - DNA, 676 bp, Homo sapiens
acagattccctttgcgatggaatataccccccaaaggttaccactgtccagctgagaagaggaagccatcgggtgccgtctctccttgatggaatcgatacagggctcctggtgctgaaggacttgggcattcaggtggaccgctacattgccacggaggtgtgtgaggactccataagggtgggcattgtacggcaacaagggcaagatcatatacatcggagaagtccgcagcgtcacacagaagcatatccaggagtggggaccattcgatcaggtgattgagggcagtccctgcaatgacctctccatcgtcaaacctgatcgcaagggcctctactatggcactggccgtctctcaaagagttctaccgactcctgcatgatgcgcggcccaaggagggagatgatcgccccttcttctggatctttgagaatgtggtggacatgggcgttagtgacaagaaggacatttcgcgattactcgagtacaaccctgtgatgattgatgccaaaaaagtgtcagaagcacacaaggcccgcaactacaggggtaaccttcccagtatgaacagggcgatgaatccactagtaatgataagctggaactaaagaatgataaaactggcagaaaccaaaacaaaaaggagacataacacaagtaaatcctacaaga

SEQ ID NO: 564616 - DNA, 204 bp, Homo sapiens
  misc_feature (101)..(101): n is a, c, g, or t
agactgatatccgctgccacaactgagggatctgacatttctatgccactttattttatgtaaatgcgttattttactcctttttccatacttttgatggnttgggaaaattactatttattccctttcttttatttatttcttattttttgagacagagtctcgctctgtcgcccaggctggagtgtagtgttgcggtctctg

SEQ ID NO: 564617 - DNA, 442 bp, Homo sapiens
agttgtaaaaggggcatagtcccctttgtcataactgacagatgctgtttcgagtactcctggtgcaggccgtgaaattagacagagagattttaccacacattaattatacttgtgcagtctctccagtataacttctctaatgagttattagaaccacttgtgtcagaagaccttgtccaattctttacatttgcaaaattactttgcagtataggcatacaagatgggtcagtaaggcttgagtgcacactaaattcttagacgcatttgttgcatttgtcgttactatcccatatgaatagtccaatgtagtgctaggtctgaaatgcgactaaaggccttgcaaaactcattacatttgtaaggttactctccagtatgaattttccgatgtcgtgccaggtgtagcaaattcgattagaagcacttgtcaacattc

SEQ ID NO: 564618 - DNA, 973 bp, Homo sapiens
gggccgcgggccggcgtgcgtggcaagcctctcgcggctcggctcgctcggcctcccttaccgggaggcggggtctggcgccgcgtgcggcggaggcaggccccctctctcccgcctcctcgagcctggctccttcccctggccggtgcgtctctgcgccagctcgtcctcggcgtcctgctcgcgcaggctcggtggggctgctcaacttgtctacttcgtacctcgccctggtggcggcggccgaattgtctcagggctgagtgacgtccaaccacgtacctggacggcaggatcccaagcaaggtccgtgggcagccaaccaggacgtactcccgagcagacgggaggagcttgggccagggccttgcaagggccgtcgagcagcaaggtcgccagtcctgggcgcagaagcccacattgggggacactcttctggagtccagtctctgcagacagcctccgcaaaccagtcacaagcaaggaacctccaaccaggaggcacacgctgggaaagcatagggggagacgtgaaggtccaggcggactcaagtggcaaggcttgcatgcaaggaaagacgtccagcacatggaaggacttcgtacaacgaagaacgctcctcgggaatggggaatcccaattggtgcgatgcacagggacgcgccccggaggaagtccggcgacctcacacgcaggtcaccttggacagcaacacacacagtaggggagggaaagcccaggcgacggcaccggggcagagtccagcccaaacacaatccgagtcccacctggacgcgcagaaatccggccacagaccgaggccagccaaagacacagtcccgcagaaagagcaacggaaaggacccagggaaaaaggggaagacatccgaagggggacaaatcgacaggagcgcacaagggtataggcgtccgcccttcggcacagcaaagtcggcgcagggagcaaacgca

SEQ ID NO: 564619 - DNA, 875 bp, Homo sapiens
tgacgccgaagtgcatcgggggggcccgggggccctggtggctcctgggcatgtgaggaactctgcggtgggttccgcgtgaggtttcggcagtggcatacggggtccggggtcgtaggccagatggataggtgagtccggagggcgcagatgagccgcgtgatactctgccgtggaggtcaaatggacctaggataaaggagtggatgcccgtcaccaacgttgggtccgcattgcgtcgaaaggacagtgaaagattcaacgtccctggaggagatctatctcttctccctgtgctcattaaaggaatcagagatcattgattgtcttcctggagggcctcttctcgaaggcatgaggttatcgagggattatgccagttgcagtaagcagacccgtgtccggtcagcgcaccagagttcaacgtgcatttccgttggctatcggggactacaatggccacgtcggtctgggctgttaaagtgctccaaggaggtggtcaccggaagtccgtggggccatcatcctggacaagctctccatcgtccccgtgcgcagaggcgtactgggggaccaagatcggtaagtccccacattggtccttgataaggtgacaggtcgtagcggctctgtgctggtacgcctcatacctgagaccaaggggactggcatcgtctccgaacctgtgcctaagaagctgtcatgatggctggtattccgatgactgggtacactttcagcccggggcttggactggcaacctggggcgaatttcggccccggccactttgattgcgctttaataccatacagtaactgaccccgagtctgggaggcgacgctttccaaggttctaaaaaagcacggcactcgta

SEQ ID NO: 564620 - DNA, 462 bp, Homo sapiens
cagactatggatccttcgtgcagtggattccagacagaaaaactaaattccaaattctaaatgccccctcccttttggagtttaggcacaactaaccagcacattacaatagacagtcatagactgccctaacactaacagactctttgtggcaatcagataacaaattccaacctgactccagtacagcatcacacgacagatagcagaccctgaaggaacatacaaattttttaccccaaaatatatttctttggcatattttgaaaatgggcctgttaagctgtcttttgtggggacacctttgcatctgtagagacactcttaccccttccaggtcttccccagatcacggagcgactagtgagaatctgttctctttaagggttgaacagagaggctttgggccaggcacgtggctcacgcctgtaatccccgcactttgggggctccccgggtggg

SEQ ID NO: 564621 - DNA, 115 bp, Homo sapiens
tactttccacagggggaatgtttcatcttctccttgttcagtataaacgttggctgtgggtttgtcgaaagtggcttttattaccttaagttatgtcccttctatgcccagtttt

SEQ ID NO: 564622 - DNA, 486 bp, Homo sapiens
aattagctaggtgcgctggtgtgtgcctgtagtcccagctaccggggaggctgaggtgggaggattgctggagcctggaggtcaagactgcagtgagctgagattgcattgctgtactccagtctgggtgacagagcaagatcctcaaaaaaaaaaaaaaaaagtgatctggaatggggaatttaaaaaaattttttttctttttttgttttttttgagtcagggtcttattctgtcacccaggccggagtgcagtggcacaatcttggctcactgtaacttctgccctctgggctgaagcagcctcccgtctctactaaaaatacaaaaattagccaggcgtggtggcaggcacctgtaatcccaggtacttaggaggctgaggcaggagaatcacttgatcctgggaggtggaggttgcagtgagctgagatcatgccactgcactccagtccggggtgacagagcaagactctatctaaaaaa

SEQ ID NO: 564623 - DNA, 472 bp, Homo sapiens
  misc_feature (39)..(39): n is a, c, g, or t
  misc_feature (297)..(297): n is a, c, g, or t
  misc_feature (335)..(335): n is a, c, g, or t
  misc_feature (337)..(337): n is a, c, g, or t
  misc_feature (350)..(351): n is a, c, g, or t
  misc_feature (356)..(356): n is a, c, g, or t
ccagcgctgctcgccttgttgggaaaaaacattttttcnccctcccaaggagaggggaagattttacaatttattttctccactttccccaaagggctcccccgcggcccctcaaaatgtctctccctccccgaagcctctcagggggtttaaaaagagcaaagaaagacctaaagaaacctcagagcagggggagctgatggcctccttcctttgggggtggagggacaaccctgagatgaaccgcgcaggacgaccccctctccgagcagccccaattgtgcccccatgagctcnggggctcccccctcctcctcccccccgcccccacctcntnctcctcgcttcgnnaggangcagaagagcaggagagcacctgccccatctgtctgggggagatccagaatgccaagacattggagaagtgccggcattcattctgcgagggctgcatcacccgggctctgcaggt

SEQ ID NO: 564624 - DNA, 115 bp, Homo sapiens
aaagacagcgctctagtatcagtagagacgactcagaaaagtcccagagctaataggcagaaatttagcactattgaacatagtagtataaaaagtagtaagtaggaacctagag

SEQ ID NO: 564625 - DNA, 210 bp, Homo sapiens
  misc_feature (4)..(5): n is a, c, g, or t
  misc_feature (73)..(73): n is a, c, g, or t
  misc_feature (75)..(75): n is a, c, g, or t
  misc_feature (88)..(89): n is a, c, g, or t
  misc_feature (94)..(94): n is a, c, g, or t
tttnntttttccccactacagaacttttttgaagaaagagggaaggggaaggcgaccccccgcccccacctcntnctcctcgcttcgnnaggangcagaagagcaggagagcacctgccccatctgtctgggggagatccagaatgccaagacattggagaagtgccggcattcattctgcgagggctgcatcacccgggctctgcaggt

SEQ ID NO: 564626 - DNA, 1532 bp, Homo sapiens
  misc_feature (302)..(302): n is a, c, g, or t
  misc_feature (413)..(413): n is a, c, g, or t
  misc_feature (492)..(492): n is a, c, g, or t
  misc_feature (1155)..(1155): n is a, c, g, or t
  misc_feature (1299)..(1299): n is a, c, g, or t
ggctcatcaccacatatgggtgctggtgtcatcagttggcattattagcaaaaatagacatgtactattgcctatcagagaacagccacctctcacagctgctctagtccattcaaaggaagcagaaaaacgctaaaagcacttctctcttattagctacatttagatgttggaagaaaaaaaaatgagacttgttctttcttctgtcacaccagcaacatcacctagacaaatgataatggatatttcccatcaaaaacacttctcaaacttatacttctatatgttctgtcatagaaatngttttcaagccagtttccttttgccaacattttccccgtcctcttaatacatgttggagtgaattggggacaggaaaattatagtaagatggaatttgaccagtgattttngtcctgagagggagatatgatttcatttagggaacctacttgctgaatttcatcctgcagagttaatcattcttgtatntttccttatatcaaaatcagctagagttagcatctacattattgaattgtcatctttttgcccatcactttagaggtttttaagcctgttgaacttagtatataattatctcagctgtgctttagacaattaaaatggttctttaggcagagttgttgagctcaggggagtagttggtctttttgatttttcttaggaagtaccagatacaaaaacccatgagggattcctggatatagaacagggattcgataagagaaaatctggcatcatttctttacaggacacattatagcttcaggaggcccttggtctttgccattgctgttggcaggccttgtaacaaaccattcttggagggccttgtgggagggatcagttgtgcaagtgaaacaaagacttttggataactgactaacatcaaggcatattgatggcaatcagcaatttgagtcaggaaaaggactagcctttgtatctcccttgtttcctttctcctccatgtaattttaattcctgatatttccagctatatttgtctgttgtcacctgactctgtgtttgcggacgcagttctgggtctgaagcagcccttgacctctctagacagcatcaaagaacttattaaaaaaaaaaaaaaaaaagaagggtccctagtgcctntttgccatgcccttccttgatctccttcctcaaactaagaaaattctatagcctttctatttttatgggctgtgcaagcatgccaaatcatcaaggtaacaaaagactacctcttgattttccagcttgaatgatatattttgngggaagattaataggctctatttatatattttttgagatttttctatttcaagaagcatatttagttagaaatagacttttaatggaatatttatatatataaatgccacagctttggtttaaatcgcagttttgtcaacattagccagctaaggttcacttcataggagaacaatggaaaatatcagttttagcatcaataaaggtgaacggttattaacacaagaaacaag

SEQ ID NO: 564627 - DNA, 182 bp, Homo sapiens
tgcactacctcttattgcggcgccaccatcctcgcagtatcactctctctcatactatgcacctttgaatgttcacccagccataaagggatcactcagaggactccatcgtccctgcccacgaggtcagaactgagtctctgcctctccctgctactatccacggacaccttagctttgta

SEQ ID NO: 564628 - DNA, 708 bp, Homo sapiens
tacgtgccattccctagagcgttaggcgtgtctcggttcttaagacctacaatcggggtacgaggtggagagcgggcctaggggcggcatctccgaagacgtcgagaggctggggcacatgatacacctacatactctcttgtgcaatgcctacttgaggcggccagttaatcatcctgtctctgccctgcggctgagttgcacgcagatcgggcagtcctaccgcattgtggctgctcacaacaagtgtcccagggcatggccgtatacgtagagcagctgggactccgtatgatccattgcccaacagtcatggagaaaaactcgttgccctcaatcctactacatggatcctgtcattggattggctgcgtggtgcccaccatctctaagcctatggaaaagcttctgggtcttgctggctttttccctctgcatcctatgatgatcacaaatgctgagagactgcgaaggaaacgggcacgtgaagtcctgttagcttctcagaaaacagatgcagaagctacagatacagaggctacagaaacataaatgacgctgactttagtgagcatagcagtgggaacaaggtcaaggtccttttgaaacactgcagcgatcttaatttcgtcacatctcggagttcacatacaatggagtatcctgagttgcccttgctcttctggcctggcctgccacacggcccag

SEQ ID NO: 564629 - DNA, 190 bp, Homo sapiens
agacctgtgggccgtctgtgtgtcctgcatctgcatgaatattcccgaacgtggccagtttcgcttccatgtctggtctgggcaacgtgggattcttgggccgggatttcactgggtttttctgacttctcgtggagtgcccaagattgagctgagggacctcagggatgcccgaatgctactaaagctc

SEQ ID NO: 564630 - DNA, 282 bp, Homo sapiens
ggtctgtaccacagagtctcattctgtcgcccaggctgacgtgcgggcgtgatctctggctcccgtgttcaagtgattctctatgcctcagccccctgagtagctgggattataggcacacgcaccatgcttggtaatttttgtattttcagcagagacagagttcatcatgttgtccaggctggtctcaaactcctgacactctggggactacgcctccctcggcctcccagactttgacgaactttggaaaactttacgttcccctctttctgtcgggac

SEQ ID NO: 564631 - DNA, 898 bp, Homo sapiens
actcgtgtggcccgatgtggagctgcatctgtgtgggaacttcactctgtggctgccaacctgctcacctacctgctggcgtgcagtgcgggacccctgtggtcctgtgcgctgctcaatggctgagtatctgcttggctggcgcagatgggcaagaactacatcagctgccttgtgggagcttgcagctggaaggcccagctccatgcatgcaatgatcatgtgccccgtggccttgtcaccttgtcgtgagctgcatcacgccaatggtctcttacgggtcctggcagggagttgccagaaatgcatccaccttgtgctgatgggtctccacctggggaaaccttcttggtccatccttgatgtcggaacaatcttacccaggacggtctccttgccgttcaggttccacatgtggtgacctggtcatgccaactttcaatccttcatgggtgcgcagagggactttgcccttggttgctcggtttttgggatgcctcttgcatgctgttgcttgctgtgggctgatcccctcccatggattccgggcggccccagggcaagctggtcttggtctcacccagaactgcatccaccattcactggtggacccttgcaacattgcgggcttttctggtgtggcccccttgtcctgggtctgtcgcaccttccttcatgtggagcccagacgcgtgagggctcatgcggacgggtcttccctccgggggcggtgctgctctaccggtcctcctttgccgtgtccattccttgcgcaggtgaaccagtggaccctagctgtgcccatattgtctgcggggggggctgcgggccccatctgccgggtcggacctctttccttgccggagcgttgggggccttcctccagagcgtctccgga

SEQ ID NO: 564632 - DNA, 491 bp, Homo sapiens
  misc_feature (62)..(62): n is a, c, g, or t
  misc_feature (73)..(74): n is a, c, g, or t
  misc_feature (134)..(134): n is a, c, g, or t
  misc_feature (186)..(186): n is a, c, g, or t
  misc_feature (192)..(192): n is a, c, g, or t
  misc_feature (319)..(319): n is a, c, g, or t
  misc_feature (328)..(328): n is a, c, g, or t
tctaaaacaatacaaacaaacaagacaaaaaaccgttccaaggctccgtaagctttaggcancccagagcccnnctctgcccggctgtgggaagttttcgttagggctacgatgttggtgccacatctgctgcntgtcctcagggggctctcatcccacagcagagatctgtcataggttagagcngtctcnacagaagcaacacctgaaaggcatccaggggagccagttctggggcaggctgaacctgcagcttcacttgccatgtaaattagagactggaaaggcttctctgacttcaatcttcctcttctgcaanatggagatnagaccttcctggaaaggttaaaataatgaaccataggtgaaactgcctggtctagccccaggcttgtcctgggagctcaggaaatgctgatgaaagctggatggagatggctcaggggagcccatgcctttcattgggatagtctgtcctgctgtctgtcaaa

SEQ ID NO: 564633 - DNA, 405 bp, Homo sapiens
tcgagccggtcccagggacaagcaagagttgaacgtcgacgtagccgtgcgtgggcatagtggaaaaggggaaggccataggatgccgcattcagtctgtggaagatggggatgattctggcacaagcaaaaatgattgaagtttatgtctagacagcacctctaccaatccatcttcagctgactgaatgtcgtatgatagcccttctccaaagcagaggtagaatgatcaggtttcaccatggattttgctactgatttcgttttgggaatcaccttacagattcgaggtccctttggtatatattgtttattctttagcttttttaagaaaataatttggtgtcatatttaaagcacttgtattagtcaatgtttcgtgttccgctgttgcttgtaccgctg

SEQ ID NO: 564634 - DNA, 124 bp, Homo sapiens
tgcctggaggtcctgcaagaaagcgagggtggcattgacctttagtgaccatacaaaataattcctaggacctatacgtcagtgatcaaaaccaatgtgttgttttaccctcggctcttacctt

SEQ ID NO: 564635 - DNA, 107 bp, Homo sapiens
tagggttcatcctgcctccaatactggtgtctttgcccgcctcggtcagcggcaccctgtgcccgcgcgctcctcctggcgacgccgccctgtcgggctagtcgggg

SEQ ID NO: 564636 - DNA, 1001 bp, Homo sapiens
ggactgaggctcagaggagggaaggcagccggggctcagctgttacttgtatggagtccttagcatcctgggcaggctgaaaagaagacttcctgcagtcacatggtttagtttgatcacagaattcagagaccaggacaccagagactttcccacttccagtccacagccttttcattttagccatggttctggggctagctgattcagattgcagtgggctggggtagatggagccgtgggtgtctgtaccttggtaagttacgcacgtaaattcagatttatagccaggtttcagcactctgctgtgagagaatgtactgcctctgtgtaagcggaagtggaatgtgggaagccagatcggattctgagatgcatagtgatgacttgaccagagcatgacagaggggcctgaacaccggtgatccacccggtggtcgtagtgcatgtgggcctgaccagggagctcgctgtggagcggctctaggtgtgacttggaggccgtgggtacgtaaggctctagttcctccttgctgagctttgggagcaccgtgggctgcaacttcctccctggcagatcccagtagatctgtgcgcaagccaagtgagtgggaaggcactcatacagcaggcccagggccagcaccactgacattcctgcttactgtcagcgctctgttctcagatgttttcattctgggtactaatctagctctccaaggtttccccaggggccaagacttgtgttttccctctggtacgccaagaggccctggcaccgtcctgggagcacagagatgtcagggatggccaggaagaagagccacgaagggctgttggccggaacgggattgcaagctctagtgggcccgggaccgggggcctgcgcaggctaggagacaagggggtccacacgggggaagaggaaaacacggagaacgggggacccgctcgaagaaaaatcggcgacccgcaaacaggacgaaagcggagtgatatgc

SEQ ID NO: 564637 - DNA, 470 bp, Homo sapiens
tggggtgatctgaggatccttaaaataaataaaataacaaaaaatcatgaaacatggaaaatttataaaaatgcaaaatgctctggaaagtccctgtaatacaattgaacaagtagaagaaaggaattcagagctctaagacaaggtgtttgaattaacccaatacaacaaagacaaagaaaaaagaagaagaaaatattaacaaagcctccaaggagcctgggattatgttaaacaaccaaatctgaaaataagcagtgttcccaaggaagaagagaattctaaaaagcttggaaaacgtatttgggggaataattgacttccccagccttgccggagatgtagacatccaaatacaagaagcacaaagaatacctgggaaattcatcacaaaaagatcatcacctaggcacattgtcaccaggttatccaaaggtaagacaaaggaaagaatcttaagagctgtgaga

SEQ ID NO: 564638 - DNA, 141 bp, Homo sapiens
gtcacatcattttaatgctttaccaggtgcacacatatttgaggagattgcaaaagattacagaactctgaggtcgtataggggagcctgtattctctatttctttaagccgaagtgggtctcagagcagtggtgatatct

SEQ ID NO: 564639 - DNA, 314 bp, Homo sapiens
catgcatgtgaaggttctgttacagatttaaactcatatcacagggtttgtgtatagattatttcatcacccaggtattaagcccagtacccaatagttatcttttctttattttattttattttactttaacttctgggatacatgtgcagaacgtgcaggtttgttacataggtgtacatgtgccatggtggtggttcgtcgcctatcaacccgtcatctaggtttaaagccctgcatgcattagatatttgtttcaattttctccctccctgctccccctcacctctcgacaggccccaggtatactgatg

SEQ ID NO: 564640 - DNA, 208 bp, Homo sapiens
ggggacttgagactcaccggcccgacgccatgagggccctgtggtgctgggcctctgctgcgtcctgctgaccttcgggtcggtcagagcttaccgatgaagttgatgtgtgatggtacacacatagaagaggatcttggtaaaagtagagaaggatcaacggacggatgatgtaagtagtacacagagaggaagagctatttacttt

SEQ ID NO: 564641 - DNA, 129 bp, Homo sapiens
ttcaatgaaatgcttgtatacaatgatataacaaagaaaccctaagacaacgagaacttcaactaagtgcactcatgcagaatctctgcggggagaattttttctcggggaagtaaccctgcctttgaa

SEQ ID NO: 564642 - DNA, 120 bp, Homo sapiens
cacgcacaggattgactcactctgttctttgattttaggtccgctatctcctcagtgtgagtgtatatatatgtataagaaagagacttatagataagtgataaagggggtgccgagacg

SEQ ID NO: 564643 - DNA, 206 bp, Homo sapiens
actatttcctggctgtgtgacctttagtaagtgacataacccctcaggacctcaatgtcctcatctgcaaaatgaatatgataaaagtgcctatctcccttcccgcagggttatggtgataaggaaatgggttaatatacgtaagtatctcaaatagggtttggtatactaaaagcactgggtgatctttctaaaggactggcagg

SEQ ID NO: 564644 - DNA, 1188 bp, Homo sapiens
  misc_feature (206)..(206): n is a, c, g, or t
  misc_feature (210)..(210): n is a, c, g, or t
  misc_feature (941)..(941): n is a, c, g, or t
  misc_feature (1036)..(1036): n is a, c, g, or t
acctctctcctacctcccccttcacaatgctcacatactgaatattgcacctatttctcacaaagcccgaaatactgctaccttcttgccctctctgccttcatgcagcacctacctgctaacatcgacacggcacatcaatcacatgaaccactcctctatcgtctcaactccgacctctcccactctaaataacacacgctacnctcngccaccttcgcatctccactgctacactacgcaccgcagtcccccaccctatcactttagcgtcgccaatcgttcatccggtcctccatcccctattcatctccgtcctcctccccgcacacttcaccaccccctctctatcttcccccctgtactcctaccccaccacaccctcctatcatcatacgccggtcaccgcccactgcgcatcccttctacttcacacgacaccccctatcacacacattccctcaccacctatataatatccactatcctctccacattgctcatccctcacatctcctcccccatcaccattaccactcccgctcctcttcattctcatcatctgtccctagtctataaacaatccctcatcctacccctcactcacctccccacccaccctccaccccccaatatcccataccatcctctcacttccgcctacccacctcctctatctctcccaccgctacctcctttccactaccgtcctcttccccctccactctactcccatctccttatacctcatcctctccccctcactcttctcccttccttaactcccactccttatccttcttctctcccccctatccccacacccccctcttctcctcactctaatatctctcctgcacatttcctcttctccctgtacaatcccccctctctcacatcttccctcccccccaccccgcatcaacatacttccccccatncatacatctcatctacgctcacacctccacgctccccccctatatcatccaccgacccttcacactaactattcctcatccccactcatcttttntttcccctcccacccctctcaccacctctctcccctcctccacaccagccccactccactctcattctactcgtaacccactcccctccaccttcatatcacttcgcgcctcctccacctcctcaccatcccctactcattccccaccaccg

SEQ ID NO: 564645 - DNA, 169 bp, Homo sapiens
ctaacgcgaacatgccctgtctattgattttgataaaccgtagagaccatgggtctggctctgtctgcccagacttgtctcaaaggtccttgccgtgaagcgatccttcccacgggtcatcctcctagagtctgacctagcagtgcatgccaaacgcttaggcactagg

SEQ ID NO: 564646 - DNA, 496 bp, Homo sapiens
  misc_feature (203)..(203): n is a, c, g, or t
aaagaagagaaaagaggaataaaatatatcaggcaaatcccttatcctcactggcttcaatttccccgcccacccctcttagtgacagggaaattgaagccagtgaggataagggatccttacctctccgcactcttctgagacctggcagatctgagaataaacttcagcaatgacagtggccctggagagcacaggaaggncctcaggaggggactctcctccttccaccccaccctcattccaccccacccttcctcaccccaactcacttgcagtccagccctcccccaggaggtaaatctgggatgtcctctgaggccagagtcctgaaaactgtgttcaggctggggggcttctgagcagaggcacacagttctgagaaagagtcaagagttaggctggggcacagtgggcgcacgcttggtaatccccagcactttggggagaccaaggcgggccggattcactttgagggccaggggttcgagaccag

SEQ ID NO: 564647 - DNA, 323 bp, Homo sapiens
gcgtcgtgcggtcctgggaccaggatcaggaaatggttcgagacctgggatgaggaagtcgtgggcacttaatcaaatgtggggtttcgagagacgacggaacagacaaggatacaaatttccatgtggccttggagaacgtggacaccactatgaaggtgcacatcaagagacccgagatgacctcgtcctcagggtgagccctgcggggccccttcaccaacccctccgtcctgtcccggacacaagggtctgcatagcgtccatatcaagaggtggccccaggacgcgggcatcccaggctcctgctgtgcttgggcaag

SEQ ID NO: 564648 - DNA, 1175 bp, Homo sapiens
tcaaaccgaggccaatggttatttagtttttatttcataatcataaatcttaactcggcaatccagctaggcttgggagggaacaaggaaaacagtggaccccaagagggaaacttacaggcaagaagcacaaagaattctaggatacgtgcgaagcaaagtgggggtggagggggtgctcctccgtgagctacagaaaggaagtgatcgtgggtggttaagatataaacacaccacaagtctcaacacttaattcgaagttgtgcgtcccacgagctcaagccaaaggggtgaatctttctgtgtggcgggctcttgtgcccaaatctcctgtggcacccaagaggcgcttccgagtgggccctccacaaaattattatcatgtgcgctttctttcacacatttgtgcccacaaacacccaacatgtgcttgtgcccaattcacaaacacaacttcaagctcttgaggcaaggtgtgcaagatgtgaaaaaacctgtgggagaaccccattgtgtggtgttgggggctccaggacaattttgtgcccatgtgggaccacaaaatgtgcccagagagatccccgcgaatgtcgcgttatggagatgtgaagagttcccctcattctttctcaaaattttctcctcccacaattaaatgtggaccttttgccccacccgagtgtgcccaattttagtgggcgcggtgtgtgcagagttcaacccaacccgcgtggacaacattaaaaaccccggggaaacattaaatccggtgttgcaaaacagcaggagaacccccgttataataacccaaaaattccatttccttcttcccggggggcctacagaaagccacggacaaaattatcgcgggcgcgggagtctttgggggaaacccctggtttctcgagcaaaaagagcttcccaagagggaaaaacgccgcgccccaaaagagggccccccccgatcgaaaagtgcccaagcgtgtcgaaacaacccggggtggggtttagacccggtgggtacaaacagacaacgcggagaaacacaaccccacagcggcaacatctttgatagccccttgtggggcccaacaagcttaaagggtcttgtcacgaccctgggctggagaacacgttggccaacttggagagccactggagaccccacacgtggg

SEQ ID NO: 564649 - DNA, 363 bp, Homo sapiens
  misc_feature (74)..(74): n is a, c, g, or t
  misc_feature (79)..(79): n is a, c, g, or t
  misc_feature (96)..(97): n is a, c, g, or t
  misc_feature (103)..(105): n is a, c, g, or t
  misc_feature (325)..(325): n is a, c, g, or t
ccaattattgctttagattaatatctatagaaaaaaaatagtctctctgtgcttcactagtttccgacggcccnttttnaatgcagttttaaggannccacannnaatgttgaaactgtgtatgacagtaactatgtaaaaggcactttgaatatccaccccatgtatcttcaaaatagtctcatctcaagctatccttctgatatattactataacatagagaatccaatgaaactgtcatttctgcctgtaggacaacgaaaactttttaattttcaccataaagggccccgttttaagccctttttaatttttaattccccntctttttttatatcctcctttttttgtgtttttttttt

SEQ ID NO: 564650 - DNA, 135 bp, Homo sapiens
gtcgtaatgcttagggtgaaaaatcctgggccagacagtgggtacagagggaggaagagaaaagggaaaaaatggagggctgagaagtggagaacatatagaaggagacactggaaaaagacaaagctgggggca

SEQ ID NO: 564651 - DNA, 363 bp, Homo sapiens
  misc_feature (321)..(321): n is a, c, g, or t
ggggcttgttcgctgtgtgggcgtcggagccagatgccggactgggtcagcgctgatcacggacgttgcagcttctgccaattcttcgccaactatgctgggccgtgtcgcctcattcttgcctttgtcagttcctctattcaactacgttggcccgttcaaacaaatcccaagaagcaggaatgaaagtggcgctttctccgacccagggtttccagggaccaataagctcttgaagcgcaaagcaatgcgacgggcgtatcgcagcgggctcttccacacttttcacctttcaattccccattttcttaaaccacaatntcaaccaaagcaatttaccaaagagcccaaaactttacaagc

SEQ ID NO: 564652 - DNA, 254 bp, Homo sapiens
acattataatgtcgtgtacattaaaaattcaaaatgtgggaaaagggagtggtgtaaaagcattttttatgtgtgtgtacacatatttgtgtcagaggtgtgatcgaagcttctcatcagctttagaataactcttttattagctacaatgatatattttctaagctctcatggcttatgatatagctataggtctatagatagattacacattatataaataagcaggggtaccgcagctcgaagttcgatca

SEQ ID NO: 564653 - DNA, 534 bp, Homo sapiens
gagcggggtggtaagtgtcaggccgatgtgtccgcccggcgaggggccggggtcgggggcctgccggggccatgctgctgcgggtgcatggtgcaagtggggccatgctggggctgcaagatgcggagccgcctcggagcctgagcctgcccctggggccggtggcctgtggggagcccgctgcggtggccctggcctggcccgggggggagggagagcagaatgcgatgcagccaggtgcgggagcaggcaaaatggccgggcagtaggatttatcattgcgggccattcacatttacacgttggccttagggagactatcacgagatccatccaaacaaggtttggcatccataatcaagaaattccacgggaggagcacagaggaaagcaccttcacaggaagagtggcccaaaggacccaaaggatcacacgaatattgaaggacaccatatcagagcagcaggggcaccaccacagaggggttcccaagcgagacgcaagatacagcacggcagtaggatgacccaagg

SEQ ID NO: 564654 - DNA, 294 bp, Homo sapiens
tataaagtagagtacgctacacacctgtgctttcacgatcgagtaccgcagctcgatagttcccatctctagtcgatcctcgtgccctgtttgaaattcgttctcctaaaggggaagaatcgcttgggcccgggaggcggagtttgtagcgagccgagattgtgccattgcactctagcctggtgcaacagagcaagactctgtctcaaaaaaaaaaatagtaatgtgtcaatatagggtcattacttgtgacagatgctccatgctactgtagattttggcttggccttatcg

SEQ ID NO: 564655 - DNA, 282 bp, Homo sapiens
aagtttggaaacctaaggcccctttgtcctccctgggtgggccaaggtttgggacctgttttggactgtgggaaactcaccctccccttgccaggcctttcccctgcaggaatggcattgcaatagtttaagggggcccctccctttgatcaacctttgtgtgcgagggtttaaatagggtcgaacccaaaaatgggaaaaaaaggggtgggccaggggctaatggtgtccctgtgtaaagtttttgccaaactagctctataaatatatgaatatggccca

SEQ ID NO: 564656 - DNA, 341 bp, Homo sapiens
  misc_feature (336)..(336): n is a, c, g, or t
ttgagacagagtttcgcttgttgcccaggctagaatgcaatggtacgatctcggctcaccgcaatctctgcctcctgggttcaagtgattctcctgcctcagcctcccaagtagctgggattacaggcatgcgccaccatgcccagctaatttttcatttttagtagagacggggtttctccaagttggtcaggctggtctcaaactcctgacctcaagtgatccacctgtctcagcctcccaaagtgctgggattacaggtgtgagccacagtgtccagccttcaattcatttttaaggagtgtaaagagatccagaggacaaaaaaattttttngacaa

SEQ ID NO: 564657 - DNA, 962 bp, Homo sapiens
  misc_feature (353)..(353): n is a, c, g, or t
  misc_feature (440)..(440): n is a, c, g, or t
  misc_feature (486)..(488): n is a, c, g, or t
  misc_feature (739)..(739): n is a, c, g, or t
  misc_feature (835)..(835): n is a, c, g, or t
agcggggtgggcccgtcggtcctccatcggccgcttccacttactgagcttgttgagctccggggcccgtgcgagcgtcgcggccgaggctcctgtgggtaagaggacgggggagtgttcaccgggggtagcagtctgcgtaccactatgtgctcgtcgcaggcgcccgagtgcgggcataggaccgacggtgcgtcccgtctccttgaggcatttccttcgtcctggcgcgggttctggacggctgaggcgagttggacatgccggtgcatctgccttgagaacggcgagctcgtccatgagttcgagatggatgatccgaatcgcacagaaaacctcgtgtcgcgcagagnataccggttgcagagtcggagttggaatacaggactttcacacagattcgtggtccacatggagactgacgttgagatatcgctacncgagtggagagatgactactgaaacgcagttattgtagcagaggcnnntttggagtgggcgagacgtatgagtaggactcttgtatatctcgtaaagtggaatgctaagcataggtcgcgtacaggacgaagttctcgaaaggaacacatagcatacaaaggcaatcacacaagccatgggagctactgtctacgtcacggggaaaacagcgatgcgcgtatgctagaggtgcggactgtagtgcaacgcaagggaaccaatggaagtatgactagaagaagtgttacctaacttgcancatagtcccgaggttagccatcaagggcaagatccaaggcaagggctagtcgatttgccctaaatttgacgagtcagagcaactgggtatgatgcncagtagtagtcaagcgttgtaacttgcgcgtgcaacagagtgaaaagggtgaaagctggaaagaggaacgtaagaggacaatggtgggaagcaaggtcgcggaatgttggaactgaagtgcctggaa

SEQ ID NO: 564658 - DNA, 452 bp, Homo sapiens
ccctcacggattacctcaagtgatccgtccatctcagcctcccaaagtgctgggagtacaggcgtgagccgctgcagctggcctgcatttgcttatgggttcttggtcatgaagtctttgcctaagccaatgcctggaaaggtttgccagtgttatcttctagaatttttatggtttcaggttataaatttaagtctttggttcatcttgagttgatttttgcataatgcgagagatggggatccaggttcattcttctacatgtggcttgccaatgatcccaccgctgattgtctaatatggtgtcctttttccactttatgttttgtctgctttgtcaaatatctgttgactgtaattattcgagtttatctctgggttctgttacctgctctattgatctgtatgcctgtttttataacagaaccatgctgctttggtgactatggcct

SEQ ID NO: 564659 - DNA, 729 bp, Homo sapiens
tgaatgatcctttgctgcctaactacctcaacggcttcgagtgtttcgtctgtgactacgaactggctcggctggatgccgagaaagcccacgcggcctctcccggggacagccccgtctttgagccccacattgcccagccctcacacatggactgcccagtgcccacacctggcttggcaatgtggaagagattcctgagaatgacagaaaagaacaagagggaagacagaccttcaggctgggtgcagtggctcatgcctgtgatcccagcactttgggaggccaaggtaggaggatcgcttgagcccagggattcaagaccagcttgggtaacatggtaaaaccccatctctacaaaaaacagaaaaaattagctgggcatggtgtgtgtgccttgtagatccagctacttgggaggctgaagtgggaggatcgccactgcagcctcccaagtagctggatcgcttgagcccagggtattcaagaccagcttgggtaacatggtaaaaccccatctctacaaaaaacagaaaaaattagctgggcatggtgtgtgtgccttgtagatccagctactgggaggctgaagtgggaggatcgccactgcactccagaaactaaaaaaagaaccatgaaaaccttcacaaatatatctaagccaaatggatggctgggtctgcatccagtactcgaaggtaggcaggaatcgttgcccaaattgggggg

SEQ ID NO: 564660 - DNA, 423 bp, Homo sapiens
ctctccattgacggcacaattgggtggagaagaagggaaggggtatgattgtcctgatggctcaggcttgcagtgaggttcagagagggaaggaggaaaggccaggctggcaggctggcgctgttagcacttcctctcccacagttcagacaggctcactcgtgggctcagtgtttgccatggtcttcctgttggtccaaacataaggccctgatccttagtcctggtgccctgctttgactttctggccgaggaggcctattttgtgcatgctgtctgttgcagtggctagctgcgatggcccatcatgctcatgtggccgcgatgtagcgccatgtgacgcggaacactctgctgctggcatgtatgcccctggtggtctggaaggccagacccaggcgcccccacacggtacggtagcag

SEQ ID NO: 564661 - DNA, 409 bp, Homo sapiens
  misc_feature (9)..(9): n is a, c, g, or t
  misc_feature (11)..(11): n is a, c, g, or t
  misc_feature (46)..(46): n is a, c, g, or t
  misc_feature (66)..(66): n is a, c, g, or t
  misc_feature (403)..(403): n is a, c, g, or t
attcggcangngggaaaggatggaaagctggtcaacgggtacatanttacaattagataggagcantaagttcctgttctattgtacagtatggtgatggttaacaataaggcattctaggccgggtgcggtggctcatgcctataatcccagcactttgggaggccgaggcgggtagttcacctgaggtcagaagttcgagactgggctggccaacatcgtgaaacgtcgcctctactaaaaatacaaaattagtcgggtgtggtagcacacgcctgtagtctcagttactctggaggctgagacaggagaatctcttggacccatgaggcggagactgccgtgagctgagatcacgccactgcactccaccctgggcaagacagagcgagactccgtctcnaaaaaa

SEQ ID NO: 564662 - DNA, 152 bp, Homo sapiens
ttgttatgattgctgggttgaataggcgctggcgactgcttctgcgagcttggcttcggctgcaggagtggaggggacatcggggctgtgaccggaggttccatgggcccagtgatagggctggtggatgggggctgcaccgtatccacatg

SEQ ID NO: 564663 - DNA, 236 bp, Homo sapiens
gctgcagttgtctgtgagccgagatcatgccactgcactctagcctgggcaacagagcaagactttgtctcaaaaaaaaaaaaaaaaaacaaaattagttgggtttggtgcctttggcctgtcgtcctagctactcaggaggctggggcaggaaaatcgtttaaacccaggaggtgacgtttgcagtgagctgaaatcaggccatatgactttccagcatgtgattacaggagatg

SEQ ID NO: 564664 - DNA, 302 bp, Homo sapiens
  misc_feature (37)..(37): n is a, c, g, or t
ctgcctcctctcaggcttagtatctcctgctcatcantccagtagctaggactgacagtgtgtgctacatactggctaatttaaaaactattttgtagagacagggtcttactatgttgccagagtgtctttgactcccatcctcatggaatcctaccacttcagtctctgaaagtgctaggataatagacatgagccatatatgcccagccagttttcttttttctaaattgaagcttggcaagcagagggacatgtataagggaaatagcttaagtttagagtgggtgtcagtagtcagc

SEQ ID NO: 564665 - DNA, 178 bp, Homo sapiens
agcagcggtcttacctgttggctcactgcccaagctccaggtttggctgaggtgaagtctgcccctttcagaaccacgtccgcttgcagcacccagcccgctaataagccattgaccttgagtttgagtctagggctgatttgctgctctgtctgggggaaccccaggggccttgtgg

SEQ ID NO: 564666 - DNA, 115 bp, Homo sapiens
ctgagagattataatctttcatatgctgcatttgatttgctagtattttgttgaggatatttgcatcaagtattcatcggcagaaaatggtctgaagttatcttttttgtggtgg

SEQ ID NO: 564667 - DNA, 980 bp, Homo sapiens
  misc_feature (568)..(568): n is a, c, g, or t
catgcagtaatccttctaattagctatcctctacaggcaatatactctccggacaatgaaccataaccaatactaccagatcaatatacttcatcattaactaatcataagtggctatagcaattaaaacataggaatatagcccccatgttgcatcttctgagatcccagagggttaccccaagggcaccccgtcgtgacatgccggacctgcatttcttctcaacaatgacaaagaaactagccgccgcacagtctcaaatcatattagccaaagtcgttctcccctcagcataaaacgtagggccttgctccgtctactctgcctgcaatcgtgtatgccattcagtatgcagggcagttggacggtgagcttaaaaccaatagcccaagcatatcgcgagaatacttagcgcactatcgtcctcaagattaacccacataaggaatgaagtacatcagacaggtatcctagcacggtatcgaagcgcgcataagcacttgatcgcaattgcatgtaattgtatatactacttttagtgaatattacttcgcctaatctaatctnacccggcaattaccctacttaactacaagcatgtaaaagcatccaatgtcatcaccgtaaacccttattaactgattttcgcctacctgaaaagcgatagctagacgattgatctagacaggcgcttgtaatttccaattacagcgcatccgtcttccgcataggagtggcttgccccccgggctaaacgctggggtttttgtggcccccaatagtggagtccattttactccggaaacgaaatttcagcaaagaaaaccagaatagggcctccattcattccacccaaacctattccgttaggacacaaccaatacaatcgcttcctttaagaggtcttacgatctaaccctaaaggcctttaggtctaacttcgacactgcaaatcacaacttagtcccccatagtctga

SEQ ID NO: 564668 - DNA, 463 bp, Homo sapiens
  misc_feature (291)..(291): n is a, c, g, or t
  misc_feature (339)..(339): n is a, c, g, or t
catgaagggattgggaagatgttgttcaaagggtacacactttcacttataagatgaacaagttctgggggtctaatgtagcacatggcaactatggttaacaatactgtattgtatacttgaaatttgctaacagagtagctctcaaatgttatcacacaaaatggtaactagatacagtgatcagtgtgtgttaactgattgattgtggtaatctttcacaagtctttgttaaaaatctacacattatatactaacatctacctatgtccatctagccctaaagagcgncaaattatatcatatggattgtgaccctacacaacgtgagaatttaantttcagcctgagtttcagtttcaattccaataccactactttctatgtaatactgaacaagttttctcaacattctataacaaatattccaacccctagtggggtagaaaaacttacttttttt

SEQ ID NO: 564669 - DNA, 439 bp, Homo sapiens
  misc_feature (26)..(26): n is a, c, g, or t
  misc_feature (160)..(160): n is a, c, g, or t
  misc_feature (191)..(192): n is a, c, g, or t
  misc_feature (369)..(369): n is a, c, g, or t
gtaattaatcaaagctacaggaactnaaaacctcacttaaggaattttaaaataaaattgaaagcttcatcaacagactacaccaagcagaagaatttcagagcttgaagactggtctttcaactaacccagtcagacaaacacaaagaacaccatgtanggaacaccgtccccaagaaatatgggatganntaaagtgatcacatttacaactaactgggcattccaggggagagaaagagacaaagtaagccacctggggaaaccattacttcagcgaataatttacggaaactttccctaattcgtgctaggagaggtaggccttccatatgtcaaggaattccaggacaacaccttgccagttantaccatccaattggaacaccacggaggacttccagttcacccggcttacgggttcaccgctttgggggcc

SEQ ID NO: 564670 - DNA, 196 bp, Homo sapiens
ggaattgccgggggtgtggtggcacgccggacctcagacaatagcccaggtagcgcgggacatctggtcgacctcacaggacctcggacactaacgtgagtggcccaggagagctggtggacatcacgggcactcggacactggtctgagtcgcccgggagagcttgtcgaaaccgttcacttaatgccgctagcg

SEQ ID NO: 564671 - DNA, 139 bp, Homo sapiens
gtgtgattatgcgtcttctgctttacaactaaatggaatataacgttcatacaactacccgattgtcactttaacattcctacaacgcacccaaaggatcccaactaccactcattttaaccccttctgtcgtcttctc

SEQ ID NO: 564672 - DNA, 217 bp, Homo sapiens
tttttttgggggggggggcccttttcccccccccccggggggccccccccttttttttggggcccccccctttggggtttaccccggggcccgggggtttgggggtttctccccccccccccccccccccccggcccctcccttttttttttggggttttttgggggggggggccccgggggccccaaaaaaaaattaaaaccccccctttttccca

SEQ ID NO: 564673 - DNA, 194 bp, Homo sapiens
gggagaccacctaactaccaccacctctctgttatacagcactttctatatcggcagttcatacagtattatcttactatatcctcaaaacaatacactcccatctccatctcacagaggaggaaactgaggcatacagacggtcgatgggcacaccttatggcagggggatccacatagaagtcgacactgca

SEQ ID NO: 564674 - DNA, 274 bp, Homo sapiens
gccgacctgcgtttctgcggtgttttagcggcggcggcgtcacatgacaacgagttcatttcatgcggaggggcctggggggtcgctcggcggggcggctggcccaggcttcttgttggcggggtggtgcagcggggtggcggctggggttgatgcatcaatgctgggctttccagctatctgcccttctctacgcgacgggggcctccttgtgaaacgtgtccaggcctaagcactgccccgctagtttgccagtcccctgagagacgaggcc

SEQ ID NO: 564675 - DNA, 1015 bp, Homo sapiens
gagcggggtcgccgcgccggccgagagggggccggatcccggaccatggcggcgtgcggggtggcgccgaggggcggcgcgcggccctggaggcggctgtgcggcggcaggttcctgagctggggaggcgggagcttgcgtgctgtgctgcggagacctggaggccactggtgcttgggccgcatgcgaacacccggtgtgcttacctgcttgcttctaccaaggatgcggggtgctctgcgagcagccgctactgcgcccgtgtgccgcggaggagctgctgccaaggttggtctttgggaacgaagcttcctgccttttgccagcgatccccatccaccagctgcagcattgagcacgacactctgatatctactcttgcaggactggcacacagggtgtaccgcatttgtacaggcaggctagcgtgcaagcaaccgaggttgccccgcgggttgccccagagagcttgccacccttttcaagccgtcattccggggaccctgggagcaggcaccatttgccgcgacggcagccacacttgacgcgctcctttcctagacttggcccgatcgcttgtgcccttccaagcaacagtttcagcaagcacttctttcagccattagtgacgccgcgcaaggtcgcgtcacctccgcggccaaagggacccttgggccccgggacattcggcatttgccaggggttgaaccacccgaatgaccgcgttcgccacccgtgtggggacaaacaccggcgtccgtgcgacggtttcgctggcttcaacagaaggacgcctaaaccctgggagccgccaactgcattcgacggccttggtttttagcgccactccttgacagcccgtctgaaaccagcgcgtagtctcgtgcgccacagtttctttcgcgcactaccgtgacaggggtgggcacccgcgaggcagtcttaggtaaccacgagcaacgtagtggccctaccccgtgctgtagtgaatgcacctttcctcggggcgacacgc

SEQ ID NO: 564676 - DNA, 544 bp, Homo sapiens
  misc_feature (473)..(473): n is a, c, g, or t
gggagatctggatggcatctacttcgtatgactattgcagagctgcccatgtaagacggggatcagcgctgtaagcttctgctggggataggaattctggtgctcctgatcatcgagattctgggggtgcccttgatatatcttcaccatcaaaggccaacagcagagggctgccgggacgggccttcggggcaggtgactggagatgtcagcaagtgtcacccatctcctgcaacgaagagctgaccgaaggcccagaagggcttgcaggatgtggaggcccatggccagcagctgctaagcagtattgtgatggccctaattggcttccctggtatgcaggagaaatggcccatacggtacaagaagaacacgtggaggagcttgacgggagagatcactacattaaaccataagcttcagagacgcgtctgcagaggtggagcgactgacgaagagaataacctaggtcnttataggcgtgcagatatccgctgtgacacatgaagtactaccccagctcccaggactccagctccgcatg

SEQ ID NO: 564677 - DNA, 486 bp, Homo sapiens
caaatgttgcattaacatataacttttttcagttgactttaccaaaattaagcccatctttagtagatactgttttaacatgtgaaagaaatacgttataaacataccacaagatatggctataaaacaatgagatcagtatccatttttgctttaaagaattggccttattgcttcagcgtcacatttcatagtcaagggcattatatacacagccagagctctccaatatcgttgttgtgtggggacctgccctatttacacatgcacctgggggttaaacagtaaaccctttctattcatgggcgcttcactctggtggtcaccaggcagtgtccttaaattttttttggtagtgtggacacgggaccggtttcccaatggcctgtgaaatattaggttcagccccgtagatcctagaataagggggttcatatagatatagttgtgcccaagaaactggtttttaaaaataaaaattctccc

SEQ ID NO: 564678 - DNA, 972 bp, Homo sapiens
  misc_feature (305)..(305): n is a, c, g, or t
  misc_feature (334)..(334): n is a, c, g, or t
  misc_feature (384)..(384): n is a, c, g, or t
  misc_feature (389)..(389): n is a, c, g, or t
  misc_feature (391)..(391): n is a, c, g, or t
gccgggcgctgcgaaggctcggctgctgtagtcagtggtgtggggtgcgcaagggcacggacctcggagctctccccgcttgcgccgagtttctcagcgccttccccacccaaaccggggtctcgcagtcggaagcactcagagtgcagccccgcgcggggccggtcgtaaccgcgccgcgggccggacgatgcccaagaagctgctgctgttgcccccgcctcggtctcggttccggtcggcgccgccgtccccgcggcatgacgccgtcgacggtaccgagttttcggcaatccaggcgctgnacggagctggcaagcgcatcaagagcgcntggtgctgaatggggaagtctgagtatatcaagagaccaatggagaaacngagtngnaataacgaatctgtacgtggcaagatattcattatagcagacaatacccagagatgtgaatacagctgtgatggagttgctcatcatggattacgcactgaagactgcctgtgccagggaaccattattggggtcatcccctacttcccctacagtaagcagagcaagcatgaggaagaggggtaccattgtgtgcaagctgctagcaatccatgctggcgaaagcaggtttaactcacattatcgactatggatcttcatcaaaggaaatacgaggctattcaggattcctgtgaccacgttagagcctcaccttacggctcagtatatccgggaggaattcaacttacggcagtgccgcatagagctacgttgcagatgctgaaggaggcccagcctatgacgagagctgcgtctgggttggccgcattccgggaacatcaggcccgacttgaatggcgacggtcgaacccgcttgtagatgacttacccgctgcgtgctgagggccggcagccctacgtgcgagtgccccgccaacggacaccacggcaattagacggagcgcagtccaaattgacac

SEQ ID NO: 564679 - DNA, 1017 bp, Homo sapiens
  misc_feature (350)..(350): n is a, c, g, or t
  misc_feature (379)..(379): n is a, c, g, or t
  misc_feature (429)..(429): n is a, c, g, or t
  misc_feature (434)..(434): n is a, c, g, or t
  misc_feature (436)..(436): n is a, c, g, or t
gccgggcgctgcgaaggctcggctgctgtagtcagtggtgtggggtgcgcaagggcacggacctcggagctctccccgcttgcgccgagtttctcagcgccttccccacccaaaccggggtctcgcagtcggaagcactcagagtgcagccccgcgcggggccggtcgtaaccgcgccgcgggccggacgatgcccaagaagctgctgctgttgcccccgcacactccgatgtcctcggagtttccgcgatcccagcgcgcaccgcaccacgatacaccccgcaagagccatgaacgccgatcgcaccgagctaccagagatcttctcggccaactccacggacgactgnacggagctggcaagcgcatcaagagcgcntggtgctgaatggggaagtctgagtatatcaagagaccaatggagaaacngagtngnaataacgaatctgtacgtggcaagatattcattatagcagacaatacccagagatgtgaatacagctgtgatggagttgctcatcatggattacgcactgaagactgcctgtgccagggaaccattattggggtcatcccctacttcccctacagtaagcagagcaagcatgaggaagaggggtaccattgtgtgcaagctgctagcaatccatgctggcgaaagcaggtttaactcacattatcgactatggatcttcatcaaaggaaatacgaggctattcaggattcctgtgaccacgttagagcctcaccttacggctcagtatatccgggaggaattcaacttacggcagtgccgcatagagctacgttgcagatgctgaaggaggcccagcctatgacgagagctgcgtctgggttggccgcattccgggaacatcaggcccgacttgaatggcgacggtcgaacccgcttgtagatgacttacccgctgcgtgctgagggccggcagccctacgtgcgagtgccccgccaacggacaccacggcaattagacggagcgcagtccaaattgacac

SEQ ID NO: 564680 - DNA, 989 bp, Homo sapiens
cgcaggcggcgctgtgccggcggagccgttcgagacagcgcgggcggctcgggtcccctggggctccgaagtaggaggacgccatgaacggagaatggagttaacttgaatacctttaaggtctcagtatgacattgacgatccgtgacatggctcagcagtggcgtgccaatccggactgttggctgggagttcttgaaggagatggaatcgaagggggaggacaagattcctaggtggttcttgacgtggcgacattctcaaccccgagtggccattaggaaacccctggtgttgtgttgttgggacctccctcgtgtttgggcaagtggtccctctgtgctggggggagctcgtttccttccggttttcatcatgttctttgcctccccttgggaattactccggatttactcctaatattgtgaaagcagcatctttgatttgagctgggggacgcacactttttttctccaggggagagataatacaccttgtcaagtagagcgacaaattgggcatgactccttgttgccattacctttctcatcagaagagttggaagcgacaagtattttgagctcgagtgcccttacttcccatggaggttgtctccttgagaggtccccttggaaatgcagccggtgtgcggccgaaagaaagccggtttaccgggttataccgtcaccaagagtcacaggcctgtgatttggtcgagtgttcacggacgagatttggccaaagagccccttttgccagcctcaaaggtcgctggtcacttgttggttgcttagcatgcccgcctgctgggcttcctttcattgggtcgaatggcaggacccgtggtccatagtttgcgagcttgacggcgttggttgacaccggggggcattttcacgcaacgatttgtggcccaccagattgtgctgtgtgttgcaaagccgcaaagccttttttttttggggcgccaccacttccaggttgtcccg

SEQ ID NO: 564681 - DNA, 101 bp, Homo sapiens
agggcttaagcggggtgctgcctgttgggggccaatgccctcctcctaggggggtcggggctaggctggagtggtccaccggctcagcaccctcctgcgca

SEQ ID NO: 564682 - DNA, 133 bp, Homo sapiens
agtccagaaggtgggaccatgacctatgaggatgggaaagtgtctatactcaaccaaacagagaatgaaaatctttgtgagaagcagccagtctctaaccatcagtacagtcagaacggcggatcaacggact

SEQ ID NO: 564683 - DNA, 255 bp, Homo sapiens
atatatgtatcgcgctactattttttgtcgttgttgtcttagtacaagacagtaccctgatgacctccgtaatatgtgatgatcctctctagtctcactgcaggctttgcatgctcggatctcggccgatgctcctgactctcgcgcctgagaaactcctatcgtacgtacacaccaccacacctggcgaatttttttctttttgagatggagtctcattctgtcacccaggaatgatctctgctcactatcaga

SEQ ID NO: 564684 - DNA, 226 bp, Homo sapiens
  misc_feature (220)..(220): n is a, c, g, or t
aactgtcacaatatgacacatgattaattcagcatcgtaggaagaaaagccttagtggtccagaagtgtgcatggcaattgaccatcatggttctctcaatgagctcatcaggacattccagcaaggtgatgcctagtagaccacaccacgcattatttgaccacggacttgagacttctgccaaccttccttgaaggcatctacttgtagccccagggnttaccg

SEQ ID NO: 564685 - DNA, 109 bp, Homo sapiens
cccccttttcccggggtgcccccctcaaaatggggccgggagggggcgggtttaaagaggcccccaggtttttttccggtggttggggtaagggggtttttatttgtta

SEQ ID NO: 564686 - DNA, 312 bp, Homo sapiens
aaggaggaagtaagcatgacggtcactaatcacctgaccaactgcatcagccaggcactcatcgatgcctggaggagcgccatgcacgaggcccctcccatgggagaacctttggcgctaatgagaagcgacacagaactgggcctattgcaacttattcacagctcttcacctcgcaagcacactacaccatgacctcttttaagactcctaacagaacactagaagtcaacacagagcaggatgaagggctgacgaagcgcaagtcaaactcaactcaaaagaacaggagcatgatgacaagatgaacct

SEQ ID NO: 564687 - DNA, 832 bp, Homo sapiens
  misc_feature (2)..(2): n is a, c, g, or t
  misc_feature (89)..(89): n is a, c, g, or t
  misc_feature (129)..(129): n is a, c, g, or t
  misc_feature (151)..(152): n is a, c, g, or t
  misc_feature (155)..(155): n is a, c, g, or t
  misc_feature (198)..(198): n is a, c, g, or t
  misc_feature (202)..(202): n is a, c, g, or t
  misc_feature (217)..(217): n is a, c, g, or t
  misc_feature (238)..(238): n is a, c, g, or t
  misc_feature (241)..(241): n is a, c, g, or t
  misc_feature (245)..(245): n is a, c, g, or t
  misc_feature (297)..(297): n is a, c, g, or t
  misc_feature (325)..(325): n is a, c, g, or t
  misc_feature (342)..(342): n is a, c, g, or t
  misc_feature (355)..(355): n is a, c, g, or t
  misc_feature (429)..(429): n is a, c, g, or t
  misc_feature (451)..(451): n is a, c, g, or t
  misc_feature (485)..(485): n is a, c, g, or t
  misc_feature (562)..(562): n is a, c, g, or t
  misc_feature (572)..(572): n is a, c, g, or t
  misc_feature (590)..(590): n is a, c, g, or t
  misc_feature (794)..(794): n is a, c, g, or t
cnccaataaaacctaaccaagccagcctgacaggttatatcaatacagcgcgcagctcggagtgcggagcgcaaggcgctggtgttagnatagggcgtgggcgtacagcatcccggggcgccctgcgcngcgcgcgctcagtgactgcgcnngcnctctgccgccctcactcttggtgagtagctaatttgcagcgcnggcngcggcttcataaggnggggtgcagggcgcgcggcgnggnggcntgcctccgcaattgccagatccacttcctcttctccttctgctctcctgcgncacttaggtgcttactgagatggttttnccacagtaaagagaggngggggcagagggnggagggtcaggggtgtgactccttcccatgactcaggcctctgtgctagaggtgacccttataggaaggggagnccccaaatcctttagccaatgngtggtggggtcatcataccagagagccagcttgnctctgggcaggcaccatcacaggcacagcacccatgcggctcaagccagaggaagaaaccccaccaggggtgggggntattggttgngggtgggccccatctgtngtgggcggtcttggtgagggcagggcctggctggagagactgggcgtgggggtcaatgcaccaggccgtgggagggccatggggtggccggagggctcgtgcggaggtgacagaggaaagggtcccattcttggagattgtgtctgagctcttgggccagggcagggtccggggagcaatggcatcctccttgatatcattggntggctcctccagggccttgccccggcggtggtaaaaaa

SEQ ID NO: 564688 - DNA, 344 bp, Homo sapiens
  misc_feature (246)..(246): n is a, c, g, or t
tgagttggagtctcactctgttgcccaggctgaagtgcagtgggatgatctcggctaactgcaacctctgcctcagcctcccgagtagctgggattacaggtgcatgccaccacacccagcaatatttgtatttttagtagagatggggtttcaccatgttggccaggctggtctcgaactcctgacctcaggtgatctgcccgccttggcctcccaaagtgctggggattacagggcgtgacacncacacctgggccataatgtagtttttaatatttgaaaagaggaacttcactgtggggtaaaaaataatttgcatttggtttttcttggggaagtttac

SEQ ID NO: 564689 - DNA, 126 bp, Homo sapiens
  misc_feature (70)..(70): n is a, c, g, or t
  misc_feature (126)..(126): n is a, c, g, or t
ggtttttttttttccgtggagctgtcgccatgaaggtcgagctgtcaagtttaagcgggtgaaagatctnccccggaaaggggaggcgttacgcaaggacccacgggaaaggtttttccagttttn

SEQ ID NO: 564690 - DNA, 432 bp, Homo sapiens
ggatccccgatgtagacacaatgaggtgtcgaacccagacttggattacgagcgtctacattggacagaagctctctgaaaggttaatgagaactaatggtgttcagagcagtaatccggggcattttggaaagagcaggtgcgggcacagatggtggaagtgatgctgaggtgacggatgctgactggaagaagtgtgacctgatcgcaaagattaaggcctcttgtccccagcagtctcatatatcaccaaagaattactacaagggaacatctgcccccaggttctggatttatttacactttcaagataaattgacagcacagacaataacagagagttgccaccactacctttataacttagtcaagagaacgcccacatttggcagcaaagtatatgctccagaccagtgttcgctcctcttcatc

SEQ ID NO: 564691 - DNA, 717 bp, Homo sapiens
  misc_feature (385)..(385): n is a, c, g, or t
cgaaaggagagcgtggtgtctggaggtgatcggaacggactggctggagtgttgcgggctgacaggtctgaggcctgaaggacttccgggaaccgcaaagcacggtgttcctccgctgtcctgaagagaaagccgcgcgcggacgactggcaggccggcttgcagctcccagaagttgacaggcatcctccggtgaccggtgtgagctatggcatcatggatgatttgactgcaagcaacagaaagaatcaaacaaaaatgggctacagccaaagtaatgagccaaatgattactttcacattccacagaagttgtgggaggatcgagctggttaaacggcataattaagtctacgatgctcaacagttatcacccatggacccnattttcacctattgtgtgctaacagcgtctgcatcgccttcagtgcttgcatccatggacatgcagcatgctgacatgtaaatgacacccttagcagccagcaatgctccactgaccatgggagaggtgtctcctctctcctgcccctttctgggaggctccaccgtagagatttctcttcacattcctgtttctcattcctgaacgcagttgcttggcaacagggaatggacttaccgcaatgggtacagagcaagtaagattcgaccactagtgaaccatttagggatggccactgtgactcatttctggtcaccaaggtggtggaacag

SEQ ID NO: 564692 - DNA, 989 bp, Homo sapiens
gtgataattatggaaaaaatcgcgcgtgttatcaaacccttccggtgacaagacagtatcactaccatagaggatactccatgtggtatagagagcagaggttggagtgatgcacctacaatccaagaaacactgtggatggcagcagctgccagaagccagcatagaggcatggaacaggtgctccctcagagtcaccagacagaaccaaccctgctgacactttgatttcaaacctctgtcttccataaccgtgatctaataaatctctgtggatttaaaaaagaaagtaacacactagaaagcgtagcaaagataatcaccactaatactaaacagacacatatttacactggtctatacgcttaaatgtatataaatacttgctcttcttaccctctcccgaaggaaggtatctgtctcgacttagtttcttgtagatgctttgccccctcccctcccacgcgcggctccacttatctacgtccgctaggcctccctccctgcccagcccaatatctcccccataccatccataaaccttactccccaagatatgcgctcacatacctcgattacccgtatcttgcctattacacggcttacatcacccccaccccgcatagacaagactgaagtccgccgcaccgaagttattcggccgcgtcactcacatctatacactcatcgattattagttcgctttagcttccccgccacagcgacaccacctcaccctcctaacccacccccttgcttacaccgtctccccactaccactcgctagtcgcgcctttatcgctcagatctgcattccggaaagttagagctcacagtagcgactagtcagctctcagcgggtgattcactgtccgccacgtgacgccgatcccgccataaacaggacagtgcagagcgctagactattgcagacgtgtagtcgccgcaattaccccaccttctcctcagcgatcccgcccccgcgcccg

SEQ ID NO: 564693 - DNA, 319 bp, Homo sapiens
tttaattaatttgaatttaaaaactgaaagccatgtacatttttttttgttaaacaccaactttatgggaagcttgtaagtacatttgaggcaacatgtaggggtgggggggttagattccaccttttttactggtaaatttatgcaaatcaatcccaggtatttctgttgaaatcaagcatccaaaatgagatgtgctgtaaatgtaaaaaggaatatgaaatatctcagtttaatagttttttatactgattacatgttgaaaggacaatgttttggatatgttgggttaaatgaaatatattattacaattgtaaa

SEQ ID NO: 564694 - DNA, 358 bp, Homo sapiens
  misc_feature (8)..(8): n is a, c, g, or t
  misc_feature (313)..(313): n is a, c, g, or t
  misc_feature (346)..(346): n is a, c, g, or t
tgtttttnttccctaaacaatagccttaagaagggtggaaaaaggcccgtcttcttcttggatccttggttgggtgacaacctccggtggtgagacatggtgcctgattttcagttggggctttctgcttcccctgtttggttttctagggacaatttaaaagattctgcaagttaattactggagaagtccgtagatcctggattcatagtatcagattaattgtggtctttgagtgggaatcctagtggtttatttagactcatcagttgtcttattcttttttttaaaaagaaagaaaacattttatttncgtaagcttgtattgcccttaaaatattttctntgcaatcttagg

SEQ ID NO: 564695 - DNA, 305 bp, Homo sapiens
tcgtcccatgttggcgcatcgtggtcgggtgggtcatcaccgagatgtacggcaggcccgcggcgcgcaagttgccgagcgccgccgaggtcttggccatctgcatcagcgagaacaggctttcctgcatgcgcgcgccgccgctggcggagaagctgacgaaggggcagccaagctccagcgccttctccgcgcccagggcgaaacgctcgccgaccaccgagcccatcgaaccgcccatgtaggcgaagtcgaagcagctggcgaccactgtgcgggccaacccatggggggggatcctctag

SEQ ID NO: 564696 - DNA, 174 bp, Homo sapiens
atctacaggatctccgcatttgctcccatcagagaaatgcaaatcaaaaccacaatgagataccatctcacaccagtcatgaatggctaattattaaaaggtcaaaaaaataacaaatgctagcgaggttgtggtgaaaaaggaatgcttgtacactgatgggacgaagactgg

SEQ ID NO: 564697 - DNA, 390 bp, Homo sapiens
ctagctaatgatagctaagtaataatgatagtaataatgataccttctcttttatacaaaagagggggcatgttgggaaaaaagctgagtgttgggggggaaaccgaggcagggcttgcataatgtcctctggaatgtgtctagacttgctggctccttgcttctagccttcctaggctcctaggtccctattcccagtatctcaagtagcagaacatgttccatgtaaatgctaaaccatcacagttgtagatcatgcgcctgcccttttgacctccacgttatcaccacctgtttctttgttggattaccaataaacactgtgggctcccagagctcggggccttcacagcctccaaaatggccccctggtgtcccacctttctctct

SEQ ID NO: 564698 - DNA, 110 bp, Homo sapiens
aaggaaactttgaacctatgtaccgagcaatcccaggtgtagcaaacataattgtagtcctagattaacttattgaattcaaaacaaaaaaacacaaacaatagtaaaat

SEQ ID NO: 564699 - DNA, 242 bp, Homo sapiens
tctagaggatccggtggagaggggtctcactcgtcgccaggtgggagcacaggggcatgatcacattgcaggggagcttggacctccctaggctcagatgatctcccaccacagcctctcaagtagctgggaccacaggcacgtgctacacacccatgctaatgtgttttggttttggatatttatgggttggtaggttatggtatttttgggtaggtggtttggttttttggtagagacgg

SEQ ID NO: 564700 - DNA, 926 bp, Homo sapiens
gacatggagcggagccggggtccggagggcacgcgtgccctgagtctctcctgctctcccctgccgctaggcgagtcatgctcgatgcctaggtcgtggccctcagtcacatgcaaagagcaggccgagtagcggcgcgctttgtgacagggtgtccacggatgtaacgtcgagagagtctctttggggatcgtagtcactgttgaggtaccgcgggcgcatcgtgagctcaaatgacgtccgccgctcctgcttgggcgcctgtccccggggaaaacacgttcggtcaacatcacgcccagttgaggttgggtgttccctgtttggcaaaaggaccgggcaacgttttaccgttgaatgcggcctgaccactgtggcgggccaggaaaatggttcggtgatccggggacccactggctggcaggatggggacattagcatggcttcttcgtaccaagaagcaccggtgggcccccaactttcactgtcactgtcaaccaagatgacaagacgctagtctggctgatgcccaaccacgcgtgtcccgcggggttcgactcaacaagaatgtatgacactgcctccaccttcgccgtcccatactgacctcgtttgtcctttcccttaacgctcccaaagtttgaccctttcttcccattataacacaaacatttatttgtgcgcattacccataccttattggtgcaaaaccaattgctggggccaagctggatgaagaacttcccttacaattctcccgtgtgtggtgcaaccattgcatgggcgtcattccgacacacagtcttctcaacaccaaccagcgacatctacacagtcacagttgcacgcctcgcaacagaaaacaaaaacatgccgcgcgatactcgggccagcagacccacgtcgctcacacggcagtttctcct

SEQ ID NO: 564701 - DNA, 134 bp, Homo sapiens
  misc_feature (16)..(16): n is a, c, g, or t
  misc_feature (65)..(66): n is a, c, g, or t
  misc_feature (80)..(80): n is a, c, g, or t
  misc_feature (91)..(91): n is a, c, g, or t
  misc_feature (109)..(109): n is a, c, g, or t
  misc_feature (132)..(132): n is a, c, g, or t
  misc_feature (134)..(134): n is a, c, g, or t
ccctggggtgggcccnggtgttccagagaatgggagggtagggtgaggctctctcgtacacggcnnaggccagggccgcngaggtcccgcngggcggggcccccggggnccctgggtcctgggcgtcccccncn

SEQ ID NO: 564702 - DNA, 350 bp, Homo sapiens
  misc_feature (28)..(28): n is a, c, g, or t
  misc_feature (102)..(102): n is a, c, g, or t
  misc_feature (163)..(163): n is a, c, g, or t
  misc_feature (167)..(167): n is a, c, g, or t
  misc_feature (194)..(194): n is a, c, g, or t
  misc_feature (204)..(204): n is a, c, g, or t
  misc_feature (209)..(209): n is a, c, g, or t
  misc_feature (215)..(215): n is a, c, g, or t
  misc_feature (217)..(217): n is a, c, g, or t
  misc_feature (231)..(231): n is a, c, g, or t
  misc_feature (239)..(239): n is a, c, g, or t
  misc_feature (280)..(280): n is a, c, g, or t
  misc_feature (342)..(342): n is a, c, g, or t
aaggtacatgatatgaatggtttatgtnattttgtgcattcaaaataagagtatttagaacatttcagaacaatcagagaaaaacatgatttcatgataaanataatacaaatgtctggtgacattttacatgtgttcgcaattcctttcttccccttttgcnagtncaacacttcaggccatacacataatgnaaaacaaggnagatntaactngncacattggcatgtnagattttnttacactttttataactgtacaaagtgcacatgtgcatganttaaaaaacaaggggaatgtagagtgttaaaaaagaaatacaaaataaatctgagacatganaccgaaaa

SEQ ID NO: 564703 - DNA, 444 bp, Homo sapiens
  misc_feature (120)..(120): n is a, c, g, or t
  misc_feature (134)..(134): n is a, c, g, or t
  misc_feature (150)..(150): n is a, c, g, or t
tccgccgccccaccgcatctcgaggagggaaccagctcccccggcccctattgtggggggtaacaagggtcgttctggtccactgccccctgtacctttggggattgccccacccacaanacccggggaccgcncaggccgagggggccntccaacacacccactccagctactgacgtctggaccacttgccccccttcacccctggagctgttgggccaccaattgcatcaacagcggcaacaacggcaactgacagccaagctcccggggaattggaccagccctcccccaattcccctcctgctctggtgcctgccggggcctgggcccctaggtgggggtcggggagcgcttttggcatcaaatccggcagggaatttcagctgaacaaagaccctgggggccccagaagaggccaagagttggaggcaacaactcagg

SEQ ID NO: 564704 - DNA, 500 bp, Homo sapiens
ttttgtttgtcttgctctcgccgcttcacacatactcggcgctgtgcgtctcgtcttttctctctctcgtgtatgtgtttgtctcctgctctcctcgctcgctcgttaactctccgctcgcgcgcgcgcgcgcgcgcgctctctcgtctctttactttctcttctctctcacacaagagaaacacacacacaccctgctgttcttttctctctctctcctctcaacacgaaacgaacaccccccaccccggtgtgtgtgttgtttttgctactctcccctcttcccccgcgcgcgggggtcccccccctgttttgggctgttcctctttcccccgctcccgcgcgcgcgcgcgggcggcacccccatccacacacccccccccccccccccctctcctcctcctctctctctctggggagtgaggggccacccaccccccccccccccctcctctttttataatatatatattatttatctctgctgtgtttttttttta

SEQ ID NO: 564705 - DNA, 1085 bp, Homo sapiens
gacacggcccagcttccgttcaaaatgtctagctgttcacgaaatgctgtgcaagctcgatctaggagggtggatcactctacacccccgaagagcaatatgggtctggtcaaagtcctatactgaactatgcatgctgagccggggatgcctcctcgcaacattgaacacaggccgatcaagaacctaacaggctgtggccatgaggtccaccaatatgtcaaagcaagtactacagacgccaaccggcaagccaatggccaccacgcagacccaggcatcatgccgccgtgtgcagctcctacgcgacgcagcacaggcacgccagaggaagcaggcaactactgcgatcacgccacctcgcacacgtcaaggcacatctactcctcgcgtcgccacgcgttggaagaagctgcgactgaccttgtatcgtgggccgcgtacttcgcacagaaacaccccctagcatacaagttgattcgaacgcgccctatacatgcagccctaccatagacggcttgtccaaccgcacactgcggcggcctggggaacactcggacgcggtacgcgacagccctcctcacatctaaggtcgaatagaaattcaagatcagtgccactacaccagcgaacaacaccacacacccccaacggcggaggccctggccaacgggggacacagtttaccacccagcacgctctcggtaacccagcaggcgaaacacagatgcgctcacaagacgaacctctggacctccctagcggcacgcgaaacggggacaccactcgacagtctccgcaacgcgcaccgcaccccacagccctgaggcttgaacctttaccccccgcccaacagggcgctgaacctcgggccgttggaccccctggcggacaaccacggcagagcgctcccgagacacggcacagcccacgccacgcggcaccatggcgccccaccccaagcctccacgcccaggcacccgccgccgaaaccatctcgacatcagaaccagccacaaccacactcggcctaccgaggcgcaacatcgcatactcaacttgcaacagcgcctatgcggacacgc

SEQ ID NO: 564706 - DNA, 497 bp, Homo sapiens
ccgaaaagggaacaaaccagacggagaataagttgacaaattgacagaagtaggcttcagaaggtgggtaaaaacaaactcctctgagctaaaagagcatgttctaacccaatgtaaggaacctaagaaccttgaaaaaaaagttagaggaattgctaactagaatagtcagtttagagaagaacataaatgatctgataaagtcgaaaaaacagcacaagaacttcgtgaagcatacacaagtatcagtagccaaatctatgaagcagaagaaagtctatcagcaaattgaagatcaacttaataaaataaagcatgaagacaagattagcagaaaaaacaatgaagaggaacaagcaaagaatccaagaaatatgggactatgtgaaaagaccaaacctacgtttgattggtgtacctgaaagtgatggggagaatggaaccaagttggaaaacacacttcaggatattatccaggagaacttcctcaacctagc

SEQ ID NO: 564707 - DNA, 246 bp, Homo sapiens
acgacatggcataaagcaaaagaactctcagccaagagaagctgcataaatacacataatgcctgcatctgcttttactaattagttcagtttaaatagtaaactttatactcctgtggacattttgccaaacgttacaatacatataagattatcaatcttaaaactaacactgcacagagaaagacaaagctacttctttatataatttattaaaatccaagtttcttctaaattctatccttg

SEQ ID NO: 564708 - DNA, 422 bp, Homo sapiens
  misc_feature (270)..(270): n is a, c, g, or t
  misc_feature (291)..(291): n is a, c, g, or t
atcctaacctccctcgcccgtgtcgctgggctgctgtcactgcgctgcccggcgcagctgggtgccctgcgccaggtggacggtgtctactacaacctggactccaagctgcgggccccgaggccctgggggatgaggacggagtcagggccttcctggcgctgcgcgtgcccagggcctgtgcgaggtgctgctggtagtgaccaaggaggtggaggagaaggcagctggctgcggacagactgaccatggctgaccatgggcgcccanacacggtccctgggcatcccncctgccgctgcgcaggactgcatgcctgggaagggccgagcacttcatggacccggggggccccaccccctccgcacacgcgcgctgctccccagtggcgctggtggcctcaataaatctgcggatgggca

SEQ ID NO: 564709 - DNA, 276 bp, Homo sapiens
  misc_feature (113)..(114): n is a, c, g, or t
  misc_feature (236)..(236): n is a, c, g, or t
gatataggaatataatatatttatatactgtatatatgtagatttaatatatatgttaaataatgaaagtactggccgggcgcgatactcacgcctaatataccagcactttnnaggctgagggggtggatcgcctgaggtcaggagttaaagaccagcctggccaacatgggaaaccccatctctactaaaaataaaaaaattagctgggcatcatggttggtgcctgtaatccnagctactcgggaggctgaggcaggagaatcggactttgtc

SEQ ID NO: 564710 - DNA, 722 bp, Homo sapiens
atctccccgggggtgctctgcgtggttaaccttgggcccatccccgcccactttttccctcgcttctagggcgtccctcggctccccgtggcttgcgctgtcccccggtgcctgccctctgcttcttggagagtttgcacgaggtgttttggcccccgtcactggttcctcgccccgtggcgccattacttgggacacccttttgctttgcaggagccttcccagggtgctacatgcggcgcagcctctcaggcggttgttcccccattggggaggcacctctccaccgggcgttcacccgaggtggcggccccccccgcctaaagttagtacccacggggcccgccctggcctagaactcgcgctgtgtgccaccctgctcgccgattagtggtggaccggtcgtctttccggggcacgcccttgtttgtgttgaatgggctcacatgccgcgccttgtgttttgccccccgccgtgcggtggcatcagtgtactgtccctcacgtcctgtctttgtcttatctattctcctttggcgcccgcatcattccacgccgtatgtcgccgccttgtcatcgggcaacacggtggcatctccccccccgatggatgcctccccttgtgtacgacccaccaccgccctccctccgcctacactgtggccccgctcccctggtgggcacccattaaaataggggatggacgcccgcaaaacataaca

SEQ ID NO: 564711 - DNA, 390 bp, Homo sapiens
  misc_feature (207)..(207): n is a, c, g, or t
  misc_feature (230)..(230): n is a, c, g, or t
  misc_feature (232)..(232): n is a, c, g, or t
  misc_feature (242)..(242): n is a, c, g, or t
  misc_feature (244)..(244): n is a, c, g, or t
accgtctacccacgagaaacaaaaacacatgtcaggacaaaacttgcacatctgtgttcagagcagcagatgtgttcatagcagcagatgtgttcagagcagcagcatacatcacagcccgagaaatggaaaccgaccacagcaatatacatcacagctcaagagatggaaactgaccaggtgtccaccaacagatgaataactgtngcctatccataaaatggagtatntnccaacatatnanaacaaatggtccggccaggtgcagtggctcaaacctgtgatcccaacaccttgggaggccgaggcgggcggatcacccgaggctgggagtttgagatcagcctgaccaacatgagaaaccccatctccactaaaaatattaaatta

SEQ ID NO: 564712 - DNA, 504 bp, Homo sapiens
tgtactcccgggctgtccgtcgaatctcaagaatggaacactccttccgtggcggcggcgggggctcctccgtgctcgagggctccggggctggaaggcgaggagagcgaccatcgggacccagaccctcctatcctcgaggcatcaggctgaaacagcacggagcggcatggctctcaggcctctcataggcgaatgcatccctggcagagagagatgatgctgccaaggactgcccggcagacccagttggaccttctcctcaggaccccagcttagaagcctcaggcccatcccccaagccagcaggagtggacatctctgaagcacctcagacctcttctcccctgcccatctgctgacattgacatgaagacaatggagactgcagagaaactggctagatttgttgctcaggtgggaccagagatcgaacaattcagcatagaaaacagcaccgataaccctgacctgtggtttctacatgaccaaaatagttctgct

SEQ ID NO: 564713 - DNA, 514 bp, Homo sapiens
tcaacgctttatacttcacccctaaacacattttaatgggtttggattaacatattatttctctatttaaggggtggaagttgataaccagtaaaattcctgctacaatctacagcgcttgagtggattagggctgacactggtggttggaccttccatgacggaaggaggtcaggggtagaggcctcattgaactagagtttcccgactgtatgtttgataaggtcaattaatggctgatcaggggtaggatataggattaatgctcgttgaggttctcatgtgttgtaagatgagaggaatcattggtatagttaaaatgaagccaattatctgccctatgctgttatacagaatcgcaaggtacgggcgtagctgtattagcaatctgctcagctgtgtcctcagccagtttgtacaaccagacataattcctacaccttctcatctgatagaacgttgaccctatgttgttggcggcaactagagtccatatcgtggcgcggaccataag

SEQ ID NO: 564714 - DNA, 282 bp, Homo sapiens
ttccaatagcgatacccaacgtgtcccactccatccatcccccagtcaccattattctgtccgcatgaatttgattattctaggtatctcatgtaagatggaatcatacagtatttgactttttgtgattggcttatttcagcttagcttaatgtcctcatttttacccacgttgtggcatgtcgagaacttatgtcctttttaaaggctgaacaatattccactgtacatataatacctcattttgtgtatccattcatcgttgatgaacacttgggtact

SEQ ID NO: 564715 - DNA, 242 bp, Homo sapiens
gatctctcaaactatcactctatatttctcgatctcgctctcacgctctctcccacgctcgttttcattctctttctctttctctctctctctctctctctctctctctgtctctcgctctcgccctctctctctctctttctctctgtctctctctgtctctctctctctctctctctctctctctctctctctctctctctctccccctccctccctctctccccttctgtcgtcttctc

SEQ ID NO: 564716 - DNA, 303 bp, Homo sapiens
gaaattattagagggcgatccgtcgaaggccaaagccatcgccaagcggtatgccgacatcgccgccgtcatgtctaagtccggcgcgatgactgccgaggacatcacgcagttcggcaagtatgcctactcgggcgcgagcgcggcaggcatctcggacaccacggtcgccgccatcggtatggcgttgaaacgcgcgaacatgacgggccaagagtccggtacgatggttcggcagttggcgtcgcgtgttctgtcgccgacgcgagaagggcgccagtcggctatcgcgaacggtatcga

SEQ ID NO: 564717 - DNA, 924 bp, Homo sapiens
ccggaggagcgtaggcagggcagcagctggcgccagcgggaacaggagccgcgcgacggaaaaaatacacgggaggccgtcgccgaaatagagtccgaggatcctctctcgtaaacacactctcctccaccggagcctccccctccgctctgcgcagccagtcgccggcatgggcgcctcgaggccagcgtccgacatgcgtaatgtgaccagctgaggcttgcggagaggaagggtgacagggaagaagaggctctctcacgcgggagagctccttgcaggaccaggatttagcggtgccatcgtatctgcaggctgtcgccttcgttatggctcgtcgtcctgtcccgccatttgcgtgcaaggcgctaggtgggcccctagggatttactcttggctcttcactcgacggtcgcgcctagactcgtcgctcggtgttccccggctgatgcattggctgtacagaatggagggagcgtgcctgcgtgcagtatggcacttgacatgatgttgtctcacaaaggacctgactgcaacacggcgcacgacgcaattggctggcgagggcggggcgggtcagccgggacacgactcgacggtgcgaccctctggggagtctgcctcggatgtctgggccgggccaaatgattgctcattgccttgcgttgcggtacttgctacggacccggggttcctcgtgggggcggactaaccagggcgtcgcggtcatagctataccctaaaggggtttgcgcgtgccacactgttggcagccgttgttacaacaacacatgtcagttagctggttgcgctgggggctacatggtggctcctgttgatggcgctggcacggcgagatttccttgcccctgccggaagggagggaggtacgtcgccccgggtttgcgcttccgggcctccta

SEQ ID NO: 564718 - DNA, 178 bp, Homo sapiens
gtgagagtgatttggacagtagagtaaccagttgtgattagatggtgaaaaaggtcatcgaagaggggtcccaagagtcttgattctgtttcagttagcttgtgtgtaaaaaacagtccaaaatgtaggttaaaaaaaccacaattggtcatttttgaaaaatgattctatgggtggg

SEQ ID NO: 564719 - DNA, 168 bp, Homo sapiens
aaaagggatgaggttgggggacgttgcccataggaatccctgctcccactgattttattagcaaaacatctgtgtcttttggagtacgatgtgtatgtgcccattgggtggcctgttggtcactgtgctagcagtctgcttcccaataaagcgtgccctttctggtgg

SEQ ID NO: 564720 - DNA, 759 bp, Homo sapiens
cggcggcaggagtgagggggaggcggcggcggctgctgcatccagagctggccgtggcgtgcggcgcgccccgtcgcacaaaggcacccatgcacccaggtgagggcgatgaacacagcacatcccgggacccgggccccagctgctgctaccgatgctgtgcgctcagggcgctggggaatgacgccctggcgtcgccgggggccagcgggcgaggcgcgtgccgtgcgaccctgagcgcgggactcgtcgcacctccgggtcaggcgccaagcttccaagctggctagagctgctgggccttggagcgcccccaggatcgcttcagtaatggctgcttccccaactccaggcccgatcgcccggcgcctgaggcgccaacttctgccaaggaagcgctcctaagtccatggccatcctgcaagcagcagatgggggcgcatgcttgcctgggcagtcagcactatgaggactgccagcccctggccagtagcgagacgaagatgccggcactttggcaggggtcactacggagctgccccatgagatgggcagagaggctggacaagaaagacaccagctctcacaggggagtccagggaacctgcacatgctgctgggagactctttcccgaaccatggcagctttgccccctcttctttctattgggagcgttggggccccatgacagaagcccggtacagatgggcttgtgggacgcgtctacacgatactgagtcaagccttggttttcccag

SEQ ID NO: 564721 - DNA, 659 bp, Homo sapiens
ctcctcgaggaccacgttaatagccaccgcggacgcgagataatcatttcaaagacttccatttcagatcacaagcaggaagtctgatagttctcaaaggcacttgtcttctcccaagctaggccaccaagcagccacgagagttgctaacccaaatccttctccagccatgactctggtgactcttagcttgcacccacctgccccctccaatatccctcagatgatgaggagccagggctaagggggcagccttctctcttcccagtgatgcacatccttcacattggctggcttgttctggaatatggatatctcagcctggatgccgaggaagctgctggatgctttaactggtgctagaggctcgagtgtgtttgagaccaagagccagttgtccctcatgccgaacgaaatcctgtgttagcctcctgtatgagatataaaatctgccagttttataacattcactttctggctctcaggaacgatacaggggacaaaaatcaatttgtacagtcttaatattaaaagcggcttgactaagtacctgatttagcaattgaagacatcccccgtcctcatgacataccgccgatatctttgggggcctcttgcaaagaacaaaataaggagcccaggggcatctgctcacacca

SEQ ID NO: 564722 - DNA, 340 bp, Homo sapiens
  misc_feature (112)..(112): n is a, c, g, or t
ccggtgctttgctctcaggtagtgatcttaactagctccaagtagtaggatcacagatgacacatgccagtagtggtattgggagagacggatctctccatgtgccaggtgntctcgaacttctgagctcagcgatcctcccgcctcggtttcctaaagtgctggaattacaggcatgagccaccgtgctggacctacagctgttttaaatgtcgcctccttggtgacaccgttcacaacctaccaaggtccctctattgtattcccaaagcactctgtgactttgtcaatcccttccactagactcgactctgagctcttcaagagcagaaggtcgacg

SEQ ID NO: 564723 - DNA, 325 bp, Homo sapiens
ctgcctccgtatacagaggctaaattagaggcggacatacggaagtgattgtccttcggctggaaaaaaatccccagagtcagacctagatgttcagaagcattaagatcaaaaagggttgttctaaagcatggcattccacagcaatcatttattctatcttgtccagttttagcacttctttcaacaaacccagcgactaacggacatgcgaggttgatggtgtatgatacacacaatacagaccttacccacattacagtataggacccgatatacattacaagacgatttacatataacacaaacaggtgaacaacagtac

SEQ ID NO: 564724 - DNA, 206 bp, Homo sapiens
taataaagatgtggtatatacacacgaagtagaataatactcagcattaaaaagaaaagaaatgcgtgacgcaggctacaaggaggggagttaagcttgaatacattatgcaaagtgaaataagccagtcacaaaaagataaatattatatgactatcagggtattcaaattcagagacagaaagtagcatggcagtcgccagagg

SEQ ID NO: 564725 - DNA, 306 bp, Homo sapiens
  misc_feature (134)..(134): n is a, c, g, or t
  misc_feature (144)..(145): n is a, c, g, or t
  misc_feature (148)..(148): n is a, c, g, or t
  misc_feature (202)..(202): n is a, c, g, or t
  misc_feature (260)..(260): n is a, c, g, or t
  misc_feature (276)..(276): n is a, c, g, or t
gtgtactgtaaattattactatataggtagtgtggaatctaagacagtgttcaaattcaggtctaggttgacttaatttctctaaggtcttacttaataagttactttgtagggataatttcattcattttganaggatacatnntcnggttcttaggttgcaagaatgggtttcctaagctttaataaaccttatataganacagatactcttcattaaaaaatgtttatgctgcatattaagtaaaacatcaggaganactgatgtcctgtagnctaaagatggtctgaaccatatctaaatat

SEQ ID NO: 564726 - DNA, 248 bp, Homo sapiens
atggcccggtagtgcgttgaatggccagttgggcagctctttccacgatggctatgcggattacttggaggaacacattgtgagcgacctcgagcacagtaagatttgttgcacatcagcaagcactttcagctccttgacgttgtgaaccaggaacttccggaagccagtgggcagacatgtgccttgttttttgtagcttccataaacaatgttgggcatcaagatctggcccttgaatcttctaa

SEQ ID NO: 564727 - DNA, 294 bp, Homo sapiens
tgatctagcaggatcccttgctgaatcctcctcctcctcctccttatggcaggccttctgggcaagcaagctgagtaaatggtctttcactagcagtgtcacatgatccttaacctgggactgctgggctgcaggctggagcctggtctgtatagatttgagtgctctttacatttgacagacacacacttgagcacttcctcaggcagaatccgatggagggcccagggaaggcagtcagagaaggcttcacagaggaggagaagtctgggctgaggaggcaggaggaattcg

SEQ ID NO: 564728 - DNA, 1044 bp, Homo sapiens
  misc_feature (1037)..(1037): n is a, c, g, or t
gtggcactggcgaggactgtgaaggttatattgaaaacttctacagtgtataggaggttgctccatagaagtacagtcgttcaaaacaaccagtaccgtgaagaagaggaggaggcgcgaagatgctagctggagctgcgttgttgaggaacgaacttgtccaccagcagggaaccccgaagagcatccagagtagaagctgtgcaattatgtaagaagtttctgcaactgtcttcctcaataataaagaagtatggtaatccttacctgtatacagtgcagagccttctcagaagcacagaatatttgtatatttcctttatgtgaatttttaagctgcaaatctgatggccttaagtttccttattgacactgaaaggtttcgtaaacagacaatcatgtccatacacttggttgcaagatgtgaattattgacacgtgaacttaataactgtgtactgttcggaaggggtacctcaaattttttgacttatgtgtatgtgtgtcctactttcctcttaagttcttatgaggaggggagggtaaataaaaccactgtgcgtcgttggtgtaatttgacagattgccccatctagactagcaatctcttcagaattctctgctatatataaacggtgctgtgaaggaggggacaagcatttccaatatattggacattttgtacctggaaacttatctgcggaattaagccaatccagggtactaaattccacttcagcatagacactctgcacacaaggccaatatatatcctaatctccacgtgttagcactctggaagatggttccccaaagagtggacctgcgcacacaccgccaaaacacctaaacaaagaaggaggggaggagcagcgcgaagcgagaaaagagacacactaaaaagatccctgtcaaacaacaggcagcagcagaaaaaagtgccgacagaaaaaaggccgcacaaacacacaagaaaagacaacagagcaacaacgcaagaacacaacaggcgagcagccaccacggagcgcacgcangcaagat

SEQ ID NO: 564729 - DNA, 891 bp, Homo sapiens
ttccggaagtagctggaaaatggcccaggagctctatatggatgcatgaaaaactgatgcgcctggatgttgcgacggatgtgtgtgtgtgacacttgactgagctgtgacacgcaactgtggacgacctggtgaaggatggagaccatggaggttcttctgtcacctgaatgaaactcattccgcgctcgtggaacatccagtgatgttgacccttgtgaacgcaacatagttgtggaggacctggaacttcacgcactttgcgttgtaaaccccgtcgacaggcaggcctagcatgtgagctacacctgtagattgttagtatgcctgactgggttataccctactagatattggcaaagactgcaatggcagcggaggttagtaggctttgttgtgtaaagcgacggaagagacactgtttacccttggccaatgggaacaggacctgtctgttagcagtctacacccaggcacctgcccgttaccacttcggtaggccttccttacttaggtggccatgcttaggtggaactcttgttgggaaccgttgtgcggaccactctggagaaatacgacatagggccccattatgttggccggaaacgaacatactgaaaagtattggttaggccaccagaaataacaacgagagcccccttgcgagctagttactatgacaaatgaatgtaagggcgagcaaccaccccaacaagtggaaacacccagggacattgacagccaagagaaaccctcacccaccgtcatggcccactggagacagcctccctaagcactgggctacgacaacaacacacaggcagctggcgcaagtatacgggggcaagtcccccgaacactaaacccattgacggccggaccctgcccaac

SEQ ID NO: 564730 - DNA, 108 bp, Homo sapiens
cttgtcgtcatcggggtgccaccagctcgtaagtgtagcttataagaagtcttatttttatttattcattcatctattttgagacagggtctcactctgtcacccagg

SEQ ID NO: 564731 - DNA, 147 bp, Homo sapiens
tcagtggtacttcagtgcttgattgcaggcgggagctcaccgatgtgatcttgcatgtcagtcccagagctggaccccagaagtgttcagtgcgtggaccctgcactgtctgacatttccatcgatggcctgcaatcaagcctggaa

SEQ ID NO: 564732 - DNA, 119 bp, Homo sapiens
atataatgataggatatagacgatactagatacaggacaacgcatcagacaggttaagccagctagattcttagagtacggagcaatcgaggaggcataaccagcacttggtggtggct

SEQ ID NO: 564733 - DNA, 123 bp, Homo sapiens
gcctgcgccgaacaaacatacagaacgcaacgagtccctctgaaggcccaacacggatccgaatcacctggcccgaaaccacctacctagccatgatgaatgctgaggacccagatgcagtac

SEQ ID NO: 564734 - DNA, 205 bp, Homo sapiens
ggcgaccaagaggacccccaggtctaaacccctcaaaaatacaaaggcatactaactatataaataacatactacgataaactagtacagcctagctacaaggaaatccatgtagtacaaacaagctagctcgcagttaagctaccataaaccaaataggtaagctataacctcaaataatactagagcagctaaataagagcta

SEQ ID NO: 564735 - DNA, 88 bp, Homo sapiens
  misc_feature (5)..(5): n is a, c, g, or t
aaganattattcattttaaccctatgtactataaataaacaaatagttctattttgtgtccccgaatgagaccttgaagcagaggtga

SEQ ID NO: 564736 - DNA, 186 bp, Homo sapiens
acgggcgcaggaggcatgaggctcagcctaagcaggctcttagtgatccctgatgtcgataatctgagacgtcgtctcctaccgccgatcatccgctaagcgaaagtaatccacgctcagcttgtgaatgagatgagatccgacgcctcatcttagcggacgtccgagaatcgaacgccatggttc

SEQ ID NO: 564737 - DNA, 225 bp, Homo sapiens
ccaaaagataccataaataagagagacatcttttaaaaataaacctagctgggcatggtggctcacgcctataatcccagcactgtgggaggctgacggcaggaggatagttttgatttctggagttcaggaccagcttcgggccacacagtgagacactgtctctctctcttttttttttttttttttttttgggaaagggggttccccctctcgggggggggg

SEQ ID NO: 564738 - DNA, 668 bp, Homo sapiens
tgtgaactcacgctgcgggaaataatttccgcccccgcgggggtaccggcacatgagtagcccccccgcttctcgtccgatgcccctcgtctaatgccatggaccgctcgtgcaaacatgcttgcccccctcatggttttttggcgcccaaacaaccggtggggactaaatgagtgatgagtatgcggggacccccactgtttggtcgccacagaatgtgttgtctccccggctctgtctcctctggccccagtgggggaaaaatgtactctctttaataacccccttttaagtgccctcacggtaataaaaacattctctgtccggaaactacccccgcgtgattacaaacatatgctgtgacttacaatggcgaaaagtggaatctttctttattgttccacccgcttttggaacacaaccactgcaaggcattatttgtaagaaagcatgtaaacaattttactaagttgtgcacacccatccccctgggatccagacataacaaattggtgtttcacagaaataagataggcaccgaaaaaaatttgtggaccacacaatgcttgcatggagactaatttagaaggggaacctctgtattggcaggagcattttataccacgctttaaataaaactaaaaaaagcaccttatcagtgtcacaaa

SEQ ID NO: 564739 - DNA, 258 bp, Homo sapiens
cccgctctcgtgaactcatgcaaatagctgggccaatggcaagaaaatcaggaacctccagactgagggaaccacatattttgggctgataagtgctttttgtgtagacaaagaaaggtagaaaatggtgtgaatctccagggtgaaaatgttgcctgtttttattatgccctccttatgaaaaaaagagagaaaaggaatcaggatgggactagcattcctgagagggagctgtgaaggagaaaaggaacccacatc

SEQ ID NO: 564740 - DNA, 346 bp, Homo sapiens
  misc_feature (30)..(30): n is a, c, g, or t
  misc_feature (172)..(172): n is a, c, g, or t
tccagagcccctggcctttcagtttttaantatttccctccaggccagaaagttttttttgaggaaggagaggagagggtggcaatgatgcttttgatttggaattggacatttttttgttagagcacagaggagggttaaatcaccttttccctttcctacttggcccagntggttggaggaccgaccccatgggtgagaatatgacggcaagaggaacagagtttgctccaagtgggaaagggtcccaagcagtccaaagaaaatgtttgtgtggctttccctccctgcctcccccagctcccacactggcctttgtaaataaatggggtggtttttgttgtga

SEQ ID NO: 564741 - DNA, 853 bp, Homo sapiens
cggggtgtcataaggcgcggaggagcggatctgagccgggaggcaggaagaagacggaggagccgggcgacagctatcacgtgaattgcccgtgcatgctccttctatgcccaatctgctcctgttcatcgcgcttccccgtgcgcaatgagaatggtgccctgggatacggagttccttgaatctatgatccagccttttacacggcagagaggaatgacgcggacgccatggaccccatgggagagaatcccatgggccggtcactaggactgctgtgggcgtcgggagccttcagtctgcttctggagcaccaatccacaactgctgtaccccatgtgtcactgcggtggaggcggaacgagtggatggagccatctgcagtgaagagacagtagaagaagattctggatagtgctgtgtggtgaagctccctctctccgatcactgggtcctgcctgggggtctcccgggcatccgaggggatattgctacctcggaagctgaagcggcatccgtccgggaggaagcacttggtgcgctcgttttgataaacattgcctgaatgttgccggctatggaggttgtagcaattacggtctagcagtggcattgacccgaaggggaaaacaacgggacaaattgccctggatcgaggacggtggccgtcagcgtccacttccaggaccagaatgacgtggagctgaacaggctgaactctaacctgcacgcctgcgactcggggggcctccatccgatggcaggtggtggacaggcgcattccactctatgcgaaccacaagacctccttcagaaggcagccggtgagttcgggctcactactgactgtgcc

SEQ ID NO: 564742 - DNA, 103 bp, Homo sapiens
acgtccgagacgcactctccatggttacgagattctgaacggttttctttccgtgagtaagcatccatgtcgtgatgtttttaaacttttttttagaagaaaa

SEQ ID NO: 564743 - DNA, 755 bp, Homo sapiens
  misc_feature (1)..(1): n is a, c, g, or t
  misc_feature (89)..(89): n is a, c, g, or t
  misc_feature (91)..(91): n is a, c, g, or t
  misc_feature (96)..(96): n is a, c, g, or t
  misc_feature (98)..(98): n is a, c, g, or t
  misc_feature (124)..(124): n is a, c, g, or t
  misc_feature (217)..(217): n is a, c, g, or t
  misc_feature (252)..(252): n is a, c, g, or t
  misc_feature (275)..(275): n is a, c, g, or t
  misc_feature (279)..(279): n is a, c, g, or t
  misc_feature (291)..(291): n is a, c, g, or t
  misc_feature (397)..(399): n is a, c, g, or t
  misc_feature (401)..(401): n is a, c, g, or t
  misc_feature (411)..(411): n is a, c, g, or t
  misc_feature (418)..(418): n is a, c, g, or t
  misc_feature (569)..(569): n is a, c, g, or t
  misc_feature (746)..(746): n is a, c, g, or t
naaggggattctaagggccaatataaccagtggggtcccagggcagcatgatcttcaccttgatgcccagcacaacctgtatgagcaanangtggngnacagcagtataaacgtagtagtaaanagggtctccgctgtgggtaatcaggccatccacaaacttcatggatttagccctctgtcctcggagtttcccagaaaccacaacctcgcagcntttggccccactttccatgatgaaccgcagcacancatagcaggccctccgcacagcnagcnctcctaggagtntgtaacgcagagactctgcgtgggcaatggcacaaagacctctagtggccaccttttcagcataaagctttaaaggaagcgagggatatcctgttaccatcacgannntnttcaactganagtgganaatgtgggatttgccaaaaaagttttattttctacaccaagcttgcgcaacccacgggccgcatgcggcccaggagatggctttgattgtggcccaacacaaattcaacatcgtgattttttgcgctaccagtagtagtgtggcccaaganatttcttcttccaacgtagcctacggaggccaaaagatcggacaccaccatcatatacagcatataatttcagtatccctcaattcctaaagcacttctaccacctacacacaatgcaggtccttgccctcccaccctggctcctttggccatgcaagtacaccaatggggacagtnaatccatca

SEQ ID NO: 564744 - DNA, 233 bp, Homo sapiens
  misc_feature (222)..(222): n is a, c, g, or t
ctataatgcagatatgccctatttttccctttcagttcctatatagttttacctcatgtattttttttcttgagatggagtctcgctctgttgccccaggctggagtgcagtggtgcgatctggactcactgtaacttccacctcctgagttcaagccattcttctgccttagccttccaagtagctgggattacaggcgtgcactaccgcacctggctganttttgtattgt

SEQ ID NO: 564745 - DNA, 210 bp, Homo sapiens
cagccccggagggccatcaagcatcggtcttccaaggccaattttacctcgtgtctctcacggggggagacctggaattggttgggagacctaaggagatggcagtgagcttaagcccttccgggagcttaccaatcagtcgtcccttattcatccccaagcaaacgtaggggggtgttgtggggcccattactgaatactctgccaagt

SEQ ID NO: 564746 - DNA, 266 bp, Homo sapiens
atatcggctaactagtctgatgacaagttaacactaatggcataaagcagcaacaaagaagcaaaaagaaaactaataaaacctctacactattaacttatatccccctacttattaactaaatagtagtaataatgtaatacctatattatactagtctgtatctatgaaaggctgtagtaatattgtaaaacggtaacaactataaagtacttactacaagactagtcgtatcataaacacaaatatacagtagtaaataaata

SEQ ID NO: 564747 - DNA, 278 bp, Homo sapiens
ggtaaccttaattccccttctctgggtctatagctcggcttattacacgggagtgtttcgttgagatgcacacatgattgaggcagctcataggtttaaagcatattttacaagtttcaaagtctaggagatgattgcctttgctcaacatcttcagcggtgtacattcgaagatcatgtgacaattattgaatgaagtaactgaattagcgcttaatggagaccttatgcacagttgcatctcttcgtgcctatcgtgacatgcctgctgttgtgcg

SEQ ID NO: 564748 - DNA, 919 bp, Homo sapiens
gagttgcttggaggttggcggcgcgggctgaaggcctagcaaaccgagcgatcatgtcgcaccaaacaaatttactaattcggacaaatacgacgacgaaggcagtgtgagtactcgacacgtgtccattgctggcccaaaaggcacatagaccaagcatggtcccctaaaaaacccattctggatggtctgaatcttgaaattgggcgcgacatcttggggcgcttcaagcgacgaacgtccagggggcattgggggtcccatttacctttttggattcccatttgtaaaccaaggaaacggctttcacacaatttttttgggctgtgtttacccgggggtggccccccaagtataatcaccccaaataggaattaaaagccaacaatggaaaccacttggtgacgggccttggtgacgacagcgcgtataccgtttgttgttagaaagagcctatctaaaagtggctttttatcagccacaagtgcttgtgtgtaccattataaaacgttgttgcccactaatgaacaagtttccttgttgtccgtgtggacgtatacaccccgcttttacatttcttacatgtcgttgggcccactatctcatctgtggggcttactcagctccacaccccattttgggaacagcaacctttcttacaacacaacggtacgcttgttgtgttcaacagctaaaacaacagcctcggtgttgtcggcacagcattgggtgtcctgtgcggaaaaccacactggtggcgtattcgtgcagaaccactcgtgtcaggggatattggtaggtggcacaccccaaactacacagccatagtaatgtgtctcctacatgtcccaagaacagttaaattatggcttccctgtgtgtgtggagacacaaacaagtaggaccaataagatacacg

SEQ ID NO: 564749 - DNA, 273 bp, Homo sapiens
tcgtcccctttgtctgctcttactttgctgagaattgagaccttcacaagttccttaagcttccctcttcacgtcagttcgtcttcggtcttcctcattctttcctccttctctccttcctatctcatgttgtggtcagcttcctctctggggctgtttctgacctgtgggtgttcccctccctccagtcacagccagactgtggatggcagcctctgtgttaggaagcaggaccttaggcaggatcctggaaggctggaccagagagtgagg

SEQ ID NO: 564750 - DNA, 170 bp, Homo sapiens
  misc_feature (54)..(54): n is a, c, g, or t
aaatcagtcggtaccagatccccctttcatccagggtcacgccatgcacccacnctgtctcccaaagtgctgggattacagggatgagctactgcaccagcattttttttttttttttcgaaacagagtgtcctgtcacccaggctagagtgcagtgatgcgatttcaca

SEQ ID NO: 564751 - DNA, 733 bp, Homo sapiens
aattcgtgaccaccactttgtctgatggctgactatgatgtgtactataacaatgatcgttgctgtttcctactactgcctgacattgattatgtgtggggatcatacctcttgagatgcgtgcggcgggaactcaggacgtgtgctgtaccatagtccgcgatgaccgttcatgccagtcaatctctgtgatttatcacttggagatccactggtgctcaatttcctgttgttgctagtccacagctgctaaaggagagaagttgtcatgcaggaggagttctcgcgtgatgggaaggctctggagaggttcctgcaggagttactttgatggccatctgaagagatacctgaagtctgaacctatcccaagagagcaatgattgggcctgtgaagggtacgtggtatgcagagaattctcgactgaaactacgtgagactacactgaacagactaaacgactgttgctgatcgcaatttttatgcccctttggtgtggtcattgtaacgaacctggagcccaagtataaacgaacttggccgatagagctcatggaaagacccaaatatcgtcatatgccccagatggattgccgactaagccagttgatgtggccttctcccattagtgaagtcgaggagggtttttcctaactattatactttctttcttcccaaagccaaacaaagaaagtcttaaattcccaaacggaaacttcttcccaaccggtg

SEQ ID NO: 564752 - DNA, 144 bp, Homo sapiens
gactcccccatgttgccgcacgtgtcgtccatgctagcagttaatgagctgccctgatcatccacggtactgaaccagcagctgggctgcttatggaaaagggaccagttgctcaagtgtctcccttttcgggttccataactt

SEQ ID NO: 564753 - DNA, 135 bp, Homo sapiens
ctggcacatcgtgcgatctggtggagcggaccatccctcaattcaaggccatggatcactttgtaacaaatcctaccaaactgaccaataaaaaaaaatgtgggttttttttttttttttttgttttttggaaaa

SEQ ID NO: 564754 - DNA, 517 bp, Homo sapiens
gtttctaagaacgttcacatgaagatagattcctaggtgttcctgcatgagagtggatcctgtgacgaagtacttctgcgctcactttgccccagcagggatctgactgagtcatcgaaggctccgccagcgtcctcgtccgttactcagacattccggatagagcatgttggcaacgaacgagcttccccaggacagccaggaaagtcaccttgtacctgacatgcctaggtacgtggcccactcctttgtttagtccccaaccctaggcgcttctcatgacttccacggatacatctactatctagcctgaacatcacgagtttcagtgcaagtaaatatgttacagggtgcgggggtgaggactgaccacagattccctgagatagtgtactggtagattcctccacaggatagcgcacttggcaaatcatgcttggtatgtgtatagcgcccaatacatacctagttcttgctttctttaccttttcgtatcttgatgcaacaaatgttgcac

SEQ ID NO: 564755 - DNA, 165 bp, Homo sapiens
aagttcgtcacattgacttcacgtgacagtaccgttggtaataacacccaaacgttgtatacagatggggataagggattcttcttttacaccaagtatgagtaggcaaaaggtggctttcagttcaggctgtgttacatgggctttcttgacacgcaagcccat

SEQ ID NO: 564756 - DNA, 101 bp, Homo sapiens
gaggatccttgaagaataatagaagagcgagccctgattggaaggaaaaagacagacgagcttcccaactgtaacccttccacaccaccaggaattcttcc

SEQ ID NO: 564757 - DNA, 553 bp, Homo sapiens
ggtagtctcgagttttttttttctttggggtttcccaggaatccatttgtttatttacaacagctttctaggaaaaaggtagaatgggcccctctcctcagtgcccaaggggacaggactgaggcagccccaccttggcccatggctctcttgcaaagctctctgcacccttccccaggggttgtacacccacgagtggacaagaaggacgttcttttcaaccaccagggtttagactttggggagacggctgaactgggaaccaccgtctacggaccataccaacatatagcacctcccgtgggtggctcccaagtttctgaaagatgaaacccaaatgtgcagtatgagcccaccgttacagggttctccagcgtctcctgcagcgttaacaacccagagaaaaccacttgaagccctacagcattggcgcttgcacggggtgtggccagagacttgcaggagcggacaggtcacgagacttgaacaagtggtcgagatacacccgcatccccacattgcagcaccgccccaccaccctgccctctacaat

SEQ ID NO: 564758 - DNA, 235 bp, Homo sapiens
aggcgtcttatcctcagatgtaggtttataaatatgtcgagaaatgccttgtacccaaaacaagtgcttaaaaaaaaaaaaaaaaaaaaaaaatttgtgcgaaacaattcttaaaattcaaatatatttttttggaaacatctaaaaatggcaaaagttctaatattccaaaagctctctggtttaaagaacgaccctccattctcctttcgctttacaacaacgcttttcttgc

SEQ ID NO: 564759 - DNA, 144 bp, Homo sapiens
tgtaccgtaactgctgaggtatatcaacaaaactagactgaaaattattttaaaaatctcttataccccaaagtaaagaaggagccacgatgagatggtaagaggggagtttcgtggatataaacaagcccatccacaccacag

SEQ ID NO: 564760 - DNA, 130 bp, Homo sapiens
gcgtcgaccttcagcgcggtaccgatgctcaggctctcttcgtcgttgacttcataagaacggaagcctgggcttgcgactcggtgatggtcacggcgtttggcagcaagccgaagatcacgtccgccgg

SEQ ID NO: 564761 - DNA, 221 bp, Homo sapiens
tatttctctcttcaatgaactcgcaacctcagaatgcatttgtgagttctcttgcagtgtaaattatgagattattcctaaccttgtcaggttctggtgacattctgtttaccataatataatagaagcaattcataatttttttttgggggggacctgaactagtttcaagttctgtggcttagacaatgccattgttcctgcttcacacagaacattcg

SEQ ID NO: 564762 - DNA, 285 bp, Homo sapiens
  misc_feature (5)..(6): n is a, c, g, or t
  misc_feature (44)..(44): n is a, c, g, or t
  misc_feature (46)..(46): n is a, c, g, or t
  misc_feature (110)..(110): n is a, c, g, or t
  misc_feature (116)..(116): n is a, c, g, or t
  misc_feature (127)..(127): n is a, c, g, or t
  misc_feature (147)..(147): n is a, c, g, or t
  misc_feature (159)..(159): n is a, c, g, or t
  misc_feature (176)..(176): n is a, c, g, or t
  misc_feature (194)..(194): n is a, c, g, or t
  misc_feature (203)..(203): n is a, c, g, or t
  misc_feature (206)..(206): n is a, c, g, or t
  misc_feature (219)..(219): n is a, c, g, or t
  misc_feature (231)..(231): n is a, c, g, or t
  misc_feature (233)..(233): n is a, c, g, or t
  misc_feature (240)..(240): n is a, c, g, or t
  misc_feature (249)..(249): n is a, c, g, or t
  misc_feature (256)..(256): n is a, c, g, or t
gaggnngggtctagcccctgtatatatattttatgcatgcactntnaccttggggggagaacagaagggggacgacgcccccgcacctcctgcgatctggctggcttggntcccgnttttaacccgntcctgccccacctgccctanagttatggcctntgttctgctcccctggncccagtgcaccgtctgcnctgtgaacnccncccaccaggcccntcttaccccacncntgtctgncccccccgntctgtancgtttgtacataataaaacaatggagtgg

SEQ ID NO: 564763 - DNA, 707 bp, Homo sapiens
agctggagctcgcccctgcgaggaccccgccggattctgtgaaagatgcctccgccgcggagcccgcggccgccccgggatgcgtggttcttggacgaacttgtcccgggggcctttgcacgccctgtctgtacccaccctgcatccccagctgatagtcatgcctgatgcctgctggcccatgtctcgcctgcttccgggttggctgcttccaatgcttgcccagatgtgcttgttcgggcacttaaccggcctgacaagttaaactcctcctgcaccgccgtggtacgtcagctggggccgggggttggaacgcccgggaaacccggggcccggggccctttgggcccctttccccttttacccggtttttttttttggagaaaaacaccacacttgtaatttacccacgagtttttggggggtttttgggaacccacgacactatgagacacaaacaccaaaccgccactagtagatagaataagaataaaagtacacgaaaaacactcgttttggggtggtggtgtgttcgaaccacgtattttttttccccacgcccccgtgggatagggtgtacaacacacagcggggtggtgaaataattttaatgcatagaagcagcaagtagtaaactagaatgtacgactgagcccacccactaggggaggagtgcgtcgagggggggacgacaacaaaaaagtggc

SEQ ID NO: 564764 - DNA, 385 bp, Homo sapiens
  misc_feature (144)..(144): n is a, c, g, or t
  misc_feature (149)..(149): n is a, c, g, or t
  misc_feature (157)..(157): n is a, c, g, or t
  misc_feature (176)..(176): n is a, c, g, or t
  misc_feature (232)..(233): n is a, c, g, or t
gggtattttaagtgatgtcatagacaggattggttaaatttagttaactccatactcttcagactgggatattgtgtaaatgtctatctgccctggtttgtgtgaactgggatgttgggggtgtttgtggttatcttacctggnggagntcctatgnttatctggcttttcatggngctttctggagacatatctgaagagatggattagaatgctttgggataaggattgnngagcacattccattcattttaggatttgccaaaagggggttgggggggggtccaatcatattggagggcagggtttacccccaagggttttggccaaaagaaaatgggggttttgccctttttctaaaggggggggttaaaaagtaattatt

SEQ ID NO: 564765 - DNA, 322 bp, Homo sapiens
cataaataaatcaagtcacacatcacaaatgacatatacggatacaatcgggcaaaattagtataagtactagatatgatacagacacgagtcaaaataccgctcttattaactcaagatcgatatagtggacataaaaaacacagtataaggccattgaagtcaaccataataacttcttagctgtcccttagttctagggacttgctctagaaattcactgggtttcttataaagggcaaattcagtaaagatcattctctagcaatggttctcaaccagaggtaccatccctcaaggggtagctggcaatatctggaga

SEQ ID NO: 564766 - DNA, 420 bp, Homo sapiens
  misc_feature (200)..(200): n is a, c, g, or t
  misc_feature (244)..(244): n is a, c, g, or t
  misc_feature (273)..(273): n is a, c, g, or t
  misc_feature (420)..(420): n is a, c, g, or t
gtgactgagatccggctcagtgatctctaaatctcctctatgatccagcttcatcattcttggacaatccctcaggtggctgaatctctggatcttcaaagattgcatggcttcatcattctgtgctcttctgagggaaccaccactcgcaagacgcgagctgttcttcatccccatgagcactgagttcagtgtgttgnatgatacagttgctcacaggcttccttgacctgatcatctcctntggcagaactatgcagacatccttctggncccttctgggcagcatcttcgatcttgggctttttcttcattcatcttttatcttcctctttctttctcaacctttctctttccttctgccttcatcatcactaattttcctttcttctcgttccctttcctcccaaaataaagggn

SEQ ID NO: 564767 - DNA, 125 bp, Homo sapiens
tgcactgatgttgctgacagagggctatggggtcctggcttggaggagcatgcctgaaccatagctgttgatttgcatagcactgagctggctgccagctggtgacagatgaagtggatatagga

SEQ ID NO: 564768 - DNA, 565 bp, Homo sapiens
  misc_feature (271)..(271): n is a, c, g, or t
  misc_feature (292)..(292): n is a, c, g, or t
  misc_feature (303)..(303): n is a, c, g, or t
cttgccggtacataaattaaagtaaattgcacttgaaaattctcaaaattcttaaattcaattataaataacatatattaacacatcttgtctgtgctaaagtccatcccacttaaattatcctactagtaggctagaaccaaagttccttatggctctgtccctagcttatccatccggactcagctgctgtgaccatcttctcaaggcaggtagaagagaagagccacaaattcctatgagtcaactcaggttattgaaagcacatttnaaagtgcagcctctgttgatntgccttctccntgtcctaaggaagcagatctcatgtaattctgtaaaaggcttgtcagagcacaacactggcatgaactacagctctggcatggcgccccgggtcacacagatcaagcattttcccttagagtttcttctcattatgtggtttgtgagtgcaaagataagttatgtttctccaatttaaaaatattgtgaaaatcaacttgttactttaaataaactgtgcaaagtttcctagttggtgatggctaggacatcaggaggtaag

SEQ ID NO: 564769 - DNA, 126 bp, Homo sapiens
acccccccgactagcccgacaggggctgaggggagtgaggcagggaggatgcatggggcctgtgggaaccagagagaagctggggtcagaggtaggagctgtcgggctagtcgggaagatcctcta

SEQ ID NO: 564770 - DNA, 135 bp, Homo sapiens
acccccccgactagcccgacaggggctgaggggagtgaggcagggaggatgcatggggcctgtgggaaccagagagaagctggggtcagaggtaggagctgacgctgtcgggctagtcgggggggtaccgagctc

SEQ ID NO: 564771 - DNA, 135 bp, Homo sapiens
aaggtagcgtacgatagtattgctttgtatgcataagctttttgttgttttagatatataaatggtatggcactacggtgtcatatctccaatgagttaatccaaaacaaaacccccaataatctgttatcattc

SEQ ID NO: 564772 - DNA, 780 bp, Homo sapiens
taaaatgcagaagctgctgcgcgggagtcggccatggactggaaagaagttcttcgtcggcgcctagcgacgcccaatcacctgtccaaacaaaagagaaaaagtgaacaaggaatttaaagagatgaacgaacatggactttatttacaaaattattactccgaatggaaaggaggtagaaaaaacacaaattgaatttctattaagaccattccccggtttcatataggctgcctgctgaagactgaagtcttactacagaacattaagagaggaatcaagagctgtctttctacaaacgaaaaacgcagaagaaccgtgttagactaactgacggcaattaacagaaccttatggttttggctggacaaacaccagaaaccacctatgatgggagaggaagcgatgatcaattacgaaaactttttgacaggttgggtgaacacaggctggagcaaagtgcaagcaatttttcacagcaaaagtcttggctaaacctccttcatacagattcatatggaacgaatttccatcatgcagttctttaattatgtcatgagaaaagtttggcttcatcaaacaagactaggactcagttcatatgatgtcgctgggcaggggtaccttcgggaatctgatttaagacaactaccattttggacccttatccctacgttgccaccaattagatggtctggaagaatctttctactcctttaatgttgtaccggcagtaaggaagtacttctactttcagatcctttagaaccggagcgata

SEQ ID NO: 564773 - DNA, 167 bp, Homo sapiens
aagcagagtaggtaggaagttgagccaataatgacgtgaagctcgtggaagcctgtggctacaaaaaatgttgagccgtagatgccgtcggaaatggctgacggcgcagcactccaagtactctgcaggcttgtagcgagggtacaatagagcacccagctaaacaa

SEQ ID NO: 564774 - DNA, 125 bp, Homo sapiens
tgcaggatcccagattgctagggatggcgctccaatttggctgcataggtaggtgccatgcagtaatgttagcggattaggacgctacggccaggctattggttgaactcaataggctgattgtt

SEQ ID NO: 564775 - DNA, 279 bp, Homo sapiens
ccatgcaggcgtcagtcaggaatctacagctttctccggcagccagcctccacccaaacagggttacctgccacactcacaaccgcagacctcggtgaggaatcaactacccacaacaccaggccatagtgaagaatcagcaacagtccacagcagcccagatgcaatggcaacaacagtcttacctgccggctctacaccctcagttcttgttggagactcgacgccctcacccatcagttcaggctcaatggaaaccaaagccgtcgtaggcagtga

SEQ ID NO: 564776 - DNA, 447 bp, Homo sapiens
tctagaggatcccgtatatgctgtctcaacttacaaatggggttatgtcccaataagtctatcataaagtggaaaaatccaaagtcagactatggcaagtcaggtacatccggtgtgtattctaacacccatctccatcgcccaacaattaacagaacaagcagaaaaaaattaaggatactagtttgaacagagatggaaaagcctcaccttataatctggaaatacacattcttgtagacacacatagagatagtgatgaaaatctgcacaaactaaaactagcctcaacacatttcaaagaatcaaaatcgcattagaccacatttaataaacactttttttattaaaaagaaacagggtcttactctggtcatctaggcgagagtacagggggtgcaatcatagcttactacggcagcctcgaactccggagacagcatatca

SEQ ID NO: 564777 - DNA, 424 bp, Homo sapiens
  misc_feature (1)..(1): n is a, c, g, or t
nccatgtagcggtatggcagcaagtcaactggcaacgtcactaattgcattaaatgtcatagtctatcatccctcaatgccaagatctggatcgtcatgttagaattgaaatcgaggtcactatattagtggccatgagaatctctctgtaagtgctcggcacgccttagttattcatagtaaaggaaaaggcttctacacgctgtgctatgtcataaagcacgatcaagtgccaatagtaatgcagaggtaggctttagagcaaggtgctgtcaataggtaagatcgtttcatgatgataagttcatgacgttggattagccatagatttcttagacgcgccattatgtgcatcatgtatcaagtcggcattaatacattggactcagccttgattaagagcatagttcagtgtaggtggagc

SEQ ID NO: 564778 - DNA, 800 bp, Homo sapiens
tttttggttgttggctgtttttgttattaaaggtgagttctcactatgtttctcagactggtctcgaacctcctggcctcaagccatcttcccgcctcagcctctcaaatagctgggcttacaggcatgagccaccaacctggcaggatggggttgttaaatataaatctgatcacccccctgcttagaccccttctgctttctattacccctcatttaaaatgtaaactcttcaccttggttatgagaccgtggttcttgccttccccttgaacctcattaaatggtgatttcttgctaagctccagcccgagtggtctcctctcagcttctactttaggtgctctttcctgccctttatcctggggcacttctacagggtctccacccacaccagtcttgactcaggtggtgtccttcttcctcaagtcttgacaatatcccgggacccttcagtccctgagcagtactattctgtgtctgtcaccagatcttgtctttgcccctcatggacattaatgcaggtaatataatatgctacttacgtacttatccattctgtctcccctaccagcgctgtaaatgaggtgcagacaccttgttggttaaatacaccataatgtaccaggtgcttgcacaaataacgggcctttcataaaatgtgcgtcgcataacacgcgggcaagaacgccaagcaccttagttagcatcgtacttttgactaacgtgtcctttggacatataccgggcttaatattgactttgaccccagtggttggtaatccacggcatctagacct

SEQ ID NO: 564779 - DNA, 691 bp, Homo sapiens
  misc_feature (368)..(368): n is a, c, g, or t
  misc_feature (448)..(448): n is a, c, g, or t
  misc_feature (451)..(451): n is a, c, g, or t
  misc_feature (458)..(458): n is a, c, g, or t
  misc_feature (480)..(480): n is a, c, g, or t
  misc_feature (590)..(590): n is a, c, g, or t
  misc_feature (597)..(598): n is a, c, g, or t
aggaaagtgtttagatcgctcagaggtcctgcatcaagtattcatctccaattgtgactccagtaaaacgactcaaaaatgggaaatgaataacatccatagtgtttagagagaaaaaaataaaccaataacctacctactgacaagtaaatttatacaggactgaaaaccgcctgaaaccctgcgtgggctaaactattgttattaactctgtatagctccaaacctggaacctcctgatcagtttgaaggacattgataaactgtgattttacaataacattatcatctgcaggtttttttttttaaaccttgggttttttacaagactgcttttaccttaaactttgtagatgtttacatctttntgtgtgttttaagatgatgttggtaatttgtgcctttagctctgttttattagacagagttaaagcatgttgtctctccnttntttgggngggggggggggaaaaaaaaaantttttttttttttaaaaaaaccaaaaacttttccaaaggggggggcctccttggaaaagggcagtttgatttttatttttaacacacttgaaaaaaggtggagtagccangactttnntcatatataacttggtgattatcaacctgtgtgtctttatttaactttttttaaacaaattttcctttttttttggaaaaaggggcccaaaat

SEQ ID NO: 564780 - DNA, 146 bp, Homo sapiens
  misc_feature (13)..(13): n is a, c, g, or t
accgtaatattancaaaaacactttactccaaagctattgaaataaaatatataatttaaaaacttataaataaaaatatataggtcatataactttattattttcatgagtaacaggcaaataaatgtttatgttgaatatccat

SEQ ID NO: 564781 - DNA, 402 bp, Homo sapiens
  misc_feature (214)..(214): n is a, c, g, or t
  misc_feature (288)..(288): n is a, c, g, or t
gtgcccccgtgggtatctccttccgcccgctggcgacgcaccggccccgacggttgctgtggttggccgacgctgtctccccgcagggacagatcgtcatcacagacggagctgtcgaagctgcgacgcagcgtcattcctcgttgttggcggtgggtgtgactcgggtacacggggatttccaagcaggcgacccagtgacgatcctggcctncgacggtcgagttgttggtcgcggtatcgcccagttctcccatgatgaggtgcgcgtcatgaggggacgttcgngtgcctggctggccgcagaaatgggcccggcggcctctcgcgagatcatccaccgcgatgccatggtgctgagtcgtcgtcgtaaagctgagccgtcatcgaagaaccaattag

SEQ ID NO: 564782 - DNA, 382 bp, Homo sapiens
tggtaccctcgctgtcgctgggattggggcatgcaccagcacgcccagtaatttgtgttttggggggagatggggtttctccatgtgggtcaggctggtctcgaactcccatcctcaggtgatccccccgcaacctctgcctcccaaagtgctgggattacaagcttgagccactgcacccagcctggaccagcttttaatagatggatctttagaagagaatgtgtgtggagggtctttcctggtagggttttttagctcaagagctccctctcctgtcgtcatagtgtgcctttcttgtagtcgaagtctctgattttcctagtgtttttttcagggggatacttattaccaggaatattgattttttttgccagggcca

SEQ ID NO: 564783 - DNA, 276 bp, Homo sapiens
  misc_feature (13)..(13): n is a, c, g, or t
  misc_feature (29)..(29): n is a, c, g, or t
  misc_feature (142)..(142): n is a, c, g, or t
  misc_feature (198)..(198): n is a, c, g, or t
  misc_feature (204)..(204): n is a, c, g, or t
  misc_feature (219)..(219): n is a, c, g, or t
  misc_feature (230)..(230): n is a, c, g, or t
  misc_feature (239)..(239): n is a, c, g, or t
tttgatcttcatncctgggtctgccgcangacccccatctctgtgacttcctggagactcacttcctagatgagaagtaaggcttataagaagatggtgccacctgccaacctccacaggctgggtggcggaggtgggtggngagtatctcttcgaaaggctactctaagcacgactaagagccttctgagcccagcncttctnagggcccttgaaagnataggcttctnctaagctancctccagcaataggagcttcttacttcctaacaagcc

SEQ ID NO: 564784 - DNA, 1265 bp, Homo sapiens
agcggggggtgccaatggggtgcacctggggaatcacggttgaaaacacactgatttcatagtcctagaaaggggctttcttgggtgaggaacatggagagacagggggatcaagacacggaccgactgtgctcctggccagcctaaaacacacgggttggggctgctgttttgtctcaagctgaactccccctaagactgggacagacggcggggacacgacgagactggaagacggaccacgcaagcagacaactgggacagcacgaactaaagacttctcgtctctccccctcccttcttcctgcttccaactattcttgtccatcattatatgctgtctctgatgggtcttcctaaatatgggaccccagctccacggcatggcaacaggacccaagttccaaatgctcagtggatcctacacaccagacactcaagagtcatgatccctactgagccatacggatggctggctgattgacaagattcttgaggagaccctgaagcacccagacaatttccgcgttccccgagaacgcacgcaacacgctggagttatccttttcattgactaacacgacagtatgagatgacagataagtggtagagcaagtacgactccaagatagataagtagcctggcagtaaggttcacattacacaagcacagtggtagacacaccaacgcggttcttgataacactcgtactatggggcaggcaaaatataccaaccaatttaacagtggcttattaggcaatccccgtgggaattcgcttttaaaaaccatacacagtcaggatacatttacatttgaaccaagaatacaatataacattagtattttggggagcccacggtgggaccacacaataggaagttgacaacgattggagagaataagcggggaggataaaaaggaagacagagacaggcaccatggtgatgggaccgttagcagccggggagcatggaacagcaagcgcaaagacagacaaggcagtaggggacaccgaccagcggcaggacgaagcaccgacagcaaggaaaagagcgaccgcaacaccgcgaacagaaacagggaagacggcagaaaacgtcgaaaggcggccaccaggagaaacaaaccagtgaaagggaacacgaacccaaaagcaggggcagcacacccgaaggagacggtaaagagcacagaaaagaacgacaagaagcagcaaaaacgcggcgaaaaggagggcacacccagcagggggaacgagaag

SEQ ID NO: 564785 - DNA, 424 bp, Homo sapiens
tttttttttcttcttttccccaagagtaaactattttcttcatggcaaatctctatcctaacaccaacaataccaccatcttcacaatccaactccataaactgatttgcttttgattgctgcctccaaagagagtctatataagatctagacaacgacaggttgaagagaactggaataaattcctgggatgaacctggttcctgggtatacaggatttctgaacttcacattgttttacccatcacagaattttgactattaagtgacagctgaattattgcagtgtcacagagtaactcagcaggatttaggattatgaaaacatttgtatcacttattagttaaatagcatttaaaaattaaacaactgatttgacaaatacggatgtagttgcccaatatagataatttttaagcgtta

SEQ ID NO: 564786 - DNA, 753 bp, Homo sapiens
  misc_feature (3)..(3): n is a, c, g, or t
  misc_feature (70)..(70): n is a, c, g, or t
  misc_feature (93)..(93): n is a, c, g, or t
  misc_feature (109)..(109): n is a, c, g, or t
  misc_feature (114)..(114): n is a, c, g, or t
  misc_feature (147)..(149): n is a, c, g, or t
  misc_feature (152)..(152): n is a, c, g, or t
  misc_feature (154)..(154): n is a, c, g, or t
  misc_feature (171)..(171): n is a, c, g, or t
  misc_feature (189)..(189): n is a, c, g, or t
  misc_feature (208)..(208): n is a, c, g, or t
  misc_feature (306)..(306): n is a, c, g, or t
  misc_feature (314)..(314): n is a, c, g, or t
  misc_feature (319)..(319): n is a, c, g, or t
  misc_feature (322)..(322): n is a, c, g, or t
  misc_feature (337)..(337): n is a, c, g, or t
  misc_feature (361)..(361): n is a, c, g, or t
  misc_feature (367)..(367): n is a, c, g, or t
  misc_feature (376)..(378): n is a, c, g, or t
  misc_feature (383)..(383): n is a, c, g, or t
  misc_feature (388)..(388): n is a, c, g, or t
  misc_feature (411)..(411): n is a, c, g, or t
  misc_feature (418)..(418): n is a, c, g, or t
  misc_feature (422)..(423): n is a, c, g, or t
  misc_feature (432)..(432): n is a, c, g, or t
  misc_feature (435)..(435): n is a, c, g, or t
  misc_feature (445)..(445): n is a, c, g, or t
  misc_feature (451)..(451): n is a, c, g, or t
  misc_feature (459)..(459): n is a, c, g, or t
  misc_feature (461)..(462): n is a, c, g, or t
  misc_feature (464)..(464): n is a, c, g, or t
  misc_feature (469)..(469): n is a, c, g, or t
  misc_feature (493)..(495): n is a, c, g, or t
  misc_feature (500)..(500): n is a, c, g, or t
  misc_feature (512)..(512): n is a, c, g, or t
  misc_feature (574)..(574): n is a, c, g, or t
  misc_feature (576)..(576): n is a, c, g, or t
  misc_feature (578)..(579): n is a, c, g, or t
ganctcaaatatatcaaaatgcacaaagcactagtcttcctccattaccgcttagaaagatatgattgtntctccatttacaaaatagaatcnggacaatttaaatttnccccnttttgcatgcaaaacactgcaattgcttatttnnnccngngggcactctcaccagcntcttctatacacaattgngtatacaatattgcatggnagaaaacagcagctcaactgaaatattagaaaaaaaaatcaaacagatacatacagatttaaaatccagtacttgggaaaagatatcaatgaataaanggcctacnccccngcngcttccacacactgnacctacctactacctctcttccgngcttancccggtttnnncaggngagcnatgcgtagaagaactacttgggntattcangtgnngtatttgancgntaagcctatngataanagtctggngnngnccggnggactttgttagtacactactatnnncgggnaaactacctgtntgtacttgatatagtgcatatgacatgcctgatttaatacaaaactacagaacatgcaaaantntnnctgagatgttaagtattacttcagtggagaacaaaacttacttaacctttcgctaatgcatgtagtaccagaaagcaaacatggttttagcttcctttactcaaaatatgaacattaagtgttgtgaatttgtctgccaagtggttcagaaatacattataaataacctagtta

SEQ ID NO: 564787 - DNA, 226 bp, Homo sapiens
tgatgatctagaggatcccatggtagctctgtctggtttggtggagatatcaactagaagaacagagattgggctggtttttcagtccgggggtgcagtgttgcaccttgtactgggaaaatttaggacgtggtttcattcttggagtctcatgttcaagtgggttttaatgttatgaagacactggggacgtaatcctgagggcagctggggggaaggaagtggt

SEQ ID NO: 564788 - DNA, 827 bp, Homo sapiens
aggatcacttgagtttgacatcagcctaggctgagacctcatctctacaaaaagtagtgtgagacctcatctctacaaaaaatacaaaaattagtcaggcatggtggtgcacctgtagtcccagccacttggaaggatgaggtgggaagatcacttgagcccaggcaggttgaggttgcagcagtgagccatgattgcaccattgcactccagtctgagcaataatagcagcaagactctgtctcaaacaacacacagctgctcatgggcaaggcatgtactttttaccttccaggagttccggttttaaacaaaaatgacagaaagtatactcagagtccttctactctacacacgggaccaagcactagtccgaccgtgcactagaccaggtcaccaccagcatttgatgaactaccacaacgtacgacaactgtgacctgcccagaaaagctctggctctggcaccgggcgatacgccgcagtacacccaaataactgcggcggtcccgacgtctcacctcttggcccaccatgaccaccgtccccgggccactggactggcgtctgcatcgctacaccactgtcgcttacggccatgtgaacgattctaaaacgggtccggcctgactaccatccacgtacatgctgccatccaccctaccactcaacaaacaggcttacacagcatagcccaattacaacctccgcccctatgtggcacgcaccctccctactaatacctaacgatcctcccatcggcggacgcgtcagcttccaccacattgggcgtgaagcacagcgcggcagagcacccggcaagcacc

SEQ ID NO: 564789 - DNA, 91 bp, Homo sapiens
ggcacctgcgtcctactttcacagggagcattgtcaagttcttaggaatcttaactatcatatttcagcaagagcagttctctaatttagt

SEQ ID NO: 564790 - DNA, 269 bp, Homo sapiens
tggactccagcctgggtgacagtgagactctgtctctaagaaaattacaaaaattacaaaaataaacacagcataacaactatttatatagcatttacattgtgttaggcattataagtaattaggtgtcttttgggtgggggtagtacatcctggaaccagtatctcatggatacctagggacaacgtccctactgacatgaagacgttgagcatctttacatgggcataggggccagatgcatatatgattaggagaagtatctatg

SEQ ID NO: 564791 - DNA, 115 bp, Homo sapiens
tctagagatcccttttcagtgaggcgttgtcagtgtgttggttagtaggcctagtatgaggagcgttatggagtggaagtgaaatcactgacaactggctcactgacaacggact

SEQ ID NO: 564792 - DNA, 436 bp, Homo sapiens
cataagtctacagtttgggaatctgctcttgtgttgaaatgaaatctagtgccaacagtgactgcacatagaggtgtggtaaatggtctgtaacggagaagtgcactagtgtgagggtatatggaactggagatgttggtccactgtaccttgggactgcccttgattcatttcaacttggtacatttgtgacttgtgctccagctgtgtggtgttctgggtgtaagcttgccttgtgagccccccaggcatgttggaatttccagtgtattgtttggaggtcatttgattggagagattgggttgatactgaagaattgatggcagtgatgcctcattacgttttagatgggattccgcttggtgaaaacgaggggccttcaattcaatccatcctggtttcagatagtgctgtgttgggggcacaaaatccccg

SEQ ID NO: 564793 - DNA, 378 bp, Homo sapiens
gaaaagctcaaggcatatcaatatattagtaataaaactagtttaagagcgacttttgaattcctctcagtctacatgagtaggtattcactatcaataaggacagattaagcttatggatttcccaacttaaagagcatgccttcctgtctctttagtgcctttatgcattaaaggaatgcaaagggaaaaaatgttgaatagtcctgagaaaagtgaggactgcctgttatgagcctatctttgttctctctcatacataattttaacctccatgttggcctctacagttttggttaagtcagtggatttgaccagtgtggttattttcattatgaaccaaataaaatctatgtacatttgcatatgaaaaaacaa

SEQ ID NO: 564794 - DNA, 486 bp, Homo sapiens
agtaaaagaaaaaaaaagaaagacgaagacacaaagaaatacaacaccaaaaactaaacacaattccaatccttttctggtacctcacgcgcataaattggctgctcctattttttttactggttatgtgtataagggatctaagttaaatctttgggcaatatataaaaatgtaaatagtaaactttatttattaagaatgtcatcctttttaatttataattacacaatggtccatctaaattaatttttcctatacagttttaaatactccagaatattttgcggtccatgatttttttatccggtcccccaatggatttgtttcccccattacggtttcctcttgatcctccaattcaccaggttggttctcacaaattaattaatgtccgagaccgaaattattttgccactgttgattactatactttaaagttctatattatgaaaatatataatagcttgtacgctggaatggaattg

SEQ ID NO: 564795 - DNA, 126 bp, Homo sapiens
  misc_feature (5)..(5): n is a, c, g, or t
tgtantagcaagctcattctggtcatgagattagatattttaaaaaattcaaggccagcgtgtaggtggctcatagactagtaatacccagtcgtacttggagcgtcgaggcgggaggatcactat

SEQ ID NO: 564796 - DNA, 236 bp, Homo sapiens
gtgactctccaggggtcctaggcctcaactcctcccatagatactctcttctctcatagggtgttccagcatttgtttgcatccttgaaaatatccccggggtggggggtggggggtggggtcaagaaccctgccatcggaactggtttccctcatcatggaggtctgcttgaaatgccgccaatgggtcaggtagggggggaaacaggctcggatgggataaggactaagcacca

SEQ ID NO: 564797 - DNA, 598 bp, Homo sapiens
gttggtacagctgttggtttaacttgcacatttgtacatatacttaatgttttcaagtgccttaattgtttaaaatctctggcttcaaagtttctgggggaaaggtcggttaacctcacattttttgtgtttccattagtaatattctaggtacctcacaaaatgtattcatggtgccatggctgtaagttttaagtgagtgctgtaaggattaaattcgaaaaatagggcagaattcctgattccttccaaggtgcaaaaatagctatactgatgtatgtcatttacctggtatgaatccctgacacacatcatgtcaatatgtagcaaatttggtgaaaacataaaattgaagcttctgtaattttggagcatgttaaaaaaagcataatataaaatagtagatttgcagtctaaatgagtctgaaagatcaagctttatttttcctaattagcaatgatatttggccatatttgggttttaaatcaaggattagaactttagatttattgttgtctgagaagtctctataaatactattactaagatttgtgcagcgattgggtttagattcattcagtctaaatgaacattgtt

SEQ ID NO: 564798 - DNA, 1636 bp, Homo sapiens
atcgctccctcgtgagtgtgagtacctgtgtgtttggttgttcgtcggcttcgtgagtgtcgtggtatgtatttagctggccgctggtgctccttctcctggattcgaccgtcctgtttttttttagatggtggggtcctgtccacgtggcgggtgagtgtctttctttttgttaattgtattggaggcctttgtgtgtactatgcttcgttgttttgtgtttctgtctcagcgcggggggtggccgccccagctttggttgtgcgttcgattttgtttttttctcgcccctgcttggttggagtttcatctctcgtgtggtagtagatggttgttttcgtcctgttgtttgtgtgatacagccccgacggtggtgtgtgtgtgggtgtgtttgttgtgtctattcggcgtatgtcgttgggttgggtctagctaagtagtgggttggtattgttgttactgctctgctttgtatggtgtgtgtagttggttgtttgcttggggctgcctcctattattagcgccacccagagatagtggtgggtccgtttcttttttttgtgggaagctacttctctgtttggttgttttttcctcgcggatggttgctctcctcgggggggtgtaccgcccttctgcttcctcagctgatttttttgtgtgtggggtgttgctgcatctgcgctgcgcgggctggggtctccttgcttcttgtgtgtcgtcgactcttttgttggggggggcctcttcctcttgtctgcccgaccctagttctgcgttgtggtactcgttgttttgactccccctcgttgtcgcctcaatatgggtttgttgttgttccctctcctgtcttttttttctctggggtgcgagtcgagatatcccaccccctcgcgcgggggagtgtgggggtctctctttttcttgtgttgatatggacagcccacggtggccgcgcggggtgtgtgaatttctctgtcagagttttctcccccccgctctttctcaagggggtgtcgccatcgctctccgcctctgtgtggagagagaggagaatatctctctctctggggggcgaacctgtgtctctcacactcttgttctctctctcctcgtgttctccctcttttttgtaaatctatcttcatcttgtataaaaacacaccgctctttatataagaccctctcttcctctcttttagaggaggagaaatacaagcgggtgtctctttttattgttgtatgataagaacacgcgcgctcttcttatatattattttgtagaagaatacaccaccgtgtgtttgtaaatctctctcgctgttttgttgcgcgagagaagaatttctctcacatatatatctcctggttttgtgtgagatatgtctctcgcaagatgtttttgtgagaagagagagtttttctgtgggaaaacttctttttctttgtgcccccgctgggaaaaaccccaaaaatccaatgtttgtgtggtggacctgttgttatataacgctcaggtgttggtaagaaccatcttttgttttttagggttttttttttgtttctttttttggagagcaccacacacacacctctccccccaaagataaaaataaaagatttttaggggaaatta

SEQ ID NO: 564799 - DNA, 146 bp, Homo sapiens
actacctttatgtcccggaaaaagcactgtaatctgggaagcgaatggacttacgattgaaaaaattagcatctaggcttaaaaactgcctgggccttgaaagtctttaatagttactaatgttctctactactttaactgactct

SEQ ID NO: 564800 - DNA, 144 bp, Homo sapiens
tgtaattttttgtgagtcaggcttgaaaaacccttccccagttttgatcccttcaagactttgtcacagcctttgtcacacatctgtttttctcgaagaaaaaaatgtaattattaaaaatgttctactcttttgcgctgttga

SEQ ID NO: 564801 - DNA, 208 bp, Homo sapiens
ggcggtcgttgtggcactaaacactgcttacgggactctacgtctaacgacgactccggttcgtcctttactgttgtgtctggttctcactttgttgtgacggttacgtttgacttacgtccttgttgggtggtgacttacgtcggttgttgatgcgctctttggcggtggggctcaatcgcgggggccctagacctgctcagtactg

SEQ ID NO: 564802 - DNA, 262 bp, Homo sapiens
cgatacgtctggatctctctatgactcattcagtcgtacatactaggttggctaccgtgccgccgtttgccacaggtcgtgcttggaaaacccgtctggatatatataataatatagcccagctgtaactgtgacaggtccattgttcatattcgtgcagcaagtgagtatgcggagacactgggttgcagcagagaaaagaggtttaattgtagggttgccaaaacaggaaacaggaggaaccctcaaatccgcctcccag

SEQ ID NO: 564803 - DNA, 965 bp, Homo sapiens
gtgtcctctgttaaacatatctggggctcaagtcctggctccagccatatgctactgctggtatctgcttacagggtgagtactggctctgagacctcaatatcctcaatggttaaatggagaagtctatctcacttggagttgctgtaaaaagataaacaaggattataataatgtaagtacgtgcttatgctgaagttgttgacgacatatgtaaagcaccccaattgttatggtcattgttacgtagaataaagactccattggtaagaaaagagtatgcagaggtctatataaagtgtatcaagcattaatttttatcaatgagaataagggtgttattaaaatgtattcactctagatcatagtacaaatgacgaggaataggaatattacaggtgtgataagcacttatagtattatattgtattgacaaactacgctacatatgtgataaatactatgcaaattcgtgaacggtcttctaaaagtgggttgcagttatgccctgtttaaatcactatatcgctgattggaaataaattttacttggtaattgtctgtgattttggtacatcgctaataataatgactttatcgagtatatttctttgagtaggcaggcaccaggttgatgagtgctactgtgcttacgtattatcttcactagtactttgaagtgggtactgatgactgtgcagtaatgcggagatgggaaaactgaggcgaaagtttgactttgggggctcactctgagtctatgatattttccgaacggtgtcattccccggtgcagagattggcttccaactgcggtgcaataaacttctttgtgggtaccccgcccgggttttcccgctattataactgggctactacggggaaaacgcgaaactcccctcaacacaccggggaggggtccagaaaaaacaaggggggggaaaaaaacggcggaggggaaacac

SEQ ID NO: 564804 - DNA, 1090 bp, Homo sapiens
aggttccaacgctacttgaatttatggaaacgtttgtatttgctattaaacttcaaaactctacaaactgtaagacttgctactttaacgattcaaacccagactcccaggaagaaaaccattgcgagcaatgctcaatgtcactcagaacccttagcacacaggaaactggattactcttctggactactaacacccacccttcacaaaactttctgtcttgccactgcacgaaccttgaacttggggactctgctcctcccacacgcagctaacactacgcacgaatctcaccttacacaacttcttgacgcgcaccggctaccctttcccaagcctcatcaaccacctctgcaccctttgcacgttctcctctcgctgacacggctggcgaactgcttccaccccttccgcggagaacgctctgactctccactaacgacacacaaggaccaccgcctctgaccgttgcacacggccctccccaacatggcgcacaggcaagtccaacgctcggcgcgcagcaagccctttaatggcatattctcttccccaccttcaacatacccacgcacgtcgccacacagaaaagcacacatacgctccctgttcgtccgactttcacaagcgcctttttcaaccgaagcttctgcaaaacgcccctcccttggttaaacgccaacggccagacacaaccgaacctattcctgcttgggacgccccaaggcatttctgccggcgccacttaacaacggctggacaacggacaccccggccccaaaccttacaaccaaacttctggcaaacccccacacccttggaaaaaccccacgcctggtggcaacaccacgcacgcacccaagtctcaccctcacacatactcccccaacgcacccccacacgccgtctgggtctcaattcccaagcgctcgcgccacccaacaattttcaacaattccccagctcctttcggcacaaccaaccttttccgaacccccactcctcacaatcctccgccgtcgaaaaccgacaacctctttggaccaattctccctttttagagcacagcaccttctactcggacccctcc

SEQ ID NO: 564805 - DNA, 402 bp, Homo sapiens
gtgatctattaagggatggtacacttaaaaagtcatgagacatttctgttcttgtaataaatacacggtcagtgggcaattattactcattagtagcttgtttgatgataggctatgaagtctgcccttgcttccttcttgttaatgccgacaaagatcatttatgttccagggaatgtacttcttgggattctccaaatactccatcagtgtttcctctccccagatgatgccttagtgcttattgggggccgggttagagtagtccaggggactgaccagtattccgacgcaatgagaccatggtgatttggaccagtcttgtgcttgtgtcccttttcaacggtgctggcacaggagacacttcataataaaaatcttcttgcctttctcaacatcacc

SEQ ID NO: 564806 - DNA, 455 bp, Homo sapiens
gagtcaaatcagtcaggaagcagccaagaaagagtgctgcccctggggatttaaggaggtgatgagtgagtacagtgatgtgatctgactggagacaggtgaaggaaaaagaattcacccacactcagagacctttctagaaaaggagaagggaaacctccatttaggcaagaccaaagggaagatgaaaaaaaggatatgggccacattgaattctttttattgctgtccaatctagctgccagtctgtatcatctgcttcagacctcccaattttgtcttgagacccggccagagatggagatatcatgaagctgatgaagcttaagcttcagggctcccacttgcgcaggccccttgtaagtcccaggagggccctaacactgagttcacaaggttatatcctttttgcgaaatttgtgaaagattacttttcttaatgagacttacctcac

SEQ ID NO: 564807 - DNA, 216 bp, Homo sapiens
cagtggggcaacacaggccacgaaggcactagagagaagtcacgaaggcttctcctacttaatacgtgcttcctaatccaaacatgttttagagcggcaattccccagtcgtgttcgtcacaccactgcgtggaggtactgtgctcttccagggcaggggtcggcacaattttttcagacgtctgaaaccccagctacaacacaggacgaagtatc

SEQ ID NO: 564808 - DNA, 651 bp, Homo sapiens
tccccctgaaagcccttgcccttaattgggccacaggggtgacggaaagcaaacaaaccgtttggccttagtaaatggcgtgttggtctgaggacaaaatgtgcttaccagaagaacgccagccatatctccacactctcccctgtgaaatgtggtgtgcataaccaccctttcaacacccgtgggccttgtgggttctcatacacagcctctcttctccagggataacaagggggcgtccttgtgtctccccgccttgttacacctcacacccatgtggagggcaagtctccagtagagttccgtggttcttccccctagagacactataaccctcttagtctcacaaagagactcctcgtgagaattgctctcatctccatgtgggtgcggagtgtgggccaaggggtgtgagcagcgttttatttcccaacaaagagagatattacagtctcaaacaacccagcgagaagctcttggcccccaaagccccccttgctctgtgtctcgaacgtggtgcgtggtgttggggggccctccccgcgcccaaacccgagaatattgtgccgcagcacgaggccttgttcttttgggtgcacacgagtatttttttatttcctcttttttctttccgagaaattcggggcaggc

SEQ ID NO: 564809 - DNA, 217 bp, Homo sapiens
  misc_feature (167)..(167): n is a, c, g, or t
ggagagcatacagacgatcctgccaaatgtacctgcttctagaaaaaaggaacttcggagcagtctagagcaggacagtgatccacagcacaatggacgatatttccatccagagcagggtactttacatggataaagaaaataagccattacaggaaaatagtctncgtctcacacagcagattggctttcttagagcgaattataaggagcatcc

SEQ ID NO: 564810 - DNA, 100 bp, Homo sapiens
ggacaacacgtttccaagaagatcaagttgtacataagcagctagcaggcatttcttatcaaagaggattggatcaagtaatcaataagttcctactggg

SEQ ID NO: 564811 - DNA, 812 bp, Homo sapiens
gaagcacccgggcaccaacggacctggcggctggcagtcgcacagtgggccccagctgccggccccgcaggcccagccccagacgtcagagaccggcggcggcgtgtcgggccaggaccgctattacagggccacatcgatcaggcctgcctcctccctgccctctgtcccgtccctggaagtacactctggggtcccgcctggcgcaatgggtctggtgccgttgaggaggccgatggcgtgagggtggcgcgtacgggccttgcttggctccatgcctggcttgatgccccctggtgctgcgtggctgcttgcgagtgtctggccgtgggcaagccgaggccgtgacggctggcacccggcttgagtcctgcccgtcccctcttcggctccgatttcgagaaagagcatagcatgcacgaggaatgcggactgtctaggcacgaacttgaactgaggccatgcgaggccggtgcagaggaatggcacgggcgcccacaaatgccagtgcgggaacagctacgtggcgctgtccgcctgcgccccgttcaatgctgcgcttcaagaaggatcacgggctggtggggcgagtgttcgccttcgatgctactgcccgtcctccaggatacgacgttcagagctgaacgctcttcaccgaagtaccccttgtggttccggcaatgtgtacgccggcgtcctggcagatggctcgccagatgttccacgatgctctgcgggagccgggcaaggcactgggattcttcgggcttcaaggtacctcgacatatgaacgccggcatggatcaggagac

SEQ ID NO: 564812 - DNA, 124 bp, Homo sapiens
gcttagagtccttagacccgctcggcttaacgttctgttgattttgctactaccaccaagattgcgctgtgcggtcgcccggccgcgcctaggttcaggctcgccgtagcgtggtgttgcgggt

SEQ ID NO: 564813 - DNA, 246 bp, Homo sapiens
ggatcttatgctcagtgatctcccgctcagcttaaaagtgtgacaggtgtgagcacgtgctggcagaacatcactttaaaaactctccaggcatggttcctgaacatgtttgaaatcatttgacgattgacatgtgaaaggaacagttaattggttgggggtttttgaagaacgaaagtgaaaggtaagaaggttttggcttaaaatttaaggggttaaaggtttctgtaactcttaattactaaa

SEQ ID NO: 564814 - DNA, 725 bp, Homo sapiens
  misc_feature (18)..(18): n is a, c, g, or t
  misc_feature (116)..(116): n is a, c, g, or t
  misc_feature (638)..(638): n is a, c, g, or t
  misc_feature (690)..(690): n is a, c, g, or t
  misc_feature (716)..(716): n is a, c, g, or t
tatagacgtcttaagccnaatcgccaccagcgccggctccatgaaatatgttgttcctcctcctggactattttttcctgtggtcaagagtacacaaacagaagtaccactgtctntcggagtactctctttcgttttgaacctttctaaattctttcctctacattctaagaactaaacgtgtctacatcgacgatctccttaactataggtgccacaaggaatacaatatttacagtgagacgggctacttttcgttttgatgcatgtagcttaaccgtctcatccttctcgactttcctacccagaccgttaaagggaccaccgttgtctttttcttttccaaaccatggacgggcccgccggcgagctttcggcttaaggtcgtgtgaccgccggcaatgatcacctaggctcgagccatggttcgaaccgcattagtaccagtatcgacaaaggacacactttaacaataggcgagtgttaaggtgtgttgtatgctcggccttcgtatttcacatttcgaccccacgattactcactcgttgagtgtaattaacgcaacgcgagtgacgggcgaaaggtcagccctttggacagcacggtcgacgtaattacttagccggttgcgcgccccntctccgccaaacgcataacccgcgagaaggcgaaggagcgagtgactgagcncgcgagccagcaagccgacgccgcgngccacatgt

SEQ ID NO: 564815 - DNA, 149 bp, Homo sapiens
gcacgatctttgcagtctccatcactagtgttgtaatatagtatcttattcttttttttcttttttcttgagatggagtctcagctctgtcacctcaggcgtgtagcaaaattcagtctccaacacaataaaaatcaaaaaataagaag

SEQ ID NO: 564816 - DNA, 451 bp, Homo sapiens
  misc_feature (364)..(364): n is a, c, g, or t
  misc_feature (416)..(416): n is a, c, g, or t
  misc_feature (442)..(442): n is a, c, g, or t
taatatgttaaccgtctggtttacagggtaggcaaaaccgaagtacagtgacacttagtgactacttaagcgccggcggacgtccagctggtataccctctcgagggttgcgcaacctacgtatcgaactcataagatatcacagtggatttatcgaaccgcattagtaccagtatcgacaaaggacacactttaacaataggcgagtgttaaggtgtgttgtatgctcggccttcgtatttcacatttcgaccccacgattactcactcgttgagtgtaattaacgcaacgcgagtgacgggcgaaaggtcagccctttggacagcacggtcgacgtaattacttagccggttgcgcgccccntctccgccaaacgcataacccgcgagaaggcgaaggagcgagtgactgagcncgcgagccagcaagccgacgccgcgngccacatgt

SEQ ID NO: 564817 - DNA, 1516 bp, Homo sapiens
gtgggcggacgcgtgggtgaaaagccatctttgcattgttcctcatccgactccttgctcgacgcagccgcctccgccgcgcgcctccatccgaacgcacgacggactccggcagcttatatctgccagagtccctgaactctcgactttactttttaatcccctgcatcggatcaccggcgtgccccaccatgtcagacgcagccgtagacaccagctccgaaatcaccaccaaggacttaaacggagaagaaggaagtagtggacagcaggcagacaacatggcacagagacgcccctgctaacgggcaatgctccatgcaggcaacacatggggcagccaggcaggctgcacaatgcaggctagcacgcaacgcaagcaggcacagcaagtgtgccggcgcaggccaagccagggcagagcgcaggcacaccaacccaaaggtgcaaaaggacgccagagccacagcacgacatgcgccgccattgcaacagcatcgcagcgcccagccccgcaactccaccctcaccggcgcccacagacggcgcccagccatggcaccggacatgcactgcacgcgactgaaccgcacctgataccgaactcaccccacaggcaacgcccagcaaacgaaccccggaccgacagagcacactgcacctcacgaaccaacggccacacacaagcgacaccacaacccacaccacccacggcgagcgtgcacccgcagccccaacccaagtgtcatgacaacaccacatccacggacatggcagtgcgcgccccacaacacacggcagtcaacaccagccgcaggtaaacaccaacagcaagagcacagtacaacactctacggagacaaacccgacaacacagatcaggaggaacgccacccccaacaagaaagatgaccgaaacagagcaccagagaaacatgtacgcacaaaccaggtccagtaatagagcacaacaactagcagacgcagaacccacggtacgaagccacaacaaccgcgacgatcaagtaagcaaatcttctgacatcaacacgacaaccacactgtccacaccaacacacactccttcatccaacaccacctacccactcacgataacatcaacaacagaaccacctcttatctacacctactcacccacttcactcctcaccctacatcagcacacacacatctctatgcgggtcaacaccaacctcgaaccagcaatcaaccaccatcacaccagacatacccacgcaagccaccacgacaagacggcgcgcagccacacatgacctaagcatccccgaatcaacacggcggtaccatacacgctacatactcacacccaatcaacctccagcaacaccactagccgatcccgtgaatgcctccgaaatagaagaaccatgacgaacgccaccactacgggacactcatgcatagactaccgaacaagcacacaccaacacccagcgcaccacagacgcaggcaccaaaccaccccagccccgac

SEQ ID NO: 564818 - DNA, 178 bp, Homo sapiens
ctgtgtgatttggctggatctttcccaagacattcggggcgaccggaggagggcagagcccacctttttcgtgaagtccagtccatgcctgtaccctagcaaggcttatggtggacagaagggaagggaagaggaaaggaaggggtgcatgccgccggagtactggccgtcctttcac

SEQ ID NO: 564819 - DNA, 499 bp, Homo sapiens
  misc_feature (256)..(256): n is a, c, g, or t
attttcatcgtggcaggtcttgcggccttggtagcttgcttctggtatggccatcagaatgtcacagacctttataaccctttgattcctaccaacattaagtatgagtttggccctgccatctttattggcttggcaaggtttgccctaattattcttggaagggcactgttttctggttcctgtcctggaaatgaaacaaaggttgggtaccgtgcaccccgcttttaccctaagtccaactcttccaaggagntatgtgtgacctgggatctccttgccccagcctgacaggctatgggagtgtttaaatgcctgaaagggcctggggttgagctcagcctgtgggcagggtgccggacaaaggcttcttggtcattttgtccctgcactccatgaaaagtctttttgggttgggggtgggggggtcccgttggtggaaaaaacaaaaaaagggagagtgtgctttttgtccagtaataaaaaataagttttggga

SEQ ID NO: 564820 - DNA, 861 bp, Homo sapiens
gaacagatgctcactgcgccgcaccagatgcggagaacgcatcgtgagtgatgctggcggggctttgtcagcgagtggagtacgtgcagcacaaactctcacggacgaggagctggtgactggaagaggcggcgacagattgccatgcaattggaggcctccgaccaacatctgcctagatcggttagaaaactggataacgtccttgagcgagaatctcaaacttctagacccgtcgaactaaattaagaaactgtgaggagttgcaggcaaaaagttctcctacaaaggggaccccattgtacagcaccggccgatgctggaggagagcaatcgtggagctgtgtagaaacttaatgacaagtgcttcgtggtgtggagcggcgggccctgatgcccgagtgcatccctgaccggcgcctcgtcatcaagaccggcgtgcagttcactactaaagtcaggtggctggtcaaattccctgagtagaattatcaggttatgattaaagtgtggattgaaaggactctggggacgtggcagctctcagaggatcccggaaattaacatgctgggcacaaacgacgagcagtgtgaaccttgggagaatccacaaacggagctctctggggaatggaaacttgacctgaggagcgaaatgtgcgactgggggccgagccaatggagggtcctgattgggacgacgacgtggccgtcccttgggacgagggtcaccaggcagatgcctaagacccctgccatgtgtcccctgcatgagccgggcgccttggaaggccagcaaagattccccaatagggccagcacccgagggccaaaacttcgtaagggcttcagggccaccca

SEQ ID NO: 564821 - DNA, 895 bp, Homo sapiens
cacctcccaggcggcgacgcggccccggcgcgctatctgggcgaggtgaccggtcccgcgacctggagacgctcgcgagaaagcggtagctagtgcgactcctgcagcgcgcggcagggccagccgcgagccggacgccaccgagctaggcccgggagcatgcagtggggccaggtagcagtaggctgagaatccggtgttcttccgtcctaggctagactcaaggtgcacgcagttaggcccggggaggccattactagtaatagttgccatccggtgtggcctttcacggatccaaggactgcctgtggaaggcaatctagcctccccgagcccccatagaggtctggacggagtctggctagagaagataacaagggccactggaagaagccctggcagtggctttctcgcaggtgctcagccatcgcggccacggaaccggtcacccctcctgcagctctcaagccgccctccaagccacagtggcaggcccgtggaaagcctttgctcctgacgtcgcccctggacggacaggaagaccccgcccctgagatacctagctctgccccatggtgaacctagctccggacccatggactcctgaccctgcgcctgagaaaccgtgctgagtcgtcggatggtctgctccaactggggaaagagtttgccgtgttgggactttgaggaacgattctacaaggtcctttgttctctggtctcccggaagtgggcggagcccaagctctaggcaggatgaggcgctggggactcgaccctgggtgcatttccgaagagctgcatcttggttgagagccggtgagtttaagggggttcaacttcgcccacgccttccgtgggggagagcaaaggagggggcgccggaacccaggga

SEQ ID NO: 564822 - DNA, 516 bp, Homo sapiens
gcgctataaaaacttttataaaccccccggagcccgagcagtgtgaagaagaggcgagaacgacccccggaccgaccaaagcccgcgcgccgctgcatcccgcgtccagcacctacgtcccgctgccgtcgccgccgccaccatgcccaagagaaaggctgaaggggatgctaagggagataaagcaaaggtgaaggacgaaccacagagaagatccgcgaggttgtctgctaaacctgctcctccaaagccagagcccaagcctaaaaaggcccctgcaaagaagggagagaaggtacccaaagggaaaaagggaaaagctgatgctggcaaggaggggaataaccctgcagaaaatggagatgccaaaacagaccaggcacagaaagctgaaggtgctggagatgccaagtgaagtgtgtgcatttttgataactgtgtacttctggtgactgtacagtttgaaatactattttttatcaagttttataaaaatgcagaattttgttttacttt

SEQ ID NO: 564823 - DNA, 145 bp, Homo sapiens
gaaggtgcaatgaatagtaggtaaaaaagaattacaacttaaaaagaagagttagaatgagaagctaaaaaagggcgtacggaggatgcctaggtagtaaaagccgaagaaggacgtgataagctgcgaaaagcttgggggagat

SEQ ID NO: 564824 - DNA, 967 bp, Homo sapiens
aaggataaaaaccatcaggcccgagtgcctatccatagtccatctccagagtcttcctccagcaaacctgggattcatccccgctgaaaaagcagcaatctagacagcaagggaacaacaaaatcatgctatcagataatactatgatgaagcagagaaacacgagtcgagcgaacagccgatccatgacagggaagtcccactggtcagattgcatgtggcatggccatggtacctgggcaaaacaggtcagcatccccgagaggacatccatgttggaagaattgatcccatctcgagtcaaccgtggtgcccaggctatttaagatgcgtcaatagaagagctgacaaatactacatttgaaaatttccagtatctaatctaggagcgcaaatcacaatcacattatggcgatgcagaatgggaaagtggatggaagtaacgtgtggaaggtggtttcggaggcaagcccccttgactcttcccatacatgcctagatacacgaagccctccctgatccagacaaaaattgctccaggatattctggaccactgaaggaaaattcctcctgaaaaattcagacaacaacagttgtacctaagtactatcaaatctctctgggaaacaaggccattagcaatgatccggagctttagaggcttatatcctaacttttcaagctgagggaaaggagaatgcctgatacggagcttacagggtggcagccattgggggttcgcacacgttacgaagggatttaagtccgagttgagcaccgatgcaaagacccaggtatagtcctgtaatctcttgggacggctagaagacccaaggggggattggacacacctgaggaagccaccagactaagcacaaacacacgaaagtgtccaacatcagaagagttgaaacacgcgaattttgcacgtgtctctgctaccatatacaacaaaccagcttctcc

SEQ ID NO: 564825 - DNA, 135 bp, Homo sapiens
ggcccggtttgaaatttatttatgctaatatttttaaccagtcctttccaaatatgtggttttccaattctccctaaaggggtgtggccctaactgttcagtattgccataaaaaatatttttttttttgtggga

SEQ ID NO: 564826 - DNA, 507 bp, Homo sapiens
aaagaaaagacgaaagtaggcaggagaggcgggtggtggaagaggcgagaacgacccccggaccgaccaaagcccgcgcgccgctgcatcccgcgtccagcacctacgtcccgctgccgtcgccgccgccaccatgcccaagagaaaggctgaaggggatgctaagggagataaagcaaaggtgaaggacgaaccacagagaagatccgcgaggttgtctgctaaacctgctcctccaaagccagagcccaagcctaaaaaggcccctgcaaagaagggagagaaggtacccaaagggaaaaagggaaaagctgatgctggcaaggaggggaataaccctgcagaaaatggagatgccaaaacagaccaggcacagaaagctgaaggtgctggagatgccaagtgaagtgtgtgcatttttgataactgtgtacttctggtgactgtacagtttgaaatactattttttatcaagttttataaaaatgcagaattttgttttacttt

SEQ ID NO: 564827 - DNA, 514 bp, Homo sapiens
  misc_feature (18)..(18): n is a, c, g, or t
  misc_feature (30)..(30): n is a, c, g, or t
  misc_feature (43)..(43): n is a, c, g, or t
  misc_feature (63)..(63): n is a, c, g, or t
  misc_feature (70)..(70): n is a, c, g, or t
  misc_feature (89)..(89): n is a, c, g, or t
  misc_feature (94)..(94): n is a, c, g, or t
cccctgggttttcccggnccgaaatccgancccgtagcccaantgggacattgaatgggcctncggaaancccaacatcctagaagaancccancccacaaaaacttttgaggaggaggagaaaacttctcctacccctggtaccttttggttggttgtgggtggttttccttccagtcccattgtacctgatgttcacctttttccctctccttcctgcccaaaaaaagaaacctgctcctccaaagccagagcccaagcctaaaaaggcccctgcaaagaagggagagaaggtacccaaagggaaaaagggaaaagctgatgctggcaaggaggggaataaccctgcagaaaatggagatgccaaaacagaccaggcacagaaagctgaaggtgctggagatgccaagtgaagtgtgtgcatttttgataactgtgtacttctggtgactgtacagtttgaaatactattttttatcaagttttataaaaatgcagaattttgttttacttt

SEQ ID NO: 564828 - DNA, 720 bp, Homo sapiens
  misc_feature (3)..(3): n is a, c, g, or t
  misc_feature (54)..(54): n is a, c, g, or t
  misc_feature (90)..(90): n is a, c, g, or t
  misc_feature (98)..(98): n is a, c, g, or t
  misc_feature (112)..(112): n is a, c, g, or t
  misc_feature (568)..(568): n is a, c, g, or t
  misc_feature (571)..(572): n is a, c, g, or t
  misc_feature (577)..(577): n is a, c, g, or t
  misc_feature (579)..(579): n is a, c, g, or t
  misc_feature (581)..(582): n is a, c, g, or t
  misc_feature (585)..(585): n is a, c, g, or t
ctncaaagtgatttttttccccacaaaagttcaacacttaagctagactttcantgttaactttgccctaaaaagttaagacattctggntaaccatnacagtcacatgatntctgatgctatctggtctgttaataataaagtctttatttggatgtatttttcctcaattaaattacaggaaactggatataggatttcgttgcaacgctattaaagttccaaaccaggagtgtgcagcactggaaaaggagatcagtactaaaacttacaataaatatcagagaagccgttagtttttacagcatcgtctgcttaaaagctaagttgaccaggtgcataatttcccatcagtctgtccttgtagtaggcagggcaatttctgttttcatgatcggaatactcaaatatatccaaacatctttttaaaactttgatttatagctcctagaaagttatgttttttaatagtcactctactctaatcaggcctagctttgctcattttggagcctcactaaaataacagatttcagtatagccaagttcatcagaaagactcaaatanggnntgatnangnnatngaaactttcaccaagtcagtcctctctggttagtactctgatcgccgatcagatcataactccagttcagagatatctccgggtatatgtttcctgctatagctattcctgtagagctatcctgtaagctgttcc

SEQ ID NO: 564829 - DNA, 1749 bp, Homo sapiens
  misc_feature (1749)..(1749): n is a, c, g, or t
gcgctataaaaacttttataaaccccccggagcccgagcagtgtgaagaagaggcgagaacgacccccggaccgaccaaagcccgcgcgccgctgcatcccgcgtccagcacctacgtcccgctgccgtcgccgccgccaccatgcccaagagaaaggctgaaggggatgctaagggagataaagcaaaggtgaaggacgaaccacagagaagatccgcgaggttgtctgctaaacctgctcctccaaagccagagcccaagcctaaaaaggcccctgcaaagaagggagagaaggtacccaaagggaaaaagggaaaagctgatgctggcaaggaggggaataaccctgcagaaaatggagatgccaaaacagaccaggcacagaaagctgaaggtgctggagatgccaagtgaagtgtgtgcatttttgataactgtgtacttctggtgactgtacagtttgaaatactattttttatcaagttttataaaaatgcagaattttgttttacttttttttttttttaaaagctatgttgttagcacacagaacacttcattgttgttttggggggaaggggcatatgtcactaatagaatgtctccaaagctggattgatgtggagaaaacacctttcccttctagttttgagagacttcctcttggctcccaggaggagggattccctgactttgacacacatggccaccttggcacaaaagccttgtggtatagaaaaacaaatttgtttttatgtcctcttctccctttccatctttcagcatagacttaactcccttaagcccagacatctgttgagacctgacccctagtcattggttaccagtgtgtcaggcaatctggactttccagtgatgccactgagatggcacctgtcaaaagagcagtggttccatttctagattgtggatcttcagataaattctgccattttcatttcacttcctgaaagtcagggtcggcttgtgaaaagttgttaaacaacatgctaaatgtgaaatgtcaaccctcactctaaactttccctgttcagagcatcagatgaagacttcattgggttttatagtggctttctgatttttggtagtccattgaagaagggagtttgaaagttgttgtatactgttaacgattgtctgcccatgtcctgcctgaaataccatgattgtttatggaaagtatctttaataaagctggatacagtttggcttggaaaaaaaaaaaacaacaaaaaaaaaaaaaaaaaaaaaaaaagggggggggggaaaaaaaatcccccgagggggccaaatttacggttcccgggtttgctgtacaagggggccctagagagagggcaaatataacacagcaaaaggcgcggatataaacgggcggaggcggaaaagtggagcggagacctcggagaggaccctactcgggcgggggacatgtgggacctaccaagaaattaaggccaaggggaaacttacccgctcaagagggataccgcggtgaacccacggagagatcggtgggggcagacattgggccggggtgttattaagaatacaggcgaggtgtatattataataaaagagggggagatggttgagagatgaaggagagagcatcagaacagggagagagaagaataaagtcaaaaagggacgaggggaagaagaagagaaatgagaaaaaaagacagaataagacagtaaagagatgaagagtaaaacatatgtan

SEQ ID NO: 564830 - DNA, 1879 bp, Homo sapiens
gcgctataaaaacttttataaaccccccggagcccgagcagtgtgaagaagaggcgagaacgacccccggaccgaccaaagcccgcgcgccgctgcatcccgcgtccagcacctacgtcccgctgccgtcgccgccgccaccatgcccaagagaaaggctgaaggggatgctaagggagataaagcaaaggtgaaggacgaaccacagagaagatccgcgaggttgtctgctaaacctgctcctccaaagccagagcccaagcctaaaaaggcccctgcaaagaagggagagaaggtacccaaagggaaaaagggaaaagctgatgctggcaaggaggggaataaccctgcagaaaatggagatgccaaaacagaccaggcacagaaagctgaaggtgctggagatgccaagtgaagtgtgtgcatttttgataactgtgtacttctggtgactgtacagtttgaaatactattttttatcaagttttataaaaatgcagaattttgttttacttttttttttttttaaaagctatgttgttagcacacagaacacttcattgttgttttggggggaaggggcatatgtcactaatagaatgtctccaaagctggattgatgtggagaaaacacctttcccttctagttttgagagacttcctcttggctcccaggaggagggattccctgactttgacacacatggccaccttggcacaaaagccttgtggtatagaaaaacaaatttgtttttatgtcctcttctccctttccatctttcagcatagacttaactcccttaagcccagacatctgttgagacctgacccctagtcattggttaccagtgtgtcaggcaatctggactttccagtgatgccactgagatggcacctgtcaaaagagcagtggttccatttctagattgtggatcttcagataaattctgccattttcatttcacttcctgaaagtcagggtcggcttgtgaaaagttgttaaacaacatgctaaatgtgaaatgtcaaccctcactctaaactttccctgttcagagcatcagatgaagacttcattgggttttatagtggctttctgatttttggtagtccattgaagaagggagtttgaaagttgttgtatactgttaacgattgtctgcccatgtcctgcctgaaataccatgattgtttatggaaagtatctttaataaagctggatacagtttggcttggaaaaaaaaaaaacaacaaaaaaaaaaaaaaaaaaaaaaaaaaaaaaaaaaaaaaaaaaaaaaaaaaaaaaaaaaaaaaaaaaaaaaaaaaaaaaaaaaaaactttttcgcccccctagacaaattaaattttagtttgggctaatttaaaaaataagcaaaaaatgaaaataaatttgccaaatcgccctaaaatgaaggcaatataaaataaacggcctttgttaaaaaaacttgaaaaaagaaaaacccttgagttacccaaaataaatgggaataacaaatcccccttttgaaaaatagggaaaaaaaaaaaaagacctgaacaattggccataacaaaaaagaaccaaacccgaatgggtaaatgaaaaatgaagccgtaaatctttgcaaaaaaacacctaaaaatttttgtataattgccccaaattcgttttggtgtaaacacatttggaaaaaaaggcccatttttaaaaacctgggctcaaacacccaaaaggtaaaaaaccttttaaaaagcggaaggcccaataaaaaccatacccatattaatttttttgaggacaagggcccaaaggaattaaatgggacccaaaagggacccaccattaaaatttcaccgaaaaacccctaattggggg

SEQ ID NO: 564831 - DNA, 1740 bp, Homo sapiens
  misc_feature (1740)..(1740): n is a, c, g, or t
aaagaaaagacgaaagtaggcaggagaggcgggtggtggaagaggcgagaacgacccccggaccgaccaaagcccgcgcgccgctgcatcccgcgtccagcacctacgtcccgctgccgtcgccgccgccaccatgcccaagagaaaggctgaaggggatgctaagggagataaagcaaaggtgaaggacgaaccacagagaagatccgcgaggttgtctgctaaacctgctcctccaaagccagagcccaagcctaaaaaggcccctgcaaagaagggagagaaggtacccaaagggaaaaagggaaaagctgatgctggcaaggaggggaataaccctgcagaaaatggagatgccaaaacagaccaggcacagaaagctgaaggtgctggagatgccaagtgaagtgtgtgcatttttgataactgtgtacttctggtgactgtacagtttgaaatactattttttatcaagttttataaaaatgcagaattttgttttacttttttttttttttaaaagctatgttgttagcacacagaacacttcattgttgttttggggggaaggggcatatgtcactaatagaatgtctccaaagctggattgatgtggagaaaacacctttcccttctagttttgagagacttcctcttggctcccaggaggagggattccctgactttgacacacatggccaccttggcacaaaagccttgtggtatagaaaaacaaatttgtttttatgtcctcttctccctttccatctttcagcatagacttaactcccttaagcccagacatctgttgagacctgacccctagtcattggttaccagtgtgtcaggcaatctggactttccagtgatgccactgagatggcacctgtcaaaagagcagtggttccatttctagattgtggatcttcagataaattctgccattttcatttcacttcctgaaagtcagggtcggcttgtgaaaagttgttaaacaacatgctaaatgtgaaatgtcaaccctcactctaaactttccctgttcagagcatcagatgaagacttcattgggttttatagtggctttctgatttttggtagtccattgaagaagggagtttgaaagttgttgtatactgttaacgattgtctgcccatgtcctgcctgaaataccatgattgtttatggaaagtatctttaataaagctggatacagtttggcttggaaaaaaaaaaaacaacaaaaaaaaaaaaaaaaaaaaaaaaagggggggggggaaaaaaaatcccccgagggggccaaatttacggttcccgggtttgctgtacaagggggccctagagagagggcaaatataacacagcaaaaggcgcggatataaacgggcggaggcggaaaagtggagcggagacctcggagaggaccctactcgggcgggggacatgtgggacctaccaagaaattaaggccaaggggaaacttacccgctcaagagggataccgcggtgaacccacggagagatcggtgggggcagacattgggccggggtgttattaagaatacaggcgaggtgtatattataataaaagagggggagatggttgagagatgaaggagagagcatcagaacagggagagagaagaataaagtcaaaaagggacgaggggaagaagaagagaaatgagaaaaaaagacagaataagacagtaaagagatgaagagtaaaacatatgtan

SEQ ID NO: 564832 - DNA, 217 bp, Homo sapiens
  misc_feature (2)..(3): n is a, c, g, or t
annctgccgccgttacactgccgtcgttacactgccgcgtttacactgccgcgtttcactgccgcgtttacactgccgcgtttcactgccgcgtttaactgccgatgttacactgtccgctgttacactgtcctcgtttacactggcctgcgttttcactttccagtgttttatactttactttgttttacacttttcctttgtttatcactgttct

SEQ ID NO: 564833 - DNA, 2126 bp, Homo sapiens
  misc_feature (1803)..(1803): n is a, c, g, or t
  misc_feature (1809)..(1809): n is a, c, g, or t
  misc_feature (1811)..(1811): n is a, c, g, or t
gcgctataaaaacttttataaaccccccggagcccgagcagtgtgaagaagaggcgagaacgacccccggaccgaccaaagcccgcgcgccgctgcatcccgcgtccagcacctacgtcccgctgccgtcgccgccgccaccatgcccaagagaaaggctgaaggggatgctaagggagataaagcaaaggtgaaggacgaaccacagagaagatccgcgaggttgtctgctaaacctgctcctccaaagccagagcccaagcctaaaaaggcccctgcaaagaagggagagaaggtacccaaagggaaaaagggaaaagctgatgctggcaaggaggggaataaccctgcagaaaatggagatgccaaaacagaccaggcacagaaagctgaaggtgctggagatgccaagtgaagtgtgtgcatttttgataactgtgtacttctggtgactgtacagtttgaaatactattttttatcaagttttataaaaatgcagaattttgttttacttttttttttttttaaaagctatgttgttagcacacagaacacttcattgttgttttggggggaaggggcatatgtcactaatagaatgtctccaaagctggattgatgtggagaaaacacctttcccttctagttttgagagacttcctcttggctcccaggaggagggattccctgactttgacacacatggccaccttggcacaaaagccttgtggtatagaaaaacaaatttgtttttatgtcctcttctccctttccatctttcagcatagacttaactcccttaagcccagacatctgttgagacctgacccctagtcattggttaccagtgtgtcaggcaatctggactttccagtgatgccactgagatggcacctgtcaaaagagcagtggttccatttctagattgtggatcttcagataaattctgccattttcatttcacttcctgaaagtcagggtcggcttgtgaaaagttgttaaacaacatgctaaatgtgaaatgtcaaccctcactctaaactttccctgttcagagcatcagatgaagacttcattgggttttatagtggctttctgatttttggtagtccattgaagaagggagtttgaaagttgttgtatactgttaacgattgtctgcccatgtcctgcctgaaataccatgattgtttatggaaagtatctttaataaagctggatacagtttggcttggaaaaaaaaaaaaaaaaaaaaaaaaaaaaacccaaaattttttttcttttttttccggcttgttgggaagaaggagactacggccctctgaaggagaggccgaatctcccgggcgggttttccgagagccctctcaaaacccgcccccctatgaacggtggggccagaagcccgcaagatatgctctgcggctttttgtattaccggagtatgaggtgcctatccctgccaggaagcggcccgatatctctttccttgggggcaccctctctccagaggagtcttgtgtgaaccagagcaccctgtgaattttgtgaactccctctctgtgtgaactctgtgtgagagtgagagttctcccagacaaagagaatcccagagcccacaagaaaaaactctcccaaaaacagagatcagaaagagggatacagagagaacagcgaagttccctcctgtgtctctgggtgtgcgtctcgcgctcggcaaaaggggggagacagaatctctctcgggtgtctctcccaattgagacccagtgtaagagaagagggagacccctctctctctncccacnanaagagatgtatcactctgtgggtgtattttggttgcgctcgacgagattgtcaccccccttgttgcgtcctgagagagcttctgcgccgtgtgtgtgccccgccaggtgggtatcacggcgacagagaggctctgcgcttgcgtgcccaaagaaggagaattcccccacgtgttggtgggtggttcccccccattgggcccccccaatggttgctcccctgggtaaaaagagaatttttgttgcttggggccgcccaattccccctgggggggggtttcgcgggcgcgggcggcctatccccccaaacttcttgg

SEQ ID NO: 564834 - DNA, 430 bp, Homo sapiens
  misc_feature (378)..(378): n is a, c, g, or t
  misc_feature (385)..(385): n is a, c, g, or t
  misc_feature (426)..(426): n is a, c, g, or t
gagtctccattaattgcatatggcagcgaaaagtgatctcttgcattgtcgtgtattttttatcacgtttaatgtaatatcgtaaaccttaaataacaccatgagacctataggaagtaccacaagtgttgctcccaggaagcagagaaaagtcataacattacaagaaaaagttgacttgctcgatatgtactatagattgaggtctgcagctgtagttgcccaccacttcaagataaatgaacccagtgcaaggactattataaaagaaaagggaaatttatggaaggctgttcactggcagttatgccaggcaggcatggaaaaaccttgttacttttttgccaaaataccttttttatgtttgtatttgaaggnggcagcnttttatgtggggttgcagggattggctatggagggaagggnctta

SEQ ID NO: 564835 - DNA, 471 bp, Homo sapiens
aggactgctcgagtgttcaccagtgtctcctgtatagcatgcagcctccttattgactcctcaggactggtattgaagtaggagatctgtgtatagagcagttcagatctatatggcaactttaagtgaggcgcttgatgtcagtgctcaatgttgatggttgggaaggtgcggctgtagcatcagaagggctctccctccggccctatgaggaacttctcaaagttccaggccacatctgagacgatgcacagggctccaaatgatgagcttggaatcggtcatgagtggaaaatgagtcatcatcagggtaggggaacttgtccttcaggtaggcgaagacaggatgctcgtactgcccattcacctcacatataaggacaagggtgaaggtgggctggtatccacccccaggacggacatacttgagactgttcaggatctcctcatactgacagttctcctgatgtc

SEQ ID NO: 564836 - DNA, 1425 bp, Homo sapiens
gcaatggggccggcctcagagagagcgctgtgtgtgtgtgtgtgtgtgtgtgtgtgtgtgtgtgtgtgtgtgtcgccctcagacgcgcgctgtgtgtgtgtgtgtgtgtgtgtgtgtcgccctccgcgcgcgcggctgtgtgtgtgtgtgtgtgtgccgagcgcgctgagacgacgcgtagtgaagaagccgagacgcaaggatacaacacgacgcacccccaacatgtcacgtcgtgccatcaccccccactcccaaccagcacgcgccccacccaaccacaccacataacgacacgtccgtcgttcgctacgaagacacacaccacacaacacagaaacacacatccctccgtaccaaccaccaacacctgcgtcgttcgctctactccatcaccgtgcttcacactcccacgacgcacacccacccccacccacctacaacgaacgttgcttggccacatgcaccacacacgcaggacaggacaatccacctacgcttcctcacttacccctcgccacgtcagaccatgcacagcaacactcccctcccactctcccctctcaccgcgcggcagccaggcagcccggcccacaacacgccgaccccacacaacacacccacaccaacatcccccccctcaccgagagacggcagcccatcccccccctccccaacctcaccaccccacccacaacccgcgagcagcccaaacaaaacacagacatggcaaacgcacgaacaccaccccagcgaagcacaaccaccgcaagcccgacaccacaaacagggagcgcaccgaggcctcaaccaaaccacacaaataaatccatttctctcaactacataaactctctgaataaataataatttgcttcaccaaatatataataaaataacaacccaataccacacaaactgtacataaaccacatccctttaccaaccatatcaacctcacccaaatcaactaacatacacccacccccttcacaccccacaacctactatccacccaatacttgaaccccccagacacgcatgcgcaaccaacaatacacacacaaaccccaccctccactcctacgctccgcaagcacagcacctcacgaccgcgtacgagcagacgtcagcgtcggcgggacgccgaacggctagtcgtggctcgcacgcgaaatgcgcgcctgcgggtcagccagacccgatgcaccacaggcacgcggctgcgccacggcacacacctacagcacgacacaccagcatgatcacaaccaggataggggaggtgcgaggggaatgcggcgcagcgatctgcaacacgacgcccatgacaggactagagacgcacacacccagatcctgcggacctaatactacgcgcgccgctcaccacgcacgacaccacacctaacatcatcgtcacag

SEQ ID NO: 564837 - DNA, 1486 bp, Homo sapiens
gcgctataaaaacttttataaaccccccggagcccgagcagtgtgaagaagaggcgagaacgacccccggaccgaccaaagcccgcgcgccgctgcatcccgcgtccagcacctacgtcccgctgccgtcgccgccgccaccatgcccaagagaaaggctgaaggggatgctaagggagataaagcaaaggtgaaggacgaaccacagagaagatccgcgaggttgtctgctaaacctgctcctccaaagccagagcccaagcctaaaaaggcccctgcaaagaagggagagaaggtacccaaagggaaaaagggaaaagctgatgctggcaaggaggggaataaccctgcagaaaatggagatgccaaaacagaccaggcacagaaagctgaaggtgctggagatgccaagtgaagtgtgtgcatttttgataactgtgtacttctggtgactgtacagtttgaaatactattttttatcaagttttataaaaatgcagaattttgttttacttttttttttttttaaaagctatgttgttagcacacagaacacttcattgttgttttggggggaaggggcatatgtcactaatagaatgtctccaaagctggattgatgtggagaaaacacctttcccttctagttttgagagacttcctcttggctcccaggaggagggattccctgactttgacacacatggccaccttggcacaaaagccttgtggtatagaaaaacaaatttgtttttatgtcctcttctccctttccatctttcagcatagacttaactcccttaagcccagacatctgttgagacctgacccctagtcattggttaccagtgtgtcaggcaatctggactttccagtgatgccactgagatggcacctgtcaaaagagcagtggttccatttctagattgtggatcttcagataaattctgccattttcatttcacttcctgaaagtcagggtcggcttgtgaaaagttgttaaacaacatgctaaatgtgaaatgtcaaccctcactctaaactttccctgttcagagcatcagatgaagacttcattgggttttatagtggctttctgatttttggtagtccattgaagaagggagtttgaaagttgttgtatactgttaacgattgtctgcccatgtcctgcctgaaataccatgattgtttatggaaagtatctttaataaagctggatacagtttggcttggaaaaaaaaggaacacatattttaaaaaacacctcgttcacggtggacggttgctctcactcacccaacttggggccgttttcaaaaaaaaaaaaaataagtatttttcccatgggggccccccttgccccatttctttttaattttggcaaggttttgcctccggcccaaatttgggcctacttggccacattcccctttgagggggcggaatcaaatcccggggccgggttttcaaacgggggcatggg

SEQ ID NO: 564838 - DNA, 391 bp, Homo sapiens
atccgattcataggttttgtgtgtgtgtgtgtgtgatgtgtgtgcgcgctgtgcagaatctcgatccttatttatgtccatgttcgtcattgtttgctgctgtagaaattcttttgatgtcttagccataaattccttgccaaggctaatttccagaatggtatttcctaggttttcttctagaactttatagtttgaagtcttagatttaagtctttgatccattctgagttaatttatatatgtggtgaaaggtagggggccagtttcattcttctgcatatgactaggcagttatcccagcagcatttattaaatagggactctttcccccataggttaggatattaatgaattttaaaaccaatgagattctactttacatccagtg

SEQ ID NO: 564839 - DNA, 1762 bp, Homo sapiens
gcgctataaaaacttttataaaccccccggagcccgagcagtgtgaagaagaggcgagaacgacccccggaccgaccaaagcccgcgcgccgctgcatcccgcgtccagcacctacgtcccgctgccgtcgccgccgccaccatgcccaagagaaaggctgaaggggatgctaagggagataaagcaaaggtgaaggacgaaccacagagaagatccgcgaggttgtctgctaaacctgctcctccaaagccagagcccaagcctaaaaaggcccctgcaaagaagggagagaaggtacccaaagggaaaaagggaaaagctgatgctggcaaggaggggaataaccctgcagaaaatggagatgccaaaacagaccaggcacagaaagctgaaggtgctggagatgccaagtgaagtgtgtgcatttttgataactgtgtacttctggtgactgtacagtttgaaatactattttttatcaagttttataaaaatgcagaattttgttttacttttttttttttttaaaagctatgttgttagcacacagaacacttcattgttgttttggggggaaggggcatatgtcactaatagaatgtctccaaagctggattgatgtggagaaaacacctttcccttctagttttgagagacttcctcttggctcccaggaggagggattccctgactttgacacacatggccaccttggcacaaaagccttgtggtatagaaaaacaaatttgtttttatgtcctcttctccctttccatctttcagcatagacttaactcccttaagcccagacatctgttgagacctgacccctagtcattggttaccagtgtgtcaggcaatctggactttccagtgatgccactgagatggcacctgtcaaaagagcagtggttccatttctagattgtggatcttcagataaattctgccattttcatttcacttcctgaaagtcagggtcggcttgtgaaaagttgttaaacaacatgctaaatgtgaaatgtcaaccctcactctaaactttccctgttcagagcatcagatgaagacttcattgggttttatagtggctttctgatttttggtagtccattgaagaagggagtttgaaagttgttgtatactgttaacgattgtctgcccatgtcctgcctgaaataccatgattgtttatggaaagtatctttaataaagctggatacagtttggcttggaaaaaaaaaaaaaaaaaaaaaaaaaaaaaaaaaaaaaaaaaaaaaaaaaaaaaaaaaaaaaaaaaaaaaaagcgagggggcggcgcgcgcccaaaaaaacacccccccgggggggcaccaacataacacaggccccaccctttttgagtgaaagcggaggggcccgccccaaatagggggggcgggctttatataataaccgcccgagccggcccgcggccgcagtaacaaacaccgcggccgtagcgagggagaaacaacactcccccccggacgacagtctcacttgcgagaagaaacgccccccaccccaggcgggggcgaacaacaactagggcggcgacacaccccgtcaacagagagaatatttaaaccgcccccacgggcagaaaacacacaaacaacttccgacagtggctcttatagcgcggtggttacccaccaacgcacgcgataataatgcccgcgcagacagacaactcttggacagcagacgaacatagtccaaaaaacaattttaacccgg

SEQ ID NO: 564840 - DNA, 163 bp, Homo sapiens
catacctcgaccttctggcatacctgaccttctggcatacctgaccttctggcatacctgaccttctggcatacctgaccttctggcatacctgaccttctggcataccagaaggtccaggtatgccagaagctcgaggtatcccggaacccgtgtctaaatt

SEQ ID NO: 564841 - DNA, 138 bp, Homo sapiens
  misc_feature (8)..(8): n is a, c, g, or t
  misc_feature (23)..(23): n is a, c, g, or t
  misc_feature (47)..(47): n is a, c, g, or t
  misc_feature (59)..(59): n is a, c, g, or t
  misc_feature (79)..(79): n is a, c, g, or t
  misc_feature (101)..(101): n is a, c, g, or t
  misc_feature (103)..(103): n is a, c, g, or t
  misc_feature (118)..(118): n is a, c, g, or t
  misc_feature (120)..(120): n is a, c, g, or t
  misc_feature (123)..(123): n is a, c, g, or t
  misc_feature (128)..(128): n is a, c, g, or t
actgtacnagagaccaacgatangttatgatcatgaataatgctacnttgtaaaaaganttcaagttattaggaagcanactctcgttttttaatcatcgnanaaatattccatgatncnttnatagnacaattctag

SEQ ID NO: 564842 - DNA, 727 bp, Homo sapiens
ggagagagagagagagaactagtctcgaggttatttttttatttttttccacggtccaaggttaatggggggttaagtgggtataacactgggatagtgggttgcttggttggtatgtaaatctttaacattatatggtaatgtacactactgatatagtctcacaaaataaaatccttgtggaaaaattatgcccaaaacatgatatgggattataccctggaccccaggatgtgactcactggggaaaacattgtgggactaggcttgtccagtaggaaggacgccaggaattgttatatacacacacggtaaacatccacctgggctcagggggcaaatgcagtacgtacagcattgggcagtggtgctgtcaagaggtggcacagaactatttcacactacccagttgaagactacccaagattaataccatccagcatcaggatatagctgtggatttgacaacccattcgttatttctaacttcaaggagtcgatgttttccccagtccatcttaaaatattacggcttataatcacagatcagataacaagggacaacatgcacaacctccacctagaatcctgtgtgtaagcctagacgaggtgaaagtgatatgacatcagaagactttaaacatgtgcagcccctttggaactcccccaaagtgtttctgcactcttctacaaaggggcctcttcctcaaaagtcagagtcaccttc

SEQ ID NO: 564843 - DNA, 336 bp, Homo sapiens
gtggtgtcgcgaccaggctgtgatgtcggggtgaggctggcgtcacgaaatgagttagggaggattccctctttttctattgattggaatagtgtcagaaggcatggtaccagctcctctttgtacctctggtagaattcggctgtgaatccatctggtcctggactgtttttggttcgtaggctcttaattgttgcctcaatttcagagcctgttattggtctattcagagattcaatttcttcctggtttagtcttgggagggtgtatgtgtccaggaatttatcagtttcctctagattttctagttcatttgcgtagaggtgtttatagtat

SEQ ID NO: 564844 - DNA, 1578 bp, Homo sapiens
  misc_feature (1578)..(1578): n is a, c, g, or t
tcctcatgtatcgtgctgtacagaaatatcctcccctggtcgtgtatgaacttcctcatcggagaagggtcgacacgactgacacatggattctactaacctcacattactcttgaatctagccgtgttagcgatagattggctagtgcggactttaacggatatttgactttcaactaaacctacccatgaggctgtaacgtatccacctagcatcgccaacactcctatcccgctactcgaaatggcagctccttgaatccatgtgccaagccccctgaggtctgcctaactctaaatgattcctttcccaaggtctcgtgaggtatcgccctcgcgcattttaggtgactcgatcattttagcaagcatcccgaaaaacacatccatatagaccaatcgcattgctttctctaatcctctagagccgaaagcggacgcgtatgaacgcccacgatctacattagtgagcctagaggatcttgaatcccatcgtattcgggggttcagtgggcacctctgtgtagacgattcccccttctcgcttgtgggtcctatcccccggggccaaccccgcgcacgtgaaaatacctacgccgactcgtgcggatgaaggggtacagcatcagtttccagtgtcccaggggacggccgaaacctcaagtaattggtgcctagcgaataaggccgatcatggtgttccgtcgaaaaggaacccgcgggatttaccaccgatgagagcaatttctcttcatggggccgaaaagaatgcgggagcgcttggagcaccctcggccccatatttcacttcttttgcacccccggaaggttacgtaagggaagctgtccaggaggttaactgggccgttattcaactgaattattcgaacacggacgcgcttatagtcgaaccagattccaatatcaaactaagattccaaacccaaaccaggcccggtacacatgggcagggtttccaaacacctcgaaaacgtcgggagcaaacccgtcgtcgcaaaagagaaaagaaccgaactattcctgtcccagtggcctccggggcacaggcgtggagggttctcacgaaggaacgtggggagaagcaaatgtgtgggggcaaaatttatatatctcccccggcattgtttaggggacaccatactcaaggtgcccctgacgccaatttgtggccaacgacaacccacgctgagcctccccacgtgtggttcctactactgtgggaggcccacaggtttctccaacttttcgccccacgtggtgttgagaatctcccttggtgtccacacctacctatttccagtggaattgcagagagagccataatgtaccaggatgacccaataaaccagagagggcacagaagtaaactacgaagggaactagttgggagcaaccccattcccacacatagcggcgccgcaacgggcaggtaaaaatagagtagaccactctagtttctcacgtaccagacagggggcgcaaccaacaccagtgtacaagagaccacacacaatcataatacagaaccagattatcagcggaagcagtacgacggan

SEQ ID NO: 564845 - DNA, 679 bp, Homo sapiens
ctaatttacatgtttaccaagctgtagtgctttaagaacactacttaaaaagcaaaataaacttggtttaacatttaaaaaaaaaaaaaaaaaaaaaaaaaaaaaaaaaaaaaaaaaaaaaaaaaaaaaaaaaaaaaaaaaaaaaaaaaaaggggggggccccattcccccggggggcccatcccccccagtttttgtgtaaaaaagggcggcccccaataagaggaaggctcctaataatagcaacgaagacgaacgacgagccgcgcgacgctgattaaaaacaaacgacggcgagcagggggaaaacacgtccccgtcgggaaacacctctgtgggaaggagagcgaccaaccacatatcgcggcggggggagggagacacaaataagtagcgcgaccaccacaccacctccactaaggaggaatatatatagaaagggctcgtctgaagagggaaggagaaatatatatatacatattgtcagagaggggtgtctaaagacgactgtgggtgtgtaccaacacaccacgctgatgatataataatttatgagtcgaggagggtggtaaaagaaaataagtttgttgagtcatactgaggagaaaaattgtagtgttatagaagaaatatttattaccgaagaaggaggatgtaacagaattaaaactgggggttt

SEQ ID NO: 564846 - DNA, 1044 bp, Homo sapiens
tggctgcagcgcagctgtccctagcaccgagcctcccgcagccgcctgagatgctgcgaacagagagctgcctgccccaggtctgcccgccggacatggtgtgcctgctgtgagtcccctgctcctgctgctgcttgctgctgctctgcctgtgtgctgctgggcgcctgcctgatggtgctccaatattacctcaaggattacagcctgaacaacatgctacatgttgtggaattgagatagatgatacttgttcgtcttttcttgtccattgattctcagcctcagtgcatccaacgcacttggaggagctttgctttatgattatgggaatgctaccaaagcctcaggaacacgatgacacaacagataatactaaacaggttcttatttcattattcgaagacacagacgttgggcaagtcaacatgtcgtgtcgtcagttgtgcatccgttgctgcagctcgttcctcacctgcatgagagaagactgaagagattcagagtggacgacgaattccaaagtccctttgcaagtcaaagtcgaggatatttccattcaggccacggaatggcccgacggtcagcagggtacatttacacatggatgccagctaattttccacagagcaatgctctggcaatacaacatgtactgacattagggtcccttctgaccaaaatcctggctaactgtacactgttgaaaatccctgtgtggtcatgtctcagttgtaaccatgttggtacactgtcgcacgtcgggtcggcacaaattacaaaaacttcttcccacttgcacgaacacaacatacacacttcccagcggctataaattgtgagggtgccgcgcaaaaacacgtatatgtgtgccattggtcacggttgtcccccaacgcggtctacatggacccccaagcatcgcgtcacccacaggggggtcaaaaacatgaccggggacacccccataaaaggcaacgcctacataattcacccagcacagccggttaccacgaactactgtctccgacatacacctgagag

SEQ ID NO: 564847 - DNA, 360 bp, Homo sapiens
atagttatattttcgctcctctcctcatcctacactttaccttcaagtaggttccagagtctgttgtttccttctttgtatcaatgtgttctcatcatttggctccctcttataaatgagaacatatggtatttggttttctcttcctgccttagtttgctaagaataatggcctctagctctatccatgttcctgcaaaggatatgatctcattcttttttatggctacatagtattctatggtgaatatttactacattctctttatccagtctaccactgatgggcatctaggttgattccatgtctttgctattgtgtacagtgctggaatgaacatttgtgtgcacatgcctcta

SEQ ID NO: 564848 - DNA, 676 bp, Homo sapiens
  misc_feature (512)..(512): n is a, c, g, or t
  misc_feature (517)..(517): n is a, c, g, or t
gtatttttagtagacatggggtttcaccatgttggccaggatggtctcgatctcctgacctcgtaatctgcctgccttggcctcccaaaatactgggattacaggcatgagccactgcacccggctggaagtgactttggaactgggtaatagacagaggttggaacagtttggagggctcagaacaagacaggaaaatgtgggacagtttggagctccctagagacttgttgaatgtctttgaacaaaatgctgataatgatatggatgatgaaattcaggctgaggtgctttcagatggagatgaggaacttcttgggaactggagcaaaggtgactcttgttacgttttactaaagcaactggcagcattttgcccctgccttagagatttgtggaactttaaacttgagagagatgatttagggtatctggtggaagaaatttctaagcagcaaagcattcaagaagcaacttgggtgcttgttaaaggcattcagttttttaagggnaagcngagcttaaaaatttggaaaaattgaagcctgacaatgcaattgaaaagaaaatccctttttttgaggagaatttcaagcttgctgcagaaatggcgttagcaacccgaggcaaaggttattccccaagacattgggtggttccaggcattttggtcttc

SEQ ID NO: 564849 - DNA, 198 bp, Homo sapiens
ccctagagttccccaggtagacctaacgtctttacgtgtgtacttgcgcttactttgtagccttcatcagtgtttgctgcagatggcggtatataggctaagcaagaggtggtgaggttgatcggggtttatcgattaccgaacaggctcctctagaggttaggtctacctgggttaggtctacgtgggttaggtcta

SEQ ID NO: 564850 - DNA, 275 bp, Homo sapiens
ccactgcgcccagtctacacactaattcttgttagcccaacagctgttctgttctatctacccctcatttcacgctcaaggagtcatacctagaatagttacacacaagagggaaacttgaagccaaacactgtacaggattgtgtaggagtcacccccctactccctttgattttacatgcggtgctgatgtgttttcgcagatgggctctcagatgaaggctcatggaaattgagataacccccaagacataacagattttgtgagtgataca

SEQ ID NO: 564851 - DNA, 679 bp, Homo sapiens
gcggcgagtaagatggacgatgaggaggtcgctgagagctgggaagaggcggcagacagcgggcaggaaatccaatatctcctcccaaagtgcccattgtgattcaggacgatagccttcccgcggggccccctccacagatccgcatcctcaagaggcccaccagcaacggtgtggtcagcagccccaacatccagccaggcaggcccacccttccagtcaagtccctagcacagcgagaggccgagtacgccgaggccccggaagcggatcctgggcagcgccagacccgaaggaggagcaggagaaacccatcctcgacaggccaaccaggatctcccaacccgaagaaagcaaggcagccccaataagtgtgatcagacagcctttgggtcctgatgggtctcaaggccttcaaaacagacgcagcatcacatgcaggcaagaaaaagatgccgaacgatatgctgacccgtcaccgactcctgggtcgtccgaccacgggatagcacctgccgtgggcagcacagctggacttgagcagacgggaaacacactgacttacttgcactgtgatcccactaggtcagcccactgtgaccattgacacccaatgaaatggcgacctccaccccacatcacactaccaatgtgattggccatcgcacacggctgacca

SEQ ID NO: 564852 - DNA, 175 bp, Homo sapiens
cgtatcagaggctcgcaaacatgcttaggcaatctccatatattatcacatatttaccagctaagtcactttcctaatgtctaccctacccaagtcactgttatgtttctacagaaggaggaagagtgcgtgtatcatctcatctcgacccaatattagtgtccagggcacacct

SEQ ID NO: 564853 - DNA, 861 bp, Homo sapiens
  misc_feature (28)..(28): n is a, c, g, or t
ataatccttatttttttcacaaaaaaanattttaataatagttgaaacttcggcactattctatgctcctattaggagaggacagctgtctgcagacatctgtatggaaacataggataggaaatttcagagatgcgtcatatgaagaagggtgtatttcagcgagtagtggcaatttttatccacttattgtgatgtcaatggagagccagttggagatgactacatttaattggtcctcctccttttcagctatttatgtcagaaagctagtatggccatcctagctgtcagagtgctccacaaggactagaggcatgcaatttgttaggttctggctcggttagcttttttgggaattgtatcatgttcatcgtaattgtgtactattatttgttcatatatgatatacatcgactcctgctggagttccaactttattcgctattatgttacgaaggccgttatcatgttttattagcgctgtacttttatttcgtctatttgtagtgattttggtgtaaagccatgtggcctcgcgtcccgtgtcggttttaccaagcgtttgatcctttatttatctttgagaagatttttttattcatgttacattaattattagggacacggtctctctcttttatacacttttgttttcgtcggtgggggagtatataacttctgtggtagacaagattaatcatatcgggacactatttttgtccacaccacccttttatttcttctgcctccttattctattatattctggcttattgtgtttttgcgttacgcaaattatctatttttatctcttgtaagttttattagagtaattaataattgcgagttccttcttcg

SEQ ID NO: 564854 - DNA, 228 bp, Homo sapiens
attcgcggccgcgtcgacaactttggcatcaaaaaccaaataccacatgttctcatttataagcaggaagctaagctataggtatgaaaaggcataaagagtgctataatggacattggagactcaaaagttgcgaaagtgagaggggagtgagggataaaaaactccctatcgaacacaatagacactactcaggtaatgagtgcacaaggaccccaaacttgacca

SEQ ID NO: 564855 - DNA, 146 bp, Homo sapiens
gccggtaccgtgatgtatcccaacactttcaaagaacacataacgtggcagaagcgatatgaaataacagctctagtatcaccaatcactaaaaaaatgcaaatcaaaatcacaatgagataccatctcggctagccagtcagaat

SEQ ID NO: 564856 - DNA, 939 bp, Homo sapiens
gtagcaaagttgtcaataaactttaagagaggcgtaaatgccaaaccaggggcgggttaaactatagcgcgcttttatggtataaaagttgtcaaaaggtgatgtgtgtttcgcccgctgaccgcatgaccaattggggtctcgccacccgtgacgtccaatgtggggattactgtacacaaggggaaagaactatattcttatatggggaactgtcgtctcaaacaatggtgttaaggaacatgcccctctcattagggaaaccccctgagccgcggagctattatagctcgtggcctcttctctcccgttgccaaaacaaatgaggatgtcatctcacgttaggggcttgatgaacaaaagttgagtggaagacaccctgtgcggaggagtttcagatgtcacggggttgcacaccacgttgcactataggaattagagacagttttcacaccttgggcgcctgtcaaggttttgtcaatgctcattcatagatcacacggagaatggtgcctggtcaacacgtgtccacaagtggagataaacgccaaacagacaggtgtgtgtgcagcacacgtttggattgtcccgcatagttccacaagaggttaagaatatctgttcccccaacccacatgtaagcacactgtgagaggagggtcttatgacgcacccaaaactgcggacactcccagtcgtactttttttgaggaacaccgcaaaatacaggtgttacttatgataaagagcatgctattgttagaaactactgggttatccacgggggaattgctgggtcacagacccccgctatcacgccagctaccttgggcaacgtgaaggggcggggggaattctaatactcgaaggtaccaaggaactgttggggccacataaaggcgggaaccccttactgtataaaaacaaccaaaaaaaaca

SEQ ID NO: 564857 - DNA, 301 bp, Homo sapiens
  misc_feature (2)..(2): n is a, c, g, or t
  misc_feature (40)..(40): n is a, c, g, or t
tntcggctacaacgccaaggcgatcgcatcgggttcgctnttccgccgcgtcgtgctgcgcgggatcaatggaacttttggagcgcgcgcagcgaccgaggctgcgggcggttcggtcgaaacggagtgatcccgctgtggcgacgatgaccgcccctggcttcgcgctcggtaaattcgccgacttgaaacggcgcctgtggtttctcgtcggcgcgttgatcgtataccggatcggcgcgcatattcccgttccggggatcgacccggtgcagatcgcgaagctcttcgaaacgcaaca

SEQ ID NO: 564858 - DNA, 655 bp, Homo sapiens
tagtgaacatttctttatatgtcttttgatgaacataaacacttagttcttttgtgtatacacccatgagtataataactgtgttacagtacagacgtatatttagctttaataggtttaacagctttagttttccaaagttagtgtaccagttgcctacctaccagcagcgtgtgagagtttactttacattctcatcaatgtttgatgttgtcagtctttaattttagctattctattgggtgttagtggtatcttgtggtgttaatttgcattttcctgagaaccaattcaaccagagagtttttaggtttttttttctttttctttttttcttttcttttcttttctttttttttttttgggaattttttcacaagcaagtggcttctgttgaaatctggattaatggagtctccgtgggggggggcctgtgtcacttagatttctaaattttccccacaggtgattcttaggctttaaaactctcgggataagatttagggctttggtcagctttggcctaagggttcaatttaaaggtctccaagattttttcacattctactaaagagggagtcttgacaattaaaaggtttttctacttgaaccagtttaacgatcatgctatgtcagggtctccagaagtcgagta

SEQ ID NO: 564859 - DNA, 230 bp, Homo sapiens
caaaggcagtccggcaaaagaatcactggtgttcagaccaaagtgattccaagtgaaatagtttgtgcacacatggtgtgatctttcaatatgcagaatccatttgtttttctcatttcagaggattttaaaatctaaggtccatactgttttggtgcagaaaattcactagttttactttcatttgcttatgttgaaaactgatattaaaataaattaaatgtaattta

SEQ ID NO: 564860 - DNA, 865 bp, Homo sapiens
atgaggatctctagcattggtattcgatagattgtatagagactgggtgtcagagtccggaccttgtctctagagataaacagaagaatggcatgtgtatgtcttagcttgagctccctcctccctcttcaactcttcttacatcagctcaccgggtcttccattgtgtaataacttgattggtgacgtgtatcttctgatatctgctccttctatctagatatacgaacctgacagatttttagtaagtgcccatattctcagccttcagtatgagaaacttgatttgcactaacatttacgcaagagaatgatcagtgagtacttgaactagtggtagtctctttacatagactatcggcatctgccagggccctgatgacaaactggtagacaagttgatctcctagcagcgtttataatatgactatgagtaatgcttactgccttaacatattccataaatatatcctataatctattgataaggtgacctgacgtgagtggacgtgccactttaacaacttcaagcttccacattcccagtaggggttatgtcactctctggctcctgggagtttagtgataccgtcatgtttctttgtatgttgaaattactttgttatttgatttacttcaaagttcggtattaccctttaaaaatcttattctattctttgataatttattgtatattatgccctcgaaacatccttctatccaagataccgtcatgttcccaggatcccttcccgtcgtcttttctctgccctttgctggttttctccattagaactctcttctttgaacccatccacctgttctttccagaactgagcctcagaactgagtcttagtgagaccg

SEQ ID NO: 564861 - DNA, 1291 bp, Homo sapiens
  misc_feature (640)..(640): n is a, c, g, or t
gacttcctctcaagctcggcgtcagttcggtggcggttacactgcgtggttctacatgcgtatcgaaaagtgttgatctctgttcggaggtcccattctatcctggtggcacggcatgatgttcgtccgcagatcgattgctaggtgttcagatttcgcaaatctaagatgtcgataaaaagctttaaaaatgaagcgctaattcgctcggcgaaagtttaggtgtgatcctcacatgcaatttccggagagagctatgctcggtaatagacgtagacttaatcagtttgggagtaactctcattgtgacattttgagaataagctgctcaggaaaattgaatccgttaatcagatatttactcaagccgtactaccgctaatgcgcatatggacaaaacgtatttggaatcgtcggattagcaaagaagaaggattagatacgtaataattcatagaaccaaggataggacagtccctagaagtcgtacaaagtcttaatttaactgcacaaccaggacattggaacggaatagacatagtcatagaagcaagacctcaccaagggaaggcgattttcacgcgcattaacccgatcatgaagaagttccatatgcaaaaaaacattccactattgcgtntgactcccagaaagcccgccttcgtttggccaggggctctagaatgggtggacaccccacagctttagaggacatggacgggacaacacattggcgctaaccattgcaagggtctacacccatggaggggaagtcttgtggggcaccaatttgcgaagagcgaatggcttctccgtttaagataaggtactcctttccttggtttataggctcaatttttggcttttttttaatttgttaccacgttatgtggacacacaaattgtctcccgtgtgtctggtgcacttatcgttcggcggaaacatggacgttgaaaaagtttttacttctttttaacttcttcgcttcttaaccccattaaagcgggttcccacttataattaatttgtgaaataaaggacggaatttaactaatggaatcctatcgttattgcgcgttgtccattgtgtcccatttcttgaactattaaattattccagggagttatttcacagggaatggttcagagaatttgccattccttcaagttggtttaaaaatgccttttactgtggaggctagcattgttaactttaaagggttataagtttcaagtggaaaaaaatttctaaagtttggtaaactaatttagcaaagttggaaacttggg

SEQ ID NO: 564862 - DNA, 196 bp, Homo sapiens
  misc_feature (120)..(120): n is a, c, g, or t
  misc_feature (176)..(176): n is a, c, g, or t
  misc_feature (190)..(190): n is a, c, g, or t
agaattcctgggtgtagcaggctgctaggccggcgccttgccgccctcctgcccccgctgagtctgtttctccaatcttcctccccgcttttcttcaagcagtgccaactctttctttanatagacataggttttagctgggtagagtacaagaagccagcttacgcagttcccanaagtaaatgccttngttaca

SEQ ID NO: 564863 - DNA, 260 bp, Homo sapiens
ccttcatctgtcctatggaaatgaaaatcatcaaccacccagaagttatgtcaaggccctgaagcacccatctcttggaaatgaaaacattcaaagtgctacctctgcctcccagtccccgagggaggaaaggacccagctctggtttgcaccactgcctccgggtcaatacaagatcacccagactttggccccactcccgggatcaggccaccatttaacaaaacctggacgagcgtcaggctcttattcaacgcaca

SEQ ID NO: 564864 - DNA, 1010 bp, Homo sapiens
gagacgtggcggactctcgcctggtgctgtttcgccgagcttcatttctcccgagtcagatttccagcctgggcttatccggaggtgctatggcgccgcctggtccccacctacttgtagtcatgatctccgttaagcggaacacgcatgaataagttggacatgggagttacaccatcgaatttggaagtgtttcatccatgattcatctatggaattgacttcgtcatttgctatgacgagagcagctacatggatattggcaaagtgtgcttagtgtatcgtaggcacggacttgtgcattatgtaatttgtgtattagagacgaagcacttcagacttgcttcattccaagataacgtaaaactgaagagctagagtgtttactttgctgaggtggaggctatatggtaagtccttatatttggtgtgcgcctgttgactaagtgcatagaatcgtatcgaaaatttacactggagtttttgagcagtctatggttcatgggagctatcttatgccatgtcgctagtatgggcttcgattaggacacagatgtgccatgctccattggaatccgcgtcccataaaatgtgatccttggcaactctagactcagattccgtcagatcaaacgtttgggcacgcaacagccaaataactcatgagtagtaaccgaacaagttgcaatatatgacataacgtcatattgagaaaatatagctgtaactttattcacgcgactcaagttgtgcaaccgaaaattagtttcccatgggcggggacgaccacgtttacagccttgaccattgcaaagaggagcccgtctggctgcactggcttccagtgtttcccaggggaggttgtctaacggacaccggctacatacggccataccaacaggttggaccgaggcacagtcaaaaactattaacgcgacgcgacaaaggccaaggtgaaccagtacaggggccgtgctaacgtcacaggtggaagccgaagtgagcgacag

SEQ ID NO: 564865 - DNA, 207 bp, Homo sapiens
  misc_feature (43)..(43): n is a, c, g, or t
  misc_feature (144)..(144): n is a, c, g, or t
  misc_feature (153)..(153): n is a, c, g, or t
  misc_feature (159)..(159): n is a, c, g, or t
  misc_feature (173)..(173): n is a, c, g, or t
ttggaagaatggtttgagtctgggaggtcgaggctgcgatgantattgatcacaccactgcactccagcctaggtaacagagcgagactctgcctcaaaaaaaaaaaaaaaaaaaaaaaaaaaacaacaacaaaaaacaaattngtactgcangtatangtaatatctctttntctctctctttccccacttccttctttccttctt

SEQ ID NO: 564866 - DNA, 279 bp, Homo sapiens
gacctgctgccgtctgctgcaagtgtgctggagttggctggaggtccactcagaccccgtttgcctgggtatcactgtcagaggctgcagaacagcaaagattgctgcctgttccttcctctggaagcttcgtcccactggctgcagtggccttactgagcacctgccagatgccaaacagagctctcctgtatgaagtgtcttttggcccctactgggaggtgtctcctggtcaggatacacggaggtcaggggcccacttgaggggcagcacccctg

SEQ ID NO: 564867 - DNA, 228 bp, Homo sapiens
gaaaggtccagaccacccaaacttggctggattctacatttctccacctgtagtatggtgcgtccagttgactatgtagcagaggcgaaaccgtgcatggagtgtttctactagagcaccagtgttcagctgctagcttcacatctaccagagcatatatgagccaaagtggcacggagatttggtattcttgcccatctgtaagcctgaggtcccccccgttgcctg

SEQ ID NO: 564868 - DNA, 214 bp, Homo sapiens
gagcaccgcggtatgaggagacccatttctataccatcacctattctgattttacggtcaccctgtaagttaatattcttatcctaccaggcttcggaataatctgcccactattgtaacttactgactccggagaaaaaagaacgatttgagatacatagagtaattgtctgagactatgactatcaaattgtgattccataaggatttatcg

SEQ ID NO: 564869 - DNA, 206 bp, Homo sapiens
gagaatggctgttactacgaagggctatgtggctgattgaagagtatgcagtttagcgatctcaggtctgtttgtcatctgcatatggtgcttgttatacattatgcctcatagggatattacaatgaaagtgtatgctatgtgtttcgtcaggcggttgccgaatgtctgtgaggcgtattataccaagcgccgtcgcctacaca

SEQ ID NO: 564870 - DNA, 107 bp, Homo sapiens
acctcgcttagtgctccttttggtacggaataacagtgagaaattactgctaataccgtatgatgacgtaagtccaaagatttatcgccctaggatgagcccgcgta

SEQ ID NO: 564871 - DNA, 211 bp, Homo sapiens
  misc_feature (16)..(16): n is a, c, g, or t
  misc_feature (91)..(91): n is a, c, g, or t
  misc_feature (102)..(102): n is a, c, g, or t
  misc_feature (152)..(152): n is a, c, g, or t
  misc_feature (210)..(210): n is a, c, g, or t
caaatgcttctgccanagtgaaagaattttatgtctataatgcttttctttaaaaaaaaaaaaaaaagtcaacattgaactaggacatgcnctgcttccccncccccattttgctgactacattttaaaaaatctattggcggaaaacaagnttttttcttcaaatagggtgattttgttttattgccattttgtttagtatatattttnc

SEQ ID NO: 564872 - DNA, 320 bp, Homo sapiens
ctaggcggaaagctacgtgggtacggttagagcagagagctgcggggtagatctgcagaaagggcaaggtggtctgccacattccttcttcctaaagcactatgccatctaggtgaaacggggctgttctaggaggggtagtacttccggctttaacactaaccaacttgaaaatcacacggggaacaaaaccatgacagccaggaacacagcaccagaaggtgaaacccagcccagagtatgtagccgctgtaacttacagcattaataaaaggcttacagaaaaccaaaggcctattaaatatccctgctccacctag

SEQ ID NO: 564873 - DNA, 490 bp, Homo sapiens
  misc_feature (10)..(10): n is a, c, g, or t
  misc_feature (38)..(38): n is a, c, g, or t
  misc_feature (59)..(59): n is a, c, g, or t
  misc_feature (66)..(66): n is a, c, g, or t
  misc_feature (100)..(100): n is a, c, g, or t
gaataaatcngggggtggttttaaaatgggattggacnccatattaaattatggggatnatatttngaatatggctattaccaatatccgtggaccattngaaattccatttgtgtccactttggatttatcttctagttagaaaagattgcattttttttttttttttttgcatttaaaaattattccagacccagtacgggttgcacgcctgttattccaacactttgggaggccgaggctgacggatcacttgagatcaggagtttgagaccagccttgccaacatggtgaaaccctgtctctactaaaaatacaaaaattagctgggcatggtggcgcacacctgtaatcctagctacttgggaggctgaggtgggagagttgcttgaacccacaaggcagaggttgcagtgagccaagatagtgcaactgcgctttagcctgggtgacacagtgagactctgtctcaaaaaaaacctagaaacta

SEQ ID NO: 564874 - DNA, 848 bp, Homo sapiens
ttgaccttgaaactgtggttcatagcaatgaacttccgacttttcccaaccaaattcttaaatgtataaacatggcgtaaactataaaggaaaagtccacaaatgggtggatgtctatattaatcttcatcttctagaatagctgatcactctctcctcgtcatcatcttcatcattgtgaagcaagaccagctctctgagataggaaaagaatttcataaattcatgatggataaggcataaaagtttcccatcttgagaaagaatgaaaagaggcaaacgagatttttcttaaactcactacctcaggaatatgtgtaaaaggatgaatgattaatatttaatgaatgtctgctgtgtgctatgcagtagtaatgacttatgtgtgttatctcatataaacctcgtcacaattcagtgaggtaggtatactcattttgctaatgaaaacatcagaggtcaaatgatttgctaaaaaataattccagaggtaagtggcagactctgttttgaatcatgtcttttagcactaaaatccatccttctttcacttcccatgcttctttccttagagccctgcatgaattggcccatgcagcactattaaaatggaatcagtgactctgctgctccttggacaaggtcaaactttctttcacttgagggccttgcttttcacctaggtatcctacccagttactccctcacctccctgaagtggtcctgcctgacctccccattgaaaaaatatgacttctgtcattcacaatcctcttacttttacttttcatcataggcctgtattcctacgtgacactatatatctatagagtatttgctaattttga

SEQ ID NO: 564875 - DNA, 680 bp, Homo sapiens
  misc_feature (56)..(56): n is a, c, g, or t
  misc_feature (101)..(101): n is a, c, g, or t
  misc_feature (207)..(207): n is a, c, g, or t
  misc_feature (223)..(223): n is a, c, g, or t
  misc_feature (287)..(287): n is a, c, g, or t
  misc_feature (398)..(398): n is a, c, g, or t
  misc_feature (666)..(666): n is a, c, g, or t
caccacacaagccaaaccaagccttcaggcagcatcgggtatcggcttgtcaggcntgaccccagcacgggccctggctctggtggaaccctgcccttacnaagctttgatgccagcggaatctggtgctggggcagcccggtcagccccggggagcccttggcttggtgacctcgccgctcttcttgaatcatgctggcctgcccntgctcagcaccccgcntgggtgtgggcctggtctcagcagcggctgcggctgtggcagcctccatctccagcaagtctcntggcctctcctcctcatcctcttcatcctcatcctcctcctcctccacttgcagcgagacggcagcacagacccctggaggtccaggggggcccgaggcagggtccaaacntgagtgagggcaagccatgcctcccctcccattcctctggtccctgccttggtcccttgcctgggaagagggcgaggaggccagtggtggggacgcaaagggtcctcagagcaggagtgacaagggaggaaagcccaaaaaaccacccacccaaaaaaaaaaaaaaaaaaaggaaagaacctacccaccaaaagagaaacccaaaaataatcccaacagaaaccagctgccccaaaggacccagaggtgaaaaccaaccaaaaaaaanccaaaaccaaccca

SEQ ID NO: 564876 - DNA, 926 bp, Homo sapiens
gagactacgtacataacctaaactactccaatgctaaaactaatcgtcccgaacgaattatattactaccactgacatgactttccaaaagaacacataatttgaatcagcacaaccacccacagactaatgattagcatcatccctctactattgttttagagcacaaatcaacaaaaaactctatgtagctgttccccaagcttttcctccgagccccgtaacaagccccgcgtcctaatagtaagcgtacctgatctgccgctaccgcctgcacaaatcatgagggagtccagaagggccaacttatccagttgaaccacctatcacgaaaagaaaactctacactactctatatctaattctcacctagagaagtctccttaattataacattcacaggcagagaactaatcatatttcatatcctcttcgaaaccaacatttatcctcgcacctttggcgtatgcatcacaccgatgaggcaagcaggtcagaacgcctgaacgcacggcacatacattcacgtattctacaccctagtaggctccgcgttcccctagtcataggacttaatttagacatcgacaacacctcgtaggctcacatgaaacattcgtacgtacgtcactcgtcacgtgccaagaactatcagactcctgagccaacaacttaatatgacctagcttatagccaatagcttatgatacgtcaaagatacctctttagcggactccacttatgactccctaagagcccatgtcggaagccccatcgctgggtcatagtacttgccgcagttactcttgaaactagggggttttggtataatacgcttctaaatcattctcaaccctgacaaaacataggctacccttctgtctatccttgaaaccaaaaaaagggggcgctaagattcccagggg

SEQ ID NO: 564877 - DNA, 452 bp, Homo sapiens
  misc_feature (123)..(123): n is a, c, g, or t
aaacgaagccagcctggaccatagcactcgcggaggctgtgtatttgctcccgtggagcgtcagcggggtggtgcaggctggcaaacgtcgagctttcagctgtgctttgtgcaaagaggctnggcggaggcgagccagtggggagtagcaggacctgccaagaagatgtccttctaactgaaggtgcggttgaattcagtgggttcagaaccaagatgccgacatcggtgtggactacgggacagggggggttgtggcttgttgggtagaaatgaaggagaagccgcggagttcacatgaactgaggcatgtcatgtattttttccttgttcttcttggctggttctttgttctgtcccccatgctctgaggcggtgccctagaaggggaaggaagtaatgctctaacgtgataggcctgctcgagggcagtggaaataaagaagagggaa

SEQ ID NO: 564878 - DNA, 587 bp, Homo sapiens
ggtacctggtatctgtcaagaaatttgtccatttcgtccaggttttccagttttgttgagtatagccttttgtagaaggatctgatggtgttttggatttcttcaggatctgttgttatgtctcccttctcatttctgattttgttaattaggattttgtccctgtgccctttagtgagtgtagctaagggtttatctatcttgttgattttctcaaagaaccaactccttgtttggttaattctttgaatagttcttcttgtttccacttggttgatttcacccgtgagtttgattatttcatgccgtctactcctcttgggtgaatttgcttcctttttttctagagcttttagatgtgttgtcaagctgatagtatgtgctctctccggttttttcttgaaggcactcatagctatgagtttccctcttagaaatgctttcattgtgtcccaaaggtttgggcacgttgaggcttcattttcattaaactctaaaaagtatttaatttatttctttattcattcttagaccgaggtatcattaaacagagtgttgatcagtttcaatgtaaatgctgtcgacgc

SEQ ID NO: 564879 - DNA, 791 bp, Homo sapiens
ggatctatgtggtcaccgccgaggggcttcggcctgtcaaagaggtgtgcatgtactggtaagattgcggtcatggatgcttctcatggcccaagggaggatgagcaaggacctgctgtttatcttgatcagctgagagtacaactgcctgcatcctggagtataaacagagtggcgagagcattgacatcattacgcgagtcccatggctatgtccaggaccgcacttggccgcccctcagagaccggcattattggcatcattgatccctgagtgccggatgattggcctgcgtctctatgatggccttttcaatggttagttccactagatcgcgataataagagaactcaagtgccttcactcatccgcctggcaggagctgcatgtcatctgatgtcaagttcctatatggttgccatagtcacctactatttgcttagtctaccaggaccctcaggggcggcacgtataaacctatgaggtgtctctccgagcacaaacggaattctataagggcccttggaacaatgcgtaaaatgtcgaagctgacgcttccatggtgatcgcagtgccatagccctttgggggggccatcatcattggacaggagtcaatcacctatcacaatggtgactaaataccttggctattgcccctcctaatcatcgaatgcatagcacgatcgctgtgccacaatcgactggaacctaatggctcacgatacctgctgggaacacatggaagtgccggctctccatgcctgcttgcgcacgacaggacgcggaag

SEQ ID NO: 564880 - DNA, 110 bp, Homo sapiens
gtcatctctctcctccacaccagataggaatacaggttctagtcctctgtgggaggagagagatgacatttggttgggagaaggctggagccaagttatggtgttcaggc

SEQ ID NO: 564881 - DNA, 175 bp, Homo sapiens
tttgtgagccaataaagtccctttctgtgtaagataatgaatgagtttctgttctgattaatataggttattgtattttcttatgattgtagaaaaccttgtaattttaaattctagactttatgcactatataagtttaataaaattagcatgggcctttccatggaaaaaaaa

SEQ ID NO: 564882 - DNA, 529 bp, Homo sapiens
ttcatgcgtctcatacctccaaccccattgtcttgacagaatatccttaccatccatgtcacagagaaagtggaagctcataggaagaaacacctgcagccttcctgccggtctcatctgcatgttcgtacctcccacccccattcattctgtatctttcctattacatgtggaagactatgagtgattccatcttgtcagaagctaatcttctactagccatagtctgctcatgtgtggaaaagaaacattaagagacaggaagaggcttttggacattaaaaatgggattatggagataaaaattcaacacaagggtcaaaagataaagttgaggacatttcccagtaggcagaataaaaagaaaaagagaggccgggcctggtggctcatgcctgtaatcccagcactttgggaggccaaggcaggcagatcacgaggtcaggagtctgagaccagactgaccaacgtggtgaaaccccgtctctaccaaaaatacaaaaattagccagacatggtggtgcgcttc

SEQ ID NO: 564883 - DNA, 410 bp, Homo sapiens
cattagaattaatgcactcttacatataagaaattatatatacatccttaaatctcagcttaccaaaatagaatagctataatttaacagcctaagctatagtaaacctgacaaatactgaaacttagagacacattaatgctgcaaaatatgtaatatcacctcaacatatctcactgcttatgctcataactaagtgtgattacatggagagagaaagttttgtaccagtaacacatgatttagagtaaaaaatcatatcagaagcatggcaatcatttaactataccttataaaaataagtggctaaatcaatgagaaacaccccaggggtttttggcttataattagaaaataagtattatcttcattaatagttcataaacaaaactcaccaacctaaaagtaaa

SEQ ID NO: 564884 - DNA, 352 bp, Homo sapiens
gtgaattcatatttagaatatgaattctaaaagtaaattgttgagttatttaacatgtaagaaggagaaatttcaaatgttgtcattgttttttttcctcccatagaccagggctagtgagatgtttcttgattcattcttcagtatcattaaggaatattgattgtggaagctaagtttagtaattttactatttaagtatgcattatcgtcttgtcctctatataaaactgtacaggcataatgatgataatgataggagctaacacttattgaggatcaccaagtactaatcattgtattcagtgctttatgtgttttattttctccctactatcctgcaaaataaagt

SEQ ID NO: 564885 - DNA, 774 bp, Homo sapiens
gtagaatttctctaccagaacaaaataatagctttaacaaatataagataaaaagccattcatagtctggcacgatggctcatgcctgtaatcctagcacttaggagaggcgcgagtcgggcagatcacctgaggccaggagttcgagaccagactggtcaaaatggtgaaaccccgtctctactaaaattacaaaaattagctagtcatggtggtacatgcctgtaatcctagctacacgggaggctgaggcacgagaatcacttgaacccaggaggtggaggttgcagtgagctgagattgcgccactgcactccagcctgggtgacagagcaagactcctcctccaaaaaaacaaaacaaacaaaaaggcctttcaccacagtccgcaatgtacaaagacctctatgaagaacatcctaaagtttttacaagaatttacaagaaaattctgcttaaagtggaggcatgcacaggatatgggtgaagggtgacagcttcacgcacaaattggatccattaacatttcacaggaaattaccaagtaaaaatcttacacatcattgttaaaagaactcgtgtttagtgagttggaagcgtgtcttccctcaaatttcatggcatggaagtccaaaaccctaaatattgcggggagtgggatgaatttgggaaataggaccttaaagaggtgacgtaaggttaaatgaggtgacggtgagatagaggtcgattaacaagaagcaattcaggaccccagaacacattgggggatgg

SEQ ID NO: 564886 - DNA, 621 bp, Homo sapiens
agctgggcgcggattctgcctgaggcacctgaggcactcagagtgagtgctgccatgtcatgaaccggctgggtgatgtctgtcagaacccatgcggcagcaaggcctgcctgcgcctcttcgtgcccagtgtgacagctgagcagctgagcctgcgactgtgatgctgctaatgtgctgtggctgcatccagtgaggccctgtgagctgatgtgaacttcgactttgtcaccgagacaccactggagggtgacttcgcctgggagctgtgtgctggtggccttgggccttgcccaagctctaccttcccactgggggcccctggctgagtgcctgggattgatgtttggtgctgtgatgtgcatgtgctggacttgtggcacctcaccttgctctgcttgcatgtggtgacatgcatgacgtgaatgacccatgttgtgaccttgtcacattgtctttgtaccctatgtgcgctcgcatcagtggtgagcatgtgcttgaacgtggtccccagtgtgtgaccctgggagactcctcaggggtccgaaaaacagcggtggcaagaccatgcaattgaccagacatttctaaccactccaaacagccgggcatgatcattct

SEQ ID NO: 564887 - DNA, 537 bp, Homo sapiens
  misc_feature (405)..(405): n is a, c, g, or t
ttgagactgttccctgggaaattgactctgaggtggagacttgcatgtagggagttatcaggagtgctctcagggatgatactcacgagagagtgaaggaagcaggactgggcaaagggaaaagatggacattgggcatgtacaggagagggctacccagatcccttggggcgttctggagctctgatagtcattcacagttgtttaacattgtggcaaacgatctggacagacattagttaagagttacctctggagagtagacatgaccttggactaggaagttctctttggcagagagcaattttcatggaaggctcagctgtgtgaggttagcgcccaatttcctgccggctgcgttccctggtaccccgggggttccccccccccttcggcgcccgccgncccccgctggtggaaatacgacattgtaccattgaacaaccccaggagtatccatgagcccagtttcattgaggtcatgtccatagtgatgtgaaattgctcatgggagctatgaatgtggcctagagatat

SEQ ID NO: 564888 - DNA, 488 bp, Homo sapiens
agccactccttgggtgaacctgccaccttggatcgtagcattggaccctgtgtcctcgtcttggcacgggctcctcagtaggcgagtatccggagcctgcagtcggaaaggtcgcctccgcttacccgaggtccaggtgcgtcgcacatgtgcgtctgcgcagcctaagtggcaacgccggccaggaacccgaagagttcgttctgggtgtccccaagataggtacgtgtccccatcgtgtcccttgagaggtcttctccaacccggcttcgtgcccctcgcagaccgctagccacaccctgggggtactccctatctacacattcaccacctcgggttggccgggcccccctatcgcgaatgcccaacggcccttcatcatcttgtccctcgtccccctaccccaactccccctcctagcccccgccctttacaacaccagtctggaatttaataatttcacataatgggtgtttaacttaactcca

SEQ ID NO: 564889 - DNA, 893 bp, Homo sapiens
atctggtctagccatgtgcaagtggtagcttggactcacaaggcccacctacttcatgtgagatgtcatcaactggtactacgatcagagggttacggcctgagttgaaaggagatagacctgggagtcattattcgaaagttaaaccattcaccacgatgtacacgtctagcacgtacgaacatgctctggcggtagtgaaagcatgaagtgtatctgatgggcttgtactgaccgattgttcccaccgagatctggaatgcaccgttagtgtcagcgtacgtatgaattacactatagacacacttgcagctgatgtagctcatgaggcatgtaacttgaccacgctctcctgagtgctcttccgcttgtagctggatggaatagcctagattgtgtggtgcaaccaaaagaaaggagagcgcataatcgagtatgactcactacacatctacgtacatgttcatgaggtcgtggaacaaacagtagtcggggcgatcgggacacaggtgatgaactctgactcccaatcatcgtgggtaatgcgacggattcctatgagggtaagcgacatcgtacccagcatacactaggtatcaatgactcgcttacgttatttcccaagtcaaatatggaccattaatggttacaaccaagcggctctcctttacggttacgtgactgatagaaatgttggcagcttttagtaaaagcatttactctgttaccatgagaaaaggttgggtgtcttctgtttggtcatagttttacatccttgattttaccagaaatggattatttgattttttggaagtttgagactttaacaacaaatggatcttaacttggaaatgggatggttggtgggaatacttggaaatgggggtattatg

SEQ ID NO: 564890 - DNA, 184 bp, Homo sapiens
  misc_feature (128)..(128): n is a, c, g, or t
gactacgatcctttagccaaaagcacagggagctctgggatataatggagctgtgattatgggcgtgcggaggccaggctgtttcctcctggttcggaagagggacagctcgcgggattctggtctcnctgaaaagcatgttggaccagctgggcgtccccttctaattgccaggtggcgtaca

SEQ ID NO: 564891 - DNA, 1240 bp, Homo sapiens
  misc_feature (505)..(505): n is a, c, g, or t
  misc_feature (1240)..(1240): n is a, c, g, or t
actgcgccgtggattgctgctgcagtgttgtgagttggaagctggtggatgctctggcatgtgcgtgtcccctgctgcatgccatggtggcccatcgtgggtttgggccaggagcgtgcccccgtggtctgattggcccctgtgtctgctcaggtgagcagctgtggccgtcgctgctacggtgctttggcgattgcaggtgaggcttgtctcctgggggccatgcagcaatgactggcgccgagttcccttgtgctgcacatgctggcccaaggggttgcatctcgtgtgtgccttggatgttttgcagacgtggtgcctgtccgccttaggcgctcggggggtccctttcgtaccaaagacctgggccaagacggatcatcacgtttgcatggtgacgcacatgcgcacccgggattggcgtcacaaagtcgacaagaacccaagtttattcgggcgggaccatttgggggactcagcgtgttgcgaccagggctttatagtncgcgcggaattccaacggttaactccccttgaacccgttaatattggctcaccggggtggtcttggcgcaggattacaaagcagcgatttccgcgcaattcctcgcggcggattcgttcgcaggcgaaccttaacctacaagacttggctatttttgcgccaactttggtcgaagaccagctttaagacacgtgggcgcacgcgaacaccactttacacttaatttccttgcggcctggtaaaggtttcccgtttgatttgtgggtgcacagacaaacccataatttgtggccttggtcatggcgccacacaccaaagaggggccattgcacttgatggcgatggaaccccgatctataactttggacgtgtgccccaaagtgaacacgcacgccgtgtctcccaaagagttcccggaaaggcaaagtgcaggtttcacacagtttccgggagggtgcaccacgtggaaagacatctcttccatttggggagacacaacgtgtgggcccacatatacaagtatttggtatcatatccacgtggagacaaaatttcggcaacaatgcgggtctggagatccccacacagttcccagcaaaggattaaccccaagaaaactttgggaagagcgctttagtggtggtacgagtgacccaatatacaaagaggcgcgacagatactttttccacagaagtggagaagtctgtgtatatccacacggtttagagtacccn

SEQ ID NO: 564892 - DNA, 901 bp, Homo sapiens
ttaacggggcaaggtcgtatccgggactgcgacatacaccaatgccattgcagcccacacggtcgttgtacaatgacgccctctgtccctctacagtctgtgcgcagtacgcttatcatcaacggcgaacgttctttccaaggctttgcgggcctcccatgaagaagcattgtgttgaaggagtccacgactttcgggtacaaaagtgtactccggcatggacacgacggctgtggaccccccccacttcgagaacgtggagtacccttacagccttcaggacaatggtgatgcccattgcccacgagttctcacctgatgtggtcctagtgctccgccgggtttgatgccgtgttgaacggacatctgtctcctctgggtggctactctcgtcaccgccagatgttttggccacttgaccaggcagctgatgaccctggcaaggggccgggtggtgactggccctggagggagcgccatgacttgagccgccatctgtgatgccttctgaggcttgtgttctcggcttctgctcagtgtagaactgcagcccttggatgaaggcaagttcttgcacgcttaaagcccactatcaacgcagtggccatcgctagatgataacttcattcgagatcccagagcaaaacactggaactgtgtgcagaagttgccgctggttgggccggtccctgcgagaggcccaagcaggtgagaccgacgaggctcgagactgtgagcgccatggccttgctggtcggtggggaccgaccaggccatggtgcggcagcccgggtacacagcctacaggccggcagaggagcccatgagcaggagcctgcctgtacgcgcggcatcccatccctctggcttacatgtgagtaagtcttgttataaacattac

SEQ ID NO: 564893 - DNA, 822 bp, Homo sapiens
  misc_feature (392)..(392): n is a, c, g, or t
tgctgaaccactgtacgtgctcttccgggccatccagtaccaggttgacaaaggccccgtggactgccgtgacaggcaaggcaaagcggaccctgaatgatagccgcgttgctgcgtggacgacgtggagttccagcccctgacgtctgtagtggtgctaggtgtgtgggccctggggactgagccggggccggccgaggcatcgagcggatgatgcatgcgctgtgccatgcccggggtgctcgaccacggacgaaccagtcacctccatggtcaaaggatcaaggtgttggagccaggtctacaaagggcacccccattctcccagatgcccctcaagtgcatgcccatagaccattgtagtggctgctcaggtcctggctgagtcaccntgaccctatcggacgacatgacttgaccctcgcgtgaccctagaaatccactggatacgaggacttcgaaacatcgcttgcaaagcaactacaacggtacccaggattgtgatggcaacatgtggcggctcgtcacgcttcaagacttgcaccgttgtgacaggcaatccatactcccagagtcctgtgccaccgataagattgccccgttggcgaagaagaacatacccacgcctgggagggattggcggacgtgacgtgcgagggggttgttgcctcctggcatccttggttgaataaagccacctgagcgaggcccagaagggggccgaatggtgcgggtgccaaccagcctgccggggaagctgcgagccccacgcaatgggccaaggccattccggaaatctaacctcaacccgttctgtgtcca

SEQ ID NO: 564894 - DNA, 187 bp, Homo sapiens
gacactgtactgtctcagtctcacaccatgatatacaaaagaagttgtaagctgtcgctctgaatggtggcatgtttttgtcagatttgttgaagattaaatggtttaggtgtgtggtgttgtttctgaggtccctgttctgttccattggtctatatgtctgttctggtaccagtacagtgatcga

SEQ ID NO: 564895 - DNA, 321 bp, Homo sapiens
tcaatggaaattagatatgacacaaaaagcacaagcgatcaaagaaaaacactagataaaccagacttcatctagattaaaaacttgggctgggcgcggtggctcactgtaatcccagcactttgggaggccaaggtaggaggatcgcttgagaccaggagtacaagaccagcttgggcaaaccatagcaagacctctgtcactacaacaaaaaactaatttaaaaacttagccagcggatggtgtcacactgccatgttagccccaacttggccagggcttgaagctggacggaactgccttgacgcccaagcgagcttt

SEQ ID NO: 564896 - DNA, 186 bp, Homo sapiens
tgtgtgacaaatactattgtgttgtatgtcagtgtacatgcagatgtatattgcagttttgaagtgatcattactgtggaatgctaaaatacattatttctaaacctgtgatgccctaagagcattaagatgaaggtgttgtactaatagagactaagtacagaaatttcagttttaggtggttgt

SEQ ID NO: 564897 - DNA, 305 bp, Homo sapiens
  misc_feature (5)..(5): n is a, c, g, or t
ggtgnccaggtttgggtttaaaaaaacccccaaaagggtccccttttccaggggttttaggccgacagggttttcaacgggttcctcatttttccatttgcctgagccagggaagggcccccccccccccccccctttttgggttccatgctccccctgtaaaatgggggggcttttgcttccccttcttaagggagggggctggcttttaaagcccccgggctgggtgccccctgacccctgctttaaaaagctcgttttttagaccccttcctggaataaacctctgggtttgggtttgctga

SEQ ID NO: 564898 - DNA, 760 bp, Homo sapiens
ggtaactgcgtctcccaagcgcaaggactgctgcaaagagccacaggctgttgaagacaactggctagagtattcgtgacggacactgacttggtcctctttgtgatgaataacgtgtaccgctttggcacagataagataatagccaatgtccactataacggcaagatcgcgcgtgtgtattctcctgccggtgtctggctttatggtggccatgacgacaagtatcactgatgggtccttaatgggggaagatggatttgtgctgtgctctgttggccataggtccgaaggtgagtattgccgggtgctagctagagcaatggccttgctctgctgtatactgcacacgcacgggcagccttgagtgctagatcattgatgacgtggaatctgctggcggagactgaatacatgagccataatatataaatctttgatcgccgaagatctatcactattgacgcgttcctttctgagcttcagactcctatgagttcctgggtgaatcgtacatccgatgacttgctgatattaggtccagatgatgttgtggaccccttgatgtaacggccagagttggtaaaaatcgaaaaacgtaccattgtgacaatttttggtatgtaactgtgtgtcttgggtggatcctgttgaaatgccccggaaccggtctggtacaattggatgggtgcatactctttaagcttggagacccgatgatcccaagtgatggattttaccattcacggagggcggtacc

SEQ ID NO: 564899 - DNA, 165 bp, Homo sapiens
ctcagtagactgagagattatactcaaaccacatcatcgcggaccccccaaaaaactatttttgactcacagaagccataatcacttgaagagaggtagcctcagcagttaccttgaaggactgatggcaagaactataccttcaaatgctcatacaggacgaca

SEQ ID NO: 564900 - DNA, 345 bp, Homo sapiens
aaaaacaattttttcccccttggggaaaaaaagggggggaaaaaaaaaaataaaaatcccaaaaaaaacctgcggtatccccccaccccttctttttttttaaaaaaaaaggcccggccctgcccggcctttttcccccttaaaacccaagggccggttccgtcccaaccccaacccctttatggggcccaaagaaaatttaggctttgggcaaaaaccccccccccagggggggggggggggcccctctggcaaaagacaacctttcttgcctgggcccccccccccctgggggtccccgaggaacccccaccccccgggtttaccggaaccccaagggggccc

SEQ ID NO: 564901 - DNA, 385 bp, Homo sapiens
tttttccttttgagacacagtctcactcttgcccaggctggagtgcagtggtgcgatctctgctcactgcaacctccatctccagggttcaagcgattctcgcgcctcagcctcccaagtagctgggattactggcacacgccaccatgcctggctaatttttgtatttttagtaaaggcagggtttcaccatgttggccaggctggtctcaaactcccgacctcaagagatccacctgcctcagcctcccaaagtgctggtgagccaccatacccagcctaaactggtttttgtttttttttttctgagacagagtctcgctctgttgccaaggctggagtgcagtggtgcgaatcttggctcactgcaacctccgcctcccgg

SEQ ID NO: 564902 - DNA, 2782 bp, Homo sapiens
tgattgttcattattttgcaaagtctccatggctaaggacccccttgtcaccctttctgtcctgcccttatttatttctaaggcagcagacctgaggtttcttttccagcagaaatcgggtaaacctcaggtctgtttgaaatgcttgttccccagtgccataaagaaatagcacttgaacattaatttcctcagcaaggccatttttttttactttctgcagaaagggtacactctccagcagttttgccaggagagtacagcgaacaaaggggacagggtcatttatcacttgatgcgtccgccctactgctgtgtccagtttccagggctggaatgggacctcacattctgtatttgtcccgattggccagcaccttggaactatttaaaagaggcaaaggcagaggagaacaaaggaaggaggaagtaacttgtggaatgctgagaaaggaaaaagcacttttagataaagaagaggaacaggctgtgacgtaatgcttgcttggaccagtataagcatgccagggctgatacttaggttaaattgtgggagctaagagcataaagtacattgatttctttatcacggctagcagatatttaggaatgttagcacaagtctttgaatgaagtttgcttctcagagaagttactatttattcctaattagatggggaggaaagtctttgaacaggaacctttattttttacaggcccgatgtcagattttggcatgtggctttctgctacccatggctgcgtgatgagacagtggctggaggcagaactgagcccctggaggtgttaatgggggagtcacttgtcctcatgcaagcattcaaacatgccttttgcacaacggcaaggcacatctcagaacatgtcagctgcaggctgcgatttcccgggtacgagctttccaagctctgtgatccactctgtctttggttacatgaaggtgggaaaattgctcagttgctaagatcacagtgttggggctcagaaaacaatcccctaaatttttcagaggcattagaaccagagcaactctgccatcttgaataggggctgcgtaacatgaggctgagacctgcttgggctgccttctctggaggtggatgaggcattctaagtcacaggatgacagaggaggtcagcacaagacacaggtcacaaaggccctgctgataaaccaggttgtggtaaagccagccaaatcccaccgaaaccaagatggtgacgactgacctctggtcatcctccctggtcatgatacgctaattctaatgcattagctgataagagacggtttacagatgccatgacatggtctaaaagggggatgaaccttcagctccgggaattggtcacccctgtcccagaaaactcatgagtaatccacccgttgtttagcatatgatagagaaataaccataaaaataggccaccagcggctctcgggatgctccatctatggagtacacattctttattcttctactttcataataaacttgctttcactttactctatggacccactcggagttctttctcacgagatccaagaaccctttcaaacccctgaaaggatcaggtgatccgcccacctctgcctcccagagttctgctgggattacagatgtgagccattgcactccagcctgggtgaaaagagtgaaactccgtctcaaaaaaaaaaaaaaagaaagaagaaaaaccttgcaggatctgtccagggtccctggggagaatctgtgtgacatacatatctctgtgatgtttcatatcatctgagggcatggttgtatgtcactctgaaacctctatcctctgtctcatcagaacacatggactcgattccaaattcacggccagtaacctgggcgaccagtcggtaccagaagaaaaactaggaggttgattggtttgtttttgagatggggtctcgccctgtcacccaggctggagtgcagtggtacaatcacagctcacagcagcctcgacctgctggactgaagcgatcaccccacctccacctcccgagtagctgggactacacgaatgcaccagcatgcctggctaattttgtaaaattttttggtagagccgaggtcttgctatgttgtccagccgggtctccagttcctagccccagcgatcctcctgctgtggcctccccaagtgttgggattatgatttgtgcattacaaagatgagaggtttgatttgtcctgtatacaaatgcatcaggccattcttcatgctgagacatgcagatggtctcagcctccgtaggagagtagcttagtatttcagagggcatgtgtgctcttcagacctctaggaagctcctcgcagcttcatcagtgaaactcagtaccccctacaatgtatacccctcctagggagcaaatgaacgtggctattacctctcttcccaccccagttgtctcaagatcaatgggtgttacaaaaaagagctatcggctgggagtggtggctcatgcctgtaatcccaacactttgggaggctgagggggaggatcatgtgaggttaggagttcaagaccagcctgaccaacatggagaaacccagtctctgctaagaatacagaaattagccaggcgtggtggcagtcacctgtaatcccagctactcgggaggctgaggcgggagaatcgcttgaacccgggggcggaaattgtggtgagcccagatcatgccactgcactccagcctggacgacaagagcgaaactccatctcaaaaaaaaaa

SEQ ID NO: 564903 - DNA, 805 bp, Homo sapiens
ctctactaaaaatgcagaaattagctgggcatggtggagggcgcctgtggtcccagctgcttgggaggctgaggcaggagaatcacttgaactcagtggagactgcagtgacccagattgcaccactgcactccggcctgggcaacaggacaagactccatcaccaaaaaaaaaaaaaatactccgagaccagtatctctgggtcacgccaagggccaagcaattaaccaattcttctcttagatcactttttttctcgggatggggtgtatgggagattggtgggagtcagggtgaaagatttgggaataacaagggttagaaaccctaggaacagggtgacggccaaagggaatggggtttaaggggagaggggagaatcaagaagacagggagtcaccaaaagggccacagggatccggtgggtccaattggtcagcaaacaagtctctggtgttacctggcactggtgggatgggactcgtcccctgggaaatgggacactcactctaggctcctacccggggccatgggacccacccagaataatttcatagattccacaaaggccctggggggatagcagcagagtaggtggggagggtctaccaaccccttccccagctggtggcaaactctatttccacagaactcagaggctctcccggtcacctgcatcctcaaatacgccttcttgtccagtctaatctcagcccatcgcctccgttggaggactgggggccgtgtgcaaggcctctgtggtcccagtttggtcccgtgagttgtggcaggtggtctgggggcc

SEQ ID NO: 564904 - DNA, 100 bp, Homo sapiens
tgaatggaaatgtcaaatttcctgaattgctatgtgtcttgggtttcatccatccgacattgaagtttgacttacttgatgggagaagatgcggggtacc

SEQ ID NO: 564905 - DNA, 539 bp, Homo sapiens
gggcatctcatgctggggggaagggactgaatacctttgttccttccccctgcctgtgtcttcagccctgatgcacaggctgccagccccccagtccagccctctcccttccactggtgccttgcttagagccagaagggatgaagccgggggatctatggaacagaggaggagcgatgcagttgggagaggaagctagaagggttatggttggagttctgtacagtgttgagtttccgacagggaaagaggattcctccaatgctcctagagagaaagcctgagcaggagatgatgcagcagaggggaagggccctgtggtgccgccgcccttccttcagcctccgaagggtgatggaaatggagagtggaggaccaggcctccagctgtctggcctcgcccttcacgccttaacactaagcccacctccctgctctccttcccagcattgagccttggttgcctgggcccaggctggggttttcagtatttgtaagcatttcagcagaacaataaagcctttggactacgaaaaaaa

SEQ ID NO: 564906 - DNA, 151 bp, Homo sapiens
atgccaatggtctcacactggtttctcgtgcccaccagcttgcgatggagggataccattagtgtcatgatcgccatgtggttaccatttccagtgcacccggttactcttatcgttgtgggaccaggctgctatcatggaattagataca

SEQ ID NO: 564907 - DNA, 504 bp, Homo sapiens
  misc_feature (60)..(60): n is a, c, g, or t
  misc_feature (89)..(89): n is a, c, g, or t
tctgtgtgtgatgggcattagttgctctgtttcagaggagaaatggagagctttggctanataagataatatgttaagtggagttcctntgagagacgttacatagtatttcactaagtgctgtatatataaagttaagaattacagtaaggggacttaaataaacaggaagccttcatgaaatagctaaattttgagatggatcttgaaagatgattagaatgtataatttgaggaaagggagcattctcaggaaaggaatgaacctactcacctacagccacaggttggtgttgggaaggagaggaaatttaaggtgtggtttaatagaataagcattaaattgtaagtctaaaggcctagttgcattcctacaaacctttttgacattttatttaggagataaataatgagggagaaaaagagtattctagtcgggagtgtaaggaaaaaatatgggaaagctacccacctcaaagaattaacatggaagcccagtgagag

SEQ ID NO: 564908 - DNA, 478 bp, Homo sapiens
ttttttttttttgcctcctagtaagtgggtgggtgtaatgactaggccatcttgcaaccatgaggaaaaaggcaagaaattttagaatcctcaccactgacaactagccagcaaccacctactattgacttattatgtgacagaaaaaaaaaattaccaacagggtcaaggtctaaaagccagttgataactggctattctgttacatgcagctcttctgttacattcattactgatgcattgctcctcaacacatatgtgaaataatacaaaacaaggacaaaatacacagcaaacagccacagaggctgactcataatgcactacacacacacacccacaaccactcacacacacccacaccccaccttctttcgtgatagtccagcttctaaaagagccaaatagaaaaatatcacctacactatataagggcaagagaaggacgtcgacgcggccgcgaatttagtagtagtag

SEQ ID NO: 564909 - DNA, 788 bp, Homo sapiens
gcagttgattcctaggggtggttttcatcctgttaccacttaagcacattaatcatttggttagaaaaataataggcccagtgcagtggctcatgcctgtaatctgcaggcatgtttgggaggccgaggtgggatggatcagctgaagtcaggagtttgagagcaggttggccaacatggtgaaagtctgtctctactaagaattaaataagtacaaaataattaaacaggcgtggtggtgagcgcctgtaatcctagggtatattgggaggctgaggcatggagaatctgttgaaacgcaggaggtgaggtaggttgcaagtgaggctgagattgaagcgcattgaattcagacaacctgggcatataagagagatgactcgcgtccttcgaaaagtacagataatggaagaacgaataataaagacatcatataatggaaagttgggaagtagaaccttagagggaaaaagtttactcgataggtttctaaaccgagataagtgtttatcatttcaagctggatattttactttacaggttgttaagaatgtcgtgagcttagggggatatttagacaagatattatactggaattcaactttggttcagaatttattacgagagtcttgtacataattattgtggatgggcacattatctggtgagtgggtatatcatagttaactgtagagaggaggctatcaataatttgtcatatgttgatgggtcattcatgggaagtagaggtaaatatcttagaatattaagttaagtagttaaaaatg

SEQ ID NO: 564910 - DNA, 498 bp, Homo sapiens
gggaccggagatgactatgtcatgaattactcactttagatagtggatatggcaggagagagctggcagtcatttcagtgtctcttgacactatcagtctgctctcagtacctcccagcctcctggatacatggagttgcactatctggtacttacaaatgaagccgattgtcaatcgtagatactgggacctgaatgtaagcaagccattcagcctgccttcaggctgataatttccctggccactgaaagagatttgggagcaatactgcaggacctagtaagtctttcctcgaccctggcactggaaccatggatgccagtcttggcacctttcagaacaagagcctagaagtacttctaggctgttcttacctagtggtgtactggatccacctatgggcactggtttttgaattctcagaaattccataagccaattattaacatagtcttaattgaaggagaaattcagtgacatagtcactgaggactcca

SEQ ID NO: 564911 - DNA, 1194 bp, Homo sapiens
atcagaggatggtggtgctaggctgctgatgcggggaccgctgatcttccctcccatacaggcctttcatcacctccttctagggcctatggcagttcgtcccaggatgtgtggcgagagcctgggccagtcccacaagcgttgcctagatcaggcagacagaccgtagggtcctcatcttggtcccgttcacaatcgtggaaccgcgtggcatggctcggtctgccagctacatttctcgttctccgagctgctgttttgtcataaagaaaaagacagcatgaagccctaaactagtgagagtaatatctaattatctcatttttgtaggtctgtgataaagaacttagtcatcccttccacctcctactgtgaagaacagagcctgggtcccacactgaaatcccctctagtcacccattcccaccccccagggagctgcctcccacagcaggggggtgcagaaaatgatgatgggctggggaaccctggagagcctcgactccggaagtctcaaggtgcctcctcctctccttagctggcccgttggtttttctgagcagggggctgaactgtgaacaagtcagacaaataaagcaagggtctgcaccgaaaaaaagaagacaaaaaaaagagaaaacatctaacacagcgagagaaagggagaaaacggacaaaacgagacagacaaaacacaaccaacacccaacagaagccaaccacgaaaaaagaggggcgggaggacgcactacaaacagccacatcccgggcgggcccagccaagaggacccgtcgccgcccagagaagacaaacgagggaacacaccacagacgagcgagataataacacacagggaacgaacgccgcgcgcgcggctcgcacccaccacacgaacggagacgaccgggacgacagaacaggcgacgtgcgcgacgcacgacactaggacagaagcacgcccacaccaccaccatcgtcgggggagggcaaaacaaacagaagaagggcaggaaagacgaccaaagaagaagacacaagagagccagacgcacacacgaacaccaaatgaacacatgacaatggaaaggagagagaacgagaagcggagcgcacacacacgaagatgacatcgagatcagggaggaaaacgagagggagcagagtcgtggggcggcgagacagagaatccaacg

SEQ ID NO: 564912 - DNA, 169 bp, Homo sapiens
  misc_feature (66)..(66): n is a, c, g, or t
  misc_feature (137)..(137): n is a, c, g, or t
  misc_feature (153)..(153): n is a, c, g, or t
aggttttttcaaggatatctgttgaattcactgcacatctgatctggcttccatgtcagggtaatntgttgctgttatgttgctaggtctgaaatgcagggatcaggacagtatatgtaattgagcaaccacttganagaatcaagtggcctncaaaaccaaacttttt

SEQ ID NO: 564913 - DNA, 102 bp, Homo sapiens
tattcacctacttacggggcttgggatttgcgggggggcttgtgtgtttcgttggcttgtttgccatgaaggtagatatgcgcgggcgcagtgatgctttga

SEQ ID NO: 564914 - DNA, 191 bp, Homo sapiens
ccgccatcagcttctcgagtagcttggattaggggtgcccaccaccatgcctggctaatttttgtatttttaagtgagactagggttcaccactgttggcctagggtgagtctttgatactcctgctcctcgtgtgtgatccacccactctcatgcctcccacaagtgatgaggattaccagccagtgagc

SEQ ID NO: 564915 - DNA, 141 bp, Homo sapiens
cgtccgaccctacagcgtcgggactggtagaagcactccaggggcacagtgatgctggccagagagagctcatctttctttttcttccgcgtttactcttcttcgtttctcctccattttccccctctaccccatgcttgt

SEQ ID NO: 564916 - DNA, 649 bp, Homo sapiens
gttctcgatggaccgagctctgaactgcgtggatgatactgtctgtgcgatgccttactggcagactaggacattcgagagcccagtagcaaccgaaccagtgtgccaggagacagtggagcagtgacgaaccacaatgtgctacttctcagcagagcttccatacagagagaccatcccttcttgagacacaccaggttagtaccacacaagacaccaagaagccaagacgcatacttgccctgcgaagcctccaaaatagcacggaattcatcaaaggtaggaatcaactccaattgttggacaaccgagatacaatcacgaccggaatgaagcagacagctaaccactgacttagcaattgaagtgacgtgcgcacagagcacacgcttccacagcaactcgggccccgtacagcacatacacattgacctatcgcacagacccccggtaactgcgagtattaacatacataagatagctttgtatctgcaccacgtgttcacggcacatgtccaccctgagacaaccataaaagttatacatcggtgtaaaacatgctatcgaacagaatgtaggacacccccctaaccccatgttcataacccattgcactgtttgataccacacgactgatcaaaacaatgat

SEQ ID NO: 564917 - DNA, 213 bp, Homo sapiens
cctctgagatggagttttgctctgtcgccaggctggagtccagtggaacaattctcggctcactgcaacctccgcctcctgggttcaagccattctcctgcctcagcctcctgagtagttaggagtacaggcacacaccaccatgcctagctaaatttattatgtagtatcaaccgccaagctcggtggctagcgcctgttatcccagcgggt

SEQ ID NO: 564918 - DNA, 278 bp, Homo sapiens
  misc_feature (187)..(187): n is a, c, g, or t
tttaacccctttttaggggggggggaatttttttaaaccagacccctttcccaaaggggttttttagggattaaccccattttaattttttacccgtggggggcccatgtttttatagtcaatgtaaaaaacccctaatgggtttttgggaaatccccggggggctttttccaacttagcaaatttnttttgttggccaaataaggttcccaattccctttctaatttttgggataattttcttttggtttcccataaaggggcccaaaagccccaca

SEQ ID NO: 564919 - DNA, 658 bp, Homo sapiens
tgtgatgcgtggtgcgttccctgataaatggcaccttgtggtgcttccctgccgcatcctctcccctcagtgaatgtgggacttgacctggtgcttgtgtgtggaatgtggactgtcagcaatggtggctctgaccctcccagtgtgactctgccaagcagctgtgtgcccccagtggctaccctacacaactgccctccccagtgcccccctaagctgctctcccttggaacctgcacagctctctgaaatggggcatttatgtttgggaccagtgacccctggcatggggaccacaccctggagccctggtgctggtggacctcctggacaccctgtccttcactcctttgccccaggacccaggctcatgctctgaactctggctgagagtgatgctgctcaggagccagcacaggacaccccccaccccaccccaacattgtccccattacaccatgagtggccatctgtgactgtagacaaggatgccagtgggccttggccagagactccacccaattgctggtggagcatcccttggacttgggtggcacacctgctgacactaccctctgtgtggtcaagggcaagagtggctgggagcctggggactgtgttgtctgagcacacgaaggacttgggatgtcgtccgact

SEQ ID NO: 564920 - DNA, 175 bp, Homo sapiens
  misc_feature (59)..(59): n is a, c, g, or t
  misc_feature (104)..(104): n is a, c, g, or t
  misc_feature (116)..(116): n is a, c, g, or t
  misc_feature (149)..(149): n is a, c, g, or t
tctcaacaccaccaagcttagtgaagaactgttctaccagatactcatttatgattttnccaattttggtgttctcaggttatcggagccagcaccgctctttnaccttgccatgnttgccttagatagtccagagagtggctggacanaggaagatggtcccaaagaaggactt

SEQ ID NO: 564921 - DNA, 244 bp, Homo sapiens
  misc_feature (41)..(41): n is a, c, g, or t
  misc_feature (43)..(43): n is a, c, g, or t
  misc_feature (160)..(160): n is a, c, g, or t
  misc_feature (189)..(189): n is a, c, g, or t
  misc_feature (216)..(216): n is a, c, g, or t
aggagccaggctcctttaaaccagtagtccccaacctccgntnccagggactgactgatttagtggaagacaatttttccacagacaaggggtcagggaagatgatttcaggatgaaactgtttcagctcagatcatcaaccattagattctcataaggngcacacaacctatatccctcacgtgaggngttcacaatagggtttgcgctcctgtngaaaatctgatgctgctgctgatctaag

SEQ ID NO: 564922 - DNA, 169 bp, Homo sapiens
  misc_feature (131)..(131): n is a, c, g, or t
gcggacgtccgtaggccactgagcaagggcagggatggaacctgcaacctcatggttcctagtcagattcgttaactactgcgccacgacgggaactccgcagatggattcttacctcactgtgccacagngagaactccttgaccagtatttatgaagcctacggact

SEQ ID NO: 564923 - DNA, 272 bp, Homo sapiens
tagcagtctatgatcatgcactgcccgtctgttgcacacactcagctgatgtccgttgcactgtccagtctgtcaaacatagactaggaaagacgcatgcaacgtatggtgatcacacaatagctgagatccacactgggagtagataccccactatgcttagccctaaacctcaacagttaaatcaacagaacaggctcctctagagggatatgaagcaccgccaggtcctttgagttttaagctgtggctcgtaggttaggtctacctgg

SEQ ID NO: 564924 - DNA, 240 bp, Homo sapiens
tgctgcgattattttagatagagatgaggtttcaccatgtgggacaggcgggtctggaactcctgacctcaagtgatctccccagctcagcctcccaaagtgctgcgattatttgtgatagagatgaggtttcactatgtgggaaggctggcatgggaagatgtgtcctagagtcaaggggcaagcagggcctgtgtttatccgtaggcccagatagcagagaagcacagagtccttgag

SEQ ID NO: 564925 - DNA, 657 bp, Homo sapiens
gaagaacactatcatcttgtaagcggagtgctgccaaggaaaggaatgcagcaacaccagcgatgccctggaccctcccctgaagaacgtgtccagcaacgcagagtgccctgcttgttatgaatctaatggaacttcctgtcgtgggaagccctggaaatgctatgaagaagaacagtgtgtctttctagttgcagaacttaagaatgacattgagtctaagagtctcgtgctgaaaggctgttccaacgtcagtaacgccacctgtcagttcctgtctggtgaaaacaagactcttggaggagtcatctttcgaaagtttgagtgtgcaaatgtaaacagcttaacccccacgtctgcaccaaccacttcccacaacgtgggctccaaagcttccctctacctcttggcccttgccagcctccttcttcggggactgctgccctgaggtcctggggctgcactttgcccagcaccccatttctgcttctctgaggtccagagcaccccctgcggtgctgacaccctctttccctgctctgccccgtttaactgcccagtaagtgggagtcacaggtctccaggcaatgccgacagctgccttgttcttcattattaaagcactggttcattcactgcccaaaaaaaaaaaacatt

SEQ ID NO: 564926 - DNA, 185 bp, Homo sapiens
cccgcgcagccccgcgaagacgaggaaactgagggacagaggggttaaagtactaggccagaatgtccacagctaccaaaggcgaaggccaagattttgaattccggctgtctggttgtcgaagtccatgttttttccactgtgcttgctgcttccaggcgccccattgctgcctgtcagggctg

SEQ ID NO: 564927 - DNA, 942 bp, Homo sapiens
  misc_feature (666)..(666): n is a, c, g, or t
gaagaacactatcatcttgtaagcggagtgctgccaaggaaaggaatgcagcaacaccagcgatgccctggaccctcccctgaagaacgtgtccagcaacgcagagtgccctgcttgttatgaatctaatggaacttcctgtcgtgggaagccctggaaatgctatgaagaagaacagtgtgtctttctagttgcagaacttaagaatggaacaccaggtgatggtgcagattgagctgtagactcacctagacaaatacccccttggggttcacttcctacccaagaagctggatgaggcagtggctgaagtccacctgcacaggctaaatgtgaagttgaccaagctgactgagaagcaggcccagtacctgggcatgtcctgtgatggccccttcaaactggatgactaccactactgagaaccaggcctgcccttcacctaccagctgctgtccttgccctggccctgcctcccctaagagcaaatgacaccaactttgtgattgttttcagtgtcccccattgactccctggggctggtcacttaggtttggcctctactgcatccctcatactgttgcaagtgtggcagggggaattgaaaagccccccccccctcaagctctggtcatgatgaaggtccaagggagacatccacagtgnaaccatgagctcagtggtcctggaattgctcactaagtcagtccttccttagccttggaagttggtcatgggagtcacaaaagcgcatgtactttacccatctagggcccttcacgctgggtcttgtggaacttacaccccgtgtggctgggtttaactggcttccagaaggtcctcaaaaccatgaccaatggcaaggaacactaaaactgaacaaaccattcaggaacctctttggaatttccctgagacacgtgacttactggtgggccttcc

SEQ ID NO: 564928 - DNA, 499 bp, Homo sapiens
gaagaacactatcatcttgtaagcggagtgctgccaaggaaaggaatgcagcaacaccagcgatgccctggaccctcccctgaagaacgtgtccagcaacgcagagtgccctgcttgttatgaatctaatggaacttcctgtcgtgggaagccctggaaatgctatgaagaagaacagtgtgtctttctagttgcagaacttaagaatgacattgagtctaagagtctcgtgctgaaaggctgttccaacgtcagtaacgccacctgtcagttcctgtctggtgaaaacaagactcttggaggagtcatctttcgaaagtttgagtgtgcaaatgtaaacagcttaacccccacgtctgcaccaaccacttcccacaacgtgggctccaaagcttccctctacctcttggcccttgccagcctccttcttcggggactggcagcccctaggacctccagggcacgcaagtcccccgaagaaaggaggcctggcaagagg

SEQ ID NO: 564929 - DNA, 168 bp, Homo sapiens
agactgtcgacaggttgagatggattgtccaaatgacactttttgagacaggttcttgctctgtcacccaggctggagtgctgtggcacaaccatggctcactgcagccctgagctccagagagcaaatgatcctcccacctcagcctcgctaagtagctgggatgta

SEQ ID NO: 564930 - DNA, 174 bp, Homo sapiens
  misc_feature (6)..(6): n is a, c, g, or t
acgtancagactgcgtctcaaaaaaaaaaaaaaagtagcgtcagcagtgtttaaaagtataaggtgagaattctgtatgggtagtggtgctattaaaaggagaaattctttattttaaggaaaatacctcttaacatttttaaggggtaagggggataaaggggtaaaatttta

SEQ ID NO: 564931 - DNA, 748 bp, Homo sapiens
  misc_feature (748)..(748): n is a, c, g, or t
gcttgtgacagctggcctggctctgcactgtgatagctccaagccagattgtgcaattgcagctgctgtgctgcggggaagaggggctgcacttcctgagctggtgcagtggcagagtggataatggatcagtgaccccgagccctccatgtgcccatccgaaggctgtgtggtgtgacacctgtgctgcacccatgtgctgtgacctcagcttgactgcctgatgatccacatgtgagatgcagtggtctaattttatgctccagccacaagtggtgcacacatgcccgagaatgctgtcatgcccagactgtgtgcacatgtgggcatgccatgtggctgctcatgtgcaacgtgggagcgagtgggaatgaccatgcccagctccctccagcactgtccctggccaagcctgcctcctgtgggagctctgacttggtccccatggcctgttgcagacatgccctcctctcagttgagtgggcaaggtcaaggtgtgtgcagccagtgaggtgctgtggtgtgacactggccctgcattcttggacaggggttgcgtcaggccagagcagtgcccagggtgcagtggtgtccctgctgcggagggacaatgggctggcttggttgtccaatggccgagaaggcgagtcctgagagctgggggccatgccagaagcttggtccactgtgctctcctgctggttgtgactcatatttgccttgacaggtggtggctcatgggctcacn

SEQ ID NO: 564932 - DNA, 498 bp, Homo sapiens
tgcatggtctggacatggtggctcacacctagaatatcagctacctgggaggctgatgcaagaggacttgcctgagcccaggagttcgaagccgaagtgcagacgcattcaagctggtcgagccgggaacgcacctgcactccagcctggcaacagagtgagaccctgtctctctttaaaaaaaggagggcctatttcccagctactcaggaggctgaggcaggagaatggtgtgaacccagaaggcggggcttgcagtgaacttgagatcacgccactgcactccagcctgggcgacagagactccaattcaaaaaaaaaaggatgataagacaaaccacgggatggacgaacatattggcaatacataagtctgatgaagactatgtgtctaagctgagcgtggtggtgacgcacacctctagtctcagctactcgagaggctgaggtaggaggatcacttaagcccgggaggtcaccttggccctatgtacaaca

SEQ ID NO: 564933 - DNA, 314 bp, Homo sapiens
ccgggtttacgccattctcctgcctcagcctcccgagtagctgggattacaggagtgtgccaccacgcctggctaattttttgtattttttagtagagacggggtttcaccatgtaggccaggatggtctcgatctcctgacctcgtgatccacctgcttgggcctccaaaactgtagggattatagatgtgagacactgtgcccgactatcatggctttgtgtaatgctccacatgttttgaaaaccatgtttatgggatacaaaattctccatatatacttctcaatgaagctcatagaagagaaaaaaaat

SEQ ID NO: 564934 - DNA, 947 bp, Homo sapiens
cactggcatctcctcacccgtctgaagagcatgaagggcatggagcccggggcagttcatcgatgactacttcctgattcagactagcttgcgttccctgcatggtgctggtctcaggtctggaccggcggcatatggccccgtagcccgttgctacctctggcacactcattgaatgacccagagacttccttcgggtgctgcgctgtgaaccgagggagcgattcatactgccccgtggtctattctccatgagcgatatgggtgggtccacgattaaccgtgctggttcggccgtccgactttcttgcagtaccgcgtcatgacgcccagtgtttggaggaccactcttttcgagtagagggtccggtcacgatcccccttgccatggatggaaccaattgaccttgaggcgtagcggtagttgcgatactttgtcaccagtcctcaaaccattgcgagtatcttcgagagcccgcgcgtgacaggcgtagcaatagtcgcatagcctcgcgtgctctctgtgacgctattcgccatactcgaaggctatgatggataatccatcggctccagtcctgccgtatggacgaaacgaagagcgcgtacaaaggtcggctctgttaggataacgtcgccccagtgcagcgtcccacgatatattggcctccggtagctaaccgagggatctcggcagtggcgaatagcccccctagagagagatcacgggcgcacttcgatttctgcataggtcggccccacggacttgttcgtccctcgtttacatattctggctagacaagctcgaacatacggaaacgctcgtcacagtgcgcatcatagatcctctctgcaggactgtcaaagtctagtcccataatagctttggatggcttcgtcgcagcctcgtagtctcgctttaccccccatatacctacgggagaccc

SEQ ID NO: 564935 - DNA, 266 bp, Homo sapiens
  misc_feature (43)..(43): n is a, c, g, or t
  misc_feature (155)..(155): n is a, c, g, or t
  misc_feature (260)..(260): n is a, c, g, or t
caaaaaaatgaaaattaaattaggtttgaactgtggtcgagcngaggcaggagtggggttgccctcttggggctgaatcaccaggcctcaaaaggtcccctgtggggatgaagaaatttataagatgcaaattgcacatttcctagattttgtanctgtggaaatggataagggaggggaacacggacaaattgcttgtacaatttgaaatgggcctcaatggtactccaaacctattgattattcataaataaaaacanaaaaat

SEQ ID NO: 564936 - DNA, 257 bp, Homo sapiens
atttaaggaagaaattataccaatcctatacaaatctgttccaagaaggaccagaaagccagaggggatacttcctaaatcattctatgaggctggcattaccctaatattcaaattagacaaagacattacaagagccgggtgcagtggctcacacctgtaatcccacactttgggaggctatggtgggaggatcacttgagttcaggagttcaagaccagcttgggcaacatagcaagacctcatctctacttta

SEQ ID NO: 564937 - DNA, 115 bp, Homo sapiens
ctggtctcatccagcactttgagcatatttagaaggcacttgatcccaggcagcttgtctgacttcattgctgcctccttcgtgatcttgttatagatcctgtgtggagcagatg

SEQ ID NO: 564938 - DNA, 341 bp, Homo sapiens
caacgatcgtcctcagttggactatgtatttttcactgaccattttcactgttatctcttatttcagtctttatcctcattttctactcaagagcattcattatttttaggaatcctgatgacatccttctttttatagatcgttttgatgtatatatcttccttgtagcagctaaaggtctatcaatatcctgcagtggtagagtttgctccattccagaagtattgcccaaaagaagctgatattaaaatatgcctagactggaagcatcgaagattatccagaatattagaagtttttagaaacctactgtgtgtaggaagagaagaccagtgccaac

SEQ ID NO: 564939 - DNA, 216 bp, Homo sapiens
  misc_feature (5)..(5): n is a, c, g, or t
agtgntttgtgtcgtgggcctgtgttctggtacgggtagtactggactccattgatggtgaagacgatgtctgcggcagtgctgcttgagtggctgagcagctgaccacctatgtcgccatctgagttctcgctggctccgattgtcgcatctgtgtctgtggtcttgtgtcgctggtggcagctctctgaggtgcatcagtgtacaacggtcccc

SEQ ID NO: 564940 - DNA, 298 bp, Homo sapiens
ccccccgggggttttttcccttttcccggaaaaagtttaattaaaggagcccccctcttttttttgggcggggaatttcaaaggggtatttgcccccttccccatttttagggaaattttatggggaattggggggtttttttcccccggggggccaaaaaaaacccttttagtgttgccccttaaacgggggtttgttttgttaaagcccctgggccccaaattttcccttttttttttaaaagggtaaagcctttaatttttttttttttttgctgggggataaaaacctgaatga

SEQ ID NO: 564941 - DNA, 405 bp, Homo sapiens
gccgtcgtcaagcgttgtgagagctctgtgtgctgcgctcgctggtaggtttttcttgccaggcagggaacccgtggccctttccttcctccagcagatccctgcaatctgggtggttctcaacagaagatcttctctctctgcagggcttcggacaggctccgctggtcctggatctcctgctggccccggcacttgacaatcatgtaacccttcttcaggtggaacacgaggttccgcaccacgtccacaaccttgtcttcagttcctttgtccaccagatcaggcttcgtcaagattccgatggtcctgtctccctcggggtccaactcctgggccatgctgagagcctctgtggtggcgatgtccacattactggggaccaccaccaggctgacttgtcgc

SEQ ID NO: 564942 - DNA, 726 bp, Homo sapiens
ggggtagaagcagggttcgtgtctgggcaccttggggggtataggttctgtctgcgattacaagcgtccattatcgcgttccgcaccctgggtcagcgcgatcagcaattccggcccggcacagtctaaaggttgcctgtgttgccactggggtcgcgggaatccgccattcatgtccctggactggcatgcatcagtcctcgtcaaggatggttttcttcgttacacctccggactgaatatgttggtgaccgaccctgagacaagagaagaactttggctttagccttcaagacgcactgattcagggctcgggagcgaaggtctgtctagagggtctatgagatctatgtgatcccctggatgtccagccaccaccacgctcagatgggagagattattagctgctgtggaggcacatacctacccagcatgacctcggtcctataagcctcagagagttgtgatcaaaatgccgctcaggacttccctgcattgctccagttccaactacgggttgggactgcccctcctctcgcttgagttcatgctgactggagtgctgaagcaggaagccaagccagaggccatttgtcctctcccctgttaggagatgtcatccacctgagaatctccactacccttgttccctcccagatccacgaattagaagatatgtgcaagaaagaacctcagggcgttagaaaggattgcgggtatacatat

SEQ ID NO: 564943 - DNA, 152 bp, Homo sapiens
agatccttgtacatagagtctcgggtatgctgttgttaaattgaaactgcaaagtagatggttgcaagtactggtatgttgctctgtatggtaagaactaattctgtaacgtcatgtccataattactaatcacttttcttcccctttacag

SEQ ID NO: 564944 - DNA, 303 bp, Homo sapiens
gccttgtaagaggcaaaaaacccttgccgaatttgcatttggcttccagtggtaagcccattcctcagcagggtcaagcccaccagtaaaaactcccaagagaacccgaggaaggcagaaacgatgtttagccccagtattttgcatggttccctgcttaagaaaatgccttttggaatatttgtaaactgaaattcgggatgggtaaaagatgtttaaaaatgtttgggtcctaaacagctttttaaaattaaacttgggaataaattcagcatcttttcaaataaactttatgaaagccca

SEQ ID NO: 564945 - DNA, 388 bp, Homo sapiens
  misc_feature (127)..(127): n is a, c, g, or t
  misc_feature (373)..(373): n is a, c, g, or t
agcgccaacaaaaccacacttcgaccccgcccgcgacacacaaacaaacacgctttagggccacccagtgctcctgctgtaagatcgttcaggaacacccgacagcattgcttcctcctcctcagtntctcacccaccaggcagctcagccacagcagccaccatatacaggagctcagactcaagcaggtcagattgaaggtcagatgtaccaacagtaccagcaacaggccggctatggtgcacagcagccgcaggctccacctcagcagcctcaacagtatggtattcagtattcagcaagctatagtcagcagacttgacctcaacaacctcagcagtttcaggggtatggccagcaaccaactttccngggaccagttcctgc

SEQ ID NO: 564946 - DNA, 304 bp, Homo sapiens
tcacctttctccaaaggcagatgtgaagaacttgatgtcttatgtggtaccaagacaaaagcgattaatgggaaatacctttggttctttggggcggcaatttcccccggttctatttggcctgaaaaaatttttagggaaggaaggccttaggccgggccatgtttctcacatctaacctgcctcctcccttgttgagacatcgtttgaggactcatacatctgtgattcaccatctggacagggctttgggcaaagctgggggattggccagctgactgctcaggaagtaaaatcgagtctc

SEQ ID NO: 564947 - DNA, 664 bp, Homo sapiens
tggctggtaggcccgggtggttgctgccgaattgggcaagtccatgaaaccggggaaggtggtgcttgtcctggctggacgctactccggacgcaaagctgtcactcgctgaaaaacatttgatgagtggcacctcagattcgccccttacagccagtggcttcgtggtgtggcgtggaattgtgaccgcataccccgcgcaaagttgacagcgtgccagtgggcaagaacgaagactcgccaagagattcaacagataacaatcttctgtggtgaaagtgtgtattaactacacatcaccataagtgcccacaaggatactcgtggtggattatccccttgggacaaaacgtgtcgatcaaataaggagtgtcttcaggagatccgtgctcttaaacgcaagggcccgaatcgtgggaggcccagaggttcaagcttttgaagaagaagtatacacagacacaggcacagaaacaaggtgcgtaactctcccagaaaaacgtgggggtttcaagagtcctaggggtatgagactacatcatcacaaattatcatacgagacaaaaacaaaacaaaaaaaaacaccacatcaagagccactcaacagactaagagtatttcggacaaaaaaagcaacgacaaacaatagtgtcaccttgttgtc

SEQ ID NO: 564948 - DNA, 152 bp, Homo sapiens
gggggggggcccccctttggggaggaattttttttttccccctgcccgggggaaggttgggaaaaatggtttggccccccccttaaagggggggccttttgggtttgggtttggtttccgggggggaaaaaaaaattttttttttcccccca

SEQ ID NO: 564949 - DNA, 344 bp, Homo sapiens
cagcctataggagataattccagagaaccaggcaaaaaaaaaaatcagtgggtgaggccaggtgcagtggctcatacctataatcccagcactttgggaggccaaggcaggcggatcacctgaggtcaggagttggagaccagcctgaccaacatggagaaaccccatctctacaaaaaatacaaaattagtggggcgtggtggcgcacgcctgtaatcccagctacttgggtggctgaggcaggagaattgcttgaacctgggaggcagagtttgcggtgagccgagattgtgccattgcactccactctgggcaacaagagcgaaatgccgtctcaaaaaaa

SEQ ID NO: 564950 - DNA, 155 bp, Homo sapiens
tggaaggtctgccgtcatgaccgcctttacagttactgccacttcttccgcggtcctgagtctcagacaccgctgtttgtacacctggtcacttaggggtctcctgtcaggattgctttccagcagcacgctgccccacaagttctgagatcctt

SEQ ID NO: 564951 - DNA, 153 bp, Homo sapiens
actctgcctgcactataaaatgaaccaaggaggatccagtttgctgtctgcactgacagatttacagacaggaaaacaaagccttacttaccaggaatccaaagtttatacatgaaaatttaaaaagggagtctatgcaaagcggagttcagg

SEQ ID NO: 564952 - DNA, 905 bp, Homo sapiens
atatctcgtctcacttgtccactccaccatgtgagattcagcatctgtgaactaggttttgctacctcctgtggtctctaaggaaaccctagtagatggttctcagagtgacattgacgaagcagcgacaacgatcacgcgcgcaagaatgcaaggctcgggaggaacgccggcgagagcgcaggattgagatagaggagaactaataaacaggggcaacgtacccagaagtccacattcctcctcgaagaatctacgagcgagtttgcctgccgtgtcaattctgtatacctagctccgtctgattctgcatttagggtcccgagccagcatcacgatgggaccatggtggcccgtctccgatattgctcgctctcagcagaagtccaggttacccattgcgagacttgttctagctagacacaccatcgggtcagccgactgccagtcagggacagtccctcattactgcgtcgggagtctaggagagaagactcctcccttcgcttccttcgtcccagatgctgagggttggacatagagcaataagcagatgtgtggccgaataactgctccataagcaaagatgagaacggcttagttccatcgctgtccctgtggacagtggagggggagagtgatagttctagaccggggtgcctggtgtcccacgggttccatggattccgttcagaccatgcttaatgaagctagccttgactgaaacgtggacaaagcagctccttcagatccctcttggagagaaatggggacgaaaggggacactgggaagcaaggctctggtaagagataacgtcccgcaaggacatgggccggcttccacggggtagagtgtgttatccccccggagggtggggattcaacgaaaaaaaccagggggggca

SEQ ID NO: 564953 - DNA, 553 bp, Homo sapiens
tctgtaactgtgcttgtgaatgtcaatcatatttaaagggaatgactttgaagtaaaaccttttttctgtgctactgaaaaaaatggagttgtttgggggtggtaaagtgttaaggaaatagggacagcgggctcacacaaggaactctggaaggccacatgtgaaacaccgtgtcactggcacagaggccagtcccactaagggtgaccagagggggctccaagcacaaacggccatgggcatatagatgggacggtgtccccccaaaattcatgtgtgggagccttaaccctcaagggtgagtggtattggagatggggccttgggataagggaagtttagatgaggtcacgagggtaggaccctcatgagtgggatgagtccccttacaagacctcgggactggggccgggcgtgggggctacacacctgtaatcccaacacttggggaggccaaggacaggtagatcaccttgatgccaggagttccagaaccaggcgtggccgacagtagtgaacaccccaatctctactagaaaaacaaaacaaagg

SEQ ID NO: 564954 - DNA, 113 bp, Homo sapiens
ttcaaaatgtcttccttccttatggtctataagccccgcagaaagtcttgcactcaatctgtcctttgttacatgcctttctgtccccagtttccaagctttcttcactttat

SEQ ID NO: 564955 - DNA, 228 bp, Homo sapiens
ctgatgtggtcagcaaaggcttagccatgatcaagttacagcaatatcagggctgcagaaaaatcaggctgctggaagtctcagggcacaccattggggctttacctctaaaccaattaaatcagaacctctggggacagcccccatcgaataggtgctataagatgcccagtgagtgccaaaatggggcatcactgaggggcacccatcgggtgttaaccttaacca

SEQ ID NO: 564956 - DNA, 803 bp, Homo sapiens
tgaatccacatctccttgaagttttttttgttttatttgtttttgagacagaattttgctcttgttgcccaggccggagtgcaatggtgcaatctcagctgggtgcaacctccgcctcccgggttgaggcgattctcctacctcagcctcccaagtagctaggattacaggccatgagccaccacgcctggctaattttatatttctagtagagatgaggtttctccatgttggtcaggctggtctcaaactcccgacctcaggtgatccaccccacctcagcctcccaaagtggtgggattacaggcatgagccaccgtgccgagccttccttgaagtttctgttggttttgatttgtattggtttagtatgtttgtttgttttctggagatagggtctcactctgttacccatgctggagtgcagtggcacaaatcttgcgctcagagcaacctctgcctcccaggctcaagcaatcctcccattcagttctaagtaagctgggactacaggcacgtgccaccaaggcccagtaaattttgtgtcggtaagagacggaggttttggccatgtttggcccagggctcgtcttgaaacaccgggggctcacaggcagttctgccccaattttcgctcccaaggtcttgacatcaggcggtgtgagtcatcaatgccagggcttcttgaaagtctactcaacacttgggattacttggtcggagcagaacgtgccattccatcaggctactgcggtctggatataatggagcacacaaaaatctaatgatttatcacttatctt

SEQ ID NO: 564957 - DNA, 126 bp, Homo sapiens
agtgtctgaatcctatctcagaaatgctcacaatgggctctgaaccctaaacaaccgtgttcatgtatgtggcaatgagcttgtgacaaacaaagctgggccaggcgcagtgactcacacactgta

SEQ ID NO: 564958 - DNA, 624 bp, Homo sapiens
agcggatgtggccgatggctcaagagagcgtggcgtcgcattgccgtttttgctcagaatcgcgactaatggcttttttatattttttctccctcttgaacggttagggctatggctgcgataaagggccgtcaactccaaggttgaggtggcgctgggcccaggcagcttggtgctgctcacatatatgcgccgcccgaggtctgcaggatgtccttgcggaccaacttgtgggtcctaaagggcaccattgaaaatgctggtcactggtgcgaggtgacattcaaaattcaccaaagatggcaatgtgcttgcctcgatgagatgcaaattcaaaattccaacagctccctttaatagcaaaagttagcaacagcctcaggattgacgtcacaggaggagtggtacatacttcaaagtgtccataattatgggacgagttactaaaaacaagctgaccgtgtaacattccgtgagggccgtgcacccgtggaacataattaccgtgaaggatttgagactcgtgcaagggattcaacagccttgtgagagttggggaggacattaacaagttgacaagaggacattaaacggaaaactccttctaatatgtcgcttagaaca

SEQ ID NO: 564959 - DNA, 339 bp, Homo sapiens
  misc_feature (50)..(51): n is a, c, g, or t
gcaagcctaggcaacaaaacaagactctgtctctacaaaaagtttaaganntgagccagacatggtggtgtatgcctgtagtcccagccactcagaaggctgaggcaggaggatcgcttgagaccaagagtttgagcctgcgatgagctgtgaatgcaccacggcactcaagcctgggcaatgtagcaagatcctgtctctacaagaaattttttaaaaatgagccaagtgtggtggtgcatgcctgtagttccagctactcaggacactgacgtaggagggttgcttgagactgagagttggaggctgcgatgacccatgaatgccccactgcactcc

SEQ ID NO: 564960 - DNA, 837 bp, Homo sapiens
  misc_feature (13)..(13): n is a, c, g, or t
  misc_feature (371)..(371): n is a, c, g, or t
  misc_feature (373)..(373): n is a, c, g, or t
  misc_feature (395)..(395): n is a, c, g, or t
  misc_feature (402)..(402): n is a, c, g, or t
  misc_feature (432)..(432): n is a, c, g, or t
  misc_feature (435)..(435): n is a, c, g, or t
  misc_feature (447)..(447): n is a, c, g, or t
  misc_feature (508)..(508): n is a, c, g, or t
  misc_feature (511)..(511): n is a, c, g, or t
  misc_feature (522)..(522): n is a, c, g, or t
  misc_feature (525)..(525): n is a, c, g, or t
  misc_feature (527)..(527): n is a, c, g, or t
  misc_feature (551)..(551): n is a, c, g, or t
  misc_feature (618)..(618): n is a, c, g, or t
  misc_feature (692)..(692): n is a, c, g, or t
  misc_feature (698)..(698): n is a, c, g, or t
  misc_feature (718)..(718): n is a, c, g, or t
  misc_feature (825)..(825): n is a, c, g, or t
gaatttacctacnagttgaaaatattcacaaaggacttgatcattcacactcatacacagagaaagtctgctgaataaaaaaatgctcctttacccattcgacctcctctcaggggctgcagtgggtttgccaattccactgtggggcttcagtcttcatgaatgttgaatagtttggctacttcattgagatcttcatgctgctcaccgtccttaatgatcttccttgctattggcattcggttaaagatgttccatagcacaatccccacgaccactttgtccctgaggtagaagatgacacctttgccgtagtcctccccctggacgggagctgtggaactgccgggggtgctgcggaggaataagtnantttccgaggcctcggactctgntctcacntcgtctgaatcggctaccacgttgcccgantgncccgtgggcagnattggggttgtcttgtgcagttgcttttttcaaaaacaccaactgtgggcaaactactgtnccncagaaccaatnagntncatagccaacatcgggggcccaantcactccagaacattgactgatgccagttcggcttagcagctccagtcatacttttctccagccaantcttccactcacaacaagcgtgatcattggtgctctaccccgcctccttccccaacttttatattcgtagaagnctgccngctactcctgcccacccagnatgtttagagcgtgcttgttagctctgcatttcacccgggaagccaccaaaaatctgagatttattttccaggccaccagtctttggccaactcaacaattgggctncaggcccacagc

SEQ ID NO: 564961 - DNA, 211 bp, Homo sapiens
atgctagcacgcacagagcgtaagagagctctgtaagagattttgaattctcagtgaagttaaaagtcactggccgggtgccgtgggtcacgcctgtaatcctagcattttgggaggccgaggcgggcagatcacttgaggtcaggagttccagtccaacctggccaacatggtgaaaccccatctttactacaaatgcaaaaattagctg

SEQ ID NO: 564962 - DNA, 268 bp, Homo sapiens
  misc_feature (102)..(102): n is a, c, g, or t
  misc_feature (108)..(108): n is a, c, g, or t
  misc_feature (117)..(117): n is a, c, g, or t
  misc_feature (150)..(150): n is a, c, g, or t
  misc_feature (152)..(152): n is a, c, g, or t
  misc_feature (217)..(217): n is a, c, g, or t
  misc_feature (220)..(220): n is a, c, g, or t
  misc_feature (237)..(237): n is a, c, g, or t
tgaggttcaataaattgaacaaccaatgttcaattatgttgtctcagtggacacaggtgtttgccaggaagcttaaagtcaatgggcaatatggctggccanactaanaaagacaanagggctggtccctgggccaaatccgaaattatnantccaagtctgggggaatatactaggagctgctgaccactggcctttcgttaatcaggaggctaanaangccacaaaaggcctgangttcaggcaccctggctggcccttaacggtc

SEQ ID NO: 564963 - DNA, 460 bp, Homo sapiens
  misc_feature (126)..(126): n is a, c, g, or t
  misc_feature (460)..(460): n is a, c, g, or t
ggagccatgtggctccggccggtgcgcgggcctcggaccctcagagaggcgagggttcgagggcacgagttcgaggccaacctggtccacatgggtaaaaaaaaaaaacaaaaaaaaaaaaaaaantttgtggggcgcggccgcgggcctagaaaaaggttttcaagaccctctcgtttggggcgcgcgggggaccaagtgagggtaactgaggagacaccttgggcccacaaggcggtggaccacaggggagactccgtggggcagagacataggtggtggggttgctctcaccccaattaaaaaaacgggcggggggggaaccggagggctctctgagacaaaatcccccaggggggggttccgggaggggcccaaacagcgggtctcaacaccacaggggtgcccccaagggagcgcccagatattcaaattttaacgccccgccggtcgggggagn

SEQ ID NO: 564964 - DNA, 1510 bp, Homo sapiens
ccctactatgagaaaaatgataccccatataggattgccatagacttattattcgcatgactgaaaagagtaattatagctatagagtgataaagctttgctctatatgcatcgatgcatatgcatgcatacgtcatagcaaacgcattttaaggaaacgggcgtaggtatgcgaataaagcataataataaaatacaaagtaattaaagcctataaccccaaatagtatacataatacccataataccaaattcaaatatataataccccccaaaagttgcttatgcaagaaaattcaaggatattatccaataaatatataaatattagatgatgtgtaatatccttagttatatgggaatggtttaaggttagttagcgttttagtaggttaatttgggaccctaatcgagtagcttttcgtgatgagtaatttaggtagttagttactatataaggtagtattagttagtttaccgtattagtttaacgtatacgttacgtatatcgtcttacgttacgtgtatatgcgttactacgtagtagtaacgtaagattagtagtatacgtagtatacgtggaataatgttttggggtttgtgtcgcgcgcgcatatatcgctattagctacgtcgtaaacgtaccgcgcttaagtaggaagagtagctcattacagtattaggacgtatactaattatatgccgtagtagtagctacgttacgtatacgtacgtagcgagttagttagcttacgtacgtgagccctacgtacgtattaaaaagtgtatatagtagtagtatgatatatcgggtattagttatacgtttatatatatatatacgagctacgttaacattagctgctacccgcgcgagagagatatatatacgtatatttgcaggatcgtagtgtagttgcagttacgtacgatacgtgattacgttagtagtagtttttaggtagtacgtatatcgtacgtagtaatagctttttaatacatatacgtgtcaatgcgttagctacggtgaaacacgtactcagcatattaaagtagcgtcgccctagtatcccatcgcccaaatgctatgctcggcgtccattgcatccaaatataatgagatgcaataaaacccccgggggttaaacgtatgtatgcataaattagtgaatatcaaaaaagtaaataatagaaaagtttaaaaatattaacgccaaaggataataaataataagacccataaataaataaaaccataaaataaaatcccaaccacaacgcatcacacccacacgtaactacccatcacaaaagtaacgtaactagcacagttaaaaggatatcgctactcggactacggcggactagactagcgcgatcggctaatcggatcgcgcgcggtcataccgcgtcgcatcggcgctgtatacgcgcgatcgggcgcgcgatatatcgtagcttcgattcgctctacgctcgcatgcgcgctcaggatgatacttctttttca

SEQ ID NO: 564965 - DNA, 941 bp, Homo sapiens
  misc_feature (1)..(1): n is a, c, g, or t
  misc_feature (99)..(99): n is a, c, g, or t
  misc_feature (106)..(106): n is a, c, g, or t
  misc_feature (116)..(116): n is a, c, g, or t
  misc_feature (136)..(136): n is a, c, g, or t
  misc_feature (142)..(143): n is a, c, g, or t
  misc_feature (145)..(146): n is a, c, g, or t
  misc_feature (156)..(157): n is a, c, g, or t
  misc_feature (159)..(159): n is a, c, g, or t
  misc_feature (210)..(210): n is a, c, g, or t
  misc_feature (218)..(219): n is a, c, g, or t
  misc_feature (235)..(235): n is a, c, g, or t
  misc_feature (247)..(247): n is a, c, g, or t
  misc_feature (250)..(250): n is a, c, g, or t
  misc_feature (261)..(261): n is a, c, g, or t
  misc_feature (265)..(265): n is a, c, g, or t
  misc_feature (278)..(278): n is a, c, g, or t
  misc_feature (281)..(282): n is a, c, g, or t
  misc_feature (287)..(288): n is a, c, g, or t
  misc_feature (291)..(291): n is a, c, g, or t
  misc_feature (296)..(296): n is a, c, g, or t
  misc_feature (301)..(301): n is a, c, g, or t
  misc_feature (304)..(304): n is a, c, g, or t
  misc_feature (307)..(307): n is a, c, g, or t
  misc_feature (321)..(322): n is a, c, g, or t
  misc_feature (324)..(324): n is a, c, g, or t
  misc_feature (327)..(327): n is a, c, g, or t
  misc_feature (334)..(334): n is a, c, g, or t
  misc_feature (338)..(338): n is a, c, g, or t
  misc_feature (340)..(340): n is a, c, g, or t
  misc_feature (345)..(346): n is a, c, g, or t
  misc_feature (354)..(354): n is a, c, g, or t
  misc_feature (357)..(357): n is a, c, g, or t
  misc_feature (360)..(360): n is a, c, g, or t
  misc_feature (363)..(363): n is a, c, g, or t
  misc_feature (366)..(366): n is a, c, g, or t
  misc_feature (369)..(369): n is a, c, g, or t
  misc_feature (375)..(376): n is a, c, g, or t
  misc_feature (379)..(379): n is a, c, g, or t
  misc_feature (382)..(382): n is a, c, g, or t
  misc_feature (384)..(384): n is a, c, g, or t
  misc_feature (401)..(403): n is a, c, g, or t
  misc_feature (412)..(413): n is a, c, g, or t
  misc_feature (415)..(416): n is a, c, g, or t
  misc_feature (781)..(781): n is a, c, g, or t
  misc_feature (802)..(802): n is a, c, g, or t
  misc_feature (914)..(914): n is a, c, g, or t
ngagcgaagcgttttacaaatattaattcacttaatactcacatcaatcttataaagtaagtgctcttgttatttccttttacaggtgaccaaactgangcatggnggtttaatangcttacccaaaactacacancaaggnngnngctgtgtcgnnantcaaactcagtcactgtagcccccaagtccatgctcataaccaccaggaanaaaaagannctcctattctaatttnagtctgacagtnggnccagtcatggnttcnatacagctcagcngannaatgnngcncatcncggcngcnacnctaaaatgctcagnnanggncaaccangcgncngaggnntaacatcngcnatngcncanccnatgtgnntcntgngngccctctgtctttattnnntttgggggnngnnatcaaggtcacgaaatcaagtgactggtgatggggcctagaaatgagtgtctccccccacccccggtttccgctctggcaggcgggtgttagcggatggtgtacttgtcccacttcttctcggggtcataggcctcccagcggctggcggggaagatgtgcttgttcttctcgtaccagctgcgcagaccaccttgcccgcgtgcgactcgtccttctccatggtggcgtcgctgagcaggcgcacgtcatcgtgcacatcgaagctgaagagcggcccgctcttgcccctcgccctggcgatgatgaagtcgtagaaggtgtggtagtgcggcaggatgaggtcctccttgatgaacatgagcngctccacgccggcggacgcancagagaaagtccttgcgcagccctgcagcgccttcttcaggactgctgcaccgtgttgccttgcgcaccgcaccgtgcgccggtcgcccgacccgtcccagtagctgaaggngacctccatctcctcgtccttcacttt

SEQ ID NO: 564966 - DNA, 131 bp, Homo sapiens
cagaatggaaacacggttacccacactacctcgcttgcacagctaaacagctagcatatccacgagggttcccttctttttcttggcaagtcagaggaatttacctccccaccccctctactacatattct

SEQ ID NO: 564967 - DNA, 437 bp, Homo sapiens
ctctctggaaggcctgggagctgaattccggaagatccccacatcgatgaaagcaaagcgaagccaccaagccatcatcatgtccacgtcgctacgagtcagcccatccatccagtggctaccactttcgacacagcctctcgtaagaaagccgtgggcaacatcttgtgaaaacacagaccagagatatcacctagaagggctcttcagaaactcgtggagcaccaagaaacgccaagaggcagagagccagagatcattttggccatagatcaggattgtggcaggagaaaagcgctgtgcccgtgatgggccttgaaagaacgaggacaaaagacaagcttttccagtttcgtgaacactggcggaaatatcccatcaaagttcactgacagagaagaggagtggataaggacgttatccaagaagtggaccac

SEQ ID NO: 564968 - DNA, 188 bp, Homo sapiens
gatgctccagctccaatccccagatgagcagttaagcagctgacagttggagggaaagccagcctgggggctgggaggatcctggaaaagtgggtggggacagaccagcccttccccatcctggggttgccctgggggaaaccagctgagtttgaattttgctttaaataaaggcggctcccgaagga

SEQ ID NO: 564969 - DNA, 239 bp, Homo sapiens
cacgcgtcgctgggcgccattcctggccctcccgctgcatcttagacctgacacccaacggggggatgtggtggccctgtgcccaccttctctccctcctcccgaccgcccctgccccacccctgtgtgttcgccagttaagcacctgtgatccagtactactactggtttgggttggttgttctgtctttttacttaacaatcaaccaacatgctgcaaacgcacagacacacacacc

SEQ ID NO: 564970 - DNA, 124 bp, Homo sapiens
accaggcgctcatatcatggcagcagggtcaggggggggccaggggcagcatacgtcccagccccctgttgggctgtctcgggcgagtaggcagggtgccctgttccgggtgtccctccacggg

SEQ ID NO: 564971 - DNA, 213 bp, Homo sapiens
gctaagactatggtgatgacatagctctgctgaagcaggcccagaaagtaaagatgaccacccatgccaggaccatctgccttccctgcacgatggaggccaatctggctatgcggagacctcaaggccgcacctgtagggaccatgagaatgaactagctgaacaaacagagtgttcctgctcatttagtcgaccagaatgggagaacacca

SEQ ID NO: 564972 - DNA, 126 bp, Homo sapiens
acccgagtataaatagactatgggttgcaagcactgagcactgtaacttctatcacgtctctctttaatttctgggatataaaacaggctttaagttacttggattagcccaagggcagagccagg

SEQ ID NO: 564973 - DNA, 395 bp, Homo sapiens
agtacatatactgtataaagaatgaagatgcacacatcagacagacaaggagcgtgtgatgctccgtggcgcttgagagctacacggggtgtgtgggtgtggaagggactatgccagaatccccagcagctctctggtttacagctcctaggtacagaacagctggtgtctagcacctgtgttagaggtttcgtcacaccgaggctgggcccagtcccctctttggcagcgtgccagttgctgagaaggtgattgtggtcacctgcagagggttcgagtcacttgcgctcagggcacacggcttctctcaccatactctgctttttgcactcactccctagttgagcctactggcatcttgctctagatgccctggcccgggatggctgtgcagc

SEQ ID NO: 564974 - DNA, 338 bp, Homo sapiens
attcagaggatccccttttttcttttcttttatttttgacagagtctcactgtgttgccgaggctggagcacagtggcatccacacatcttacctcagccttgacttcctaggctggtgcgatcctcctgcctcggccccccaagtagctgggactacaggcgcccaccaccacgcccggaaaatttttgcattttttcagtagagatggggtttcaccgcgttagctaggctggcctcaaactcccgacctctggtgatccgcccacctctgcctcccaaagcgctgggattacaggcatgagccaccgcgcccggctgaagttttgtatttttttt

SEQ ID NO: 564975 - DNA, 102 bp, Homo sapiens
tatcggtcggtacctgggacatggggggctgagctgcctgaaggaactcctcatcatgtgtcctgctgccattgctggtcccactttcttgaaccctgccct

SEQ ID NO: 564976 - DNA, 241 bp, Homo sapiens
  misc_feature (181)..(181): n is a, c, g, or t
gatcgacccaggcctcatggtgcacatctgtggtcccagctactcaggaggctggctaagtgtttgtatttttgatagagatggggtctcattatgttgcccaggctggtctcgaactcctgagttcaagcgatctgcccaccttggtctcccaaagtgctgggattacaggcgtgacacntgtacccggcccttcctcccttacgcgctcttttctctcttccctaatttatgatggtgc

SEQ ID NO: 564977 - DNA, 943 bp, Homo sapiens
cagttgtacaaaccccaggtataaacacggcagtactatacggtctaaggtagcgaggctgggtgggcataaagcctacgtttctgtggggcatcgtgacgccgctggcactggctttgggacctcttccagttccgccacgcttgcgtgatataagtgcgtggaggaaataatgggtgggcaaggaattaacgtttcatcctgccatcggcgccacgtaaatggaggtgccggctcttccactgcgtggccgcagtgtcattgacagtcacagattccttggacttcgtaaagatcatcaccatcctggtcacggccacagccgtccagcgtgggggcacgctgggctatccctgctggaggtgtcctcactctggccatcatcctcgaagacagtcaacctcccggtcgaccatatctccttgatcctggtctgtggactggctagtcgaccggtcctgtaccgtcctcaatgtagaaggtgacgctctgggggcaggattcctccaaaattacgtggaccgtacggagtcgagaagcaccgagcctgagttgatacaagtgaagagtgagctgcccctggatccgctgccagtccccactgaggaaggaaatcccctcctcaaacactatcgagggtccgcaggggatgccagggtcgcctctgacaaggaatcagtcatgtaaaccccgggagggaccttccctgcctgctgtgggtgctctttggacactggattatgaggaatggataatggatgagctaaggtctggggtctgctggcaaatctgggacccagggccagcacccctcaggacaggaatctggatgctggttgtggattctgtgttcaaaggttatcctcaaacccagtcctcatctgcgccatcaaggttgaaacagcaaacgaaaatatgtctgtgcttccactaactgtgctcc

SEQ ID NO: 564978 - DNA, 339 bp, Homo sapiens
catcctcgcttgtctttgatgcggatcctagtctatgtgcttgaactccctgggcatagttctgttgatccgcctggtgatagctacctctggtcctggcgtgcaggggaggctgacaggaggatcctccagcctgtgccagctatagagcagctaactgcatccgtatagcagactgtgctttgactctagaaagggtatagtactatatggaaaaggtattataaactatttgcctttgaaggccaaagtcacccctattgtgtatcagagcaaagttaagactgctttcctcagagaccttggccagtgcttagtgccaccttcctgtggctcaca

SEQ ID NO: 564979 - DNA, 177 bp, Homo sapiens
atttaaccgtgttagccaggatggtcgcgatcttctgacctcatgatccgcccacctcggctcccaaagtgctgggattacaggtatgagccaccacacccggccttttttttttttttttttggaaaggaattttcttttttgtgccccaggttgaattgaaaggttccaatttgg

SEQ ID NO: 564980 - DNA, 1070 bp, Homo sapiens
  misc_feature (363)..(363): n is a, c, g, or t
  misc_feature (376)..(376): n is a, c, g, or t
  misc_feature (467)..(467): n is a, c, g, or t
  misc_feature (493)..(493): n is a, c, g, or t
ccctcagagagacagcagaaagggagggagggagggtgctggggggacagccccccaccattcctaccgctatgggcccaacctcccactcccacctcccctccatcggccggggctaggacacccccaaatcccgtctgcccccttggcaccgacaccccgacagagacagagacacagccatccgccaccaccgctgccgcagcctggctggggagggggccagcacccccatggccccactacccctctgaggtggccagaatggatttgtggccaggggcatggatgctgctgctgctgctcttcactgcatgctgctcttacctgcatgaccaccctgatggttctgcaggccccagntgccaagtacttncttcaagatggccttctacaatggctggatcctcttcctggctgtgctcgccatccctgtgtgtgccgtgcgacggacgcaacgtcgaganaacatgaagatcttgcgtctaatgcntgctccacgatcaagatacgctgtaacgggactccgagtggaggttgcgagggggctcagacagtgaccctccctcgcaggccctattgtaggttgtctccaacccgaccagacgctcgtctcgactctgcactggcgaatgcatggagggtacttgcccatggccggtgatgtagcccaatttgccagagccggcgagcaactgatggggcttgacgtacatgccagggctggacttgcggtgctgggcacgcgagtccatccttccagacgagccggaagcgcgacggggggatagcccaggcacagagggaagacgtggtagtgacggggaccagacccaagaacgaccgtggcgcagaccagcaggaccggtcaagggagaccaggcgagaggaagcccatcagaagggaagcggcgaaagcgcgacatgggcgcccgaagtggaggggcccgtcaacaacggagtgcgcgccatacgacaaatgcaactcagggggcgcccgcggggaggagcaggaggggcgcgcagagaggacgtaggcgaccgaaccagcagaaggaagggggaacgag

SEQ ID NO: 564981 - DNA, 1271 bp, Homo sapiens
  misc_feature (898)..(898): n is a, c, g, or t
aagaagttattatctcgaaactgatcatctgatgccacaatcccattacaacgccagtctcttccctaaggctttcaaactagaactacttctccataatattcatccctgtatgcaattgtttcgttacatggtcgcatcagtagaatatactcactgtgtagtgatataaatctcgagatcctcgataatcattcaaatcatgtctaccttcagaagtattcttactccaatcattcgctagagttatccaattactaaaatcgtttaggttagctcgtgtaaatcaaccctatttcgccatactgtttgcatccgggcttgcaggaggggccgctagggacattgtattatcccctatgcatattggcttccgaagtccaaggtctcgaatggaactagcggcacgcagtacggccagaagtggtccaaccaagaatgcggaggcacacttttccacatggcgaaatccccttattgagctagaacacagtcactcagtgcctgattaattcagagtatttcactgccattcagtccattctatgggcagctgattggtttaggtccccgttagacaacttcttcgaataacggttccactggagaggaatcacccctaaggagagcccaaaggacttagtgccggcccttttcgtttagaaacctcggctctataatggttcccaacacggcgcggttcaaagcgctcgcttaacggtatctttgaaggggcctcgatccgcagtcgccagtaaggtctaggagccgacagacaaatgggggcgtacacaattttccaaaggccctccaggaggttagaacggggtgtcagtgccccaacagcaaccccgttggaaagagctgtactgcacaccactttcaaatgttccccaanttacagacaatgtgagacacacccgctaaagacacacacttataggttctttgctaaggcacctccaatcagtcgttcggcgaacccatcctgagaagtggctcagccttcatgtgtagggcacttactggctttgagagcccattgggggtaaaaagttccgcttcttcggtgttaaaccttccatagttggcgccgaggtgtcgttgccgaaagccaacctgcgcggtaagacagacagttcaacaaccgatttgagagacccttccaccagttggagaagtgtctctaataggagactctccgattagaacaaacgtgtaagttgcccatctcaagcgagccgtggcttgagataccacccctaggcatt

SEQ ID NO: 564982 - DNA, 655 bp, Homo sapiens
  misc_feature (363)..(363): n is a, c, g, or t
  misc_feature (376)..(376): n is a, c, g, or t
  misc_feature (465)..(465): n is a, c, g, or t
  misc_feature (467)..(467): n is a, c, g, or t
  misc_feature (471)..(471): n is a, c, g, or t
  misc_feature (474)..(474): n is a, c, g, or t
  misc_feature (480)..(480): n is a, c, g, or t
  misc_feature (489)..(489): n is a, c, g, or t
  misc_feature (503)..(506): n is a, c, g, or t
  misc_feature (522)..(522): n is a, c, g, or t
  misc_feature (542)..(542): n is a, c, g, or t
  misc_feature (545)..(545): n is a, c, g, or t
  misc_feature (590)..(590): n is a, c, g, or t
  misc_feature (652)..(652): n is a, c, g, or t
ccctcagagagacagcagaaagggagggagggagggtgctggggggacagccccccaccattcctaccgctatgggcccaacctcccactcccacctcccctccatcggccggggctaggacacccccaaatcccgtctgcccccttggcaccgacaccccgacagagacagagacacagccatccgccaccaccgctgccgcagcctggctggggagggggccagcacccccatggccccactacccctctgaggtggccagaatggatttgtggccaggggcatggatgctgctgctgctgctcttcactgcatgctgctcttacctgcatgaccaccctgatggttctgcaggccccagntgccaagtacttncttcaagatggccttctacaatggctggatcctcttcctggctgtgctcgccatccctgtgtgtgccgtgcgacggacgcaacgtcgcncncctnccnctcttncgtctactnctgctccccctccnnnncctgtccgggctccgngtggcggtgcgcggggctcnccncttccctccctcgccgccctctgttgttgtctccccccccccgcnctctctcgctctgcttgggctgatggaggtactgccaggccgctgtgtgcccattgccaagngcg

SEQ ID NO: 564983 - DNA, 989 bp, Homo sapiens
ggtgacaatgatggcggcggagcgtggtggagtgcaaaaacatggtgatgagtttacgagtctccgaccttcagagtgctcctgggtttcgttgggccggcagtaagagctggactgtaagcgacgaggctcgtcaccagggccctccagctggtgcagttggactgtatgccctgagctgttcacggaagatcaaggagctgtaccgaggacccggtacgccgaagacaggaactcggagcctgtccccacaggcgcagcgtgtcccctggagccccttgacactatgcactccgaccatacagagcggtgcctggcgtctgtgcctcaggacatccgcatggtaaggcgctccaagtattgacttacccgcgttgcatcgtacggaaagtacttaaaacggacatgggacggttggtcactgctcgcaaggacacctgcaaaggccatgagaggtcctgctcgtggttgaaaagcatagccgttgcgtattaagtaattgcctggattgtaggactggcatggagagacccaagccgaaatttagtgcccccagcagagaccaatcagagaaagcctttacacggatggagcgcccggttagcattctttacggcactttggaacggaccaaggaaggagggatgggaaggatcggaaacccaggagaccaaatcccagcgggtcaaacgtggcaggcacgcgggaagatttaaaggagcccgtggccaggaggtgcagatcccgtgaaggcaaagatctcttggtgaacatcctgggaagcaaaaccaacgcgtgggaccccagtcccacggggagagggacccaagagcataagaccccggacgccagaaacagatttcggaagttgagtagagaagggggtcaagacaccgacacaaggtaataagcgagagcttcccagagtccccatggagggcgtcaacataaaagacgcgattaccaagatataacgggggcccagaggg

SEQ ID NO: 564984 - DNA, 132 bp, Homo sapiens
cctcaactgcgcccgcgggaggtagtgacagaaaaataacaactacacggactctttcgaggccctgttaatttgaatgagtccactcttaaaatcctttgaacgatgcatccatctggagcggcaacgtct

SEQ ID NO: 564985 - DNA, 523 bp, Homo sapiens
  misc_feature (96)..(96): n is a, c, g, or t
gaggcttggggtaggcttggccttaaggggacagagtcagtttcacgctggttttgtaataaaaaggccccagcgggcccagtgtaagctaacagnaccgtaagccagggcaaatggttgggggacctcactttcccttttaggtgggccagggggttggaggcccctaaaaaaagataagtaagccccagtgtccccccagcccccatgtttatgtgaaaatgcgctgtgtgctgcttgctttggaaattgggcttgggtccaggcctagggtgagctccctgtccgtacaaacacaagatcagggttgagggtaaggaaaaaaaaagcttaggaaagctgggcccaaaactggagcctgtttgtttttcctggaaatgcaaaactgggcccgtggagcagcagtgtcagcatcaggggggaacccttaaagcagcagggggtgggcccaggcacccaaatgattcttatggccccagccaggaaaaatggcagtttttaaaggagaaaatgtttgagccca

SEQ ID NO: 564986 - DNA, 688 bp, Homo sapiens
ggttggagtgccaatagaaaatgaaaacaaatgccttgtatctacagggtcagtcctctgaaaggtgtaccacgataactagtcttcatctgtcgaccaactcggagttccctgtcttgctttgtgaagaaggggcttttgtaaccttgctaggcagatgccacctcaggaagttcacactgtgcaggagaacaggttttattctctcctggcatacattagaatgtcacgatgcttgcttccatgtggaccacgatggggctctaaaaattggtgggcacgggggtttgcttatgagttctctctggaaaccgattttactcctggatgctattgaatgccccttgagtcttaatgagtatacgagttccacatggctaaaatgttagacagtggagttctacagaggattccaggaagaggccatgtctgtgcagatcctagttccagacaggtgagatagctccacggaagctactggtctagcttgacatagtctgggtacaatagttactcattctcgggtaactggcttgaaacatctgacttctaggacgagtaattcctggggtactgtctgtggtagcatcaccagggatatatgggtgggacagacagagtacacacagctgcctgttctctcctgcccatcgatgtttggaccactagatgacgctgtactcagcaa

SEQ ID NO: 564987 - DNA, 398 bp, Homo sapiens
  misc_feature (7)..(7): n is a, c, g, or t
aagcttntctagaggatccctttcttgccaaagagttgagacagggcttgagctggtgtacaggacggaggtggtgaagaacaacctgaacccggtgtgggaggctacaaagtctctctgagtaccctctgcagatgcgaggagacaaggcctctaaagtgcctggtcttgggattacgactctcgatggaaagcacgacttcatcggacgaattctctaccaccttcgaggagatgctgaaggcctttgaggaaggggcagtgcccaagtgcgcctgtgtgaacaccaaatacaagcatgaagagacgcagttataacgaactcagagagtggtcgtccttgtgcagacctcaagttccacatgggtgtactccttccttggactatatcatgggcg

SEQ ID NO: 564988 - DNA, 302 bp, Homo sapiens
ctgctgaaagaaatgaaagaaggtctaagtatggtcatgtattgcttaaccatgggggcaccttctgagaaatgtgtcgtgtaagtgaattcgtcgttgtgtgaacatcacagagtatacttacacaaacctggatggtatagtgtactacacatctaggcaatatggcatagccttgctcccgggctacaaacctggacagcatgttactgtattgaatactgtagacaattgtaacatgatggtatttgtgtatctaaacatagaaaagatacagtaaaaatatggccttataaaaaaaa

SEQ ID NO: 564989 - DNA, 181 bp, Homo sapiens
ggtgagaaccagatggttagtattgatgaaatgtgcactgacttttcatgtacaatgcaagctagcgagcaatctctctgtcgcgacacacagacgatcaacctctcgataaatcgcaaaattgcgcacaagagatgtagatctacatgacacatcatagtcaacatatattactaatggc

SEQ ID NO: 564990 - DNA, 196 bp, Homo sapiens
actagcgcttatgagtctctatgatgattaacgtttctaagatatctgaagcaccattcagaaacttgttttggggaatgtgatagttattgatgtgcatctgtataaactgatgacagacataactcatcattccccagaaaccttttgtgattacagtatctaacattttgcctcctcttttgtggttttgctg

SEQ ID NO: 564991 - DNA, 566 bp, Homo sapiens
  misc_feature (167)..(167): n is a, c, g, or t
  misc_feature (173)..(173): n is a, c, g, or t
  misc_feature (175)..(175): n is a, c, g, or t
  misc_feature (180)..(180): n is a, c, g, or t
  misc_feature (186)..(186): n is a, c, g, or t
  misc_feature (201)..(201): n is a, c, g, or t
  misc_feature (553)..(555): n is a, c, g, or t
  misc_feature (558)..(558): n is a, c, g, or t
  misc_feature (560)..(562): n is a, c, g, or t
gaaacagtaactccctccacacactacctcatgcttatatcattaacagtgtaactcttggagattgtgcacacccaccaaaagagaattgcttgaacccaggaggcggagtttgcagtgagctgacatcgcatcactgcactccagcctgggtgacagagcaatantccatntngaagnaaaagnaaaaaaaaaaaaatncatgcacagaaaaaaaagttcaatcagtgcataaggacatatgcaacaagtctccctcctactgtttctcctgatctgcaggtcccctccctaatggcaatcactgttacagtgtaacagagattctgacataatcttattgtatgtatttccttcacccccacgcatggaaacagtaactccctccacacactacctcatgcttatatcattaacagtgtaactcttggagattgttgcacacccaccaaaggagaattgcttgaacccaggaggcggagtttgcagtgagctgacatcgcatcactgcactccagcctgggtgacagagcaatactccatctcgaagaannnganannnaaaa

SEQ ID NO: 564992 - DNA, 479 bp, Homo sapiens
  misc_feature (80)..(80): n is a, c, g, or t
  misc_feature (86)..(86): n is a, c, g, or t
  misc_feature (88)..(88): n is a, c, g, or t
  misc_feature (93)..(93): n is a, c, g, or t
  misc_feature (99)..(99): n is a, c, g, or t
  misc_feature (114)..(114): n is a, c, g, or t
  misc_feature (466)..(468): n is a, c, g, or t
  misc_feature (471)..(471): n is a, c, g, or t
  misc_feature (473)..(475): n is a, c, g, or t
cccaaggaaggggggaaattttacaagtaagttgaaaatggcgatcaatggccctccaggctgggggccagagccaatantccatntngaagnaaaagnaaaaaaaaaaaaatncatgcacagaaaaaaaagttcaatcagtgcataaggacatatgcaacaagtctccctcctactgtttctcctgatctgcaggtcccctccctaatggcaatcactgttacagtgtaacagagattctgacataatcttattgtatgtatttccttcacccccacgcatggaaacagtaactccctccacacactacctcatgcttatatcattaacagtgtaactcttggagattgttgcacacccaccaaaggagaattgcttgaacccaggaggcggagtttgcagtgagctgacatcgcatcactgcactccagcctgggtgacagagcaatactccatctcgaagaannnganannnaaaa

SEQ ID NO: 564993 - DNA, 785 bp, Homo sapiens
ggccgaggccgggtcccctcccctacgcgccccaggatggatgatgccctgcgcccgggtggtctcgtgctgggcggcggcggtcggcggccactgatgactcctgacggagccgtctcgggttccgtgcgcgaatgctggttcttgccgatcgcgcggctgctctgcgcctacgggcttcttcgccaggccatcaggccgtccgagccgctttccttgatcgcccgtacctgctggggtccggacaagaacctgaccgagcacgggatggtcttcaatgaaatttatccagtatggactaacgtctataccttaggttgctaacgtggatttccgtgtgtccttgccacagactacctccgttataaacctgttgttctactgcaggggctcagcttatgtacatggtttatgctgtctatgcccaggactgtggcattcaatttctagaatttttttatggatcgcacagccactgaaaagcctattacctaattacaggggggacgggcatgtccaaaagcacaagtacgtcgaagtgcattggtgggcttaaggggtctgtcctagggcaatctgtctcagggcagcgtcgctgtcagctgaatgtcatctctcttactgtgttcagggtttgtgggccggtttacctatcaaaaagctcttttacacatcttaactggcaaaggatggccccggccaatgggggtggacgaacccagttacactctggggagctgataaacccaaaaggaccggagcacaaacacaagctttagaaagac

SEQ ID NO: 564994 - DNA, 906 bp, Homo sapiens
  misc_feature (9)..(9): n is a, c, g, or t
  misc_feature (181)..(181): n is a, c, g, or t
  misc_feature (194)..(194): n is a, c, g, or t
  misc_feature (200)..(200): n is a, c, g, or t
  misc_feature (210)..(215): n is a, c, g, or t
  misc_feature (321)..(321): n is a, c, g, or t
  misc_feature (412)..(412): n is a, c, g, or t
  misc_feature (468)..(468): n is a, c, g, or t
  misc_feature (470)..(470): n is a, c, g, or t
  misc_feature (535)..(536): n is a, c, g, or t
  misc_feature (539)..(539): n is a, c, g, or t
  misc_feature (553)..(553): n is a, c, g, or t
  misc_feature (608)..(608): n is a, c, g, or t
  misc_feature (633)..(633): n is a, c, g, or t
  misc_feature (635)..(635): n is a, c, g, or t
  misc_feature (657)..(657): n is a, c, g, or t
  misc_feature (789)..(789): n is a, c, g, or t
  misc_feature (792)..(792): n is a, c, g, or t
  misc_feature (805)..(805): n is a, c, g, or t
  misc_feature (819)..(819): n is a, c, g, or t
  misc_feature (823)..(824): n is a, c, g, or t
  misc_feature (837)..(837): n is a, c, g, or t
  misc_feature (844)..(844): n is a, c, g, or t
  misc_feature (859)..(859): n is a, c, g, or t
gcttaatgnactatatgcacctttaaggtgagcataacacaagaagcctatatttagcaaggaagttaatttgtttgtcagcaagtctaatatcttagaggaaatatttatttcaaaagtaataactaatgtggtcatattaattaatcagttaacagttacaatgatggaaacccttaanattcatataaaanactgcnattccatttnnnnnncttgcatatttcacaattatatgttttccaatgatctattaacctaaactaaaaattaaatacacattaattcatcaacagtgatataacttcaaggctgagaaanatgcactaatcacaaagaatttcaattaaatgatatcaaggagtccagagagaagaaatatttcctgtgggagaagttctaattataaatnactgcgtattggtttaaagactaacatacacctagctttaccaacacttgtgaaananattacacattacatactttgttcaaagcctaatatgaaaattgtaacaaatcctctactgaaaannaanagtgactacctganagagattcataacatctcattaacaaagcaaaactgttaaactaaaaaggttcanaaaaaaaagtcttcagttacaaacnanaccgccctgattattccctatnaccgcttcttaaacaactaaaaaaatattttgtcaattgaaaaaacatcactgaatcaatgagcttttgatcattttattcacaaaatataagcgagacttacatccctttctggtgaaagttttcaaatanttntatgggtagggcnttgagatgtatcanttannaaaacatgttaanatgaaanattttttaaattacnaatacaaccaatactttatacaagattctctataagttcgtcaagta

SEQ ID NO: 564995 - DNA, 292 bp, Homo sapiens
gctgcaacctctgccgcctgggttcaagtgattctcctgcctcagcctcctgagtagctgggattacaggcacctgccatcacacccagctaatttttgtatttttagtagagacggggtttcactatgttggctggccgtggtcttgactcctgacctcgtgatccacccacctcggcctcccaaaatggtaggattacaggtgtgagcaactgttgcccagccaggcaaaggtttttaagtcttgcaggatctacatgatcctacctaatctcttcaggcctcccatacg

SEQ ID NO: 564996 - DNA, 272 bp, Homo sapiens
atattattctttagaaggagtgagtagtgtacaggagggttaaatgctttatagacaagaaaaaaaaaatgcgctaaaccaacttattcatcataatcatcttacttcttcatcttcatcttcttcatcttcctcctcctcctcatcctcttcatcttcctcatcttcctcctactatccgttcttgggctatgcaatgatacagactatgacaactccctattaagagatagcatcaggattaccttaaggtcgatagtgcagcaaatatc

SEQ ID NO: 564997 - DNA, 945 bp, Homo sapiens
ttgtgaaggaaggaatgtcgtctcgttcagcgcgtaccaagcagcgcggtcaagcgagaaaacacggagttcgccccttaggtggcgaaatgtgtcggatgcgaatagcgctggctcaggcgtacagagcagcagtgcgctggtaacgagaatgcctagcggcggggaactagtcgcgcctgcagctgcgtcagcgggaaggaaggcaagtgagaacagaacctgagacgtgacacctgcacctcagtcacaagaaatacgtccacattggattctaccgggggaacgacagtgggtcagaaagactctaccggaacatctacctgaccacatacgtcgaagaccatcttaagaagcaaactagagcattgccacaggacttacacctgagtagaactcgctggccagacagaaagatacaccaagaccacacccattgtgccgcttgcgtgtcctacaccaagcatacaatggcattcccttgaaacagaccagagactggcaaacaggggtcgaatgggcgtgatcttcgcatttgtataggtgcatcacatatagcctgggggccgtctgaggataataacggaagtttcacggagcactccgtcacaaaaaagcccgcgttcaaccgggtctttgcggaccaagaatgatctggaacccgagtgagcccaaatttctccatggagggccatcggcatatatccggggaacacatcgcctccactcggctaccagttagacaaacggggaacgtgaacagacacaaacacaacatacgcagcaaaccgccccagcacacggagcaacagacggcagcgtaacagcctcgactctcagaacaccaacgacgactgtcacgactgaaatgcatcgtaaaatctcagccccccttcatgcctctccaaatttttactacatacgaacaaaaaaaacaaagaagtg

SEQ ID NO: 564998 - DNA, 219 bp, Homo sapiens
ggttaatgtgctatagtcctgtaagtcaatagtcttccatatataattgtgttacatatatagctggtagactctcagaaatcaagggtagagcttttcctctgagcagtttaatgagtgattcagcagcaaagtcgcagaaatgggtctcagccagagaggtaatgttatctctgattgccgtttctctgcacaagtatatcgtattcagtgagaggt

SEQ ID NO: 564999 - DNA, 314 bp, Homo sapiens
tatggccatggatggttcatggataatcaccatgagcagtgaagcctgctgctatccatgggtggagtcatttatgcttgtcacctgcaatgttgccaagatgaagatacttgagagacacattcttgacattgaagcccacattgtacccgcagagaagagcttcgactcaaagcttcatgttgcattgtctgacagaattaacttccgttgtaacgtagactggatacaaaggtgcccaccataccgggttcgagaactccagtcatccactcggacaccaggaacagtctcaataccacgcaactgatgta

SEQ ID NO: 565000 - DNA, 116 bp, Homo sapiens
ttgcgaagtttccgaaagctagggtgactacatatgagattgtttgggctactgctcgcaatgcgccgatcaggcgtagtttgagtttgatgctcaccctgatcagacacatggag

SEQ ID NO: 565001 - DNA, 167 bp, Homo sapiens
cagcgtgcctggggcgagatcgcgcccgccgatcgcctgctgctgatgatcgatgacagcgtggaagccggcgatgaatggggcgatgaattgcgcgaaatcctgcgcaagctgccgcagggcctgtccatcaccgtggtgcgcaacaagatcgacctgagcggccg

SEQ ID NO: 565002 - DNA, 302 bp, Homo sapiens
gcactaccatgattaactgcgggatagaccacaacccttctcttatcatcctttcctgcagtactgcttccagctttgctgctatcttgcctgcaattaacccacccacttgtaccgctgctctgcacaatgaccttcaccactacgatgatgtaccacccttcacttaccctgtactgttacgaacagcacgtggaagaaccctaactagctgcctgttgatttttaaccaccagagcctgctggtgcaggtccgcagccaccagatgcgtataaatcgcctttacaggaaccggacgcat

SEQ ID NO: 565003 - DNA, 974 bp, Homo sapiens
  misc_feature (212)..(212): n is a, c, g, or t
  misc_feature (465)..(465): n is a, c, g, or t
ccggagccattgtttcgcagggcacagtgtgccccattgcctatttggtgcgcactgatgaccaagtgtggtcgcagaagacagggtggggcccctgcccgggcaattcccgcggtattgttgtgctcccccaccgggtcgccgcggcgttttggatgacgcacggatggttttttatcgcgcgcgctgagagttggtgtgtggacccctcnccccacgagggagcgcgtgttctatgtgggcgcggcccccctttgttccccggggagtcaccacagtgctgcacgccgatatggcccggggtgttcactaatatgcgcggcaccatcttcgctggatgaagatgccccccaggatcctcggggggggggtgccgcctcatctacgcgcctggtggggaatatcaccaccactaggggggggagaggccccttcggggccctttcattctcaacgaaagggggnttgttccccagaaggtcccccatccccccccgggcgccttggctcattctttcggtgggggggagaactctctcgtggtgttttgttgttgtgcagaccacgtgacacccccaccacctgttgttgttgatttcttcacaccgggccgacacgggaaactttttttgttttaaaatatgtgggttaaaaggcatggggggtggtgcccaccacaccccgctgtggtccactaccccccatacacgggagtgcagcccgcttagagagttcaccccatacaacacgcgagactgtgaatattttcacgacctcttaaggggaacattttggatgttttgaccacttcttttggtttgttgtttacgagggctctttcgttaattgattttttgtggggtttaaaccaaacgcggaaacccccccttgtttttttttttttccaaaattttcccccctgttttttttccaaaacccctccctttaaaaaaaaattgagcgcaaatggttta

SEQ ID NO: 565004 - DNA, 133 bp, Homo sapiens
cgggtctagccagatgaagagggtcccaagcactggaccaaagaaaggaccagtttctgatgaagctgaagcaggaagccctcacctgtgccaggaacgggggggccgactatatcctgttcgcagacccagg

SEQ ID NO: 565005 - DNA, 845 bp, Homo sapiens
ggatccgccatcttggcgctgtgggcctcgcgtcggttggagaatcccgaacgtgaggtagtatggtgggccgcgttctgtgtccttgagtgctctttagcttatacctgtctaggtccactgatggccgacagttatactagcaacactggtgatggaagatacagccgcgtcgtctgtccgacaatccgctgggacctcggttgctgctctatgaaggcaaccgtgtgcgtactcagaatataggcattctgagggcgaactttgatgtgtgtaaaagctcagcagtagtgatttgaggttaggacagtgtctagccctcatatttagctgcaggcgtagcagtgccgtgggattgatcgttgggctcattgcagtccttgactcctgtagcttcaacgcggatcctcttgctgaagccgtgctgtgagagtagcatgagacctacagtgttggtgtataaaacagaccaaggttcgacgagtgtcaacagcaacgattgaggaaatttcccacagtcaattaatggggaacttatgggtaagccaaggaaagcccgcaattgttccccatggaaactgagtgactggtttgacatgaagacgttgtgtgcggggtacttcccgggaaagtcaaactatctttgtggagttaacgagaaactgtgtttggcgagagaaaagtagcttatgttagtaagtggggtgtccgaaacctagaggtcatggtgcgacttcctttttatccgcttggaacccaggggtgcaatggttcccgtggaagccttatttacttgggacttggacagaatgcctcgcttaaacaggcgactttggcggcggaca

SEQ ID NO: 565006 - DNA, 590 bp, Homo sapiens
tccccgccatttaataatttcctggacaaattttctcttattccccccccccggaacaattaaattttttaaaaggctccctccctcatagaacacccactcgttgaccacacactggtatgtgtctcgcaccccccccctctttgttactagctccaattgtatatactttctctccctcccctaatataatcgttttcttagagacaacatcttggcacaacaaatcgcctcttaacaaacagttgttccccggcgcacacagcgtcacctacgagacttgtttatcatcactgcgaacataaacgtcccctaagagtaggttggttttctccccccaaggattatcctcacccgggcggttcttgccccgcacgaatcatgtaccacttgtggcgtaccccgtggggaaatctgttgtgcggtatatagaaagatgcaaatcacctaattctttttctcctcacaccacgcgcacaccactgtgctgacgcccctctttaaaatcttaggtcccacctcccttttgttgtcgattcttcacctttaaaaaaaggaggtatttatctttccacaacaataaacacaaa

SEQ ID NO: 565007 - DNA, 236 bp, Homo sapiens
  misc_feature (6)..(6): n is a, c, g, or t
  misc_feature (14)..(14): n is a, c, g, or t
tggggnacctacgnaagtggttgaaagaacttgttcctttttgacctaacaatactgacactgtttcagactttcagatgcccaaattattaagatcattaagaatgtcaaaacaggccgggtgcggtggctctcacctgtaatcccagcactttgggaggccgaggcgggcggatcacgagtcaggagatcgagaccaccctggccaacacggtgaaaacccgtttctgcttatt

SEQ ID NO: 565008 - DNA, 460 bp, Homo sapiens
  misc_feature (75)..(75): n is a, c, g, or t
tagaggatctcctcccaccagcaaagacaaaggatttttgtgtcttatcttcccttacagccggcaataatagcnatcgccccaacaataaattttccaaaggagaaacctacacagctcccccggtggggggcagaaggaatgtggggagaaaatgttaatggatttttctgcagtgtgatactatgggcttatcaaaggcttatcataccaggcagaggcgaggtgcgcccgaagagtatttggagggcttggaaaacactcctggtcttttgccaagggtaaggctgcaaggacttgtgaaatctatgattgatgaggccgactccggaaggtgtaagaatgggactgagggcagaaggcgggcagagagcaatgggagtttgcaggggacactccgggaaggaagcccggagtggatttgtgaaaccagatctctctcagcactcccggatgctct

SEQ ID NO: 565009 - DNA, 297 bp, Homo sapiens
catggcaagctcccctccagggttcacgccattctcctgcctcaggtcccaagtagctgggaatacaggcgcccgcaccatgcctggctttttttgtatttttagtagagacggggttttgccatgttggccaggctggtctggaactcctgagctcaggtgatccatctgccttggcctcccaaagtgctgggattacaggtgtgagccaccacgcctggcttgttttactgtttatgacgcggctctgctgctgctaggacagatacttgtacagcccgattcaaagagtcgacg

SEQ ID NO: 565010 - DNA, 260 bp, Homo sapiens
  misc_feature (142)..(142): n is a, c, g, or t
  misc_feature (151)..(151): n is a, c, g, or t
  misc_feature (174)..(174): n is a, c, g, or t
  misc_feature (234)..(234): n is a, c, g, or t
  misc_feature (252)..(252): n is a, c, g, or t
aaaatccacctatgcagggcacagtggctcatgcttataatcccgacactttgggaggctgaggagtatcacttaaggccaggcgtttgagaccaccctgggcaaaatagtgataccctgtctctacaaaaacataaaaaantacaaaaantcagctaggcacggtggcatgtntctgtggtcctagctacccgtgaggctgaggcaggaggatcacttaagcttaggagtttnaggctgcactccagcctnggggacag

SEQ ID NO: 565011 - DNA, 273 bp, Homo sapiens
  misc_feature (5)..(5): n is a, c, g, or t
  misc_feature (17)..(17): n is a, c, g, or t
  misc_feature (127)..(128): n is a, c, g, or t
  misc_feature (263)..(263): n is a, c, g, or t
aaaancagttggtggancttcactacgatgccatctgccagtacatgggccctagtgacgcagatgatgactgacccatgggactcctcccatgcccccaggctggtgccagttctgtcccatatgnnacagttgccttcagcagctcggaagattattgttccatacctctcacttctggtgcagtcctggcgtcaaggacaatgggaaagggatgggtgaaccagttgggaagctcagaaacaaacccaatattttccaanatttagggta

SEQ ID NO: 565012 - DNA, 196 bp, Homo sapiens
gggggggggggaaaaaaaggggcttctccccccccccccctttttttttgggggaaaaaaggggatttttcccgcgggggggggggggaaggggcccccccccaaaaatttgtttcccctttttttttttttgccccccccctttttttttttttttccccccccgtttttttttttttgggggggggggggggga

SEQ ID NO: 565013 - DNA, 873 bp, Homo sapiens
gatagggagcagtttcgctggtctggatcctccaggagctggacaatcttgacgggcttttatgtcttgggtaccagccccctttcccttcctcctcctccagatgccttatactctgaccctccatcgcccgggtacagacatttccagcgcaggctggtgatcgtggtagtccgtcgtcgaagcaacatatcattgggattacggctcgtttcactctggggatgttgttgaggagggagagtgcccccctcctccacgatggaatgttactcccttgccgaaatggacttgcatggatttctacttacttccacgtttagtgaccaattccctaggcgtatgtcggtggtagttccatttattcaaatacatactctgtacaatggagaacgaaatactaactccccttctggagcagttcatgaccagccctttggtcacttggctcaccaccgtttggacctctggccgcaggaaatgggaccaaccttgatgaatatgtggctttgctggatggggtatcttgaaccaaggtcatggctcccaatttaatcctaaattggcagacgtcagcgacgccactcaaacaagtcaacaattgctgcctcaattacgaatggcgaatctaatacattggtgacaacaggattgaattcattaccaggcgcacttggcagcttggttcatggatggtgtgggccagatgttaaagtcatgtggaagacatcctttcggagccaggccagaggaagtaacacgggatagactaatggggtgcgccgcccaggtacaaaacagaggatatgtgagacctacggtaacttgagacacacaaggggccacaatacaaggggacacacaccgaagagg

SEQ ID NO: 565014 - DNA, 700 bp, Homo sapiens
caagtcatcaatacctgttctctctgtaagggcagtggtgagggactgctgtgcagacccaagcaatcccaacctggtgctaggtcatttcacttttctgaaaacctcacatcaggctgcatcctcttctgtccctggcaccaggcttgtattacacttggagacaccttggtgtgggtcaccgggacaggtactcactctcctgcaaccagcctccccttccccgaggatgtggtggctgcagatctcaggaagagcttggtacttgtggggacattctgtttttctccctgtggagatcagttgacagactgagaggcaaagctgccttcaacctgagtccggctcttcagccagagctgcacaagatggcagcacactaattctgcgtgactccaggctgggctctcacacccaagattaggtctgctctggcctaatggatcttacatgtataaccgggccggctgcccttggattgtacaaatgctatagtggatgcccccgagacacttgacatactaggccgagaacgaacctgctagcttgacataaccccatggggataatccttagggttcaggaatggtcaacagagaagcgaactccctcgactgaacaatcatactccagccagcacgatcaagaatacctgagccaatttcgtcatacaatcaggagcctggactcttacctcagt

SEQ ID NO: 565015 - DNA, 404 bp, Homo sapiens
atcctggctcaaaaacagtaaaaggatgacttgtgcgggtagggaggaaaatatgatcgtccccctctaccagaatatatccaatgtccccctaactgaggatacgctggttagaatttggtttacaggctactggctgacaagcatcgatgtaggatgctcagaattctcctctcagtttgtccttttgccccagagcttatagtgaccctatagcgcaaggagcggagtacttccttgctttaatgcattaatccggaaggcagctggaataatggttcagatcattcttacgatggttgttatggaggatggggtgggcattgcctaagggccgggtctttgctcctcccccagctggagcctcctccccctctgagctctctgtttcttcccggtcgctg

SEQ ID NO: 565016 - DNA, 564 bp, Homo sapiens
  misc_feature (27)..(27): n is a, c, g, or t
  misc_feature (61)..(61): n is a, c, g, or t
  misc_feature (93)..(93): n is a, c, g, or t
  misc_feature (99)..(99): n is a, c, g, or t
  misc_feature (116)..(116): n is a, c, g, or t
ttaggtttagatatttagttataaggnagtaatgatattggtgaggaaaggagggatttgntaatataaggggtaaatgttaattattgggangaaagntgaaaatgaattgtatnttaattatatattaagttaaattttaaatgggtttaaaagtattaggaaaaagtgaatttttttattattggggagtgggtaaaatttttttaaatatgatttaaaatttaggagtgataaaagataaaatgtatattgggaaaaaagttttataatatagtatatttttaaagtgttggtgatttgagtgggaagtagggtagtgattgttggggattgagggtggggggatggtgttgaatgggtgtggggtttttttttggtgtgatgaaggttttggaagtatatagaagtgatggttgtatgttatgaatgtattaaatgttgttaaattgtagattttaagagatggttaaaatggtgaatttttttaattatttataggattttgataaaaatgttgttttatgtatattttattttaataaaaattataatttaaaatga

SEQ ID NO: 565017 - DNA, 185 bp, Homo sapiens
gtggtgaatgacggcgtgaggcacctcgactgcaactacatctccctcatctacaccaactataggcgggcaaggatgactattaaaggcactcccgggcactgaagccttttgagaccctcctgtcccagaaccagggaggccagaccttcattgtgggataccacagtctccttcgctgacta

SEQ ID NO: 565018 - DNA, 1241 bp, Homo sapiens
gggtacctgcaaccccctagccaaacccgtcgcaaggtgtcgtcgagcatccaggcctgtgccggcttcacgtggcgtggaagaccctctgcaaggaggagacagagcaggcccctccaggcccaccagcccagtgttcccgcagagcccatttggatcagacattccccgacacgggcacctcgttacttccacaccctgtcctggtggggcatgtccggagaagacacctaaccctgatgggcactctagggatgtgcaccagacccaggccactggctcaaggggaggacctcagggttccatgagagcattccttgcaagtaggaaaatcacatgcacccgacattcaccaaacggaacctgtgcaccgatagaaagggcccacttgaattacacggaccacaattcagtgatacaccacaaaacagacgctgctagggtcccgtgcccaatattcaccagggagagaccacagcatggccccccctgcataggcaaagcatgaaacaaccccatgtaggaggcggcgatgcagactccagacataaaccgctggaacacccagacacctgcattcccgacacaggggcaaccccccattgcagacgactacgaggaacggaacaccagacccgtgatggactcccccaccctccacgggaccctcagcaccatctagacagtgaccgtcccacaataggaaaaaagttcctcaaaggaagcaccatcccagagcatcaacgaaagccatccggcgaacaagggactcaatgaactggactaactaacccataggcattaacaaagccaagccagcattcgaaaacgacggatcaaataggccgggataaaatgtagggcccaggtcattaagcacagacatgcaggctgacagcagataccgagccagggacgcaaacagaaccccagcatcgcaagccaacaagggccagcaagtccaaaacccaagaacagacgaccacgcagctgcaaccgaccaacggacaaaggaatggcaaacacccagggggcagagcgcaagaaagagaaaggaaggcgcagaaaaacaacaagcacgcaaaagaaaaaaaccaacgaaagaagagggcagacagcgaggcagaacaaaagcaagtacagaccaaaaaaagagagaaagaaagagaagcggcgaacaggaacaacgacgagaaagaagaagaggaacgacagacgcgacatagaacgggaaggtcgga

SEQ ID NO: 565019 - DNA, 247 bp, Homo sapiens
acgggggaacgctacaaactaaggtccataacagctacggataaaagagatcgtgcgttctcttttagctttatagcctcattcatcccagaattgaagaagccagaaatccaacacaccaatatctacacacaaaaaattactaacagatgtaagcagttatcagacacagatccaggaaaggaggagcctcacaaagcataacaatttacgacagcaacccctctactccagtcaaacaccgtag

SEQ ID NO: 565020 - DNA, 103 bp, Homo sapiens
  misc_feature (18)..(18): n is a, c, g, or t
  misc_feature (44)..(44): n is a, c, g, or t
  misc_feature (101)..(101): n is a, c, g, or t
ccaaaaaaaaaaaagaancctggcagctatagaatacactatgngcatataatagctaatatattgtagtatcaacatttttaaattaaatgttttacatncc

SEQ ID NO: 565021 - DNA, 910 bp, Homo sapiens
cgcgagctgccgtcggctccgcagggcggggcgtggtcgggccatccaccgggctcgcgccagtgatcgctcctcgtcttctctccttccgcctcttcacggaatcgctgcaggacacgttgccgcgctgaacttcactggcatcggacacgacgcctgattcctactcaatccgcacatgtaaaatgtgccccgtgctgcgcagggcgacgtgctcacccgttttggaggtcacgacgcgagaagcccggaggttgcgcgtgatgcttggccgtgctcgctgggtcttggatgtcgggttcgaccacttggccgatgggaatggtctgtcacaattctgctccttataaaatttgtccagccacacgtaactgacgatgctcctttaaactaaaggcgttaagtgttcacaacgttataaacaaacaaaaagacaagaagacacacaaaaacaatataagaacaaaagaacaaaacaacaaaaagagacacaaaaaacaaacaacaacaaaaccacacaaaaacagacaaccacaacaacaaacaaacatgacaatgacagcaacgacccaccaccacaaagaaaagaaaacaaaaacacaactaaaacaacaaaaaaaaaacaaaaacaaaaaacaacacaacaaatactaaaactcaaaaacacacaacaacgtacaatataatatctacatccaaatcaaccaacaaaaaagaaacacacaaaacaccaaaaccaaagaacaaaacacaaccaaatcacaaaaaaaacacaacatcactaaataaaaacacaaactaacaacacaaaaccaccacaaccaccaacaaccacaaaacaatcacacgaaaaaacacaacaaaaaacaactaacaaaccaaataaacacaatacacataacaccaacac

SEQ ID NO: 565022 - DNA, 934 bp, Homo sapiens
gcgtagatctcgccggcgttgacgttcatctgggtgtctgaagtaccctccgctattctctgcctaggcgacgagacccagtggctataatggtatacagcatgtctatactcgagatccgtgccggggagatctgcgaatcgcgcggggaatgccacatggttgaggtctcgatgctctgtcatcgtcatgaaggtctctgtcagagctgttgtgcccagtggtgcttcagactggtcatcgtatgaggtgcctagagcatccgggacagtgatacatgactcgcgtatatggggaagggggtctgcgaaggtctggtcgtagcagcatcgttagaagagctgaatggcggcctgtccgctggtggatgcacgcaccgctagaacgtgcacgagaatcaacgaggagagatggcacggagattgcatggatgcgagagtggtatggtagaccagagaaatacgatctaggggttgggctagcgagagcggctcagtcctcttggagggcggtagatccgcgtatgcgctgtccatggacatagggtctgggtggccgagcatgaccacatgagagaggtcgccccacctggtgaaccagcgcgactaggtccgacgtgagtcgatcgagactgagtagagcattcgtcgataggatcaggtcgactaggcacgatccccctcgggggtaacagatgggatcccaatcgcagacgtgaggcaggggttctcctctcactgggcctggaggccaaacgtaaaggctggggaccagtcgccacaggaggaaggtttccacttggaatctcgttcccccagggatcggtgttggccatcgccaacaagcgttgcaggcgggaaaggcccattggcggccattttggtgtaagccggagcgacgggggttttaccccgactaaaccctggacaggaac

SEQ ID NO: 565023 - DNA, 1201 bp, Homo sapiens
gagacgatcttcgccgagagtcgtcggggtttcctgcttcaacagtgcttgtgacggaacccgagcgctacgattccccaccaccggaacggaccgacccatagaccagccctccgtcacctcttcaccgcaaccctcggactagccccaaggaccccgactctaccttaagtacgccgccatgacagaccgcgatccaccatcgcaggtgcagccagaacataccaccaggactcagaggccagccaatcaaccgccagatcaacactggagactctaagcctcctacgataaaacctgtccactgtcttaactactttgaccgagaatgatagatggcattagaagcacactattgcccatatacatttacatatacaccaaatctcatgcaggagagggaacaatgctggagacaacctgactgaagctgcagataacaaaagaaggtgaaccgataatcattccatattcagggcattatcaaagaacaacccagactggatgatgaatgggacgcgcggtagcatgaatgccaaatggatatgtgcaattataaatataggaaaacaaaatgatgaatacaaacaaaacatgagaaactgaaaaaaaacatggccaatgacaacaaaagaacacacaaaaaaagggagaacaacaagaaaaacaacataacccagaaatgaaaaggataaaaagcaacaaaaagaaagagaaaacaaatgaacaaaataacaaacaggagcatagacaccagacagtcagcacatggaaaggagatataaccaatagacaagcagcaccctgggcacacagaaacatgacagaataaccaaggacaagaatcacccaaagaccggagaggacacactggaaccaaggggacgcgtacaaatgagaaccaaaacaagcgtacagggacaaaagtacaaaagttcgagagtacaacatgacaagagggaatcacaaaacataaaacaaaggggaagtcacgaagatgaaactgggcggaccagataaatgagggaaaaaaaagaagagagaacacagggatgagtaatgaggaggaacaggcacaagaagaagtgttctacaccagagcagcgaaaagtcaccactcaccagtaacgtgaagaggaaaagcgagggacaaacaaaaaagaaaaacagataggacgaatgggaagacataagtaaatag

SEQ ID NO: 565024 - DNA, 771 bp, Homo sapiens
  misc_feature (207)..(207): n is a, c, g, or t
  misc_feature (225)..(225): n is a, c, g, or t
gctccgtgatctcttcgtctttgcggcgtagccgcgagagtcggtcgaggcgccgtgcaggatctcagcagccgatgtcgaagcccgcctatagtgaagcactgggacttgccattcagtatcatgacaccacgagacgagcttgcacgctatggcaatgagcatgaactacgatgcacttggtgcagccatatgtcgcgcagacgntggcaatcttagatctcnaacatacccgagtcgacatgactcgagaacagattggacggtctagtcgtagtgaccgatttggctcgcgtagcttgtcccatgaatccagatgggtaggcactggttgccacaggcagcatgtgatccaagtcttggagcacgtagcatctggtcggcatcagttccattgcaacatatcgtcgtctatacgggaactctcccatgcagttaactccagtgccgttagtatccatcgtaaggatatggtacgcggcacacaaaggccattggtacaaagctgtttgccttcataggcaactgctatcacgtactgtagcgtggcacagtgtgcatggtcggcattctaaaggatcgagttacaagggacctgtaggattccgtagactggggccttcgatcacaggggcgagcaggggcaacttgcgatgagggtgtgaagctgcaaggcaagggaagcccaactcttcacaaagtcacggctggaatacaccgctctacaatgggcaaacacagtgtggacgagtaacattccttgtggactgg

SEQ ID NO: 565025 - DNA, 595 bp, Homo sapiens
  misc_feature (322)..(322): n is a, c, g, or t
tggaggctccagggtcccgtgggggtgggggtgggctgcgtgaggacatccccttaccccctgaatttccatctggtccagccctctcatcttgtacgtgaggaaaccgaaggcccaagggagaaatgacttgccaggaacccctgttaaggaaaattaacaaagtgtggttattaaagaagaactgagttgggagtcagacctggaggcccacacccacagttaagacattataccaccttgagtctggcctgttgactgaaggtgagccactccatcctcatgtgattgtggggtcttaacctcaaagggtttcctacangaagaagcaaatggatttactttcctagctctatccagtacattagggaccctgatgactgaatagattcttggagagccatctggtatatatcatggatggatctttttagaaagtcaatctacccattagactaactcatcctgaatgaactatctataatctttaagaattatctatatacttttaaagacttcttcacctttcaccaaaagatcccgctgcaattaaagtggtaaaaccttaactttataagaccttatatttacctta

SEQ ID NO: 565026 - DNA, 128 bp, Homo sapiens
gagtgcactcaaaggaagtagaagaaagcctaatgctggaggtgtctaaagctgaccagactggggtgttgtgtgctacagatgtcagttgcaagaggctttgtacaacaggaaggcatcagaaatag

SEQ ID NO: 565027 - DNA, 175 bp, Homo sapiens
  misc_feature (14)..(14): n is a, c, g, or t
agcatttccagcgncgccagcgaggcctccttctcctacaaggaaaacctgagtggcgccctcttggcgatcttcgggcacctcgtgtgcagcattgcacttaacctggagaagtactgccacatccgcctggccggctccaaggatccccgaacctatttcaagaccaagacat

SEQ ID NO: 565028 - DNA, 235 bp, Homo sapiens
  misc_feature (208)..(208): n is a, c, g, or t
gaaggattggggccattcaaccaaggcagttcgccttcacagcagcttttccttcttattgggcttgaggacagaagacagaacccttaaaccacaggttgcttaaaagccaggagtcaaaattacttagcgcttttacttccaccatttgcaacgaatctctcttgggcaggaggtcatcttcgggagaagcccttcttgcgtggtntctttgagaccttttcgcaacactgcg

SEQ ID NO: 565029 - DNA, 448 bp, Homo sapiens
  misc_feature (41)..(41): n is a, c, g, or t
  misc_feature (50)..(50): n is a, c, g, or t
  misc_feature (157)..(157): n is a, c, g, or t
  misc_feature (159)..(160): n is a, c, g, or t
  misc_feature (249)..(249): n is a, c, g, or t
  misc_feature (262)..(263): n is a, c, g, or t
  misc_feature (287)..(287): n is a, c, g, or t
  misc_feature (332)..(332): n is a, c, g, or t
  misc_feature (344)..(344): n is a, c, g, or t
  misc_feature (415)..(415): n is a, c, g, or t
  misc_feature (444)..(444): n is a, c, g, or t
acatacccatggggactgaccaccttagtgccttcaaaagncagtggatnctggctccttccaggcatatactgtttccaacttttatgcatcttcaacttacacactgtatttgcaagtttcttcaattccccctttctgtcgtcttctgcggcangnngacgacggccgcgaatttcgggcgtgcaatttgcggtgggtgtcatcaaagcagtgggacaagaaggctgctggagctggccaagtcancaactctgcccannaagctcagaagggtaaatgaatantatccctaataactgccaccccatcttaatcagtggtggaacaanggtctcagaacngtttgtttcaatggccatttaagttagtagtaaaagatggtaatgacaacaatgatcgtcctcagaagganggcgtgtttgtggaccttggtttctttgngggg

SEQ ID NO: 565030 - DNA, 173 bp, Homo sapiens
accccggagcttgctagaggcccagaccttgctccaatcagcctctacagaccaagctcatgactcacaacggactaagtagacccataccctacgggacgctaggttcagaggatgaccctactgcgacacaacagcttccacaggctcaggtccatcgttacaagcggcct

SEQ ID NO: 565031 - DNA, 119 bp, Homo sapiens
ttctttagcatttaggtgactgttcagcagttttctatatggccattgttggcctaaaactgcgctagtaacaagcatggtatttatcttgtattgaaaataaaaacaaagttttggta

SEQ ID NO: 565032 - DNA, 399 bp, Homo sapiens
gccctgtctcatcttggctctgctctccagcttggcagactctggctttccgagaagcccctttcggctgcttgggaaacggagccttccggaaggggtggccaatggcatcgaggtctacagtacctcaacttcaaggtgacctcccgttttgctcacaatgttgtcaccatgagagccgtcaaccgtgcagacacgggcaaggaggtttcctttgatgtggagctgtccaagacgggcttcatcaccaacttcaccttgaccattgacggtgttacctaccctgggaatgtcaaggagaaggaagttgccaagaagcagtatgagttggagaagttcacagtctctggcaacgtggctgtaggcagcgtcaccttcgagctcctacgagggctgctg

SEQ ID NO: 565033 - DNA, 441 bp, Homo sapiens
ggcctttatggccgggaaggctttgaggcagccagcgcaggggcttttgttgaggggccagccgaacctggaggaacccgcagataagttttttcctcttggaaggatagagattattccacctccttaaaaattttagccattaggttcctaaaatatggcttaccgttaagtttttaccgtaattttaatagcttaggattttaagagaaaatatgaggacttaaaaaagtaccttgaggaaggaaaggttaaagggtttttaaaccatgacggaggttgaaatgaagcttcttcatggggtaaaaaaggtttttaaaggaaaattgagagaaaggcctccagagccccgaattattcccattggaagggcatggcttttagattaaaatgaaggtgacttaaccagtttaaagttaagtttaaaagttgtaggtgatt

SEQ ID NO: 565034 - DNA, 290 bp, Homo sapiens
  misc_feature (219)..(219): n is a, c, g, or t
  misc_feature (274)..(274): n is a, c, g, or t
ttatccaaagttaaggcaaaggacagaatcttaagagctgtgagacaaagcaccaggtaatctataaaagaaaacctatcatcagattaatagcaaatttctcagcagaaaccttacaagctagaagggaatgggaccctatcttcagcttccttaatcaaaacaatttatcagccaagaattttctaaccagcgaaaataaacatcatttatgaaggnaaggtacagtctttttcaggccaaaccaaaggcttgaggggaattttgccctttncctattcacaccccca

SEQ ID NO: 565035 - DNA, 979 bp, Homo sapiens
  misc_feature (1)..(1): n is a, c, g, or t
  misc_feature (3)..(3): n is a, c, g, or t
ncnccagtgcagagcggaagcagcagttttccgacgtgtagctggtgtggtatgtgttcgctttctctgggtgttgtgttcgggtagagaggtggtggtgagcgtggaccacgcggtccgttggacccgttcgccttcggggtcccccgcgggagtgtgtaaccgccccatgggcgtcttctcctttcgtagcggcgccctacttttgggggggaccccccgcacaacttggtgttcgcgacccctatcagcgctcccgtctcgcgctctcgcactaattcccggcggcttctcgccctttctcgccccgtggggtagtttttttcccgctcgcacataacaacggggggacccccgcaaacatggggacaatgcaattccagacggcagcggcaccacacttgggggttaccaccggtgactccggccccggcccaccagagcgccccgtcattgtccccccggtgggggattggccaccgcccacactttgcgggcggcgtcattattacctctaacacgtgagtcaggtcatgcgtttctctaattaagggcgcgcccaaattaacttcgcgtgtcggtaaccaccagtggcccggacaaggcgccggttgcaggggtatattcaacgagccaaccctgcgcgagctttcatggggcacccacgccccccgcggctcggggggtgcacctcatatggggcccccgcccctctccggcacctggaagcagacgtcccccactcagccgcgggacacgccaacaacacgggcgcggcacaagagggaatcatagcgcgtcactgacgccgggcgccccctttctcatggtcagaccacggacatctgttggcagatggaagaaccccgggtgcacgaacactgggacccggcacgagtcccccacaccgcgaagcccacagaccccaaccccgctttttcagggccggctcaaaaatatttttttgtcccacaaaaca

SEQ ID NO: 565036 - DNA, 104 bp, Homo sapiens
gggggtatcatgtctccatcgagatacacagtgggcaatggtggaggggctcgcgaacatggtatactggggattaagccgggccagctcctcgatttttttgc

SEQ ID NO: 565037 - DNA, 475 bp, Homo sapiens
gttttttcccacaggggggggggtcccactttggggggccggccctcctttttttggggggggggggcgggccccccgcggggtttcccccctcttttttttggggaacccggggttttttccggggggttaggggccccccggggtttttcccccggggggcccccacccaggggggggggggaaaagtggtttaaaaaaaaaaggggggggggggggcgggggggttttccccccccctggggggggggtccaaagggttttggggggggccccccttttttccccccccccccgggtttttttttataccaaggaacctccccaaggtaggggggggggggggtctccccggggggggatttgttccccccccccccctttttgaaaaggggggtttttttttttttccccccccccccccccggggggggggggttccccccttttttccaaaaaaaggggggggctttta

SEQ ID NO: 565038 - DNA, 764 bp, Homo sapiens
ccgattccaccaaatgtgctttgagcaaggataggccttcattaacaaaatgtatgtctggtcccccagtagagctctactgcctcaacccaaggggcatttttctgtctggggctagataacatctcaagttgattagaaagaccgaggccattgtcagggtacctggggccatgatctcagcctgctattgtcgcaattgaacatgtactttaatttatgtcttctgtggtaggtggaaaagcaacattcatagtcttcggagacatgcttagaaattcagcatttgacccttgcggtgaagtatgcccaattagtttcctgtatgtctatcctgtatgatccgtgtctgtgtgcaccaatgttcaatcagaggaaattctttcccaggctgtcgattgatgcctcagccacttgccggtgctacaattcattgtgtcctcctgtagattcaggtaatacaaactatatgtaatcatcaagtaatacaacatctagctttgagtcagtagcctgggttgagtattatgcagggcctgtgtctgctgtctgaaagaacccaattcggctgatgcgcttcagttttcagatcacattgctttcggatgttccatcttgcttgagctccaatttggtgtggttacccagagataactgtaatgtgccttggtttggccttctaacaggtccgtcgacgggggaggaatcccacccagggccaatcagggacctatccctatcttcccgaatttcccttttccggc

SEQ ID NO: 565039 - DNA, 550 bp, Homo sapiens
ggacgatagtgttatcatgttacttatactaacattcgtccttctatagggtgatagatctggtccaattggatgtgaggagttcagttatctgtcagtgcatatgtaggtcgtgggtgttgagcttgaacgctttcttaattgctggctgcttttaggcctactatgggtgttaaattttttactctctctacaaggttattacctagtgtccaaagagctgttcctctttggactaacagttaaatttacaaggggatatagagggttctgtgggcaaatttaaagttgcactaagattctatcttggccaaccagctatcaccaggctcggtaggtttgtcgcctctacctataaatcttcccactattttgctccatcgccgggtgtgctcttttagctgtacttaggtcgctcgtctggttgcgggggtcttagctttggctctccttgcaaagttatatctagttcattcattatgcagaaggtataggggttagtccttgaaatataatgctaggttaacatttccatctttcccttgcggaa

SEQ ID NO: 565040 - DNA, 137 bp, Homo sapiens
ctgaagtaattatttgaggtctggcagtacacattcttccccagcctttttttacaaattcccttcccttacccctgagcttgggaacagcctttcatccttctttttccagccctcgagaggagagagggtgttta

SEQ ID NO: 565041 - DNA, 881 bp, Homo sapiens
tcaatggggccccatgaccgactcgagactcaaatgaggatactgattgttaccggtgtttagatgggactatgagctggcatgcccatgtggcgggtatcatgcatcttactcacctgaaaaaaagcgtttgaatcctggttagttgtctggtcacatggagcgaattcatgagctcgctgcccggtagggtgtggccaaatccatcaccagaatctcctggagatgctgtagattacttgccagtgatagaacagtggcggtgtcttgagacatccacctcacctgcactacgtattgaggcatggccatacgcgtgtctgtcgtagatggagtagaccggagatgcgctgcctcgacatgtgaaggcgacgaatccgaggtaacacagatgcactttgcagttgtgacgcggggtccttccaatgaattaataactacgacgccgagtgactacacagttggacctactgtaggctggacgaccaagagtcttggatgtcgcatggagtcgtcactcgaggttcccgcagttctgttgatcaccgagctaacatgttggacttactgccaatcctcacacaatagttgatgacgctgggttgtgtcacgctgctgatgaactgaacgcaagtgtggtgtccaatgctgcaaatgaggtcgaatgttcatgcatcatatagtgtgtgtctagaaagtatatgtcctgttgggccatcctgggcctgtactggaggagttatacgcgagagacgaggattgtaactagtccccagattccgggctagggagggttgtgaacttatctccggggatcagatgggcaagttcaaattattggtcctttgaacatgcgcatagaggggttccccagaactgtg

SEQ ID NO: 565042 - DNA, 1179 bp, Homo sapiens
  misc_feature (69)..(69): n is a, c, g, or t
tctctttatgatgtgatgttctgtaccctgtcgatctcgctcttggagtacccctgcgtggtagtgacnttcctccttgtgggggattcatatttagttgtgttctgtgaatgtgtgtctttttggtgagactttgggtgattggcaccaccccgtggggggtcctctctgctttttggatgattttgtatcacgagtgcgacactcgtcccgtttgggcgagctccctcttataggccctcgctcgttggtcgagtcgtcgtgttctccctgtctccggttaaatagtaggttcccacgtggggacctgtgagggagcccctgtttctttgtgggacgctttggggtgtgtgtgctccagcgcactgtagttttttgtggggccccccgtgccgccccacatgtgtggatgtgccctctcagcagagggctcggtgttgtgtctactgcatgtcgctggtcacatgcgctccaccgaccacggcgttaccacggcgttgtttgttgtgctgccccgttcagggcctctccatcgcccgcccgtgtccccactgttgtcaccgcccctgtatccgtgcactgtcccactgtaggacccctcggtgcctcggtcttcttgtctcgtgcacacccctgtgggaccacaggagcacaattcccaagtctgggatcacctcacgagtagatccactgtcacgcagcaggggcccttcgtgtccccccattttaccacatctgtgcacaacacggggcctgtaggttcccacggagagtgcgcccaaaagtctatgacacgagtccccgtttcctgacacttctcacgcacgcctccaaccacaccagggttcccaggacctatggtcttcactggaccgagaatgtggataggcacacacgggagaatgggattatcccttatcaccccacgagccccacgtgctggacacactgctgagctgtcctctcccctccagcctttggccttggcttttttatgcctattttacctgcaggctgaggccactcttttccctttctcccagcatcactccccaaggagagagcccatgttttccacccataatcctttttgccgacccctagttccctctgccccgacccagcttgttatcagcttttcagggccctggttcacctttgaattaaaggtagtaattt

SEQ ID NO: 565043 - DNA, 129 bp, Homo sapiens
cgcggaggggaaaaacttagcggttatttgtttatatttaagcacagtttaaaaaaattcattatcgtttattcagtgtccgaattgaggccatttgcgaagaaaattctagctgtgggtggcagaatt

SEQ ID NO: 565044 - DNA, 890 bp, Homo sapiens
  misc_feature (2)..(2): n is a, c, g, or t
  misc_feature (129)..(129): n is a, c, g, or t
  misc_feature (254)..(254): n is a, c, g, or t
  misc_feature (325)..(325): n is a, c, g, or t
  misc_feature (770)..(770): n is a, c, g, or t
  misc_feature (850)..(850): n is a, c, g, or t
tntgctggaaagaagattgtctcccttcctctactacctactactagggtttgtcaacagctttccacacttaggttggagtaaggttctctaagacaagtttggagggagacttgggggtctggaganaccaagagctcagaaaataaacatctgagaaaaaaaagcaatccctggttggtaggaggttttgtggggtgtgggatgtgcaggattcaaggactgctcagccctgtcctgtagatcttactaangtacaagggaccaaggtgaaactgtgaaaaatcttaaatcctgaaattattcccaggagacgtgttaaaanccaggttcccctaacttcctgccatggattttgactttgtttagggtaggacttacattttgagtttgtttatttatttagtgaaatacattgctaagctgcccaggttggttttgaacttcctgtcttagactccttgtattttcagttaagtccctcagatctaagcttgtgagaccgcatacgcatcttcagggctagaagtgttctttggtctagtcagactccttcctactgtggaatgtgtttggtttaatgctgcttgcctctcagcagcctgaactctcatcaggtttggtttgaatcctcccggaacccggtagcggtaaccatggtaacctagggtggaagggtctgtgagggtaaaaccaggatcctcggcttagctcttgggggtcttgatagttgagccctccgggacccatggaaagtagaccctttaaantctgaacctggcttgaactgggttaaaagccaaagtggacatgatgggcgtatccaaagggcgcaaccttcaagagcctngttccagctactctagggcgggaaaaggttgagggagggg

SEQ ID NO: 565045 - DNA, 96 bp, Homo sapiens
  misc_feature (8)..(9): n is a, c, g, or t
taactatnngcaaatttcttaattgctttgtacttcaatttctttatttgtaaaatgaaaatgctaatagaagccttaagtcatacgtgtgaatgg

SEQ ID NO: 565046 - DNA, 165 bp, Homo sapiens
caactcgttgacattctctacaaaccacaaagacattggatcgctatacctattattctggcgcttgagctgtgagtcctaggcacagctctaagcctccttattcgagccgatctgggccagccaggcgaccttctaggtaacgaccacatctacaacgttatc

SEQ ID NO: 565047 - DNA, 426 bp, Homo sapiens
  misc_feature (28)..(28): n is a, c, g, or t
  misc_feature (67)..(67): n is a, c, g, or t
  misc_feature (212)..(212): n is a, c, g, or t
aggagtttgagaccatcctgggcaacanaggaaaaccccgtctctacaaaaagaaaatttggttttnatatttatttgtattaaattttttagaaacatagctgggcatggtggcacacgcctgtagtcctagctactcagggggctgaggtgggaggattgcttgagcccaggaagttgaggctgcattaagtgttgatcacaccactgtnctgcagcctgggtgacagagtgagaccctgcgactccagacaggtgcacaccaccacactcagctaattttttgtagaaatgaggtctcactatgttgcccaggttggtcttgaactcccgggctcaagtgatccacctgtctcagcctctcaaagtgctgggattacaggcatgagtcacagtgcctgggcccaaattcatagtcctaaacat

SEQ ID NO: 565048 - DNA, 228 bp, Homo sapiens
ttttgggggcccccccccccccccccccccccggtgttttttgtagggggggcccctacccaaaaaaagggggggttggcccctttttcccccccccggggcccgggggttttggcaatataaattgtttttttttccccccccttccccggagggggggggggggtttccccttctcccccccccccttggtggggggggggggttaaaattttttttttttcccca

SEQ ID NO: 565049 - DNA, 116 bp, Homo sapiens
ttctgcccacctacggtgaaaagcaatatgaaatgatcttgctgcagtgctctgagccctaggattcatctttcttttcaccgtaggtggggcagaaggagcgtggccagacagga

SEQ ID NO: 565050 - DNA, 129 bp, Homo sapiens
ccattatcactattctcaccagacctcctaggcgatccagacaattatccctagaccaaccccttaaacacccctcaccacataagcccgaatgatatttccgtattcgcctacacaattctccgcgac

SEQ ID NO: 565051 - DNA, 1099 bp, Homo sapiens
gcacaggtgtcgtgaaaactacccctaaaagccaaagtgggaaaggaaagagactcactagcgaaccattgtcgtctatagatacgacgtagattccgtggcaagtccaccgactaactggcacatgctggatctcataatatgctgcgtggtgtcgacaaatagtaacctatttgtaacaaatttcgatgaatggcacgtgctagcatcgagcatagggacaagggctcgcattcgacagtctcatgccttggtgatgctttgcgatcacacacatgtgaaagcatgcagctgatgaactgttggactcatcgaccaaaatttgaatgatgcgtccttatgctgagaaacactctggagtacctatgcgaaagttgcgtaattggttagaatctagtgccatttcgtagtcgtcagcactatgggcagcatccaagcatgtaacttgtgtcatgcacaacaagcaattggatattaacaagtggacaccaagtcatccagtggcctagagcgtagttggcattggtccggtgagtggagtcagtcgtggacgtaggttcgatcatcgtggttggagactttgtggataggctcgtggtaatgctgcccataggcagatcgggggcagtaccccgcagcaggacagtgcccttactagggacttaacagcaactaggggtttgtgaaaaacaaagctacattagatcggatagattaaacaaacaacttgggaatttccgacgtgaagaccaagcgcttacaagggccaagaaaagacgaataatgaagggacaattttgtctacaaaggaaaggttcacgcaaacgttaccatcgaacggaagaaatgggggctaacaaagccccggacaagaagtgagacaatttagtagccaaatgatcaagagaataagggaaattcgagtcgaccaaaacaatcggctgggaaggccaaagtggctaaacaatgcccacggagagccacacggggaacggaaaaagctccaccccgcacacgagactggggcaatggccacgtaggaaaccacgactcgaatacggagagacgctcgggactcggattccctagcaaccaaaag

SEQ ID NO: 565052 - DNA, 110 bp, Homo sapiens
gtcatgttacgtctaggtcctgatgttacgtctacggtcgacctatacgtaacacagaagtggattcagtagaatctagagaagacagcagctctattattcttggctgt

SEQ ID NO: 565053 - DNA, 251 bp, Homo sapiens
ggtcgacccgagtagctgggattgcggctgctctgccaccacgcccggccttctaatttttgcattgttttggtagtgatgggggtttcgccatgttggccaggctggtcttgaactcctgacatcatgatctgcccaccttggcctcccgaggtgctgggattgcaggagtgagccactgcacctggccgggattaagcaacttttaaaagatgaatttggccaggtgctgtggctcacgcctgtagatc

SEQ ID NO: 565054 - DNA, 490 bp, Homo sapiens
  misc_feature (87)..(87): n is a, c, g, or t
  misc_feature (434)..(434): n is a, c, g, or t
atcacttgaacccagcaggtggaggttgcagtgagccaaaatcgtgccactgcctccagcctgatgaaagcataagaatccgtctcnaaaaaaaaaaagaataaattcttagatttagaattgcctaaagattatgtacatttttttaattttggtggacattgacaaatttttgcccttagagttacacaaatgcatagtctttaccaacaatatgtttgtttcccaagatattaattttcaatcattcattttattaagagataccaaatattttgtaattaattcttccaactttccttaaatatataaatagaaaactgagcttgattgtagaaattggtttattcatatatcaaacctttatatagtaccactctattcctggtatattgtgtgatacagatcaagtgatgaggaacaggatataatgntacagtattggcgtgggtacagtgactcataccctggtaatcccagcactttgggg

SEQ ID NO: 565055 - DNA, 1109 bp, Homo sapiens
cgcaggagccgcagggcctgtaggcagccatggcgcccagccggaatggcatggtcttgaagccccacttccacaatggactggcatgctgtgctgcgtgtgcactgtggttcaacctatgcctggccctggaagatcctgcagacgtaatggccctggcaatgccaatggctgcgcctgattctgctccgcggccccgctgtcgggtcccatcctgtgcccatcgtagcgctgccccacggttcgggtaccacacgaaggtgcgcgccggccgcggcttcagcctggaagtgagctcagggtggccggcattcacaagaatggtggcccggaccatcggcatttctgtggatcctgaggagtgcggaacaatgtccactggagtccctgcaggccaacgtgcagccggcttgaaggagtaccgctccaaactcatcctctttccccaggaagccctcggcccccaagaacgggagcacaggttactgctgatgaactgaaacttggccaccagctgaccggaccgggtcatgccccgtccgggaacgtctatacgacaggaccacagctcgaagtcatcacttgaggcacgagcacgactttcacaggccttccgattagtcgtccggaatggcccccgttgcacaacgcgccagggcatctacgggacataccgtggcaaaaacgcagcccaacggaacagcacgcagaacaacagggagtctgaaaccacaaacaaaaacacaacggtatcgccgtacccaacacacatacccatctgcgtggctaccaaaaggattatcggagtataccccagagttatatgtgggtacaagacgagtggtgctaccatatatcagggagatcgaggacaaagtatacagacctattgtcgcccacgtttggagccggtagtacttaaaagaaagagtaacgcatgatcagtggggagacaacccagctctaatcagagagggaacattatctggttgacagcccgacacccacgtaaagtgtcaaggaggttgcgatgcacatcctttggggtcgaacatgccatccgactacaggaagacttatctacaccacacagagtaaataactaacac

SEQ ID NO: 565056 - DNA, 170 bp, Homo sapiens
gcgttgaatggaaaaaagacctagaagaggcagagcctgtccacaggtttcaccattcatccagccaacattatgggaaatttccacacccaccactgtcaaaccgaggactttggacttaataactgctcaaaattaaacgaacttaccttccatgggtgagggcttac

SEQ ID NO: 565057 - DNA, 224 bp, Homo sapiens
  misc_feature (6)..(6): n is a, c, g, or t
  misc_feature (81)..(81): n is a, c, g, or t
tccttnttgataggtgtataacatgagggtgttttctcggtgtgaatgagggttatgttgttaatgtggtgggtgagtgangcccattgtgttgtggtaaatatgtagagggaagtatagggctggtactagtatgttaagtcctgtaagtaggagaggtgatatttgatccggagaacggtgttacctaagcacaggaagaggtctccccagtagggttaata

SEQ ID NO: 565058 - DNA, 639 bp, Homo sapiens
ttctgataccaggaagacattctggatgagttaactgggtaacatggtgttggccccactcccagatccgggatccccaagtgcctggctgtaggccctgatgccctgccctcagcccctgcggagccccagcttgggacaatcccactcccttcccaaagctggggccctctgagaacccatctgaagtcggctgttggtgcccagggtgaagagtgagagagttctgaggtgacagccttactaccgggtggccgccaagtcttccagcagaccatctcctgcccggagggcctgtcggctgaggtggggtccgaagtgggagacaggacgctgcgctggatggccagtcacactgccagaccctggcatgtccctgacagacaggggagtgatgagctacagtgaaggcatgtagcttgagctgcctgggtcgggaggactggctctctagtgctggcgccgagagcacgtgtgcatctgggggccccatgcagtgcatgtgcgggccaactgtcgcgaacaccattaactgagcgccacgttgaggccgaagtgaagcttgcgtccccacaaaatcaagacaggggagccaatttggggcccccttggaatttggggggcctggaaaaagggggg

SEQ ID NO: 565059 - DNA, 902 bp, Homo sapiens
gtttctttttggaatataaaaatgtcctagaataagacagtggtgatacttgcacaactttggaatatgccaaatgccactgaactgtgtactttaaatgggtgagttgtatggtatataaattatacatcaataaagctgttattctaaaaaaaaaattcagccaggtgcagtagctcacgcttgtgatcccagcactttgggaggctgaggcagatggattgctttttgctcaggagttggagaccagcctgggcaatatggtgagacctcacccctacagaaaaatagaaaatattagctgggactggtggtgcgtacctgtggtcccagctactcggaaggctgacgtgggagggtcgcttgaaggctctggcagcgagattgaggcttcaggtgagccatgattgcaccactgcactccaatgtgggtgcacagagttataacccccgctctcaaaacaaacaaaacaaacaacacaacaaaaccctaaactaacattaacaaaagaattcctctcttcatgcgggggctgatcacgaaacccccgaaggaggatctcttatcagtctgtctctcatcctctaaagaaactccccacagaacagtatcttgctgaatcaccacatcttttcaggcacgcaggccacgctctgccttttcacccaacgttctactcccagcgaattcgggcaacaatgagaaaacacccccagtaatcaaacttgctgtgtttaacaccattctacaaatccaccttacttgttcagttactaatcaaggccctttaacaggaacaaaagtctaacataacaaagctaacctttcaactgctaccattcaaacccttacaaccgttcttaacccaaaacctattctccctcggttcacacaaaaacgc

SEQ ID NO: 565060 - DNA, 337 bp, Homo sapiens
gctcggtaccgtctgacggagactctcggtcatagccatccgaagtaggtaagctggggaggagctatgaagacacatctctcggtagtcattcaggttggtaagctcacaggttaaagagtgtccaggcttttcagacattctaactattttcaaaggttccaagggtgctgatatctttcagttgatttccacttaagttgagatgtgtgagatatgggaagttttgcagcgtaacatgtccagacctccgaagattctattgtcactgagttcaagcgttcacaatgtaggcagcttggggagattcgaaagtgatatcaagcctacattgatt

SEQ ID NO: 565061 - DNA, 996 bp, Homo sapiens
gaacaccacccatgtgtggagcagcccagccaagcactgtcaggaatcctgtgaaggcaggctccagcttatgtgtgacagaagaagatcctgactgagcgtggctattccttcgttactacttgctgagcgtgagattgtccgggacatcaacggagaaacctggtgtatatgtagctcttggactttgaaaattgagatggccactgccgaatcctcatcctcccttgacgaagagttacggagtggcctgaatggcgccctctgactcaccatcggacacatgacactgttctcccgcttgcccaagagaccctgctcacggaggcacccctgaaaccccaaggccaaccgggaagacaacattgactcaaatcattgtctggagacctttcaattgtcccagccattgtattgtggctatccaggccgggctgactctctatgcctctggacgcaacaatggcatcgtgctggactctggaagatggtgtcaccacaaatgtccccatctatagggctatgcatggccaatgcatacaatgcgtctggacctggattggcgagatctcactgatacctcataaatcctgatgagcgtggatactttgtgggacgatgcccacgctgttccatccatggggacccacaacacgggcgagggggcaggcacacaacgccctgtggaccaaacaaaagcttcctagccacacacggtaccatcgctgaataggccaagcgggcgcgagactcggcggagctactcctttgtcctctcttcttcccctgttgtcctcagtaaaaaaagggcccagcggggagaagccgggcgcggggagacagcgacagagaacaaacaggcaaacaagagagagcagagggaagcagagaaaagagcaacaagagacaggaacaagcgaagcaggaggagaaagaaaggagaagccaagaaagagagggccagaagaagagaagcgagagccagagagagacaaa

SEQ ID NO: 565062 - DNA, 765 bp, Homo sapiens
ggaggcctctgtggcggctcgttcggggaagttgagtcagggattgctccagcttccgcgagggaggtctctgtggcgggcagggtccccccctggagctgctgctaggcggtgctggttgccgggatgctgagccctacgcgggggctgagcggggcccactacttcttagctattctactcagtgttagagaggagaccgagcttgatcggctgggaggaagtgggagaggtctagtgagtcccttagggaataaagcagaccccgtattctattataccggtctagtcactgctaagtgtctccatatctaaccatctatatgatatcacgccagcacatctaccatatttactgatatattctatatacgagctatatataaatatatatatagagtctatcctgtaacatatagtcgggtatctaggaactgggtgtgcggcgagtactccctaggagacggcgggtgggaccgaccgtcgtgatgtggaggcgggaggagccttgcgggggtggcgcgcgacgaacgcgaggagtggatgcgcgagaaattaggaggttgggcggcccacgtgccgcaggcttgagcagtgaggctctgccagggtgcacggagtggtgcacatacccagggcaagagggggtgtggcgaacgcccctatcttccggaccgcagggaactgaacctctaccggagtgccatatacctaggcagagaggaggggggtcgtcctgatgcgctctggccggaatgatcaggg

SEQ ID NO: 565063 - DNA, 531 bp, Homo sapiens
  misc_feature (13)..(13): n is a, c, g, or t
gatccacgttggnatccgattcggatccacgttgggatccggttggatccgaattcggatccaccaaaaatacaaaaatcagctgggcatggtggcgcgcacctgtaatcccagctactcagggagccgaggcaggagaatcacttgaacccagggggcagaaggtgcagtgagccaagatcacatcactgcactccagcctgggggacacagctggagtctcaaaagaaaaaagaaagaaaaggacaggcacagtggctcatgcctaaaatcacagcattttgggaggccgaggcaggaggattgcttgatcccagagaccaacgtgggcaacatagcaagacctcctttctacaaaaaattctcaaattagccaggcgtggtggtgtacacctctggtcccagctactcgggaggcttaggtgggagggtcatttgatcctgggaggtcgagcctgcagtgagccataattgcacctctgcactcccgcctgggcaacacggcaaggatctgtctcaaatttaaaactt

SEQ ID NO: 565064 - DNA, 460 bp, Homo sapiens
  misc_feature (434)..(434): n is a, c, g, or t
acattggctataccacctgataatttaagaatggagaacatatgttggaattacttcaacagtgccaatcatgaataataataaaaattaataccatgaagtccatagtactttcttgtattggtaaatcatttaatgtttggttaccaaaatttccgaaattatgtggctgcaactccccactgtagatactggataaagccgggggaatttttattttaacttaaatatatacaagatacttttttagtttgtttgaaaaaataattgggccaagatcatgtctctcaagagttagcctaaatgaaatgttttttttatcatggggcttgaaaataggaacttgtaatgggagaaataggaaacagaagtaggaatcccaatatctccgtcctaataagacattggatttgggtgactggttaatttccagnaaaaattattaatttcccgaaaagtt

SEQ ID NO: 565065 - DNA, 141 bp, Homo sapiens
cacgaggggtcgtgccaattcccttccactacggctcgcgcagctcgcgcttcagcagcttgccggcgcccgagagggggagcggcgtgtctcggaagtccatgctccccgggcacttgtcccccgcgatctggttgcggc

SEQ ID NO: 565066 - DNA, 192 bp, Homo sapiens
tatatcatgttttgaggttagtttgatattgctagggtggtgattagtcggttgttgatgatactctagggcgagtggcgatcacaagagcgtagacttagactggtcagaactgcggcgggtaggcgcttccaattaggtgcatgagtaggtggcctgcagtaatgttagcggttaggcgtacggccaggg

SEQ ID NO: 565067 - DNA, 444 bp, Homo sapiens
  misc_feature (25)..(25): n is a, c, g, or t
  misc_feature (60)..(60): n is a, c, g, or t
  misc_feature (326)..(326): n is a, c, g, or t
aagggcttcacctgtagtcctcatngtgacttgactcatgcctgatgctgcttccttccntgttctaggtgccacatagatgcagaagcagtgtgcttgatgtcaggaggtctcccctttcttctctgtctccccattcttctctcctccgaccctttctctcccccatttctccctctctttccttatgtcctctcctccacactttgggtatcaaacccgggaccttgtacctattaggcaagtgctgaatcattgtgctacattcccagctctctaactttcttctcattctttacatctcatctttggctcagtggagaacnctttctgggagcagagctggcctgggaggagacagtgaagtaaggaagttcttggctctgaattacacactgttcttccctctagtgaccatgacctggggcagtcggacccacaggc

SEQ ID NO: 565068 - DNA, 298 bp, Homo sapiens
tggggcccggtggctcatgcctgcaatcccagccctttgggaggcctaggcaggaggattgttgaagcttggagtttgtgtcctgcctgggcaacatggtgagcccccgtcccttcgttttcttttttttcattagctgggcttgttggcatgtgcctgtggtcccagctgctcgggaaggtggggctgttagatcgcttgcccccatgtggtcccggctgcaatgaatcatgatggcaacaatgcactatagatcaggcaacagaccaagaccctgtctcaaaaaacaaaaaacaat

SEQ ID NO: 565069 - DNA, 373 bp, Homo sapiens
  misc_feature (3)..(3): n is a, c, g, or t
  misc_feature (9)..(9): n is a, c, g, or t
  misc_feature (125)..(126): n is a, c, g, or t
  misc_feature (287)..(287): n is a, c, g, or t
  misc_feature (289)..(289): n is a, c, g, or t
ganttcggnacgagctacaaaccgagacgggtggatcacgaggtcaggagatggggaccatcttggccaacatggcaaaaccccatctttttcaaatacaaaaaatcagctgggtgtggtcacanntggtaagtcccagctactcaggaggctgaggcaggagaatcgctggaacccgggaggtggaggttgcagtgagctgagatagcgccactgcactccattctggggacagagcaagactccgtctcaaaccagctaagcaggaagaacattgctttgcaagnanaatacctatgtatttcatttaccaccagcttccaacaaagggcagtgggttcatcaagggttcgggcagttgttttcatcttta

SEQ ID NO: 565070 - DNA, 1128 bp, Homo sapiens
gactgtctaaagcatgccttatttatgcctctcctgtaagggtgatctagccaggtacattttaaacaatgcttcagtgtagaaggtgtaaactattattgggctatgcatgtgctgtgaatgttagcttttttttttcctttgttaaaatcatttaaatcagaagtgcaaaaggtcctctagaggatcagatcatgcatgcgccattttttacttaatgcagctgttaaatgggcaaagctctacactgcactgctgccatctagtgatacactttggtcaaagtacagcaaaacctacagatatatacagtcatatcaacatatatcatatatatatatttcatatttctagggggtgggagaaaatccaaaataaagtaaatgcttgtattcattaaaaaagctgctgatattcattccttattcgtatgttgtcaagatgcaggcaaattgtgcagatacatggatacataaagcatgagtaatataaactgcaaatctataatatataagggcttcaacctggtgcaatttaatcaagctggaaacagtccaactgactgggctctactgcaattgccagtatatacgtatgatagctcaccagctgattactcttctctctacctgtcaagtcatgatcaaatcatacatcctatagcactgatgtgtcgaacctcacatctggcaccattcactacaaacacagggcaaaacaccaataacaaacacaaggaaaccaaccgcccatgcaaagcaacaccatggcaacactacagggaaacaaacacgctcacgaggaacgacagagatacaccaacaagaagaaacgggcacacacccacaacacacaacaaacccaaagcgccagacctgccggtgcacaccccacacaaccagacctgatgatattggggtacaatatgagaagtcactgagaatgacagggcttcgagggagaacgagtgaagaagataggatgggagacaaaagattcgatgacggacatattgtcgctcggcatgccaatgaagacagatgacaatactgtacaagccacagaataggactaagaaagaaatgaaggcatatagtcggatgttgtatcatgatttagctactagga

SEQ ID NO: 565071 - DNA, 127 bp, Homo sapiens
ggtcgacggggatggtgttgaacatgagggtgttttctcgtgtgaatgagggcttttaacttagttgttaatgtggtgggtgagtgagcctcattgtgttgtggtaaatatggggtaccgagcctcg

SEQ ID NO: 565072 - DNA, 1194 bp, Homo sapiens
  misc_feature (992)..(992): n is a, c, g, or t
taagtagatatcgactcgtggtctctgctctagcccttgtgtgctgttgcatgtgcaatcgagctgagtgttcatgcggcatatctcgcacatagtgcgagttgcgtcgcgcttacacgtccttcgcatacacgtgactcgctcgcatcacgttctacagaccaagatgtagcgattggctgcatccagcgaccattggggctgtcaaggccacgcttacattagatgagtccacaggtgtgctcccaaatgagtaggactcggtaaagccagtcttagggacttgagacgatgctactatttcgatcggatggtggttgcgtagcacaaatggaacgcgctcttcgtcgatcacaggtcgtccgaagatgtgagatccccctcggtagcggtaagttcgatcgagctctggtaggccacgtgcttccctttgggacacgacgcagcggttgtgcccaatactgggcttgtcagtggcccttgaaccgttggacccatgcgtttacaagatgggggttccattccaaccagaccttggttgcattctactaccaggacagtacgcacatgacttatcggttgggaggcgcaaaattgaatagcgctacactagggcggtacttggttcaataacaaaataataagaacgcgctttgacaatcacggtgtcgcacatggtgcaatggcagcatggggaatcgcaatcgttggtttcccacgatacatattcataatttttgcaccgaagaaaatttccctccttgataactttggcggcgcaaaagtgcagagccaagtttccatttccccccctatggtgaacaacttgaagagctgtgtttccctacacttaagggcgtatagtgttcccacgttcgccattgataaccccctttactctgaattatagatttctcccctctagaggaacaatgggtgcttgggaatcctcacataatggactcgtttgtactcaaagttccgctgttggngcacccaatgggtgcatatttgcgaagttgcaaaattccctactacgaacttggggcaccgttgtggtccaagttcccaaccttcggtggtgatatgggcaaattccaaacagtgaatatatctctgtttccaaatataagcctcggcggcaacaacactattcaccatgtaatttattcggtgtgggctcgcaaggggctg

SEQ ID NO: 565073 - DNA, 113 bp, Homo sapiens
tacttttcacagggcttgtccatgtgccagcgaaacattgccctcaacatgccacctggctgccagtgtacctgatgctctgaattctgtaatcattggtcatatgcttgttt

SEQ ID NO: 565074 - DNA, 984 bp, Homo sapiens
gtgtttgttgctccgcatggtgttgcgccgctttttgggttccccgcggtagtagatgccgcttgtgaccgtcacgccgcgtggctcatgtccccgcctgggtggattaaggcctgtccatacatttctctgacggcctggtttggccttcacgtgctcttactctgcgttgtccgcctgtaccagacatttggacccatttcttgggtcgccacgtgggggcgtactatacaccctttgctgttggctaaggcatatgtatgctgatgctcacgcacttgagtatgttctgagcccagtgacaatttggccctccgtttgtgggcctccacctgtggcgctatcccccagctccctctcgtgtttattctttcctcgacctcaactattttcttaaaatgtatccctcccccagggcttgtacactctctgcttatattgttctcctgctcctcacaggctcataatgtgctgggtgccatcaccaggctttgatcgattaatccccctcttttgtcaatagattctctaatttctgtctacgcccgcactataaaactcttttattctagtttcttgttatcccatgccacctgtttattaaccttccccggatggctcccctcccgcttatgtattacctcactagaggagaaatccttttgcttacgagaactccgagtttcactggaccacaaaaatacactggtcttgccattgactggtggcaccgcattacgtatgtcatcctaccctaattatctccggcgtaacacaatttttttcacccgcactacccgaaggggggtcctttccgctccccccctctattagccaacacattgatatacacccgtctgctttacacacacgagtagtaccacccccttaattgcttaataacacctcacgttctctccctctttttctcctgtttcccctcccccgctttttttcccggcgttttcctcccacatggacgaa

SEQ ID NO: 565075 - DNA, 237 bp, Homo sapiens
agatcttcaaacacgcaatcttggacttatgatggcaaaagtccctggattatttttttaaattgagtaatagaagtctttatatattctagataaaagttctttgtgttgccgatatattctccccgtctgtagtgtggcttttttattctccttatgtttcttttattggtctttgagatggagtcttgccctgtacgcaggctggagtgccatatggtgtaaacttgggtcaca

SEQ ID NO: 565076 - DNA, 501 bp, Homo sapiens
tttatgcacgttctatatttggagaggatgcacttgcaaatgtcagcattgagaagcccagttcaccagggaccagatgctgccgttactggccatataagaattcgtgcaaaaagtcagggaatggccttgagccttggagataaaatcaacctgtctcaaaagaagactagtctataaggatgaacaaaaggtctttgaaagtttatgcttaaaatttaggtgtgggctgattggactccaacatcttttgtactcttttcatgctttatgttatgtagaatttgagttcatgctgaatgcattccagccagtaatttatagcctttcccctaaatcaagaatgagtttaaaattatagtctgtcttttatcttaacagttctgaatgctgtcctcaaagtatataatgtttctcatatgtaccaagaccattttcacaataaacagatctgttcatacatttttgttattttataaataaattacttaattttaaaaa

SEQ ID NO: 565077 - DNA, 248 bp, Homo sapiens
ggccccatgggtttttttattccggggcttttccagagcctttatgactacacgggtagtcagaattttaaaaaaggggcttagtaggcagcatttcccaaacaaattgggtcgcaggaaatacctaacagccaggggcagtggctcccccctgtaatcccagcattttggggggcccaggggggtggttcatgaggtcaggggtttgagaccagcctgcccaacatgataaaaccctgtttttccta

SEQ ID NO: 565078 - DNA, 303 bp, Homo sapiens
aagagtttaattggccggcccggtgcaagttggcttatgcctgtaaatccccagcactttgggagccctaggtgggtggatcacttgagatcaggagtttgagaccagcctggccatcatggcgaagccccgtctctactaaaaatacaaaaattggccgggccaggtggtgcatgcctgtggtcccagctactcgggaggctgaggcgggagaatcgctggaacccagtagggcggaggttgcagtgagccaagatcacaccactgcactccagcctgggcgatggagtgaatcttcgtctc

SEQ ID NO: 565079 - DNA, 240 bp, Homo sapiens
gcacaaagatatattgtcacctgtctaggcattttgcacagagacataaggtgtgttgtttatgcccttttttacttttgggttgggggaaaccggaaaggtaatacacatttcaatggtccatttccttcacagactttttttttctaggggaagagacacagagctctctggagggcacagagagagagagccctagcctagcccagggtgccccaggggaggcctctgcacacccaa

SEQ ID NO: 565080 - DNA, 196 bp, Homo sapiens
ccacgtgcgtggctctggcataggatggtgtctacagctctgattagacccctagcctgagaacctccatatgctgcaggaagtggccctagaaatggcaaaaagagagaaaaaaaaaatctcggctcgggttggatcgaatagtggtctcatattctctattcatacctccaatatgcaccgtaattagggtttg

SEQ ID NO: 565081 - DNA, 545 bp, Homo sapiens
tgcgttgcacgcccccatatggtaaacgtttctggcccacgcggaaagcctattggaaaaatatttgagaaaatatcctccctgtgtcacgagacttataagaaaggctggaggaaatatttataaaattatatggttaatcaccctgcggttcctaattctctaagagaccgcggggccccacgcgttccgcttgaatgtggttgtaatcctcggttggtcctatctgagcacctttcgagttgctttcactttgttgttggctcacggttaaaagtttcaccactctcgctcttaaggagaaaatgagaaattctattatagagttcactcttctgttttagagcttaggtcacctgtccctaagtatgtatttttaatgcatctacacttttttactattttggatgtttggtaatttttctaacttttccaaatgggaataccagtaattttgaagtcctttccaactgtaagatcgctctaattttagttggtaattattaattgataataaaactatcatatgattgccaaataactga

SEQ ID NO: 565082 - DNA, 785 bp, Homo sapiens
agagggagctggaggccaaggccggagagctggcccgcgcgcaggaggccctgagccacacagagcagagcaagtcgtgagctgagctcacggctggacacgctgagtgcggagaaggatgctctgagtggagctgtgcggcagcgggaggcagacctgctggcaggccagatgcctgtgtgctgctgatgacatgaggctggcgctgatgccgggagcagcagcgcagctcccaggagcatgggctgagttgcagggccggctggcagagagggagtctcaggagcaggggctgcggcagaggctgctggacgagcagttcgcagttgttgcggggcgctgctgccggaggcctgtgggcatcctgcaggatgccgttgagcaagctggaacgagcccctgcaacctgcggcttgtaccgagctccccagaactaccttggtgatgcagggcccaggaggccttgggattgccgtgaagcaccctggagggagggggccacgcccagtaccttgaacctccttggcagacgctctccggccctggtggcggctctgacccgcttcttcccagctggctgcggataccatcattcaattggccggtgccaccttcgcaacctgggatcccaccggacccttgcctaaccgggcttcatagaacaccttgcaggtgagttgctggggcccgtgggctctggaagctcattggcggaaggtgtcaagggagcatggaagggattctggggaccattgcaggaccacgcctgtggggggacagcccct

SEQ ID NO: 565083 - DNA, 282 bp, Homo sapiens
aatcagctcggtacctcatcgctatgtacaggcctaccaaattttgtgttgctttattgcactttacagatactattttttacaaactgaaggttggtggcaaccctgtgtcgaggaagtcttgcagtgccgtctttctaacagcatatgctcacttcgtgtctctgtgttacatttcggtaacagtattttagatgttttcattattatcatatctgttatagcgatcagtgatctttgatgttactcttgtaattgcttacaacctcactgatagaagag

SEQ ID NO: 565084 - DNA, 204 bp, Homo sapiens
cattccctggggaggggttcctgaacccttccccaatgggatctgtggactttcatttttttaaaagacttacccaatttcatgcctgtactccctgaaacaaagtgagaaaggccaggtgtatttttttaagtcatcaaaataaacccttaaaaattcagtttaaattagcccccaggaaggaaaaatattttaaaaccccca

SEQ ID NO: 565085 - DNA, 81 bp, Homo sapiens
gatcggtccacgtattactatggttcggggcaagatgcttttgatatctggggccaagggacaatggtcaccgtctcttca

SEQ ID NO: 565086 - DNA, 228 bp, Homo sapiens
atctggcgttacttaatcaagaccgtcactcccatagagtctgtgtgttccctgtagtactgtgacacacaatatatggtaccggagtctcaggcttgatatattaagcactacataatcataaggacagtgatgaccatgaacccagaaggctcgaacatctagctgacagtatacacgcgcgcactgtgcgcattgcacacagtgaggagctatctaggaccctct

SEQ ID NO: 565087 - DNA, 489 bp, Homo sapiens
  misc_feature (29)..(29): n is a, c, g, or t
  misc_feature (146)..(146): n is a, c, g, or t
  misc_feature (168)..(168): n is a, c, g, or t
  misc_feature (288)..(288): n is a, c, g, or t
  misc_feature (297)..(297): n is a, c, g, or t
  misc_feature (489)..(489): n is a, c, g, or t
gccttctctgaatctcttgtcctttccanttcccattctccaggctgagaactgcactctgatacacggttattcccaataataataatgtgtgtatcacacataatgcactgcacctcttcaccatgctggcacctactcctctnctccccctgccagcttcctcanccccttcttctaccctgatggttctctccttgcctcctcaggccagcacttcccatgatctgagatgtctctttccttttcacctttttctccagcagtgagttcctcctcctaactcanggcttccanggaaggatatcctctgcttctcagacctgaacctgcctcgaatactcatgaggacccaaggagctactcctcacctcccacttctcctctggtcctgtcacataaccaaaggcacggccaactggatctccaaccatctgaggaaccaatcgtgtgtgggaaccgctgagcagaaaacctccccaagcggan

SEQ ID NO: 565088 - DNA, 143 bp, Homo sapiens
cctcgctaccaggaggctgcaggtaggaggattgttgaacccaggaggttgcgtgtgctgtgcagctgtgcattgcaccattgcactctagcctgggcaacagagtgagcacctgtttacaaaaacaaacatccccagcaatc

SEQ ID NO: 565089 - DNA, 1391 bp, Homo sapiens
  misc_feature (1096)..(1096): n is a, c, g, or t
  misc_feature (1161)..(1161): n is a, c, g, or t
ccttgtgtgccctcgggggcctctttgtgtccccccgcggatggtttcccttgggggggggtttttgtaggggggattgtcccacggggggaggctaacccaacggggggcggggcttgtctccgggggggtagacaccaccagcggtggacgcaagattgggtgcgtcaaaagattggtcagaggttatgtctccttctccacaggtaagcccacgtggttttgccttggtttttgtgattggttgggtcgtgtgtgggctggttcttgtgtgtcgtgtttcgtggtgcccccggtgggcctacagaatgttgtttttataggcgtgttgtttggtttttgataaaagcgcaccccctcggggtggtgcgcccaccaaccataatgggggaaaaatagtgggccctctggtgtgggaggatgaagtagtcccgccccggcttaatataagggggagagaatataaggttgttaactagaggagtagcgccttaatgattgttttctagtaggagtaacaaaggccttataaaagatgggagaatattctgcgcccacaacaggttttagaacagccttttggggaggaaatatcccaccgctttatggtagaaaatagcgctacttaaaatggctgggatgtgccccttgataataagatgatgtgtggagcacaacagcttgtgggccaacagcacacacccgtctgttgtctcatagcgccgctgtaggaggccctcgttataggagatgttataatcacgagcgagaagaggtggtctcgtttatattatccctctgagaacagcgcttggcgtgttagagatagtcggagagggagagagaggagcgcgcagaggggcacatctgcggggcgctcgcgtgtgggggcgcgcgctataagggggggtgtatattcgggtgtataggcgcactcacacggagtcacccacgcagatatatgggtgtgatagacacacacactcgtgtgtgtgtgggggagcacgcggcgtgttctacacacgcgcgttgtgtgttgagacctcttctgttcacatctcgcgtgtggtgagactcttatgggctctctacgggntgtgtcacatgtggggggtctctcctcgtgtgagtcacgccacaagagatgttgttctcttggcnctattgtggttataatgcacattgttgttaaaagtacatttgaatgtaccacttacacgagttaaaagaagagaaaggcggcgcttggtgtaatatttaacaccccagatgcccccgcggtttcctcaatcctattgggttttaaaatatattggttcaatttcaaacttttgtaaagaagtatggatttcccagtttttttttactttctccccagtatgttttaacca

SEQ ID NO: 565090 - DNA, 404 bp, Homo sapiens
gcggttgtatcccaaaggtcagtctaaggaggcagccacctatatagacatgacgtcaggtggattaggaaggacccacagctcaccttccctaaggcttactgacttgtacatgaggtctataatattaggtatacgcacccgtaagtaacatctgattgacggcatgaccttgcttgagatccactctcagaaacaggtttagaggggaaaagcacatgaatactgggagctacatggaggacgaacagggccacagaacaaggggaagctgggcctatagcggtccagcatgattaggggccaacagttggcttctaggaggtcatgggttaacacagtcgtcctaataccacctcctgagatgctgaatttcctctcagctgcgtacacatttctatttt

SEQ ID NO: 565091 - DNA, 336 bp, Homo sapiens
aaccgggtctgcccatgtatcagggttctgcttgggttgatcgtgtcggactccgcccttctattaacaattcatgggatcattgcgactagactatctacataatttcagtgacatccttcccaaatgttgtacaaattccccatattagtccatgcagcacaagctagtagctcgcatctgtgtgatcctcatctccatgcaatgtgtgtgcgatgagatgatcagagtaaattctactctgggtggtaccagtatcagattcgggtgtacgttcgcctgatccccctttaatccctggacgattccttgtctcggcttccaggcagctttccc

SEQ ID NO: 565092 - DNA, 295 bp, Homo sapiens
  misc_feature (19)..(19): n is a, c, g, or t
  misc_feature (41)..(41): n is a, c, g, or t
gggtggtccgggggtgcgncggggcggtgggtgtgagctcntccgcgtccactacaatcttgctaggagagacatatgacgcactgtcccgtgaagtctacgcaacatattttgtcaccaagaccgacgttgtaacctccctgttcttatgaattcgagcagcataccccggattccgctaggaccaactcatacacctcctatgaaaaaacttcctaccactcaccctagcattacttatatgatatgtctccatacccattacaatctccagcattccccctcaaacctaaaa

SEQ ID NO: 565093 - DNA, 723 bp, Homo sapiens
  misc_feature (47)..(47): n is a, c, g, or t
  misc_feature (79)..(79): n is a, c, g, or t
  misc_feature (81)..(81): n is a, c, g, or t
  misc_feature (87)..(89): n is a, c, g, or t
  misc_feature (104)..(104): n is a, c, g, or t
  misc_feature (107)..(107): n is a, c, g, or t
  misc_feature (120)..(121): n is a, c, g, or t
  misc_feature (124)..(124): n is a, c, g, or t
  misc_feature (126)..(129): n is a, c, g, or t
  misc_feature (147)..(147): n is a, c, g, or t
  misc_feature (161)..(161): n is a, c, g, or t
  misc_feature (164)..(164): n is a, c, g, or t
  misc_feature (168)..(168): n is a, c, g, or t
  misc_feature (179)..(179): n is a, c, g, or t
  misc_feature (207)..(207): n is a, c, g, or t
  misc_feature (213)..(213): n is a, c, g, or t
  misc_feature (218)..(218): n is a, c, g, or t
  misc_feature (221)..(221): n is a, c, g, or t
  misc_feature (224)..(224): n is a, c, g, or t
  misc_feature (243)..(243): n is a, c, g, or t
  misc_feature (260)..(260): n is a, c, g, or t
  misc_feature (264)..(264): n is a, c, g, or t
  misc_feature (269)..(269): n is a, c, g, or t
  misc_feature (288)..(288): n is a, c, g, or t
  misc_feature (291)..(291): n is a, c, g, or t
  misc_feature (304)..(304): n is a, c, g, or t
  misc_feature (308)..(308): n is a, c, g, or t
  misc_feature (316)..(316): n is a, c, g, or t
  misc_feature (329)..(329): n is a, c, g, or t
  misc_feature (355)..(358): n is a, c, g, or t
  misc_feature (376)..(376): n is a, c, g, or t
  misc_feature (379)..(379): n is a, c, g, or t
  misc_feature (384)..(384): n is a, c, g, or t
  misc_feature (395)..(395): n is a, c, g, or t
  misc_feature (400)..(400): n is a, c, g, or t
  misc_feature (406)..(406): n is a, c, g, or t
  misc_feature (410)..(410): n is a, c, g, or t
  misc_feature (412)..(412): n is a, c, g, or t
  misc_feature (422)..(422): n is a, c, g, or t
  misc_feature (436)..(437): n is a, c, g, or t
  misc_feature (444)..(444): n is a, c, g, or t
  misc_feature (462)..(462): n is a, c, g, or t
  misc_feature (551)..(551): n is a, c, g, or t
  misc_feature (553)..(553): n is a, c, g, or t
  misc_feature (570)..(570): n is a, c, g, or t
  misc_feature (711)..(711): n is a, c, g, or t
gaagaggcccagaggactgaaattaaactcaatattgataaataggngcaaagaatactgtggaaagaaaataaaatanantaaaannnggaaggctaaaatcnggngggggtgagctgnngtncnnnngggggcccggctgcagcngctttccctggggncangggnggctcgggagntgcagccacactgtgaacctcgcggagnctgggnccacncgntcncgctgcctcggcatggcgncctttcgtgggttcccnttcntctgnctgcagacagcaaatttcnggnctcaaacaggagntccntacctgcntctgtacataggncagagtcagttacacgtggcggaagnnnncctggggctgcccagggnggnggggnggcccactttngggcngggggngttngntgcccccccngggcggggggacannggggganggtggggtccctgcggcntgggggccagggccacctagcaggaactagaatcaatgtgggccacaggggggatggggggggggaaagggagggatacccagagcttntnttccccctgctggagcntcccatttgtggagtccggtgggagtcctgggccaggcagtcataggggccacttgtaagtgctcagcaggccggagcacagaatgggctgggggcagcagggggatgacggcacaccaggacgcatgtgttgcccatganacatttccatgt

SEQ ID NO: 565094 - DNA, 404 bp, Homo sapiens
gacatggacatagctgtaccgtgtgagaagctcgcatctcgttactcaatacgtttaacacctacagactgatattttcgaaagaaactaagaggacacacatgaaaaggtcatcgtgatcacagattggaagattcactactataaaatgtcaagactggccaggcagcggtgtgtcctgcctgtaaccccagcactttgagaggccaagacggacagattacaaggtcaagagagcgagaccatcccagccaacatagagaaaccccgtctctactaaatacaaaaattagctgggtgcggcggcacgtgcctgtagccccagctacttgtgaggctgaggtgtcaggcttgcttgagcctggcaggcagaagttgcagtgagctaagactgtgccactgcc

SEQ ID NO: 565095 - DNA, 289 bp, Homo sapiens
gatacatcagctcggtaccagtgaatcactcgggtactgaggatctctagatcgaccaggctccatgtaaacgagtatatggagcggtccgtatgatagctcacgtgtcgacggaacttgtacagggaggcatgcaccgcagtggtgaatacacgtcgaccaggatgcatgtatgcatgcttgggtcatgatcacggatctcctatattcaagcagcatgtatacaaacttgtgcccggccgtggtgaatacacgtcgagctggaggcatgcatgcatagctcgggtcc

SEQ ID NO: 565096 - DNA, 352 bp, Homo sapiens
tagttttttgtttctgcagggtacaaaaccacaatctttattttcttataaaaaactgagttgtttcacttaagataatagcctccagtgccacccacgttgctgccaaagccgtactttcattctctttatatggctgagtaatatcccctggtatacatatacaacgttttctttatcccatcatctgctgatggatacttaggttgattccatatctttgctcttgtgaattgtgctgcaatagatatacaagtgcaggtatcttttggatagaatgatttattttcctttaagtagatacccagtagtgggattgctgggtagaatggtagttctatttttagttcca

SEQ ID NO: 565097 - DNA, 415 bp, Homo sapiens
catctgtcggaccaattacactaggccagatatgaattacctgcatcaacaaccagtctggtgggttttatcagcatacttaactccgatgtcagtggttgtatggaatcctattgtcattaccctagacaaaaacttgcacactaccggagagggccagcagagtttcgcgtaaggaacacgaatgaattgatatgtctagtaggcgaggggggcccaacttagatataaaatgtttttcaggctgttcactaatatactgcatcatttgaaatgtgagtgtactaagtaagctatctagtacgatgcagctgatgtcagcagcctttccacaaagctactaattacagaagagacaggccccgccccacctggtctgaacccccatgaaaaagcaatgatgcaattcatcacc

SEQ ID NO: 565098 - DNA, 405 bp, Homo sapiens
agttccagcgtgtatatcctagctagttcctttctctccacctcacacggcaggcttgaaacagcagggtaccccgcctgcctctacttccacttcctctctgctttgcattccttatccactttcaacaggctgcagtgccccttccttgccccaaccctgtccctaaaccctactaaaacagcttaggcaaaggtcaccaccaatgacctctgcttgtaatctcaattgcattttctcagtcctagtctcaaactctatgcaacaacagacacttaatactccttgttgttttgcgcttctccctctggtcactcatacccctctgacctcttttccaggttctttttttcagcttcccccttaaatggtggtgctttccagttctgtgtttagcctctgctc

SEQ ID NO: 565099 - DNA, 219 bp, Homo sapiens
tccagaatagtggaggcagcaacatcaatcatcctttcttggaagctcttgacggctggtggggggacaggagaggtagggagatgccctggtatttaaccatttatgggctggatctccagactcagaaactgtggcttcattgctacatctgtccatacatgtctctgtgggtccctcccacgcagtgtggaaactgtcactccttcacccaagcta

SEQ ID NO: 565100 - DNA, 196 bp, Homo sapiens
tggtttggtaccacaaccgccgcgcgcggcggaatcgactatcagtacttcgatgacgcgctggcgctggcgcactggtgcgacgtgctggtctgcgccatgcccggcggcgcgggacgcggcacatggtcaatgcggccgtgctgcgggagctcggcccgggcggctatctggtcaatgtcggccggggcagcat

SEQ ID NO: 565101 - DNA, 906 bp, Homo sapiens
gtgtgtgcgagccatggaggctgaggcatgcgggttgtgtgagcagtctggaggaggaggcagactgctcagggaacgggcgggccgtgaactgcatgactgcccagggccagggtttcagagtggcggcggcgccaggaggaggaggcagggcgcactggaggcaggggtaggaggcatcggcgccgggcaactcgggaggccgaggcctctgacccagacgccttggcagtaaacacgacagagtaccgttggatcggctggagcggggcctggcgtgcagttctgctaacaggagctgatactgacgccaccaatgggcctggagcagccagtcgggcaagcgttgtgagcgaccctgagcagaagaaagcaagacgcgcatgtttgacccagctttcttggcagaaggcagaagtgcagcgtagtacttcagggcagttggcattgaacgtgatgcagggtccgatggcagagggccgggaagcgttgactgctcagggcccttgtcactgagacttgggtgacttggatcgcaggaagcacgggaggcgaccgtgagcgagctggaagcagtgagagatcggaggacctaagacgtggtgatcgatgggaaagccagtggatgatgagccagaggattgacggattggacaatgagcggttggatttgaggctggaaagtgcatggcatgacgggggttagcagaaagaggcaagacacatgattctgaagaagcgaacatgggtgacgagaaacttgtgagggattggaccgttgaacaggagggcagaggagtgccagagattgggttttggaagggtgattggtgcaagggtctctcgaagaagctcaggattgagtgttgacctggcagggaacgagaatgagggttggtgaacgag

SEQ ID NO: 565102 - DNA, 501 bp, Homo sapiens
taacatcttggcaggtgctgcataatcatgcctcaaatgactttctgaagataaaaagaaagtggtacttgcttgcataactgaacatatctgcctgagttgttttcctacagatgttatcctgggaatagaaccaaaattgttcattccctagcagccttcaagaagcactgtgatctagggcagcacagagccagcaatgagagacagaatgacattcacaattctagaagaaaacactggagtggaatatacacagaatggctgtttggtctcaagactgcatgaattattatccggctatgctggatgttctaattcctttctctcagaggactgtaggtagatacatatgctgactacatatgtggataacactgtcgaatgccagttttcactaatagtgtttgtgttaagctctctaaactttctaggctggcactatttgtgcccaaaagcatattctaaagcataaatccttgagagcaacacacacacaaa

SEQ ID NO: 565103 - DNA, 416 bp, Homo sapiens
tggtcatagctgcttcttgaggataaaactacttcagggagagacgtactcatagacttagctttttcctgagcaaaaaaaaccacttgatagattccttctaccacccatgtcgaaggacaggagagaatgcagccgcctggagccagtgaagaaagtgaagtcagtgaagaaggaaacaagaagctgcgctgggtgcctccaacaggccaagtaggataagaactgggaggggctatgggacttagcaatgcaacgacctctgaaggggacactctggtgcagcatttggaatgaaagcttgatttgagggaattaaagagaaaggagaaagagaggaattggagaaagaaagaaccctttcgagagaaggttgttggaggcaaaggagaacagcgcgctagattggttcattt

SEQ ID NO: 565104 - DNA, 115 bp, Homo sapiens
cttcctttatagcttacttatcaggtctccacataacggtgttggaaactttcattcattcatagtcttcaagatacaattgtggctacccacagaggtaccgatgcgtcgaatt

SEQ ID NO: 565105 - DNA, 659 bp, Homo sapiens
  misc_feature (70)..(70): n is a, c, g, or t
  misc_feature (307)..(308): n is a, c, g, or t
  misc_feature (347)..(347): n is a, c, g, or t
  misc_feature (417)..(417): n is a, c, g, or t
  misc_feature (447)..(447): n is a, c, g, or t
cgtgcaatgtcggatgtggatgactaccaattgctgcaacggataccctcatcacattgttctctactgngttatgctccatgcttcgttgggccgtttcacatgaatttgctagctgcgttctccgtggatttcgcgcaactcttggccggaattacgcatcgagcctaagtcgagacttcagaacacttccttagtaagagagcatatttgactgccgtttagataccagagtgtcatttcaacgaaagatgacatttattttcctaatacattttggaaacaggttgcagtgagtcgactatcnnatctaaatgtactttaggacttagaacattcgagatgcnttacttgatttttccttgttatttaacaatccctcgtccacctcccaaatataataatgaaacgatctgncagctgggcacagctggcgtcagcgcctgntgaatcccgagctgagcatgttctcttattcactttcggcagcgtgcgagaggcatttctagactctcttgtgacgcattctgaacaatagaggctatactatgtatgcgtttactccttcagagaaaagtcttaagacgtcacaatacggggaagttccttgttaccaggaagatcttctggcaattcctagttaataaatcttaatggca

SEQ ID NO: 565106 - DNA, 805 bp, Homo sapiens
  misc_feature (150)..(150): n is a, c, g, or t
  misc_feature (314)..(314): n is a, c, g, or t
  misc_feature (594)..(594): n is a, c, g, or t
gctccgagaagcggtatctgaacccgtgttgctctcccgaggcagatgctgctgtctgctagtaggctcaatggttaaatagtggaagcatcgatcgtggacgctgatacctagaagatacagtcgaacaatttctctggctgcataccntacagcgaactcaggcttgctttgtctagccaagtcggacatctgcgcgagaagttgagtgtatctttgtatgtactgttcacactgagaggtctgtggcggcgccagtggcgtttcgagcactcgtgtgatgggagaagacttgcagtggcctttgctgctcnttagtctgcccaacttgcatccgtgctgtacatgcaatgggagtatactacactgtcaaggtggacgtctgcgggttcgactaccggcacgccacgaggtgatccatggtccgatccattctatggtcatgaaatcgcggccttttcctgtcttctcatgtgccacccctgcttgggagaaggtgcccaagacaatctcgtcaaagctcccgtgcaccgtcgatcccatggacaccaactattgcttcagttccacggagaagaactgctgcgtgcggantggtacattgacttccgcaagacctcggctggaagtggatccacgagcccaagggtaccatgccaacttctgcctcgggccctgcccctacatttggagcctggacacgcagtacagcaaggtcctggccctgtacaaccagcataacccgggcgcctcggcggcgccgtgctgcgtgacgcagcgctggagccgtggccatcgtgtacta

SEQ ID NO: 565107 - DNA, 582 bp, Homo sapiens
ccgtcgttctctccttgaatccactcgccagcccgacgccctctgccgcctgcaccctgaacaccctgccccatctcctgtgccaggaacttgctactaccagcaccatgccctaccaagtatccagcactgaccccaggagcagcacagacaggcagctgtctgacatctgctcaccgcatcgatggcaccatggcacaggcgcactccatggtctgcacgactgacctccactgtggacgcatatgccatagctgtgctccagatccacttgcgcaccctgacgaactaacctgatcgaatgaaaccatgtgcctgcatatcttaccctggcgccaggcaatgacttgctcttgacccacgccctaggcactgatcacatggaaggcttgcaaaccacacattgccaactctagcaaggagtgccttgattccagataccaccttccactgtcccccaattagcactagacaccaatttcacctatacccccaaggcacatggcggcctcgcggaacctcggacacttcgacgagggcccggtttacccccgatattcaccacaccaccgaaacggacta

SEQ ID NO: 565108 - DNA, 134 bp, Homo sapiens
  misc_feature (27)..(27): n is a, c, g, or t
  misc_feature (85)..(85): n is a, c, g, or t
  misc_feature (98)..(98): n is a, c, g, or t
catccatccacccacgagtcagtccanccactcatccatccacccactcatcaatccatccacccatgactaatcaaactaaccncaaaacaaatganaaccatacacaacactaaaggacgagctccccgggt

SEQ ID NO: 565109 - DNA, 491 bp, Homo sapiens
cggagcgcgaggcgcggcggcgcggcaaggcggaggagcaggccgtccggcagcgggagctggctgaacaagagctggagaagcagcggcagctggcggaaggcaccgcgcagcagcgcctggccgcggagcaggcgttgatccggctgcgggccgagacggagcagggggagcagcagcggcagctgctggacggaggagctggcccggctgcagcgtgaggcggctgcaggcacgcagaaacggcaggagctggaagccgagctggccaaggtgcggggccgagatggaggtgctgctggccagcaaggcgagggctgaggagagagtcgcggctccaaacaggtgaggaagtccaagcagaggctggaaggccgatgccgggccggttccgtcgagctggccggcggatggccgcccgccttgcgtgccttggctggaacgaggccaagacgggcagcggcagctaggccgaggaagaccgcgggcgg

SEQ ID NO: 565110 - DNA, 570 bp, Homo sapiens
caccagaggttgttgtctcatgggggtatctctgagaccgcgggttgtaggactgcccattagcgcattcggatgtgggttcacccacaggtctggcacagttgtcaagccacagcccctgtggcttccagagcttgcacaggaccaattggcccagagatatcccttgtgcctgtgttctcaacgtggatatgtcttcccatcatggtaccgcgtcgcctcatgaggctcacactggattctctcctttccggttcccaacctgttgcaggttatcatttggccattttctccctgacggttccacttctttccaatcctggagttcacaccattgtcatggcaccatctagatgaatcacatctgaaatgacccctttccaagccttagccctggccccaccgtttaaagcctgattcagacattcgtttccactcatttccaacggcataatgggaaactgtgtaggggtcaaagcacgagtcatccgtaaggtgggtccaagcctttggtgaaaaagttggccccggtaacaacctcttcccgaaccttatgcctctgctggtctt

SEQ ID NO: 565111 - DNA, 392 bp, Homo sapiens
  misc_feature (392)..(392): n is a, c, g, or t
cactgtgcatagcccttttttgattgtttagttggttctctctcccattctccacagtggctgtcatggactccatttcactcctcaaaccccagacttcatccctcatccttctctcttagcaaatgaccatgctaccccacccaaagaaaaaaacaaacaaaaacttcaaataaaaacttgcctctaggccaggcatggtggctcatgcctataatcccagcactttgggagactgagtcaggtggatcacctgaggtcaggagttcgagaccagccgggccaacatagtgccctgtctctattacacagaggtgggaggatcacttgcctgggaggcagaggttgcagtgagccgagatcgcatcactgcactccagcctgggtgacgn

SEQ ID NO: 565112 - DNA, 864 bp, Homo sapiens
tgtgagccatcacgccgggcaccatctattactttgaaatcttcaaaagactgcttactcaagtcagctgatggtggtaaaaataattggcctttaggtaaagtgagacatcataagggtatgaggtatacattatggaggattgactgtcaggtcagaatatggagttatacatctatctctctgagttgaatactcagctccccacggagaaagaaagtcagtgtttaaggtccagcgtttcttagtctacgtgaagcgaaatgttgcattaatattcctgagtataagaatatactctttatatgggctaaaaagaccccatgaataaatagcaggttcagtagttgaggagctggagttaagcaggtagtctgcaggataaattagataacatgtgggaggtcacagcatttgggagcatgagtgtccccaagtgagcttggtttataaaactgtcgcaaatgtcggaaagtggacaggtttgctaatcttgtatgcagcaccttcacttcctttgttcttttctctctggttatcgcccgggcaggcagtccttcatactagatagagtcagactaacgcaaagtaggaagaaaatgacgtgaactcctacacctcgatatgaggggtacccggttctggccaaagcagggtgtcagccgtgaactgacaccgcacacctaggagggcagaaccgaccccatccaacaatgcgagcccacggctggggccacctgccaaacgcgcgtggaacgccaacccgagaacgggaaaacaagaaaacaagcaggcagacgcaccacacaaggcaacagccaacataagcaaacaaacacaacacaccaacaaacgacaccaacc

SEQ ID NO: 565113 - DNA, 320 bp, Homo sapiens
ctgatacaatccgagcttatacctgaacattcgtgtcaggtgcgtgggtcagcgttggaggcagccgtgatggccgcgatgcaggtggcgtgggttccagcgttggaggcagccgtgatggccgcgatgcaggggcgtgggttccagcgttggaggcagccgtgatggccgcgatgcagggagtgaataatcagcgtgtgcgtccaggcagcaggttccaagcagaagctttcctcctgtgactttgaaaagtgacctccttgtcagtttcttactcactgaactataaactagaatacgagtatggacacgaatgttca

SEQ ID NO: 565114 - DNA, 303 bp, Homo sapiens
tggaacccacttgcactgtcacagagtccacaacggaaatcacctatcccaccactatgacagagacatcatctactgccacctctcttccacccacctcttccttggtcctcgactgcagaaacagccaaaactcctaccacaaccttggtaaccaccaccaccaagaccacctcacatagtaccaccagcttcacttcttcaaccatctactccacagccagcacacccaccactgccatcacctcagttcccactaccttgggtaccatggtgacttctacatccatgatcccatctact

SEQ ID NO: 565115 - DNA, 403 bp, Homo sapiens
  misc_feature (6)..(6): n is a, c, g, or t
  misc_feature (39)..(39): n is a, c, g, or t
  misc_feature (42)..(42): n is a, c, g, or t
  misc_feature (52)..(52): n is a, c, g, or t
  misc_feature (193)..(193): n is a, c, g, or t
  misc_feature (276)..(276): n is a, c, g, or t
cctggntttaccaaaaatacaaaaaaccagccgggcatngtngcgggcgccnaaagcccagccactcagctcggctagggcaggagaatcacccaaacccaggaggcagaggccgcagcgagccaagaccatgccaccgcactccagcccaggcaacagagcgagactccatctcgaaaaaaaaaaaaaagantggctactccatagacaaagcagccccgaggactgctggttctccgtttttgtggaagtccagggaagaaggagggccccagnctttaaatttagtaatctgccttagccttgggaggtctgggaagggctggaaatcactggggacagggaaaccacttccttttgccaaatcagtttcccgttccaaagtggcctcccttgcctacca

SEQ ID NO: 565116 - DNA, 933 bp, Homo sapiens
aaggtctgacagtagctcttagagctcgactatcttaggtagtgcatgcggtgcatattgtttttcatggtgtactgtgttggattggtctcatatattggagatatcctgaaaaatggagcagtaatgcagaatcaagcctattaaaatacattttaagccttagagaaaatagagaaagaaaagatagaaagaagaaatgaaagataagagacccaataaactataaataacaacagagaaaaagagggcaaacccttctatcaaatgacctcaaatgccacccaggcattttggaccaagcagaaggctagcaaggaacaggagggagagtattactgcacagccttcaacagagccaaccacgcctccagtgtccccagaagcaaaatactgacagtcagagtcattcttgccccatggaagaaaggacttattgcagtggttatcatcggagtgatcattgctctcttgatcattgcggccaaatgttattttctgaggaaagccaaggccaagcagatgccagtggaaatgtccaggccagcagtaccacttctgaactccaacaacgagaaaatgtcagatcccaatatggaagctaacagtcattacggtcacaatgacgatgtcagaaaccatgcaatgaaaccaataaatgataataaagagcctctgaactcagacgtgcagtacacggaagttcaagtgtcctcagctgagtctcacaaagatctaggaaagaaggacacagagacagtgtacagtgaagtccggaaagctgtccctgatgccgtggaaagcagatactctagaacggaaggctcccttgatggaacttagacagcaaggccagaagcacatccgtactgccctcaaggatcgagaaaaacaagaggaccgggtatagaaacaccacggggcatacaaaac

SEQ ID NO: 565117 - DNA, 1627 bp, Homo sapiens
  misc_feature (908)..(908): n is a, c, g, or t
aaaagccctctttgatgggggaaggggaggactggaaaagcagagagatctttctggatgtcctgggagagcagccctttgggtggtgggtggaggctggaggcagggaggaatcccctcacagtgccatgagaagggcccccaaacccaggcgagacagagggagggtcaagaacgccaaggcaaatgtcacttgtgccttgttttttccctaaagaaactaaacaaagcggccgcgttcggtggcccctcaggaaggccggtcatttcctgaggagatatcaggccagcccaggccccattgttcccggtttccagccatggctgccattacctgaccagcgccacagccggtctctctgcaggcgccgggagaagtgaccagagcaatttctgcttttcacagggcgggtttctcaacggtgacttgtgggcagtgccttctgctgagcgagtcatggcccgaaggcagaactaactgtgcctgcagtcttcactctcaggatgcagccgaggtgggcccaaggggccacgatgtggcttggagtcctgctgacccttctgctctgtgagtgtttactctgtttccacatcactttaactccatgagcatcgaagcttctggaatcaacatgtttcttatgtttcttgcaggttcaagccttgagggtcaagaaaactgtaagtctgatgtttccactgtaacagatgtttctacctggcttcctcctttctcttctgtgatgcctaaaacgcacattaaattgctggggtttgatacttctaacaattaaggaaaagaatccaattgagaactaaagtttatcccatgtgggcatttttagaaaggcttagatctaagccaagttctggtcagtgtgttttagaagtagcacacgtttccttgnctggtctgaaagtagtgggttatcttgatgaattgttaagtcagttacagatcaaactccatgttcttttctctgttctcacgactactcttgactagtctaaaaatatattaggtgttgaaaagtaatcgtggttattgccattacttttcttaacaagatggcaaaaaacacaattataagtagcacacatttctgtcggtttccctttagtttggagacagaagtctcggtaacccaggctgggaagtgcagtggaggcaaacacagagaaactcaggagaaagacagcacacacatggatccaaggacaatgcgccggacgaaggcacactaagagtagccgggcacttacgagccctttgcacaccaggtactcagataaaactaagaagccagaacacaagataagaagataagagacaacacccaaggtgggcgccacagagagagggatactagagcgaaagcggacacacacgaggccacaaccagacaggacgcaacaagcgacagcacaacgcgcagcagtcgatgaaaccgatgtaacgacacacgcaggaagcacgacgggacgacgcaaaagcggtacgaagaaatacgcaacggagtagaaggagaagagggagcaggacaagcatgatacccgggggaaagccaggaaggcgaacaggcccagcaccaacggagcagcgcggcagacggcagccgagaccgac

SEQ ID NO: 565118 - DNA, 622 bp, Homo sapiens
gtcgtgctgaggcaggagtggacattctgccccaagagggcaacccactcctgcctcaggaggtcccctgtggggatgctgctatttctaagatgcatgatgcacatttcctagattatgtatctgtggagtatggataagggaggggaacacgggacaagtggcttgtagaagtttgagagtgggcgcgtcaagtggatacgttcaagacgctttggatatattccgtagatataattaacataaatatatttgcaagaagagatagaaaggagaaaagaatcataatagaaatatataggaaatgaaaagagaacaaaagagtgagcaccactaaaacatacattgaaacaacttgaacataaaatgacgtggactataattcagcgccaggtccttcatctatcctgttgcatcaggacgtacttctcctttatggtactcgggactgtaccacttcagtgcccttcactctcgcgctataactgtacagcgttacacattagaagcctccatggcgtatggccttagtgctggttagctctctagtgtaattctgatcatgattccattctatgataagctgctcctactgcatctgcgcagtagcttccttacacaa

SEQ ID NO: 565119 - DNA, 403 bp, Homo sapiens
  misc_feature (403)..(403): n is a, c, g, or t
cttcattaactaatccttaaaatgaggactgcaattaccatcctgcctctaacacaggctgctatgaagataaaaagcagaactgcagtgtcacttagttgatctttgtagagcaagagaagtgagcaacagccttacatacatgaaattcatggaaggctcgctatccaactgctgtcactcctgttaagagggtgagcatccctactgctttttgcccggatgacaggacaggcaggctgtcatgttgactcccttgttggctacatttgtaaggaacacactgcttaatatttatatcttttttaattgacacataatagtacatatttatggggcacaattaatgttctgatacacatatacattgtgcagtgatcaaatcgtggtaactagtgtatcn

SEQ ID NO: 565120 - DNA, 627 bp, Homo sapiens
acagtattttggggagtaatgttttcccgaagtttctgtcattctctgtttggcgtattgtacttctctttcccgtgcccttctcaccacacacacacacacacacacacacacacacacagcctgtcagtctcataggtgtcctataaaggtaaataaggcaggcaggcatttgaaattacagcagggatagaaagccaagctcaggctttggaggaggaacctcttgtgctggatgctttgcttttaccttcagtgccttttggattgtttctccctctgctctagaaatgctctcccagcccaggatttcttatgatgcccagtttgaggtcataaaaggacagaccatcgaagtccgttgcgaatcgatcagtggaactttgcctatttcttaccaacttttaaaaacaagtaaagttttggagaatagtaccaagaactcaaatgatcctgcggtattcaaagacaaccccactgaagacgtcgaataccagtgtgttgcagataattgccattcccacgccaaaatgttaagtgaggttctgagggtgaaggtgataggtaagttgctgtgctgtgagaagaaatcatgtgggcttggggcattctttcacgcccagggac

SEQ ID NO: 565121 - DNA, 601 bp, Homo sapiens
aactgcaggaatggcgtttgttggaacagtatgttcaaggagccacgcaggtgggatcaatgtgtttgggcaaatcactgtggagacatttgcatccattgttgctcatgaattggggcatatccttggaatgaatcatgatgatgggagagagtgtttctgtggagcaaagagctgtatcatgaattcaggagcatccgggtccagaaactttagcagttgcagtgcggaggactttgagaagttaacgttgaataagggaggaagctgcctgcttaacatcccgaagcctgacgaagcctacagcgcgccctcctgtggtaataagctggtggaccctggagaggagtgtgactgcggcacagcgaaggagtgtgaggtggacccatgctgtgaaggaagcacttgtaagctcaagtcatttgctgagtgtgcatatggcgactgttgtaaagattgccagttccttccaggaggctccatgtgcagagggaagaccagtgagtgtgatgttcctgagtactgcaacggttcctctcagttctgcccgccagatgtcttcattcagaatggatatccttgccagaacagcaaagcctac

SEQ ID NO: 565122 - DNA, 2811 bp, Homo sapiens
aaaagccctctttgatgggggaaggggaggactggaaaagcagagagatctttctggatgtcctgggagagcagccctttgggtggtgggtggaggctggaggcagggaggaatcccctcacagtgccatgagaagggcccccaaacccaggcgagacagagggagggtcaagaacgccaaggcaaatgtcacttgtgccttgttttttccctaaagaaactaaacaaagcggccgcgttcggtggcccctcaggaaggccggtcatttcctgaggagatatcaggccagcccaggccccattgttcccggtttccagccatggctgccattacctgaccagcgccacagccggtctctctgcaggcgccgggagaagtgaccagagcaatttctgcttttcacagggcgggtttctcaacggtgacttgtgggcagtgccttctgctgagcgagtcatggcccgaaggcagaactaactgtgcctgcagtcttcactctcaggatgcagccgaggtgggcccaaggggccacgatgtggcttggagtcctgctgacccttctgctctgttcaagccttgagggtcaagaaaactctttcacaatcaacagtgttgacatgaagagcctgccggactggacggtgcaaaatgggaagaacctgaccctgcagtgcttcgcggatgtcagcaccacctctcacgtcaagcctcagcaccagatgctgttctataaggatgacgtgctgttttacaacatctcctccatgaagagcacagagagttattttattcctgaagtccggatctatgactcagggacatataaatgtactgtgattgtgaacaacaaagagaaaaccactgcagagtaccaggtgttggtggaaggagtgcccagtcccagggtgacactggacaagaaagaggccatccaaggtgggatcgtgagggtcaactgttctgtcccagaggaaaaggccccaatacacttcacaattgaaaaacttgaactaaatgaaaaaatggtcaagctgaaaagagagaagaattctcgagaccagaattttgtgatactggaattccccgttgaggaacaggaccgcgttttatccttccgatgtcaagctaggatcatttctgggatccatatgcagacctcagaatctaccaagagtgaactggtcaccgtgacggaatccttctctacacccaagttccacatcagccccaccggaatgatcatggaaggagctcagctccacattaagtgcaccattcaagtgactcacctggcccaggagtttccagaaatcataattcagaaggacaaggcgattgtggcccacaacagacatggcaacaaggctgtgtactcagtcatggccatggtggagcacagtggcaactacacgtgcaaagtggagtccagccgcatatccaaggtcagcagcatcgtggtcaacataacagaactattttccaagcccgaactggaatcttccttcacacatctggaccaaggtgaaagactgaacctgtcctgctccatcccaggagcacctccagccaacttcaccatccagaaggaagatacgattgtgtcacagactcaagatttcaccaagatagcctcaaagtcggacagtgggacgtatatctgcactgcaggtattgacaaagtggtcaagaaaagcaacacagtccagatagtcgtatgtgaaatgctctcccagcccaggatttcttatgatgcccagtttgaggtcataaaaggacagaccatcgaagtccgttgcgaatcgatcagtggaactttgcctatttcttaccaacttttaaaaacaagtaaagttttggagaatagtaccaagaactcaaatgatcctgcggtattcaaagacaaccccactgaagacgtcgaataccagtgtgttgcagataattgccattcccacgccaaaatgttaagtgaggttctgagggtgaaggtgatagccccggtggatgaggtccagatttctatcctgtcaagtaaggtggtggagtctggagaggacattgtgctgcaatgtgctgtgaatgaaggatctggtcccatcacctataagttttacagagaaaaagagggcaaacccttctatcaaatgacctcaaatgccacccaggcattttggaccaagcagaaggctagcaaggaacaggagggagagtattactgcacagccttcaacagagccaaccacgcctccagtgtccccagaagcaaaatactgacagtcagagtcattcttgccccatggaagaaaggacttattgcagtggttatcatcggagtgatcattgctctcttgatcattgcggccaaatgttattttctgaggaaagccaaggccaagcagatgccagtggaaatgtccaggccagcagtaccacttctgaactccaacaacgagaaaatgtcagatcccaatatggaagctaacagtcattacggtcacaatgacgatgtcagaaaccatgcaatgaaaccaataaatgataataaagagcctctgaactcagacgtgcagtacacggaagttcaagtgtcctcagctgagtctcacaaagatctaggaaagaaggacacagagacagtgtacagtgaagtccggaaagctgtccctgatgccgtggaaagcagatactctagaacggaaggctcccttgatggaacttagacagcaaggccagaagcacatccgtactgccctcaaggatcgagaaaaacaagaggaccgggtatagaaacaccacggggcatacaaaac

SEQ ID NO: 565123 - DNA, 316 bp, Homo sapiens
gtagcgtccaggtcagatctttatgtcatgatatgttgggaccttttattaatatatacatttatagttttaaattttgtgtaggcattatattagctgcatctcacaaattatgtagtatttttgttattcagttcaaaacattttctaatttctcttttgattcctgctttgacacaggggttctatagaagtatgttctttaatttctaaatgtatgctacaaagaagggcattattagtagctgacagttaagagaaacatatgggggttctggaatcattcagtgaatggctgtggggaggttattggcat

SEQ ID NO: 565124 - DNA, 2491 bp, Homo sapiens
tttttttttcaagtggaaccatggaggagagtggctgcccaaggtggggtttgtcttttgccgtctgagtggcccctgggatgcagggcgggtttctcaacggtgacttgtgggcagtgccttctgctgagcgagtcatggcccgaaggcagaactaactgtgcctgcagtcttcactctcaggatgcagccgaggtgggcccaaggggccacgatgtggcttggagtcctgctgacccttctgctctgttcaagccttgagggtcaagaaaactctttcacaatcaacagtgttgacatgaagagcctgccggactggacggtgcaaaatgggaagaacctgaccctgcagtgcttcgcggatgtcagcaccacctctcacgtcaagcctcagcaccagatgctgttctataaggatgacgtgctgttttacaacatctcctccatgaagagcacagagagttattttattcctgaagtccggatctatgactcagggacatataaatgtactgtgattgtgaacaacaaagagaaaaccactgcagagtaccaggtgttggtggaaggagtgcccagtcccagggtgacactggacaagaaagaggccatccaaggtgggatcgtgagggtcaactgttctgtcccagaggaaaaggccccaatacacttcacaattgaaaaacttgaactaaatgaaaaaatggtcaagctgaaaagagagaagaattctcgagaccagaattttgtgatactggaattccccgttgaggaacaggaccgcgttttatccttccgatgtcaagctaggatcatttctgggatccatatgcagacctcagaatctaccaagagtgaactggtcaccgtgacggaatccttctctacacccaagttccacatcagccccaccggaatgatcatggaaggagctcagctccacattaagtgcaccattcaagtgactcacctggcccaggagtttccagaaatcataattcagaaggacaaggcgattgtggcccacaacagacatggcaacaaggctgtgtactcagtcatggccatggtggagcacagtggcaactacacgtgcaaagtggagtccagccgcatatccaaggtcagcagcatcgtggtcaacataacagaactattttccaagcccgaactggaatcttccttcacacatctggaccaaggtgaaagactgaacctgtcctgctccatcccaggagcacctccagccaacttcaccatccagaaggaagatacgattgtgtcacagactcaagatttcaccaagatagcctcaaagtcggacagtgggacgtatatctgcactgcaggtattgacaaagtggtcaagaaaagcaacacagtccagatagtcgtatgtgaaatgctctcccagcccaggatttcttatgatgcccagtttgaggtcataaaaggacagaccatcgaagtccgttgcgaatcgatcagtggaactttgcctatttcttaccaacttttaaaaacaagtaaagttttggagaatagtaccaagaactcaaatgatcctgcggtattcaaagacaaccccactgaagacgtcgaataccagtgtgttgcagataattgccattcccacgccaaaatgttaagtgaggttctgagggtgaaggtgatagccccggtggatgaggtccagatttctatcctgtcaagtaaggtggtggagtctggagaggacattgtgctgcaatgtgctgtgaatgaaggatctggtcccatcacctataagttttacagagaaaaagagggcaaacccttctatcaaatgacctcaaatgccacccaggcattttggaccaagcagaaggctagcaaggaacaggagggagagtattactgcacagccttcaacagagccaaccacgcctccagtgtccccagaagcaaaatactgacagtcagagtcattcttgccccatggaagaaaggacttattgcagtggttatcatcggagtgatcattgctctcttgatcattgcggccaaatgttattttctgaggaaagccaaggccaagcagatgccagtggaaatgtccaggccagcagtaccacttctgaactccaacaacgagaaaatgtcagatcccaatatggaagctaacagtcattacggtcacaatgacgatgtcagaaaccatgcaatgaaaccaataaatgataataaagagcctctgaactcagacgtgcagtacacggaagttcaagtgtcctcagctgagtctcacaaagatctaggaaagaaggacacagagacagtgtacagtgaagtccggaaagctgtccctgatgccgtggaaagcagatactctagaacggaaggctcccttgatggaacttagacagcaaggccagaagcacatccgtactgccctcaaggatcgagaaaaacaagaggaccgggtatagaaacaccacggggcatacaaaac

SEQ ID NO: 565125 - DNA, 2494 bp, Homo sapiens
gagcagacagctttttctgtgcagttaacgagtcgctatgtttcggatctgcgttacttccccggtatttgaaggcaggagcactgcagggcgggtttctcaacggtgacttgtgggcagtgccttctgctgagcgagtcatggcccgaaggcagaactaactgtgcctgcagtcttcactctcaggatgcagccgaggtgggcccaaggggccacgatgtggcttggagtcctgctgacccttctgctctgttcaagccttgagggtcaagaaaactctttcacaatcaacagtgttgacatgaagagcctgccggactggacggtgcaaaatgggaagaacctgaccctgcagtgcttcgcggatgtcagcaccacctctcacgtcaagcctcagcaccagatgctgttctataaggatgacgtgctgttttacaacatctcctccatgaagagcacagagagttattttattcctgaagtccggatctatgactcagggacatataaatgtactgtgattgtgaacaacaaagagaaaaccactgcagagtaccaggtgttggtggaaggagtgcccagtcccagggtgacactggacaagaaagaggccatccaaggtgggatcgtgagggtcaactgttctgtcccagaggaaaaggccccaatacacttcacaattgaaaaacttgaactaaatgaaaaaatggtcaagctgaaaagagagaagaattctcgagaccagaattttgtgatactggaattccccgttgaggaacaggaccgcgttttatccttccgatgtcaagctaggatcatttctgggatccatatgcagacctcagaatctaccaagagtgaactggtcaccgtgacggaatccttctctacacccaagttccacatcagccccaccggaatgatcatggaaggagctcagctccacattaagtgcaccattcaagtgactcacctggcccaggagtttccagaaatcataattcagaaggacaaggcgattgtggcccacaacagacatggcaacaaggctgtgtactcagtcatggccatggtggagcacagtggcaactacacgtgcaaagtggagtccagccgcatatccaaggtcagcagcatcgtggtcaacataacagaactattttccaagcccgaactggaatcttccttcacacatctggaccaaggtgaaagactgaacctgtcctgctccatcccaggagcacctccagccaacttcaccatccagaaggaagatacgattgtgtcacagactcaagatttcaccaagatagcctcaaagtcggacagtgggacgtatatctgcactgcaggtattgacaaagtggtcaagaaaagcaacacagtccagatagtcgtatgtgaaatgctctcccagcccaggatttcttatgatgcccagtttgaggtcataaaaggacagaccatcgaagtccgttgcgaatcgatcagtggaactttgcctatttcttaccaacttttaaaaacaagtaaagttttggagaatagtaccaagaactcaaatgatcctgcggtattcaaagacaaccccactgaagacgtcgaataccagtgtgttgcagataattgccattcccacgccaaaatgttaagtgaggttctgagggtgaaggtgatagccccggtggatgaggtccagatttctatcctgtcaagtaaggtggtggagtctggagaggacattgtgctgcaatgtgctgtgaatgaaggatctggtcccatcacctataagttttacagagaaaaagagggcaaacccttctatcaaatgacctcaaatgccacccaggcattttggaccaagcagaaggctagcaaggaacaggagggagagtattactgcacagccttcaacagagccaaccacgcctccagtgtccccagaagcaaaatactgacagtcagagtcattcttgccccatggaagaaaggacttattgcagtggttatcatcggagtgatcattgctctcttgatcattgcggccaaatgttattttctgaggaaagccaaggccaagcagatgccagtggaaatgtccaggccagcagtaccacttctgaactccaacaacgagaaaatgtcagatcccaatatggaagctaacagtcattacggtcacaatgacgatgtcagaaaccatgcaatgaaaccaataaatgataataaagagcctctgaactcagacgtgcagtacacggaagttcaagtgtcctcagctgagtctcacaaagatctaggaaagaaggacacagagacagtgtacagtgaagtccggaaagctgtccctgatgccgtggaaagcagatactctagaacggaaggctcccttgatggaacttagacagcaaggccagaagcacatccgtactgccctcaaggatcgagaaaaacaagaggaccgggtatagaaacaccacggggcatacaaaac

SEQ ID NO: 565126 - DNA, 1452 bp, Homo sapiens
aaaagccctctttgatgggggaaggggaggactggaaaagcagagagatctttctggatgtcctgggagagcagccctttgggtggtgggtggaggctggaggcagggaggaatcccctcacagtgccatgagaagggcccccaaacccaggcgagacagagggagggtcaagaacgccaaggcaaatgtcacttgtgccttgttttttccctaaagaaactaaacaaagcggccgcgttcggtggcccctcaggaaggccggtcatttcctgaggagatatcaggccagcccaggccccattgttcccggtttccagccatggctgccattacctgaccagcgccacagccggtctctctgcaggcgccgggagaagtgaccagagcaatttctgcttttcacagggcgggtttctcaacggtgacttgtgggcagtgccttctgctgagcgagtcatggcccgaaggcagaactaactgtgcctgcagtcttcactctcaggatgcagccgaggtgggcccaaggggccacgatgtggcttggagtcctgctgacccttctgctctgttcaagccttgagggtcaagaaaactctttcacaatcaacagtgttgacatgaagagcctgccggactggacggtgcaaaatgggaagaacctgaccctgcagtgcttcgcggatgtcagcaccacctctcacgtcaagcctcagcaccagatgctgttctataaggatgacgtgctgttttacaacatctcctccatgaagagcacagagagttattttattcctgaagtccggatctatgactcagggacatataaatgtactgtgattgtgaacaacaaagagaaaaccactgcagagtaccaggtgttggtggaaggagtgcccagtcccagggtgacactggacaagaaagaggccatccaaggtgggatcgtgagggtcaactgttctgtcccagaggaaaaggccccaatacacttcacaattgaaaaacttgaactaaatgaaaaaatggtcaagctgaaaagagagaagaattctcgagaccagaattttgtgatactggaattccccgttgaggaacaggaccgcgttttatccttccgatgtcaagctaggatcatttctgggatccatatgcagacctcagaatctaccaagagtgaactggtcaccgtgacggaatccttctctacacccaagttccacatcagccccaccggaatgatcatggaaggagctcagctccacattaagtgcaccattcaagtgactcacctggcccaggagtttccagaaatcataattcagaaggacaaggcgattgtggcccacaacagacatggcaacaaggctgtgtactaagcattggcatgtgggacacaaggggtaattcacttgcaggtggtctcagccgattttcgttagcagcttgcggtc

SEQ ID NO: 565127 - DNA, 937 bp, Homo sapiens
tgtctggtgtgctttcctctgatcgatccccacccttcacctattttacatatacctacccttttctaattgccattcccacgccaaaatgttaagtgaggttctgagggtgaaggtgatagccccggtggatgaggtccagatttctatcctgtcaagtaaggtggtggagtctggagaggacattgtgctgcaatgtgctgtgaatgaaggatctggtcccatcacctataagttttacagagaaaaagagggcaaacccttctatcaaatgacctcaaatgccacccaggcattttggaccaagcagaaggctagcaaggaacaggagggagagtattactgcacagccttcaacagagccaaccacgcctccagtgtccccagaagcaaaatactgacagtcagagtcattcttgccccatggaagaaaggacttattgcagtggttatcatcggagtgatcattgctctcttgatcattgcggccaaatgttattttctgaggaaagccaaggccaagcagatgccagtggaaatgtccaggccagcagtaccacttctgaactccaacaacgagaaaatgtcagatcccaatatggaagctaacagtcattacggtcacaatgacgatgtcagaaaccatgcaatgaaaccaataaatgataataaagagcctctgaactcagacgtgcagtacacggaagttcaagtgtcctcagctgagtctcacaaagatctaggaaagaaggacacagagacagtgtacagtgaagtccggaaagctgtccctgatgccgtggaaagcagatactctagaacggaaggctcccttgatggaacttagacagcaaggccagaagcacatccgtactgccctcaaggatcgagaaaaacaagaggaccgggtatagaaacaccacggggcatacaaaac

SEQ ID NO: 565128 - DNA, 195 bp, Homo sapiens
aaatcccgcgcactccctaacatcttgtagccaccaaagggtgactgggctccaaacacatcatagacagttgacccacacagtgcccgcctgaagggcctgggacaggtaattaggcctatataccaaatccttatgtgacagacagctgcgagccagacccgatacgtaggaattagtatggctctccacaac

SEQ ID NO: 565129 - DNA, 1020 bp, Homo sapiens
actcgggagcctgagccaggagatttgcttgaaccccggaggcacaccttccggtaacctgagattatacccctgcactccagcctgggtgataagagcgggactctgtctcagaggaaaaaaaaaaaagttgagcagtgcctgtctcatgttcctcttcctctgcccttctttgctcagtgtgaatccttttcctgcttttcagccccggtggatgaggtccagatttctatcctgtcaagtaaggtggtggagtctggagaggacattgtgctgcaatgtgctgtgaatgaaggatctggtcccatcacctataagttttacagagaaaaagagggcaaacccttctatcaaatgacctcaaatgccacccaggcattttggaccaagcagaaggctagcaaggaacaggagggagagtattactgcacagccttcaacagagccaaccacgcctccagtgtccccagaagcaaaatactgacagtcagagtcattcttgccccatggaagaaaggacttattgcagtggttatcatcggagtgatcattgctctcttgatcattgcggccaaatgttattttctgaggaaagccaaggccaagcagatgccagtggaaatgtccaggccagcagtaccacttctgaactccaacaacgagaaaatgtcagatcccaatatggaagctaacagtcattacggtcacaatgacgatgtcagaaaccatgcaatgaaaccaataaatgataataaagagcctctgaactcagacgtgcagtacacggaagttcaagtgtcctcagctgagtctcacaaagatctaggaaagaaggacacagagacagtgtacagtgaagtccggaaagctgtccctgatgccgtggaaagcagatactctagaacggaaggctcccttgatggaacttagacagcaaggccagaagcacatccgtactgccctcaaggatcgagaaaaacaagaggaccgggtatagaaacaccacggggcatacaaaac

SEQ ID NO: 565130 - DNA, 95 bp, Homo sapiens
ggtcgaccttaaaactgatggatggtatggctggggcagcatggctcacgcctgtaatcccagcactttgggaggcgtcgacgcggccgtcgacg

SEQ ID NO: 565131 - DNA, 1395 bp, Homo sapiens
aaaagccctctttgatgggggaaggggaggactggaaaagcagagagatctttctggatgtcctgggagagcagccctttgggtggtgggtggaggctggaggcagggaggaatcccctcacagtgccatgagaagggcccccaaacccaggcgagacagagggagggtcaagaacgccaaggcaaatgtcacttgtgccttgttttttccctaaagaaactaaacaaagcggccgcgttcggtggcccctcaggaaggccggtcatttcctgaggagatatcaggccagcccaggccccattgttcccggtttccagccatggctgccattacctgaccagcgccacagccggtctctctgcaggcgccgggagaagtgaccagagcaatttctgcttttcacagggcgggtttctcaacggtgacttgtgggcagtgccttctgctgagcgagtcatggcccgaaggcagaactaactgtgcctgcagtcttcactctcaggatgcagccgaggtgggcccaaggggccacgatgtggcttggagtcctgctgacccttctgctctgttcaagccttgagggtcaagaaaactctttcacaatcaacagtgttgacatgaagagcctgccggactggacggtgcaaaatgggaagaacctgaccctgcagtgcttcgcggatgtcagcaccacctctcacgtcaagcctcagcaccagatgctgttctataaggatgacgtgctgttttacaacatctcctccatgaagagcacagagagttattttattcctgaagtccggatctatgactcagggacatataaatgtactgtgattgtgaacaacaaagagaaaaccactgcagagtaccaggtgttggtggaaggagtgcccagtcccgtggttatcatcggagtgatcattgctctcttgatcattgcggccaaatgttattttctgaggaaagccaaggccaagcagatgccagtggaaatgtccaggccagcagtaccacttctgaactccaacaacgagaaaatgtcagatcccaatatggaagctaacagtcattacggtcacaatgacgatgtcagaaaccatgcaatgaaaccaataaatgataataaagagcctctgaactcagacgtgcagtacacggaagttcaagtgtcctcagctgagtctcacaaagatctaggaaagaaggacacagagacagtgtacagtgaagtccggaaagctgtccctgatgccgtggaaagcagatactctagaacggaaggctcccttgatggaacttagacagcaaggccagaagcacatccgtactgccctcaaggatcgagaaaaacaagaggaccgggtatagaaacaccacggggcatacaaaac

SEQ ID NO: 565132 - DNA, 476 bp, Homo sapiens
ggcagtcgggccgttccttcgccgaacgcaggggtagcggtgtagtctgcgcagggtctctgcgcgctaccgcagccaggttcggccgtaggcgtctggcagcccgtgcgccatcttagtatgaagcgcatggccgcagcctaggggccggggagcggcgggtactgctttgctcctcggctttgcatttgtcgctcgcgtgagcagcggggcctgctctgtgcgcctggcaagacgcctgatccgaaatgtttgttgcgggcctgttttaaaaggctcttaacccttccaatatgacacggtttataccagcttccccggccggcctggagttttaatctccacacgctgaagttgttcgttttgaccgtgcgctgcaggcatggtttgtagattcttataccccaaatagtcgtacatgtgtcaggaacaaagaggtggagattgggtatgatgtacaggtgggaactgtaaga

SEQ ID NO: 565133 - DNA, 234 bp, Homo sapiens
  misc_feature (8)..(8): n is a, c, g, or t
  misc_feature (78)..(81): n is a, c, g, or t
  misc_feature (86)..(86): n is a, c, g, or t
  misc_feature (106)..(106): n is a, c, g, or t
  misc_feature (114)..(114): n is a, c, g, or t
  misc_feature (152)..(152): n is a, c, g, or t
  misc_feature (158)..(158): n is a, c, g, or t
  misc_feature (162)..(162): n is a, c, g, or t
  misc_feature (168)..(168): n is a, c, g, or t
  misc_feature (181)..(181): n is a, c, g, or t
  misc_feature (190)..(190): n is a, c, g, or t
  misc_feature (198)..(198): n is a, c, g, or t
  misc_feature (201)..(201): n is a, c, g, or t
  misc_feature (218)..(218): n is a, c, g, or t
agagagtngctggaagagactccaggccctggggagactttacttttcctgaacactggccttggcacactgggtttnnnngaggnaggaggagagcccatgtttnctgtctgnctcctccaccatccctgacctcagttgagctgcctctngccttnttgntgctgncacatcctaggtntaagagttnaacgcctntcntaggccactacaaactnacccctcagcagggct

SEQ ID NO: 565134 - DNA, 137 bp, Homo sapiens
gaactggtaggtatggaagatgaatagatggatgcatggatgagatggatggttgggtgaatagatggtagctgatgggtacataggtagatggatggatggatagatggacgcattgatgagcagggagcaggtgg

SEQ ID NO: 565135 - DNA, 189 bp, Homo sapiens
tcgaagtctgggaaagcggtgaagcagtactatgaaacttgagtcatcccgaggttgatctcttacaacggtgtatgttaacctttgtagcacatgtgttgtactgggtacacgagaaaacccagctttcatctttggtctgtatgaggtcaatatggatgtcactgaattaattacagtgtcctatag

SEQ ID NO: 565136 - DNA, 167 bp, Homo sapiens
ggtactgctctctatctgctgcttatcttggccactgggtaggagggtgaagtcaggttcacgctctgagtcagaggtgaagagcaagtgcccgggaaccagagctccagtagtgggatataaaaacaggagcctggtggcctgggagctggtggagcaatctatgt

SEQ ID NO: 565137 - DNA, 310 bp, Homo sapiens
  misc_feature (242)..(242): n is a, c, g, or t
ggctggttcatgccctgccagggacaccgaagggctggtggcagccacgatgccacctggcgtgctacgctgacactgccgtcataatgggcagcatgggcgtcccacaacaccgaggacgtcctttcgtactatgagaagctttccatgagccgatggaccacttaatgagtctgacttggggatgaacggcggagtaggtacttagtgagacaatggaaggatgtgtcgccgtgctacgntgccagggccgtggctatgagacgcagccaagtgtagcaaccataggtgttggcatgcaaggagcttg

SEQ ID NO: 565138 - DNA, 1622 bp, Homo sapiens
atatttatattatttatattatcagttgaaatggtttataaggactttaagcgccccattgacaaaaaacaaattggaaaaccacagatatattaatttccaaggttgggggtgaacattgtgaatggcccgtggaaaaatatattcaggtgaggctatccataccacttctcgtgagtgacgtgcgaagaacacatagtgaaaaacttcttcataaagtggttatacacactcacacacaaacaatatcacacagagcctaacagtgcactatacaagacgctttagtggcgccagtagaacaacatatcacacttttgtaaaatttacagccgaaataaaaatatatataccttgtagggtcggctagtcgcaacacacacctaaaacgcaacacacaaaaaacatcacacaacaccccctctcgtggaaaatacaacttattgtggagagacaaacagacaactgtggggacaagccccacagagacacacaggtgtgagaagatcccagagtgaaagagggccgagcggactgaaactatattgctacaatgtgtgcggatctctattctatatttcccagagtttattccacaagatatatatataccatctcttctgtctcaaaaaatattgggggcaatctccctgtgggaaagcgtgtgggatcttaccaatatccctataaattccccctcctaacataacatgggcagcacgagacaaaggaaaccgcgtagggcgcccccgcacaaatctacctatagagagatagcagtggtatcccccacagggggccccgcgcttgggacaacacaataggggggaacatacaataaccaccccacacgcgtggggcagaaacaacacagagactgggggacaaacacggccgaaaaggagcaaccaaaacccatatgaggcacccccctaagaaaggtggtgaagaaccctatgtagggaaaaccacccacaatggtgaggagcgatcatcaaacaactaggggagcccaccgacgtggagctagatacacacacttcacgggcggccaagcaaaaccaagaccggctgtacaacgaacgaacaccaacaaactcataaagagagaaacggacgagaacacaccccacactattctacacgaacgccgcagagaaaagaggacaagagcaaacaaatccagccgccccaccaaaagcaaactggaggaccagtatcgcgcaacacagcacgaagacactaattaccacaacacaagcagcggggaggagagcaacacacccagaggtgcgagagcccaccccaaccgtactggaaccatcaacaacagcacccagagggaggagaacacaacgagctggcggacacgagtcaagctgcgcagcggcaacataaataaaacgcgctgagcaagcacgccgttagagaaaagcatccccagaatacacattccaaaaaaacaagagacacaccccagattcattaaacacagcacagtgaacaacatcactatggaggccccgagagggcgtaaaaaccagacatcaatgcacaccaagagcatcaacagaagacaatcagaggccgctggaaatacataggagagagcaagagaacaa

SEQ ID NO: 565139 - DNA, 330 bp, Homo sapiens
tggcacgaggtggcacgaggggagctcagactcttagagccagctgtggcttcggacccaaggcctgacctaggctgctatcctaatattgcaggaggggcctctcttccaagccccaccctaagggttagcccttggccaaatcttttgacgactaggcccactcaggctcctctgactgaacaagcaataagaggctccaagctgactgagttgcaaggaccctacacggcctcccttggatctccatgttagtccagatgcctgtagaccctgtgccatctcgttctacaccagccttgtccaagtgctggctcgtatagccatgac

SEQ ID NO: 565140 - DNA, 715 bp, Homo sapiens
gggattcccaaaaaaaaaaaaaaattttaaaaaaaaaaaaaaaataaaaaaaaaaaaaaaaaaaaaaaaaaaaaaaaaaaaaaaaaaaaaaaaaaaaaaaaaaaaaaaaaaaaaaaaacctggcggcccgtctggcccaagggccttttaaactgggcaagctttatcattggggccaaattccgggttaattgggcaatttgccctaaagggggttggtttacaattaaatggcccgagtttaaaaaattttgaaaggggaaaacccggggggtccccaatttaaacggcttgggggaaaacccccttttgccaggttggggaattgccaaaaggccccgaacaaatggcctttccaaaaatttgccaaccttgaaggccaatgggaaatgggaacgttaaaattttggtaaaattccgggtaaaattttggaaaaatcggctaatttttaacccattggcccaaatccggaaaatccctttataactaaaaagattaccccggaaaaggtttaagggtttttccatttggaaacaggggcccattttaaagaaccgtggctttcaacgaaaagggcataaaaccccttttaaagggcgaagggcccactaggggaaaccttcccctaaaacagtttttttggggccggggggcccaaaaagccctaaaaggggaacccttgggcgcccccgtatttggttttccggtgggcct

SEQ ID NO: 565141 - DNA, 962 bp, Homo sapiens
ggttcaccgacttgatggaactattccagtgatcccctatctcctggaagccgtcacgagaaggactccagctctatggaaggcgcgccatctgggaggatccatggcaagtgggtgatggacacatatccatgtggcatgcagaccaatcaacagcactgagtgtgcctcccctgactgcagttacggactgaggatgtctggcttcgacggcatactccatgcctcgggagggatcgacatagcagagcagatgcgcccccagtgatgctgacaggtgacccgactgatgaacagtgactgatgaggcgtgcaggaggcagcacaaggtactccaggcccccaagagctagtgacagcagacgtccaagcagcaaacaagccagtcacggatgacatcttggagctcctcttgtggagtccaatgcgtgtgacagggtgcccggaagcgccagcgcccttcactcattactcgctcacgcggattcgcacctggcatccgccgcacgatcgagccctgaaagaatgacgttccatgagaccaggagccaccacgagcaccagcacctgtacgagacgtgcgcggaaaccacccgaggaaacccacacgaaccaatacgagcctcgaaccatggggtgccagggacatccacgcggaccacgaggcagtgcacgaggccgggaacgcgccttatcccgtttcccaacgaacgcggagacacgctgggcaacagtaaccttctccgaggtctggttaccattcgaacgacgtcacagtcaggggagtatggggcgcctatggattcgggcgctgtgtggagccccgtccccgcgtaaaggtaaaaagcctggaaccgggaaatgaccgccatgccgtcgggaggacacacgggaatgccaatcgggccccggctgggaaaaagtggacaacaaagcacgaagaaccaggaacgcaagaatga

SEQ ID NO: 565142 - DNA, 401 bp, Homo sapiens
attcatcattaaaataatgagatctatccaaagatcagctgatatgccaagcagagcatatatactgacaagtctttagctatcagtctgtccacttaggtggtaaaaaaaaagccacctttctcagatgagcagctaatcagaaataaatgcaagttgaccaggcacgatggctcacgcctgtaatcccagcactttgggaagctgaggacgggtacgattatttgaggtcaggagtttgagaccagcctggccaacatggtgaaaccccattactgctaaaaatacaaaaattagctggatgtggtggcaggcacctgtaatcccagactacttgggaggctgaggcaggagaatcgcttgacccggaaggcggaggttgcagtgagctgagatcgcac

SEQ ID NO: 565143 - DNA, 1179 bp, Homo sapiens
  misc_feature (692)..(692): n is a, c, g, or t
  misc_feature (717)..(717): n is a, c, g, or t
  misc_feature (787)..(788): n is a, c, g, or t
  misc_feature (797)..(798): n is a, c, g, or t
  misc_feature (869)..(869): n is a, c, g, or t
gtcggagaggctgcgggagcacgcctatgagcactcgctgggtcgaagcttcgagccaccaagcagagggcacaggaggctctgctgcagctgtcgcaggccctaagcctgatggaaattgtcaagcaaggcgttgatcagaagctggtggaaggccaggagaagctgcacctaggatgtgtgctcgagtcgtgtgataccagtaagcatgcttccgagggccgccgcaggaaggatccgtgccaacgccagatcaggtgtcgagctcccgtggtcgctcacctatgttccggtgactattgcccagtcaatctgtcaggccacctgtatcgctccctggggtccagctagttctagggcctccgccaccaatgtgaaggaccatggtgcagcaaggcccgccgtcaggtggaggaccttccatgccacgttttctcgatgctatccagtctcttccaggacctgtcctagtcagcattctggcccagagccggtgagcgtgtcgccagcgcccgcgaggccctggaccacatggtggaatatgtggcccagaacacacctgtcacgtggcatcgtgggaccctttgcccctggaatcactgagaaagccccggaggagaagaagtagggggagaggagaggactcagcgggccccgtctctataatgcagctgtgctctggagtcctcaanccggggctcatttcaaacttatttntctagccactcctcccagctcttctgtgctgtccacttgggaagctaaggctctcaaaacgggcataccnnagttgaccnntctctcagctctctgagcttggaagaagctggtctgagcctcacctatcagtcagtagagagagatgtccngaaaaatatctttcaggaaagtttctcccctgcagaattttttttccctgttaaatatcagtgaatataggcgctgggtgcggtggctcacacctcttatcccagtaatttgggatgcatgaggagggcggtacacttgtggttaggtgttcgagaccagccaaggcctaccatagtgaaaccctgtctctacatcaaaataccacaaatttgagcctgggcactggtagacggtgtctgttatcaacagttaggaggcttatgcaagagaatctcttgaacctgatagagccagcgtgccgtgagtcac

SEQ ID NO: 565144 - DNA, 123 bp, Homo sapiens
  misc_feature (1)..(1): n is a, c, g, or t
nagtgatctcagatcttctgatacaccaacacacaacgtctcttctcaactgcccagcatacgggcccctccctcagccactgttagggtctcccttctgcaccctccttagatggtggtata

SEQ ID NO: 565145 - DNA, 196 bp, Homo sapiens
caacaaaggtaatgtcttcgtcgatgctctgatttttgtgtcatcataattctgtatagcgctatacttcttgtaatccatattcattccctctttgacctttatttatattatttccaaatgccaaaaccaactccagcaactgcttgagggcaccactcctaaacacctcttctgagccagaacgaattgcttc

SEQ ID NO: 565146 - DNA, 386 bp, Homo sapiens
atcggtcaacctagaaacgttttcattcgtcattccaagagagagagaggaaagaaaaatacaactttcattctttctttgcacgttcataaacattctacatacgtattctcttttggctcttcatttataactgctgagaattgtacatttctgtgttttttggaggtgcagtgaaacttgaaagcttaagtgtgaccggactgatcaatataagatcaagagtagatccgactgtagaagtctactctgtgaccacggagctcaatttttgtgttgaagctgtactaatctcccacagcattgggaatgtgttatgtatacatctattgtttaaactatatgaatgttgcggggccacatagctttcttttatgttggagaca

SEQ ID NO: 565147 - DNA, 388 bp, Homo sapiens
acaggtgactgggagaacaccccatggttggccgagagggtcatgcaggctgtgaataccacctgctacaccagtagaccgtggagggcgcagtcatctagagctccacgctgtaggcagtgtagacggtgattgtaatctacctcgttgggcttcctctgcctgaaagtccaatctgatagccctaaaattggttcgatgtacagattggggtgacgttcgcgggaataaccctccgaagggtttcatgttgggtccagggttagggtgatttgagatttgagatattcaccgggggcccgagtccgctccagaggccttggggggacttgggttgaaaggctcgtgggcctgtgccccgcgtggttcatttggtacttttcccggg

SEQ ID NO: 565148 - DNA, 1158 bp, Homo sapiens
  misc_feature (404)..(404): n is a, c, g, or t
  misc_feature (434)..(434): n is a, c, g, or t
agcgggggatgcgtgtcggggggcggggagacgtgaacgctctcgagcgctcctcccggtgggggtcgggctcggcctgcggtctcatcgcccctcggacccgggctcgcgcgccggacgcagggaccacgcaggcagggcaagtaacgtagagaggggagcacagtaaggccacggggggccgcagaaaggcagaatcgcagaagactgggaaattggccaggtcgtactgcaaggggcttggtggaccggacgaccgagggcaatgggcaggttgatagcagagcgtggagccgcatatacgtcgggcctcgagtcgaggggatagcaaagggagaccgctcgtgtcagcgggttgacctcgaattcgcgatccaagtgcctgagactggagctcggtctantcctatgggaatcgcacgacacgaaaaaantcgagataagcccatcgctgcccatggaagcgttggtgcatgagggtaaccagagggaagtaccaggcgatagggcccggaccccctgggaaggaaccgaatgcagtcccattggtagcacggcatcgcgctggctcgggaccaatgtagacccgcgtgtcatatggaacccgtatactcaaagagctacacgtgactagacgtcaaactactcacggaggaaggtaatagggagcggctcctaactacttgggaaaagcaacggaacgggggagtacttgagctcgcccgaaggcacctcttcagtggggaaaacggtcaagcggatgctcggtggttgactgggagtggcagtaggaccaccccaaattgggcagttgacgtagtcatgtgtaccggcacaaagagaggcgggcgtttaggaccactttgaacgcgccaattttctaggaagttgtgcaaaggaccccgagagaagaggtgggagtttggacattggggcgacgccaaaaacttccatagatccgagggaattgggggtgaataggttggtttcaaaaccctaatgggaaggggtgcccttttgacacttgagtagattgaaaattgggttatacacttatgggcggttgtggatcgccaatgtagagctgtttggaattcggaggcgacttaaaaaagcgcgggttctttggtgacaaagaggggggacaggagggggaag

SEQ ID NO: 565149 - DNA, 671 bp, Homo sapiens
taacgcttcttttattagttttaattaagtttttcaaaagttatcggagaataacagaaggtggggagaagataaatctgcctttggaaaccaaattatttaattatttacattaaattggtttcaatacaacttcaggcaaagtgccaacgggaagaccaagcccagaaattcagaggaaataatcttccaaacagaggaacaccaagggtgatcttcttccattccagccacaatacgggtgatcataagtgggtgcatagtcagtatactccagatatatcgaggtgtttaccacattcactctattttctcagaagtgccttccgaaacagctttacagtgtgacaagagttacagaagcaccgtgacgtgattaccaacagaggcgtggaacaaccagtttcctccaaaagtgtttggaaataccaccctttcggacattaagtgccgtgcagtattattcttcccgtggagcatgccggttacataagatacgtgatatacgtggtagaaaaggggattcaggccggaatttccagctagtgtagatggaatgacctccatagctctctgcaaaagcccgaacgcagtaggattccataccactcaaggtccgtgaatatccagtaaacgaagggccactctatttctggagccacactcctgca

SEQ ID NO: 565150 - DNA, 410 bp, Homo sapiens
cccaatctgttagagtagtgactggatggacgtttatgggttagaataaaagagagaactaaaaaaacctccactcttctgacagaatggatagtgacaccttttaccagtgacacattgtgtagtagagaaataactggtttggtttggggtgaggaagtggaggggagtgaagagttagtttgtctttgaacaagtgtatttaagaacccactggaaatgcacagagggtttttggaagttcttttcctcctcagatacatagagaaaaatgtatagtaattctttattattttttcacatatttatattgctgtttttttctgtttcctttttgtggttttcctttatatttttcttctgtctctttgttgatgattttcatttatccatgtaaagtttagagacag

SEQ ID NO: 565151 - DNA, 120 bp, Homo sapiens
ttgactctagagtgatcccataccccgattatagtgcctatatgccatactatgtcttatgccggcctgcgaagcaggtggtgggcctagccctactagtctcaatctaccaacactggt

SEQ ID NO: 565152 - DNA, 1616 bp, Homo sapiens
  misc_feature (522)..(522): n is a, c, g, or t
  misc_feature (1616)..(1616): n is a, c, g, or t
tgggtaatttagtttaaatttacataatcataaattaaattctgaaatccagttaggcttgggagggaaacaaggaaaaacagtggaaccccaagaggaaacgtgcagcgaagaagcacaaagaattcaaggaatcacgtgcgaagccaaagtgggggtggagggggtgcctctccgtgaagctacagaagaggaagtgaatcggggtggtaaagaataaaacaacaaggtctcaaaactatatattccagagtgtggctccaccagtctcagcaatgtgggtgactctttcgtgtggcgggctcgtgtgccattctcctgtggaccacaaaggggcctccatgtggccctccaacaatatattctcatgtgccttctcttcacatcttgtggcccaaaaaacaccatactatgggcttgagcacatccacaaaccatctcacatgtctctgggggacatgtggcgcatatatgagacaaaatggctgggagacctcatttgtgtgtgtgtgtggtgtgtcncccagctatttgtggcctatggggaaacaagagaatgggccagagaccccgtgtatatgcgctataaagggagaatgagaatgtttctaactattcttcacaaaaattattctccccccctaatataagtatggtgatctttggcccacccaaatgtgggcctatttatatgggggcgtgtgtgtcgacaggtcccacccaaacctctggggagcaatatacaaacacgccggggggaaaattataatttctggtagaaaaacgacagagagaaaccccttttaaataagcgcaaaaactcctgtgttctctccagggtggctccagaggccgcaaaaacatttttgccgggcttgatctttaggggcgaccctttggtcttcgcaaacaacagggctccaaaaggaggaagaccggcggaccccaagggggccccgcgccgattaagaacggggcaagtgttctggaaaacaaccacgggggggtgggtttcagaaccaagtgggctacaaatcgtaaccacggggtatatccctcgggacactagaaagggcagatccaagatgtgtatctaacagaaggaaatgtggaaacttctctcttctcccaagccagtgtggtttggtccgacaaacccctctggatagtgggtacaagtaatcaacgcgacactctctatgatttcttttaggagagacgcgttgtcgccgacaaagttgtgtgttgatcagcccctgtggtgagaaaagagcaagagacgatatgtggcgctcccaccaattggtgcgtgggaacccaaaaacaaggggttcgtccgccatgagagttgtgatatcaccgaagtggtcacgtcaatgaaaacggaagtatccttataaccagcgaggagagaaaaacagactgtgagcggatggaggcacactctatcgatgaacaaggcagtaagcagtctagatcggcacgcgacacatctcttcgacgtcttcattcttcgttcactcttcgttccttcttctctatctcgtccagcgtccgctacaaagaagtacagcacaaggacagaagacaggagcaggagacgacagacgaacggn

SEQ ID NO: 565153 - DNA, 425 bp, Homo sapiens
  misc_feature (364)..(364): n is a, c, g, or t
acccgtgtacatcccccttcgtacactaatttatcctgggtaattctactttcactagatggaaatttcataactgaaaacaagataaaatacccttgggggtgggttctcggaacttttggctttgaacacctatatcctcattgggtggcgggataacctggccaaacaagaacaggattccacatatgacatgttgctactaggtatgagaggacttatcaaagacctaattttcacagcacaataactatggctcccatttgatgcttccaacaaaagctctgttttacagaagactgtgataattaccaaaagtttgcacaagtcaaagagggtctttaactactaaagagtaatgcanttcgtctcatctattaaataacaatgctttcatagtaaagacttactttggttcttatttt

SEQ ID NO: 565154 - DNA, 491 bp, Homo sapiens
ggatggccagtcccgaacagtgaggcagttccagttcactgactggccagaacaaggagtgccaaagtctggagaaggatttattgacttcattggccaagtccataaaacaaaggagcagtttggccaagatgggcccatttccgtgcattgcagtgccggcgttggaagaactggagttttcataacattgagtattgtgttggaaagaatgagatatgaaggggtggtagatatcttccagactgtcaaaatgttaagaacacaacgaccagccatggtacaaacagaggatcaataccagttctgctatcgagccgcactagaatacctgggcagctttgatcactatgcaacgtagaaacccctgaccccttctggatttttactacaggcccttcgctatccatggagtctcttctgagccatacagggcacttgagaagtccttcttaacttctagctaacaaccacttagtgggactattaca

SEQ ID NO: 565155 - DNA, 154 bp, Homo sapiens
tggagttggcgtggtcttccaggctggcccttgccttcgactcaccgccaacttccctgccccaagccgcaagcaagccaatgggtacaatgggtccccaagctgcacgtaatggatttcccgccgaatctgcccaagctgcaagtactcaacg

SEQ ID NO: 565156 - DNA, 142 bp, Homo sapiens
ccttgtttgtgttagcacagtggaatctcatcagcattgttgaaatgcttaagcactgctgctgatcatttcgtaatataagtcttgaaatctaaatgtcaatttcctacaaattataaaaataaactccactacactatca

SEQ ID NO: 565157 - DNA, 736 bp, Homo sapiens
cacaaatctctcatgacactggtaggaccaagctgataacacaattacgtgcagtgtgtcagagcttctcgtagacaccatggagctcgcagaccaccaagtttcattatgtgggaaccaggacactcaacactctagtctcagatagaggcacgcaagcgtgattgcgattagagtttgacgaaggcacaggtggaccggaaagcatgccgtcgctgctcacggtgagtctcaattggagaagcgttgctgcaaggacgatgttaactatgcagcacgaatgtatacacatgtctagattctgatgcctgctatgagatatttacagaaagccttctgtgctctagtcgccttgaaaacgatccacctggctggaccagatgatgcactgcagtgtttgttcacgaaaatcctccagctggtatagcccataaagggaaatccccactacaggatcaggctacgaaaagagtattgacttggtattaggctgccagagagagtacttcaattcttctaccaaacctcactgatagctgcatggatctagccaggtgctggttacaacgtgataacagacagagcccctgccattcaagaggagctagatcttatccaagccgtgggatgtcttggagaattgtggggtaagagatcctgcctttgcagtgcgatggtgcctgatcggatcagtctcatcaaggcggtgtattgccagtcccgaaatggtataaag

SEQ ID NO: 565158 - DNA, 274 bp, Homo sapiens
aagggtaggttgaaaccacacccgggcatcttggcaccctccagagcagatatcgtttttccatatgtagcacgctctgctgtcgctgaaggtttgtgtcccctaagcaattctatgttgaaatgctaatccccaaagtttatgacatgagggggagtctttggggatgtacgacgccttgaagaatggggctagtacccttccagaaaacttgagaactgggaagaaaacaatggaaatatatatcttttttttttggaagacagcatattca

SEQ ID NO: 565159 - DNA, 177 bp, Homo sapiens
gtgttacagcacacatagcttcactacccatcggtgtccatattatagaataatgtagggaagaaacaaacccgtatttatgatttactacattatcgcctatttgacagctgtcttgcaaccacaaagtagatagcctgaatcttgacataaatcccacacattcagtaaatgtat

SEQ ID NO: 565160 - DNA, 624 bp, Homo sapiens
tgtacggtccggagtttttggatccggccggcctcgttagccagcggatctgcggcgcactggcagcgccccgaaccaagatgccagaatgccgggcctgcagggcttcccggagctggtcctggtgtacactgggacacagtgctccaaggtgggtggcagacgatgtgtgtgcccccctgtgtccctggaccttgctcctggaagccccatgcccatggaggggccctggcatgctggctatgccccttgattatcacctagcaccgtattactgatagcatgctgggcagtacgctccgcactagttggcataccttggaaaacaattcggtagaaggatgatttgtaaaatgcatgttggagatagccgacgaggtcggaaggcccgatcgggggtaagttatgtacccccacagagaaaagtcctcccttatacgtccaaagtggaaacggtaggcccccgagagtcgcgccgcggaaagaggcgaacgcgcgagaggaagccgaaaagaaggatagcaagaaggagccacgggaaggacaggaggggaacagaagacggacggcgggacacacggggagaaaggagaggagggcacctaggaggatcggaagagaagg

SEQ ID NO: 565161 - DNA, 451 bp, Homo sapiens
tgctggagacgcacctatgatgaaggctgactgcacacggacaacggccgagggggtggtggtgtgacttccacctctagtcactgtcgctgtcacaggagtactccacagaggataactctcaacctccggagccacaatagcgaatttgtgctggtcaagtggaatgagtcctacctgaaactggccgtccgttaagaagggtgaggcatattcgggtggatccagtccgaggacaggcggtctgtgcagatggacaacgaacgcagagcgcacgtgagctgcttacacgtggcagccatgatggacctcacgcacttattacctatcgagatgagtttgtcctggtagggtctgccagtggacaagacactgctcatccaaaatcaacttggaaagtcacatcacgtgtggaatatggactcctgacgcccaccaggtgctgtctggc

SEQ ID NO: 565162 - DNA, 116 bp, Homo sapiens
gtcgattggaaaatttacacctttacggccgtgtgaacaaactgcaagacccgtgaagatgcaaataggtgtgtaaactcactgataaattctgagagagagaggaaaaaaaaaaa

SEQ ID NO: 565163 - DNA, 319 bp, Homo sapiens
  misc_feature (112)..(112): n is a, c, g, or t
  misc_feature (313)..(313): n is a, c, g, or t
gtgtggtagcttgtctacagggtgcagatctacaagtgcgtcatgagactgaggcttggttcatctgatggcatgttgagaacgggcttcgcagttctggtgtttgtggcanacttcgatgagaatgacccaagacctttgagggcgttgaccccagactaacagcatgcgtgacgtctaccggaagtttgatctgcgcgaggatgtcatcgatttcactggccatgccctggcgctctacggcactgatgagtaaggggaagctgggtggtggcagccccctcgccgggccgtgccccatcctaaccacaancaactg

SEQ ID NO: 565164 - DNA, 240 bp, Homo sapiens
ttccgtctcttctcaggctgttctctgcagtgctgggcggctcggggctgggccactgggccctcctgctgctcctgcgccctgctgtcctgctggaagcgggcgatggccttgctggtccttcttgccgcttgtggctgcatcaccgtggctgcacattgtctcgcgcttggatggcgttcgatcgtcaacagatacgtcgcccagggagctggtggaggggactcctctagacgtcga

SEQ ID NO: 565165 - DNA, 281 bp, Homo sapiens
cggcccgctttcgtgagactcaacaaacaacaaaaccccgaatggactgtatcctacccacactcctcttctcctctaggagtgacatgctgggactagcacggggctcaacaggggcagagcccagatggcaagtccttgctgctcccaacagacttgctttgctggaggactatctgtcagtctgtttgtttcaggtcaaccatattgacattaaaaaaaaaaaattcctaggcaggatctgagccgcgtctgctgcctgcaccagatctcacggagag

SEQ ID NO: 565166 - DNA, 899 bp, Homo sapiens
  misc_feature (660)..(660): n is a, c, g, or t
aatcgaagaagaaagataaagttgagaggataagcgcatgttgagtaaagcgccatatcatggaagacggatcatgcgcagatcaccgcaaacatacgtatcgtcaggtgacaatgcaagaaagctatacatggaacgagagaaatactaagtcgaggcaaactgctataaggcagcaataatagcaagagcagaaccgacaggtgaaaaggctgtgcaatgaggcaggtggaacagaacaaggagatgatttgatacgagtatatcaaagaccggacagggctcgatcaagtcgatccgtccaaagcaagcctgttcagtttggcactgtccctctcctgtgcacagaaactagttagagtgcgtttagatagctacggaaccagttgacattgaataacgagaaccatgacaaacccacacttggcattggatccaatcatattacagcttcaaatatacacactctgaattataacagatgtgtttgtttttctttcccaatcatgtagaattgatttccagttcaaggataaaccaggaacaattatttagaactatcaagtgatctaattaattttctttggtatgcttcttttacatttactgttatttgatgacttatcaggtagtagcagcaaccagagctatgatattgancacaataagccattgttaagggccccatttccgagaataattaggtaacttatagcctggggagcctatatatattattgcacgggggggaaattattattggggtccggagggccctggtgagaaggttcaaaggttccccacatttttcttttggggaaaaaaccggtgttcccacctatttttgtggatgtagaaaacccttgttagaatatcggatacaacccctggggaaattt

SEQ ID NO: 565167 - DNA, 1024 bp, Homo sapiens
taaatagatgggggtctcacttggttctccaggctgatctcaaactcttgacttcaagaagaatcctccggcctccgcctcccaaagtgctggagattacaggcatgagctgctaggtccaatcgcttggagatttttgggttgggttgggttgggtatggtggtttataggttggttggaggcagtcttcctctggttgcccaggccggagtgcaagggcactatctcggttcatggcaacctctgtctcccaggttcaagtgattctcatgcctcaggcccctcagtagcggggattacaggggcccggcaccaaacccaggttaatttgggggatttatagtaaagaccgggttttcaccaggttgggccaggcgggatatcgaactcctaacctcaaggtgatctgctagcctcgcccatcccaaagggcggggattacaggcgtgagtcactggtgcgccgggctgggtaagcttacataacaaagcagttaaaacctttaacgtagtggttacttacagttttctctccttcactagacggagatctgagggtcgagcctggctccatgggagctctgccgaatgcagagcgtagttgatcgtgaacatagtatatcctcgggccctatcagggacaaggtaacagaggacgtaacacagggcacggtgggaacacacataacaaaagaacggaggtgcgggaacccttagggttacacaccatggggtgctgacgacccactggaccagaccgggaaacccaaatgtgcgtgacgcacacgtacacagagcaggggggggggagaacaacacacactatccaaacagcgcgcggaaaaacgatcgcgggacgacgcttccgagacccgcggggaatcccattcacagacgggaaggcaggcccacaaccaacagcgggcggagacaagttaccgcaacacccccccgcgtaataccacgcgtgcgcatgaagccaaacgcgtctgtgcctctcgctcactactttatctccgatggc

SEQ ID NO: 565168 - DNA, 736 bp, Homo sapiens
tgagggatgcacaagtcttaattcctgctggcagaggatggtggtcctggtggctggcggagtggggcacctcatggctggcagctctcacctcttgctggccggcagcttcagccattgtgggcaccttgcccagtgctcctcttcatggtgtgctggtgcctgtcccttgtggatggggctcatgggtgggaccatgcgccccctcctcagcaggtgggctcagacttatgtgtgcaggggctcatgtggtgctggcacatgtgggaatggtgtgaccctggctgtgcccgtggacattgtacctgggccaccatgcatcgtctgtgcctgcagatgtgtgagaagaatggcattgctccatgcatgtgccatgtgctccaggtgtaagacaccttgccggtgatcctcggtggttcccaatgttgcaccaagatgctgagcctggagaagatgtgttctgcctgaaagatggtgtcatgcgtattggtcgtccaggtgacttgttttcggtgagaggtggtcgatagaacagtgtaaacatgacagctcggggtcccccagggtggctcctcatggaaggtctcgcaagtcccccagtggtctccgctggggcaggaaaaaagcccttgtaggacgtactgttctgggtgactggccctcagagcacctttgggtacgcccaggtctccttattgggcatcctgatgctttggccaggggctatcagggtcga

SEQ ID NO: 565169 - DNA, 248 bp, Homo sapiens
atgattgaaatgggctacaacaaatttgaaatataagtgtatttttccttacactctttgactgtaaagaagagtttgttagtattttagacattgactgttttctgatattcaggttgtaaaatttttgatagataaatgcatttaatacttaggtaattctttggaaccttttaagctttgtttactctccagtggactatgttataaactgagatgtgccttaactgttctgtggctccctaaga

SEQ ID NO: 565170 - DNA, 932 bp, Homo sapiens
  misc_feature (44)..(44): n is a, c, g, or t
  misc_feature (64)..(64): n is a, c, g, or t
  misc_feature (74)..(74): n is a, c, g, or t
  misc_feature (118)..(120): n is a, c, g, or t
  misc_feature (139)..(143): n is a, c, g, or t
  misc_feature (152)..(152): n is a, c, g, or t
  misc_feature (160)..(160): n is a, c, g, or t
  misc_feature (177)..(177): n is a, c, g, or t
  misc_feature (180)..(180): n is a, c, g, or t
  misc_feature (186)..(186): n is a, c, g, or t
  misc_feature (188)..(189): n is a, c, g, or t
  misc_feature (195)..(195): n is a, c, g, or t
  misc_feature (203)..(204): n is a, c, g, or t
  misc_feature (210)..(210): n is a, c, g, or t
  misc_feature (212)..(212): n is a, c, g, or t
  misc_feature (232)..(232): n is a, c, g, or t
  misc_feature (252)..(252): n is a, c, g, or t
  misc_feature (268)..(268): n is a, c, g, or t
  misc_feature (270)..(271): n is a, c, g, or t
  misc_feature (275)..(275): n is a, c, g, or t
  misc_feature (281)..(281): n is a, c, g, or t
  misc_feature (288)..(288): n is a, c, g, or t
  misc_feature (291)..(291): n is a, c, g, or t
  misc_feature (300)..(300): n is a, c, g, or t
  misc_feature (308)..(308): n is a, c, g, or t
  misc_feature (310)..(310): n is a, c, g, or t
  misc_feature (317)..(317): n is a, c, g, or t
  misc_feature (322)..(322): n is a, c, g, or t
  misc_feature (324)..(324): n is a, c, g, or t
  misc_feature (332)..(333): n is a, c, g, or t
  misc_feature (337)..(337): n is a, c, g, or t
  misc_feature (340)..(343): n is a, c, g, or t
  misc_feature (347)..(347): n is a, c, g, or t
  misc_feature (351)..(352): n is a, c, g, or t
  misc_feature (355)..(355): n is a, c, g, or t
  misc_feature (362)..(362): n is a, c, g, or t
  misc_feature (365)..(365): n is a, c, g, or t
  misc_feature (368)..(368): n is a, c, g, or t
  misc_feature (382)..(382): n is a, c, g, or t
  misc_feature (397)..(397): n is a, c, g, or t
  misc_feature (407)..(407): n is a, c, g, or t
  misc_feature (410)..(412): n is a, c, g, or t
  misc_feature (417)..(417): n is a, c, g, or t
  misc_feature (425)..(427): n is a, c, g, or t
  misc_feature (433)..(433): n is a, c, g, or t
  misc_feature (439)..(440): n is a, c, g, or t
  misc_feature (444)..(444): n is a, c, g, or t
  misc_feature (449)..(449): n is a, c, g, or t
  misc_feature (462)..(462): n is a, c, g, or t
  misc_feature (480)..(480): n is a, c, g, or t
  misc_feature (482)..(482): n is a, c, g, or t
  misc_feature (511)..(511): n is a, c, g, or t
  misc_feature (634)..(634): n is a, c, g, or t
  misc_feature (638)..(638): n is a, c, g, or t
  misc_feature (647)..(647): n is a, c, g, or t
  misc_feature (653)..(654): n is a, c, g, or t
  misc_feature (701)..(701): n is a, c, g, or t
  misc_feature (857)..(857): n is a, c, g, or t
  misc_feature (862)..(862): n is a, c, g, or t
  misc_feature (928)..(928): n is a, c, g, or t
ttaggtgtaattaaaaataatgaattgaaagttacattgaatgnagggtttcccagggtagttnttattttgtnaattactccaaataaattaaaggtagttatgcctcatctttttnnngagctgtggcagctctaannnnnggaaaaganaaataaanaaaaggaaatctaaaanaanaatttnanngaagantggacaannaaaaangngggggaggatttagaaagtnggatggtaaagaaagttgantcaaaatatttttttngnnaatntggggntggggtntanttgtggggngttgtttntnatggggnttgananatgtgaannttgnttnnnntggngggnngtnttgtggnggnggntgggttgtggaggnggggggggtgggttntggggttggnttnnnaggtnacgaaaannnttattnaaaagnnactnttganatgttagtttgtngggaaagatatgggaaangngataaaatcacaattaaatgcatgtatanacatgaataccaaagctattatgtagaaataaaatcaaaacactttagaccaagaagaaatcagagacctcctagtctattgccccagtgtaaaaattaaaaaactctggagtaatcattgcnattnagcattagnaaaaannaaataattttaactctgaggaaaaaaatgattttttaacattttcanttttatatcaaattagatactgatcacatatatcataaaattaataaatcaagcagatttttctactccataattcatgtcacatttaatagtctcttcacggattctttgtactgagaaatggaattttcattttcctcctcatttttaagactnacaanagactttttgtactcttcaatttctttagtaccaaggagctcttctttatttatttccatattttntcag

SEQ ID NO: 565171 - DNA, 156 bp, Homo sapiens
acctgatcctaaagatatggtgcgagcttcgatttcaaacgtcaggctggcaagcagcagtataggatgtccctgcgtgtagtctgcccagaaacaatacatcctggaatgtccaaagcagggctcggatgctactagcatcagtaccgaaagaag

SEQ ID NO: 565172 - DNA, 172 bp, Homo sapiens
atactctatggtagaactaaggcctttcctttcttggccaaagtctctaccctgtttaacccttgtatattctgactgctcactgttcatattatagggccagcttggtaatatagagtgctccataacatgatgaataattctgtccagccagcatggtggctcaatatag

SEQ ID NO: 565173 - DNA, 601 bp, Homo sapiens
tctagctaggccagaaccccacagtctttgaacactgtaagacctctggtatttttgttcttcatttaacctcacattcatgctctgctgggccttgatgagtcttgtgcacatgtgcagcctagccctttaacaatgacctatttcgaactcccacattgacttctgtcctcgttctgtgcatagctcctccatcttcagtgccctaccaggtaaatcacagctgcattaacagcccccaaatttccatctctgtctcatcagtgcagttacaccgtcatgatctgcttggtttcaaactccccgccacaggagaattttccccacccatagggcctgggcaaacatgaggctctcaccctgacaataccttatgtctatgagaaactctcatacactgtttgtgggaggagaaattggagttaggactctggcaaagttttggcaggttctattaagctgaatatgaacattcagtatgacagtaattctctctgtcatataatcatcctaaaagttaacatgtccaaaaggcatatagaaacgctaattcctaatagcccaaactggacacaacctagaaattaaatcaccatctcaa

SEQ ID NO: 565174 - DNA, 463 bp, Homo sapiens
  misc_feature (9)..(9): n is a, c, g, or t
  misc_feature (37)..(37): n is a, c, g, or t
  misc_feature (108)..(108): n is a, c, g, or t
  misc_feature (128)..(128): n is a, c, g, or t
  misc_feature (228)..(228): n is a, c, g, or t
  misc_feature (230)..(230): n is a, c, g, or t
  misc_feature (276)..(276): n is a, c, g, or t
  misc_feature (279)..(279): n is a, c, g, or t
  misc_feature (365)..(365): n is a, c, g, or t
  misc_feature (405)..(405): n is a, c, g, or t
  misc_feature (410)..(410): n is a, c, g, or t
  misc_feature (414)..(414): n is a, c, g, or t
gaaaatgcnatatccgtgcttgggggccctatgaacntccaaaaacggccgtggcggctaactcaatggaacacattcaagctgtgaaactccttcccctggggggtnaaaggtcaagcatcaatccnagcctggctgcttcaaagacagagtcaagtgagaaacgtgggtcaagtgggaaaagcgcaagcaattgctgctggccaacctgcctcaagagctgctgcnanctacggcaaggactacatcgagcacttgcatgggagttcctgcacntcntacgcctggccatgtccgacctcaccccagttgtagatgccatcacagatgcgctgctggcagctgccccgccgccgctattaccncgccaggcctggggctcatgtacttcatccactactaccntgccntganacggtgcggcgccgcttcctgcaggccttcttcatcagtcactgtctgc

SEQ ID NO: 565175 - DNA, 463 bp, Homo sapiens
gagatatgatggcttagctctggcgctcataggcctgacgagacagatgatgcagaattgaaagattcatgacaaaagttggctacgttcgtgtacatgcacctattaagctttttatggtatgttgtacatttatcttcttcagggtcttcccagccctattagtaacagtgtcttccatagcaattggataagatatgaaactaagaactttattattaattggcttgctattccttggcaatacacaatgaacacaaagattaacaatggcaagaatatcaaacgtacaatttgcccattcattcatatcagatgtctcagtacttatggtgaggtaggcatcatattaaggtacaactatcttagcgcagatgtacctaacatgattaatatatgagaaattatgacatttaatacccgtccaaaactgtcagactaaatgatttatgtccataggtcc

SEQ ID NO: 565176 - DNA, 332 bp, Homo sapiens
  misc_feature (8)..(8): n is a, c, g, or t
  misc_feature (67)..(67): n is a, c, g, or t
  misc_feature (101)..(101): n is a, c, g, or t
  misc_feature (114)..(114): n is a, c, g, or t
  misc_feature (118)..(118): n is a, c, g, or t
  misc_feature (135)..(135): n is a, c, g, or t
  misc_feature (229)..(230): n is a, c, g, or t
gggctgtntcctgaagcgctgctcggagccggagcgctactgcctggcgcggctgatggctgacgcntagccgcttgcgtgcctgccttccacggcgtgtnggagcgcgacggnaaantacctgcagctgcagancctgctcgatggcttcgacggaccttgtgtgctcgactgcaaaatgggcgtcaggacttacctagaggaggagctgaccaaggcccgtgagcgnncaaagctgcggaaggacatgtacaagaaaatgctggcggtggatcctgaagctcccacggaggaggagcacgcgcagcgccgttctaccaagccgcgctaca

SEQ ID NO: 565177 - DNA, 182 bp, Homo sapiens
aagttacatatacgaatcgagtctccgtacccagtcatgcaggctggttgagaagacctcctggagcttgaatttattaatgcaagacgtacctcacaaacccactaggttcctgcactaccagacctgtcattaacaatttcggttgtgtggcgacctctgagcataacccaacctccgag

SEQ ID NO: 565178 - DNA, 515 bp, Homo sapiens
ccgagctagggagcctgcgaaggggaggtgagaatacagagaggatctcaggagcctgtctcctaccagggcttccaaggtggcattcagctccttggttattttaccatggttctcatctttgggcctctcccttgtaggtgtagaaacttgcattatcagcaagtcaagagtggccccatttctcagaagtaagaaatgcatcaccaaaccaaggggactggagtataatgagactggtgggagtatagtaagacatttgttgtcacaggtatagaacacttgctataaacagaactgcatgggagaaaaaataaaaccagaaggtcacaaggcaagtagggaatggaaacaaaataagctttatctaaagagaaggcaaagccattgtaattggagcccttggagctctcagcaacaacccctctctatctttacatcagggatgatccagttattgggcttggaacacttgaagaccactagctgaggtaccctctcttccctggatggtg

SEQ ID NO: 565179 - DNA, 93 bp, Homo sapiens
ctctctatatgtcgtgacagcatggtcccagctccctgcaaacaagtcagtttctccccaattccacttctgccctcatccgcttatccaatg

SEQ ID NO: 565180 - DNA, 1659 bp, Homo sapiens
cgccctcgacgagcgagctcgaaggctgcgactggcgccgcctcaccgcctcccaccgccactgaccgaccgttcgaccggcaaactgaccgaccgttcgaccggcaaacatggttgaagcggatcgcccggggaagctgttcattgggggcctcaacctcgaaaccgacgagaaagccctcgaagccgagtttggcaagtatggccgcatcgtcgaggtgctcctgatgaaagaccgagaaaccaacaagtcgaggggcttcgcgttcgtcacctttgaaagccccgcagacgccaaggccgccgccagagacatgaacggcaagtccctggatggtaaggccatcaaggtggcccaggccaccaaaccggcgttcgagagcagccggcggggcccgccgcctccccgcagccgcggtcgcccgaggttcctgcgcggaacccgcgggggtggcggcggcccgcggcgttccccatcccggggcgggcccgatgatgacggcggctacgcggcggatttcgacctgcggccctccagggccccgatgcccatgaagcgtgggccgccgccgcgcagggtcggcccaccccccaagagggccgcgccgtcgggcccggctcgcagcagcggcggtggaatgcgcgggagggccctggccgtgcgggggcgagacggctactcaggcccaccgcgccgggagccgctgcccccgcgccgcgacccctacctgggcccgcgggatgagggctactcgtccagagacggctactcgagccgagactaccgcgaaccccggggttttgccccctcgcccggagagtacacccaccgcgattacggccactccagtgtccgggacgactgtcccttgagaggctacagcgaccgagacggctacggaggtcgcgaccgtgactacggggatcatctgagcagaggctcccatcgagagccctttgagagctacggagagctgcgcggcgccgccccaggacgggggacaccgccatcttacggaggaggaggccgctacgaggagtaccggggctactcacccgatgcctacagcggcggccgcgacagttacagcagcagttatggccggagcgaccgctactcgaggggccgacaccgggtgggcagaccagatcgtgggctctctctgtccatggaaaggggctgccctccccagcgtgattcttacagccggtcaggctgcagggtgcccaggggcggaggccgtctaggaggccgcttggagagaggaggaggccggagcagatactaagcaggaacagacttgggaccaaaaatcccttttcaacgaaactaacaaaaagaagaacctgttgtatggtaactacccaaggactagtacaaggaagagttgtttttaccttttaagaatttcctgttaagatcgtctccatttttatgcttttgggagaaaaaacttaaaattcgtttagtttagttttggaattgttaacgtttctttcaacaagctcctgttaaaagtatatgaacctgagtactagtcttcttacatttacaagtagaaattcgattaatggcttcttcccttgtaaattttcttgataaatgaggcaaacagttctaagatctttgataaacatctgctcacctaaaaaaaaaaa

SEQ ID NO: 565181 - DNA, 206 bp, Homo sapiens
cgtcgtaatcgacggttctctgaaggaaagcgctatccattacagttaaagcctggtcaaataaccagtggacttcaatttgtcatgcaaaagaaaacagattcttattgcacttatgcaaattactatcttgccataagttaagaatactcacaaatggtttccaaagttctggggaactctggaaggagagaacatatgctgca

SEQ ID NO: 565182 - DNA, 636 bp, Homo sapiens
cgatagtttgcgatcagggccacccgttttgaaggagtggaaaagccctactatagtgttttaaattagccagtgttaagctccagtgctagagtggataataccaccccgcatgtgtttcaaatagtggcacttttatgtatcctagttgggttattgttctagactggactgttaaataactatagtttgaggctgggttgtcatattttataaactgtcttggtgttttatggcccattatttattacttttgataacaaccaggatgagctgcatagccatttatagagccatttagaggatgtatttaatagtgccctgtttttaactggattaagaactgggagcatggatccataaaactgatttaaatggtctatttgctagccttcttgatgttacttgccgtccagataactttgattactgttgaagtttgaaaaaagtttgaaaatatttttaccaaactgtggtttttgatgacacccaaagtggaatatctaccagagatagatgtaattttataagactgcccgaattatttgtattaatttgttgctgtagcctttagggcatgacttctgtatttgtgccatcctattctaccattacattcatcctattaccactcca

SEQ ID NO: 565183 - DNA, 1633 bp, Homo sapiens
cgccctcgacgagcgagctcgaaggctgcgactggcgccgcctcaccgcctcccaccgactgaccgaccgttcgaccggcaaacatggttgaagcggatcgcccggggaagctgttcattgggggcctcaacctcgaaaccgacgagaaagccctcgaagccgagtttggcaagtatggccgcatcgtcgaggtgctcctgatgaaagaccgagaaaccaacaagtcgaggggcttcgcgttcgtcacctttgaaagccccgcagacgccaaggccgccgccagagacatgaacggcaagtccctggatggtaaggccatcaaggtggcccaggccaccaaaccggcgttcgagagcagccggcggggcccgccgcctccccgcagccgcggtcgcccgaggttcctgcgcggaacccgcgggggtggcggcggcccgcggcgttccccatcccggggcgggcccgatgatgacggcggctacgcggcggatttcgacctgcggccctccagggccccgatgcccatgaagcgtgggccgccgccgcgcagggtcggcccaccccccaagagggccgcgccgtcgggcccggctcgcagcagcggcggtggaatgcgcgggagggccctggccgtgcgggggcgagacggctactcaggcccaccgcgccgggagccgctgcccccgcgccgcgacccctacctgggcccgcgggatgagggctactcgtccagagacggctactcgagccgagactaccgcgaaccccggggttttgccccctcgcccggagagtacacccaccgcgattacggccactccagtgtccgggacgactgtcccttgagaggctacagcgaccgagacggctacggaggtcgcgaccgtgactacggggatcatctgagcagaggctcccatcgagagccctttgagagctacggagagctgcgcggcgccgccccaggacgggggacaccgccatcttacggaggaggaggccgctacgaggagtaccggggctactcacccgatgcctacagcggcggccgcgacagttacagcagcagttatggccggagcgaccgctactcgaggggccgacaccgggtgggcagaccagatcgtgggctctctctgtccatggaaaggggctgccctccccagcgtgattcttacagccggtcaggctgcagggtgcccaggggcggaggccgtctaggaggccgcttggagagaggaggaggccggagcagatactaagcaggaacagacttgggaccaaaaatcccttttcaacgaaactaacaaaaagaagaacctgttgtatggtaactacccaaggactagtacaaggaagagttgtttttaccttttaagaatttcctgttaagatcgtctccatttttatgcttttgggagaaaaaacttaaaattcgtttagtttagttttggaattgttaacgtttctttcaacaagctcctgttaaaagtatatgaacctgagtactagtcttcttacatttacaagtagaaattcgattaatggcttcttcccttgtaaattttcttgataaatgaggcaaacagttctaagatctttgataaacatctgctcacctaaaaaaaaaaa

SEQ ID NO: 565184 - DNA, 845 bp, Homo sapiens
tgccgatcatgttcagaaatataataataagcgtttaaccgtcgaaatactagaaaatgactgggatatcagcatgacaacatctatcaatcctcgacttaactaatagccttaagaatggggatccatacatgtgctgcatgatcggttgatggggacgaaactgcgtgcaattatacacactctaacaaatctcatcatccactcatgagacgcatatcagtgtgacaatattgctcgtacatcatgcctaagccgtcctgggatgcaaccaagtgggtgcctacaccacgtaatagatctctatactcctcccatatcatgactcattgtgacctaaatgagcttaaccgtttacaagttagatcacttcatgagacacgtaatcttcacaaattgtgcctaaaaagggatgaaatcgggcgccaccattacaacactggattattctacaatatcccattaatgtatcagtcgaaccttctttcaccatttttcccatcggaaatcaaatgaggtaatggtaaaccattaaattgattgcaattaatgattcttaacttgagagtataggccaatcagtttcccttgtgtggggtgattaaattgtgaaaactcgaatattggatggaaaacaggtcgcgtaatattagactgtgatttcggcaaaatataattaaagcaattttcccgaataccttcttgggtaaaggaatggaaacattttgtttaaatatttaatttgtaaccatagaaggaatttttaaccttggaaggctttctttacattggtgaagggcctttaaaagtggggcagtaattttcaagggggaatccaagaaatt

SEQ ID NO: 565185 - DNA, 728 bp, Homo sapiens
  misc_feature (21)..(21): n is a, c, g, or t
  misc_feature (109)..(109): n is a, c, g, or t
  misc_feature (111)..(111): n is a, c, g, or t
  misc_feature (250)..(250): n is a, c, g, or t
  misc_feature (265)..(265): n is a, c, g, or t
  misc_feature (274)..(274): n is a, c, g, or t
  misc_feature (341)..(341): n is a, c, g, or t
  misc_feature (465)..(466): n is a, c, g, or t
  misc_feature (468)..(470): n is a, c, g, or t
  misc_feature (473)..(475): n is a, c, g, or t
  misc_feature (479)..(479): n is a, c, g, or t
  misc_feature (483)..(483): n is a, c, g, or t
  misc_feature (487)..(491): n is a, c, g, or t
  misc_feature (498)..(498): n is a, c, g, or t
  misc_feature (510)..(510): n is a, c, g, or t
  misc_feature (513)..(513): n is a, c, g, or t
  misc_feature (515)..(515): n is a, c, g, or t
  misc_feature (519)..(520): n is a, c, g, or t
  misc_feature (522)..(523): n is a, c, g, or t
  misc_feature (525)..(526): n is a, c, g, or t
  misc_feature (533)..(533): n is a, c, g, or t
  misc_feature (537)..(537): n is a, c, g, or t
  misc_feature (542)..(545): n is a, c, g, or t
  misc_feature (551)..(554): n is a, c, g, or t
  misc_feature (569)..(573): n is a, c, g, or t
  misc_feature (575)..(576): n is a, c, g, or t
  misc_feature (582)..(583): n is a, c, g, or t
  misc_feature (590)..(595): n is a, c, g, or t
  misc_feature (599)..(599): n is a, c, g, or t
  misc_feature (601)..(606): n is a, c, g, or t
  misc_feature (616)..(616): n is a, c, g, or t
  misc_feature (620)..(620): n is a, c, g, or t
  misc_feature (657)..(657): n is a, c, g, or t
  misc_feature (728)..(728): n is a, c, g, or t
acaaagagaaggccgagacgnggcctgggccagtgtctaagggtctctgagtgagtctgtgtcagcatgtgggccccagctgggcctgtccatgggttgggcacagcantntcctgagtaagagccagccccaccctcagggcagcattccagcccaaaaagaaatccaggccctccaggttcggcctgttttcaaggccctcaggacagtcaataaataggttagattctgagccaggcctggaaagtnagggtattcaaaggncaggatganctgctagggatcgtaatgattcccaggtactctcctgcccttctccaacaaggaagtaaataaatanacttttaactcaggaacggggtgttggagcaggggaaccctccccttggagttagtaattaagtctcatgttaaaaacaaggtagccccagcccctaccagcatctacaaaatcctacaggatnnannnaannnctanccancctnnnnntacacantacccatccccncantncctnnannanntctcatntctnttctnnnnctcccnnnncaccctccgcccctnnnnntnncgccannaaaaaannnnnnactnannnnnncggccacacntatnatttttaatcctttacccccaccaccattaatttttncccccccctaaacaaaccccacattcccctaatttttccactcacaaccatttcccataaaattattcacn

SEQ ID NO: 565186 - DNA, 248 bp, Homo sapiens
  misc_feature (131)..(131): n is a, c, g, or t
  misc_feature (144)..(144): n is a, c, g, or t
  misc_feature (146)..(146): n is a, c, g, or t
  misc_feature (169)..(169): n is a, c, g, or t
  misc_feature (172)..(172): n is a, c, g, or t
  misc_feature (232)..(232): n is a, c, g, or t
  misc_feature (245)..(245): n is a, c, g, or t
ctcctggactccagaggccagcggggagctttcctggctcctctgttttctctcactgtagaccaaatagccgcttgtgtgatattaaagccactttagaaagcaaaaaaaaaaaaaaaaaaaaaaaaacnaaaaaaaaaaaangntctttactcggtgccgaattcgncancagtcgggttcaatttgccattggtttctgaaagtattcacatcatttgggataccaganagctcaaaactcnctg

SEQ ID NO: 565187 - DNA, 113 bp, Homo sapiens
  misc_feature (29)..(29): n is a, c, g, or t
  misc_feature (42)..(42): n is a, c, g, or t
  misc_feature (70)..(70): n is a, c, g, or t
ctgaccaaaggcctgatcgcagcttttangtaaattataggnataattacaaatgctgtaatcaaccatnatttacatattagtacatgtatactaagtataaagcttcctaa

SEQ ID NO: 565188 - DNA, 535 bp, Homo sapiens
cttgaggctgaggtcaacacacatcgagcatctgatgagcatgtcatactctgagattcttgcaagcactcgaaacatgaaatttaaccccaacttatttggacatcaagttccttagcacattccaagagatgcctacagttcttcagggtagtgccaaacttcatgttaccctcttcacctccaatattatcttctgttgcaatatgtagtaagaccttggcatgtgggtgattacgtgcaattttcttcaattcaatttcattgtcacatgtcaggatattcactccaacttctgctgcatactttatctgagacacttgcttgtaaggcacttctgtaaatactgtattctggaggtacacccaactcttgcactaaagccatttccatgtttactggaacaagcaaatccggttccaagagctgccaaaatctcaagtacagccggagcagagttgcacttcaactgtgtagaatggcttactctgagatcactacattctggcattgactgtgtcacatatcacaatct

SEQ ID NO: 565189 - DNA, 842 bp, Homo sapiens
cattcgaagaacccgtatacatgaaagtctagacaaaaaaggaaggaatcgaagcccaccaaaggctggtttcaagaccaaccgccatggtgctccagtgactgtttacaaacaaaaaataaaaaaaaagaaacagagacgaaaaaccggtggaggggcgcgaagggagacccaggaggaaggtttttgaagagaccaaatcagttgggggtcgtcgtcggaccacgaagatgaggaaaagtagacaacgggtggtcgaaagtggtgagaccaccgaagaaagaatccgggaggaacagaaacaagagaggaggaggagattcacccacaacaaataagaagaaaaggcccgggaggaggaaaacaccggagaaagcgtatgtgagagacaaaacaagaatctacacaagagaagggagagactgatacgcgacgagaaacaacaaaaacacgagaggaagctcaaatacaaacaagaagggaacgagatacccaaaaggacaggaagacgaagcaaaagaatacgaacaacagtcatgaaacgaaacccacgagcgcacggggtggcagacacagaacagagacagaaaacggacaacgaaacacaaaaagaacgaagaaaaagaaaagaaaagaaaacaaaaaagaaaaaaagaaagaaaaagaaagacagagaacaaagcacaaagaaagaaggaaaaaaaaaagaaagcaaaaaagagaaaaggacaagaagaagaaagaaaaacaagacagaagaagaaaggagaaaaaaagcaacgaaaaaagaaacaaaaccaaagcacaaaaagaagaaaagaaacaagaaaaaagaaaaaaaa

SEQ ID NO: 565190 - DNA, 930 bp, Homo sapiens
tgtgcgctctcgtcgggagtcccagccatgtctgacgagagagagtggtagcctgaggcagcgagctggggaagacgcctcttctgcctgcctccgaaaaccgaggcagcgagcgacccccagcatccctgctggcctccgaaggggcctgccgcctgccgccgcctcgccgccactgctgccgctgcctagtgctcacctggctttggaggctacgacaatgttgtgaatgctgcatgatgcctgttgccttggcagctgccccctgtgcccctgggggccctgtgccatgctgacgtctgctgtcttgccgtgtgccttgtgtggtctcaagcttctgcatgacctacatgtgctatgtgcatgtggtgcttgtacgaccctgtcatccctgcctactgccctgtcacctcctggtgcatgtgattgtgcgctgccggtgtgtttgttgactctgcatgtgtggctgcagggatgtccagctgacctgcgaattgccaggtgagacccggggttgatgcgtgttgagaccctgggtccaggtgattgttggcccgtgacgaagtgttggaacttgttgcctctccgggttcccagtaccctttccctttgaagttcacccttgaagggccccatagacccgtttggacgcgcattggcattgcttagccctgattggctccggtcagaaagtcttcgacgttttaacccgtggcccttaacagtttttggttcacccttcctcttttgaactgtatccaggggcgaaacccgttaacgatgccccttggggcgcccaccgaagggctggctctcttgtgagttcaccacaccactttgtggcttgcacacgcggggcgcataggtacgggcgcccttcgaggcgatcgcccgggtagccagccgcttgttaccacgggtatcccactg

SEQ ID NO: 565191 - DNA, 271 bp, Homo sapiens
ctctaacaggatcctatggagaccaggctgagagtacctcaagattttcaaggcatcatgaagtggcgtgggcatcctggggcaggctagcaccaagatagagagtatgcaggggaatcacatttggctgccctaatggcaagcaggatttaaccctgcaaacatcctaagcttctatgctgtgcaagagtatggtgtagtgtatggtgagaattggtggcattgtcaatctgttgccatcagccacaaagctgcccacctgggtctccat

SEQ ID NO: 565192 - DNA, 319 bp, Homo sapiens
  misc_feature (126)..(126): n is a, c, g, or t
  misc_feature (150)..(150): n is a, c, g, or t
  misc_feature (227)..(227): n is a, c, g, or t
  misc_feature (303)..(303): n is a, c, g, or t
  misc_feature (312)..(312): n is a, c, g, or t
ctttgcaggagcacacgtgtgttctgcatagcatcagtgggctagggggagcaccgtgggacgctgggcgcgcgtggagggtacccccagtgaccctaaccccaacgatccccagagcccgcatgnacagtgagagcctcttcaaggacngggaagctgctgcctgctatcaccatcctgggctgccgagtcccggatccctcgccgaggtgctcatcctgaactcngattgttctgccacacaaggagctgagcctgaagcttcaccaaccagatcatcctctgacgtagggctgccagaanggcccccangctccta

SEQ ID NO: 565193 - DNA, 209 bp, Homo sapiens
gatgtatcgccaacactgtagccttctgactcactcaatacagttctgctctcgattgctgtgtggctttgcgatgtactctgtcatcttggagacttattcatggaccaggggttattggtacctagcttttgggttttcttaggatggctgcgctcattgtgcatggaaagtgctagcccagggtttgcgctacgggaaagcacttc

SEQ ID NO: 565194 - DNA, 295 bp, Homo sapiens
ttacaacccacgatcacctggagtagagagttttaagtttgttttttggtgtataataaagaatgtgactagcctttttcctggggttcctggcataatgtgtctaaaacctttggaattttccaagtgatagaagtatctttctttgttattcatgagccttttggatcataactgagtttatgttaatgagatgattcaggatgggggctggtcaccagaaagaccaaccatgtgataggagggctgatgcttgaggaagtctaatctctggggagtgatcgtggggttgtaa

SEQ ID NO: 565195 - DNA, 621 bp, Homo sapiens
ggaagactggtgattccttcatggatgcatagtcattagtggctttcagtttggttaagcacaatattaatgataagcatgagatgggaaataacattagctactatataccatattatctactatatgccacacactttgaatgtattatttatgcacatacgtatttaatgaaatgaacatgcatatatctgtgttatgcttatacaatgaaaactctgcaaggtgggtagtgatattatttccaggttctaaatgatgctttcagaaggttgagatttttgcttacatttagaagaggtagacccatgcttcaaaccagtatctacttgccttccattcttttagtttttaaatgaaaaatatattctttagagatgagaacttgctacatttcccaggcaggaatgcagtggctattcacatgcgcagtcatagctcactgcagcctcaaactcctgggttcaagaaatcctacctcctcagcttccagctactcgggaggctaaggtgggaggatagctttagcctgggagtaccaggctgcagtgagccgtggttgtgtcactgcaccactccagcctggatgacacagtgacaccccctgtttaaaaaaaaaaa

SEQ ID NO: 565196 - DNA, 513 bp, Homo sapiens
tcattctttttatggttgcatcttattccatggtgtatatgtaccacatattctttatccaatccagcatcagtgagcacacaggttgattccatgtctttgctgtggtgaattctgttgcatagttgttggtagaacaatttattttcctttgggtacatatgcagtaatgggagtgctggggtgaattgtagttctatttttaaatacttgagaaacctccaaactgcttttcacagtggctaaactaatttacattcctaccaacagtgaacaagcattcaaaaaggactttaaaaaaataaagatattttaaatgattcatggctcaatatttagaatttattgtggtagacaataactggtgaatattagggatatgttggattatagctatagctacctttatttacattttcaaatgtatgtgcattgaagaaagaaatttaaatgtgcaggttgccctatgccctcagaatattaaacgaaggcaataaaacatgataaaacaaa

SEQ ID NO: 565197 - DNA, 324 bp, Homo sapiens
ggtcgaccctaaaggtttgggccagttgtggtggcttatgcctataatcccagcaatttgagaggcttagtagggaggatcgcttgagtccaggaatttgagaccagacctggcaacatagcaagatcccgtccctacataaaattaaaaataaaaaaaattagccacgtgtggtagtgtgtgcctgtagttccagctactcgggaggctaaggtgggaggatagctttagcctgggagtaccaggctgcagtgagccgtggttgtgtcactgcaccactccagcctggatgacacagtgacaccccctgtttaaaaaaaaaaa

SEQ ID NO: 565198 - DNA, 173 bp, Homo sapiens
ctagcttaggaataaatgctacttaaggtaggcagtgtatttccgtagtaggcatactttcgttaagacggaggccatttggttcctgggagaataggcagccgcacacttggatgaatacagaccccagtatctagatcgtggatataattgatacgctgaagaccataagc

SEQ ID NO: 565199 - DNA, 619 bp, Homo sapiens
  misc_feature (614)..(614): n is a, c, g, or t
ggaagcattatgaaatgatctgctgcagtgcgtctggagcgccgtaggattcactctttctttgcaccgtaggatggcctgactggccttgtattaacaaagtcatcactagacttcgtactacacgacacgtactacgttgtcgctcacttccactatgtcctactcaagtagcgagtctgtgactttcgtcgcactcactagggagtgcttcattacactcgatttccccgtattctcaggctatagcctagaccaaacctacgaccaaaactccatattcactatcatattcatcggcgtaaatctaactttcttcccacaacactttctcggcctatccggaatgccccgacgttgactcgtgactagccccgtatgcatatcagccatcatgaaacatcctatcatctgtaggctcattcatttctctaacagcgagtaatattaataattttcatgattttgagaagcccttcgcttcgaaagcgaaaagtcctaatagtagaagaaccctccataaacctggagtgactatatggatgccccccaccttacacacattcgaagaacccgtatacattaaatctagacaaaaaaggaaggaaatcganacccc

SEQ ID NO: 565200 - DNA, 591 bp, Homo sapiens
cattgaaggtttaagcatcaaacaacaaattgaagtacagagaatttggaagtggacagacatcctacactacacaacaggtgaaaagatactcacacaactatgatggatatcaaatggaacggttagcatggacggatcgtagatatgatatatccagaatggagcagattgaaataaaaatatgtatctataagatgataacatagtaaacaataggataacaatattacaatagataaagataaataagataaaagatgacagcaaataacgcaagaaagcaaaaacaacaaagcccatcaacagcacacagagcaaacacacaaggacaatgaagaactaccacagataacgagaaatgatcaccaacaacacaaccacatacccacatacacaacacaacaccacaatcccatcctacactcacatcatgcatacaaccataaacgataaacatacaaaataaaaccaaaaaaacacgaatcacaaggagagatacacaaagagcaataaagacacaaagaaggacacaagacatgaaaacaatccacagcaccaccacaaaaggtacaaaaaaaaaacaataac

SEQ ID NO: 565201 - DNA, 850 bp, Homo sapiens
gcatagtagagggctgtgatatacggcgatggctagcctcactataagactcttagtaagattacacatacaagcatacccgttccagtaaagtacaccctactaaatacaccacgatacaaagattggacgagcatacaatgcacgcagcaatagcagctacaaaactgctatagcctagccacacccccacgggaaacagcagtgataaacctataagcaataaacgaaagtattaactaaatgctatactaaaccccagggtaaaggtacaatatatacgtagccagccaccgcggtacacacgatataacccaagtacaatagaagcctggcgtaaaagagtagtatttatgatcaccccctaccccaataaaagctaaaaactacacctaaaagtattgtaaaaaactacccagtttagaccacaaaataagactaactcaaagtttggctatataacataatactataacacacaataagctaaacaaccccaaactagagcattaacgataccaccactaatagctattaaggccctaaaagcctaccaagcgagtcaaacgatacacagcaaagagctaagctacgcccaagaaaacgactaactagagccagcaggcctataaacgagaattaccagaagggagaccccttaagtcgggtaagccttcactcaatatccccctcttaaggaaaggaagccctagtatcttagtaaccttacgaataaaagacccccagaaatccaaaacttcaggctaactatcataagacgccaggcctataataaccgggccgacttaccagcaaaacccttatattaagtgctaccgaagttatagcc

SEQ ID NO: 565202 - DNA, 725 bp, Homo sapiens
  misc_feature (181)..(181): n is a, c, g, or t
  misc_feature (219)..(219): n is a, c, g, or t
  misc_feature (239)..(239): n is a, c, g, or t
  misc_feature (243)..(244): n is a, c, g, or t
  misc_feature (253)..(253): n is a, c, g, or t
  misc_feature (287)..(288): n is a, c, g, or t
  misc_feature (319)..(319): n is a, c, g, or t
  misc_feature (332)..(332): n is a, c, g, or t
  misc_feature (339)..(339): n is a, c, g, or t
  misc_feature (511)..(511): n is a, c, g, or t
  misc_feature (513)..(514): n is a, c, g, or t
  misc_feature (517)..(517): n is a, c, g, or t
  misc_feature (523)..(523): n is a, c, g, or t
  misc_feature (534)..(534): n is a, c, g, or t
ccacgcgtccgtgaacttgtaaaccaatcttgccaagatacaagtgtttggtttttcactacaatgacctcttgttcctcctgtcttgactgctgacgttcctcaatgattctatgtctattttatgggaagcagccttcccataggtttccttttacacactgcagggctatctttatantttaaaaaaaaaaaaaaaaaaaaaaaaagggacaaaantgtctaccctctgggggggnttgnngtaaaaccnttttagcccactttgagcaaggggtagatcccgnngtggtttttttaagctcactggtattaaaanaaattctatttcngcatttntggtgctacctcaaggtaaaacttgtttaagggccttctttggccctagagtctatatacaagtgtttgaaattgtcctctcattgggaaatttatttttaaaatcctgggagtggaattttatttacactccgggtgtaaactctggtttttaaatcctcagaagaatagncnnatnggaacngtgatcaattntggctcctggcggggtggttcaccctctttttgaacagtctttcaagatttaaagtcccgctggtttggccataaccaaggtggatgtccttttcggttcgttgttaaagagaacccttgaggggccggctttaattctgcgattcagatcaggggcttgaccaattcttgttcgacaaacacaaaaaagg

SEQ ID NO: 565203 - DNA, 517 bp, Homo sapiens
  misc_feature (409)..(409): n is a, c, g, or t
  misc_feature (438)..(438): n is a, c, g, or t
  misc_feature (445)..(445): n is a, c, g, or t
  misc_feature (502)..(502): n is a, c, g, or t
tcatgctgttatgttgcccaggttggcctcatgagatcttgccttagcctcccaaagtgctgggattacagatgtgagacactgcacccaaaccccaccacttttttttttcctttttctttttttgagatagtcttactccgttgcccaggctggagtgtagtggcatgatctcagctcactgcaacctccgcctcccgggttcaagcgattctcctgcctcagcctcccgagtagctgggattacagaggcctgccaccacgcccgactaattttcgtatttttagtagagacggggtttctccatgttggccaggctgttcttgaactcctggacctcaagtgctccacctggcgttgggttcccaaagtgctgggataacaggagtgagccactgcgcctgggtnattcccagcaatttttcaaatgatgccgntcaaagncgtgaattgggctaatttgaacagcaaattgttggtgctgttgttaaactgaagggntttaaatgccagttt

SEQ ID NO: 565204 - DNA, 329 bp, Homo sapiens
agagccccagttacaacactacatttacggtcggctgggatgactaggagcaccatggttgtgattaccaacatggtaagataccgaatgccgaaggaccctcactgaagagacaccaaaggagcctgccctcctcccctgctgggaagagacacttggagactgtcccaagggagctgaagaatccagaggcaggggatccggctgctttccatctgagtgtgcgacgagaggactgttcatgatacatttggatatagcattctactctgagaaatgcaacacacggagctacctatcactatcacttagtaatccaaaagatgact

SEQ ID NO: 565205 - DNA, 438 bp, Homo sapiens
ggatacccattatgtgcatctcaccagcatctttattttttgactttttaataatagccattctgatggtgcgagatgatacttcattgtgatggtaattttgcatttctctgatgattagtgatgttgagcattttttcatatttttgttggccacttgtatgtcttcttttgagaggtgtccgttcatgtttttgcccactttttaatgggcttatttggtttttgcttgttgatttgtttaagttctagattctggatattagacctttgtcggatgcataatttgataatatttttctcccattatctttactctgttgatagtttcttttgctgtgcagaagctcttacacataatggggtatcctattcaagctctgtcctcagagagaggtgacaaccatttcaaattctacacataatggggtatcgggt

SEQ ID NO: 565206 - DNA, 181 bp, Homo sapiens
cagtatcatgcgcagcagtgtcataggctgttgtctcacattggatgctggagcttgaagtccacatggcaggctctggagaagagaaggttgatatgaagttggggagagcaagaaaatctcaaccctgatgctggaacttgtgtcactgattgttgacctctgtgtgactttgctctta

SEQ ID NO: 565207 - DNA, 215 bp, Homo sapiens
  misc_feature (70)..(70): n is a, c, g, or t
  misc_feature (83)..(83): n is a, c, g, or t
  misc_feature (100)..(100): n is a, c, g, or t
tctagaggatctcaataaattgttggtcattgatgccaaaacggggattcggggcaggaaaacgccgacnaaggcgacgcatnatagtactgttgaacanaatttccgaatttacaaagttcacgaacatcaacacataccggagattgaacaggaacttgccgaacgggatggggaacaaacaccgatttctatcaatgaccaacaatttattg

SEQ ID NO: 565208 - DNA, 873 bp, Homo sapiens
gttttcctaagacatagttttgttgtctttattttttttattggtttttttggagacagggtcttgctctgtcgcccaggttagagtgcagtgacactatcacagcttactgtagccttgaaccttctgggctcaattgattctctgaactcagtctcctgagtagttgagaccacgggcacatgccaccaaggctgactcatttttaaaaatttttggtagagacagggtcttcctatttggctcaggctgatttcaaactcctaggctcaagtgattctcctgccttggcctctcaaagtgctgggattacaggtgtgagctaccacacctggccaatttactaccatttttaatcactatgatatataaaactatacatgaactgttttatacattagttttggagcctagctccgattattccttaggataagtttaaatttggcagttgctcagaaatgaaaactttgaagatactggtcacaatttggttctatttatgtgtatatataatagggacaaggggggtttcaacatagtgagtggacaaggggaggattgcaggtccgacaaaaattggggcatcatgtgtaagctctcaaccatcagggggattacatggccaatatcatccatttaccaacaagaccctcttttgaaccacaaatttgtgggcccatgaaacaaaccctgggttatgggggtcatactcatatacacggaatagtgctgaaacaaatcagtgtggccccgtgattattacgacaacattccctactcaaacagggaacgttaaatatctctgttgaagatctccgtgataattcgggccagggttatcttagagacaaagtagcggtaaatgtcacc

SEQ ID NO: 565209 - DNA, 260 bp, Homo sapiens
  misc_feature (24)..(24): n is a, c, g, or t
  misc_feature (109)..(109): n is a, c, g, or t
  misc_feature (113)..(113): n is a, c, g, or t
  misc_feature (119)..(119): n is a, c, g, or t
  misc_feature (134)..(135): n is a, c, g, or t
  misc_feature (249)..(249): n is a, c, g, or t
agtcccagatactccgggggctgnggcaggagaattgtatgaccccaggagccgagcaccacaccactgcactccaggctggggggggcacagtgagactccctctcanaganacaagnataaaagataagtanntacctatatatatggatatattagaaggcgcacccaatgtatacagaagaggactccacaggtacttctcacagaggttcataggagtatgtacttcaacactcaggaattcanatgcttggacg

SEQ ID NO: 565210 - DNA, 249 bp, Homo sapiens
taaatttgtattttaaaagtgactcgatttggctgtgcaaggtggctcacgcttgttatcccagcactttgggagactgaggtgggtggatcatatgaggaggctaggagttcgaggtcagcctggccagcatagcgaaaacttgtctctactaaaaatacaaaaattagtcaggcatggtggtgcacgtctgtaataccagcttctcaggaggctgaggcacgaggatcacttgaacccagcaggagg

SEQ ID NO: 565211 - DNA, 154 bp, Homo sapiens
ggattctgaaacattggcctgcttgtgtaagctcgccgtaagtgctccggtcctgtcacccccatgcgagtgagttagtgcacccaggagctctgtggcctgtagtcgtccaatgacaggggtctccttgatggaccatcagtcctgtggcaca

SEQ ID NO: 565212 - DNA, 985 bp, Homo sapiens
atactgttgttacagtggacgttaaaggctaacacactcacacgtgggcgtttcaccaatatgtatgcgcgcactattataccccgcgtggtcatccagtaagatgttccatttctccgatacatgtcgtcgcgtatccccgctgggggtgtaggcggccacgtcttacaggggttacaaacacccgatgtatagttttcacacaaacattctgtgaaaggcttgtgccacaaacgaaccccttggggagtggttggcttgccccccaattttcctgcgcgtgaaactaggcatcaagtcgtctctttgtgttgaaaactctcccccctcttggtgtcttgtgaagacacccatcacggctgtcccaatttctagcccacccccagtgttgtcgttcaatttctgggccaacacatatcattctgtcgccccctatatcattttcctccgtaatggtgtgaaatctactcccaagcagacactactattaagtgactaaatcatctggccggacaatcgactaaatttcttgctcccccgttgcctacaccggtaggtaaacaagacactccttttctaatcctcccccgagcacatcccaacgatatttatctattctcagtacatcgttctaacttaattgcccgcgccgaaaactcgcgggagacacccagcacatccagcgagcaccacgctgaagaaggggggaacgaccccctgctggtcgcaccccactgcgtgcgacacagccccacttactcctgggagccaccagtacgacaatgcgcgcaccaccacaccgccaaaaacacacggggcgacatgatcattacaaggagacgacaccagaaaaccactagccatagagaggaaaccaacagagaaagaaccaaaccacaaagacggtaggcaaaaaccggccataaatgtcgcccccaccagcacgtcctcctttaataagggaaccacacaaaccaaaatgaca

SEQ ID NO: 565213 - DNA, 349 bp, Homo sapiens
  misc_feature (104)..(104): n is a, c, g, or t
taagcttctgcataggtttgcagtaaggtcttcttttttcaatataaaaggaaagtgtgttgttttctgagagaagatagatgatagctttctctgaactatcnactgggtaggggtaagtcttgatacactgttaatattttgtaataatttagcaaaacattatttttttaaaaaaatagtttttaatgctttatccaaactgtaactatgtcttttgtaattcaaaagcagtactattttccttctaactgaagattttgacaaaaacttgagtctgggaggtcatgagccatgactgtgtcactgcactccagcctaggcgacagagtgagagcctttctccaaa

SEQ ID NO: 565214 - DNA, 195 bp, Homo sapiens
tctagaggatcccgtgtgtcgagataagcagggaatgtactagggatgtaaaactgcaaacttaaaaacctgcatcttcttgaagcattcagttttactataccaaagtggtttagagtcataagatgacctatttttatataaagagttatattatacgaataaaatgttcatacgcattagactgttaaggat

SEQ ID NO: 565215 - DNA, 200 bp, Homo sapiens
acaagacgctacttcccctatcatagaagagcttatcacctttcaatgatcacggccttcataatcattttccctatcttcttcctagtccctgtattgcccttttctaacaatcacaacaatacttactaatactaacaactcaaacggtcagagaaaatgggagaccctctcgaactcatacccgcccgccacacata

SEQ ID NO: 565216 - DNA, 901 bp, Homo sapiens
gagcgggttggagtttgtcctcggatcagtgcggagctaaaaggagactgtgagcagaggcctagttgcctggatgataactagttgtctcccgtcgctcatctcttctcctgtccccgctaatctctggtcacatccttttcgtactccgactccctcgtctcagtcgatgggcacattggacgtgcatactgatctgcgagttcaacttgagttcccgattccgatcgtacactcggatctggtctcgtatcgtgcagtccgaggccgatccgtggcaccgcacgtgagagaggagagcagccctctcgtgaagatggtgacacacgtaccatgagaggtacaagcagaaatgctggcagtatcagtgcctggtgtccggtgggatcgcatactgcagttatcctcggccaagagtatcgtgaaaggcatatcgtctcggagtactgtcctttcagggtgagccaacagggcatagcatgcatgacctgactcatccccttgcgctgaattgtaacacgtggttgcactacaagtgggtggcatgtcctgtataccacgtgcacatgcctcggtcttgtttctgcggagtgactacagcatacttgcaggactatgctggcaatgcatatcagggcttgccggattagtgcacatggtcatgcttccctgcataagttacactatgagaagtgtggacacatacctggtttacaatagggcacgtaacccttggagtaaggtttactaccaattccaacctccgttgatactcatccacagaaagtctctttaccataaaagttaagcaattgaaataggctttgcaaattggacgcaatctcttgaaacgcagggcagccctgggttgttgcatttattccggggttctttgctgggg

SEQ ID NO: 565217 - DNA, 624 bp, Homo sapiens
gtatatacctcagcctgcttgcacgcaggcacatgtaggcactctgcacaccggagatgcttgcaaagacacacaggcacccccatgtgtccacaggccccagtgcaccctcaggttcacacacatatactcacataagtaagaatatgttcagtccaggaattatatagccaggtggattgcaggagcagggaggagttctttcaaatgaaaaataaaatatgggcaaaggaaattctgaaacagctttaaaagaaaaaaagtagaaggagccaagccaacatcttagtgcttctgatgctatcagattggagtgaactaacatgggggctcagtcttgttcctcagggttttgttctcctcttggggcacatccagccctctgcctggcagggcccagcagtggggaagagagaggaaccctggcctgcgctaggagcatcaggacagaggcagccctgcccacagcatgcccaggtcctcactgagcctttcacgcacagggattgctccaggctctgaactgatcccatggtcaaccatcgtttacctgtctgtccagagggatcggtattgtagctccagcacatgggctctgggaccaggctgctcgggttcaaatcc

SEQ ID NO: 565218 - DNA, 164 bp, Homo sapiens
  misc_feature (35)..(35): n is a, c, g, or t
  misc_feature (50)..(50): n is a, c, g, or t
  misc_feature (105)..(105): n is a, c, g, or t
  misc_feature (162)..(162): n is a, c, g, or t
ctgcttcaccatcctggcgtctaccagcctggtgnggctgggtactgtgnatcgtcttcctcaacaaatgcgagacctgccaacctgcactacaccacatccgcncaagaagaagaacctgctgcttcatacaacacggggaggccctgtcattaacattantt

SEQ ID NO: 565219 - DNA, 972 bp, Homo sapiens
  misc_feature (27)..(27): n is a, c, g, or t
  misc_feature (34)..(37): n is a, c, g, or t
  misc_feature (738)..(738): n is a, c, g, or t
aacaagggggggggagaaatgaaaaanaagaaannnnaaatcctgggcgcgtgactggtttattacagttgaaaggatacagattaaaatcagcaatgaagaaaggcacataaggtaaggtccaagagggcttgcaattatcctctcctggcagagtcttcaggataatgcttaattctcccagcaatgatgtgtggctacaatgatgtgtgcacagagtattaccaaccagagtagctcacccatgcctaggggtgcagggcttgtactagggattgatcacattggggggcttcactgcccacatgggtaacttaatctcctcaacttgaccttgcaagggcaagctgatactgcatgggccaagggccacaggtaaacaaaaacactcttatcaggcaagatattctaatgggcttagagggttatctcccaagagccaggcaggggcctatattttatttggaatggtcaggggtcaaacatcccaaggtattgctgtttcacaaaagaggatgaacttaaaaagggggattttttgggcaagggggggtgggttcacaacttgtaattcccaaccccttcgggaggctaagaggggaagaattgttttaaacactgattttagcccaggctgggggacctaagggaaagcccttttcttttgaggattttctgaaaaggggggctgtttaggtgaagtggctcccgcgcgttatgtacagggaggagaaaccncgcaaacaccttgtggtagggatcgccttaggaacaccgtgctccctggttcgtggtgggttgatacgggagattcgcccagttggtaacgctactaccggcagagaggttgtggtcaaagaggaagggggagaaccagtggagccctcgcggcggagagtgtcggggcatgtgcggggtctattgaaggtgtgtagtggttcttcttggaggggatagggtggcggcgcgcgt

SEQ ID NO: 565220 - DNA, 220 bp, Homo sapiens
tcactgtttggtatatcagccagatttctaaactcaagggagatcgttgggaagtctccagcactgggatccttctccttgctctccattggaaccgcccagtctgttggtaaaggaaagagtgaaagttgtgtaacagcgggaccttcttttccacactgatggtcatgtcatcttccagtgtgtccagagctcggagaaccagataaaatatgcacac

SEQ ID NO: 565221 - DNA, 703 bp, Homo sapiens
gcagagtgggactgtctgggtagtcggaaagcaagcctagcgtggctcactatgacgtataatccttttcttttcaagatgcctgaggtaaggtgcaccaaggagaggaggacggtggagactttgcctttcagggcgagaaaagttgtgcccaagctcatgtccctcattcatcaataccttctattccaccaaggagattgtccttccgggagtggatctctaatgcttctggatgccttggacaatgattcgctatgagagcctgacaagacccttcgaagttggacagtggtaaagagctagaaagttgacatcatccccaacccgtcaggaacgtaagcccgtgagcttttggtagacacaaggctactcggcatgacacagaagctgatcttcagtacaattagatttgggaacccagttgccaatgtctggtagctaaaggcgattcatggtaggctcttacagggcgtggtgccagacattcttcgcattgatttgggcagttagcgtgtgggctctctattctagcctacttggagggcctgagaaagtggtctgtgatcacaaagcacaaggattgatgaacagtatgccttgggagtccttctgctggaaggtccttcactgtgcgtgctgaccatggttgacgcccatggcacggggtaccacaggaatctcatgctcaagaagatcagac

SEQ ID NO: 565222 - DNA, 121 bp, Homo sapiens
  misc_feature (69)..(70): n is a, c, g, or t
  misc_feature (116)..(116): n is a, c, g, or t
agtgctgttgcccaggaggaggaccttgagcccactagaaggccaccattggtgcatgtgtggtgtggnntatggattcctgaggtcagtattggttgggcagagaagatggagtngatca

SEQ ID NO: 565223 - DNA, 774 bp, Homo sapiens
  misc_feature (8)..(8): n is a, c, g, or t
  misc_feature (76)..(76): n is a, c, g, or t
  misc_feature (83)..(84): n is a, c, g, or t
  misc_feature (126)..(126): n is a, c, g, or t
  misc_feature (132)..(132): n is a, c, g, or t
  misc_feature (143)..(143): n is a, c, g, or t
  misc_feature (146)..(147): n is a, c, g, or t
  misc_feature (162)..(162): n is a, c, g, or t
  misc_feature (186)..(186): n is a, c, g, or t
  misc_feature (195)..(195): n is a, c, g, or t
  misc_feature (199)..(199): n is a, c, g, or t
  misc_feature (268)..(268): n is a, c, g, or t
  misc_feature (279)..(280): n is a, c, g, or t
  misc_feature (319)..(319): n is a, c, g, or t
  misc_feature (329)..(329): n is a, c, g, or t
  misc_feature (357)..(357): n is a, c, g, or t
  misc_feature (376)..(376): n is a, c, g, or t
  misc_feature (397)..(397): n is a, c, g, or t
  misc_feature (422)..(422): n is a, c, g, or t
  misc_feature (424)..(424): n is a, c, g, or t
  misc_feature (439)..(439): n is a, c, g, or t
  misc_feature (507)..(507): n is a, c, g, or t
  misc_feature (556)..(556): n is a, c, g, or t
  misc_feature (563)..(563): n is a, c, g, or t
  misc_feature (584)..(584): n is a, c, g, or t
  misc_feature (652)..(652): n is a, c, g, or t
  misc_feature (665)..(665): n is a, c, g, or t
  misc_feature (675)..(675): n is a, c, g, or t
  misc_feature (679)..(679): n is a, c, g, or t
  misc_feature (683)..(683): n is a, c, g, or t
  misc_feature (761)..(761): n is a, c, g, or t
acatctanggcacaagtggagaaactttaaaaaatgttgggagattctttttattaagaatttaatcacacgtagngatttgnnggggcacttatggagttctcagcaagtcaatagttaatatcnaaagancgcgtaggatntgnnatcattttctctaantctttctcatgagaattggaaacnacttcatgntacngggacaaaaagaaaaaaccacttactcctcagagagattattttcaaggagttgaaaaaagacagtggnatacacatgtnnaaccagggaaaacaagcattccttagagagatacctgcngggcttacgngatttcaaaggaaacatgccattgactnatttatgagaacctatggnttttcccttttctcgggttanacatttatttgagacaatgcagggngngggctttgtgaaggnaaaagggagaatgttcaattccctttgatctgtccttaaaaaatgacctctttggcagggagtgtgcntgtcctcagcggggagagagtttttaagttagtattttgagttttaganttagtgnaaagggcagagggaggcgcangggccgggttaagctctacttctctctctagagaagaagctaagaagaatcaaaggtttaaatcaggnagtgacttccaangacatgcttngaantctngcccaagccaagaaggaatgctgggatcggttcctccaggagaagttagcttcagagttctttgtggatggacttganttctgatgagagg

SEQ ID NO: 565224 - DNA, 293 bp, Homo sapiens
  misc_feature (162)..(162): n is a, c, g, or t
aggcaggcggattacaaggttaggagttcgagaccagcctggccaacatagtgaaaccccatctctgctaattttttgtatttttagtagagacggggtttcaccgtgttagccaggatggtctcgatttcctgacttcctgatccgcacgcctaagcctcncgacagtgctgggattacaggcgtgaagccaccgcgcccggcccctgttttgttggttttttttttgacactcgctctgtcgccgagaccacgccactgcactccagcttgggtgacagtgagactctctg

SEQ ID NO: 565225 - DNA, 130 bp, Homo sapiens
atctacaggatctgtgctgtgtctcgaagtgcacgtcacggcagtctactcggcttcggcttcacagcgcccaggacagtgccctgctctactaccgggcgtcccggatgggctatgccaggtgtccctg

SEQ ID NO: 565226 - DNA, 1049 bp, Homo sapiens
ggcgtttgctctgcatgttcttcggtcgcccggttcactgcgccttcctggacacattgttcactaatgcccctttgagacaccacagggcttttccttagtaagctttctcccggcttatcccttagtttccacttccctgggttagccttggccgaacttcaaatgtgttttgtgattcccttaatgcccatttcccccgggccagaatgtgcccagcaagtgaagagggcctcaaactttggtatcctgccgtgcattgttttgtgacagcagcccagtgttgcctttacctgcttgtcaaaactggcaaagcatgtcatattgtctttacgcactgtcatgtgggactgaggttcttcagagaaagagtgtgacctgacgacacagtggttgtgacacccactccctgggcagggagttttgcactgtagcttgtcgagactgtcgattggttagtgcatatcgcttggtcactcgactgaaggctagttgcttgatccgcgtcacttgactgatacgtgcatatcaagagatatctagacttgtgttgcgcgggaagggcactgactgtactcatggctaacttacagatatttgacatatacggctgtccctctacaaccttcttagtcacacaggatccctgtagcctaaacagtatatgatccagctgccagagagcagactgctctcagcttgcacagcaccttaggcgagggaagaatatacggatagggaatggggtggacgcaaacggatgggaatgttgtcactaccaaggtggctttagggtcctcaggagtggagaatggactggcaactgcggaggtctggatggatcatgtgtaggagtatccctgtagataaattactgatcccccatctactatccccagtatgtaatggctgaattaatatgtaatcaactgcattgtatctaaagccttagaactagtcacggtgctccctccacccaataccatttcttaccctctaatcctacctgatcttaacaaagcattaatcattctagaggataatctctt

SEQ ID NO: 565227 - DNA, 280 bp, Homo sapiens
tctagaggatcccgttcattttctacacctcattatgggtaactatgcaacacactgattaccaaactcattgataactttaaaacactgctcagtgtttgctttcttcccagtgttattatcatcctgggtgacttcagtgtctagctggagcacttaatcaagctcagaagttccaatgactttcttctctacttatcagggctcaggaattatcagggctcccatgctaattcaaagaatttcttcactttgaaatcaattatttagacatctcatt

SEQ ID NO: 565228 - DNA, 116 bp, Homo sapiens
cgcatcttagatgatcaagctaggtctaggtattgatgaagatgaagcggcagcagatgaacccaatgctgcaattcctgatgagatcccccctctcgagggcgatgaggatgcgt

SEQ ID NO: 565229 - DNA, 338 bp, Homo sapiens
cacgaggtttttttttgagacggagtcttgctctgtcacccaggctggagtacagtggtgagatcacgggtcactgcaagctctgcctcccgggttcacgccattctcctgcctaagcctcctgagtagctgggactacaggcgcccgccaccacacccggggaattttttgtatttttagtagagatggggtttcaccgtgttagtccaggtggtctcaatctcctgaaccttgtgatccacccaccttggcctcccaaagtgctgggattacaggcgtgagccacagtgcccggcctgtatttggtgatattttaaaaaattctactttgacctta

SEQ ID NO: 565230 - DNA, 134 bp, Homo sapiens
agatatctgtctggatctctggttctggaacgttcacagcagatgatgactgcagcttcttttagaaaggtgtccccttgacagttcagaagtagtattagactgcactttgggtgccttagaattagattttc

SEQ ID NO: 565231 - DNA, 293 bp, Homo sapiens
gtaacatattgtaccaataagctctgtagaatccagacaagaataaattaatttaagtagctgatgcagacttttcttccttacccccaactaccatctgcatctgacaaaccgctaaagcagtttctactccttttcactcggatatccttcctatttcccagaatagtacccataacaaaggccagtatgaactaactctaaggtagagcacagagaactggctaaacatgtgtgttcaaattaagcactgtccttggcctgaacgatacaatctggtcatagtacaggaa

SEQ ID NO: 565232 - DNA, 959 bp, Homo sapiens
ttgtagacaaaaaaaaacgttgggaaaccgtgaccccactcgaccgcggaataagtggtctccccaggtctcaccgcggtcgcttcgcacacccggaattgtccacgaccaaggggacttctccggacagggaccaaacaaagcctccaagagtctctcggaacccgctgggcacagaagcgccccccggggagcgctggctgcccggccaggggtgcctcgccccccccgctgcattgcccccgggtgcccccttattggggtcccacgcggcccacaactgaacaaagcacagctccgcggtcaggaaaaaagtgtgggccccgcgttccgggataaaacctggaacggccccactttttcaagtgcatccgcaccaccccccatgcgaaatggggtccccggcgacaaacaccagctgggggaacagttcctgcggcctaaccacccccctggggggggcctccatgcactgttcgcataagcaggccaaccccagcccgcggggggtgatatcacaacagcccagggccacaacaaacagctccgggagccgccaacaggaccaccccacatgtcgcgccacaatgctgcagcaagggcgccagcacaatgtactcccccgaaagaggctgcacccccccgcgtttaaacaccgcggggggagacacgggttctcagacccgtggtgtgatctccaacggggcagcataagtgaatcagcataacacaggcctgggtgaagcagccaccagggcagctcgggacaccctgcaacaagtgaacagagtaaaaatcttttgggccccacactgggggatattctttgtcgcgatggccctgtcaaatgaacgaggattgtttaaaaccaccacaattttgaacggacaacacgcggcgccccacaactggcccccccatcttgggggccccctaacaaggtaaaagaccacaaaaca

SEQ ID NO: 565233 - DNA, 477 bp, Homo sapiens
  misc_feature (20)..(20): n is a, c, g, or t
  misc_feature (67)..(67): n is a, c, g, or t
  misc_feature (91)..(91): n is a, c, g, or t
  misc_feature (188)..(188): n is a, c, g, or t
  misc_feature (327)..(327): n is a, c, g, or t
  misc_feature (423)..(423): n is a, c, g, or t
  misc_feature (472)..(472): n is a, c, g, or t
ctcacacagtactggtgggnctccagcgcaacaatggcgatgatgacttcgattacttgcgccaatnggactccatctacctcgacaactncatccagtacagcgacttcaactcgccgaaggagaagtcatggcaagtgcgctacgacctggatatggagtctttcggtgtgcctgggttgagcttnatgactcgatatgcccagggctgggatgccgactacagcaaggccaacgaagtctatatgcgccgtgatgacaacggcgatccgttgaccaaccagaagcgctgggagcgggacatcgaggccaagtacgtttgtgcangactggatcactgaaggatatgtctttccgtggtcgccaaatgaccacttcgcgcgaacgattacgaagtcggatctggatgaagtccgctgatgncgaagtaccccgctggaaagtctctaacccttggcaaaccgggccgggntgaat

SEQ ID NO: 565234 - DNA, 104 bp, Homo sapiens
tgtgcgatatactggagctcatagtatgtcttttgttctgctgctattagtatcctttctttatccttgacctttgcagtattattattaaaactgtcttgcag

SEQ ID NO: 565235 - DNA, 162 bp, Homo sapiens
ctgtacggcgtcgttttgctcagtcgggagtcgtcactaacctgacggatttcagtatagccaagttcatcagaaagactcaaatggaatgatttacaaaatagaacactttaaaccaggtcagtcctatctttttgtagctgaaggctatcagtcataaca

SEQ ID NO: 565236 - DNA, 445 bp, Homo sapiens
  misc_feature (233)..(233): n is a, c, g, or t
acaaagcgtagtaccatccattcatgcttcgggatgattagtaagcaagacaatggcataccatgtgcttccacttatgaccacttcccaataatgccggccactatcaataaacacatttccagctactccatagctcccctgagctggtgaagacgttcagtgtgtgtgactacttcttggaatgatgactcatacactgttctacatgtcaagattatcatgtggacacncttcagattttcgcatgcagcagattatgggatcccagtttaagatggtatgggctgtttggtcttcaagcttcccagagctcactgactgcggctgcccgcctggcttgaaatggccttgaccatgacagatgtacttcggtgccgctctggcagaccggtgcaccgtgtcagtggttctagcttgatcgttgggtactacgcttgtggca

SEQ ID NO: 565237 - DNA, 356 bp, Homo sapiens
taccgggtactgcactgaccagagtggagaggacagaaagacaagcttgtaggccatcacccaactgccttaggaggcttaggatagtccatagaaagactaatgtcaccagaagcagaaacagaagagagaagatgtaccaggtagcagcttgtccacagggatctgacgtaaaggtgctttctcatggaagcaaattaataataaatgctgtttgtgtgaaacctccactgtgccaagcattaggtcaggtgactgtgaataatttaacatttattcacagatagcatgaaaagccacagtccatttgccatttagcttatttgattgagagaaaactgaggcacaggaaggca

SEQ ID NO: 565238 - DNA, 338 bp, Homo sapiens
tccactgcaagcaataaaggtgctgtagggcttagtgtttaaaagttcctaagcagagcctgggcatagtgcctcatgcctgtaatcccagcacttgtgggaggctcaggtgtgtggatcacctgaggtcaggagttcaagaccagcctggacaacatggtgaaaccccatctctactaaaaatacaaaaattagccgggtgtggtggcgggcagctgtagtcccagctactcaggaggctgaggcaggagaatggcgtgaacccgggaggcagagcttgcaatgagctgagatagcaccactgcagtccagcctgggccaaagacccagactctgtc

SEQ ID NO: 565239 - DNA, 489 bp, Homo sapiens
accctttccgccgctcccgctcgattccactgtggtgactagtaaccacctgccccgcgacttctaatataaaacgtcacctgctgttcacgaggggagaagaacccacggaaaatgaccgtacctataaaacgatgcttcgctagaagagaaaaagccgatgccaactaaccgcctgagacgactaacatacgcacctgaaaccccaaaacaccgacaaaacaaacgcccgcctcttaataaacagtgcgaaaaaacgcgatacgttgtaccacccactatcgaaaacggcccacccacaacaaaacccgagaatccgtctaccaaacccaatctaaaccccgttcggcaaccacttggcaaccgtccgaaacacggctctagttttccccccgcaccaattatacaatgaacgacgccactgttacaaaacacggccacttttgctaccccccccgataaaaactagggcccacgtcgaccccccca

SEQ ID NO: 565240 - DNA, 727 bp, Homo sapiens
ggtgcacactctaatcccaactacgggaggctgaggcatgagaatcattgaacgggaggcagaggatgcaggagccgagaggtgcacttcactccagccggacaacagagcagatcgtctaaaacaaaacacaaaaaaacaaaaaaaaaacaaaaacaaatttgggcggccggcctcggaaaagttaaacccctcgtggggccggggccaagtaaggaacggggcaggggtcccagggaccccgggcgacaggggggtccccaaaaaaaaggccgggggacccgggggttgtagaaaacaccccagagggggagtcaggagggaccacagcgggacctatcacaagggagggccaaaagaggagcaccagattaacaaatttacggccggctcggggagtactacatcgacagacaaccacagagcgccaacagacgtagcagcgcgagcgacaacgagcgcgcaaacgtagacggcaggaaacaggacagcgagccggcagagcgaagacgcgccagaagacgagagcaacgacaggcgcagacacagacagaacgacaaaaggccgaacgccagaacagcaacacgaaagcagaaagacaccacaaagaggcgagaacagaagaaaagacaacaaagcaaaagagcaaacacagcacggacacacgcaaggcagaacggagacagagacgcaggaaggagggacaacagagagcgggcgcaccaa

SEQ ID NO: 565241 - DNA, 523 bp, Homo sapiens
gtcgacggtatcaataagcttgattctggtacgggagtggggcttggggcctcagggtgcagctatatgtgggcgtcagaagtggcattagtgctatccacagacaacaaaaacaaccctattggccacttgtgggcttctataggggtggatgatgccttgatgatttccttggatgtcatggctaagccattgttttttggcagctgcagcttctgaagatgttactgagagccacagagaaagtgaagacggctaagacaaccaggtcatgcgagacatgcccaagacgcccagattgcttaaaagacatttgggaaaagggagcatttaacagttctttccacgaggatggataggggacaaaaactaaccttggagagcctaattttttcatttcccaggccgaatatgacttgaaaacaaaaaaaatcacaggtgttcaggaagaaaactaaaattggctgaaaaaatgtctctgcttttactggtgatgcaatacaaggcatcatccatttagaag

SEQ ID NO: 565242 - DNA, 237 bp, Homo sapiens
tcgtcgttttgtatagctttatgatagctaatgaaaattagaacgtttcctgggatctactgtacaaggatttttaagaaaatcttaaaatgccttttcttcaatgaagccactcttcggagttagtcattactctctccttatcagttatcttgacttcaacccgactattcctcttcttttggtccagaaccctcaacatttacagagtagcttgaacgttaacggaaaggatca

SEQ ID NO: 565243 - DNA, 262 bp, Homo sapiens
tccaagccatttcaggatggtggcctctgcttcctaggagctgtattcattggccgtataagcagatccactttggagttgttaggcttgtatgggttacccggtgggcggtagatgagctttggcccgtatggtgtcgtgggaggcaaattcaatatcattggtgcgcgggggcgcatgtcagccacgcggagctctagtctagggggtctgtcagtgacttgctctccctcctccctctgtttggccttattgtcctctt

SEQ ID NO: 565244 - DNA, 1118 bp, Homo sapiens
  misc_feature (1087)..(1087): n is a, c, g, or t
ggcggaggcgcgcgcaggtgctggcggactggccgctggtagcagtacgcagcgccgcgggcccttcaggagtggccgcagtccggagctttgccctcgcatcctgttccaggcgcgaggctggtgtgatgtggctgggagccatctgtgggcgccatggcaaagagggaggacagccctgtgcccagcaggtccagccaataggacatagcagttcctggtatgcagcatctgcctggatcgtgtacctagtgctcccaaggcttcttccttgaccttgcacactcttctgtgcagagatgtctccaaagagctatatcccatgacccagcagccgtgacgcgtattcctgtccagtatgcgcggcagactgtccatccatccgcgagagtcagggacgtctcgagcgacgtgcaagaacgaacgttcttcatcagacagcctcatggaaggcaaattgcagcgatgtgcaccgtgattggtggcccagcggacgcctgcgaggaacgcttccgcgatcactccatcgagatgtaggtacggcttgtgccgccatcatcgtctcttgtcgccaaacatgcaaggcaattgagcgcatggagtttaaactgttgcagcgcctgtgcatgacggacactggatgtagtcaggtgaccgaagcccggtggacgacatacgttccacgtcacttggccaacagatagccttggctgcaggggcactcgtgggatgcggagacacgtcaccaaacgagtcggcggcccctttccaggcattcaagccgttcgggacgcgcttgtttggcagttgagccccgcaatttggcccactaggcatcgatcccggcagactcagtttggcccttctcacgattcggggcggatgctcattccaaggccctaagaccaaggcatatgtgcccgggaaacttgtccaattcgtgcaagacaggtggcgccccttggggctcgcaagggaaattccatgcttaggcatagcctagtttagccagaagcgagaccccccttgtgggcacgcccaacacacacgctttgggacatcgccaaggcgtgaccacaggcacccngcgcctcattggggttctaggaggaaccccg

SEQ ID NO: 565245 - DNA, 325 bp, Homo sapiens
cctgaaggagacggtgcgccaagccctgcaggagacgctgctccgggaggtggtgcggaaaatcctgctgctgcagagctggttccggatggtgctggagcgtcggcacttctaactccatcttctttctgtcactgcgcacccccgaatacgggggccagcgatttgcataaccaaatgatcaagagcatcaaaggattgcctggcagggcgaggacccccgtagccttctccagtccctcagtcggctccagaaaccccgcgccttcatcctgaaaagtaaagttatcaaacaaaagcagatcattccaaaggtaaaaaaaaa

SEQ ID NO: 565246 - DNA, 434 bp, Homo sapiens
ctgagcctcctgagtatctggcgggagggttgcgtgacgccaagactggctagttgtgtcgcatgtcgactaagacattttatgcgaggcctcttcagaaaaaaccttaagggaaatctgatggtgctcagtgaatctaagtctgcctaaacgcgatcctctttagacgtgcttctagatagtatctctgttggccttgcttagcctttttctgtttccacttcaggtggctccaatgcgcgtttgttgtttcataacgttgagtgcttggggtttgacaggtagtgacgtgtagtttgacactgttaacttgttaaaatacagtgaacagagttggctgacgctgaaggaactgctgagaaggatggtaactgactttgtacgaataaaagctcttgcttagaaaaagaacacgataactaggacaaagattg

SEQ ID NO: 565247 - DNA, 480 bp, Homo sapiens
  misc_feature (461)..(461): n is a, c, g, or t
actctagagatccatgtagaaggtgttagtgatctgattcgaactgtgatgttctttgaaccttctctcttgagtccagagaaagaacttcgtgatattgtcttagtgactctagggtgacacggtactgcaatcagcttcataaatcgtgtcttctttagactttaatttcacatcaaaacacactgtagcatttatgcatactgtttcctttccctccatatggcagtttttctttggaatattcactttatttggctcaaaattcatggtcactttaactacggtcacatctcgggaccagaagagggcagcaccaccaaggcccccaatagtcacacctgtcagaccgtcaccatttaaatccatttctccgtggatagactgggcaaaaaatttcagtgtcttaccatccccacctgatggaatacgttgtgcatactctttccttatagtcttgncacttccatgatacatgtc

SEQ ID NO: 565248 - DNA, 595 bp, Homo sapiens
  misc_feature (43)..(43): n is a, c, g, or t
  misc_feature (76)..(76): n is a, c, g, or t
  misc_feature (82)..(82): n is a, c, g, or t
  misc_feature (112)..(112): n is a, c, g, or t
  misc_feature (115)..(115): n is a, c, g, or t
  misc_feature (147)..(147): n is a, c, g, or t
  misc_feature (175)..(175): n is a, c, g, or t
  misc_feature (206)..(206): n is a, c, g, or t
  misc_feature (234)..(234): n is a, c, g, or t
  misc_feature (241)..(241): n is a, c, g, or t
  misc_feature (244)..(244): n is a, c, g, or t
  misc_feature (259)..(259): n is a, c, g, or t
  misc_feature (263)..(263): n is a, c, g, or t
  misc_feature (268)..(268): n is a, c, g, or t
  misc_feature (272)..(272): n is a, c, g, or t
  misc_feature (281)..(281): n is a, c, g, or t
  misc_feature (283)..(283): n is a, c, g, or t
  misc_feature (288)..(289): n is a, c, g, or t
  misc_feature (297)..(297): n is a, c, g, or t
  misc_feature (320)..(321): n is a, c, g, or t
  misc_feature (336)..(338): n is a, c, g, or t
  misc_feature (380)..(380): n is a, c, g, or t
  misc_feature (396)..(396): n is a, c, g, or t
  misc_feature (421)..(421): n is a, c, g, or t
  misc_feature (424)..(425): n is a, c, g, or t
  misc_feature (479)..(479): n is a, c, g, or t
  misc_feature (487)..(487): n is a, c, g, or t
ctagaggaccctgtgtacaccaaccgcattgaatttgataccnactattccacagatgatgacattgtgtttgagnactttncccggcttcggctgaaggggatgaaggatnacnactatgatgatcaactctgctaggaaccgggntgggaagaagggaggggatggggttggnagaggtgagggcaggattaagatccccactntcaatgggggattgtcccagcccatctnaccttcncanaacctggaagcttcntcanccaancccntcacactcncnccaanncccccccnagatacacactggaccctctctnnctgaatgtgggcatnnnttttttgactgcagctctgcctctccagcccccccgtgggtngcaagctgtgttcatncctaaattttctggaaggggacacnccnnagaggagtgacaggagggaaagggggacccaaaactcctactctcaacctcacnccaacacntcccattatcactctctctgcccccattccttcaagaggagaccctttggggacaaggccgtttctttgtttctgagcataaagaagaaaagtaaatcttttagtaag

SEQ ID NO: 565249 - DNA, 338 bp, Homo sapiens
  misc_feature (222)..(222): n is a, c, g, or t
  misc_feature (230)..(230): n is a, c, g, or t
agcggctggaccaggtccgactctatggtgcagtgcatcatagaggagtagtgagagctcatcatcgcgaggtgggcagagatgcacttggagatgtgcttgaaggacagggaggaggagggtgcctgcatgtgcttaaacatatatgatccggtagtgtcggtcgaagaggagtcagtgaagagtaaggggtggtcagaatctcctactctcaacctcacnccaacacntcccattatcactctctctgcccccattccttcaagaggagaccctttggggacaaggccgtttctttgtttctgagcataaagaagaaaagtaaatcttttagtaag

SEQ ID NO: 565250 - DNA, 603 bp, Homo sapiens
ctagttctagttcaagccaaccccatggcctccatgactttttcaaaaaaaaaaaaaaaaaaaaaaaaaaaaaaaaaaaaaaaaaaaaaaaaaaaaaagggggggggggggggaaaaaaaaaggaaaatagaggagacaaaagaaaatagacgcgaaacaaccaagcacatgtcagcacaccaatttggaccgcacatcagaaggagaacaaaacaagagaagaacaagcaaaaaagggcgcgcataggtaaaaaaaacaatggtaatgagcggcaaaacacgcaacacaacacgctgaaggagaactctcagaagaagaagaaaccataacaccactatagaatgagacagagaacacacataagcgagagagaccaaacaaaaatcacaacaaactgagaataaatcaaaataaaaccccaccaagagcaaccatatactaatataataaagaacaggaataaaaggagggagaaacacacagaacaacacagcggaaacagtcagccacgttcgaccagacaactactaccaataataaaagaaaaaaacgaaatacgacaaaacaaataataacagacaagcacaaaataaagagaaag

SEQ ID NO: 565251 - DNA, 347 bp, Homo sapiens
  misc_feature (9)..(9): n is a, c, g, or t
  misc_feature (68)..(73): n is a, c, g, or t
  misc_feature (91)..(91): n is a, c, g, or t
  misc_feature (107)..(107): n is a, c, g, or t
  misc_feature (127)..(127): n is a, c, g, or t
  misc_feature (152)..(152): n is a, c, g, or t
  misc_feature (161)..(161): n is a, c, g, or t
  misc_feature (163)..(163): n is a, c, g, or t
  misc_feature (171)..(171): n is a, c, g, or t
  misc_feature (204)..(204): n is a, c, g, or t
  misc_feature (240)..(240): n is a, c, g, or t
  misc_feature (247)..(249): n is a, c, g, or t
  misc_feature (254)..(254): n is a, c, g, or t
  misc_feature (258)..(258): n is a, c, g, or t
  misc_feature (269)..(269): n is a, c, g, or t
  misc_feature (294)..(294): n is a, c, g, or t
  misc_feature (296)..(296): n is a, c, g, or t
  misc_feature (304)..(304): n is a, c, g, or t
  misc_feature (326)..(326): n is a, c, g, or t
  misc_feature (328)..(328): n is a, c, g, or t
  misc_feature (337)..(337): n is a, c, g, or t
  misc_feature (339)..(339): n is a, c, g, or t
  misc_feature (344)..(344): n is a, c, g, or t
ccatttgcntccttaacattttccatgttaagttcatacatgtagatatgatcagatttaccattttnnnnnntttgagggaaaaaaaggngtatttatcatcagcnagatgtgctcactgtatgcnccgttatttatatgcaaggcccggntgactggcngntcagtggncaggcattttaataaactggacagccatttgtntctgcacgacaaggcatctttacacaggggccatcnggtgccnnntggcnaccnccaagccctcngcactgcaacacgccaccttaacancnaaccagcnttactcaactgccacaccactncncctagtgcncnccccnccc

SEQ ID NO: 565252 - DNA, 1385 bp, Homo sapiens
gccgcctagagtgctggccgagcgcggggctgggcaggcgagctgcggaggaggctggcgacgctgtggacagaagtggcggttgctgacgcctggaaattcccctgaaggttggagcagcaaccaaacccccttggggatcccaccccctgagaagtgccgatcaagcgtggacgaggcctaacgactttcttccggtactatcgagacgtctcataagagacgggcagcaagctgtagcctgcttagcagagatgcttggctgggctgtggtggcttggcacctgcacagggtgatctgttgagccacggcccatggatgatgctgacagatccagcctggcaggattgcatggggcgcatttgcacgcaccagaggaacggatcctgtggctgacaccagggccaagctactacggcgccatgggagtgtgtagcccaggcacctcgagttggatggcttccagacattgccaccattcggggcacaaagggggcaacaccaaggatagaacccagcaggacacttaggattgcagagagacccgtgggcaatttgaccagggtactcattatcaaaaggggcgacatacgagggtgccaaaggctgtgtcatccagaggggacttgtcagccacataatcttcatagtagcgatagatacctatacacccaggactactttatggcccacaacgcattggatagcccaagacttgggtggcccagaccccgggactggtcccagaagggaagaaaaagtcaggccctattcattaactggttagatacccgttcaccttgggaccgcgggggtttggtgttggggccttgaggcggcaagatttagaccagacacgacgttagtgggacaccggatctagaacaccgcccgtgtaggaattgatggcgtatgaaaaagacacgggcgaggggattccgcaaggtgtcaaccgtttacacaggcagaagaggccggtacgaaacggtggcacggagacacaacgcattacagatcgttggggagaaacattccgttgggaacacttggtgtgcaccagtcgggaacaggaacttccctgtacgagtgaacgaatgggagcaccccctcaaggagacgtttcccattcaaagtggggcggccagtttagcattgggacaggacgccgactagggttacaagtccggacgccgcccacttctataggaggcggacaattccggacaaacaaggggatcgggacataacaattaccattgaggacagattcgcgggaacaagttcaccatgcatatgagcagcgattgcatagaaagaagaatacacaccagaggggcagtacaaagacccaagagcagccccacggatatacacaacacccaag

SEQ ID NO: 565253 - DNA, 451 bp, Homo sapiens
  misc_feature (445)..(445): n is a, c, g, or t
ggcattaaatatttcaaactgttgtgcaacctccgctaccatccatctccagaactttttcatcctcccaaactgaaactctacccaataagcaataactccccactgccccttccacccagctcgtggtaactccaacttcctgtctctatgttttgggctactctagacaccgcctataaatagaattacgtgatatttgtctttttgtgcctggcttctttcacttagcataatgtcttccaggttcatccatgtcgtgccatgtgtaattcctttctatggcggaatagtattctaatatgtggatatcccatattttgttcatccattcatttgttgatagacacttgggttgttcctacctcttgactattgtggaataatcttgctagggtacatggggtgggacaaatatctgtctggacttccccgctttcaactntagaaa

SEQ ID NO: 565254 - DNA, 188 bp, Homo sapiens
gctctggagtaccccatgagtccagcttgttcaaagtaaaagtggcaatggctttgggatcacaaaacagcccttgaacatcaaagtcaattagtagaaacccctaaatatcatggggcaaaaaatatttcaaatttacttaaatattcggtttatcagatgggattgcaggcgtgagccacggtgtc

SEQ ID NO: 565255 - DNA, 265 bp, Homo sapiens
tatctcatgaggagagggaaccatgcagagacactgcatgaagctagagaacaacgagatgaccgaatctattccttcaggatctcaagaaaccagaaatgtgatgactgggagagcgggctgaatgcaatgaagtgtgcattacatttggccaaacatgtgcatcagacactacatggacctgcacacactggccactgaccaaactgaaccccattagtgtgatttcatcgcgacacattacctgcatgagcggtaaaagctt

SEQ ID NO: 565256 - DNA, 146 bp, Homo sapiens
gggggggcggtggggcgggggataggagtgattgctaatggggtcaggcttctttttggggtgatatgttctaaaattgattgtgatataattcacatgctacaatgcactcattgaaagggtacaacaatttttagaatttttag

SEQ ID NO: 565257 - DNA, 427 bp, Homo sapiens
atcatttgtggctctggttttatggtttatatccgatattgtcactgtccagtctcactgttcctaatgccccctagtccttcaggcatcacagatttgaagtgtctttggtatctgatgcctttcttttttttgtttgtctaatgatatcattgaattaacctagtccaatcatctgtttccaaaaaggatgccgcaaagtacactggaataagattctagcttcaggcctctgaattatcttaaagcctactctagtgtttaatcacctgaatcatcagggagtttcttcttccatttcatgttattattatattttcaaaccatttgctctatatgggccttcaggagagggccatatatcagcctcctgcagcctgcaaagttggtgccaggctgctccattgctcattgggttccgatgggg

SEQ ID NO: 565258 - DNA, 172 bp, Homo sapiens
acttctattttattggttctgagagggaggattcacccaggggatccttttccctacactctccccaccaggctggtctcaaactcctggacttaagtgatcctccctcctcagctcccaaagtgttaggattgcaggcatgagccactgtgcctggcctcagctttgagtg

SEQ ID NO: 565259 - DNA, 823 bp, Homo sapiens
  misc_feature (662)..(662): n is a, c, g, or t
tggatactggcctaacttgcttgtgctgtaaaattaggttaacggggaaataactggaggagtgagggctaggcttgggtttaagggttcttagtgaaattttcagtgaacaatccaaggcttatttgggttaagaacagggtgttttaaatctcagtgtagggtggaataaaaagttttatgagtggggactttctcaaactattttctctacaggcttttcagtgtaaatttagtcttgggtctcgtgaaacttctctaagggaattgggtactttttcttggaaatttattccttattccctcgtgggcagctaaggggctcttaccagcgtttaaaccacaaatttttttcttaaccaaaattactactattataacctacggttccatgtccatgatcccttcttttcctccccaccctgaaaaaaaatgagtccctatttttccggggagaggggggggttgctccgcaacaaactgttgtgtgtcccattcacacttggggctgtggcatttctaactgaggaggcccagttgtgtgtgggcttcatgcttgtgggtcccattacactgtaggtgtgtggttcccaatcacttgtgggtgtaaggagttcgttggagcccttatacgcggttaaatgggccctaatcttctattntggggggccaaatacctctggttcgcttgttgtgccccctcttcttggggcgtttggaaagggggttttggcccccgttaggcggctttttgtgccccagcctctttggagcctgaggggggtgttccccgggtgggggcgcccctatgggagggcttaag

SEQ ID NO: 565260 - DNA, 232 bp, Homo sapiens
gaggatcccgtgggcgacggggtctcaggaggggaaggtcacaatggtattggtcatcagtaaagggtaggaactgggctatattcacgttcttttgggtggctcttcgagtggcctcaggccatctggatgtataagtgcaggcttgggctcagaagcctgagataggtctcatacctccctaaaatgtataaaaccaggctgtgcccccagttcacttcaggggcaatgg

SEQ ID NO: 565261 - DNA, 338 bp, Homo sapiens
tcgactctagcaggatcgcgtcgacggtaccaacacaagagtatgagatatggtgaaaccatagagatagagaccagttctatggcttaaacatgctacatagtccaggcacaacgtagtgattaggcatccaacagtacgtacaataaatatcgttaaattggctggccgcaggagcgagaaaaatggtatggttggagtaggacccgagacgatgtgatggacatgagtaactccagctggcgcctctacattgatgtcgggaaactgagaagagaatgaggtcaacattgcagtgatgaaaatgtagccgtgacccttaggcagggtctcgaatc

SEQ ID NO: 565262 - DNA, 658 bp, Homo sapiens
  misc_feature (521)..(521): n is a, c, g, or t
  misc_feature (548)..(548): n is a, c, g, or t
  misc_feature (622)..(622): n is a, c, g, or t
ttgagtaccccaaaatgacacaaaaagtgttcatcttaaggagtgagcaggtgaaattcaattcaacaagcattgattatcttgttagtaccaagcacgctgctaaacactgaggtaggccagacattgttgtttttgtgactttcacaggcaaatggaacaatgacctatacatgataaattaaaacaaaaactcagactgatgctatgattaattctccaaatgcaaaatgctgtgaggtcagggcctgtgcctgcctagttcatttccaagtcccctgtatctagcatagacatggcctagcacagggtaggtattcctttgaatgattgtctaagtgctttacatgctttatcttatttcctaccaggtggattatatggtgtcttcattttacaactgagggaactaagtttagaaagagtaattcatttccccgtcacacagctactagcagcttagaccagggcttttcagcatcggcatcattgatatttgagctggatcattctttgctgcnggcaaggggccaccttgtgcattgtangaatgttggcagcatcccctggcctttagtcaccggatgccaagaacacactcttactcacttggaacagtcanaatgtcttcagatgttgctgtgtccctgagggggct

SEQ ID NO: 565263 - DNA, 339 bp, Homo sapiens
  misc_feature (47)..(47): n is a, c, g, or t
gggggttaaaattttttgggggggggccccccgaagcccccccccgngggggggaaggggggggccccccggggccccccgttttttttgggggttttttttccccccccccccccgggggtttttttgggggccccaaagggaaggggggggggataactttttttccccccattggggggggcccccgggggggggggggggggtcccccgggttccccccccttggggggggggaagggggggggaaaaggttttttgggttttttttcccccccccccttgggttttgggccccttttttaaaaagaaaaaaaaaatttttgggttttttcccca

SEQ ID NO: 565264 - DNA, 89 bp, Homo sapiens
aagtcccatcagcaacccgttttttaccagatgtcactcaagaatgcgcccgtggccctccagttcctgcgcactaagagcgtcccgct

SEQ ID NO: 565265 - DNA, 187 bp, Homo sapiens
cctaaaacctttttattttgttttattttgaaagatgagcctttgggcccccccctcccccttttttgtcccccaactttaaaagtaaaaaggcttttggtttccctgggagtgggtggaggcaaccaggggtttcctgtacccttactttagaccagttgaataaaagggcccccctttaaaatta

SEQ ID NO: 565266 - DNA, 558 bp, Homo sapiens
tgtatatgagggggtttgcttctgtcaaaatttaaaacattttctttatgtttctgattttccaaaaagaacgtatttcaatttgctcttttcatgtaaagcattaggaagaagtcttctgagctagccaaaatactgcgtttgaaattgcaaggtcagttcaggcactctgggtagtaaccatcaggtggcgccgctctacagcttttctaaacccaacatgaaacccttcagactttgaaataagcaaggaggttagagcaatcacaggaaactgatacagtcaccaaatacttaagctcaatgctatggctttcctaggtgatattaccaaaatgcttggatttctatgttcatactacctgttgtcattcctcagaacttagagaatttaagcagaaacgtgttttaactattctactaagaaccaaaaattttaatgtttgaactttcaagaaaaaaattttttttattaagtggtcctgagaaccttacaaaaactttctatttttcctttttaaaaaccaatgcaaaccccacttgggcttggcccagggt

SEQ ID NO: 565267 - DNA, 410 bp, Homo sapiens
aaaaacagaaaagacaagtgtgacctaataaactaaacagcttctacacagcaaaagacactagcaacagaataaacagacaacctaaagaatggaagaaaatgcccacacactatgcatctgatgaatgtccaatatccagaatctacaagaaacttaaacaaaataacaagcaaaaagaacaacaactccattaaaaagtggggaaaatacgtgaagagatgctttttaaaagaagacatacttgtggcaaacatatgaaaaatgctcaacatcactgatcattagaggaatgtaaatcaaaaccacaatgagataccatctcataccagtcagaatgcctattattatactatgcatctgatgagttccaatatccagaatctacaagaaacctaaacaaaataagc

SEQ ID NO: 565268 - DNA, 930 bp, Homo sapiens
cgtccctcctccgctccggggatgtttagacccccctgtgcaggtcctcacaagggacaccggcgccttttgtgtgaggcttcctatcctccaggggtgggccgacagattgggtatcttctgtgcacccggcgctctttctatgaagtgtgtccgctgcgaagaccccgtgatgttgggggcgaattatgtccccccgccggtgcttgctgtctcttcgggggtcctacaaccaccccgaagggcgtccctccctgatatgtgtccaggcaccgcccctggagtgtatcacccaggagagagttgtcgggacttcataagaaccatttctctgcgcgggctccctgcggcgtctttcatattgcgcaaaacgttgcgaaaggatgttactactattaccttctaacaaagaatcgccttactaaaatttgtattgtcctttcaacattgttcctaaggccatcctcgtcgtatttgtatatgagacccacattaataatcgtggacaacattgtacgctacgaaatagttctgcttcttaattcttccccgaccacgccccaatgtattctctcgtggaaggtgaagaaccttctgagaaaacaactttcctcgaaaggaacttgcgggtatctcacttacaaatttttcgacccaacattgcagaccacacacccagtgttctaggagaaacccgcttcctcctgtgtgctcaccaaaatactttgaaggagtaataataatttgtgtgctaactcttctcttctcgtgaatgacctgtggataccctgctcttactcctatggctatttctccaagtttgcaatacttataccacctctagaagttccaggacaattgactattttgataggttccttttcttcatttgtattactcctcaagaaaaatttggacaacccacaaaac

SEQ ID NO: 565269 - DNA, 835 bp, Homo sapiens
ggggtgttcggccctcgtggcgggtattttttagaacaccgcgtggtaaaggggttttttagcgcccacgcaaaccggggtttttttccccccccggggaaacaatcgtttccgccgccgctctttgtaggcgaaagaacttgtctttccgcgcgcgggagacgattacgcgccgggtcgtcccttgagcttgtgttccctctctgggaggaattacacactgtggggggcgccaccactctccccagtgatggggagaaagtgcgccctctcccgcgcttgggtccgtgtagtcaactctcgagcctactcctgcgctctccctccccccccatacgtgggtaaaaacttgtgaaagaattatgggaaaactctccccctgtgtgaataacaaggagtaaattctttggtactcaccaacaggatgttctttccgcaagattgtttcccccctccctatccacctctgtgtcgcgcgcaccaaaacacaccggttacccactatcttctccccgtgctttattaacaaggggtgaaaaagttgttgtctgaggcggcgcgaacaaaacgttccgccctctgtaaacgtgtaactagtcttctaaatggttaaccccccccccctcacataatctctcgcggccctacgttgtccactattgggtgaaagtgatgaattatccggggtgctctctaggggctatagaaaacaaggggtgaaaaaacctgggtttttaggaaaaatagccccgacccctgtattgtgactctttgagagactattcgccccctttttccctccaattaaatataaggaaaaaccccaacaaaaaca

SEQ ID NO: 565270 - DNA, 344 bp, Homo sapiens
tcatcatactatactgcaatcccattgaccctcaagattcaacagaccgtcccctccgcaaccgctcttcccccccaccccccaatctcatcccaaaaccgtctcatccgagcagtccgtccccctctcacccctcctcctcttctcagccctggggtacctcatcatcaaatctactcccccaaagtgtatccaggggctccacgcccgcctaccccaaccgattccaccgccattccggtgtcggggagggtcactcaccttcccggggaggcgctcaccacccactcactacctgcccttgtcaatcgatctccggcatctacaccctccgacccggcacc

SEQ ID NO: 565271 - DNA, 474 bp, Homo sapiens
ctcaacgctttatacttcatgcctactaattcatcttctttttttttttggagacagagtctggctctgtcccccaggcggggagtgcagtggtgcgatctcagctcacggcaacctccgcctccggcgttcaagcaattctccggcctcagcctcctgagtaactatgattacaggcttgtgccaccacgccgggctaatttttctatttttagtagagataggtttcactatgtgggccaggctggatctggaactcctgacctggtgatctggcccaactcggcctcccaaatgtgctggggattacaggcatgagccacggcgcccaactcaacttcttttttaattaataaaaggatcactcactcacgggcttcatatataatggctcttggaatatatatagtagacggcagtaaagtatactcactacatattattacttccttttttaaaaaaaaagggaagtat

SEQ ID NO: 565272 - DNA, 481 bp, Homo sapiens
  misc_feature (3)..(3): n is a, c, g, or t
  misc_feature (29)..(29): n is a, c, g, or t
  misc_feature (47)..(47): n is a, c, g, or t
  misc_feature (135)..(135): n is a, c, g, or t
  misc_feature (151)..(151): n is a, c, g, or t
  misc_feature (164)..(164): n is a, c, g, or t
  misc_feature (186)..(186): n is a, c, g, or t
  misc_feature (217)..(217): n is a, c, g, or t
  misc_feature (277)..(277): n is a, c, g, or t
  misc_feature (302)..(302): n is a, c, g, or t
  misc_feature (435)..(435): n is a, c, g, or t
  misc_feature (452)..(452): n is a, c, g, or t
  misc_feature (467)..(467): n is a, c, g, or t
ggnttgccggaagaacaccacaaggaagncatccacatcaggctggntggacagctccttgaaggttgccccagtcacagagcctccataaatgatacgggtgctctggcaccccaaataagggaggtgggactncagccatcctcggagnttctcgtgtactncctgggcctgttggggtgttgnagtcttgccagtaccaatggcccacacaggntcataggccaggacgaccttgttccagtccttcacgttatctgcgatgaccttggtctgntcgaaaacaacttctcagtgatgcnagtttccctttcatctagcttctccccaatgaaggggattactccgagtccctctgccagagaatgggcacttctgcccaatcaggtcatctgactccccaaagacatgccttctctctgagtgcccagggancacccacgtgggtccgnaggctttggatcatnccaggggttgatct

SEQ ID NO: 565273 - DNA, 307 bp, Homo sapiens
cggacgcccgtgaccatgtggaggctgctggctcgcgctagtcgccgctcctgcggtgcccttgtcagattctggcactcctcccgcagtgctgcgtaaagaactgctccagtacaagtttgagatgtttcattcctgaaaacccagcttagattattgaaggcacactgtgcaaagtagagaactaaattaagtacaaacggactccatgagtaggattacagaggatttgcattgcttggtggtcaccttggcattgaattgcttaataactttagccagactttcctaggtacacctaagctat

SEQ ID NO: 565274 - DNA, 231 bp, Homo sapiens
gttttgggtcccatcaagcgcggcagcagaggtccggagtacacgatgcggagactgctgcaggaaacggagctcgtgagcgctgcacctagcggacgctgcccaaccaggcgcaagtgcgattcctaaagagcggagctatgaaggtaaggtgctgatctgcgctttgcacgtctaaaggcatctgatcctatgggagatgtaaataccgtgccacaatgtgtgtggaaa

SEQ ID NO: 565275 - DNA, 660 bp, Homo sapiens
agctcggtaccggttcgcatgtcccaggctgagtgtagtggtatccctgctcctgcttctctgcctcccaggttcaagcgattctcctgcctggggctcctcagtatctgggattatatgacgtgcataccatgctcagctaatttttgtatttttagcagagatggggttcaccatattggccaggctggtcttgaactcctgacctcaggtgatccacctgccttgccatcccaaagtggggggattacagtcatgagccaccgcagctgtccggagcctgcgtttcttctaatatacagtggaggagagtaatttttgcattacctactttgcaggctctggagttagattgagcgcacctgaagctaaggttaaagatgatggctatgggcatgatgacagtcattgttcttctctggttggggactgattgatgatccctgatttctctgtttaaacgttgcccaaaacaaaggttgagaggtccttaggggagaggcgagataagcagaggtaggacttgcctttcttctgtgcttctccagaattagttgtgtcctgtggcatccacagaccaaaattgagcaatctgcttaatagttgagatcgtataattcgataaaatagggtttaattggcttatgcctttttatattc

SEQ ID NO: 565276 - DNA, 914 bp, Homo sapiens
ggtgacatgagagacaacctgtgtgctcagcctgactagatggctccatgcctctggtgggcgacgctacttcagatggcagtggcgggctagtaaccacgctgtggatccactagcggagcagactggctaccactgttagctgtcaagcttggtgcactctatcaccgcacttgatgggagctgacgtgtacttcatatgatgaggatgacgtggtcctggacccccgattccttggctgtcatcaccctgtcccactttcgtgcttcgacggtgctgaagatgcgaaacgacaagatgagaggatgactgagtttggagatatgacatgaaccatgcgtgattgtgtgaatggcgatgcatgatccatgacgtcagtgtgtggcacttaggccaccttgtttggagcgttgactagacaggtgttcgggagacttagggtaagcatactgctatcatcagacgtactgtggtccgagtgtgcttcttcattcatcgcctgatgttccagaggaagtatgtggcataagcgtggagaatgaatctatcgcgatagtgagcctgagggatcgttaagccagtcttattggcttccaggctggacgaagttgagttccatgtgccgttttcgtcctctggatgtatgtgccgggccactacagtactactgaggatagaggaggcgggtgccgagaacagaaagggaagttccacgatggggattggccctcggatgttcagagtgcctccatcggcagggggcagcctgaattctccaagcaaaccggggagcagtggctgccccaggagttctatcctttcacctttatcaaccatgggtggcagagggaattgccgggagccttgaggttcctaatgaagtgttccgggaattgggggacgaaaaggagta

SEQ ID NO: 565277 - DNA, 102 bp, Homo sapiens
ctactctgaggatccttaggcatggggtctgtacgtggatgatgtttatgaggcggaagaggaaggacatctgcgtgggcacctgggatatgtaggcgagca

SEQ ID NO: 565278 - DNA, 104 bp, Homo sapiens
tacaggcgacgtcgggtagcaatgatgaaccttttatctgctgtggccagtgctttgcacacaagctctgcgcaatcacagggcaagtctccgctgctgtggaa

SEQ ID NO: 565279 - DNA, 591 bp, Homo sapiens
tgctgcttctctctgcttccccggaaggttgagtgtctgtgtctgctgggcacccagtggacgatcccagcacagacccaggaaggattctgccaaggggcctggccaggctcccggctcaccagctccagggcacgcctttctgtccactcccagaaccccctggttcctgcttccttcctcaggcttagcagaagaattccgtttcccggggccttgggtcctcatgtgtggcggaaggctttggctaaacacatgtgccatgccctcctgtcagtgtgactttgggtgcaggggtgtccaccacgagccttgcaatgggtaaggagaaggaaactgtctccgggatggactggccccacacccctccctcctgccctcacccacccttggtctctacaggagcgagtttcatcccaggctgagcccagtccccggggccagcacctgtctgcagagtacctccagtcctcagtcctggtaagtaactggatcccggagcagctgcagccagtggctgtgcaagtctgcccttctgcctggcagctcttttcctagagcagtgatcatactttacaggcgcccagggag

SEQ ID NO: 565280 - DNA, 443 bp, Homo sapiens
gatcacaaggtcaggagttcgagaccagcctggccaaaaaggtgaaaccccgtctctactaaaaaaacaaaaattagccgggacgtggtggcgtgtgcctataatcccagcaacatgggaggctgaggcaggagaatcgcttgaaacctggaaacggaggttgcagtgagccgagatcacggcactgcacttcagcctgggcaacagtgcaagaatcagtctccaaaaaaaaaaagaacgaattggcagccctgtctacactggccctctctcaggtgcatcataacctattacattcaggcttttgactctcagcacttaggggcagtatgcttggcatagtttccaaaaacttccatttgccaaatctaaaagtcagtcttctgtctatcttgaaaatgattataaatatgatattgggcggtgaaccggaccaggtataa

SEQ ID NO: 565281 - DNA, 192 bp, Homo sapiens
acgcggaatctgggggtatgcatgtacgaatacactaacgaactggaaggttataatgtcacggtcttggtgaccaagtatgtcgtgtcgagtacaggtgatcagtgcgtcttaccttttcccgttgtaaaaatgtagtggtgagggtgtatattataataatgtttgtgtattcggctatgaagaataggg

SEQ ID NO: 565282 - DNA, 118 bp, Homo sapiens
gatcatcgatataggcccgctcatcccagtcttccggtaatagaagcatcaggatccttaatcttcttgggtggcaggaagtcccaatcgtacttccaaaggagccaggactaccacc

SEQ ID NO: 565283 - DNA, 437 bp, Homo sapiens
  misc_feature (149)..(149): n is a, c, g, or t
  misc_feature (310)..(310): n is a, c, g, or t
  misc_feature (334)..(334): n is a, c, g, or t
  misc_feature (339)..(339): n is a, c, g, or t
  misc_feature (354)..(354): n is a, c, g, or t
  misc_feature (373)..(373): n is a, c, g, or t
  misc_feature (413)..(413): n is a, c, g, or t
ttgccgatgacgaaagcgaccgcatggtttcgccgagtgccggcccaggccgagaaactgccccaatgactgctgatcgagtgtagggaagcacatgttccactcacctcccacttggtcgaacccagtgcgtatgctgactccttcanttgtgtcggtacagtcaggaacacctcgcgcattattgaggagatgaagggaatcaccatgattgccaacacaaagccagcgctcagcgttgccgattccgagcggtggtccttgaaacagcgtgccgatcagcggcagaattgccgatgttgatcattangggaacggggttgaatgttattcnggtcntcaccgggttacaancacaaacagtccccacatngccggtaaaataattgaatgggatcccacccaccaactcnaattgcattgccaacggggcttgc

SEQ ID NO: 565284 - DNA, 122 bp, Homo sapiens
  misc_feature (78)..(78): n is a, c, g, or t
  misc_feature (86)..(86): n is a, c, g, or t
  misc_feature (113)..(113): n is a, c, g, or t
tgagacagagtcttgcccgtcacctaggctggagtgcaatggtgcaatctcggctcactgcaacctccgcctcccagncagctggnaccacagacacgcaacaccacgcgcantaatttttg

SEQ ID NO: 565285 - DNA, 284 bp, Homo sapiens
  misc_feature (204)..(204): n is a, c, g, or t
agtgacaggtcttgttctgtagcccatggctggagtgcccaggcaaaactcaatgcagcctcaaactcctgggcttaaacaatcctccagtttcagcttcctgagtagctgggactacaggtgtgtgccagcatgctcaactactttttaaattgtttgtagagatgggagtctcgttatgtttcccaggctggtcttgaactnctggcctcaagtaatcccttctgtcacagcctcccaaagtgttgggattctgggtatgagccactgtgccaggcctgttt

SEQ ID NO: 565286 - DNA, 282 bp, Homo sapiens
tgaactcacagttgctggtggctgtggaggcctcataatcatggcagaatgcaaaaggcacatcttacatggcggcaggcaagagagaatgagaaccaagtgaaagtggaaaccccttataaaaccatcagatctcatgattcaattatctcccaccagttccctcctacaacacgtgggaatgatgggagctacaattcaagatgagatttgggtggggacacagccaaaccatattagacagtgaacttcatcgataaatgtcatgggtgttctaacaaa

SEQ ID NO: 565287 - DNA, 492 bp, Homo sapiens
ctcgtatgcgccaacaagtacaagatgtagctccattagtctcttacagcatacgttaaagacttcgatactaccagggtcgtctcaggcgatggcgggaagacctgaaagagagtactggttctgaggccagaaaggtgtgaggagagaggaggaaaagtcttcctaattgtgcccctaaagagcatcctgataccattctattctccagacatggaggggatgataaaggaaataggatctccactggacccttgattcattctgaaccctccaaaggaactctagagggcgagggatgatgagggaagcaataggtagctggggagccctattgctgctaagtcattggcaaagtgacaaagcaatttactgatgagagaatgtggaaatagatgtgcagtctggaattatgttggtgtgaatttgccagaggaccaatgcttgcatggagaatgggacgaggacatttgtggcccaacagtcgtcgca

SEQ ID NO: 565288 - DNA, 1384 bp, Homo sapiens
  misc_feature (771)..(771): n is a, c, g, or t
  misc_feature (817)..(817): n is a, c, g, or t
  misc_feature (974)..(974): n is a, c, g, or t
  misc_feature (1040)..(1040): n is a, c, g, or t
  misc_feature (1270)..(1270): n is a, c, g, or t
  misc_feature (1277)..(1277): n is a, c, g, or t
cctgtgctttttttgagttggggacgccagtccgccgcactccgcttttgggggcccgggactggccgcggctactggtgtttatattccgccccccccttttcgggagttgtttggtgcgccgcgctcccagggatttttttggggaaacgcctcgtgttcgcagggctgccacacagggtgttctctggactctccccttggggtgtagtggtgtcgtttacttacgacaaagcttggcaaaggagctgccccgcgccacaagtgttgggtgacccctctgcgcccaacgcctcattttgaaaaaggaatttcttgcgggataaaacgaaaggtttgaagaaaagggggcccacatgctgccccagatagagaccttgggggtgcggctccacccctgccggccaatatgggggacaccacgcgacacccttacagggcttgggaccacgcccccattattggggaccccggatcaatggagagccccacgcgccacttttctggggaccacgcgccccccccacatggggcctaatattttaaatcgccccacaaaacgccccctcggaggatctcaccccctgggcccaccccccccttggtgggagagaccgcttgccgcgccaagagaaggctgagaggcgctcgacgccacgagatgtaatatagcgcccgcttttaagagacccctcggttgggtggtctctgcctcgtgtgtggagagaccccgccccctcggctatttcttttctcgggctcttgtgtccnctcttgagaggagtttccccatcgagaccgcacgtctctccacacnccgccactttctcatgttcgccacatgagtccacacgccatataggtttctatagggtatattgagatgagaagaattgaaaagtgggccacgcacacgagaggagacacccacacatgtgctcgccacgctttccctcgagatgagagagttcccnccctctcttctcgagagggccgcaatgagagagaatgcgcttcttcgccactcggagaagaaagtncgagattataggttataggagagtttcaataagttggaaaaacttgtggccctctgtaataagggtggccccactcgggctccccacctcgcacagcctctcgagagtggcccccctgtcccccctggcgtcccccctgctggttgtctatgtgtttttttccctctccctgtcccttgtgttgaaagcgcccgtaaactataagggtgtccaagcccccattcccttcntttaacnctcttgaccccaccggagttggatgttgtgtattgtggtttattttattttcttccttttgttctgaaattaaagtatgcccaaataaaggatatgccctttttata

SEQ ID NO: 565289 - DNA, 750 bp, Homo sapiens
catttgtacaattttgaaatgcactacaataaacaaattagagcaacacatttgaaatacaggcttctttacataaactgagaggttatacaaaactcagtttcacaagggaacaatctatacctttctaaaagttaatatttcaagtctctaaataggcagaatattttaactctttaaaatcctgcctttctgaccaaaaaaaaaaaaaaaattctcatattggattctccaatcttccattagttaacaagccacagtttaaaactcctcaaataatctcccattttattttgaagcttgacacattaaattaagcagataattattttacccaattgaaaaagactttctacctttcttataatttaaaatttacacattgttctaagaggaattggtttaactctttggagtagctttaaccgagttgtgtatttaaatttctaggggccattgtgctaagcagcattttagcattctactcagggcagttattatagattaacccggctggggacagcaaaatttggtcacaattttagcagtcttggatttttctggttaagcctatgaaaaggtcatggtccctattaaaaattaacttttaaacctggattaactatttccttattttacccttattttgaaattcatttactttattaaaaggaaatccctaattgcagaaacaaagatgcacctttcaaaaatttctaataatccctatttgtaattatacccgagaga

SEQ ID NO: 565290 - DNA, 377 bp, Homo sapiens
  misc_feature (235)..(235): n is a, c, g, or t
tcaccacttctctcccctgttaatctacacacctcactgctcccggtcattgaccctagctgtgtgtgtggtatttggaggggcaggcaaagaacaatgaaaggaatgtgatgtcggcttcctttgattgatatagggccactggagctaggcttctgccctcttcggggaaaacaggtaagcaatcatctttcagaaaaggggttgaggtcagaagccttagcttctctttcanaaacaaaaacaaaagaagatagtttctgcctttaagggcgctgtgatccttggctggcttagtgaatgacgtcatgaagtgaagtgcacacctggcacttaggaggcatctttggttccgacctctggctcaccgtcgacgc

SEQ ID NO: 565291 - DNA, 310 bp, Homo sapiens
atccttgaaaatagcgacgggtagtatagttacaaagatgcaaatatatagccaaaagaatatccaggatatcctggctcttctcagttgtaagatcccttgcctgaatgatagtcctggtgttttctttcattttattcataaacctagcatgtaatatgaaccaaaccacttttcacctacttttatttaagcaacttagaagagagcatttatttactttgagaaagaaatataggttcctctcagagaaatccaaatttcattatctaatagaggcgtcggctacattttccggcgtaccgagcct

SEQ ID NO: 565292 - DNA, 162 bp, Homo sapiens
ggagaggtagggaacaggtgtccagcaggactgaggtggtctttggcagtgcatctgtgactcctccaaggagagcagatacagctcctcccagtcctggtgaagcctaccccatcacacctgctcggtatctgcaaggaacccatctgcaaggaacccacg

SEQ ID NO: 565293 - DNA, 161 bp, Homo sapiens
tatgcagtggagcagccctacagctgtcggcctggagaagctgcactgtggtgcctgaaggacagactcctgctgcctatccccagtggtatcagtgccaccatacatgctcatgcaatggaggctcacatgtgctagggtacctgagctctgaattctgt

SEQ ID NO: 565294 - DNA, 293 bp, Homo sapiens
tttcatgattaaaaatcagttgcggccaggtgtggtggctcagcactttgggaggctaaggtggtaggattgcttgaggccaggagttcaagaccagcctggccaatgtggcaaaatcccatctctgctaaaaatacaaaaaatatagctgggcacggtggcacacacctgtaatcccaactactcgggaggctgaagcacaaggattgtttgaacctgggaggtggaggttgtagtgagccaagattgtgccactgcattctagtctaggcaacaggtgagactctgtctca

SEQ ID NO: 565295 - DNA, 1451 bp, Homo sapiens
  misc_feature (545)..(545): n is a, c, g, or t
tggaaaagtgttggatttccattcacacaaaactgtggacattcattcgtggtgaggcttcgtgttcccagaagaagacggggccacccctcagtgttcgtgtaatgggcgtgtgtagaataaacacaaagtataattcaaacaaacgtgcaaataactcgtgtctcgtttctccatatctcaatacagcaacagctccctcaggtggtactggcaccatcttctgtgagaaaaatagtggcctcacaggggtctccttctccacattccccacaagggcacgcacgcaaaattccctctgagtggtccgccctcctatatgggggccaaggggcaacgcccaaacgcgattctgggagaagtgctccttgggcgcctcagataaagattggcgccaagatctccggcataggagactttttcccgtgggtgagaggcctcccaccttgtgggccagtatataacgtatagaatgtctccccaaatggtagaccgcgcggatgggagattaacatctacaggctccccatatttgtctcccctgngggcataagcccaagcgctgtgataaattctcagaatataaactcccagagagggtgctccccctcatgtgtccccttttgtcccttctaccacgggataacttcgcgcgcgccattttgggcgggcgccaattttctccacccaaagaaggcggcttccagaacactccaccgggtgttctctttagaacccccgccacagaactctttggataaccgcacaccgcggagaatttttttcttcccttctccccccgagtagaaaatgtccgcccttggggcgtggtatgctatatcacaagaccacccctcctcactggggaggattccccagaaaaatatgataacgcccgagcgcaggggtagaagcgaccagaattatcccggagaggccacagagaacggtcgtgcctgccgcggtgtagcaacgcgaacacagacctcattgagggcgccgccgcctagacaatgaggccgcgggagctgtcccaccgagaaacacattctcaaaacaaaaagcggcaagcggccagcaaaagagccggccccgcttagccccaattcttttggcccccgaaaccacacgcccccatcgtctagagaacacgctgcttggatgcgacaggggggcatttcacacagacaccgcgggggccgtcccgtacgaaaaacctcactaccgcgggggacctcccctaaaaaaaccgtccgccggtacccccagacggtgggcacacatcctctccctggggtgggccccccctctggtagtgtgggccccccttctgtgcgtaggtgcacacgcgacgaatctacccccaagtgggaggaccacccgatggagcggacgagaagtcgaagacctctcccaccatgcgtcgtggagacactcatacactcggggca

SEQ ID NO: 565296 - DNA, 528 bp, Homo sapiens
acccccctgcggatgccagagtgattctattacgttttatgatattttatgtatgagatgggtctcaatatgttgctcaggctggtctagtaactcctgggctcaaaagatccttccaccttggcctcccaaagtgctgggattacagtcgtgattgaaagagcccagccggcattttcttattataaaagtaatacatgttcaatggacaaaaaattttcagaaaatatgcaaagatgaaaagtaaaaattgtccataaatctgtcatctacagataaagataacttctggataatgtttttctaccatcatttttagtaatcacataacatttcgttgtatgtctatgccttcatttaattaagaggcatttccattatttctgcatgttcatgactctgaatgatgatatgtctgcctgctgatggctacaaccctgtttctgcatttcaaacctctctcttgagctccagatttgatggcctcgtcagcatttacttgagttgctcataagtgtctcaaattta

SEQ ID NO: 565297 - DNA, 562 bp, Homo sapiens
atgaacgcagtcctggactgtgcaaccggacgctgcggatcatgtactttcataggagtagctgctggtagcaccggattcactgttgatccagaggagctagtaataggacgtactatcaatgggacattctttggcgggcgcacaagtgtagattctatcccaaagctggtcactgactatcagaataagaaattcaatctggatgcactggtgacccataccctgtattttgacacaatcactgaggcatttgacctaatgaaccaaggcgcatgcgaacaatcctcatcttttgaagatgccaggagcacattcggagtactatctgattgaatgtgaacactgctgtgtaatatattacctgagtagatgaaccatggaaagccatgcgtttaaacacacatttacatataatatgggaacatacacagagctttaaatagtatagactactgacctgcgatatatatgaatatccactagttagatggtaatcatctagtgtttatggatcgcatcatgtcttctataggtggttatggccatagttgatgtgttg

SEQ ID NO: 565298 - DNA, 313 bp, Homo sapiens
gtccccaaataaggctgctaactaggccccccttaagaaagctttaaaagttatagcttcctttaagtccctctccattacccaaaatcaaagcaatagttgttggagcctagaaaactgattttttaggccgggcacagtgggtcatgcacgtaatcccagcattttgggaggccgagaagggcggaccaccttaagtcggggagagaccagccttgaccattgtggagaacccccattctctactaaaattacaaaattaggcttggtgcataccttgtaaccccagctacttgggaggctgaggcaggag

SEQ ID NO: 565299 - DNA, 196 bp, Homo sapiens
ccagaggagcgataagcacagagatatttcacagggtttaacctacacaagctataaagtactgtatgagtctacaaacagatatatttcacaaattcagcataaaatgggtccaagctgaaagctctattaagaaaatatactatgctgatttataaagcttgtttaccctcactacgtcctcccaccacaaacg

SEQ ID NO: 565300 - DNA, 106 bp, Homo sapiens
tgatacattcgtgtcccaatgcttgcttttctcctcctccccttcccggttaccaagatactcgaactttccagtacagggacccagggacacgaatgttcagtga

SEQ ID NO: 565301 - DNA, 371 bp, Homo sapiens
ctatgtttaccagagtgggcaccgaggccgaggaggctaccgagagcgagtgagggctgccagcacactgtcacctctcagtttattccaagggtaggagtgtggaggtgaaccctttcctgtcatggccttaggtcctgtttataatttggtatcttagtgccacagagagtctgttttgtcagtcttatgatctctgttttgacattcatgctggccagttgtgtctaaactgaaaaagggaagggatgtaatgaggcatgtctggcctcccatcccatcctggctgggaactcagttttaagatttttatggggttgccttggccacaagggggcctattcagtcagttgtgggcacacattatggag

SEQ ID NO: 565302 - DNA, 125 bp, Homo sapiens
ttttgtgttcctggcctggcctgagctctagcggtctgattagtcttgagtttaagttcggctctgggagagagagagagagagagagagagagagagagagaaagagatagagagagagagaga

SEQ ID NO: 565303 - DNA, 2041 bp, Homo sapiens
ctcggctaatttgtatgtgttgggtgcagtcgcgttggttgcgtgtgcttgtctggttgatttctacatcgtcttctctgtgtggggtggacgttcgtatcatagagaggtgtgtccgtgctgccgtgttcgctcaccgctgggtgttgtgtgtgcgtgttgtcttcgatggttggctccttaggagttgtgttgtcgtgctcgttcgtactcttactagcgaggtggttggcctactactagaggggggagtggttttgcctctgttgtttccgtcaatgcgttgtgttgtgtgtgtttctcccctgctctggcaagacgaggggggttgttttaatggtctctccaggagtgggtggggtggtgctggtctgttgtgccctcgtttgtatgtgaggtgtttgtgttcgcctgcgtgttgggtgtgtcgacctcacacgcagagggggttgttgcgtgggcggtgggtgcttgtttttgttgagtgaccctcgttctggtggttgtgttgtgaagctagggtggtggcgataggtgtggtcgtcgtgggtatgtggttggtgtgcgatcccccacacatggggggtgtgggtcctatgcggacggtcatttcgtatttggtggtgcggcgcgggtcgggcggcggagggagcgcgtgtggtggcggcatcgactccgcctgcttccgtgcgctgcggggtgtgtggtgtgtgttgtgggtgtatgattagtagggggtgtctccttcgcgacggggtgtgtgttgcgtcgcgcctcccccccgttttttgttgcaacagaaatgtgtttggtggggagaagagtaccgacttcttcatcggtgaggaatgaggagaggggtgttatgaaaatgtaggggaggaaccacctctcgtgggaaggaaatgagcttgtgttttgttctctgtgggaaacaacacgggtggggggttcatcatcggtgcgaccacttgttcttcttggggggccctcctcgttgcctttcccctctcgttatgtgtgtgttggtggcgttggagtagtagcgtgacgcggtgtctatgagtggggcggcgctccgtctcctgtgatggggacgcgggcatcacatcgagggggaggagctgcgcgcgtcgaagatgataataagaagaggcggctccttcttagagtgagtctgcgaggaggacctacttctactagggggtggttttcttcgtcacacgacactggttgggaaggagtgttgggagacgacacggtgtggtgtaaaagatatatattagagggtgctcgagagatggtgctcacagagagagatgagagatagacggcgcgccacacaatgttcttcgtctcctcgtgtaggactattagtatagagtagtagagttcgctcctcgcctcacatgagactacacgacagtgagagagggcggcggggagtatactacacgcgaagtagagcgcgcactggtgctatgagatcacttcgttggtgtgtgtggcgtgagagagtatataagttttcgataagagccgcgcacagcacgcgcggcgctgcgcgaatgcgtgttcctcacgcatatatgtgtgtgtgtctctcacacacacgtgtgtttctcacacgcttttacacacgcgtgtgtgtgtgtgagaacacctacacgctctgtggcgcagagtagatacacacacgtgccccgacgggcgcagcactgcctcgtggagaggagcgggactgtgtgtagctcttataccaccctcactcctctctctctgttatagttgtcgctgataaccgtcttcactcggcgctcttctctcgtgttatttgtttttctctctgtaaagaccacacaaaaataggtaacaacgatcaaaagaatttgtgtaatatgataatcttttgaaagtagataccactatttcccaccctcggttacctgttatttaaataatccacaaggttaatgacacaaatttttcaattttataaaaaaaaaaacataaacaataataacaaaaatacataaatata

SEQ ID NO: 565304 - DNA, 252 bp, Homo sapiens
gctgtgtacacaccggcgtccagacgtatcaagacatgttgcttctctccattgcggccagacaaacccaggatggttcgattgaatgcgtgctgaccgtgcgagaactgttcatcgtcaagacaacatcgatttctggtgtgtcattgcccgcccccaaacgcggtagagcctccgcccaaggcgcggcgaaacgcaaaaggggccagaacccaaccctaaagcaggccgacaccgagaaaaacggttccc

SEQ ID NO: 565305 - DNA, 423 bp, Homo sapiens
gagaccctgtctctactagaagaactttaaaaatcacctaggtgtgggccgggcacggtcgtaacgcctgtaatcccagcactttgagatgctgaggcaggtggatcacgaggtcaggagatcgagaccatcctggataacacggagaagccccgtctctactaaaagtacaaaaaaattagccgggcgtgggggcgggcatctgtggtcccaattaatcgggaggctgcagcgggagaatggcatgaacccgggaggcggatcttgcattgagacaagataacgccactgcactcaagcctgggcgacagaatgagactccatctcaaaaaacaaaaagaaaccaaggatatagaataaaacaagaaaaaagatttgggcattagaggcctacaaaattggattgttatcaaagacacagaa

SEQ ID NO: 565306 - DNA, 830 bp, Homo sapiens
cccaaagtaggctaggcctacggaagctgggtcttcttgctgtgaaggtcgcgttccccagtgttacggagggtccttgtaggcaggagtgaaaattgggtctgggggttagtcctggggtggaggtctgggcatcgccgggtgccggaccccctccatcttcggttttgcatcacctccgctttccagtcgcggagtctgcggcgggtagggcggctgtcgcgtgcggtgacgtcactccagcaggtcgtcctcgcgagggctccagtggccttgacctcccgcgtgcgtgggatggctgtgcggcgatgctgcagttcgtccgggccggggcgcgggcctggcttcggcctaccggcagtcagggcctgatttccctggcggaaagaggcatgcgcgtgctgaccgatgaacccggatggcagtgtggtcggagcgagggttctcccggagcccgtgctgcgcaaagtcgagctccgcggtacccgactcatcgactgcccagtgcaggcctgggtcgagtccttgcgtgggcttcgagtcaggagctgctgtgggcctgtgcgacctgcatccccgatgttttcgccaccgcgcccaggctggacatatctgtaccaggtagctatgtggcagaagaacttcaatgagaattagctatgccaaagaccaagaggagagccagatgtgcggggcggtggccggaagccttggcgcatgaaaaggcactgaggggggccgggataggaacatccgagtcttcggtctggaaaagagaaagtgttgcccaatgccccggggggcccccaattttattacatttgggccct

SEQ ID NO: 565307 - DNA, 980 bp, Homo sapiens
ccctacgcgtacgaccacgcggtcggctagacgctacttccgcgcgtatcatagaagagcttatcagctttcatgatcacgccctcgataaatcagtttgccattatctgcttcctagttcctgtgtgcccttttcctaagcactcacaacgaaagctaagctaagtgactaacatctcagacgcgtcaggagaatagaaggccgtctgagactatcctgcccgcgcatcatcctaggtccgtcagtcgccctgccacatccactacgacattccttatagcagtagacaggacgaaggtcaaacggattccccttccgttatgcatctacaagtctacattggggcaccaacaggtggctgcatgacatacgtagcgtagatacgaccgacggagggacggaattaatacttcaatcatccttacatagttcccaccattattcctagaaccaggcgacctgcgactcctgtgacgttgacaatcgagtagtactcccggattgaagcccccattcgtataataattacatcacaagacgtctggcactcatgagctgtccccacagttaggcttaaataccagatgcaattcccggacgtctaagaccaaaccactttcaccgctacacgaccgggggtatactacggtcaatgctctgaaatctgtggagcaaacacagttgcatgcccatcgtcctagaataattcccctaaaaatctttgaaatagggccgtattaacctatagcacccatctaaccctctagagcgaaaaaaaaaagaaagaaaaaggaaagcacaacaaacataagaccaaagaaaaggaactgcaaaaaacccagggcgaacaagaacacacaaagatgaaaaaggccaccgagagcagcaacaacaaggaacaaacaacagaggaacgaagggacaaagacacccccggggagagaagccacgagacagcaaaacagaggaaaaaaagaac

SEQ ID NO: 565308 - DNA, 390 bp, Homo sapiens
  misc_feature (72)..(72): n is a, c, g, or t
  misc_feature (273)..(273): n is a, c, g, or t
ggcgtgccgggattcctttgtttttcttttttgttttctttctttaatggagttgcactcgttaccccagtnggagtgcaatggtgtgatctcagctcaccacaacctccgcctcgcaggctcaagtgattctcctgcctcagcctcctgagtagctgggattacaggccaccacacccagctaattttcgcactttcagtagagatgaggttttgccacgttggtcaggctggtcttgaactcctgacctcaggtgatccacccacctcggnctcccaaagtgctgggattacaggcgtgagccaccaggcctggccacctctttgtatctttaaacaccagccagtgacctccaggaccctggggtggacttcagacaaagggaaaca

SEQ ID NO: 565309 - DNA, 468 bp, Homo sapiens
  misc_feature (174)..(174): n is a, c, g, or t
  misc_feature (276)..(276): n is a, c, g, or t
  misc_feature (333)..(333): n is a, c, g, or t
  misc_feature (348)..(348): n is a, c, g, or t
  misc_feature (362)..(362): n is a, c, g, or t
  misc_feature (368)..(368): n is a, c, g, or t
  misc_feature (378)..(378): n is a, c, g, or t
  misc_feature (392)..(392): n is a, c, g, or t
  misc_feature (405)..(405): n is a, c, g, or t
  misc_feature (450)..(450): n is a, c, g, or t
tgagacggagtctcactctgtcgcacaggctggagtgcagtggcgcaatctcggctcactgcaacctccgcctcctgggttcaagcgattcttctgccccagcctcccaagtagctgggactacaggcacctgccaccatgtccggctaactttttttggtatttttagtaganacggggtttcaccgttatctgccaggctggtctcaaactcctgacctcatgatccccccacctcggcctcccggtccacttttgttttagcttgagggcgtncgtgtgcggctttgttacaagggtatgctgcgtggtgctaaagtttgggcttctatnaatcctgtcacccanacagtgaaccacangaagtnatatgcccanatagtatccaatanaaagcatttcagnccttcctccccttcctccctccctccctccttctggaacccccantgtctactattcccatct

SEQ ID NO: 565310 - DNA, 408 bp, Homo sapiens
agtcagtagagagaggggaaatctttagggatacacacaaattagcagagctgtaagagtatgagggcaaaggcataatatggcttgggagacatctcagttgtgtggtgctaggcatagtggtgagtcatgtgagctcatattggcaagtgagactggccactcagagcgctagagagagcgagaaggacggcacagaccacaaggggcgggattacaggagggtgaagacaggaagggtgagacgtaaagggaaatgggggtccgtgaccatgagaaagtgtctctctctctctctctctctctctctctctctctctctctctctctctctctctctctctctctctctctctctctctctctctctctctctctctctctctctctctctctactctctctctc

SEQ ID NO: 565311 - DNA, 145 bp, Homo sapiens
ttctagctgctcccaccgtttgaccctattctatcgctattagttggctcaaccactaaacaaaaacaatgaggaacggggtgaagagcggttaacccattgagccgtgggccgtggtaaaagggggatccgggagagtcgaact

SEQ ID NO: 565312 - DNA, 742 bp, Homo sapiens
gacagctttctcctctgctggagaagaggaatttctgctcctcagtctgggagcagttctgaccttgattgttgtggttggtttttaattctctgctcctcttgacctttgagtcgacactggctcctggagtttccagctagattaggctccagtagtggtaatttacttaataatacacactttgtgtgctgccttcccttccttgactcccttcctccccttcctatcagtgattcctgtggccccctttcaaataaactatttgtagttggatctttgagtcatggtcttcttctgggggaacacaaactaagtgctatcttttagtcagcacttactctgtgccaggcagcagctaagagtctgtttttatgcagtgtgtaatcacattatctccattttgtaaatgaagaaaccacagttgaagttaaataagctacttggggatgttcatcaagtaagtgacaaaaatacaatttgaaccaagacctctgactttcaaaagccatattttttgaccattagattcagaaagcaactgctttctagcatatccctcactcattttctcatgaaaaattcttctccttaatgggtcctattcagagggacagttcctcagttaaaaagatcccttggtatgattgttcagaattattttccctttcctgtatattcatatgaaccgaatgccttcttttggaaggtatacgccggcttaggtataagggggaacatc

SEQ ID NO: 565313 - DNA, 227 bp, Homo sapiens
agggaagtgaggaaatgtttgggagaggactttctaagctctattataggtgttagatctaatttacttatgggattctgtaggtctggtgaaaggggtggtgggtgacggttggattgaggagggttttggaggaaaatggggttgaaatggaaaatgggggggatattgtagggtcaaaatccaaaatttaaaaggattgatttcttttaaattggtggaataaa

SEQ ID NO: 565314 - DNA, 225 bp, Homo sapiens
gcagcaaccagcgttcaatggaatcccaatctgcctcctactgggtcaccagctccagtggccaggggattccagatggacatcaccacatgaatggatatggatcacatacttataaagctgattaatgcaaatggggaggcagtttattgcaaattccatcagaggactgaccagggcatcaaaaacttttatgttgaagatgcgacaagacttcccaaggaa

SEQ ID NO: 565315 - DNA, 677 bp, Homo sapiens
  misc_feature (623)..(623): n is a, c, g, or t
cgtgaacaccttgcccaaggcaactgtattaatgttctctcattttcacttcctttccttttgcatatctgtcaaattattataatactctctaaaaacgcttcccaaaacaaaatagcaactcagaatctcagtaagctatcagtcacacttctaaaataatagctgcaatcagtaatttcccaagatacaaattaatccaggaaattatctaatttacacgaaaagatggctttgggaatcatcacatttcaagcctgaagaaaaattaactcccatacaagtcatagcaacatttatgtttgtaactgctagtaacatgtcaatattaggctataatatattcatgagaaagaagttttctgtcttctctctggggtctcaaaggcattttggagcctcagctccctcatcagtaaaataaaggtagtagactgaataaccagccaactctagatagaccataaatctataatgagagaataaatgaaggaaaaatattcatgtttccaaattaaatattgagtattcaagataaatgataccaatgtctatattgacaaaattaaaagctaacaatcatatgttcatcatcccattttttttcttactgatccataaanaccaagcctggaaaacattcccctattacacattataagtatctcaatgatctt

SEQ ID NO: 565316 - DNA, 156 bp, Homo sapiens
ggctcatcaactatctttagtgttagtgtatttaatgtgtggcccaagacaattcttctcccactgtggcccagggaagccaaaagattggacactgctgatctaaagtagtatcagtacccagatatacacatgaactcctgtgtcataagtcag

SEQ ID NO: 565317 - DNA, 356 bp, Homo sapiens
tctctctctctctctctctctctctcgggctctctctctctatggatgaatatacccccagaggagagagagagagagagagaagggagagaggaacagatagaggcaaacagaggagcgcacggaggaacaggagcacgagagacagagagagagagagagagacagagagaaagagagagagagagagagagagcgaggcagacgaacgatgtaagagcagacaagaggaagagcaagtgtacagagcgcgggagggggaagaagagcaagagcgagcgggagaagcgagagagatgaggataagagggagagaggaaggagagggagagcagagacacagagagcacaggagc

SEQ ID NO: 565318 - DNA, 551 bp, Homo sapiens
atcttcttatgcctatcatgtttcgtcgttagggtctctcctgcttccgtgtcccggcctgcgtgggtgggcttgtgggtctttgacgacccgaaaattgagagcgtcttcgcactccaggagctgctcctggtggctctgcggccgtcagcatgccacagaatgaatatattgaattacaccgtaaacgctatggataccgttggcattaccatgagaaaaagagaaagacggcaagtcgagaggctcatgaacgttcaaagaaggcaaagaaaatgattggtctgaaggctaagctttaccaataaaacagcgtcatggtgagaaaaaatacaaatgacacagactatcatgatgcatgcaaagagaaacaccaaacaaaagactgctgaaaagacaccacagggagcagtacctgcctatctgctggacagaagagggacaatctcgagctacagtactttccaatatgatttaaccgaaaagaaaagagaaggcggcaaactgggaagtccctctgccttaagtacgtgcccaacgagaagcggcga

SEQ ID NO: 565319 - DNA, 756 bp, Homo sapiens
ctagacaaaggcgaaaaatgctaacatatgatgcattcctgtgatcatatcctgcctgagtctgttgtataatccgggatacgatcacaaattgctaattactgtgatcccgaggtaacatgtgaagtgagtccatacagatgatgtattcagtaaaagtccgaggctgatgaggtgaaataaaaaatgtcttccaaaaaattaagcattgttgatgaatctgccctgtagcaaatttataatcagagacgatgagagaggagcatactcttttggacgagcttaggcaaacaagtgagggccatggatgtgaggataagcagagagagttataactgagtatgctttcactattctaccctggcttaaaggcttgtttaaagatatatcaccaatagactttaaggtttaactcggagacatatagcagtatagatataaaaaatgacactaataatagaatcccggtggaaatttatttattgtgtataatagaaggtgttagatcccatgagagatggacaagaagtgtaagtcatagtctctgcccctcaggcaatttataatttaaagtgtgacacaaaacagagatctgaaaagctacatgaacaaatgttagaaaatacagattgatattatttaagtgtcactgttgatgtgtgacaacgggaatgcatttggagtgtctacttggattgttctccctttcttaaacattcttaaaaattccaaaaacaaaaacaacacaaacacttg

SEQ ID NO: 565320 - DNA, 430 bp, Homo sapiens
agctttgtcccacactgggaggtcacaggactgagtgtgcacaggaatgacagaagcgctggctcaaagagccgcccgtcaatgtttcctgccaaccgtaagctacggactttacagaaccacaaaagcagtaaaagccgactctcaagagaggaccggacacaaggatgcgcaattccacctcctggcactgcttttctgcggcttactttacgaccggtcaacgatgtgcaaagaattcttaggctcctttcacaaaagcatcctgattcttttcatactcctgcatacgtctttaaatatttaatacttttgggagaaatgaggacggataacacatagattactaacaactgcatttaaaacgaggataaaaagaaccagctggcacatattcttgcacaccttgtaataaaccccgtgtaaatta

SEQ ID NO: 565321 - DNA, 569 bp, Homo sapiens
ggtcgtcgccgtctgaggtgttccctggcgtttgtctcgccgtcgttgccgccccgtccctgccttcgtgccgcccgccttaggccctgcccagccgctctccctgtcctcctccccttaaccacccccacgatttctgccgtcggggcccgaggggcctgggctggatgatgcctgtcaggagagcggagcatgagcgcagggaccgggcggcatgctcaggatggggacggctgcggacacggcgtgtaggccacgagagcccggcaggctggctggcccggacccggaggccttatcggaccttccccggacggcgacctgagtgtgctgagctggcacacagggtgaagcgactggacgcgtcttctgagacgagccggatttcccacttcacgtggacgcgtgaaaacttccccaaggacatgacgcgttgcaaggcccggaaagaatcgtagcaaggtggtccagaaagaaaacctggaaggacacagggacttacatgtgcacagtgtgcggctgcatggttcacctagcagacacgtgctgcactgcaatggctgggtcaa

SEQ ID NO: 565322 - DNA, 296 bp, Homo sapiens
ctgagtgaaggagctggaaagtattctatatattgatctaggtggttgttacaccaagtgtatacacatatataaattcacagagctgtacacttaagatctgtgtacttcacagtattgtaaaaaaaaacatttttctaaactatgagctactaaaccggaaaggagcatgagggagctggaagtattctatatattgatctaggtggttgttacacaagtgtatacacatatataaattcacagagctgtacacttaagatctgtgtacttcactcgaaacgggtaccgaagct

SEQ ID NO: 565323 - DNA, 832 bp, Homo sapiens
agtatctgattcgtcagaggagcgagaatctgcatcctgggaacacctgactatcatcagaatcccaggagtatcgtgggtacatccaccgttacaggtccttctgactttgtaacccgtcgtcaaggtggtgcaaatcgtggatggccacgcagcgaccattctacgtggtagcacttgcaagatcattactcgagcatacatgccaataggcatgcacgaatgcgcgaccaccgtattacaacacgatggaaggaacaagacgccgcaagtatcatagacacccacgaaaaatcagcacaagagctcaaggcaaagcaaggtgtgcattacatcaataacagacatgaatgccacaggctaatgataaaccaaccagagcgcatgcccaaactgaaaggacaggccagcaatacctcaagcatactcagaaccaaactatcttagcacagcaagacgaacccacagcctacaactgttagaggcctgcaaggaacagcaagcaataccagtgatgccgcatgtgctcaacccaagacgaggatccaaaagtgtgagcagaaaaacaccagtgagccagaatggtcgatgacgaaacgcacagatgctggcacattttagatgcacaatatagactggtgaccaattccagccaaaaagacacgggaccaatgtgagacaggatactacaggcgcaacgccccccctgggagattcacccaagcaagcacgaccgatacagagaacagaggctcatcacagaccggacagagatcataacaaggagagacaatggccagccgtaatgccacagatcacaaagccacgaagg

SEQ ID NO: 565324 - DNA, 1122 bp, Homo sapiens
  misc_feature (528)..(528): n is a, c, g, or t
gaaaaaaggtacatgacaatctgtgggaaggacacatcgtgatggccgccatgtctccactgggtcattaaacaatgtagtagaagaaatagtgctgagctctagcatcgcagttaatgaacacgtgtacctaggtgcttgtgtcaagtgttgcttgctaccatcttccgttctctttctacacctatgatatgaatactcgctcatctgaacatggacatggtacaattaagacgtgtgataacctttcgaggatgatgagaagcctacccattggatatcaagagttcccaggctcttacgtagtgtggaccgcgtctgcgggccataggtggatctttaatgcgtacatgctgaagctgtccatttatatctctatgtgggtcaaaaaatgggtggtattaataaagtggagtacgatgggtggggactctctagaggctctagctcaatagcaagagtgatagcatagtaggggtaatatacagcagaaagagtcgagtatgaggagctgatgttggagattcntacaggtagatacataacgggctattttgagggtattgatcttgtcgcggggaaagcgtcaaccaatcacaatctaggataatattgaccaacaatttatattggcaagcataattcgtcgttcttgaacgtctcggaataggctcctgcacgaagatctggagctctggatggatgaccagaatctcttgatgttgcctaacttcgcgtaatttcgacggacgggggaaccctcagggagggcagggaagggtacagggcacaacggacggcggggaacagctgcaaggaacaaagattaccaagggaaattactcgttgtaaaggtggaaaggcaggggttaccccgacgttggggggggccccgtcaaggagattcgatttcccctatgcttggggggatcccttcgttggggaagaacttggcacgcaagagaggaaaaaccttccaggaagactgggcattcatccgttccgttggcccaagggggcgcatgaaaaagtttccgggggggtccggaaaagtccctccaacctcacctggtttgcctctcattttggcttctggaagggggttggtcccccaaaagggtg

SEQ ID NO: 565325 - DNA, 130 bp, Homo sapiens
gttagtcaaagcgacagataacacgttagggctctgggatgagatttcctggtctgtctatgagtccttttcctgctctggttgggtgaggctgtccgattgagtatctctataaggtgatgactttgcg

SEQ ID NO: 565326 - DNA, 889 bp, Homo sapiens
ggggagggatagcattaggagaaatacctaatgtagatgatgggttgatgggtgcagcaaaccaccatggcacgcgtatcactatgtaacaaacctgtgcacattctgcacatgtatctcagaacttaaagtataatgaaacaaaaaaaagaaagaaaagaaaacactactgcctgggtatggtggctcatgcctgtaatcccaagaccctgggaggccaaggtgggtagatctcctgaggttgggagtttgagaccagcctggccaagatggagaaaccccatctctactaaaaatacaaaaaattagccaggcgtggtggtgcatgcctgtaatcccagttactcaggaggctgaggcaggagaatcacttgaacctggaggcggaggtcgtcggtaggcactagattgtgccactgcactccagcctgggcaagaagagcgaaactccgtctcaaaaaaaaacaaaacaaaatgaacacacgaaaacatatacggaggatctcagacagggacagcttccacctggtgttcatcaacaactctccggagccaccctacatttacttgacaccaactacatccgggcacggtgagttgttaccacaactccagggattccaacgttcctggaggccaccaatcggggttccaaatcctagcttttaaggagacacaccggttatgatggatcaaaaccctatggtgcatacgcattcacagtgggtacctctcccaaacatcctcgcacgccttggaaacatacttggggagctaccctcagccacgaccctagaatgtcgcggggaccatccccggaccttgccttcaaaagaccagttgcaacaacatccgcggcacactggcaacagggccatcggaacacgag

SEQ ID NO: 565327 - DNA, 195 bp, Homo sapiens
  misc_feature (108)..(108): n is a, c, g, or t
cactgctcaagaactagggctgctctatgcttcaggaggacatggaaggtcgagacatcctgcgcatgtgcagtgccgctctgtagaggtagctgtgggggggggggngccccccccccccccttttttttttttttcccccctttttggggaggggggggggttggccccccgcggcggttggcatcctgtgac

SEQ ID NO: 565328 - DNA, 117 bp, Homo sapiens
tgggccccaaaaaagccccaggaacatctttcttttcccgcaacccctccccccccagggaggccctggcccccagtcccttcccccgtggaataaacggggtgtcctgaaaaccca

SEQ ID NO: 565329 - DNA, 1768 bp, Homo sapiens
  misc_feature (1496)..(1496): n is a, c, g, or t
tccccaatttctcttttttggaggaggaggggggcgcaacaaacaaaaaaaccagagggggggggggggcgcaaacctctaataaaaaagggggaggagagagagaccccacaagaggcggcgagcgcggagtgggagcaccaaggaggaaacccccgcgcgcggcggcggggggagagaaatccgccgcgcgggggataagcaaaaatagactaagagcgcggtgccccacgcgggggtgtggtgtgggaacaagaaaataatatacacagcagcaaaacacagagaagaggcggcgagagcccacacaatggggagcgaagagaagaggggcacgcgcggggcgcgccacccacacacatctcgagggagagggggggatctaccccgcgcgcgacgcccctaaaagagagagagagagagaggtgtagctacaaagagagagaagtaacacacagcagagagagagagcgggggcgcgcccaaagagagagcgaggagacgagatgcgcgcccaccagagcgggcggggcggagacacgtcacccagacgagaagagaagagaaggagcagagacgaagaccaaacacaacatatctgtaatttcacacaacacgacgaggagatagaatgagaggagaagcaccaacacatccgagacgaggaggaaaaaactaacggaggcgcgcgcgcgcacagatccaccacacgaagacagacaacaacacgacgcgacggagaggaggtagtgtcacgtcaacgcaatagtcaccaacacgcgtgcaagaggaagagaagtaagcaaaacatctcgacgcggacgcaacgcacagctccacgctggagttgaagacgtagcacaaccagagacgacgcagcagacaaccaacacaaacacaaaagggacatcaaccaagacaacagaagagaaagggacaccccactgcctactcatcccagagacagagggaagaggacgggtggggcgggcaccaaacaaaccacatacttacggggcggcagacaaaaagcctcctcctcaaacagggccccacacacaaactactgctgcgggcggggcgcgcacagacagcaggatgactaaacaataacacagatgggtggcacgtcgagaaggcacaacaacaaacgcaggagagggcggcgagacagcaaacacccaccctacgaggacgaaagtcacacgcgtcggacgcagaacaaagatagcggagagggcccaataaaaaaatactacctgcggggaggaagcataaacatcgtctgccgcgcgcccaccacccagagaaaggtggtgagccacgcacgctaccaagaagagggggcggggccaacaaaaagaacggcagcggggccgacgagaaagcgacagagacgacagagcgacgcaggcaatcaacgaacagcgacgaggatcagaagccacgaaggagacacccaacgaggggtgggtgcaaagaaacgagcacgaggnggccgatcaatacagaagccgacgcagagtggaggaaacaacacgagcgtcacccaaaccacgaggatgaagacaaccccactactgcgtgagagaagaagaaaatcgacggaccgaccgcggcgggagaagacagaagaagcacagaggtcgacacccaccaagagagggcccgatactgcaccagcatgacgcaacagcgacagcgaaagcaagacgagaacaccagggcggaacggaaggcggcacagcagacacgagacagtagaaga

SEQ ID NO: 565330 - DNA, 917 bp, Homo sapiens
aactagaaataattttgcacatggagagccaaagctaagacccccgaaaccagaggagtctacctaagaacatgctagaaagagcacacccgtctatgtagcataatagtgggaagatttataggtagaggcgataaacttaccgagacctggtgaatagtctggttgatctcgaagataagaatcttgagttcaactttcaaattgtgtccctagatgaacttttaataatcccttgtgtaaatgaaactgtaagtccaaaagaggaacagtttcttgtggataactagtaaaaaaccttgtagagagagtaaaaaatttaacaccactatagtaggtcataaaagctagatcacacaattaaagaaagcgttcaatgtcaaacccatatacctaaataaatcctcaatattataaactgaacgttcctcactacccagtgggatcattttatcaccctatagaagaactaatgtagtataagtaacatgaaaacattctcctccgataagcctgcgtccagatttaaaacactgaactgacaattacagcccatatctacaatcaccagaagtcattattacccccattgtcaagccaaaacagggcatgctaataaggcgaaggggttcacacaccacggtaaggacatccggcaaaatcttaccccggcgtgtttaccaaaagaaattaccttctagcatcacagtattagaggacgctgcgtgacccacaggtgaagggcggggaccctaccgtgaaagggtgcaaacactggccaaaaaggagcggtgaaggtcacacgggcagggcctaattacaggaaagacgcggaaaggggataacaaggaaccggggtaagagagcaacagcaaaacgaatgggggcaacccccggagaacaaaataacggacacc

SEQ ID NO: 565331 - DNA, 405 bp, Homo sapiens
gtagcctcagatgcccgtctgcctcaaatttaagcattattatcatgttaacatgattatttgtcttaaacataacatcacacttaagtttctttcgatcttgaacctgaagtatttcatatttactatattttaagagcttaatattgttaagttaaaactatgcatttgtataatcaaggaagcagttaatatttattatatatagctttcatgtctcccatttacaaaaaagtttcagttattctattaaagatttgttggtatattctgcattttacaagtggaaaaaatcagatttaaagaaagggtttaatatttccaaaacagagtttgttatctggggtcgtgtgataaactcttgtggaataaacacgtttacagtttattattttactcctccca

SEQ ID NO: 565332 - DNA, 890 bp, Homo sapiens
  misc_feature (549)..(549): n is a, c, g, or t
  misc_feature (890)..(890): n is a, c, g, or t
ctatgtagaggctgagtgttaatcggccgagggcgacggcgaccatagctctccagtgtcaatggccagcaaggagtggggggtcctgcagcctgtgcgggctggcgtgctgtgcatgtgtgtgtgcagctgggagacaaatggaaacctccacagtggcacatgactccatcaatgatgtgagaactggggcagatgcacatgcctgccaatgcttggtgtgcttgcctccccatgactgccctgatgcatgcatgtgatgtgcccattcatgaatgtgccaatgaatgtactgccatgtgatgcattgcagcatcaatgatgtgttgcttgtgtgaatgcaagacacatctgctgcacccagcatgcaagcatgctcaccacacctgcaggagtgtgctgtgctcatgctgtgcaatgctgtgtgctgcttggtggccatcagattgttgccctgctggtctagcgtttgtgtgcttctattcttacttatttgatagcttgtgtgtgtgatgtgacagccagtcctggccatgtgggccttttgcnctcccttttttggtgccccatttcaattgatgcattctgacatttgtccttgtggtgacttcctgttcaccactgaaaggccacaatggtgctttaggcctatctgtggatgtattgatgtgtcccccgaagcttgcaacatgcttggcctatgtgagcatgatgaactctgtgtgattgcttgggtggtgcatgggaacatcaatggtgttggcagacccaagcaacaataggggcaatgccccagcccaatcatacgaccatgttgggctgagtgagtgcaactgtggccttcaaacctgcatctacgtggcctctgtgcacccagtgacctctccagn

SEQ ID NO: 565333 - DNA, 300 bp, Homo sapiens
cttcattcagcagtcacctgtgtccgtgtaacattatgatcaaataaatttgtatgccttttctcctattaacctgccttttttgtcagcgattgtcagtgaaacttcagagggcaaaggggaagttttccttggaccctccagttttggtgctgtgaacaggataccaaagctgctctgttcttctggaagctgcaatgaagggaaccaaggacctgacaagccagcagaagggtaagaaattcttaccagtcaggctcccggcctctctccctctgtggaatctggtagagccgatgg

SEQ ID NO: 565334 - DNA, 143 bp, Homo sapiens
  misc_feature (109)..(109): n is a, c, g, or t
cccgggtgtgcggaacaagtcattagtcatttcttataactgtgttgtctgctatttagggagtgataatcatgaatatcttattgacattcagattaaatatagtgtntatgtgaaaactgagagattcttgtccttctcat

SEQ ID NO: 565335 - DNA, 697 bp, Homo sapiens
gcggtgatcctgctaccctgaatctgttcctgagtaacatggagcggatgctgcatgacaaggtgcatggcgtccgagtgattggaagctccacattggacactctgccacctggtcgctcagcggccgcggatgcctattaacagatttggactgcactgctgcggatctggcggtgccacagtcatcatcagagaagcaggcggcatcgtgatagacactttctgggtggaccccgtcgacctcatggcttgctagagtgcgttgcttgtccagcacccgggagattggcgatactcatagctcaggccttacagacgattaattatcgggctgggcatgatgacgaatgtgacttgggctgaagcaaagttgctcccaaggtctccctgggctgctgtgggctcctgatgaggattggtcctcgtgggccatcgctccatgtcaggttggctcatgcatctgtggtcctggtgtaagccccaggagggagttgtcaggctaaagtgcagctgggtgtgccttttataacatcgacgatcgtcatctcagcaagatttggtgataaggggtgtactctcttttaatctcacggtagcctttttcactgttacaaacgtggtcgccgtgtcacggcgcaagagctccctagtctcctttgaatacgtcctcgatagtcaaccttgatttcccccca

SEQ ID NO: 565336 - DNA, 122 bp, Homo sapiens
catcactttcatcacaacaatttatcaattaaacccccgtgccataaccacaattaccaaagcgccccatcttcgtctgatccgtcctaattacagcagtcctacttctcctatctctccag

SEQ ID NO: 565337 - DNA, 270 bp, Homo sapiens
cttatttttcatataatttggagaccttgttatcaaataaaatgatgagtttctgtgcctgtaaaaaaaaaaaaaaaactaagtgaagtcatcctttccccaaagggaccccgggagagatgttcgggccctcggcggactacttccaggaatcagcacctcagggactattggagaatgtggtgctctctatgggtcacctggaagactcggttccccggctggcaaactcttctcttctggccctggggtacgtctggctggtggccg

SEQ ID NO: 565338 - DNA, 1614 bp, Homo sapiens
gccacagcccagagcacgtggagatggctttgctcagacaccatcctagacggcctattccttgtgtctcagaaaatccttgagcgagcaagcctctgatactatggtaatctggacgtgatgcaatcgagagctggatgcatgacccttggctggcctcatggctgactacggggcatctctggccaagacagactggcaaggacggagatcccggggcaagaagttcctggcagggaacagcagacgagcagccagccgacaaagacagcgaccagacgaaggcattcgagcacagtagcacggacccacccggtagataccaggaatactcctacacgaagcctgaacagcacaaacccaggcacggcatcagcgcacgcaggaacacaccggcgacacaacacagaactgggacgaaacaccacaatcctggccggagacagagacagcactagggacaacagcgcgacccacccaagaggagggacaagggaaccagagcaagccgaacaagacaccacacacaatccaacaccagagggggaacggcaacaccgtgagaacaataggcacacaatgagagccacaaacaggccaccagtagaacaggaagtgagtcctcacaggagagaaaaaccacacaaggacagaacgcaccacgcagagacaacagacctaccggcagcacactacgcgatcaactactaaacagggaggcagcaacactcaacacgagacagcagaaggagacgcaaccaccacgccggggaggaaaaccaacccccaaacgcctggggagacatgagagcaccgccggcaccaaggcggcgacaacacagcgtgaccatcacaccggctcgactccacataggcaaacagcagagacagacacacgataggacgagggagaacacaacaaaccgacacaggcgagaaatcaacccgaggagcgacaacacactacacaaagcggagtatcagccgcgcgaccagaccacaccactactatgtggcagtcaagagagcaatctcgcacaccacacagggaacaagtgacacaagcaaccaacacgcgcgcaacgatgagaacaagctacactgagcgcacacccaccacaagtagaaatgaagacaaaacaacgaacacctaagagcagagacaagtgaacacactagagcgaccatccaacagtatagacgaacagaggggcacacccaagcgaacgtagcgcaacagcacagtgaggagaacggacacacagcagctgacaacaccaacacatagcacacagaaccaaacaaccggacagaagcgagagcaacaaaccacacaacgaccagcctgatagacaacacaggatgccacgatcatcggaagacaacagcggagataccgcaagagtggacaacacaccacggccgcgaccacgaccacaaaccaactagggaagcgaaaggagcgaagaagtacgggtacagcaacacaccacgggcgcacaccgcgagaggaacaagacagccaatgagcaacaaatcacaagacgcgagaaacaaccacaggaccgactccaaccaacagtagacaaacactaacacgaaggtcgagacagc

SEQ ID NO: 565339 - DNA, 343 bp, Homo sapiens
  misc_feature (180)..(180): n is a, c, g, or t
cctggaaggcttttcccctttctatgtgtgggtaggctgaaaaatgcctcccccctccaggctgggttcaagtgctcacgcctgtaatcccagcactttgggaggccaagccgggtggatcacctgagatcaggagttcgagaccagcccgaccaacatggagaaaccctgtctctactnaaaatacaaaaaatcagccgggcatggtagtgcatggctgtaatcccagctactcgggaggctgaggcaggagaatcgcttgaacccaggaggcggaggttgcagtgagtcgagattgtgccattgcactccagcctgggcaacaagagcaaaactccatctc

SEQ ID NO: 565340 - DNA, 572 bp, Homo sapiens
ctaaatcagctcggcaccggttaacgcacgtggttggacgtataccctgtggatagagtcggaagccctgaggcatagggcacgcgcctccgaggaagataaacaggtcagctggagaagctagctgaaggagggcagcagtaaatcagagggtgtacgactgggatacaggccgacctagagtgagcatgtgatagtatccaacacgatgagttcagagccctcatgaacaggattggtctggctattcgtgccatataattgtatggaaactcccctccgagcggtaggttgcatggctgaatagcgcgagcgcagagctggtgaagaagatactgtgtgacgagcagagagggagctacaggcgctctacgccctccaggcccttgtagtgaccttagaacagcctcccaacctgctgcggatgttctttgacgcactgtatgacgaggacgtggtgaaggaggatgccttctacagttgggagagtagcatggaccccgctgagcagcagggcaagggtgtggcccttaaatctgtcacagccttcttcaagtggctccgtgaagcag

SEQ ID NO: 565341 - DNA, 791 bp, Homo sapiens
gtgtgtgagagccaggcgtacctctgcctgcccactcagtggcaacacccgggagctagtttcagtccttatgtggagcctcagcagttccctactttcagcaactcactggccaacgagccctgacacagcgagccaccactgcacgtggcttcagccttcacttaccgcaccatgactgcatccctccttcaactcttgcctccctctcttctagtgctgcgctgcacgcccctgctccgcgccgctcgcggcactcctgcgcgctgctcccatcccgactcgccgcgccataccgtctctcctcgcaacgactccttccgcgcgcccacgtggtcccgtcccacgtcgcccactgccacgcctacggtccaaaccgctgcgcgcctcacctctcacctaccatcgacaccgcccggcccgctcccgcagcgctcctctatggcctcctctgcgcttcttcgcctcggcgccctcgcctcaatgcgcctgccctacacgcgaccctggacgcagccccacgcctgcttgcccgccttccgcctgcaccgcctcacctctccctctacacatccgctccacttcacgttcacatccttatttcacacactccggcccctcggaaccgcccgccttctggtccaccgcaccgttggcccccttcgccatctgcagccatccccgcccccccctccatgccccccctctgggttaaaccccataactgccaaaaccgtagaacccttggcgccccttcgccaacatctcacaacacctattatacacacccc

SEQ ID NO: 565342 - DNA, 460 bp, Homo sapiens
aagctcggtaccctttatatatctaaactctccaatacagagagacagagtgctgaatggggaaaaaaaaaaaaaaaaaaaaaaaagcaagacccaggtgatctggtggccttaaaaaaacacccctcacttttaaagatacagactgaaattgagggattgaaaaatagattttctatgctattggaacccaataaaaagagcaggattatctatacgtggccattcaaacacaaaagatatccactaaaaacctgaaaatagagacaaaaaggggctttatataattgataccaaagtaaatccagaaaaaaaatgatgattgtaaattttattttcccccccccaacactaaagcttccagatatataacgcaattttttttaccactaaagaagaaaagatagactctcattacaataagagagggggaattcagttcccccattttcaggattta

SEQ ID NO: 565343 - DNA, 294 bp, Homo sapiens
ccgccgcccccgcccccgccgctacctcagaactgaacagtgttggctgcgggcgaaagacagaaggtcatgggaacatacagagacctacagggaagacggccatgggacaagggaggcagagtctggagttacgctgcctacagtcacggaatgccaaggacagctggaaaccaccagaagctaagaaggagattttacctgaaagcctctcaaagaaatcaatcatactcacacctcctttttgaatttctggcctcgtgaatggtgaaaaaataaatttctgtcgtctta

SEQ ID NO: 565344 - DNA, 955 bp, Homo sapiens
gcgcggtggcgtgatggagcggagcagagagaaacagaaatgggaaacctgcgtgacttcctgtgctctacaatcggatgacagaactctgttccagcgctgtgtgcccagttgcaccaccgagctctggaacgctgaggaggaggcctgtctgcacagttgtgttggaaggctgatccattccaaccaccgctcatggccgttacgtgcagctcatgcctgcctgtacaggcgccgatcggaagactacgaggctgcctcggttgtgccaggcgttgtgtggaaacagccttggggtctctccaatcaggcagtatgcataccacaaacccaggaaggaggggccttgggatggacccctcagattgaaagggacccggtgtggcaccttttggggtttgtgtgaaatcctaaaacaggaagagaattcgaagggttgcctggaaagcttgggatgtcctttgcttcctttatcccttaggagccaataataccccagtttttcacctccagtattgattttatattccggggcaaaggaacgctttgcctactttattgggcacaagccggtggtctagtccgtaagggcatatctggtgggattaagcaccatggaagttgagaaaaatttgtttcttatattgttaaagtgaacacccctggaggcatttgcggcgccttggtacaacggccgggtctgtggttgtccatttcagacggggtaatattgtcatgcccatagcttatatttcacaacaaactattagttaggggattaagcctacttaacgatgggcgcagatccagaaagtcccgagggccttttaacacggagatgttctgcccaattagagaagggggctcgtatgctaacgacagcacagggcaacgagccactggggtcaccggttggacgtcatttatggtgacgagaagacaacaaactagggca

SEQ ID NO: 565345 - DNA, 268 bp, Homo sapiens
ctcttcccctgttgacagctgtcattacaggatctccaaactttactattatatgccttctttcctgggatggatttcttgtatcctgggtcccatatttactctttcttggattatccactcatttacatagcgtacatactcttattacatcttcataaagtgcatgataagtaaaattttgggaaccacagatttctgaaaacgtctttattctatattccaactagatgtacattttggaaataacttcccgtcgactaatttt

SEQ ID NO: 565346 - DNA, 252 bp, Homo sapiens
caattctcctggttcggcctcttgagtagctgggattataggcatatccgccaccatgcctgactaattttgtatttttagtagagacgggatgtcaccatgttgatcaggctggtctcgagctcctgacctcgggtgattcacctgctttagcctcccaaagtgctgggattacaggcgtgaaccactgcgcccggcccaaaatctttttcatttgtttttttggtgtgtggatatctagttgtccttgaa

SEQ ID NO: 565347 - DNA, 520 bp, Homo sapiens
gaggacccccccgaacccaagagcaagtactaactagcataattttgaatttagtatataacacactttcatctgcactgggatacttatactatcacactaccttttcgtatttatccacctcaatttttaacttcattaatcttcagaagaaagaggtataaagtataggaaagtaataacagaatcattacgaggaaattactagcactgcctaaacattcagaagtctgtgacacagtttatgtctaggattgcctcaaaaacctaacaaaaggaggatcccgaattgaataatctgagcaccttgtcaactgaggttgatattaaattatttttcctgcattctttgtttcctttcacactaattaaatattgtgtacaagcttataaaattcaataatttgtattaaaatacaaaatccaataacaaccaggagttcttcggaagaaaaaaaaaatcacaaaacaaccccaacagtggtgaagaactatattaaagatggcttttcctaagaca

SEQ ID NO: 565348 - DNA, 768 bp, Homo sapiens
catcgaattccattgtctcgggactgcgcgcactgtgttggtacctgggattcgccatatgtctgttttgagacaccagtctccactctttcaactgaaagccctttgccagactgtccggatgctacacagttggtggattcgctactgtacctagtgcccaacctgaacaggtaaatcaacaaatctgcacgccataacactacgagccacagcttaaaactcaaaggacctagcggagcttcatatcccactacaggaacctgtcctgtaatccataaaccactatcaacctcaccacattaaactcaatctttacaatttgatactaatacatgttaaccgattagcccaatcccactttacacttgagacagtctactcatgcggcctcaaatctagctccatcgatcattcaccctttactcataccttttaaatttaaatgcccgacgatttatacaatctcgactgggaaaccccttgggtacccatcttaatactcctactatacatacatatttctccagctggcgtaatgccacaaagccctctccgttcacctttataacagttctcagcctaatgctcaaacgaaatcttttccgtcaatctttccaaaaaatctcttaaattatgattactcatctatttttaacccatacggcctatatcggctagtcccttttataatgaatatacctatatatgattgaactttttcctagtttgatcaatgtcacttttcacttggatattcatcttccg

SEQ ID NO: 565349 - DNA, 218 bp, Homo sapiens
ggtcatcaggatgaaactatcgtaccacccatatgtagcacaggaaaaaggacgtccttaggaaaggataatcactgctattcagtggagtggccactccctgcaggccattgcactagcttgtttctcagactggctcttactgagattgttttgtaaaacagcattgtaccatgtgtctttcatcatctgtattgtacctgagactagcaaagtcg

SEQ ID NO: 565350 - DNA, 187 bp, Homo sapiens
  misc_feature (29)..(29): n is a, c, g, or t
cctcccgtgtgaaccatgtgactttgtcnccccccctgatagttaagtgtgatcgagacatgtaagcagcatcatggaggtttgaagatgccgcatttggattccatgaattccaaattctgcttgcttgctttttaatattggtatgcttatacacttacactttttgcactacatgtagggaact

SEQ ID NO: 565351 - DNA, 171 bp, Homo sapiens
ccgctttttttttccattgaattaaagggtttctctttctctctcctctctccacttttaggttaaaatcctactatcagattgtcaggtgtctgggtcactttttctatcctttccaagtaattcaatccaaatcaagggacacattattaatgcttaaatcatgtaaaa

SEQ ID NO: 565352 - DNA, 159 bp, Homo sapiens
gtctctacataattcagcccaacaatgcttggtttatttcaatcagctctgacacttgtatagacgacttggccattctaacagttggtgacgtttgttcaacgcaacctatcgaccttgatcagcttcagaccacagcaactagacaaactcaacaaa

SEQ ID NO: 565353 - DNA, 284 bp, Homo sapiens
tgaacattcgtgtccacttgcgtttgcatggacacccacctgtaattgtctgtactcatatcaggaacagcaaagcgaaccaaaggtggctcgtctgagaagctctcctgacacatggcgtcttgcctaggaactcgatatcatacaatgccagcatcaccacgacttcaagaattccagggccatctatccagctgtttataccaagaatcggcgtactacaactacattttccctgtcatcctctagactccatctctgacatagccaattgtgacgtcccg

SEQ ID NO: 565354 - DNA, 307 bp, Homo sapiens
ctttcccccaattttgggggcccccaccttagaacccgggtgttcggccctggctgtgggggccggggccccctgggcctgggggtttttaggggtcccccctggtcccaaccctgggggaagggtgggccgggggttttttcctttgccggggagagggggccctaccccgggaaaacccttttgtttttttttggccccgtttcccttaaaagggaggttttttgggggggggcctttttttttttcgtttttttcccccccccccctttttgggggcggccattaatttttttttgggggtgga

SEQ ID NO: 565355 - DNA, 172 bp, Homo sapiens
gagatgagatttcacatgttggccaagctggtcttgaggtcctgacctcaggagatgggcctgccttgacccctcagagtgctgggattacaggcgtgatcacggcgccctgtctgttggtaaattgttaatatgaatactgcagtgcagcagggaagaggctttgccatct

SEQ ID NO: 565356 - DNA, 377 bp, Homo sapiens
  misc_feature (112)..(112): n is a, c, g, or t
gtgctttccaaccacagagtattacttgtacacggagaactacaaagggctcaaccgtgtgcaggggtgtctgtcactcccaaaaaccttttctgctaactgtgcagtttgnactcgccatgcacgcaaacaacacggactgtgccccttgctgcgtcgggcctgcctgtgccagctgctgggctcagttgatgacatggcagtcaggcgcggtgtaacaagaggcgtgcggggccggcgatccaaggggccgggcatatgaccagtgcggcaccgaactgagaagagggcctatccccccccaagcccctaaggctttggtgggtggtcaacgggggacattgacacaaaaggcaccctatttacataaataacgg

SEQ ID NO: 565357 - DNA, 443 bp, Homo sapiens
cgagctgtggccactgaagccgctcttcagttacggcagtggtcagctaatgactggtcagagagttccttaggtgcctggaagcgaagtctttgccgagtgggtctctctctgtgtgccgggcgtggcttcagtgctcggctaggcagtgctcaactttcccttagccgtcacctgctgtctgcacagcacctcaggtcagtcacgggtgagggctcagggccttgccggccttcctgaatatgggcacagctgcagacagccttacccacgtgcagggcacctagattcccaagaaggggcaagagctgttcaaaaccactacaagctggacatggtggctcacacctgtagtgtcagtgactcagaaggctgtaatgggaggatgacttgaggccaggagtttgagacctagcaagaccccatcccccacccaaaaaaac

SEQ ID NO: 565358 - DNA, 1379 bp, Homo sapiens
  misc_feature (257)..(257): n is a, c, g, or t
ggaacatggcggtagcaagagggaatacaggcgcgacagtggataaccaacgtaaactaatatgaggatgatctttacccgacgagcaacgatgtcctcaacgaggaaggtcagcatctcggccgtacaggagcgtccgtgcaaggtcacagagccctaatgaggcaggatcgagcgctgcgctctagtcgatgcctagagacctcactggcgatgatagatggcaacgcggagagccggaacaaagtgctgtagtngactgataaatcttatttaagaacttaaaaaatagtagcacaattataatatgtggcacaaaatgtgtgagatgcaatacgtgtgacacgctagggctcagtccagtagggttttgataccgtaacgtacatatcttagaagcaagatattaatctcatagctgggaagagagcggaggtatacccagtaagggcattttgcacgagtaggtaagctccccattggctcttctctcgatctgaaggtcgcgtgaagtcagagacaagggacatcgctcgaaagattctttggagattaccattagaactctaatattattagcacctaggttgttcgctttatttcaatggctgtgtatcccacaattggtctttcactctttttctttttgttgacctaaggtactgataaagagaacttattgtgttgattacaacccaataaattgttgggtaaaaatataggcacatggcttaataattaaatgataagtcgatcttaggacatatcaagtttatttaaacacgcaatagggtgaaggggtcatatttcacatttacattacatgccccaatttcaagtttttaaatgcgtgggtcacacatatggactgtggaatgtgtatttcacatataaggggttgaaatactttcaagtatattgaccccggtggtttgggttttttaagtaatttatttgggtgttgaccaatttccaaggaagaaaaacgttgagggttagttggagcggaacatactttggtggaaacattctaagtggggtgaaaagcgagctccataggaacacttgtgtctgcgggtagtttgtttcaaaagcatttttagaaccaagttttccccaacgaagaaatgttgggaggggggcgaaacaggttttataacaaaattatttacggtaattatttagttaacaataaacgagtatttattttcaaacaaatgggggcaatgggcgtatttgtggagaagggacacagatggttctcgctagaggataattttgaacacaattgggctcgtttgtggaacaccacatttgtttgtatagaaatgttacagcttcttattattaagaacccacttaggtgttggtctggtggg

SEQ ID NO: 565359 - DNA, 407 bp, Homo sapiens
taagggcctgcagggcgctgcactcgctggttccaaagtggagtttccagacagatcccattcttgcccatctgagaactcctagaggtggcccttgtccacatcccgatactcagcctgccgtgcagtcatggacaggagtcggtgttgatgccgaaagctttgttccgatgcctgggttgggtgcttcctgtcggtcagcggtcttggaccatgtccagttggcgtgagtcaaaagtcttgaacatcagccatgtcatgctgcccatgcctaactacgttgcgcattctgggtgacctgacttccagtgcggctgtcgcgcttctccgggcacgcttctgtttggagcccacgccaagtcccccaggggtcaggctctcgtagggtgtgcgcgcgagggccgaga

SEQ ID NO: 565360 - DNA, 219 bp, Homo sapiens
cactgccgtgatgagcagttgtactcgtgagactgcctatcactgtgggtcgctgaaacagacctatatctagataagggggtgtctttccagacttaatttactaagagtctgaataagggatggataccaaatcttacgaaataccttttcagcatctatagagctatcataaattcttccctattaattgaagctgcaaatgaaggctcctgcaca

SEQ ID NO: 565361 - DNA, 430 bp, Homo sapiens
agtgagcactggaatacaaatatgagactatgctgccctcctagatctcaggcattttcatcatcatgaaaatgatgatcagatgtatactttgacatacattggaggtggtgatggagtaatataaggtgctaatgggaacaatttgagacatcggatcagattgggattgggagggtagtagactgacttctatttaaaaattattctctgcataggtatttatatagttcaaaactcaaaatatataaaagagtaaaatcgaaagcctctctgctacctctgtcctccagccaccctgtttgtccttagaagtaacccattattacttgtacattcttttgaggctaactcttgaactaaatcttaaaatggtcattcagattaagtcactaagaagagaaggggatagttttccaagcagttgccg

SEQ ID NO: 565362 - DNA, 633 bp, Homo sapiens
  misc_feature (412)..(412): n is a, c, g, or t
  misc_feature (498)..(498): n is a, c, g, or t
  misc_feature (633)..(633): n is a, c, g, or t
ggcgggcgcccctcccccagcctcgctgccgacttgcagtttgatctcagactgctgtgctagcaatcagcgagattccgtgggcgtaggaccctccgagccaggtgtgggatatagtctcgtggtgcgccggtttttaagccggtctgaaaagcgcaatattcgggtggtagtgacccgattttccagttacagcagatgaatggaacagcaaccatacgatagaaatagagatgaatcagactctggaaataccatgctttcaaaatagctcctcagaaatttcatctgagttcacctatgcatggtcggtggaggataatggaactcaggaaacacttatctccctcacctcatcagcaattgcacattacttaaagatagagtcaagcttgggacagactacagactncacctgtctccagtccaaatcttcgatgatgggcggcagttctctagccacattagagtcgggcctaacacagactcactggcatnctcctgtcttctgccctgctgtttcttgaagaggaagcaccctattatgctgcagagcacgccacattgtggcagtgcttgaggcctgtttccctggtacttgcattctttgttggccagggggatgagggtggn

SEQ ID NO: 565363 - DNA, 151 bp, Homo sapiens
aataggtgcatagtaggtgctgcagatgtagcggtaggcgtacggcaggctattggttgaatgagtaggctgatggttcgataaaactagtatgggcataggggtgtaggtgtgccttgtggtaagacagtgggctagggcattttaatct

SEQ ID NO: 565364 - DNA, 126 bp, Homo sapiens
ttttctcgtttacatcgccatctgtggaacaaaatgctaactatacctcacatagggctgtttgaaaaatcttaatctgcaatcaaaattaggagctcgtgtttaagatttcaaaacccctcgaca

SEQ ID NO: 565365 - DNA, 137 bp, Homo sapiens
  misc_feature (122)..(122): n is a, c, g, or t
aaaaagaaaaaccagcactgacctcaggacacagacttcccccttctctagttggccttgccaacccttgcaggttatgcttcccgaggcccggccttgcgaaagtgagcctgtcgtccccnttttccaagagcctt

SEQ ID NO: 565366 - DNA, 343 bp, Homo sapiens
cgtcgacatttctcataacttccaaaatctattttcttcctcatacctgatgcatatactttcttctccccggctccttcagctgtactcactctttaggtctcacaattaccattgttcctggcccggacttcaatctggcctctcacattattcctgatatcacacctgacccccatgactgtatccctctgatccacctgatattcaccccatttccccatatttccttctttcctgttcctcaccctgatcacgcttgatttattgatggcagttccaccaggcctaatcgccacactatagcatagcctgactttgctggtgtgtggcgagtcgacgc

SEQ ID NO: 565367 - DNA, 270 bp, Homo sapiens
  misc_feature (263)..(263): n is a, c, g, or t
tgcgggtctcttcgtgactagcaattgctcagcctcagggttgtgcccaagaggccctggggtccatgccctgtccaggccttatgccccaaggcacaccttgtttggagaagccacagcacctgggagcaacaaccagccccatccagcaagcgccataggtgtgaaatgtgccacaagcattgaccgctgggcttggccagatccacagaacgagagcggccggtgtaccccaaatcacgtaagctgagggagcacacgcncgaggga

SEQ ID NO: 565368 - DNA, 920 bp, Homo sapiens
tggggtcgtgagtcccactcactgtccggacgaggacggagaggtatccgtggctgctatcggtggatgacgcctcttggtcctgtcctccggaccgccgtatggccagtcgcggcgacgccagtctcccgcgggctctcgcacggggccgccgacgccgtcgggccgtcgtcatccgctcgctgtgtgcgctggcttagctgctccaccgacttagttgaggcttacgacgaaggtggaagactgtgtagccaggcacgatgcatttgccccctgagctcctctttgggcaccggaccagcttgaaccgctgcggttcttggcggtgcgcctgcagggcttccgactatcgtcatgtgcctcatatgctttagagcgatgggagtcgtgtaacggaagcggttatcctctgcgctctgctggtgtacaatccgtgggcctgggaagggactgtcgtggatgcttgctgatcggccagctgcgtgccgtaggcggagtctagccgactcggttaatggctggagtggtaagtcggggttgcatcgtgttggcaccctcgggttcatgggaatagtgagcatgcgccagaggtgatgtgtgccctcgggtccaagacacttttccttgattcactgtggccatgatctttggtgggaaggctgctgaactggactcgtcaatgacattaccagccctaccatggtcctcattcgacgattcagcaactacaggtctggaccatcagacgtattgagtaacatcatgggcttgcagggatgtgtgcgtaatggttgcctgtgcatgtgtgagcgaaccagctgaagaatgtgacaagaggagctggaaaggagcctcggtcaaaaagcactatgcatgaaggaaaatgggtaacaaattcatgcatatcaaagaatgatact

SEQ ID NO: 565369 - DNA, 341 bp, Homo sapiens
ttcgtcgacacgaacaacggcagaccgccccagccaggttgtggcgtagacctcgacaagcgccagggcctgcaaagaaggcatccctggccctggatcaacttcctcggacaaattgtacagcggcccttcctagcagtgcctgccgtccccggcggactcgctagcacccactgccaccacgctcctcggaattctcagaacgacacctgcgacactgtcccgcacacagctgacgctcccctggagaggtttctgtgggcccgcctgctgtgcctatcacgtcaaccagtaacacttgtagtgccgttcttcttcgacgtaagggtaccgcagctcga

SEQ ID NO: 565370 - DNA, 959 bp, Homo sapiens
acaaaaataagtggatgtggtggtgtgcgcctgtagtcctagctactcaggagactgaggtgagaggatgacttgggcctgggaggttgaggctgcagtgagctgagatggtgccactgcactctatcctgggtgacagagtgagaccctgtcaaaaaaaaaaaaatttttttttttggcctgtggacaccaaccaagtggttggtcccatatggtggatacttctataatagataactttttgggttatgattatggccccttatgaaaatgtccatttggtagcaaatcttctgcctgaattatttgatatggtaatggcggggagggggggcatacgtaaggcggggaaagggcgcctggcccagggcgtattcggaatcagggatttacaaacaacaccaacgaacaccacaaaacaaaacaacaaacttggtcgcggcgcgccgtcggcgcccagaaaaaaaagtttcacaaaacccacttcgggggggggccggcggcggcccagtgggttgcggtcacctcggccacacggccgcgcccaaggaggaaactctgggggctgcgacacacggtcgcggcgtttccccacacaaaaaaaagaaggcggcggcggcgaaagggacggtcttctggaacaaatcccgaagggagctcggcgagcccaccggggcgttcccaacacgcaggggagcacgaagggacagccaataaaagaacccgcggcggcgggacggaaagagagaacaagcagatgcacatcagaacaaaaacaacacaccagaacgagcgacgacaacaccacaaagaagaacgagatcacagagaagcacaaacgtacaacagcgacagacagaaatacaaaaggacaacgcagaaacacgaacacgaagcacagatagtacagaacagagacaacaatacaagaagacgcaccatagaagcgtacaactgta

SEQ ID NO: 565371 - DNA, 266 bp, Homo sapiens
ctgacctagaggatccccttgcggcgcgagacaagagtttgagcttgcagtgagctatgatcacgtcactgcactccagcctgggtgacagagcaagaacccatctcaaaaaaaaaaaagcgagcgcgagacagagctggcagaaactctaatggctaagggctggactcgtagagtccgatagagataagtgatatatcttacagctgtattggacatgtgtcaaggggtggggcaccatttgagccacttgagcagagcagccc

SEQ ID NO: 565372 - DNA, 1013 bp, Homo sapiens
  misc_feature (1)..(1): n is a, c, g, or t
  misc_feature (66)..(66): n is a, c, g, or t
  misc_feature (76)..(76): n is a, c, g, or t
  misc_feature (83)..(83): n is a, c, g, or t
  misc_feature (86)..(86): n is a, c, g, or t
  misc_feature (88)..(88): n is a, c, g, or t
  misc_feature (90)..(90): n is a, c, g, or t
  misc_feature (100)..(100): n is a, c, g, or t
  misc_feature (107)..(107): n is a, c, g, or t
  misc_feature (192)..(192): n is a, c, g, or t
  misc_feature (285)..(285): n is a, c, g, or t
  misc_feature (298)..(298): n is a, c, g, or t
  misc_feature (382)..(382): n is a, c, g, or t
  misc_feature (433)..(433): n is a, c, g, or t
  misc_feature (469)..(469): n is a, c, g, or t
  misc_feature (475)..(475): n is a, c, g, or t
  misc_feature (483)..(483): n is a, c, g, or t
  misc_feature (549)..(549): n is a, c, g, or t
  misc_feature (551)..(551): n is a, c, g, or t
  misc_feature (554)..(554): n is a, c, g, or t
  misc_feature (558)..(559): n is a, c, g, or t
  misc_feature (590)..(590): n is a, c, g, or t
  misc_feature (596)..(596): n is a, c, g, or t
  misc_feature (599)..(599): n is a, c, g, or t
  misc_feature (603)..(603): n is a, c, g, or t
  misc_feature (618)..(618): n is a, c, g, or t
  misc_feature (620)..(620): n is a, c, g, or t
  misc_feature (622)..(622): n is a, c, g, or t
  misc_feature (624)..(624): n is a, c, g, or t
  misc_feature (780)..(780): n is a, c, g, or t
  misc_feature (799)..(800): n is a, c, g, or t
  misc_feature (815)..(815): n is a, c, g, or t
  misc_feature (851)..(851): n is a, c, g, or t
  misc_feature (868)..(868): n is a, c, g, or t
  misc_feature (875)..(875): n is a, c, g, or t
  misc_feature (885)..(885): n is a, c, g, or t
  misc_feature (924)..(924): n is a, c, g, or t
  misc_feature (950)..(950): n is a, c, g, or t
  misc_feature (1013)..(1013): n is a, c, g, or t
nttggttcttttcctcttccaacagtcaggatttaaacgtttctatacttcagccaaagcatttgnatctaatgtntacattnttntntnttcattcttnattttcntccacctgtcaccaaggctcacacttatggctctgttatctttccctggctacatctgagtatattccactctgtcttttttggnaaaaagcatgaaggcattcattggtcttttgcacttattaggggaggtggcactcacagtccctgagctgtggtttttgacagctttagcatncaaagggttgggngggagctgtgatgatccaggtgagccacagtttttactgaatccagatcttgcaaagtcttgaccaccaggtcctccacaaganaaagatgcacgacgctggcgagccatactacttaacacataaactgcagangagtccataggtgtgaagtcatagcttttaaatgtntcaaanacacctgnatcatcaaaattaatggcatcggggtgtccaggaggataagaaatacatcgccaatatgtacttcncnacntggnntgccatgctgtaccacagtcaagcttggatnaaatgntgnccancctttatttttcacntngnangggtggtccagcttacactctacggtaagtaaaccatcttctactgtaccaggatcaaaagtcaacttcagtacagactcgccaaatgatacactttcttcatgtgataacaactttagaccatcagaaccatagcccttgtgtatgcccatttgnagatcttcctcattatcanngccttcagctctagncaaatctttcaactcttggcattccttattgcttcncttatgaaagcacagtngtgtgcntttcaaaaanaagtgacagacagttgaaggccaggaattgcaccatccnaaatcatcatcatctgacagggaggncatgcagaaaaatgccagaatctgactcactatttgccctttcgtgtcttactggttgtttcn

SEQ ID NO: 565373 - DNA, 163 bp, Homo sapiens
  misc_feature (154)..(155): n is a, c, g, or t
gctggacggcatctatgctttatttcaccaacatttgttttcaaaactatactgaaccaaaacctatttggcatttattgtcactaagatgtacgcaagaaaagagttagccacattctatatcaagaattagctaagaattctataacaactnncttctgct

SEQ ID NO: 565374 - DNA, 368 bp, Homo sapiens
tgggcatcacgctactggctgctgaccaatagatatgtgaaccagtcttggtctgcgacagtgatctgatataaggacctgccagtactggacagagtcaatccatgtagcatgtcgtgctcgtcaccgtgagaataggtaagagttctgttcagcggttgccataatgcctctgtccaatccgcaacccatagcatttatcttcttggccatctgatccagccgtgagtaatgtcaggacagaagtcacggcttgagatattagcttctgacgtagtcgagaaatataccactatcttcttgtcagtaagatcctgccgtgtgtggtgccaggacagaagtggcgtcatgggatatgactcaagagc

SEQ ID NO: 565375 - DNA, 666 bp, Homo sapiens
tgcagtaggcccgtataggtataaatctataggaggcaaaagcttgcatccttcctgttttcaagaagtgaatgtcttaccagtccattattatactaatcaaaaggcctggatcactcgggataccttttctgattggtttcataaacattttgtaccagtgccttatgcttattgcagggaagctggactgaaagaagagtgaaagattttgttatccattgataactgttctgcttatgctgcaaccgaaattctcataaaaaataatgtttatgccatgtacctttcacccaaatgcgacttcattaattcagccatgtgaccaggatatccttagatcagtgaagggtaaatataaaaacactgtcttgaacatcatgctagcagcagtgaacagaggtgtgggtgtggaaggttttcagaaggcgtttagcatgaaggatgtcatacatgctgttgccagcacttggccaacagtgactaagacacagtcatgcctgcttggcataacctctggcctgtgactattcagtgatgatgatgatgatgaacaaggtagtgacttggatggattccatatgttaaagtgagaaaaaaatgatatctgacctccttttatatgcaaaaaatacatctttagagtctgtcagtaaacggaaagac

SEQ ID NO: 565376 - DNA, 189 bp, Homo sapiens
accagggcggcggtgacggaatctcagttacagggcacttcagacaccacctccaacaacacagcaaccggtgatttccacaggggcctccagcttcctcagcagtcacgtccccctctcggagtccctccccttctgcctcagcctccacctcggaggcatccagggccagggagaccccggtctcca

SEQ ID NO: 565377 - DNA, 402 bp, Homo sapiens
agagcagtgacggaatctctgctctctgcaaccttgcctcctggggtcaagcgattctcctgcctcagcctcccgagtagctgggattacagtgtcacatggcgtcatcccaccactctaatgatcccctgagctccccctcgacattcctccctctcccccatccctctcctgcgccccaggcaaccactgatgtctcactgactccatagctcagccttttccagaatgccgagagctggaatcctacagtcggtagccttttcccattggcctttttgaccaagcaataggtgttcaagtttgctccatttttcatggcttgagagctcatttcttttcagcgctgaataatactccattgaccgcgtgcaccacagggcgcctgctcattcacctatt

SEQ ID NO: 565378 - DNA, 401 bp, Homo sapiens
gttgtactgggctaaatttttgtcagtatgtgattgactaatctcaagcttagggtgaaccctcgtagtaagctcaaggtcagttcgggtacacttgaataagcgtagaattgagcttatttcttgctcacttttcagagatttcatgaggcagttgctcattctggatgctaattatcctttatatacttgataagtaggtagggtagaattctctctggcaatggtctatgtgtatattattattttagtctagaggtgttaggtacatgtaagtcttagaatttcccgacgtgatgctttgcggtgaatctggttgaatgtgatcagtgggaatacccagtctgccacctttatccttgatttctcagcattttattcagtaaacaggcttacctttg

SEQ ID NO: 565379 - DNA, 206 bp, Homo sapiens
acagtaaatctgacgggacatagtctttggggcagtatgatagatgcccacagcatgaagcaaatatcttttattggaactatgcacacttcaatacttcgccacttatagtctatagaacgggagataacatttctctatcacagagagatcacgcgacctatttacggcaccactccgacaataacacgaacctcgaccgggag

SEQ ID NO: 565380 - DNA, 472 bp, Homo sapiens
  misc_feature (37)..(37): n is a, c, g, or t
atctatcctactgtacagtatccattagaagtgcttngtttgcatttaattgaatcaggaaatcttactgatgaggggcagcagtattgttgtagattagtggaaatggattcaaaaagtggtccaggcctcattggcttaggcattaaagcattacaagacaaaaagtatgaagatgctgttaggaacctaacagaagggttaaaggaaagccctgtctgcacaagtggatggtatcatctggcagaagcccaagtcaaaatgcatagacctaaagaagctgttctttcatgcagtcaaggtatttttgatactttttgggttgacatataagggtgaccaaccctatttgtttttatcttaaaggacaaagatagtgatttttaaaaaccaaaatgctatattttgtattttaaattgctaattttaatttcaataagtttaaataaaagtctgcatgcatgtgtaaaaa

SEQ ID NO: 565381 - DNA, 188 bp, Homo sapiens
tcgaaaaattatttggggggttttttttttcaccctcccttataaaccacagggtacctggaggtttggggcctttttccgggggaaaaaaaattttgaacggttaaacaccagggccccttggttaaaactgggggtaagggggtttttttgcgccggggttaaaaagggggcgtttttatttgggg

SEQ ID NO: 565382 - DNA, 375 bp, Homo sapiens
  misc_feature (100)..(101): n is a, c, g, or t
tagtagatcacagcgcaaattacccctaataaattaattaaccactcattcatcgacctccccacccatccaaccatatccgcatgttgaaacttcagcnncacttctttggcgcctcctgatcctccaatcaaccacaggacttattcctagccatgcactacttcaccagacgcctcaaccgcctttgcatcaatcgcccacatcacttgaggcgtaaattattggctgtatcatccgtaccttcacggcaattggccttcaatattctttatcttcctcttcctcaaaatcggcgaggctatattacggatcattctctactagacctgaacatcggcattatcatctctgcaactttagcacagcttcatg

SEQ ID NO: 565383 - DNA, 365 bp, Homo sapiens
  misc_feature (162)..(162): n is a, c, g, or t
  misc_feature (199)..(199): n is a, c, g, or t
  misc_feature (248)..(248): n is a, c, g, or t
  misc_feature (256)..(256): n is a, c, g, or t
  misc_feature (272)..(272): n is a, c, g, or t
  misc_feature (292)..(292): n is a, c, g, or t
  misc_feature (318)..(318): n is a, c, g, or t
  misc_feature (345)..(345): n is a, c, g, or t
  misc_feature (355)..(355): n is a, c, g, or t
caacaatctgttggggcgcttcgagctgagcggcatccctccggcccccaggggcgtgccccaaatcgaggtgaccttcgacatcgatgccaacggatccgtgaacgtaacggccacggacaagagcaccggcaaggccaacaagatcaccatcaccaacgncaagggccgcctgagcaaggaggagatcgagcgcatngtgcaggaggcggagaagtacaaagcggagggacgaggtgcagcgcganagggtgtnagccaagaacgccctnggagtcctacggctttcaanattaagagcgccctttgaaggatttnggggtttcaagggcaagttcagcgagnccacaaatangaagtttttt

SEQ ID NO: 565384 - DNA, 117 bp, Homo sapiens
cctgacgttcgcctgcggagggagagagagttatcttggtttcctttcacttggtttcggtctgcttcaaagcaaacatcccagttgcaaatgttctttgtggctcgaatcctggca

SEQ ID NO: 565385 - DNA, 1616 bp, Homo sapiens
  misc_feature (600)..(600): n is a, c, g, or t
  misc_feature (710)..(710): n is a, c, g, or t
gtccttgaaaagagtgtggtggtgaacgcacccggctgctgttttgcaatgattgtcttcatggagagatgaattggtgtgatgtttgatgtaacagctcccatggggagcgggtggttgtggttgttctctcgctgttacgaccacgatttgaacgcacgtttgcgacagccacaagcgttgtgacagaagaatgtattttttgccaccgacacgaccaacaccaggtgtgcttgggagagagacgattatatttgtgtcctccagaaagccgcagacgccaccaacctttttttgtggggacaacactagagttagttctgcttggtttccgcgggtaatataattctctccgctttatgttcctcaaaaaggggttcttcctccaagaggagagccgcctcaattgtcttatcttacctcaaaatcccctccaccaaccacattttaaagagggggttttcttttttaaagggaactttatattatgacagataaaaaatgtggggctttttcttagaaggttgttttaaggctcccaccgttggagatctctaggggattgagcgccccccacaccgtccggagcataaaagtgtntgggtgctgcccccctttaatgggggaagaatactcttgtgtgtgtgctgtacagcacgccgcaaggcggtggccccctcagatggtggacaactccccgaaaaattttnttgggggaggagagagaaattttttgtggagagaaatggccccccccactctccacatcgggtgagaagagaaaagtgtgtattataacatagataacagatttgtatccctctttggaggggagaccttctttgtcgcgcccacgctgataataacactcgcgtttgtgtgtttgttggagatgtttgtatatatattatagaaatgtctccccacatccccccggcgtgttttatactcttctatagatgatatatagagaatatagggagactacaccacacaaacatttttggtgtctctttggggagccctctctcccacttcagacactctatatttatccccgctcggaccaccaaagatataggtgtgtatagagagcaacagagagatctctcgagagatttgttatattggagagcgctcgagaatttgttctctttttgtagaaataggagaggtatattcccccgctatgggtcccaaacattttgaaaatccctcgctagagagagaatatatatctatctctctgtggctcttgtgtataaacacacatacacatagagagagagtgtgagagcgcctcccccaccccacagagaaaggcacacacaatacatatgggcgcctcttttataggaccacactctttatatgtacacaggtgaagaagaagagaaaatggcacacatgtgtcctccctatttgagatacacgagtaccacggcacatatatgtcactcttatttgcgttttggtttatttgcacctttgcacaaataaatgcacattttttacacacaaagtggagagaggtttattggcacacactttctgcggtgaggccacgtttatttggggccaagtttcccaaaaaaattttcctttcaagttttgta

SEQ ID NO: 565386 - DNA, 178 bp, Homo sapiens
cgtgtggggtactaagggcagtttcctaattgccatctcactggagatgtttaaagttggctctatcctaatgactcaaaactggttcttaactaccatgatgctttgagggcccggaattataaatatatattatattttaattgttggagattattttgacacatttctttgatac

SEQ ID NO: 565387 - DNA, 127 bp, Homo sapiens
cagagaaaacgccggacatacactacatcggcgatcatctgcaggggggtacggcgaggttagcgcggcttgctagcacgtcatcaaaacagctattagtggcgagtagagtaacgaagtccgggag

SEQ ID NO: 565388 - DNA, 2073 bp, Homo sapiens
  misc_feature (201)..(201): n is a, c, g, or t
  misc_feature (594)..(594): n is a, c, g, or t
  misc_feature (898)..(898): n is a, c, g, or t
  misc_feature (1721)..(1721): n is a, c, g, or t
  misc_feature (1837)..(1837): n is a, c, g, or t
  misc_feature (1928)..(1928): n is a, c, g, or t
cgtgacgtctttgtagtcgtctgtcagtgtacttggttgcgtctcgcgtgctgctcgggtcttggtctagttagcatcatgtcaggtcgctgctcattactcgtgtagttatccccgtccggtgtgtggccctacttgtgttgctcgtcggcggacactatggcgtgttgtcctgtagacagcgtgcgggtgttttgtccnccgcggcgcatgtagttgtgtagccagcggcctgtaaggtggctagcgcgcgctgttgggggtgcgaattgtttcagcgcaccaggggtgtgttggttttgtcggttgtagtttagttgtcgtctgacgcgactgtttttgaggggggttttctactcgtgcgtaccatgtttccttcgggggaacactccaggagtacatcttgccggcggttgtggcactattgacccagagtttttagtgggcgctactcgaatggcgtctcgttgttggtgcgctcgtctttagttaaaggtggtgcgtcactccgggcgcttccttcctgttgcctagggggtccgtctgttcattcgacgaagatgtttcccgtacacgatcccgatagtaaggcgnaaaaagttgttatgagggggcacccccaacagtgataataagtttctttgtgggggataagctaccatatgtagtagagaggactctttgttgtctctttgtataatatggctcgctgtgtcccattagggaaagttgctccacaacgtggttgtcccataatgggtgaattattttttggggacggaaatttaaatattgactcagactcacatggcgtgtggtgttagacaaccgacagtgtgtccaccgtgggttccgccgtcccaccgccgtgtttgaatatagcgcccggtgctgatanttccgctctgaggatagataagacaccccccgggtgtgggggcggccccacacaataggggatgattgttatatagatgtgaatgtgtgaccatcaatgtgttttggggaggaagaagacctgttttggggcgcacacatcaattaggtgtggtagatcttcctgtcgtatcggtagacacactacaagcaaagtgatatttgttggttgtgttgttgtcgaccgccacgaacatgagttggggtgtgtcttaatcaatttggagtacgaagcttgtttctctcgggtggaagattgtgtaacaaaaccgtgttctttgtcaacagcgcagggaacgccccaccgtgtgggcaacataacacatttgggggcccacgccatcaacacacgtcgtgagggggggtgtacccacacatggatgtagaatatagcgcacagcagcattgtagaccttctttgtggagccaacaccacaggtgggtggtgtagaatattattgttatatatgaaataggggtatcccacaataggactcacggggtatacacgccgctggggagaagatttcgcgtgtgtgtgcgcctctgtgtgtggtgtgtataaaatgtgggggagatacgcgcgcccaccactagtagaacacacatgtgtcccctcgtgaggaatgggtaataggtttctgtaggggcggctctccgctgatgaactccatctgtctcgtgtagtgtcctctggcttataggctcggtagagagataatggtgagtgtcctctgagtgataacacactctgtgagacacacctcgtgatatttctctataangaagtggtgatattgttagtgtgtgagaactcttgttatcacagagagtgtggctctttataatagtacacctcgtgaagtggaggagaaactgagttttatagatatcaactctnggaaagatttgtgatatagtgtgttgatataaaactgccacgtgtgtgaaataggtgtctggtgtttcacatgaccgcctcggattgtgtngccacagagactttatatgtcaccacagagtggggtgattataacttgtccagaatttttttgtcaatcaagccctgtgatatttaaaccccgtatggcaccttagtatgaggctttttaatagatatcccatattcctaacgtt

SEQ ID NO: 565389 - DNA, 1130 bp, Homo sapiens
ggaagatgccggcgccatggctggagaaggaggaggctggcggcaggaattagcgaggaggaggcggctacaggtatgaccggtcagatccgcctgtggggactggaggcccagaaacgggtgcaggcctctcggcgatgcttctatgctgggactttgaaacggactctgcgcgtgctgaaattgccaagaatctcatctctggcaggagtgaaaggactgaccatgctggaatcacgaagcagggtaactccagaagatcccggagcatcagttctatgagttcgtactggagtcatgttggaccgacatatagggctgaaggcctctttggagccgagctcagaatctcaaccccaatggtggatgtgaaggctggacactgaggatactagagaagaaagcagagtcatattcacactcagattcgatgctgtgtgtctgacttgctgtatccagggatgtcatacgttaagagttgaccagatctagtcacatacagatagcatcaaagtatctatatacagtgagatgtttgtggctaccatggatacacatttgccaatctaggagagcatgagtttgtagaggagaaaactagaagttgccaaggtagcaaggagtagaagatggtgccgacacaagagagcaaaatgattcttctgagacaagagggtcagaataaggtggtctactgccctgttaaagatgcctgggaggtgacgtggagcaagtgagaaagcacagctgcctgaggggcacaacttccgactagattctccttacaagtaatgcttctccgaaatgccccagttttcacagagataggaaggaaattaggacacgcaaatgggtaatggcacacttatacgggaaactcttcaaaaagaaattgctttctacttaataggacattaagggaccaggctattgtgtaggctatagcccacagagtaacataagtagtgtagcacacacagattacaagtacacgctgcacactaaactgatcgaattacataaaaggatgcgaagagaaagaaattcgaacgcaataactatacacagacaaacgagtatgttctacatacatggtgaggagttaaatagaagtatagactgattaataa

SEQ ID NO: 565390 - DNA, 216 bp, Homo sapiens
ggggatttttttttttccccttttaagatttaaaggtctcccccgcgtcccccaacaccccaaagatccttccttttggggggggttttgttttcccaaaaaaattcccaaaccaaatggggcaaagtctttttttttccccggggaaccaagggaaaaaaaaaccgtttgtgtttttccggtttccctgaaaaaaaaaaggttgttttggttcca

SEQ ID NO: 565391 - DNA, 500 bp, Homo sapiens
  misc_feature (238)..(238): n is a, c, g, or t
  misc_feature (243)..(243): n is a, c, g, or t
  misc_feature (370)..(371): n is a, c, g, or t
ttgagcgcaataaaggtcaggatgatgtactccagagacatggcgtaaacgcctgaagtgcaaaaataacgacgctaatcacgttaataatcacccacaacagccagttttccacatacttacgcgtcatcagaatcattgccacgatagataacaccatcatgcatgaatcccagaacgggaaagcgtccggttgcagttcaggcatcacaacctgtaatcctaatgcttgcatgancatgnctgccacgggggtcaaaaatgcaaacaccggattgataaataccgtcatcagaccaatcgaaacaacgcaaaccgccaaccagctgagtgccttcggcaatggcaaccagcgaatttcaactccgcnngttctgactggtttgtcgcgaccacgcataccaaccgtaaatattcgcggcaaagaaaacacctgtaatagcaggctggcatacagctgaatctgaagaaatatgccaacaaggtgacgttgatcaggc

SEQ ID NO: 565392 - DNA, 672 bp, Homo sapiens
agcggacgttgcggccaccgagcagccggctctcagcacatccccctttcgcacctgtctcctgttccattcgccttcctctatctttcctggcccacgccgctccgaggcctcgcgaacgccgagcctgcagacctgcccccgcggacaacagtgagcttcttgtatggtagtcgctcttctaaaacttttaacaccaaagaagaacattccagagggttctcaccagtatgagctcttaaaaacacgcagaagccacacattggcagatggcaaccattcggatggctgtcatgcctttccctgaaggggaagcatctcacatgaactgggttgcaaggtaaacactgtggattttcacttccaatcgagatcaacatgctattatggaacctattcacagactatcctggtacagcaaggaccaggttgtcccagtggattgtacaggatgggccccacacatactgagataatcactgggggcacgtaatgtgacaaccgaacacccttcacacggagcacccctacattaaagcgtgacttcgtggaacccaaagaagctaatattagaatttacgttaggaacggaccttaggggttcaagggaaccaggttgggatgactgaagacgttagttagcccatcgaacaacattggggtcccgatccc

SEQ ID NO: 565393 - DNA, 113 bp, Homo sapiens
ttcttttccccttctttaagggttactgatcacattcatataaagttcaaacatcttagcctatgagggtccctcctccccaaactctgctgtgcgatctggcccctgtgcca

SEQ ID NO: 565394 - DNA, 782 bp, Homo sapiens
ccacgcgtcgggccaggtgtggtggctcacacctgtaatcccagcactttgggagaccaaggcgggcggatcacttaaagtcaggagtccaagaccagactcgccaacatggtgaaaccgtatctctaataaaaatacaaaaattagctgggcatggtgcgggcacctgtagtcctagctatcaagaggctgagacaggagaaacacttgaacctgggaggtggaggttgcattgagctgagatcgtgccactgcactccaggctgggtgacagagcgagactaccatctcaaaaaaaaaaaaagagaggaaaaaaaaattggtctggcctatcctggaagattggccctggttggtgagagggaagcccaaggcaggtcactgtgggacaggtggcctggaccaggccccaggttttcaaggccatccaaggcccagtcaccaaacttggagagagaaagaagccttcagggtggattctgggactccattaccttttggattggataccggatggatacaatcccaggtggagaacctggccccataaatccagaaaaccacttggctatctaaagagtccctaagttgggggcttattggtcccacagcaacgggtaccggggaacagaggggcacagccggatgaaggggccacacagactcagcccatacatacccgggtctaaggtgcccaggggagcccgggaaccacacctgggggagcctacgggaacctaaggtcccacgtggcacagttctacgacggggctataagacca

SEQ ID NO: 565395 - DNA, 110 bp, Homo sapiens
tcattggaccctttttgtgacgattggtctctgtggtgtgattctcttcccaggtgtacctttctacctacccctagtgtccttaaagtcctcctaccacagggatcata

SEQ ID NO: 565396 - DNA, 213 bp, Homo sapiens
ccggacagaatacactcaaacatcagcgtaagtaaacctgactggttcgggggattcttggtcttgctgcatttcttgccctttttcaggctgctgtacactggccgtcgtcaaagacgcacctcacaaatccgggtttctttcacaagtgcggcactctagggttgtcatatggtaactcgttgtggagataccatgtcccacagtgtcttt

SEQ ID NO: 565397 - DNA, 794 bp, Homo sapiens
  misc_feature (86)..(87): n is a, c, g, or t
  misc_feature (97)..(97): n is a, c, g, or t
  misc_feature (117)..(119): n is a, c, g, or t
  misc_feature (125)..(125): n is a, c, g, or t
  misc_feature (164)..(164): n is a, c, g, or t
  misc_feature (176)..(176): n is a, c, g, or t
  misc_feature (206)..(206): n is a, c, g, or t
  misc_feature (244)..(244): n is a, c, g, or t
ctctgaattccatagtacggagcgcgcattggttggtatcgggaattcggcattatggccgggcataatggaattctgaagaaatnntggggagggnaggggagttggaacaaatgnnngttccntggaggccagtccagtgctcagacctttagactcattgnaagttgccactnccaacatgagaccaaagtgtgtgactagtnaatgaagtgcgacagcattaaagactgatgctaaaccncaaaaaaaaaaaaataaaataatattgtaacataattaaaaaatcattaatccgattagtggtctcatgtcttaagtttcgatccacctaagatactccatcttacataatcctcccttttaaattatgtattataatccttccttttcattaatagtctcccattcatttctttaatctgacagttgcctatctgatctaatatttgaaagtcactctctactagttcctcgtattctatttctcgttttaatctgcttagctttactcttcattctattctaatttttctcattcatctctatctatttcaaccttctataatctgctaaatctctcgatttcttcttccacttcttctttatataatttttcaccaattgttatgtctgttaactccttcttctttcgcatacttcttacatggttatatcgtctatggcttctttactcacttctcttactctattctctagcacagtctctctactcttgctacctcgacaatctcattatacactttttataatttttatttctcttggccctt

SEQ ID NO: 565398 - DNA, 803 bp, Homo sapiens
cttcctgctaagcctaatccaagccttacccagctgtgctactgtcatttgcaaacgcaaggaaatactactactggtactaaaactacacatgcaagatgtcacgctacgaacatatgtgtttatattttaccttcctgcgatgtggggtaggtgcttgaacgctacacatgtgctgtttctagtttcttaaatagcccacacccctggatgcaaacaaggcagggttatttttttacccatgagcatcctgtgcaggcaatagacttccctcatgtcatccgctgcagggaggagaaatgtaccccaattgcacctgagcattcctggtcccctcagccaagaacctcagggtggtccccagaacaagccttgtggtgggggacccctgtgcttgatgcaggtgtatggaggcctttttgccttaccctgtggggaaggaaccattgtaccccaagttatccttcccctggcctttactgggacccagatggtcctcctttacatagacttgtcacaccaggaaacgtgcacgacccctatgtctcccgcaccatttcaaccactttctggaaatcccaacttccccagacttgcaacgggaagaatagaatattcttggagcatcattgcacccagcgcatactcgtcgcatattcgaacgcgccaacaaggttgagataacaaatgaagtaaacctgtcattagagcgtgtaataaccagttacacaacgagggtcatctaacggtcgcaactgattacaatccaaaccaaggttccctggcatcataaacaacagaat

SEQ ID NO: 565399 - DNA, 200 bp, Homo sapiens
gattagaggatctggcagctatcggtcatgtactaaagctaccacactgacagcatctagaatgtactgagcctgtgcagccatgacacctctgtcatctcagcctcactgttccttggaacaccccactgtagctagattcaagaggagaggaattttgcagagaggggcccgggggggccccccccacaaaagggggg

SEQ ID NO: 565400 - DNA, 1045 bp, Homo sapiens
  misc_feature (50)..(50): n is a, c, g, or t
  misc_feature (80)..(80): n is a, c, g, or t
  misc_feature (147)..(147): n is a, c, g, or t
  misc_feature (297)..(297): n is a, c, g, or t
  misc_feature (337)..(338): n is a, c, g, or t
  misc_feature (348)..(348): n is a, c, g, or t
  misc_feature (368)..(370): n is a, c, g, or t
  misc_feature (376)..(376): n is a, c, g, or t
  misc_feature (415)..(415): n is a, c, g, or t
  misc_feature (427)..(427): n is a, c, g, or t
  misc_feature (457)..(457): n is a, c, g, or t
  misc_feature (495)..(495): n is a, c, g, or t
accgcctcagcaggggcctcctgacctctggctccgtgaagcgaatgccnccacgtgggtcacactcccattctgtaagncatcttggcacactggggcttaccgtgccccagtaatggtttcatggactatggactctttcaaggnatctgatccttttgaattttgcacgcccagatacatcccttttgataaagggtctttgcttctgattacaggagcactgtggaacgtctgtaatatgtttttatattcctgtatagttggtgtacactcaaaactgtccccggcagccantgctctctgtatagggccataatggaattctgaagaaatnntggggagggnaggggagttggaacaaatgnnngttccntggaggccagtccagtgctcagacctttagactcattgnaagttgccactnccaacatgagaccaaagtgtgtgactagtnaatgaagtgcgacagcattaaagactgatgctaaaccncaaaaaaaaaaaaataaaataatattgtaacataattaaaaaatcattaatccgattagtggtctcatgtcttaagtttcgatccacctaagatactccatcttacataatcctcccttttaaattatgtattataatccttccttttcattaatagtctcccattcatttctttaatctgacagttgcctatctgatctaatatttgaaagtcactctctactagttcctcgtattctatttctcgttttaatctgcttagctttactcttcattctattctaatttttctcattcatctctatctatttcaaccttctataatctgctaaatctctcgatttcttcttccacttcttctttatataatttttcaccaattgttatgtctgttaactccttcttctttcgcatacttcttacatggttatatcgtctatggcttctttactcacttctcttactctattctctagcacagtctctctactcttgctacctcgacaatctcattatacactttttataatttttatttctcttggccctt

SEQ ID NO: 565401 - DNA, 236 bp, Homo sapiens
gccgacctctctggaagattgatgagcatgattgaagcacgtggagcacaggtcagcgtgggaagagggttatggtggacatgggggtggggttgtctccccgacctcctcacattatgcctacaagaactcagacactagtgcaggttgcctttgcagaaacaaagtcagggttcttcaagtctcaaagggaagggcaggatcaaatcttgcctctcagttccatacaaggcagt

SEQ ID NO: 565402 - DNA, 1510 bp, Homo sapiens
ccagctaactctacccggtatgtcacatgcgccactcgctgtcgtcactgtatgtcatgggttcgactggcatatcgtggcatcctgtcgatcagtgtgctgtgggaatcttcactcgttggatcgccgataggttcgctatttactacatctaacttatgtttgagatcgatgtcttggactgcttatacctccgtgtgcatagatagtacctcgcgtaaccgaggctgaactatcagtgggaggaaagcctcatacgctcggttacgatgccatgtgctactgccgatagttggtaagcactagtcatgtagactcatacagcttggcatagtcatgtccttgaagatcgaccaagagatatctagcggcgcgtgactggtcagactgtggttaatattcaaatatactaggtctcgagactgagtttccaagcttagtctgttagagttgtgtctgggtcatgccatatacgcagccaggcctgagactcgaccttgtcccgttctgtgtcacaagacctctcgtgtgtaagtagctctgctggtagatacgatacttgctagcacataggttgctggctaattcgcacaggatctgtgtggcgcatacccagctcccctataacattgtcgctattgattagctgagatatatcctttccttgtgctctagcggcggtacctagatcgataaattgagccgatggaccccagcatattgccctctatgtggttaccgctatagctcggtcccaacgttgattttcgcaaaatatacacccaatctaggttttacatttacctgcaagggttgcacttgcccccttatattgatttcgaaacgtccttagtctggagacaaaaactgttttttactcaaaggcaaattccgccgccagattcagcgccttagaccattgtccactaaacggtggttaattgggcctatggcgacagggcacactaacttattcggttaaaccttggaccaggattgtgtcctatggttacaagacttccattgtccggtcttttacctaagggtctttagagagccgagtaatgttcagtgccgagagggcctaatgtggtgcctccctcttcggtgtaccaattccttggccgcctcggtatgagtgcaaacgtgcgtttccaagttagagccattaaagaggccccagttgcctaattaggtccctgttttgcctacaactaggtcaagagcctctgtcgtgtggcgcgagtagcggaacagccggagcggttctgtggcagaaggttagggacgtcacggtgtgggccattacagagtgttggcctaggactttaatttggccgggcgggcgcaaatttcttggcgcccctttggttatatcaccagttgcccggttttggggcttgcgcagttaaacccgcggcaggactagagcggttgtcgctggcctcctatcccttggtgtgcccattccagggccccggggggttggaactttgtcgtttccacagtc

SEQ ID NO: 565403 - DNA, 180 bp, Homo sapiens
gaattgctggacggtcactcgacctgtagagtttgtgcatttggatttgctgaatgtataccccagtggtgaggtataacatgttcctctggaacaggaattaaaagaaattcaagaacgtgtaagcagaaactcagttgtatgtgagaaaacccaatttctcatccttgggcaggggtc

SEQ ID NO: 565404 - DNA, 371 bp, Homo sapiens
tttgtacctttagataactagcttaccgtggtgtggacgggtagagaatgagggagacggagagactttggagtcagactgagtagttttaatctgggctccatcacttactagctgtgtggcgttgggggagtaaataagcctctctgagcttcagtttcctcatttatagattaataatagcaacaatactcagctcataaccactcaggttgtttgtgaagttcaaataaggtaatgcttataaaactgagaggccaggtgcggtgctcatgcctataatcccagcactttgggaggctgaggcgggcgggtcacgaggtcaagagattaagaccatctggctaacacggtgaaaccccgtctctact

SEQ ID NO: 565405 - DNA, 523 bp, Homo sapiens
  misc_feature (168)..(168): n is a, c, g, or t
  misc_feature (423)..(423): n is a, c, g, or t
  misc_feature (425)..(425): n is a, c, g, or t
  misc_feature (428)..(428): n is a, c, g, or t
  misc_feature (441)..(441): n is a, c, g, or t
catcacgtggtaaagcgatgtaaacacttgcagactggtttttgtgagagtgtttattggataaacactcaggcgtggggttgctgggccataggtacagtccttactttgttagaaactcaccacacgctgttttccacacccttcgcgccatgtcacatccccacnggcactggatgagatttccaggtgctgcagtcaggccagcgtgtggggtggagtttgctgtttttagtgtgtcggttggtgtgcagtgttggcacacggtgttggtgtccagtgttgacacacggtattggggtttgctgttttaagtgtgtccagctggtgtgcaatggtggcacagggtgtaggtggggtttgctattttcagcgtgtccggctggtgtgcagtgttggcccacggtgttggtggggttggcngnttnaaccgtgtctggntggtgtgcagtgttgtcacacagggttgggggggttggcggtataaagcgtatccggctgttgtgcagtgttgtcacacagg

SEQ ID NO: 565406 - DNA, 1227 bp, Homo sapiens
cccataggaaatgacccgcagtgctcagcagtaacccctgactgcgcgcagatctcagaatcctccacctcaatctacagccacgtgccagcaataagaagacagagtttcagggccaggcgcggtggctcacgcctggtaagtctcagatactttggagagagccaaggatgggaggatcacttgaagttcagtgaggttcgatgaactcagacctgcccaagcgatggtgaagccccgtctctaataaaaagaatacaaaaattagccgggatgtggtggtgcacatctgtaatcccagctacatgagaggctgacataggagaattgcttgagcccaggaggtggacgttgcatgtgatgccgaagattgcaccactgcattccagcctaggtgccagagtgagacttggtctcaaaacaaaacaaagacaaaacaattagccaggcatggtggcacatacctgtagtcccagactacttggggggctgaggcaggaggatcgcttgaagcccgggtgtctaaggctgcagtgaactgagatcaggccacagcatctcaacctgggagacagagtgagaccctgtctcagacataactcgaaaggccagagctaggtactcacacgggtgcatatgttataccaaccacattcacaacttccaaggtatccaaaacggtgtttaagtccaatagtagtccagggtgagccaatcccttaacgggcagctcaagacctatgtaaccaaaggtccgtgtgtacccataccaatcaccgccgaaatgcacggagcacgggcgcacgcgtacattccacggggcgtgcaacgttcacttccacgtagctacccttagacacaaccaccacaaacagggggcgcggcagaaaaagacaccaccaagggggccaaggccagcgcaacccgctctgtgtaccaagggagccccaagaaggacggcagaacaaaccccaccgcacacgccagcggaaaaacaacggggcggacgaacaccgaccccagacgacacgagccagcccccaacctacgcgcagccaaagcgtgcacccacacagcgaccaccacagcgaacaccagcacagcacaggccgaaccagccgctgcgcaagcgcagcgcagaacagccctcactatgactgcgacaccgaaaccagcacaaagcgcgaaccagaaccgaagagcgcgacgaaagcaaggccagcgaaa

SEQ ID NO: 565407 - DNA, 914 bp, Homo sapiens
  misc_feature (1)..(1): n is a, c, g, or t
ncgccgggggtggatggcgagggacagctaggttatacagttggattacttgggagtgtgtgaggccacctactaagaatacttgggcaatagagattgacaaattaaacccataagccaggtagacgaggagcaaggaaatgtctgggaattcgtatttcatcggcatatattgaagacatcttatgcttctaattgccgggtgagtcaacctctgcggactgaagcatcactaaaagctctaaggagaacgtcggtctttttaatcctctgaataggaatcgattacatttaaaaactgcccgtggtgtcgtaccgcgtcggtaacagagggtagacaaacagcgagtctaagggaaagaggtgcccctgcctccccaggcagacagggcccaggcccggtaacggagtcgtgccctctttatgcccaaagccgcggacgggatgcgaggtcgaggaccggcgcgcggggcggagcggggatgcaggtaacagggcccgcgcgatcattccaccggctacggacagccgacaaagaccccagaggcagtgtccacgacagcggggtcctggatggctgtggcctcgggtcgtccggggcttctcggtgcgcccgccccgaccccgtttctgactcagcatcccaggctcccacaggggcgggagcgctccccgccgtggcggggcagtgctgacgatcgggcccgagccgcttggaccctcagccgggggtctcacttagccagccgggtgctccgcggccacggcgggggctcccggggctcctcgaaatcaggacacttccggtttcgaagcctggcggaggctaggaccgagggggggcgcgtggggggtggcgggggcttaggccgctggagtacacagcgggggatgcggtggttcgggccgagggg

SEQ ID NO: 565408 - DNA, 258 bp, Homo sapiens
cggcaccgctctcgtgagactgatgagagtctctagttccatcaggttgctgcacatggcattattttgttctttttatggccgagtagtattccattgtgtatatataccacttcctcctagtccaatcgcctttcaatggacatttgggttgtttccatgtcttggctattgtgaatagagctgcaatgaacatgcgggtgcatgtgtcttttttaaggaaaggtttgtccagatatgcacccaagagtgggattg

SEQ ID NO: 565409 - DNA, 459 bp, Homo sapiens
aattgtcgctcttgtcccccaggctggagtgttatggcgctatctcggctcactgcaacctccaccttccgggttcaagcaattctcctgcctcagtctcccgagtagctgggattataggcacctgccaccacacctggctgatttttgtatttttagtagagacagggtttcaccatattggccaggctggtctcgaactcctgagctcaggtgatccacctgcctcggcctcccaaaatcctgggattacaggtgtgagccaccgtgactggcctgtttcattaatttttatacaatcctctgacctcccagcctctctctctcccataggactgactatagaaaggacttatctctgtccaggcatcatgatgtgataagagaaacacacagtagcatctagaaaaatgctgaaataaattttcacatagctaatatcctgtgattttgtgcaag

SEQ ID NO: 565410 - DNA, 134 bp, Homo sapiens
caaagtggtggactgttccaggccctccagtggggtgatgttgggacccttaggatggggctcccagctcctttttcctgtgaatggaggcaaagacctccaataaagggccttttgggctttttttaccctta

SEQ ID NO: 565411 - DNA, 147 bp, Homo sapiens
acgagatgctagaggcctctgctcgagagcatcagggtcagcacatgagagatctgctggaaatgccagcagcctcctgacagtcatggcgaccgacaggttagagaaggaggtccacaaacgaccaaggacaaacatttgcgcaca

SEQ ID NO: 565412 - DNA, 449 bp, Homo sapiens
aagtcaagggttataacaaaaaagccccagcccattcctcccattcaagattcccactccccaaaggtgaccactttcaacttttgagtttttcagggataaacccccatgtttttaagtaaaaagcttaaattgttcccttcttttttttttattttttaaagaaatctatttcataccatggaggaaggctctgttccacaaatatttcccctttttcattctctcgggatagttttgtcccaattatagattagatccaaagtttacataactaatacagctgagctatgtagtatgctatggattaaatttacttatggaacttttattgtttttggcattaacagtgtttcaaaaaattttttgggtaaacccatcagtgattcattcccaaattttttaaaagcataagggtctcaatatattaaaacatattgaataatcca

SEQ ID NO: 565413 - DNA, 924 bp, Homo sapiens
  misc_feature (18)..(18): n is a, c, g, or t
  misc_feature (25)..(25): n is a, c, g, or t
  misc_feature (30)..(30): n is a, c, g, or t
  misc_feature (32)..(32): n is a, c, g, or t
  misc_feature (77)..(77): n is a, c, g, or t
gttggcgagttttccttnactgtgnaaagnanagcatgcttgaattacttcaagttttttggaaagaacacctgggnaaattcatcgcaaaaagacatcacctaggcacatcgtcgtcaggttatccaaagttaagatgaaggaaagaatcttaagagctgtgagacagaagcaccacgtaacctataaaggaaaacctatcatattaacagcagatttctcagcagaaaccctacatgccagaagggattggagccctatcttcagcctccgtaaacaaaacaattatcagccaagaattttgtatccagcaaaactaaacctcatatatggtgcttagctatttattttgttatctattgttgttgctcaaactgttcaagctttggccattgggagctctttcacattggctcttgtgtacttttggcatgccctcatccactttgtttggagcacttcctctttctggcaccacaggatgctccaggctcatctatgtgttttcttctctgcattggccctagacttagtcatttctcctaggagccctggttctttttttttttttttttttgatgaatggccttagaaaccaagatcttggtgatgggtgtgctcattgctactgtgatgacactgcttctacacattctaaatgaacagaactaggaaatatatgtatggtgtactaccacatggttatacatagtcctaattatgttcctatatgcatatttattaaactaaacattagttcactgacattacaaaagtctgatgattattgatgtgaagaaataaaaataccccctaatctcccaatcttctatgattgggttatgtgtaacaaacacaaagggcttcttaaaacacaattaaacaaaattaaagtcatactaattctttgacttgaatccggac

SEQ ID NO: 565414 - DNA, 671 bp, Homo sapiens
  misc_feature (297)..(297): n is a, c, g, or t
  misc_feature (438)..(438): n is a, c, g, or t
  misc_feature (449)..(449): n is a, c, g, or t
  misc_feature (451)..(451): n is a, c, g, or t
  misc_feature (456)..(456): n is a, c, g, or t
  misc_feature (462)..(462): n is a, c, g, or t
  misc_feature (518)..(519): n is a, c, g, or t
  misc_feature (526)..(526): n is a, c, g, or t
  misc_feature (531)..(531): n is a, c, g, or t
  misc_feature (533)..(533): n is a, c, g, or t
  misc_feature (614)..(614): n is a, c, g, or t
  misc_feature (620)..(620): n is a, c, g, or t
  misc_feature (643)..(643): n is a, c, g, or t
  misc_feature (671)..(671): n is a, c, g, or t
aaggctagagagactgtgtaatcggacgaggcaggagcgcacgcgcggggaggccgggcattgctgcgtcacagcgcgccggctcaccacccttcgttgcacgcacgcacgtcattctccgtcctcgcgcccctatttcctacactttcctcttctccccgaaccggaggagccgctctttccgcgcggtgcattctggggcccgaggtcgagcccgccgctgccgccgtcgcctgagggaagcgagaagaggccgcgaccggagagaaaaagcggagtcgccaccggagagaagtngactccctagcagcagccagacgccatgagatggccacggacacacacagataacgacacgatccacacactggacacacggttacacaagtgcatgcctggcatatctggcaaaagtggtacgatcgaagggactatgtnttcattgaatntngtgtngaaganagtaaggatgtaaatgtaaattttgaaaaatccaaacttacattcagttgtctcgnnaggaatngaaananttaagcatttaaatgaaattgatctttttcactgtattgatccaaatgattccaagcataaaagaacggacagatcaattntatgtngtttacgaaaaggagaatctggncagtaatggcaaggttaacaaaagaaan

SEQ ID NO: 565415 - DNA, 262 bp, Homo sapiens
catctagatacttataactattgtaaattaatttaaagacgaagaaacgaaagctcggccgcaacggtttttattttttatttttttgagatggagtctcgctctgtcgcccaggctggagtgcagtggcgcaatctcggttcactgcaagctgcgcctcccaggttcacgccattctcctgcctcagcctcccgagtagctggtactacaggcgcccgccaccacgcccggctaatttttagtatttttttaagtagagat

SEQ ID NO: 565416 - DNA, 645 bp, Homo sapiens
  misc_feature (297)..(297): n is a, c, g, or t
  misc_feature (320)..(320): n is a, c, g, or t
  misc_feature (329)..(329): n is a, c, g, or t
  misc_feature (344)..(346): n is a, c, g, or t
  misc_feature (351)..(352): n is a, c, g, or t
  misc_feature (357)..(358): n is a, c, g, or t
  misc_feature (360)..(360): n is a, c, g, or t
  misc_feature (364)..(364): n is a, c, g, or t
  misc_feature (371)..(371): n is a, c, g, or t
  misc_feature (374)..(375): n is a, c, g, or t
  misc_feature (378)..(378): n is a, c, g, or t
  misc_feature (384)..(384): n is a, c, g, or t
  misc_feature (412)..(412): n is a, c, g, or t
  misc_feature (423)..(423): n is a, c, g, or t
  misc_feature (425)..(425): n is a, c, g, or t
  misc_feature (430)..(430): n is a, c, g, or t
  misc_feature (436)..(436): n is a, c, g, or t
  misc_feature (492)..(493): n is a, c, g, or t
  misc_feature (500)..(500): n is a, c, g, or t
  misc_feature (505)..(505): n is a, c, g, or t
  misc_feature (507)..(507): n is a, c, g, or t
  misc_feature (588)..(588): n is a, c, g, or t
  misc_feature (594)..(594): n is a, c, g, or t
  misc_feature (617)..(617): n is a, c, g, or t
  misc_feature (645)..(645): n is a, c, g, or t
aaggctagagagactgtgtaatcggacgaggcaggagcgcacgcgcggggaggccgggcattgctgcgtcacagcgcgccggctcaccacccttcgttgcacgcacgcacgtcattctccgtcctcgcgcccctatttcctacactttcctcttctccccgaaccggaggagccgctctttccgcgcggtgcattctggggcccgaggtcgagcccgccgctgccgccgtcgcctgagggaagcgagaagaggccgcgaccggagagaaaaagcggagtcgccaccggagagaagtngactccctagcagcagccgccgncagaaaggnccgcccaccagttcnnncgtgnncctgnncngttnacaaagnagnntgnttctgnaaagtggtacgatcgaagggactatgtnttcattgaatntngtgtngaaganagtaaggatgtaaatgtaaattttgaaaaatccaaacttacattcagttgtctcgnnaggaatngaaananttaagcatttaaatgaaattgatctttttcactgtattgatccaaatgattccaagcataaaagaacggacagatcaattntatgtngtttacgaaaaggagaatctggncagtaatggcaaggttaacaaaagaaan

SEQ ID NO: 565417 - DNA, 533 bp, Homo sapiens
ccttgttacggccccggggtatcgggatctggagagccgcccaccgtctctgaccgctcgactcctccgcccgggccgtcggccggtccagccgcggtcggcgcctggctgtgaggtggattcccgggccagtctgaccatctccctccagtttttccacttcgttcggaccttctcataactatgtccacccatctacgtcgtcccctcacgccagatgaccttccccgagaccgtccgaagccctcatagccgctacgcgtaatggggaggcatggggagggtcccggatggggcaggagcctaacgaaccgcgatgttagactcacagaacaaagcaacggagcgaatgaaccagacaaccagaacatcaagacaaaaaacaagccatgatccgagacaccacggacgacacagaggaacaactagagacaacatcgacacaaaaagagagggacaaaggaccagagaaacagagacagacgcaaagaacaaacaaaacaacagaaagacaagtaaaaggaaaacaagag

SEQ ID NO: 565418 - DNA, 949 bp, Homo sapiens
  misc_feature (544)..(545): n is a, c, g, or t
ctgaaagctgagcgttgaacggtggtatcaccattgatatctccatgtggaaatgagagaccagcgaagtactatgtgactatcattgatgccccaggacacagagactttatcaagaaacatgattacagggagcatctcaggctgactgtgctagtcctgattgttgcatgctggtgtgggtgaattgcgaagctggtatctcgcagagaatgggcagacccgtagagcagtgcccttcgtggcttacacactgggtgtgaaacaactaatggtcggtgttaacaaaatggattccactgagccaccctagcagtcagaagagatatgatggacaatcgttcaaggaagtgcagcaacttacattaagaagaattggctacaagcccgacacagtacgcatgtgatgccaagtttactgggatttggcaactgcgtgatcaaccagtgtctaggaatgcctataggatgctagagcaattgccgtttgcgtgtgcagaagggattgcgacaaatgtctagcgcgcgtaaccggagtgcgcannatgcgcggctgagatacccaacgcttgcgttgatggcatctggacgtgcgatctctaactaaccaagctgccgttccaactgagcaagtccctgtgcgcctgcctctccaggatgtctacaaagttggtggtataggtactgtaccgtgttgggcgagtggagacttggtgttctcaaagccggatatggtgggtcaccttttgctccagtcaacgttacaacgggatgtaacaaatctgtcgaaatgcaaccatgaagcttgagtggaagctcttcctgggggaccaatgtgggccttcaaaggtccaagaatgtgtctggtcaagggactggtacgacgtcgggcaacgtctgcttggtgaccaggcaaaaatggaacccagcaagtgggacagccaggtgg

SEQ ID NO: 565419 - DNA, 246 bp, Homo sapiens
agagagctgctcaatcatctgatgctacgcatctggactcccctactgttgagcgcatttcaattatagatagcgttcagctgactggttggaagtcactctaaagatgagtcactgttgtctgtctctctccagatcttttgggcagtacatctgtggcccttaagaagctctctcttaattcccatgaggcatccaggtggtctgggctatgggaaagaaccttcaacttgggagtagaccagg

SEQ ID NO: 565420 - DNA, 101 bp, Homo sapiens
agatcagctcggtacctcatagctgaagttgctgaatgatcctcctgttgctataacccactggcctccctgagcatgtcattgacagtgaggtcccaccc

SEQ ID NO: 565421 - DNA, 219 bp, Homo sapiens
  misc_feature (7)..(7): n is a, c, g, or t
  misc_feature (17)..(17): n is a, c, g, or t
  misc_feature (86)..(86): n is a, c, g, or t
  misc_feature (119)..(119): n is a, c, g, or t
  misc_feature (151)..(151): n is a, c, g, or t
  misc_feature (158)..(158): n is a, c, g, or t
  misc_feature (187)..(187): n is a, c, g, or t
aaccttnaaagataaanaccaaacttatcaccctctcatcccaaactgctcttctttgagagtttcccaaagaatcatctgttaantccttcttctcccctaactcttcacatgtaaanacccagccaccaagttcagttgatatcccccnggaaaantgatttattcttggcctgtctttgctaanctcctaatcaaggcagtttcttaaatttccgt

SEQ ID NO: 565422 - DNA, 336 bp, Homo sapiens
  misc_feature (239)..(239): n is a, c, g, or t
  misc_feature (272)..(272): n is a, c, g, or t
  misc_feature (284)..(284): n is a, c, g, or t
  misc_feature (320)..(320): n is a, c, g, or t
  misc_feature (328)..(328): n is a, c, g, or t
tctgtgaccttatgctccacactaactctggcagagctcccgtttcctcatagaacaaagaacagccaccatgcagctcttcctcctcttgtgcctggtgcttctcagccctcagggggcctcccttcaccgccaccacccccgggagatgaagaagagagtcgaggacctccatgtaggtgccacggtggcccccagcagcagaaggggatttcaccttttgacctcttacaggggcnttgggtttccgttggcccccagccaggaacatnttttttttcccntgttgaggcattttccatggaggctgggggcattgntttttccntggggggg

SEQ ID NO: 565423 - DNA, 150 bp, Homo sapiens
ggcagtccaccactactggccatctgatctataaatgcggtggctcgacaaaagaaccatgaaaataagagaagagcgctgagatggcaaggcctgtcagtatgcctgggcttggataactgaagctagcgtaacgtgttcccttgaatc

SEQ ID NO: 565424 - DNA, 528 bp, Homo sapiens
  misc_feature (32)..(32): n is a, c, g, or t
  misc_feature (34)..(34): n is a, c, g, or t
  misc_feature (144)..(144): n is a, c, g, or t
  misc_feature (169)..(169): n is a, c, g, or t
  misc_feature (224)..(224): n is a, c, g, or t
  misc_feature (316)..(316): n is a, c, g, or t
tcatacagcgtcagggcagtgcgggtaaggtnangttagatgactggtgatatctcaagccgtgatggggagcgcgacaggaaaagacgagtagtgttggaaagggttaggaaataatggaaaggggaatcagtgattggacangaggggtgatgacagcgggcactgnaaagttctcccactgacaggcaggagagaagcagtggggagacactgacaggtgnggtcactaacagcagggcagggtactaatgggtccctaacagataagggatgaaggaggtagcatgaaaggggacaggaactgacaacaggngagaactgatggggaggatctgacaggcactaacacagaggccgatagcaaagagcggaagggccacaacaggcaggatgagggagacacttatgagggaaacttactgacagtggggctcactgacagaggcactggcactgatggggggcactgacagagaagatcaatgacaggtggggacattgctgacagaaggggtcacagagcgc

SEQ ID NO: 565425 - DNA, 1135 bp, Homo sapiens
  misc_feature (6)..(6): n is a, c, g, or t
  misc_feature (13)..(13): n is a, c, g, or t
  misc_feature (39)..(40): n is a, c, g, or t
  misc_feature (77)..(77): n is a, c, g, or t
  misc_feature (150)..(150): n is a, c, g, or t
  misc_feature (1095)..(1095): n is a, c, g, or t
ccctantgggaangctgaagcccgcgttggagggagctnncccctccagttcatgtcctggctgcccctggaattcngcactggagaggttgggtgggatgtgcagaacaaacaggacttcctgcttgagcaagtctggacatcagagcnggagatggggactgagaccacaatcagctgtgcaccctgtggtcagggaagaactcactggagtctcatttgactgagaaagcttctttcaaaggaaatgcaactgtcttaagactgcctccccagggatctcattaaacagctgggaaagatcaacctccagagaagagaagagactggaggcagccaccaagcccagactttccccctgttcttctgagggcagctcccggaggttacctgggagacttcgtctgcagccaagacaaccttcactcccacataccctccctggagcacgggactgagcaaccccactcctcctttctgtgaggagggcattcgggcctcagccatctggaccctctgagttcacatttcccaagacctccatgaacacatgtgagtgtaataaatgttctctgcttctctcttgttaacatgtgtttctgctgtaggggtgtcagctgtggccctttttcatggggaacaaagggatcatcctgagcttcctgatgtgtacagaaagcacagagttcaagggggaagattcagaggatcacaggtgaatccggtcatctggaaactcctgtgagcatctccaacagcagagacacacgtagactcctgcaaacccagctcagctgccatcctcccttggcagccaaaggtctcagaaaggcacgtttccaaaacttggttttctcacctataaattggggcaaaccccagtctgtgtctattgggagaattaagtgagatactgcacgtaaactctggcacaatttaaacatcaaaaatggcagctataatttaggctaataatttaatttctttctttgagccaggtgtcttgcctgtaaaatggggatattttgttataaaaaaattaggaagaaaataaactggtggcctcgttggcctcagcggtggagctctgcggcnagcccacactctcccatttttttaaccataactcaactat

SEQ ID NO: 565426 - DNA, 904 bp, Homo sapiens
  misc_feature (1)..(1): n is a, c, g, or t
  misc_feature (36)..(36): n is a, c, g, or t
  misc_feature (67)..(67): n is a, c, g, or t
  misc_feature (84)..(84): n is a, c, g, or t
  misc_feature (864)..(864): n is a, c, g, or t
nttagagcaaccccgaggtacttgaaaatttgttgnagcaaaaaacttcattccaaaaaccctcctngaagcaagggattaacnacacccattcctctttctgtgaggagggcattcgggcctcagccatctggaccctctgagttcacatttcccaagacctccatgaacacatgtgagtgtaataaatgttctctgcttctctcttgttaacatgtgtttctgctgtaggggtgtcagctgtggccctttttcatggggaacaaagggatcatcctgagcttcctgatgtgtacagaaagcacagagttcaagggggaagattcagaggatcacaggtgaatccggtcatctggaaactcctgtgagcatctccaacagcagagacacacgtagactcctgcaaacccagctcagctgccatcctcccttggcagccaaaggtctcagaaaggcacgtttccaaaacttggttttctcacctataaattggggcaaaccccagtctgtgtctattgggagaattaagtgagatactgcacgtaaactctggcacaatttaaacatcaaaaatggcagctataatttaggctaataatttaatttctttctttgagccaggtgtcttgcctgtaaaatggggatattttgttataaaaaaattaggaagaaaataaactgtaattgccctgtgcaaaacatcccacattaattcaatgaattattaataacaaaaagatggaaaaattattttcccatttaggaaaaaatgtgaaataatagcaaacctaggatgcttttataattaatgcaaataataataaaatgtggcctcgttggcctcagcggtggagctctgcggcnagcccacactctcccatttttttaaccataactcaactat

SEQ ID NO: 565427 - DNA, 579 bp, Homo sapiens
  misc_feature (6)..(6): n is a, c, g, or t
  misc_feature (13)..(13): n is a, c, g, or t
  misc_feature (39)..(40): n is a, c, g, or t
  misc_feature (77)..(77): n is a, c, g, or t
  misc_feature (150)..(150): n is a, c, g, or t
ccctantgggaangctgaagcccgcgttggagggagctnncccctccagttcatgtcctggctgcccctggaattcngcactggagaggttgggtgggatgtgcagaacaaacaggacttcctgcttgagcaagtctggacatcagagcnggagatggggactgagaccacaatcagctgtgcaccctgtggtcagggaagaactcactggagtctcatttgactgagaaagcttctttcaaaggaaatgcaactgtcttaagactgcctccccagggatctcattaaacagctgggaaagatcaacctccagagaagagaagagactggaggcagccaccaagcccagactttccccctgttcttctgagggcagctcccggaggttacctgggagacttcgtctgcagccaagacaaccttcactcccacataccctccctggagcacgggactgagcaaccccactcctcctttctgtgaggagggcattcgggcctcagccatctggaccctctgagttcacatttcccaagacctccatgaacacatgtgagtgtaataaatgttctctgcttc

SEQ ID NO: 565428 - DNA, 403 bp, Homo sapiens
gggctcaaccccccgctgtgctctgcggttcgcagctgcagccgcttcggtgctccaagaccagagaggaagcaaagacagagctttcccagccaggcatcgctgctttggccttgaaggtgacaaagaagacaaggaagacaaggaaggtgatccgggaggctggagagcttgtcaaggtcacagacccacggttttccgccccctagggtccaagctctttcctggacatctgcaggcaatgtcgacacgccctccagtgtctgtggcgggcaaaggatgtgtctccacccccagaccttccgatcctgtgctgaaagtgtccctcagcctgtttcctgagaagcccaggggcttttggcttgttactttttctttctcttgaagtaaacagaataaaaga

SEQ ID NO: 565429 - DNA, 136 bp, Homo sapiens
gtctatctataatcgcccacggacttacatacctacattactattactgactagcaaactcaaactacgaacgcgactcacagtcgcatcataatacctctactcaaggacttcaaacatactactacccacataa

SEQ ID NO: 565430 - DNA, 286 bp, Homo sapiens
  misc_feature (20)..(20): n is a, c, g, or t
  misc_feature (25)..(25): n is a, c, g, or t
  misc_feature (40)..(40): n is a, c, g, or t
  misc_feature (43)..(43): n is a, c, g, or t
  misc_feature (66)..(66): n is a, c, g, or t
catgtagtgcatgacatccngagancaggcaagacatgcntcnagctgtacgactcactatggggncacacccacggttttccgccccctagggtccaagctctttcctggacatctgcaggcaatgtcgacacgccctccagtgtctgtggcgggcaaaggatgtgtctccacccccagaccttccgatcctgtgctgaaagtgtccctcagcctgtttcctgagaagcccaggggcttttggcttgttactttttctttctcttgaagtaaacagaataaaaga

SEQ ID NO: 565431 - DNA, 137 bp, Homo sapiens
ccccgggccccgggggggggttttgggggggggggccccccccccccccttttcccggggcccggggttcctttttttggcccccccccccccccccggcccccttaaaaaaatgggggggttttttttttttttta

SEQ ID NO: 565432 - DNA, 1317 bp, Homo sapiens
  misc_feature (6)..(6): n is a, c, g, or t
  misc_feature (13)..(13): n is a, c, g, or t
  misc_feature (39)..(40): n is a, c, g, or t
  misc_feature (77)..(77): n is a, c, g, or t
  misc_feature (150)..(150): n is a, c, g, or t
  misc_feature (1277)..(1277): n is a, c, g, or t
ccctantgggaangctgaagcccgcgttggagggagctnncccctccagttcatgtcctggctgcccctggaattcngcactggagaggttgggtgggatgtgcagaacaaacaggacttcctgcttgagcaagtctggacatcagagcnggagatggggactgagaccacaatcagctgtgcaccctgtggtcagggaagaactcactggagtctcatttgactgagaaagcttctttcaaaggaaatgcaactgtcttaagactgcctccccagggatctcattaaacagctgggaaagatcaacctccagagaagagaagagactggaggcagccaccaagcccagactttccccctgttcttctgagggcagctcccggaggttacctgggagacttcgtctgcagccaagacaaccttcactcccacataccctccctggagcacgggactgagcaaccccactcctcctttctgtgaggagggcattcgggcctcagccatctggaccctctgagttcacatttcccaagacctccatgaacacatgtgagtgtaataaatgttctctgcttctctcttgttaacatgtgtttctgctgtaggggtgtcagctgtggccctttttcatggggaacaaagggatcatcctgagcttcctgatgtgtacagaaagcacagagttcaagggggaagattcagaggatcacaggtgaatccggtcatctggaaactcctgtgagcatctccaacagcagagacacacgtagactcctgcaaacccagctcagctgccatcctcccttggcagccaaaggtctcagaaaggcacgtttccaaaacttggttttctcacctataaattggggcaaaccccagtctgtgtctattgggagaattaagtgagatactgcacgtaaactctggcacaatttaaacatcaaaaatggcagctataatttaggctaataatttaatttctttctttgagccaggtgtcttgcctgtaaaatggggatattttgttataaaaaaattaggaagaaaataaactgtaattgccctgtgcaaaacatcccacattaattcaatgaattattaataacaaaaagatggaaaaattattttcccatttaggaaaaaatgtgaaataatagcaaacctaggatgcttttataattaatgcaaataataataaaatgtcactattctaccattcaattttagaaataaaaaagtggcctcgttggcctcagcggtggagctctgcggcnagcccacactctcccatttttttaaccataactcaactat

SEQ ID NO: 565433 - DNA, 480 bp, Homo sapiens
  misc_feature (440)..(440): n is a, c, g, or t
gggctcaaccccccgctgtgctctgcggttcgcagctgcagccgcttcggtgctccaagaccagagaggaagcaaagacagagctttcccagccaggcatcgctgctttggccttgaaggtgacaaagaagacaaggaagacaaggaaggtgatccgggaggctggagagcttgtcaaggtcacagacccacggttttccgccccctagggtccaagctctttcctggacatctgcaggcaatgtcgacacgccctccagtgtctgtggcgggcaaaggatgtgtctccacccccagaccttccgatcctgtgctgaaagtgtccctcagcctgtttcctgagaagcccaggggcttttggcttgttactttttctttctcttgaagtaaacagaataaaagagtggcctcgttggcctcagcggtggagctctgcggcnagcccacactctcccatttttttaaccataactcaactat

SEQ ID NO: 565434 - DNA, 442 bp, Homo sapiens
gggctcaaccccccgctgtgctctgcggttcgcagctgcagccgcttcggtgctccaagaccagagaggaagcaaagacagagctttcccagccaggcatcgctgctttggccttgaaggtgacaaagaagacaaggaagacaaggaaggtgatccgggaggctggagagcttgtcaaggtcacagacccacggttttccgccccctagggtccaagctctttcctggacatctgcaggcaatgtcgacacgccctccagtgtctgtggcgggcaaaggatgtgtctccacccccagaccttccgatcctgtgctgaaagtgtccctcagcctgtttcctgagaagcccaggggcttttggcttgttactttttctttctcttgaagtaaacagaataaaagagagttgctcagaaataaaaccctggcctcgttggcctca

SEQ ID NO: 565435 - DNA, 378 bp, Homo sapiens
cggggagatatgggaaccaaataaatgaaatggtttaatttctcccaaaaaaaaaaaaaaaaaaaaaaaaaaaaaaaaaaaaaaaaaaaaaaaaaaaaaaaaaaaaaaaaaaaaaaaaaaaaaaaaaaaaaaaaaaataaaaaaaaaaaaaaaaataaaaaaaaaaaataaaacaaagttaaaacagggggccttatgctaaatagaatttgaataaaattgcataaagatttaatttttagtttttttaaatcgtctgttttaaaagaatttaatggaaaggcatttgaggcatcttgcaaaaggtcctttttgaagaaatgttgtgaaaggaaatgtggacgtggtatttttggattaatttcctgtgaaataatt

SEQ ID NO: 565436 - DNA, 1028 bp, Homo sapiens
  misc_feature (76)..(76): n is a, c, g, or t
  misc_feature (106)..(106): n is a, c, g, or t
  misc_feature (217)..(217): n is a, c, g, or t
  misc_feature (267)..(267): n is a, c, g, or t
  misc_feature (691)..(691): n is a, c, g, or t
gcaactagtcgtgctcactgtagtcgggtcgcgctcgacgagacatccggctcaccgcacttgttatgctctgtanactggacagcacgacgcgtctgttcgtgtngacctgtagcgagctgcgctagtacacgacgcttgatagtgtaggcttgtctagcgctatcatatacgcagctcgcatgcacatgtatgcgtaggcacgcaacggcctctngtgcgtagctgctctactgctgtacatcacgccgaagggtcgtgtcagtngagacagttatgactgcggcgtcttgcgcagacgcgagaactatcatggcagatcggccggtcgtgaataggccctctgtacactactgacagatagtggtgcgctgtgcacgtaaacaagttcacgttggcgaagctacggcgcagcatctagtcttcaatgcattgcgctgctgccacagtgtacctacaccgttactctatccctggatctagatcacgtctgcagaccgcgctcactcgcatctttcttcgacgctatgagaggtatatcactgcagcttctagtcccactagactctcgtgcacttgctcgagatagaacttacgaacgacattgcgactgcgtttcatgcatcttactcctcggtatcaaccatgatcccaagacgatcatgcaccgcttatctcggagtcgatatcngggtacgcacaaagctctcccacagtctactcacgtaccactcgtacatgagcgacctcagtatgctacaatagttggaaatgtacagcgcgcttatcgatcctacgatttacaaccaggacgtggacttattatagccttccatccttaattctacaaatggtatgatcgcgcaacaatccaaagtttctataaagtccagacccctagcacctgctccacattaggttcataccaccttggtatcacgccattcggtacgagattgcaccactcatcaacatggcgggagagcctatgtcggaccaatcacgtctgtccccagttttcaaggctc

SEQ ID NO: 565437 - DNA, 126 bp, Homo sapiens
caccgtcacgattactcaaatactaactgttgctttgaaaaagagtcatggaaactcaggcttggagagacttaaacattccatccaggcacccatgtgatgccttaatcatctctattttgcatt

SEQ ID NO: 565438 - DNA, 129 bp, Homo sapiens
gtccttgtgtgtctcatgtctggggtccatgatagttgccatgcaaccagctcctgaactaccgtaaataatcttgccaaccggggacagctttaggagcaaagaattcggatcgcaacccttgaatac

SEQ ID NO: 565439 - DNA, 247 bp, Homo sapiens
acgaatccactacagctaagaaaattactcccgaaggttacgttttgagggatgaaacggcaaaggagcgcgaaaatgcacttgcgacagctcttctcttcagaacagcaggcttccatctcgcatgtgtggactacagcatctactacagaacttgaagctttccgattgcttcgtggaagacggtccatcaatatcgtagagcacagcagaaaattagggccatttcagaatttagagagtttaa

SEQ ID NO: 565440 - DNA, 483 bp, Homo sapiens
  misc_feature (118)..(118): n is a, c, g, or t
  misc_feature (156)..(156): n is a, c, g, or t
tctctacctcacgctcttccccccctcctaccacaccccaccactacgccacccaacaccattcgggctaggtacgaggccgcgtgtttaccattacccagcctgacaggtgggcatngtggacatccatgcagcacaaccccaatggacccccanccccttggatgcagcaccacaccaccgatgaaccaggcccccaccctcctgggcaccatggccctcctccaatggtacctgggaagtactgcctgtgggctctgggtgtctatcgcctgcatcaaggaaaaggtatgatgccgccaccacctatgggcatgatgccgccgccgccgccgcctcccagtgggcagcccccaccctatccctctgatgctcttgcctcatgggaataacagtaggaggagcctccgccaacgcctcagtgcagcagcagtatggattccagtaaccccttgcaatggcagccaagatcactccccgcgg

SEQ ID NO: 565441 - DNA, 107 bp, Homo sapiens
cagcctgcaagcttgggtttaatttgctcttcttttctaatttcacagggatagaagcttagatcactgatttgagaactttcataattttctattatttcagtgat

SEQ ID NO: 565442 - DNA, 182 bp, Homo sapiens
ttctccctgacaccaatatgaataactcatgtaaggtgtggcaagccacagataaggacttcagacaatccagcatgaggacaagtggtttatacatgaatagcacatggctagtctttcagtgttagcagagtagagagagaacaattaatagtctcagatgggagggaaagatgaaatga

SEQ ID NO: 565443 - DNA, 381 bp, Homo sapiens
gttgcgaccggtgtgaattccctgtgaggggctcaagggttatggctttcatgtctaggtctggcgccagaggagggcgaggcagatcctgggccatgggaggatgacgtggtctgaatctggagtaattaatgccacccaaagaaaaggccctgccaggtccaatgttgtattagatctgatgatgctgatatttacaaaacactgatcgttcgaaagcttgaatctgttcctcctcgaatgaccctgtggatgcctgacctccaccgtacctccgcatcactattcatgtccttttaggaaaatgttcacgtgcctcacgccatatgtgggaagggcgtctttttaaaataataaagtgtgtcaccattagcctttcga

SEQ ID NO: 565444 - DNA, 304 bp, Homo sapiens
tcttgggagctggtgcagaaggctcaagcccactcggccggccctgcttgccccagggcagtgtggtccgggggggcgggctgtggggaaggcccacttacttggcaggggctccgtggtctggccctcgccttggggaccgtgggcggaaaaggtctctgccaccatgcgctccacaggtgtgaggaggaggccgggggtggggccgccctccgccagcttcttgcgcacagcacctcgcaggtcccgccacttgtgcttgaggtcccccaggtcgcgtagttctagatcgcgagcggccgct

SEQ ID NO: 565445 - DNA, 501 bp, Homo sapiens
  misc_feature (33)..(33): n is a, c, g, or t
  misc_feature (77)..(77): n is a, c, g, or t
  misc_feature (102)..(102): n is a, c, g, or t
  misc_feature (308)..(308): n is a, c, g, or t
  misc_feature (316)..(316): n is a, c, g, or t
  misc_feature (325)..(325): n is a, c, g, or t
  misc_feature (329)..(329): n is a, c, g, or t
  misc_feature (335)..(335): n is a, c, g, or t
  misc_feature (346)..(346): n is a, c, g, or t
  misc_feature (348)..(348): n is a, c, g, or t
  misc_feature (395)..(395): n is a, c, g, or t
  misc_feature (461)..(462): n is a, c, g, or t
gttgatctttgtatttcctttttattattccanatgttttgaacagagataaggatgaggagccaactgtaaaacangagattgaagaaattgaggaagaantggaaccacagggtgtaatagttacaagaatcaaaagtgaaattgaccaggatcctatgggtagagaaacatttgaacttgttggtaggttagataaacaaagagggatcttcctatgggaaatccaagggaatctttgacccaggaacagagaatgttcagagaaaacactaacattatcccgtaaaagaccaaacttagaaganaaatgccntaaaatgtnaaanaatgtngaaagggtttngncccgcaaggcccatttcattcaaccattaaagggtcccatcttggtnaagaaaccttttcagtgcaatgaatgttgggggttttagtcgcagttcatttggtaatggacatcnnataatttacactgggggaggccctatgagtggtctggtg

SEQ ID NO: 565446 - DNA, 893 bp, Homo sapiens
aacagcgtgttgtacccccgtgtcccggagcgccacccccggcggtgcccccctaggaaccccgtgccgatcctccttcgggatttttccttgccccggggcgggactaccaatttttccaccaggacacgctatgtatccctttgccctcttttggggcacacataggaacaaaaggttgtccaaaggaaagacaggggatgggttcccggccccgggaattctcccgcggagaattttttcgccaccccacggctctgcgcccggcccgcgcgttgtgtggcggcccgacgcacagtcttctttgggtgttcctcccctcgaagcggtcccagcccatgattttgtcgggcgaacgcgcaccaccccgcaaatctctggactggcggcggggaaattatcccttttccccaccccgccccttttaaggggttgggccccgagatatgacctccatttgtggtgggttgtaggacaacaccaccaccactgtgctcctcctccgcgagagggccgggaacgactcccctcgagggatggaagggggaacacacgacgatccacccctaacgagaagatccccccccctgccaggaaccccccacgagtgatttttgtgacacaacagaaagagattttcaagaggatggtcaaaattccacccccggcctcctacccccagtgtttggggacagcaccacgacctcccgtgtgagaaacgcggtgagcgactttaggaagattctgtggcccctaaagaggtctcacttttggggcccttttttcgaggcccccacccccaaaccccttccccccggcccccccctgggggtttcccaaaaaaaaaaaattttttggccctttttttttattaatattttttaaaccacaca

SEQ ID NO: 565447 - DNA, 481 bp, Homo sapiens
  misc_feature (194)..(194): n is a, c, g, or t
cactatgtcctatcaataggagcgggatttgccatcataggaggtttcattccctatttcccctattctcagggtacaccctagaccaaacctacgccaaaatccatttcactatcatattcacggggggaaatttaacttttttcccacaacactttttcggcctatccggaaagccccgacgttactcgggntaccccgatgcaaacaccacatgaaacatcctatcatttgtagggtcattcatttctctaacaccaggaatattaaaaattttcatggtttgagaagccttcgctttgaaacgaaaagtcctaaaagtaaaaaaaccccccataaacctggaggggttaaatggatgcccccccccctcccccccatttgaaaaacccggatacataaaatttagccaaaaaaggaaggaatcgaaccccccaaaagtggtttcaaaccaaccccatggcccccaagactttttcca

SEQ ID NO: 565448 - DNA, 156 bp, Homo sapiens
cactcacagaacaggtgcgattctgacaccacaggtttgaggtcactgcacgccttctttctatcaccagtgagctagcagacttcggcacccagtaggtgctctcagatgcttgttgaatgtcaactacattatacgctctaagatgggtgccgt

SEQ ID NO: 565449 - DNA, 967 bp, Homo sapiens
gaggggtgcgagcagcggggtggggaggctgcatggactgacgaggaggagacgtaccggtctggaaaatccgaaggaccatcatgcagctgtgcaacgacgccgtggttatcttgttggcccagggactgtgcttggaccagaccttgggggatgtacaaagcccattttggtggacacacgcctgcattgagggggcggccggggcgcacgggccctcaacccggtgcttgtttgcccacaaaatgatgaccccacgggaccagattgtttgtggtcttttcccaggatggagcccaatgggtgggctttccaggacctttcaaggttggtctctgccagcgccttgcagggagcggaggacatcattcacgcggggctcttcattcggtgggtggcccgccagggatttgacaccctttcggcaagaggccagtcctcgtggttcggatattggccccccagatggtaattccgtggaggcccggtttcttggcggggaagggggtggtcattcaaccttcagctggggcacggcgcttagttccctggagcactgtcgttcgtgccccaaggcggggacggttgaccagagtcttggtggcccggatattaagcctgcgggagggagaacccaggcttgcccaggatcccagggcggggcgacccttgtgggcgcgctacttgggagtcaaggctgggggccgttgttgcactcatccgggccctgtgagagggtggcagggtacatcactaacgggtggtgcggagtaccggctgaggccctagagggggaaccggtggccccatcctgggtgaaagcctggctggcagattctgggcccaagtttcaggtgtggctctggctccaggggtggtgtccccgtccgctgtgggggtttgtgcccgcatctgtgttgggagtgaccaaggagccgggctggtgtgggttcacacgtcttgttgg

SEQ ID NO: 565450 - DNA, 190 bp, Homo sapiens
aacgtcatatatgcgttaagtgaatctagaacaaggtgaatgtgaaattccctccttccttcccccttcctgtggggttcattgtgtgcatccccagcgagagggacctggccccagggtgtgatggcagattgggaatgaccaaatgtgagaaaagtggtgggggcctccccaggacaatcatgcagca

SEQ ID NO: 565451 - DNA, 121 bp, Homo sapiens
tcagatgtccacgtcccgcacgtctacgactggagagaagtggagatcctgatgtttctcagtgccatcgtgatgatgaagaaccgcagatccatgttcctgatgacgtgcgggacgtgga

SEQ ID NO: 565452 - DNA, 394 bp, Homo sapiens
aaattctatgattagaattagtctaaacagaaaaagaggggaatgaaaggaaataaaactgtaattcatgtaatgtatgttaaatagcccaaagagttgtttctgagctttgaaacctggggctgagaacatagcagaacagaccaggacatgcccgggcaagcccatcgcctccctagctcccacccctctgacctaagttaaatgttacaggctgctgatgtttaaatggaccaatcatgtgaaaccgcgccaattcctcccccaagccccactccttttctataaaaccccctaagcttccaagcctccgtggtcgaatccactggtctcctgttgtgtgagataccgtttcgacccggaagctccgcccattaaaaaaccctcttggttg

SEQ ID NO: 565453 - DNA, 269 bp, Homo sapiens
ggggtttttttccccccccttttttccttggggccttttttaaaaggggaaagtttggaaaggggatttggggggccccaaaaggggtccctcccccgctccggggggaagggggggtttttttcgttttttaccccctttggggggggggggtttttcaaaggggtttttttccccccccttaaaaagaccccaccctttggtttttgggttttgggttttggggcaaaaattttgccccccccccctttttaaaaggggggggggga

SEQ ID NO: 565454 - DNA, 479 bp, Homo sapiens
cattccactgcccaaagtttattctggtttctaatttcaaaggacaaggctacatatattcagacttttatgacgatgaccaaagctagcttagggtctcctctgcatgtagcctaaggctagccttcagcctgactcatatccacgacttcttggccaccgtcgcaacgcttgttctttaaaaaagcggttctacctctctatgtgcctgagtgatgatacaatcgctgtgagtactagatgaacaaatccacagaatgggtaaagagtagaatctgaatatatctgaaaatatgattcgaaactgtgaatgtaaatatatacagtatgtatattgtttaaaagagattgcttgcaatgaccttataagtgacatttaagtgtcatagcatgtaaagggttgtctggggtaagtaaaaattatagaatctgaagagacacggggcggggagaaggatgaggagcaggcaaagcagcag

SEQ ID NO: 565455 - DNA, 344 bp, Homo sapiens
  misc_feature (15)..(15): n is a, c, g, or t
  misc_feature (67)..(67): n is a, c, g, or t
  misc_feature (72)..(72): n is a, c, g, or t
  misc_feature (75)..(75): n is a, c, g, or t
  misc_feature (134)..(134): n is a, c, g, or t
  misc_feature (149)..(149): n is a, c, g, or t
  misc_feature (210)..(210): n is a, c, g, or t
  misc_feature (239)..(240): n is a, c, g, or t
  misc_feature (242)..(242): n is a, c, g, or t
  misc_feature (248)..(250): n is a, c, g, or t
  misc_feature (253)..(253): n is a, c, g, or t
  misc_feature (278)..(280): n is a, c, g, or t
  misc_feature (337)..(337): n is a, c, g, or t
ctcctacttcccggngctccaagtctccagccagctctcccgggggagggaggagacgctgctagcncgagngtntgggtgtcacagggagcaaagccctgaccaaggccctaacctaagactgagggcagggnggaggggccccaggnggatgaagggagttagctgaggtacttgccccgggtttaaaaaaataaaatttctagattntaagttaaaaaaaaaaaaaaaagcattanngncattgnnnccngccctccacccagggcccgccctgnnnctgtggccacctcgctcagccagttcagagctgcgtgttctcctcctggctctccgngtgagcg

SEQ ID NO: 565456 - DNA, 872 bp, Homo sapiens
ttgaactctgggagcatagattcaagttgccttgaatgtacactttaattagcagcagttacaagtggatttacaaaggcaaaagagagggacagggagtggactgaaacaaagttgtttgtcagaaattcttcttgatctacagaaataacattgatgactaattggctatatatttttaagctgtgaggtattgcttgtaacatctagtgtggcattattaggttaatttatatctacttgtaggaatagcaaacagtttcaagaggtaaacacgtagctcaaaggaggcagtagaacataattatgttctcatttttgtgtccctccaggcctgataaaactaaaaggacttgcactcctcagatcaaagttattctttttcctctaatctcaagaccgagattcagaatttggtactgtagatttaggtcctggatggatggagaaatggcaggtgttaacctgcacattcatgggaatttgggaggaggagaaagaggaactttgagatactcatgtttactcaatgcacacatgtcaccctaattgttcttctgggcctaatagtctccaactcagtttcaggtctcaagacatatatgtgtcactgaaagacgtgacatggtcgattactgtcctgtgaatttttgtcaaccactttgtagaaaggcttaactctctatgaatggtttgtaaaggactattgattttgaacacggcaacgcacaaaactggcgccaaactagggggccacgtggccttggggcccacatgaaagggttatcggaagcctgagggaacagtctctaaagagaaacgcgcgcaaatcacattaaacagtggagaggacctcggcaatttagcgcaac

SEQ ID NO: 565457 - DNA, 389 bp, Homo sapiens
ccaaagtccatccatccatttgatttccttaaaaaagcgaatcccaaggttgtgcaattaatccatgaccacatacaattgatccgatgaactagataatgttaaatctctcaggtaacttgttaaatttttgatgtgtaggataaaaaaatacttcaggggtcctactctgaccacgtcccttactgatctgtcgccctggtgcttgggggtcatggaaagaaagagtgagaaaatgtcgagggagaaggataaggggatgagagtgagtaccccttagaagtttgagcccatggggtgggaactattcctcccccaatcactgaagctgtagtaagagcaaatcatggtcaattttacagtcatctctgggttagccacactaatgg

SEQ ID NO: 565458 - DNA, 546 bp, Homo sapiens
cccacaaaaccttataaaaggggtccaaaaataccgccacaaaatttgggacagggggccccccaaaaaaaccccggtttaaaaaaaaaaaaacaaaaaactgccccccccaaaaaaaaaaaacaaaggggcccccccaaaaggccgaaaaccccgcgccaaaaaaaaggggcgccctcccaaaaaaaaaaaaaaaaagcccccccacaaccccggccgggggaaaaaaaccgaaaaagggccatccggggaaaaaataccccccacccaaacaggtcaggccctacccaattctttgccgccccggtcccccaaaaccccgccgcaattatccacccgggcaacccggttacactctctacccggggggcgcgccaaaataaacttccgcccaaacttctgtgctcggcccccactctcctgcacaaaacacggaccgcccgccatattataataggcacaccaaaaaggcggcggcaacaccgctacaaagttgtcctcccgccaaaacagttcttctctccaaccctccccacacaatgcccg

SEQ ID NO: 565459 - DNA, 372 bp, Homo sapiens
  misc_feature (2)..(2): n is a, c, g, or t
  misc_feature (126)..(126): n is a, c, g, or t
  misc_feature (145)..(145): n is a, c, g, or t
  misc_feature (181)..(181): n is a, c, g, or t
  misc_feature (212)..(212): n is a, c, g, or t
  misc_feature (226)..(226): n is a, c, g, or t
  misc_feature (236)..(236): n is a, c, g, or t
  misc_feature (268)..(269): n is a, c, g, or t
  misc_feature (287)..(287): n is a, c, g, or t
  misc_feature (302)..(302): n is a, c, g, or t
  misc_feature (359)..(359): n is a, c, g, or t
tntagcaccagcagatttttcaagagcctcaacatctacttttagagacatactatctgccgatggcaagtctttactaagacctttggctttctctggatctacaagtgggttggcagaattaanctgtgccagggtgtgattntcttttggtttttttttccacagctgttgtaggtcnctatttgcctccttcttccgcccatttttgngtttgaagtttgcngcttctcttntcagggacaaatgggcgggggtttttggctgnnggttttgttaccactggntagcttgtgtgaggncctcattggccctatcaatatcttcttcatggctatacatggtaactaatgcagatnccatgcctggttt

SEQ ID NO: 565460 - DNA, 146 bp, Homo sapiens
aagtatgaggcccccttagtcatcagcatcttatatagtacaagctcatttgtacaaggtttataagtttatatataaaatgtgtatatatattgtatgtttccccttttagactttattttttctgtatgaaacccagcaaatcg

SEQ ID NO: 565461 - DNA, 223 bp, Homo sapiens
accttcaagcgatacatgatgttaacggtagatcaacgtaggtcttgagctcctgagctcaaatgatccacctgcctcggcatcccaaagtgctgggattaacaggcctgagctcccatgcctggccttttctggtcctatggttagtatttttcgtgacctatttaagaaaatctttgcctcgcccaagaatgttcactgttcttctgggaacgcctgtttt

SEQ ID NO: 565462 - DNA, 301 bp, Homo sapiens
actaaattcgcggccgcgtcgacggcccagtgcgaaaacaccttcgatgcgctcggccggatccgcacccagcgcgatgccacaggacacctaacacggttcacgtatctccctggtggggtaaccgtcgccgatgacgggcagggtcaccattccaatacgtggattagtgatgcccggggccgtaccgtcgggatcattgacgctgacgggcagcgcacttctatccggtatgaccgctatggcaaccttgtaggggctactgatcgagcgggcaaggtcgacgcggccgcgaatttag

SEQ ID NO: 565463 - DNA, 593 bp, Homo sapiens
tacagcgagctcccagctttcaagaagataaccggcagcgagcacccctacaacaacctccgcaagcgcttcgtgggctctgctctcagaccagtgacttcgacctcatgaacaagttcctgacctacttccccgggaggaggatcagctgctgaggactggcctcaagcatgagtatttcctgcgagaccccacctcccacatctgacctcctccatgttccccactgtgtgccctgcaagcagctgagcagcaagcgtgtgaagctgtgggcaccagcccgaggccccctgagggatggcctggtgctacatgccagcatggtgtgactgactgatcctgaacggagactggtgcttccagccttaccaccacgaaaccatgtggtggcctcctgccgctgggcaccctggcttcaatgcctcaatgttctcgaaggtcagatgtggacccctgtcatggggagaactcagcctgggaccacaggctgtgtgctactgcggcttggagctgcgatcgagactcggaactcctcgtcttactttgtgctccatgttttgtttctcgtatctcaggtttgtaaatttgtagaa

SEQ ID NO: 565464 - DNA, 1476 bp, Homo sapiens
  misc_feature (132)..(132): n is a, c, g, or t
  misc_feature (1153)..(1153): n is a, c, g, or t
gccttgctatgcggtcgtgagtgagtaaagatcatgtgcccgaagtatcgctaagcaagatcatccatcgtatctgtctacatagcacgtagaatgccctgttacaaatctgtgagtacagtcactcccacngtcgatacaagcagacaggactcttcgagaggtgaaggagacctgggacttgatggcgtgggaagggcgcaagcccgtatgctccatgatccataaggaatcaacaactgtccagaggccggttccacatgttagtactgggcgtagcactatctgtactaccggtggaagccaatcggaattctaataatcttcgtgtcagaggaaagcacgatggacggggtaaatgggtatacccataatggtgtaggctcacttttggattggcaccagtagcgcgtactcgtggcccaggagaactatgtggggtaaaaactagggtctcaaaaatcacttaatatttgaatttgaacttttcgtagcatatatagggctaagcttgttctccaaactggtgtggaccgaacatcggagatgttctttctttattcttcttaataacgttaagctttgaattacctttaaaaagtcaagccccggtaggttgtgcatataacttttttaacatcggaaacccagtttttttaagtctaaaattactgaaggcggaaacagatacggctgggagctaatttatgcaccacattgtttagttgtttacgccgcagggtaatcttcgttttctcacacatactccttgggctgggaaatctccattgggcatcgaactttctgggggactcaacatcgcgtcgcgaccctttgcggaatccccttgttctagcactatcttagttccactatgctttatcgtgtccccccccttggcgaacctgtttgggtctcttgcgacacgcaacagaagtggttaggtgacttatgcccggtgggctagccaagggaaagataggaatggctttcggacatggcgtggaaaccccactgtgttggaattagcaccctgtgtcgagtctccaaccgcgaaaggggatacttactctctaatcggggcagatttccattcaaacatgaagacaaaggcatggctctaggttcaaatttacaaagagtctgcgttgtnggcaggccctctgtccccatgtccacgggtcatgagggtgagatcgctgtcgggacgtttaccgagtgccggacttgtcccccttgcgcttttggcaccttctgtgcttgccgttctggatgtacccgggagaggggggctccggtgtaaccgggttcaggtgggacttaatgtcttccagagttgttctacagattctaccgagcgcgctgaaaggtccacgaaatcatccacggtccggaggttctgcgtgatcaccacagacgccgtcactgtgaggtagcccgcgcatttatgcgttcgctgttgcgtcccagcgcgag

SEQ ID NO: 565465 - DNA, 110 bp, Homo sapiens
tgatgattcgctacctgttaacacacttacatgctagagatacttataataacaaacaaggcactagcaagtgcgacactgctaaacccctttttttaaaaccctatagt

SEQ ID NO: 565466 - DNA, 288 bp, Homo sapiens
ctgcagtagctgtttatggcgaggcgctgtttccagagccatggagagagccagtctgatcagaaggccaagctggcagaagcagtgccccgggggaaacaaaaccgctatgaggacattgcagcttcataaggcgcgtgaaaggcgagagctctctgcgaacgaaactgctctcatactaaaacgtgtgggcggcagagggctgcctggagggtgctgtccagtattgagcagaaaagtcgaacgaggatgggcgtccggaagtgaggaaaggggggccccgaagag

SEQ ID NO: 565467 - DNA, 355 bp, Homo sapiens
  misc_feature (16)..(16): n is a, c, g, or t
  misc_feature (61)..(61): n is a, c, g, or t
  misc_feature (68)..(68): n is a, c, g, or t
  misc_feature (124)..(124): n is a, c, g, or t
  misc_feature (126)..(126): n is a, c, g, or t
  misc_feature (138)..(138): n is a, c, g, or t
  misc_feature (177)..(177): n is a, c, g, or t
  misc_feature (272)..(272): n is a, c, g, or t
  misc_feature (284)..(284): n is a, c, g, or t
  misc_feature (298)..(298): n is a, c, g, or t
cccccatgactccagngacagtgtgggagaggctactctccagggacatgtttttggaganatatggngaagggggcccaggcgaggtggctcacacctgtaatcccagcactttgggaggtcnangtgggaggatcncttgacgccaggagttcgagaccaccctgggcaacagancgagatcccatcactacaaaaattcaaaaaattagccaggcatggtggtgcacacttgtagtcccagctactcaggaggctgaggtgggagactngcttggccccangaattcaaggctanagtgagccgtgatcaccagtgcactctagcctgggcaacagagaaagaccctgtctc

SEQ ID NO: 565468 - DNA, 1273 bp, Homo sapiens
gggccagcgccagctgccagaccctgcgcgccgctgctctccgtgcccgtcgcctgccttgtggactcgcgagccctgcactccctgccctgcctgttctgctgccctgagtattggagcttgctgtagtttgctgaatgtgcaccctgtgcactgctgcccctggtgcctggtgcctgtgaccctgctggcttgctgtggtggaccatgctgttgtccttgcaagacgccttgctcctgccatggaggagctgctactggtacccctgctgcactcctagcttccatgtgctgtgcatgcgggcagatcaaggcctgcacactgctggaacgatgcttgtgcttactgggactgcgtggcaggtactgctgacgcgactgcagatcgctgatgagtgacgcgcacgtccttccacccttgtgccgatgacaccttaccctggcatctggctaccctagatctttgctgtcgcccaccctgaacaaggctgcaggtttgcatcgcttcctgggtgttgctgtgtcatagcattgcctgcttggccatccactgcgtgctgcgcagaccacgcccacctgacccatctgacaaacctggtgcactctacagctgaccacgctgtcatctccaccgaccagttagcgggactgtggaggtgctggtccatagggacagctcacgttgggacctgcgctgctgtgatagcacattgatactcatgcgccttcatatctgcaccgggtctctctgccccgtgaaccgacagggccttgcgtccacaaaggcattgcccaagacactttttgtgggcctctggtggctacaggaattataccctttgccactgtacccggcatgtcattgactcgacaccgtccacgcattgagggtctgacgtggcaaggcctgaggtgcctgtccaatgtacagaggatgatctaccagactttcttgcctgcgatcccgtcggcccgtcacgtggcactgtcctgcggcctgtcagagcccaacttgcaccggctcccggacaagccccagggaagcagtcaaaccacagagacaaggtgccgacagcccgagccctacctgcgggctgtccacagaaaacaaagggaaacgcacaccagtacccagacgactggtgactcccgcagagtggcgtcgcgacctgctaagtcaaacaagcaaaggtggatgcacacagggcggccacgcggcgtcccgctagtagagcatccctgatcgtggggagtagctctctgcttccggtca

SEQ ID NO: 565469 - DNA, 271 bp, Homo sapiens
taatttttgcgggaaaaaataaaagtgatggaatttggttaattatccccccgggtgttaaaaaagtaaaaagcagtcaattttcacttcaaaaacggttctaaaaagtttggttcggtccgggaattatttaagtaagtgggtgtctcagtaaatggtgtggacctggttggttttcccaactggtgccaaatttattcaccagctgaatcttcggtgcagcagtctcccttattaaatggcgaaatcaataaaatctcccaaaatattt

SEQ ID NO: 565470 - DNA, 202 bp, Homo sapiens
cttgaagaaacttcctcaattacgtaaaataaactttagcaacaataagatcacagatattgaggcgggagcatttgaaggagcatctggtgtaaatgaaatactgttctttagctgaacaacggaatttcttgcttttgatctgtccaattcttaagtttgccaggcggcgagggctggtgcaacgggcaccactggtctc

SEQ ID NO: 565471 - DNA, 231 bp, Homo sapiens
ggcttcatgatccatacctccccagcttctcccctagtgcacatgctacctatacggcaggctccatctcctcctccccagctcctccactagtgcacagatacctattggcaggctccatctcctcctccccagctcctcccgtagtgcacagatacctataagcaggcaccaatctcctcctcccacagctcatcccacgtagtgcgcggatacctatctgtcaggcac

SEQ ID NO: 565472 - DNA, 261 bp, Homo sapiens
acatgtttggcaagtctcttcaaaatcttcccaggaaagtcagtaatgatgtcttatattctcattaataaatgtttctgtaggaaatctgttatccacttagttgtgcccatgttggggttaaattttctttaaaaaataatgaataaaaacaaggataggcttgcttattagtttacttttcacatgttatatgctgtatccaacaaaggcttcactaaaagataaatggcttcctctagaatagaatgtacttacatc

SEQ ID NO: 565473 - DNA, 1041 bp, Homo sapiens
  misc_feature (424)..(424): n is a, c, g, or t
atatttcacgctccgctaccataattcagtcgctatccccaccggcgtcaagaggtattatacgacgtgtactcgccactacctctcacggaacgcacagtactgaacactgatcatgctcgctacgttcgcgtctgaggccctagcgattcactactttcttctgtgcaccgctacggtgggtcctgagcgtaggcctagttgtgattacgcataactgctagtctactgagtaccattcgttaggctaaaccgacacgtgacgtacgctctgtatgctcactgtccacttatgtaccctgatcgaagtgaggcagcgtgtgattatgcccgatctagtgagcgaaggctgtcactcttcgactgggactttcctcctaattcatcatggtctactaggccttatatcactaatagcatacgnccatagaattgccgagtttcagcgtattcgatgatgtacatcgagtcgcttaaaatgctgaaacttgtgctttgccccgacagaaacagactttgtcttgcggtccataatccggtaaatggtcgcccggaacgctttaactccgggacgttagcccccgaaatgacgatactactcacattggaaaactattccgtaatgcatcgtgttgagaggcatcatgtcgagttgtcatcttaaacaggcgagtgacactatttacactgaaattttctccagtggcaatttgtgacgaaaggccctttcgcattcggaaggcggaaaaaggtcccttaatagcgtaggaagggaaatcccttcgcattaaactcgtgggacggtggacttattagttggggaattggccccccgcccaaagaacccttaacaacaaccaatttccgggagaaggaaaaccccgtggttaagcaatataattcaagcgaaacccgaacatgggaggatgacacacaacccctgatcttttagcgctgcccaacattgggggctcgcgaggagaacacggctgttgtcaaggacgccattgtgggttaaggtagtctctacgggcgggacag

SEQ ID NO: 565474 - DNA, 475 bp, Homo sapiens
cacgaggaggttcggcagcagatcccgtcgagagctgaccgactcggcctggtcgtcgccgagcccggcacgccgtagtgcgggcaccgatagccgcgcccgaggaacgacatggtcgacgtggtggatgttccgggtgtccacgtgcgggaagagcatcgcgagcgaggcgaatgtccggcgggtgccgtacttcaggtcgagcaggtcgtcgatctcctggggcgtcaacgtcagcgacttgccgcgggccgccatccgctcctcgatctgcgcgaccgggaagccgtccgaagcgtgctcggtgatgacgtctcgcaggtcacgaagcaacgtgtcgagcccggaaccccagatgccctgtttgacgaggctgcggaggacccactgacggagtgcgctgcggtcctttctctcgctgggagcggtgcgataggtctcgtccaacccccgctggtagacgtagtacgcgacc

SEQ ID NO: 565475 - DNA, 488 bp, Homo sapiens
  misc_feature (61)..(61): n is a, c, g, or t
  misc_feature (450)..(450): n is a, c, g, or t
cttgtgtacattgacttccgagatgaagacggacttctcagacagtcaagggaagcagccnccatgggcttcactggtaaacaggtgatccaccctaaccagatcgcagtggtacaggaacagtttactccaaccccaggaaaaaattcagtgggctgaagagctgattgctgccttcaaagaacaccagcagctgggaaagggagcctttactttccgaggaagtatgatcgacatgccattactgaagcaggcccagaacattgttacgcttgccacatccatcaaggaaaaatgatctgttaaatgaaccctcctcaggcgggctgaatggatactgtgggcttcttaaagacaaaccgcagtacccagggcagcttgctagcatgctggatcaggacctcatttcacgttagtcacaacgccccctccccttgtatcttactgacncgctatgctaaaaataaactttcttcctctggagtcta

SEQ ID NO: 565476 - DNA, 255 bp, Homo sapiens
  misc_feature (192)..(192): n is a, c, g, or t
gtagatctctagcaggatccccgcacactttttgcatagaataatattttgttttgaactagtctggagaatgttactgtttcaattattataaactatctttgctttcctagaatactgctccaaatggctttgctgcctctactattcatcagccctaaatttctgtccccaaagtatgataagcagacnactagggagtctctttggccattctccttcattcagttgcattctatattaggatatctatta

SEQ ID NO: 565477 - DNA, 831 bp, Homo sapiens
  misc_feature (3)..(3): n is a, c, g, or t
  misc_feature (119)..(119): n is a, c, g, or t
  misc_feature (128)..(128): n is a, c, g, or t
  misc_feature (141)..(141): n is a, c, g, or t
  misc_feature (145)..(145): n is a, c, g, or t
  misc_feature (147)..(148): n is a, c, g, or t
  misc_feature (151)..(151): n is a, c, g, or t
  misc_feature (157)..(157): n is a, c, g, or t
  misc_feature (190)..(191): n is a, c, g, or t
  misc_feature (194)..(194): n is a, c, g, or t
  misc_feature (242)..(242): n is a, c, g, or t
  misc_feature (247)..(247): n is a, c, g, or t
  misc_feature (273)..(273): n is a, c, g, or t
  misc_feature (285)..(286): n is a, c, g, or t
  misc_feature (288)..(288): n is a, c, g, or t
  misc_feature (293)..(293): n is a, c, g, or t
  misc_feature (333)..(333): n is a, c, g, or t
  misc_feature (344)..(344): n is a, c, g, or t
  misc_feature (385)..(385): n is a, c, g, or t
  misc_feature (488)..(488): n is a, c, g, or t
  misc_feature (507)..(508): n is a, c, g, or t
  misc_feature (514)..(514): n is a, c, g, or t
  misc_feature (529)..(529): n is a, c, g, or t
  misc_feature (532)..(532): n is a, c, g, or t
  misc_feature (534)..(534): n is a, c, g, or t
  misc_feature (536)..(536): n is a, c, g, or t
  misc_feature (562)..(562): n is a, c, g, or t
  misc_feature (604)..(604): n is a, c, g, or t
  misc_feature (607)..(607): n is a, c, g, or t
  misc_feature (609)..(610): n is a, c, g, or t
  misc_feature (634)..(634): n is a, c, g, or t
  misc_feature (637)..(637): n is a, c, g, or t
  misc_feature (652)..(652): n is a, c, g, or t
  misc_feature (655)..(655): n is a, c, g, or t
  misc_feature (667)..(667): n is a, c, g, or t
  misc_feature (669)..(670): n is a, c, g, or t
  misc_feature (679)..(679): n is a, c, g, or t
  misc_feature (685)..(685): n is a, c, g, or t
  misc_feature (696)..(696): n is a, c, g, or t
  misc_feature (703)..(703): n is a, c, g, or t
  misc_feature (705)..(705): n is a, c, g, or t
  misc_feature (736)..(736): n is a, c, g, or t
  misc_feature (738)..(739): n is a, c, g, or t
  misc_feature (766)..(766): n is a, c, g, or t
  misc_feature (806)..(806): n is a, c, g, or t
ggnggctgcgaacgcggaaaggcgacgacgacgaacgcaaacaacgtcatggcaaacaggtggccctgaaccggacccaagtgtgcgggatcctgcgggaaaaacttttccaaggcgangccttccancaatcggatacanacananncancaacangggtgcatcgggtgacctggccaaaaaaaaaanntancccaccaactggtggctgttccgggatggccttctgcccgaaaaaaanttcancgtgggctaaaccgttcccgcctcanaaaggctgacanncncaaanaaaaaaaacccttcttcaaagccaccccaaaaaaaaaacncaaactggagnacttctttgcccgcaactcctatgtggctggccaatacaanaatgcagcctcctaccaacgcctcaacaaacacataaataccctccacctagggtcacagaccaaccacctcttctacctagccttgcccccgaccgtctacnaagccgtcaccaaaaaaanncacgantcctgcatgagccanatnanangctggaaccgcatcatcgtggagaancccttcgggagggacctgcagagctctgaccggctgtccaancananntcctccctgttccgtgaggaccanatntaccgcatcgaccantanctgggcaaagananngtgcagaanctcatngtgctgagatntgccaanangatcttcggccccatctggaaccgggacaananngcctgcgttatcctcaccttcaaaganccctttggcactgagggtcgcgggggctatttcgatgaanttgggatcatccgggacgtgatgca

SEQ ID NO: 565478 - DNA, 429 bp, Homo sapiens
  misc_feature (313)..(313): n is a, c, g, or t
  misc_feature (332)..(332): n is a, c, g, or t
  misc_feature (375)..(375): n is a, c, g, or t
  misc_feature (395)..(395): n is a, c, g, or t
aattcgcggccgcgttcgacatggaagctgttaaacaagttcagccacagttggtctgaaatcaaaaacttcatgcagttttggttgcattgaaaagggcgcaatcagagcttgcagctcatcagaaaaaaatctccatgttgacaaccatatggtatctcaatgcggggcttactgctgatgctagactgttatgtaatttatgcgtcaggagtgtttggattccagatttgtattcgatagaccactgcctgtgtctcgtcttgtatctctaatggaagcatatccttttatgtagcatttaagggatagnactttgaaagggtttgaanactggtgttaaataattaaggatataataataatatgacatangtaagatgtgacttcacctngatggcccttcatagccttatagccattatttgc

SEQ ID NO: 565479 - DNA, 200 bp, Homo sapiens
  misc_feature (68)..(68): n is a, c, g, or t
cccccctgccctctcccctctctccctccccctaactgcattacatgttaactgtgtgcccaggacanccgtggtggggaccgggtattccaactggaatgattctagaacccaaataaagttggggcaggaagagggggcttccagggaaccctgctcggccctgaatcaccttcgtctcttctctaggaaaaaaaaaa

SEQ ID NO: 565480 - DNA, 1146 bp, Homo sapiens
  misc_feature (235)..(235): n is a, c, g, or t
  misc_feature (1010)..(1010): n is a, c, g, or t
  misc_feature (1146)..(1146): n is a, c, g, or t
atccagagacaattggcccctgtatgggatggagcccgagaggcgtcatcagagagtaactgggaatgagattgttgacagcattatgatgacatgaacctctcggagtccctttctccgtggacagtctacgcctagtgggtatttgagaagccctcatgccagtccagcagcgagccattctaccttgtactcaaagggttatgatgtgagttgctcagagcgcgcaaaatcntgggagcttgggaaagagcggccacagtttgccattatctcgagttcatgcaagcaagatgtgacacttaggactcctaggaaggcgcatgcgcatggccgttggttcccgtaggcacgcctatcatcgtacgaattgggcgtctagcaagatacaggaacggtggtcatcggcgactagcgagactacattgggctgccttcctgtcatcgcctgtatccgggggcaccaacggtgcgtgctagagagtgcataaacttgctagatggaagctccccataatcatcgtgggtacccctggaccgtgtgtgagatattgcttaagccggagatagctgtaaccccaaataacatcacatgatgtttggtactgggatgaagctgatgaaatggttaagccgtggcattcaaggtaccagatctatgaccattttccaaaagcttcaagagaaacaaccaggtagtatcgctgttgaggcacaatgcgttctgatgtgcttgacgtgacccatgaagttcatgaagggaccccatttcggattcttgtcaagcacgcagaattgaccctgggggaatccgcagtctacattcacgtgtacgaatggttgaactgtgtacacgaatggaccttttgaaccctggaccacacccaggggggccttaattagcccgagggaaggggacggggtcaccagaaaatttctgctccagaatacggactcccatgtatgaatttggcccccggcacagcatacgacagcagctgtctacacanagtaacaccacgctgtcacaacattagagaatataacaccaatcacccgaagccaccacaccgagagcgcagccttataacaacaggagacacacctagagtcaactgtcatgctcttatcagaacatgagagggn

SEQ ID NO: 565481 - DNA, 207 bp, Homo sapiens
aatcgagctcggtacctactacagctctaattttttttttttcatttttggtagagacaggtctcgttatgttgcccacactgattttgaactccgtggcctcaagcaatcctcctagctcagcctaccaaagggctgcgattacaggcttgagccacctcacctggcccctcttctttcttaatttatgatagctgttgtaactgg

SEQ ID NO: 565482 - DNA, 135 bp, Homo sapiens
gcggccgcctactactactactactgctcgaattcaagcttctaacgatgtacggggacatggtggctcacgcttgtagagattgtgccactgcactccagcctgggtgaaagagcgaaactccgtctcaaaaaa

SEQ ID NO: 565483 - DNA, 1401 bp, Homo sapiens
actagttctagatcgcgagcggcctccttgaaaaaaaaaaaaaaaaaaaaaaaaaaaaaaaaaaaaaaaaaaaacagggcgccggcgccgccagaaacaagcaaccccacacaaggcggcacaacaatcgcccgccgcggcacccgcaccgcgcgcgctgcaccaccagcggcgcacaccgactgaccgaggccagcgcactactgcaacacggcacacacaccacgacgccccacctcaccaccaccacccgcgcgcagcacggggcacacacaacgcgcgcgcacccactgacagcactctctcttcgcagaacaacgagcacaccttatcacctatctgaggtgcgcggcgcgcacgcacccccatgccggcggacaacacacaacgaccccagccaacaacaagtatctaaaccaccacactaccggacaccactactcccaccccacggccacagcagagggcacactcacggggcagaacacaacagacgcacgcgacacaacgcgcgcagcagccccgcacgccgacacactccgccgcgcgccacgcagagcacacgaaaccacaacccacccaccgaacacacgccacaccacggccaaacctacatacactatacaatcaccaacacctaccaccacacatctacaccactcacccccactccatcatacactctcctcctcccccccaccacacacacatcacaattaatacatcacctaatacacaaacacaacccctcatacacaaccccaccccaccccaacttcacaccacaacacactatcctcctcacacacctcacgcggcggaccgacgcccacgcacacaccagcaagctagcagcacgcagcacacggccacgccgaaccaccggagcgtccatcacggggcaggactagggcgccgcgcgccgccccacctgcccacagcgcgaacacccgcccccggccggcaccggcccggcaggacacaaacaccgaccgcacaccgcgtacgcggcccaccgggcacagccccagcgccagggccaatacagccgcacgcccacacggacagcccccgggccggcacgcagcaacgacgaccgcgccaccacccggcggcccgcaaagaacaaagcacgccgagcccgacccacccgcccaccacgcatccaccgcacagcacccgaggcacccacacgccgcgaggcaccgccgcaccacagcacgcccggaaccacacagcgccgggcacgcaagaaggcaaaccgaacggccgagcgaaacccacacgcccaaacggagccacaccgcccgccgacacctcgaccacggagccggaccgacccggcagcacgccacagacacgagaggcccacaacccgggcggaaccgcggacgcgggccg

SEQ ID NO: 565484 - DNA, 157 bp, Homo sapiens
gcaccccctcccttctaggaaacaagaagagataaacaggaacctacatttttatgtactatgcaaaatcagacatcttttaacatagtcctattactatggtaacactttgctttctgaattggaagggaaaaaaatgtagcgacaatttttaagc

SEQ ID NO: 565485 - DNA, 172 bp, Homo sapiens
ccttctacaaacaaaacccagacccaggactcatcgtggcggaggctgaagcacgacgcaacagtggacagcacttggaagggagaaaaggtgagcttcagagctggttgtcgctgccggttcaggaggccatcctctgcgatctcttggagcgaccaggggtcccgagctc

SEQ ID NO: 565486 - DNA, 498 bp, Homo sapiens
ccagtgctacttccacaaacaggcatttgtttacttgtaagacgacagaacagaatcagcacctatataaaaatcacactgacaatatctaatattttgagaaaaaatgaaatctgatggtcctgttaacaatcatggtattttctaaacccctgcctccttttttgttgttattttttgtttagtcagggtctcgctctgtcacccgactggagtgcagtggtacccgcatagctcactgcagccttcaactccggcctctgcctcctgaccctactgcctcagcctcctgagtagctaggaccataggcatgcaccaccacacccagctaattttttattctttgtagagaaggagtcttgctatgttacccaggttagtatcaaactcttggactcaagcaatcctcctgccttgacctctcaaagtgctggcattacaggtgtgagccaccatggccagcctatgaactgtttgtggaggtagcactggggatc

SEQ ID NO: 565487 - DNA, 198 bp, Homo sapiens
  misc_feature (148)..(148): n is a, c, g, or t
  misc_feature (190)..(190): n is a, c, g, or t
gtggcaaaaactgacttggcattgtgtatgtgccagggggcatgccctggcaattgtttcacttgcagatctgcggaacagcagaggtgtgtgcgttaaggcctgccatggcagctgacatagaaaacattaatgagtgtccattgcntgtttcctcgttttgtaaaactgtggcatatctagaatccgngtgtattc

SEQ ID NO: 565488 - DNA, 136 bp, Homo sapiens
agtcccattatactcgctcttccacggccacatcgtagcactgaggtcatccgtgcgcgcctactctgtgtccatagacctgtcccttcctccgtcacagcatggtcattccaggatctggggacaaagcactcct

SEQ ID NO: 565489 - DNA, 662 bp, Homo sapiens
ccggctcaacttttcgtcacttgtgtgagattcagtctggccgaacctccagcatgaggttcaacgatcctgggctttaacagcaagggagaggtgcatgggatcaagtgtggacccaatggggtcagcattctgacggatgggatggtagtacgtgaaggacataggatgtggggtatagctgtgagaaactttttgaaatagtatagatgaatgtcctgaggggactgtgaaactatctctgaccctcttatgaaactcaacggggaatcaatctaaattaattgtacagacatggtggtcaatgaattgattaggaacggcgacgaggtcaccctagcggaatgtgtatctacggtcctaggggccaaacgtctggaaacggggtttggaacgtggtttaaggcaaggacggtgcactcggatgtgcccatgagtccgcttgaggtccagggtgtggtgaattacacgttgagctcaccggaacacgcaatgaaatgagatcatcgcttgaggagcaggtcctagacttcgagtcactccttttcagtacgaggcatggggaagtgccagccattaaaggtagcgcgtaacaagcatcgccactcgaatacctttgtgggcgcttccacgagtacactcaccttgggctcgcgaagctg

SEQ ID NO: 565490 - DNA, 210 bp, Homo sapiens
  misc_feature (72)..(72): n is a, c, g, or t
  misc_feature (98)..(98): n is a, c, g, or t
atgggtgctccatcccccgaggtgactgggctgagtcccgggagttgggaagaggtggcaggaaggggatcntgaggaggagaacaggggtcctggtnggtcttgtgtttcttcccagacacgggagctgtagaaggggagctcctgcagcagatgctaggggggccaggtagggccccatggccagtcttgggactatggggtccttgt

SEQ ID NO: 565491 - DNA, 545 bp, Homo sapiens
gagctggggcgggacgcgcggaggtgggcaataccgctaccttcccttgagcagtccacgccttgtggcggctttagcggagctgctgctttggcgggagttggaagctggtgtgatggtttctgtggcggagaaggagagtgccagaggtgactggcttcgtggttcttctagtgctctcatggccaccatgtatggaacggcagatgccaaactcagcccaaggtagcagcccacagtgtgccgagaggctagccttgtggtctgtcaggctttgggactgaagctggaggctagtacactccattcctggggaagtatcgcccctatatgtgggtacgctgttgccagacctgcacacccaagagctgggagtccctcttccacagaagcatagcagacctaggcttctgcaatgtgatcctggctgaaagcgcagctgagaaccacaacggttatcagggtgcttgggctggtatctggcaggcttcttgcttatactcctagttggtcccctggaagcaggcacattccacctattcgca

SEQ ID NO: 565492 - DNA, 268 bp, Homo sapiens
gtcgacctttaatctttctaggtaacattctcttcctaaatgatgaatttaactcagatctacagaaaacaatctaccccagaaacaaactaattatgagaaatgccaaaaaaattaaaacacaaacacaattataaacaaagtatgaattgcaaaaaataaaatatggtacagaaagttacatttttagtcctataacaacatgatgaatttccttcattttatgacagatgatgacattgttaacttctacatagacccgtcgacg

SEQ ID NO: 565493 - DNA, 525 bp, Homo sapiens
  misc_feature (433)..(433): n is a, c, g, or t
  misc_feature (468)..(468): n is a, c, g, or t
agcggccgcctttttttcggtgggagattttggaatatggactcaatctcctcactaaccacaatatagttctattcaaattttctatttcttagtgatttagtcttaacaagtttggtgtttctagaaattggtacacttcatctaggttatccaatttatggatgaacaatggttcgtagtattttttttttaaaggagtctcgctcggtggcctaggctgggagtacaagggcacaatctggggctcactggtaacctccgcctcctcagttcaagcgattctcatgactcagcctcctgagtagcggggattacaggaacatgcaaccatgtccagctcagttttggtattttcagtagagacagggtttcaccaggttggccaggagggtctcaaactccggagctcaggcaaggcacccacctcggnctcccaaagggcggagataacaggcgtgaagccantgggcccgaccaagggaacacttcttaagtctttctgtgaggcaggattaccctgat

SEQ ID NO: 565494 - DNA, 1009 bp, Homo sapiens
agataggctaggtagaggctggtgggaatcggcaccgaggaaagccatcttgcattgtctcatcgctcttgtcgcgggcgctcgcgcgcgctctccgccgcgggatccggagtttatgccagagtcctgaactctcgctttctttttaatcccctgcatcggatcaccgtggtgccccaccatgtcagacgcagcgtagacaccagtccgaaatcaccaccaaggacttaaaggagaagaaggaagttgtggaagaggcagaaaatggaagagacgcccctgtaacgggaatgctaatgaggaaaatggggagcaggaggctgacaatgaggtagacgaagaagaggaagaaggtggggaggaagaggaggaggaagaagaaggtgatggtgaggaagaggatggagatgaagatgaggaagctgagtcagttacgggcaagcgggcagtgaaagatgatgaggatgaccgatgtcgataccaagaagcaagaagaccgacgaggatgactagacagcaaaaaaggaaaagttaaactaacaaaaaaaaaggccgcgtgaaccctattccccctcaattttcccatttcagattctaaacgttggtccccttcgagtagaagaggccggcccgcacaccggggcagtgcccccgaagatgaaatgcgctctccaaccaccaaagcaaaaccatgagaatttgccacagcggaggcaaaaggaaccaaatttcaaggcccctggatttttttcttacacgtactttaacaggcaattgtgtgtgtatcttcaattacatataatattttgttacatttggtaagggccagccattttactgatctcggtgacaaccagcttcggagcgttctgcctaattctgacttacttgtgtgtgacctgtcattatatttcacaggagaaaaacttgttagaataacgaaagaaacaagaacaacaacagcgcgtgttggcgggacaagatagacattttatttcacaccttgaag

SEQ ID NO: 565495 - DNA, 273 bp, Homo sapiens
  misc_feature (101)..(101): n is a, c, g, or t
cccccaaatcctcccaacaacatttttagctgacatgcaatggcgcttacttggctcctgcaacctccgcctccgggattcaagcgattctcctgcctcanccttgggagtggctgggattacaggcatgtgccaccacgccctgctaattttgtatttttagtagagatgggatttctccatgttggccacgtttgtctcgaactcccgacctcagatgatccagcctccttggcctcccaaagtgctgggattacaggcgtgagccactgt

SEQ ID NO: 565496 - DNA, 149 bp, Homo sapiens
ccgatttgacactctaggcaagcgttagtccttttgtgttacctcatacatacaaatagaggctttatgttagcgtattcacgccacctaggatgttctttccttgaattctcacaagtgataggcccattctaacaatgtcgatcaga

SEQ ID NO: 565497 - DNA, 801 bp, Homo sapiens
aaataaagtgttattaagaaaatcagggccaggtgcagtagctcatgtctgtaatcctattgctttgggaagccaaggtgggaagattgcttgaggccaagagttcaagaccagcctgggcaacatagcaaaagcctgtctctaagaaaatcataaggaagagaaaatatatttactattcattaagtggaagtggattgtcatgaacgtcttcatcctcatcatttcacattgagtaagctgaggaagaggaggggctggtcctgtctcaggggtggcagaggcagaagaggtggagaaggtggaaagggaggcaggagaggcaggcacagttggtgtgactttaagaagacacatgtaatttctgtgtaacttttttgctttttcatttctctaaaaatgtttctatatgataacagtacttttccactatttgctttagtttcagtgctagtatcatataagggtctatgtcgtaaaaggagtcaaagcagtcttgaataataggaacccttctggccaggtaaggggtctcattttcataatcccagcactttggaaagctgaggtgaaaggatcgcttgaggccagaagtttaagaccagcctggacaacatagtaagaatctgtctccattaatcacaatagtaataaaataaatagggtacccttctggcagaatgtctaatgtcagtaggtttcaggcactgttcttctacatcttcttccccattctggcatgggtcacggaagcactcatttccatcaagcatcctctgctaatccgtgatgtagtatcat

SEQ ID NO: 565498 - DNA, 189 bp, Homo sapiens
  misc_feature (23)..(23): n is a, c, g, or t
  misc_feature (40)..(40): n is a, c, g, or t
  misc_feature (67)..(67): n is a, c, g, or t
  misc_feature (103)..(103): n is a, c, g, or t
ccgccctacaggccctagcaggnagagcgggaggtgagcncggccatcccgctcccggagttccggnatcctggagtccgtagttcgtggtccttcgccggtntccccggagcccagcggctgtggatggcagaagccagagtgggactggtcagctgcaggagcagaagaaaggtcttctgatagccg

SEQ ID NO: 565499 - DNA, 105 bp, Homo sapiens
aacacttctgtcagcctcccacaacacccatcttccatcccaactgcagctctgattgctctccccagccctctgtacaacagtgtcaatgtcacatgtccagca

SEQ ID NO: 565500 - DNA, 607 bp, Homo sapiens
aagcagtggtacaacgcagagtggcattacggccggggaaatttctaaattgtcaaaaatgtataccaaggaggttcaccagtgttgttgataatcagaaaaaaacgggactcaactgcaatgatgcagacagtgatggggatctgacagactggagtgcagtagcgggatctcggctcagtgtagccaagaactcctggcctcaagcgatcctgccgcctgggcctctggagtagctgagtagctggaacaacaggcggcgcccccccccgtcccgacccaggaatgttgctatagtgtgtggtagataccgggtttccctatgttgcccaggctggtctctaactcctggcctcaagcgatcctcccgcctagtgctcccacaagtgtcgggattacaggcgtgagccaccgagacccccaccttgccatttggtcgtagtggtagtgggaactatggtttacacacaagcaacgtgccaactatcttacatgtacacgcttatgtgaaccacaagcaccttcagataccagaacactttcagcacaccaagagtctccctcaggcaaaagaaaacagaggcgatcactgttctttttaccacca

SEQ ID NO: 565501 - DNA, 648 bp, Homo sapiens
cgggcgcggtggctccccctgtgatcccagtcgcttcgggaggccgaggcgaggtggggatcacgaggctcaagaggatctgagaccatcttggacaaatggtgaagacccgtctctaatacagatgcaaaagtaggccggcgcggctggatgagcgctgcatgctgtacactctccagtctactagcatagcgtgtgagagcagtgagaatggggttgaagtaccggggggcggaggtagtcagcgagccgaagtatcgctgccattgaattccatactctgtcaatcacagcgagattccgtctcaaacttcgcacttctcttggggtctaagatcagggaagggaatacgccgcgagtcatacatgaaatggatgccttgctcgtgcagggggcgcctgtcgatagctcggttattcgggtagccagtgcgccggtagcggcagggaggtgctatcccgtgcgttgcaggggcacgatggttgtccctccagctaggcggcggggctgggttagctagcctgcggtggcagggccctggtgtgggtcccttcctgtagccgtgtcgataggcggattgcactttcttttgcccacgccctttattgcgagggaaaagcgtgcgttaccggattagaaccccatct

SEQ ID NO: 565502 - DNA, 243 bp, Homo sapiens
gttggaatcttcacaagaggtgatgccatagtgatagccagaagatcgttgtgattgcatacaaagcatggattatagagccgatgacgtggtggggttgatgggagagctgggtaccatctcctccgatctggtgctctgtgttccaccgagagagaagccatctccttggggaggtcaggctggcccaggccccggaagctagggctcagcatctcaaatggtggcgaccctctgagtgca

SEQ ID NO: 565503 - DNA, 293 bp, Homo sapiens
  misc_feature (35)..(35): n is a, c, g, or t
  misc_feature (234)..(234): n is a, c, g, or t
catttaatgtatcccacactatcggactgatctgnacaggtcatgcttgtccttctaatatagcctcttctttgctctacatagagcgcatctatttgtgcatcacatagctgtatgtctccaaaatgaatcagtcttgtattctttgatatttttccggggtccacttatcttgcttctccattaaaaatcctgcactttatccatgattggaaggtttccgtgatcagctgnggggtagaggtttgtgtagtgggtcattcatgtgttgcgcgataacatgggtaccgagc

SEQ ID NO: 565504 - DNA, 766 bp, Homo sapiens
  misc_feature (766)..(766): n is a, c, g, or t
tatacggcccctttgacgttcttttggttttacacttacgtgagacagcacattacgtgggttcttacagagacttacgagactatgtgtgtgtgtgagacacatgttctcatctgtcacacgagactgttgtctcactctgtgtgtgcccacactgagactgtgtgtgacacacagcggtgatacgctcttcactctgtgtgtgtgtgtggctctacccgcaactatacagcgtgttgtacacacactgagacgagagcgtgtctgtggcgagtcatacgagagcgtgacctcatacacactgtgtggtctttgtgtgtctattaccggtgtgggggagaagaccaccatcatatctataatctgctgatcttctatgtggttatgtggtgatttggggggatccatatcctaatcatgtggaaggacagatgatctttggtgtgtggatcctatatcataatgtaggtcatcatccggagcccctgtgaactggagaacgttgtggacttacctggtcacaacatcagccggggggacaccagcgttgaccaccgccttctctctctctacctgtgtgtgtgttacagggagcacgccgggactctcgagacacacaacatgtgtgtgactacgggggcgcacactctgctgggacacacactttctcacatctgcggggggctgtgaacgtgtgtgtgggagaacagggtgggttgtttttacaccgggggggggtgtggtcatacgggggagtacctacacn

SEQ ID NO: 565505 - DNA, 584 bp, Homo sapiens
cgctacaaggaagtctgtttggtcagacttacgatctctgttttaacctaattgttcgctggttgtccaaactccaaaagggagcaggtataacgaggtatgtccaatctcctttctgtctgtcgtagcctggaaggtagttttccacgtcgctcccgggtctccttggacaagagggtgttagagtaggccactaggcagacatgaacagggcaggagaggcccccaactaggaatgtcaggcggtcatcaggtgatggtcaggcagttgtttaggtgtctctctaaaataataattggtcactgccagcaccagggaaagacagtctcacaacagatggaaaacacctaaagcttctgcatggcggaataaggaaaagaaagaaaacacctaaggctggtgacagcagcttccttagaggatctcaggagttgggtgaatgggctccagcaagcacactgaggtgaaatggtggtgtttaaccggtatatggccctcctctagaaacacttggctggtaagggaagaatgcctcaagtgagcatgcgcgcaactgagcacaaaccctcaaaaggagcttccg

SEQ ID NO: 565506 - DNA, 163 bp, Homo sapiens
aggctcgaaaagggggaacggcagacggatacttaagcgctaattttaacagattaaacaagattgtgatcaccatgataccagggtgttaatctttatgtgaaaaatctttattattgtctttatgattaacgtctccggaaagagttttctccatttggta

SEQ ID NO: 565507 - DNA, 573 bp, Homo sapiens
ccttttcccaggccctccccttcccactggttttggacctcgctattcttccccatgcctgcctacgccttccgctacattggcagcccccactcagcacctagtggagcccccccctgccatgtcgcccttgaccgtcccgtctgcccgtatcatcgtcaccagtccaattctctggctatcctagaatcctgtcgccctaatcccagcctacggtttcacacttctagtaagcctctacctgcacggccacacattaaaaaagacccagggctgatcaccggcaccacctcacagaagcgggcgtcccgtgcacgtgcccaccttacactgtcagggaagaagcgccgaaaactcctcccgcagatccggcttgccccgaaagagaagacagccctggaagtggaagccccttcaaagcccgcccggactagtgaaccacagctccaaaggccaaagaagaccaaagcccccccggatgtagaaatgaaggaccctgaagatgaggagctaaacctcttcccctagaagattttcaactggagcccgccttcagactccacgtggttgttt

SEQ ID NO: 565508 - DNA, 353 bp, Homo sapiens
tcactctatatgacaacctataagagcatggagaagcaagaaggaggatctggtatatatcttctgggcccacagagtctgcgccacctaaagagcaaaatgatttatagccagctccaaggacgccatcaagaagaagctgacagggatcacagcatgaatagcaagcaaactgctacgagaaggtcacggaccgatgcaacctggcatagaagctggggggcagtgccgtcatctccctagagggcacgcctttgtgagccccttctggacccctgcctggagcatctggcagacccacacctgcccttggcagtagcaggctgccaccttactgacagagcggaggggca

SEQ ID NO: 565509 - DNA, 385 bp, Homo sapiens
tgactcagtgtcgacgagagtaccgacgaaatcccacaagaacaggcggcaaaaaacggtccgtgggtcgctgtgtgcgtctcacgtgccattgaaatagtttgcctccgggtgatggactgacgaattgcgtcggtggactggccaggatgaaagcaggaacccctctgacagttgtacaccgaatcctcgtcggatcgagtagtttcaccaccttgacgcgatcttcgaggttcggacaggtggcgtaaccgaaacttgtccggctgccacgagaagtttgatgatcgatggcgccaatgcccagggattcaccgtcaaggcggcaccggtttccgaccccatgagcatggtcccagtaagcgtcgtggactccggaaatgac

SEQ ID NO: 565510 - DNA, 120 bp, Homo sapiens
tctcctcgcatcaaacttcgctcacattggacatcagctgcagagctttaaaaatgactgacgttggctgggcatggtggcttacacctgtaattccagcactttgggaggccaaggcag

SEQ ID NO: 565511 - DNA, 92 bp, Homo sapiens
gggtcgacacggccgtgtattactgtgcgaaaggatctagggatcatgcttttgatatctggggccaagggacaatggccaccgtctcttca

SEQ ID NO: 565512 - DNA, 282 bp, Homo sapiens
tttttgttgtatacaaagatgactttatacgctgctaacatataccaccattaaagtacatgtgaggtgtttcttttgggaatgaaaatggatttgtataaatcccttcttggtggcttctgtcataaatacatgtttgcaaaataactttcttgggctcgggtacaatctattgatactggattgaatgaagtgaagttgctcatgtgacaactgaacaataactttattctgatcagctccacgttacctgaataaatgggctggaactaagtataataa

SEQ ID NO: 565513 - DNA, 111 bp, Homo sapiens
acctgccaagctgactccacgaagccccacaaattgctctccacagaatcagaactctggctctcacatgttttccctccagatatcaggaagcactacgaggctatagtt

SEQ ID NO: 565514 - DNA, 240 bp, Homo sapiens
  misc_feature (75)..(75): n is a, c, g, or t
  misc_feature (178)..(178): n is a, c, g, or t
taattttttaaaatggatatgaagtcttgctatgttgcccaggctggtctttaactcctggcctcaagtgatccnccgggctcagcctctcaaaatgttgggattacaggcttgagccactgtgcccagccagatatttttaatggtgatattttcacctattttagctgttgtttcnagtatgatttttatgttgactctaacctgtggccttactaagttcattaattagttcaagtt

SEQ ID NO: 565515 - DNA, 118 bp, Homo sapiens
aaaaaaaccccaaaaaaaaacaaccaaaaaaaaaccttatttatgtaaccaaataccagctacctgttccccaaaatcctactgaaaattaaaaaaaaataaaaactaagaacaattt

SEQ ID NO: 565516 - DNA, 897 bp, Homo sapiens
cacggtggctcacacctgtaatcccagcacttggggaagctgaggcgggtggatcacctgaggtctggagttcgggacaaacctggccaaggggcgaaaccccgtctctaccaaaaatacaaaaactagccgggggtggtggcacacacctgtagtcccagccactcaggaggccaaggcaggagaatcactcgaacccaggaggcggaggctgcagcgagccgagatcgcaccactgcactccagcctaggcgacagagcaagactccatctcaaaaaaaaaaacaaaaacaaattagctgggcgtggtggtgggcacctgtcgtcccagctactcgggaggctgaagtgggaggatcactgtgagtcccgggaggttggcggttgcagtgaacctaaatttgcatcactgcactccagcctggttgatacattcgagaccctgtccaaaaaaaaaaacaaacaaaaaaaaaaaaacctgtggggggcgcccgtggcccccaaaaaaatttttcacaaccattcggtggggggcggggccccatgatccgcacatgagcacacggggactagcagtggtcgccaaagaaatcggggcccggaaccaagcggggggtctcccccccaaaaaaaagacgccggggggaccccgggagaggttgggaacgaaaccccagaggggttcgcaaggactgaagggtccacacaggctgtcccgacgacgccgatacatgcccagccgcggggggaagactaccacacggacgccactacgacagatcagttcacggagaacgttcgacagacgccaacagatctcgacgaaatcaccacccgctgaaagtgcgaaagacctggtaggagccacgaacaccattacaatcaacctagcaccaa

SEQ ID NO: 565517 - DNA, 336 bp, Homo sapiens
  misc_feature (6)..(6): n is a, c, g, or t
  misc_feature (21)..(21): n is a, c, g, or t
  misc_feature (67)..(67): n is a, c, g, or t
  misc_feature (74)..(74): n is a, c, g, or t
  misc_feature (319)..(319): n is a, c, g, or t
  misc_feature (321)..(321): n is a, c, g, or t
  misc_feature (326)..(326): n is a, c, g, or t
  misc_feature (328)..(328): n is a, c, g, or t
ttttanccagtactctgggtncaataaataatatgtggaaattttaagtcctccaattccagcattnccagtgngttttgacagtgtgtttatgtggaatgtttaaggatatacaattgtactttatataaattggttcttgttcttcttaaatgtgacatgaaataattgtgctgctacattatactggaaattaacaggggaaaagggaagacctcttggctcccttgagggttctgctagtggtgttagggagtgggttacaactgagcttttagtaaccatttaaccgtatgtagacttggtttctaattaaaanangaatntntttttcca

SEQ ID NO: 565518 - DNA, 778 bp, Homo sapiens
  misc_feature (719)..(719): n is a, c, g, or t
  misc_feature (750)..(750): n is a, c, g, or t
  misc_feature (760)..(760): n is a, c, g, or t
tatagataactgcattttattacaaattgaagctttgtggcaactgtgtcaaggaagtctattggcaccattttttttaacagcttgtgctcaattcctgtttctatcacattttggtaattctcacaatatttcaaaccttttcattattattatatcttttatggtgatctgtgatcggtgattcttaatgatactattgtaattgttttgggacgccatgaaccatgctcatataatatagcaaacttaattggtaaatattgtgttctgactactccaccaactggctgcttttttatctctttctctctaattgtgtgttcctgttccctgagacacaacaatattgaaattaggccagttaataacctaattaattggcttgattcaattaggcctctaactaatgatgatggtctctaactatttaagtgaaaggaagagtttcacatctctcactttaactcaacagccagaaagaattaagcttaatgaagaaggcatgttgaaagccaagatatgctgaaaactatgcctcttgctccaaacagcgaagttgtgaatataaggggttcctgacggaaattaaacgtgctactctagtgaacacatgaataataagaaagcagtacagccttattactgatatggagaaagtttgagtagcctagatgggagattaaaccagctacaacattcccttaagccgcctaatncacaggatggtcctaattctcttcatattangaaggctganagaggtgagggctacagg

SEQ ID NO: 565519 - DNA, 241 bp, Homo sapiens
agttctatgtcatcaaggatattggctgttgttttttttgttatgtcctttcctggttttggtattagggtcatggcggcttctcagagtaaattagggagggttccttcttcctctatcctgtagaatagtgtcaaaaggattggtaccaattcttctttgaatgtctggtagaattctgctgtgaatccatctggtcatggaatttttttggttggtaatttttaaattaccatttcca

SEQ ID NO: 565520 - DNA, 389 bp, Homo sapiens
cacataatacataaagcataaacattaggataaacacgtgcagtgacaacaatgacatcccaaaacaaatctacaaagtacgcacaaacggaatgatccagacattatccatagatagtaccttattatcacattcagcttatacaaataatgccaagtgcagtgaaaagttacaggatgtaccatccactgggtgatgtaggatgggagagtctcttccagtaccggtcatgtgacaattgcggaacatatacctactgactggagtccagttgggcttataccagacaaaaggtaaaccagggaaggtctcacttcctgaagagaatcacacttaggacatggcagagtctgcattaccttctagatacatgaacttaccagagctc

SEQ ID NO: 565521 - DNA, 97 bp, Homo sapiens
ccgcatctcacacgtgcatgtccccgccgccgcgccccgcagcgggctccgagtagcaggccgcctgccaggtactgagacgcctctccggtgcggc

SEQ ID NO: 565522 - DNA, 1440 bp, Homo sapiens
atctgctgcagtgctctgagccctaggtttcatcttctcttctctcaccgtaggctggccctgactggcactgctacttacgcaacactcactcacctagcacactcgcatactgacacgcacactgtacatacgcttgtagcaccaccttccagctactgctcctactcaactaggacgctgtactttgccactcactacggaggcattcatctcacctgactttccccatattcctcagcgctacaccccctagcacccaaacccatacgtccacaaatcccacttctcacatactcactacttcactcgcgccgctacacactcctaacatctctcttcccaccacacacctattactcggaccctactccgcgacactgcccccgcacgctctacctcgcgacctagccccgcactgacaatacaccccacactgcaaacccactccctactcactcctgctagcgcctcactctcacttctcctcctacacccagcccacgctcacctactctacacctacacctccctccacctgcactctctgcagcacacgccccctctccgccctctccgcacaacgccgcgcacacacacgcctccccctacacctacgcctacgccacaacgcacacccccctacccacctaacaacccccggcgcacggctgcaccgccacctacctgcgcactgtcgcccacccgcacccgcctaaccccaccacaccacatcaccggcaccacgcacaacgccccggcaactcacccactaacacacaccccctacgcaaccacacaacacaccccggcacaccgcgacacctcggaaacggccccgccctcaatcacacgcccgatgcgcttacctccaacggcccccaaacacaccgcccaactggggcccctcccacactgcaacccataccgcaccggccctggaaaccaggcccacattccgagggccccggagcaactgctcatccagccatcccaggcagagcacccccatcaacaacagcctggaatggcacctaccgaccacgcagcataacgctccatatcctcatcactgtcaccctggggcccgctgggcaagggaccaatactccccacgacaccactaacccctcccacacaacagaaacatccaagcgggcaattcaacccacccacccgggttccaacccccacacgccacacccccgcacacagtgcgccacaacgcctaccacacacactcgctccccggcaacacaggacacaacagcacagaaccaccggcagcgcacacaacacgcacccaacgtcccaacacaccactacgacacctctcgcagccccaccccacgccaccaacaatggtgcagcccgcaccgcaccctcacacacaccccgcggtgacacccaccacaccacacaaagcccatcccaccaaca

SEQ ID NO: 565523 - DNA, 398 bp, Homo sapiens
aaacgatcatcgcccgcagaggaaaattctcggtgtggataggcggctccaacctggcatcgatgtcaacattccagcagatgtggataaccaagcaggagtacgaagaggccggccacttccatcgatacaccgcaaatgcttctagacacaatccacatccagcaagcgacttctcaagacgacgaatcttctcaatgggggggaagctgagctcaagacaccccgcaatcactatctttgaaacaacttccgttgctgacatcgtaaactgacaaagtgtttataacgtgtacatacattaacttattaactcaatttgttataatacgaaacaaagacctgtggaagaaaatggaaaacttgaagaagcattaaagtcattctgttaagctgcg

SEQ ID NO: 565524 - DNA, 162 bp, Homo sapiens
cccttcagccactcgccggagctcaccacgaaattgcccgcgccatcgggcttgccgtagaggttgtagtcgtactcgcgcacgacgtccttgatgccggtggcgtcgcgcaggctgcggtccgtaaaggaggtggcggagtagagccacatcttgcccgtg

SEQ ID NO: 565525 - DNA, 107 bp, Homo sapiens
tcgttattactctcagcgttctccgtttgcggcctgacctacttagtattaccctttttaatcttgtcaaaaattacacagacagggccctgtcgggctagtcgggg

SEQ ID NO: 565526 - DNA, 182 bp, Homo sapiens
cgtgcatgactgctgtcacatatacatgcgggtctctcctaagaaccctcttgggccgggatggtagtcacacctgtaatcccaacaattggaggccaggcaggcggatcacttgaccctgggagtttgagaccagcctgggcaacatgaaacctcatctcaacaaaaaatagaaaaattag

SEQ ID NO: 565527 - DNA, 183 bp, Homo sapiens
ctgttcccacatccaagcataggtctttctgttacgctgtttgaacttgtttaaaacttgtggccaagcatggtggctcatgcatgtaatcccagctactcaggaggattgcttgagcccaggagttcaagaccagcctgggcaactgggaccccatctctacacacacacacacacacagga

SEQ ID NO: 565528 - DNA, 293 bp, Homo sapiens
cgaatgtacaatgttaagacagggaattttgtgttccattgacttttttttttttaatggagtttcactattttgcccaggctggagtgcgatggtgcgatcttggctcactgcaacctctgcctcctgggttcaagtgattctcttgcctcagtctcccgagtagtggaaattacaggtgtgtgctaccacatcttgctagttttgtatttttagcagagatgggggtttcaccatgttggccaggctagtctcgaactcctgacctcaggtgatccacctgccttggcctc

SEQ ID NO: 565529 - DNA, 1505 bp, Homo sapiens
ggcttgcccttgaaggaactcaacattgtccttgcttctgtgcttgggaagacccacaggcccctaagggcgggggggggtccttgtttggtttcaggagcagcaggtgcaaaggccctggggtgggaggggtgagatgtgaggccacagcagcgggtgagggccaggctgcagagggttttggggaccatgaaggtgggcccttcagagatcaggcagggtcaggaaaggcagtagggaggcccaagacagcagacactgtggttgcttccatctggaagatgggcagctgcaggagcctggctgttcagggtcacacttctctccctgtcccggccccatctgctgggtgtccttccttggagcccttgacagcacctgtgcccctcctctccatcccctgaaccttggtggttgtgccccccctcggggcccaacaatctcattagggtggcactgagacgcctaatcagctcatgaagcagcgagataaaggccggggctggcaccctgcggagggaggcccagcactcacagcacagccccctgagacccgccctgcacttgaccgcagcaggagggagtccaggagccaaggttgccgcggtgtctccgtcagcctcaccatgaacctggaaccgcccaaggctgagttccggtcagccaccagggtggccgggggacctgtcacccccaggaaagggccccctaaatttaagcagcgacagaccaggcagttcaagagcaagcccccaaagaaaggcgttcaagggtttggggacgacatccctggaatggaaggcctgggaacagacatcacagtcatctgcccttgggaggccttcaaccacctggagctgcacgagctggcccaatatggcatcatctagcacgaggccctgctgaagtccagaccctccccctcctgcccactgtgctctaaaccctgctcaggattcctgttgaggagatgcctccctagcccagatggcacctggacaccaggatgggactgcaacctcaggtctccccctacatattaataccagtcaccaggagcccaccacctccctctaggatgccccctcaggggctggccaggccctgctcaacatctggagatacaggcccacccctcagtcctgcccacagagaggcttggtcggtctccactcccagggagaacgggaagtggaccccagcccgggagcctgctggaccccagatcgtcccctcctcccagctggaaagctagggcaggtctccccagagtgcttctgcaccccagccccctgtcctgcctgtaaggggatacagagaagctccccgtctctgcatcccttcccaggggggtgcccttagtttggacatgctgggtagcaggactccagggcgtgcacggtgagcagatgaggccccaagctcatcacaccagggggccatccttctcaatacagcccgcccttgcagtccctatttcaaaataaaattagtgtgtccttgcc

SEQ ID NO: 565530 - DNA, 213 bp, Homo sapiens
ctggaacgggggagatgaatagagacgaccgagatcatgttgaaggattatgcggtgcattcagacacacctggacggggtgcttcaccatccccatttgttggggtgctgcctgggggagctggatctccaggttctcggacgcccggctccctgcctctggtcttggccgcctctatgcctttgactcgtcgggcgtggcgatcaccttcg

SEQ ID NO: 565531 - DNA, 805 bp, Homo sapiens
  misc_feature (46)..(46): n is a, c, g, or t
gattcggaacgaggtgaattcctctctgctgggcggccttgcacgncacttttctcagcaagaattcccaaagtttggggacgacatccctggaatggaaggcctgggaacagacatcacagtcatctgcccttgggaggccttcaaccacctggagctgcacgagctggcccaatatggcatcatctagcacgaggccctgctgaagtccagaccctccccctcctgcccactgtgctctaaaccctgctcaggattcctgttgaggagatgcctccctagcccagatggcacctggacaccaggatgggactgcaacctcaggtctccccctacatattaataccagtcaccaggagcccaccacctccctctaggatgccccctcaggggctggccaggccctgctcaacatctggagatacaggcccacccctcagtcctgcccacagagaggcttggtcggtctccactcccagggagaacgggaagtggaccccagcccgggagcctgctggaccccagatcgtcccctcctcccagctggaaagctagggcaggtctccccagagtgcttctgcaccccagccccctgtcctgcctgtaaggggatacagagaagctccccgtctctgcatcccttcccaggggggtgcccttagtttggacatgctgggtagcaggactccagggcgtgcacggtgagcagatgaggccccaagctcatcacaccagggggccatccttctcaatacagcccgcccttgcagtccctatttcaaaataaaattagtgtgtccttgcc

SEQ ID NO: 565532 - DNA, 1749 bp, Homo sapiens
ggcttgcccttgaaggaactcaacattgtccttgcttctgtgcttgggaagacccacaggcccctaagggcgggggggggtccttgtttggtttcaggagcagcaggtgcaaaggccctggggtgggaggggtgagatgtgaggccacagcagcgggtgagggccaggctgcagagggttttggggaccatgaaggtgggcccttcagagatcaggcagggtcaggaaaggcagtagggaggcccaagacagcagacactgtggttgcttccatctggaagatgggcagctgcaggagcctggctgttcagggtcacacttctctccctgtcccggccccatctgctgggtgtccttccttggagcccttgacagcacctgtgcccctcctctccatcccctgaaccttggtggttgtgccccccctcggggcccaacaatctcattagggtggcactgagacgcctaatcagctcatgaagcagcgagataaaggccggggctggcaccctgcggagggaggcccagcactcacagcacagccccctgagacccgccctgcacttgaccgcagcaggagggagtccaggagccaaggttgccgcggtgtctccgtcagcctcaccatgaacctggaaccgcccaaggctgagttccggtcagccaccagggtggccgggggacctgtcacccccaggaaagggccccctaaatttaagcagcgacagaccaggcagttcaagagcaagcccccaaagaaaggcgttcaagggtttggggacgacatccctggaatggaaggcctgggaacagacatcacagtcatctgcccttgggaggccttcaaccacctggagctgcacgagctggcccaatatggcatcatctagcacgaggccctgctgaagtccagaccctccccctcctgcccactgtgctctaaaccctgctcaggattcctgttgaggagatgcctccctagcccagatggcacctggacaccaggatgggactgcaacctcaggtctccccctacatattaataccagtcaccaggagcccaccacctccctctaggatgccccctcaggggctggccaggccctgctcaacatctggagatacaggcccacccctcagtcctgcccacagagaggcttggtcggtctccactcccagggagaacgggaagtggaccccagcccgggagcctgctggaccccagatcgtcccctcctcccagctggaaagctagggcaggtctccccagagtgcttctgcaccccagccccctgtcctgcctgtaaggggatacagagaagctccccgtctctgcatcccttcccaggggggtgcccttagtttggacatgctgggtagcaggactccagggcgtgcacggtgagcagatgaggccccaagctcatcacaccagggggccatccttctcaatacagcccgcccttgcagtccctatttcaaaataaaattagtgtgtccttgcctgtctgtggcatatttgtgcatgggacagggcctgtggtggggtcacttgagttgagccggagcacatgggggaaggggtgggcagtggggcaggaggggctggcctgcctgagtgggaagcacgcccttgggctcacactctcactgagccttgctggtggccccaagacacgcaatgtcaggccatggctgggtcaaggcagaaggccttggtgcacacccaggggccatagtcaacgaagc

SEQ ID NO: 565533 - DNA, 973 bp, Homo sapiens
  misc_feature (23)..(24): n is a, c, g, or t
atgctgagacactctcttattanncaccgctacagaccgcagcaggagggagtccaggagccaaggttgccgcggtgtctccgtcagcctcaccatgaacctggaaccgcccaaggctgagttccggtcagccaccagggtggccgggggacctgtcacccccaggaaagggccccctaaatttaagcagcgacagaccaggcagttcaagagcaagcccccaaagaaaggcgttcaagggtttggggacgacatccctggaatggaaggcctgggaacagacatcacagtcatctgcccttgggaggccttcaaccacctggagctgcacgagctggcccaatatggcatcatctagcacgaggccctgctgaagtccagaccctccccctcctgcccactgtgctctaaaccctgctcaggattcctgttgaggagatgcctccctagcccagatggcacctggacaccaggatgggactgcaacctcaggtctccccctacatattaataccagtcaccaggagcccaccacctccctctaggatgccccctcaggggctggccaggccctgctcaacatctggagatacaggcccacccctcagtcctgcccacagagaggcttggtcggtctccactcccagggagaacgggaagtggaccccagcccgggagcctgctggaccccagatcgtcccctcctcccagctggaaagctagggcaggtctccccagagtgcttctgcaccccagccccctgtcctgcctgtaaggggatacagagaagctccccgtctctgcatcccttcccaggggggtgcccttagtttggacatgctgggtagcaggactccagggcgtgcacggtgagcagatgaggccccaagctcatcacaccagggggccatccttctcaatacagcccgcccttgcagtccctatttcaaaataaaattagtgtgtccttgcc

SEQ ID NO: 565534 - DNA, 881 bp, Homo sapiens
  misc_feature (213)..(213): n is a, c, g, or t
  misc_feature (243)..(244): n is a, c, g, or t
  misc_feature (683)..(683): n is a, c, g, or t
  misc_feature (752)..(752): n is a, c, g, or t
caaagacagaggagatcctaccaggctctcctaacaagcactgcacctgacatccagtgtaactatctggacaacacagacccgattgcagtctctctgtacctgtcagtctgagcagatctgtccacgcacctgccctcttcctcatcaatgaacaagttgggaaaaagatgagttcatgctcagtgctctgttcctcactcgttccacctnccattatcaagtctgtgacacaatggtganntttcgctttaatatgatttgctagggccaggactagggtgaggtgagcgaggcacctagggcgcaaaattcaaagaggtgcccgctctcagggccatgcaagtgccttaccctcgtcccagccctgtgatttgcactctttaaagtaatatcagtttatcttcttcctatgaacaagtatagtccttctgatttggggtcgggggttaactccctatctcttgttgcaccaaatattttattgctacctatttttccattgctataagtctttgtgtgcctatacattaaagaatctttaatagtgttaatatcggaaaacatagttgatttctaagtaatatgctccaggtggcaagttaacacccatttcagcagggatgctcccaaggccagcccttcaacaaaagagtgactgagttgacggtctgtcaccaggntcctccctctcctctttctgctccatctcctaaaccttgcttcccagcaccaactttttttaaagcctnctactttcttcttctcctaagaaaaacctgctctcaagaaagggataaattcatttcctttgagaatataagggttaatggctccttttttggggggcaggtgcctttttaccaggggaaaagccttaa

SEQ ID NO: 565535 - DNA, 1299 bp, Homo sapiens
ggcttgcccttgaaggaactcaacattgtccttgcttctgtgcttgggaagacccacaggcccctaagggcgggggggggtccttgtttggtttcaggagcagcaggtgcaaaggccctggggtgggaggggtgagatgtgaggccacagcagcgggtgagggccaggctgcagagggttttggggaccatgaaggtgggcccttcagagatcaggcagggtcaggaaaggcagtagggaggcccaagacagcagacactgtggttgcttccatctggaagatgggcagctgcaggagcctggctgttcagggtcacacttctctccctgtcccggccccatctgctgggtgtccttccttggagcccttgacagcacctgtgcccctcctctccatcccctgaaccttggtggttgtgccccccctcggggcccaacaatctcattagggtggcactgagacgcctaatcagctcatgaagcagcgagataaaggccggggctggcaccctgcggagggaggcccagcactcacagcacagccccctgagacccgccctgcacttgtttggggacgacatccctggaatggaaggcctgggaacagacatcacagtcatctgcccttgggaggccttcaaccacctggagctgcacgagctggcccaatatggcatcatctagcacgaggccctgctgaagtccagaccctccccctcctgcccactgtgctctaaaccctgctcaggattcctgttgaggagatgcctccctagcccagatggcacctggacaccaggatgggactgcaacctcaggtctccccctacatattaataccagtcaccaggagcccaccacctccctctaggatgccccctcaggggctggccaggccctgctcaacatctggagatacaggcccacccctcagtcctgcccacagagaggcttggtcggtctccactcccagggagaacgggaagtggaccccagcccgggagcctgctggaccccagatcgtcccctcctcccagctggaaagctagggcaggtctccccagagtgcttctgcaccccagccccctgtcctgcctgtaaggggatacagagaagctccccgtctctgcatcccttcccaggggggtgcccttagtttggacatgctgggtagcaggactccagggcgtgcacggtgagcagatgaggccccaagctcatcacaccagggggccatccttctcaatacagcccgcccttgcagtccctatttcaaaataaaattagtgtgtccttgcc

SEQ ID NO: 565536 - DNA, 265 bp, Homo sapiens
tgatctaccgatcttcaaacacgcaactgcaggtacggagtgtatccagccttggagcgtgctgtcaggagcaggcagcacttgactcacagctgtgtgtgatgcttgttcgctcagcttctccatttatgagatggggagaatagtcacagcctcctcaaagggttgtgcaaatccaatgtgataatttgtggaaaagccttaacagtggcctggcgcaaaacaaatgctcagtggattgaagcttgctattattattgtcgtt

SEQ ID NO: 565537 - DNA, 232 bp, Homo sapiens
  misc_feature (3)..(3): n is a, c, g, or t
  misc_feature (113)..(113): n is a, c, g, or t
agnaacaatgtattttattgtttgaccaagctctcttcagagtacgtgagttatttctctttataaatactatagcctcctattcaaaatgaattactttatttttagcaagncttatttttataaacaaattaaatgtcatgtttagatgcattttatattcatttccacacctttttatactttcttactaaagcgatgatttagtttcttacccagttcgtccctgtac

SEQ ID NO: 565538 - DNA, 158 bp, Homo sapiens
gtacgacgtagcgtaaattattggtgagtttagaggggggcagctcattggaagccctcatgagtgcagggcccgccacttgtccagagggccacgactgggtgatgtacttgagccccacaggccatctggtgatgagccgcgttttcagtccacca

SEQ ID NO: 565539 - DNA, 150 bp, Homo sapiens
gcgaggagaaacggaggtccatgagagatgacacaatgtggcagctctacgaatggcagcgcctcagttttataccaacagagcaccctccctcgacacagactttgagagtccaaaccatggtaaatatttcgaccagacaatgactta

SEQ ID NO: 565540 - DNA, 126 bp, Homo sapiens
cgcggccgtcgggtgtgagctgcgccgaccgctctgagggctcgtggcccaaccgcgccttcgcggtccctgccgcaacagtccaacggttaaggcgttttaagaaaaggatagttgggtcggaac

SEQ ID NO: 565541 - DNA, 451 bp, Homo sapiens
tatcacgggcaagaggcgtgacctccaagagcagcaactcttgaacatactcagacttgtgaccagagaattatgcggtgactgaacagttgcaccagaagcaacagctacatcagggttgatgctcttatgcagtgcttttcccttgaagacagtcttgacgccgcttctgcatctatgaggatacgagtagaaccaccaaccaggacaatatcatgaatctgtgacttgtctagtcaggcatctcgaagggcttactctactgagtccagggtgccacggaaaaggtcagcatacagtactatccaatcgggcacgggtaatgcaggtatagaaatcgattccttcatagagagcatcgatctcaatactggcctgggtgctggaagagagggtacgctatagcacgttcaccagcagtacggaggcgttttacagatctcttgtactc

SEQ ID NO: 565542 - DNA, 404 bp, Homo sapiens
gagagagagagagagagagagagagagagagagagagagcgagagagagagagagagagagtagacacagactgccacttactcttacagtcctcgaaaccttcctcgcacctgctcgtctgctcccggtggcctgccgtgctctctctcccgcctctgctgtccctgtctccacagcacatccttgtcccgacgtgcactttctcgccctgtgcggctactttccagccccctatgtgtaccttcctcacctgcgtggtgtctctgtgcgtacctggctatgcctcagctgctcttgcccactgccttctcgtctattcttctctccatgctctatggactctctcgctctgtctgtgactgccctgcatgtgtgtcacgcttctgccatcattggctctgcc

SEQ ID NO: 565543 - DNA, 1552 bp, Homo sapiens
taggggaatgcaaaaactttattgaaaggaaagtgcaagtgaaacattgtggtggaaacctttaaagaggggaaaactttagaacacccccccctcaagcgcgaggaccagagtgtgcagaaggtggacctctttcgtggagtgtggtagctcagcacgaggggtgcgctccatctttccaggctgtggttctcccagagacaaagagaatcaaaccctctgtggcgtggactcgaggaagggaagtgcctttccttgatcgtgggaactcttggcctttgaacaatctctgcgaagtgggtgtccacgtgggcctccaccttcgagagagaggtggagtggctctttcaccagagtctcagagggcgctctctctcacacgcaaagaactctgtgtcaattccccgacacttctgtgagagacacggggagccactcagaggggtgtccagggcgtgtgagacacactctatttctccggtggacagtgtctgtgcctccagcctcccagacacagagggggtgtagccggctcccaaatcttctcccaccagactgtggtatctctccccggagccaaaagatactacaacccctcagtgccaggagtcacccaagagggaaggcgaagtggcctctatcctgtggggcaccatggggacactcttttggtgcccctgtgagacagatttctctcccaaagggggtgtggctccaccactcgggggacacccccccaacgttggccgcagagagtgtgcacaggggctccttataacccccaaggaacaaggggcgcaccgcagcacagcggaaaaaacactccgctggaccagtccccgaaaccgtcctcgaaagagacccgggacgacaccccaggcggtgcccacgcgggggggaacgaccccataacacacggggagcacgctcgagaacaccctccacgacacagagagtccgagcggaacccacataccatcccaccaaacccctgaatgacccccccacgaccaagaggaaattcaaccgcccccatgcccggtcgccaccgacggaggaggacatgaccccacgccccaagagccccccagcggaacatcaccaatgccccgtgtgaacacaacttcccccacagggcggacgcgccaacacatgcaggcgaccccacaccacaccgaagcatacagcgccggccacaaccccacagaccggggcgacatcagcgacaaaaaatcttggcggcccccaccagcttgaaacaacgagcgcccaccgccgacaagcggacgaaacccccaccgggcagacgtccgaacacaaacagagcggcgagccacccctcacacagaggactacccagcgcagacaaacacccacctagacgaacaagaagcacgaccacaaccccgtacatctcgacaaccagcagggcagaccccaccagcacggaagcaggcggcacccgccaccgaacagaggactacagcacaacgatcagacacacgactcccaccagacagcacaagacactcgagtcaccgcccgccatcaa

SEQ ID NO: 565544 - DNA, 801 bp, Homo sapiens
ggttgggggacggttgtatatcaaggtactactgcaaacatattgcaagaagctgatgtacctcttctatcaaatgagagatgccaacagcagatgccagaatatacaactattactgaataatgatgatatgtgcaggctatgaagcaaaggaggaatagatctcttgtcagggggattcaggaggaccattaatgtgccaagaaaacaacaggtggttccttgctggtgtgacctcattgtggatacagagtgtgccctgcctaatcgccccggagtgtatgccagggtctcaaggtttaccgattggatactatgttttctacattagagcatttcttaaactaaacaggaaagtcgcattattttcccattctactctagaaagcatggaaagttaacgtgtttcgtacaagaagctcttcaccaacagtgaccaaaggtttttattcttacctatgtcaatgaaatgctagggggccagggaaacaaagattttcaaaaactacataacaattcacccatagcaatacagaataactttaaaaataccattaaataacattcgtattccatggtgaacaggtatttcttcacagatctcattttaaaaaagttcttcactgattattcttcattaacttactggtggtcacagggatggttactttcaaaggcaataccatagattagaaatttgacccgatttaacacaggaacgccactcactggtttccccagcatttcctgtcggaataacgggcaaaattctagaccgatattggcgcttgaaaccatggc

SEQ ID NO: 565545 - DNA, 139 bp, Homo sapiens
ccttgggtcccttttttcccccccccaaaatgttcccctgggccttgccccccctttagggaaaaagtcccccctgggcccaaggggggttttttgtttctcctaacctgcctttccataaaaaccttttttcggggga

SEQ ID NO: 565546 - DNA, 1033 bp, Homo sapiens
  misc_feature (22)..(22): n is a, c, g, or t
  misc_feature (24)..(26): n is a, c, g, or t
acatcgctagggtcgaggctgngnnnaatcggacgagcgaatgcccggcagccgtggcggctagagcgttcctccccagctcgaatgcccggcggccgaggcggctagagcgtcgcctcctcccggggaaccgcgtgtgaccttccagcccgcggaccgatgctgccggcggccgctcgccccctgtgggggccttgccttgggcttcgggccgctgcgttccgccttgccaggcgacaggtgccatgtgtctgtgccgtgcgacatatgaggagcagcggccatcagaggtgtgaggccctcgctggtgcacccctggataacgcccccaaggagtacccccccaagatacagcagctggtccaggacatcgccagcctcactctcttggaaatctcagacctcaacgagctcctgaagaaaacgttgaagatccaggatgtcgggcttgtgccgatgggtggtgtgatgtctggggctgtccctgctgcagcagcccaggaggcggtggaagaagatatccccatagcgaaagaacggacacatttcaccgtccgcctgaccgaggcgaagcccgtggacaaagtgaagctgatcaaggaaatcaagaactacatccaaggcatcaacctcgtccaggcaaagaagctggtggagtccctgccccaggaaatcaaagccaatgtcgccaaagctgaggcggagaagatcaaggcggcctggaggcggtgggcggcaccgtggttctggagtagcctccagctcggaggacttgtgttcaggggtcctgggccccgggcgaggtcccgccctcccgtggtcactggctccgcccccagcaccaggcgcccagtggagccgtttgggagaattgcctgcgccacgcagcggggccggacaggccgcacagacctactgtggcgggagggaggggcggctgctgcctggtgacggcacccggaggcccaccaggacgcgccaccggtgaatgtgcctctggtggctgctgagaaaaatacactgtgcagctcag

SEQ ID NO: 565547 - DNA, 278 bp, Homo sapiens
gtgtggttttggttttaaatctgcaaagtccttggcacaagtctcccaatcgggttgggagtcttcccttctgaggtttcccacctctattctacgtagaccctgcgcttctcgtgccaggcgtggtaccactggatgaagcgctgggtgctctgcagctgggggtgcaggcagtgctcctgacctcggtaccgggacacgctctggggggtgatgataaccatcttctccgtcgcggggcgggtacttgggctccattcccagttggctcagagggg

SEQ ID NO: 565548 - DNA, 484 bp, Homo sapiens
agatggtgtttcactttgtcccccaggctggcggggactggtgccctctagggtcactccagcctccggctgccgatgtgatgaaagtttcgggactagacattgcgagtgcctgggagtacatgggctcaccgccagtcttgatgatggttcatttaaagatttggtaacctttgagtacgaacggagtgaacctggggtgacaagtctggcggccgccgcaggtgatactagctacacaacataccgtcgccttaccagtgacagaacttgccaggtggagctataagtgagacctgaggtgccatgtctagttgctggtgaaaacaagactcagacttcatctgacgcttaacgaaaacagggatgaggccctagccctgcccgactggtgagcgcagagttgatgtgctacggctgcctatatgaacagaggagacgcctgtgtgcgatccctatatgaaagtgccagcgacatccctat

SEQ ID NO: 565549 - DNA, 1359 bp, Homo sapiens
  misc_feature (22)..(22): n is a, c, g, or t
  misc_feature (24)..(26): n is a, c, g, or t
  misc_feature (1057)..(1057): n is a, c, g, or t
  misc_feature (1060)..(1060): n is a, c, g, or t
  misc_feature (1062)..(1062): n is a, c, g, or t
  misc_feature (1075)..(1075): n is a, c, g, or t
acatcgctagggtcgaggctgngnnnaatcggacgagcgaatgcccggcagccgtggcggctagagcgttcctccccagctcgaatgcccggcggccgaggcggctagagcgtcgcctcctcccggggaaccgcgtgtgaccttccagcccgcggaccgatgctgccggcggccgctcgccccctgtgggggccttgccttgggcttcgggccgctgcgttccgccttgccaggcgacaggtgccatgtgtctgtgccgtgcgacatatgaggagcagcggccatcagaggtgtgaggccctcgctggtgcacccctggataacgcccccaaggagtacccccccaagatacagcagctggtccaggacatcgccagcctcactctcttggaaatctcagacctcaacgagctcctgaagaaaacgttgaagatccaggatgtcgggcttgtgccgatgggtggtgtgatgtctggggctgtccctgctgcagcagcccaggaggcggtggaagaagatatccccatagcgaaagaacggacacatttcaccgtccgcctgaccgaggcgaagcccgtggacaaagtgaagctgatcaaggaaatcaagaactacatccaaggcatcaacctcgtccaggcaaagaagctggtggagtccctgccccaggaaatcaaagccaatgtcgccaaagctgaggcggagaagatcaaggcggcctggaggcggtgggcggcaccgtggttctggagtagcctccagctcggaggacttgtgttcaggggtcctgggccccgggcgaggtcccgccctcccgtggtcactggctccgcccccagcaccaggcgcccagtggagccgtttgggagaattgcctgcgccacgcagcggggccggacaggccgcacagacctactgtggcgggagggaggggcggctgctgcctggtgacggcacccggaggcccaccaggacgcgccaccggtgaatgtgcctctggtggctgctgagaaaaatacactgtgcagctcagaaaaaaaaaaaaaaaaacaaaaanaananaaaaaaaaaaaanaaaaaagggggggcgaagtaaaaagagctcccacaagagggacaaaagagtgcaggaagaccaagatagatggacaaaagggagacccaaaagagggcgaacaaaacagacgagaggcgcggcgcagagacgtaaaccgagcgggacacaacagggaaaacacaggagaaaggaagcacacaagaggagaaggacacacaaaaagcgaggaaggaaacaacaagaggaaaacctacacgagcgagaatgaacagaccaagacgaaaaaaaaagaaaggacaccg

SEQ ID NO: 565550 - DNA, 969 bp, Homo sapiens
  misc_feature (22)..(22): n is a, c, g, or t
  misc_feature (24)..(26): n is a, c, g, or t
acatcgctagggtcgaggctgngnnnaatcggacgagcgaatgcccggcagccgtggcggctagagcgttcctccccagctcgaatgcccggcggccgaggcggctagagcgtcgcctcctcccggggaaccgcgtgtgaccttccagcccgcggaccgatgctgccggcggccgctcgccccctgtgggggccttgccttgggcttcgggccgctgcgttccgccttgccaggcgacaggtgccatgtgtctgtgccgtgcgacatatgaggagcagcggccatcagaggtgtgaggccctcgctggtgcacccctggataacgcccccaaggagtacccccccaagatacagcagctggtccaggacatcgccagcctcactctcttggaaatctcagacctcaacgagctcctgaagaaaacgttgaagatccaggatgtcgggcttgtgccgatgggtggtgtgatgtctggggctgtccctgctgcagcagcccaggaggcggtggaagaagatatccccatagcgaaagaacggacacatttcaccgtccgcctgaccgaggcgaagcccgtggacaaagtgaagctgatcaaggaaatcaagaactacatccaaggcatcaacctcgtccaggcaaagaagctggtggagtccctgccccaggaaatcaaagccaatgtcgccaaagctgaggcggagaagatcaaggcggcctggaggcggtgggcggcaccgtggttctggagtagcctccagctcggaggacttgtgttcaggggtcctgggccccgggcgaggtcccgccctcccgtggtcactggctccgcccagacaggcgccagtggagtgttgggaaatgctggcagcaggggcggaaggcggaagactatgtggggagggcggggggtgtgctgtgaggccgaagcccagaggcccggaaggcccgggggtgaaaaacggggc

SEQ ID NO: 565551 - DNA, 1172 bp, Homo sapiens
ccgtcggggccgtgggcgcctgcgcgggccggcgcgggagcaagcggcatggcgttccggcaggcgctgcagctggcggcctgcgggctggccgggggctcggccgccgtgctcttctcggccgtggcggtagggaagccgcgcgcaggcggggacgcggagccacgcccggctgagccgccggcctgggcggggggcgcgcggccgggccccggtgtctgggaccccaactgggacaggcgagaaccactgtctctgatcaacgtgcggaagaggaacgtggaatctggggaagaagagctggcgtccaagctggaccactacaaagccaaggccacgcggcacatcttcctcatcaggcattcccagtaccacgtggatggctccctggagaaggaccgcactctgaccccgctgggtcgggagcaggctgaactcactgggctccgcctggcaagcttggggttgaagtttaataaaatcgtccattcgtctatgacgcgcgccatagagaccaccgatatcatcagccggcacctgccaggcgtctgcaaagtcagcacagatctgctgcgggaaggcgcccccatcgagccagacccgcccgtgtctcattggaagccggaagctgtgcagtattacgaagacggagcccggatcgaggccgccttccggaactacatccaccgcgcagatgccaggcaggaggaggacagttacgagatcttcatctgtcacgccaacgtcatccgctacatcgtgtgcagcatcccgccgctgttgtccgctggggattttgtggttctggggtcctgacctctttcacttgctgatctgtgggcgctcccacccgtgtgccagcgtgacggctcggggtgtccgctcccctctgggtcgaggccacagctgagtcacgttgctgctcgggctgctccctcggggggcccttgtccctcaacctgctctggtgccccactctcagcaccacagaatgatccgggttcaggttgcgttttccctgccaccaccctgcaatcagccacttctttaaggagctccagggctgcagccacgttagagggccccttggggggcagggccagctctacggttacatgcctgaaacagtcagaagggttggccaaatctcactaaatgcaaatttgaaacaa

SEQ ID NO: 565552 - DNA, 372 bp, Homo sapiens
cttaacaggcttgtgtcacaaattgtctgcagtgaagcctgatcactactcaggcctactgccctgtgtgtcagcagaaagtgaaggaggacctgtgcttccatgctgagtccactctcaacctggacagtctggggccatgccaagaaacgcatccatggccccctaagcttgttctactccaggatggcctggctctcaggcaggttctgaccctgtgagagaccccaggaagggctcttctttgccatgtcccaatcccagtctccattgctctggcccatcccagccgcacaagcccatctgcggagaccacttgtcaatgacaagacattctggggggcccccacttgctgaaggaggccaatccag

SEQ ID NO: 565553 - DNA, 2927 bp, Homo sapiens
  misc_feature (1725)..(1725): n is a, c, g, or t
  misc_feature (1729)..(1729): n is a, c, g, or t
ccgtcggggccgtgggcgcctgcgcgggccggcgcgggagcaagcggcatggcgttccggcaggcgctgcagctggcggcctgcgggctggccgggggctcggccgccgtgctcttctcggccgtggcggtagggaagccgcgcgcaggcggggacgcggagccacgcccggctgagccgccggcctgggcggggggcgcgcggccgggccccggtgtctgggaccccaactgggacaggcgagaaccactgtctctgatcaacgtgcggaagaggaacgtggaatctggggaagaagagctggcgtccaagctggaccactacaaagccaaggccacgcggcacatcttcctcatcaggcattcccagtaccacgtggatggctccctggagaaggaccgcactctgaccccgctgggtcgggagcaggctgaactcactgggctccgcctggcaagcttggggttgaagtttaataaaatcgtccattcgtctatgacgcgcgccatagagaccaccgatatcatcagccggcacctgccaggcgtctgcaaagtcagcacagatctgctgcgggaaggcgcccccatcgagccagacccgcccgtgtctcattggaagccggaagctgtgcagtattacgaagacggagcccggatcgaggccgccttccggaactacatccaccgcgcagatgccaggcaggaggaggacagttacgagatcttcatctgtcacgccaacgtcatccgctacatcgtgtgcagagcactgcagtttcctcctgaaggctggctccggctctccctcaataatggcagcatcacccacctggtgatccgacccaacggccgagttgcgctcaggaccctcggggacacggggttcatgcctcccgacaagatcactcgatcctgagggctccggcctctccttccctctgtcctccctgcacaggccgcacacacttaacgttttgttcccaaggagaccggcggaaagtagaaacctgcaatgctgcatctgggaactgacttgtgaccaggctgagaaggggagagttgggatcagacagcctgacttctctgcagggttttatacctgaccatgaacccccaggatggcgtggggtttaaggtgaaagcgtctcacgcacaagtcaggcctgttgtggggacttgaaagaggcctgacccagaccaccatgttcgcacccacagctgacccgtgctgagggtccaggctccattggcaaagccggtcaggcacgagggcgactgaggcacgtggatgaggagggcacccaggttctgttcacaactcacttcacttcatacatccttttaatttcttaaaaccctcttgtcccttaaatatttgtcaattaaagattttctggctgggcacggtggctcacacctgtattcccagctactcaggaggccagggtgggaggatcacttgaactcccggctcaggagttcaagaccagcctggacaaggcaacatagcgagaccctgtctctactaaaaatacagaacttagctgggtgtgtcgtgggcatctagagtcccagctacttgggaggctgaggtgggtggatcacttgggcccgggagctggaggctgcagtgagctgtgattgtgtcactgcactccagcctgggcaagcgagggagacttaaagcaattttttcttttgaaacggagtttcactcttgttnacgnggctggagtgcagtggtgcgatctcggctcaccgcaacctctgcctcctgggttcaagtgattctcctgcctcagctcccgagtagctgggattacagtcgcccaccaccatacctggctaattttttgtgtttttagtaaagacagggtttcatggagaaaccaatatagaattgttcaggctggtctcgaactcccaacctcaggtgattcacccaccttggcctcccaaagtgctgggattaaaggtgtgagccatcgtgcctggcctaaaaaatttttttttcttcatctgggtttttgctttgaaaacaagtttctccaaatttacagatttcctgatgatgttgggtctgaactcaccaacttgattaggtctttaggggccgagggactagccagctgcacaggtgactggatgggggaggggcaggtgaggtgggtctacagaggtggcttcgcctttgaccttcatgctggtctcggctgaggtgacacgctagtgacagcccaatagggggttacccttattgagtaaaatacttcagattgacggctcaatcttagtttgcctccagttaatcttttatgcttagggattaaatgtgtggtttttttttggttttttttttgggagacggagtctcgctctgtcacccaggctggagtgcagtggcgcgatctcggctcactgcaacctctgcctcctgggttcaaacgattctcctgcctcagcctcccaagtagctgggattataggcgcccaccaccatgcctggctaattttttatttttagtagagatggggtttcaccgtgttggccaggctggtctcgaactcctgacctcgtgatctacccacctcggcctccccaagtgctgggattacaggcgtgagctagcatgcctggccagggattaaaatattcaaacatgttgtgtgtacccagatatgctgttaatttaggaaaaacagtacaatttctatgaagtggttgtgactattttctgtagtcaatacagttgggatatctgatctatttctctgtctactttggaaatgattgcataataaataaaattttactgtttttttaaaaaaaaataagaatagattagaaaaaaaaacggcggcagcagcgtattccattaggtagggttagtttaggctgacactgcgttcgtttagcacgtcgta

SEQ ID NO: 565554 - DNA, 406 bp, Homo sapiens
ggacgcgtgggtcgacccacgcgtcgggagtccctgccccaggaaatcaaagccaatgtcgccaaagctgaggcggagaagatcaaggcggcctggaggcggtgggcggcaccgtggttctggagtagcctccagctcggaggacttgtgttcaggggtcctgggccccgggcgaggtcccgccctcccgtggtcactggctccgcccccagcaccaggcgcccagtggagccgtttgggagaattgcctgcgccacgcagcggggccggacaggccgcacagacctactgtggcgggagggaggggcggctgctgcctggtgacggcacccggaggcccaccaggacgcgccaccggtgaatgtgcctctggtggctgctgagaaaaatacactgtgcagctcag

SEQ ID NO: 565555 - DNA, 2658 bp, Homo sapiens
ccgtcggggccgtgggcgcctgcgcgggccggcgcgggagcaagcggcatggcgttccggcaggcgctgcagctggcggcctgcgggctggccgggggctcggccgccgtgctcttctcggccgtggcggtagggaagccgcgcgcaggcggggacgcggagccacgcccggctgagccgccggcctgggcggggggcgcgcggccgggccccggtgtctgggaccccaactgggacaggcgagaaccactgtctctgatcaacgtgcggaagaggaacgtggaatctggggaagaagagctggcgtccaagctggaccactacaaagccaaggccacgcggcacatcttcctcatcaggcattcccagtaccacgtggatggctccctggagaaggaccgcactctgaccccgctgggtcgggagcaggctgaactcactgggctccgcctggcaagcttggggttgaagtttaataaaatcgtccattcgtctatgacgcgcgccatagagaccaccgatatcatcagccggcacctgccaggcgtctgcaaagtcagcacagatctgctgcgggaaggcgcccccatcgagccagacccgcccgtgtctcattggaagccggaagctgtgcagtattacgaagacggagcccggatcgaggccgccttccggaactacatccaccgcgcagatgccaggcaggaggaggacagttacgagatcttcatctgtcacgccaacgtcatccgctacatcgtgtgcagagcactgcagtttcctcctgaaggctggctccggctctccctcaataatggcagcatcacccacctggtgatccgacccaacggccgagttgcgctcaggaccctcggggacacggggttcatgcctcccgacaagatcactcgatcctgagggctccggcctctccttccctctgtcctccctgcacaggccgcacacacttaacgttttgttcccaaggagaccggcggaaagtagaaacctgcaatgctgcatctgggaactgacttgtgaccaggctgagaaggggagagttgggatcagacagcctgacttctctgcagggttttatacctgaccatgaacccccaggatggcgtggggtttaaggtgaaagcgtctcacgcacaagtcaggcctgttgtggggacttgaaagaggcctgacccagaccaccatgttcgcacccacagctgacccgtgctgagggtccaggctccattggcaaagccggtcaggcacgagggcgactgaggcacgtggatgaggagggcacccaggttctgttcacaactcacttcacttcatacatccttttaatttcttaaaaccctcttgtcccttaaatatttgtcaattaaagattttctggctgggcacggtggctcacacctgtattcccagctactcaggaggccagggtgggaggatcacttgaactcccggctcaggagttcaagaccagcctggacaaggcaacatagcgagaccctgtctctactaaaaatacagaacttagctgggattacagtcgcccaccaccatacctggctaattttttgtgtttttagtaaagacagggtttcatggagaaaccaatatagaattgttcaggctggtctcgaactcccaacctcaggtgattcacccaccttggcctcccaaagtgctgggattaaaggtgtgagccatcgtgcctggcctaaaaaatttttttttcttcatctgggtttttgctttgaaaacaagtttctccaaatttacagatttcctgatgatgttgggtctgaactcaccaacttgattaggtctttaggggccgagggactagccagctgcacaggtgactggatgggggaggggcaggtgaggtgggtctacagaggtggcttcgcctttgaccttcatgctggtctcggctgaggtgacacgctagtgacagcccaatagggggttacccttattgagtaaaatacttcagattgacggctcaatcttagtttgcctccagttaatcttttatgcttagggattaaatgtgtggtttttttttggttttttttttgggagacggagtctcgctctgtcacccaggctggagtgcagtggcgcgatctcggctcactgcaacctctgcctcctgggttcaaacgattctcctgcctcagcctcccaagtagctgggattataggcgcccaccaccatgcctggctaattttttatttttagtagagatggggtttcaccgtgttggccaggctggtctcgaactcctgacctcgtgatctacccacctcggcctccccaagtgctgggattacaggcgtgagctagcatgcctggccagggattaaaatattcaaacatgttgtgtgtacccagatatgctgttaatttaggaaaaacagtacaatttctatgaagtggttgtgactattttctgtagtcaatacagttgggatatctgatctatttctctgtctactttggaaatgattgcataataaataaaattttactgtttttttaaaaaaaaataagaatagattagaaaaaaaaacggcggcagcagcgtattccattaggtagggttagtttaggctgacactgcgttcgtttagcacgtcgta

SEQ ID NO: 565556 - DNA, 813 bp, Homo sapiens
aagccagtcggcaggaccagcgggcgggggctcacgacaaaagctggcaggctgacagaggcggctcaggatggacctactggctactgaccgtttggctgtggtgatcccgagattgtgtgtaggtgtgagatcaggcatgagttccgtgggcccggtgtgaacccaaggagagtttggctgaacaccagaagtgggctggttccgcaaatgacaatctaaagttgcgactctagtattcagaagaggagagcgatcctcgcgacctaacaaggaggccttgccctccgacgttcctgagaaagctagcttgcctggaaagtgcccaggaacccgctggagcctgggggaacgaagatccgaacctatcgaaggcttctgtcatcactcaggtgttccatgtacccctggaggagagaaaatacaaggataatgaaccagttaggagaaggtgaactagcaaaaatctgccttgagatcatgcagagaactggtgctcacttggagctgtcttatggacaaagacaagggctctccatcatggtgtcaggaaagctggatgctgtcatgagaagctcggaaggacatcgtttgctagactgaagaatcaggcctcagcaactgttgccattccccaaagaacagccatcgcttcgttgatggcaaacaatggagagaaacgggaggatttggagctaaacactgggagcaaaaatccaatccgccggccagagtaaccgggcattcggttaggatcaggggccacaaaggctcgaacagcgcggctgaggttaaccatctgcgagagaaact

SEQ ID NO: 565557 - DNA, 198 bp, Homo sapiens
aagtcgcggtcaccgttggggtctgagtgggtccacccgaggactaggacatgcgagggtcatcgtcacttagggcttctcgagttggtccagcatctgggctccagcgacagatgaaagggtcatctattacttaggaacctaaactggtaccccacagagacccaacattcccaacaggtgaccggctgacttcgc

SEQ ID NO: 565558 - DNA, 761 bp, Homo sapiens
  misc_feature (459)..(459): n is a, c, g, or t
  misc_feature (462)..(462): n is a, c, g, or t
  misc_feature (464)..(464): n is a, c, g, or t
  misc_feature (477)..(477): n is a, c, g, or t
ggacgcgtgggtcgacccacgcgtcgatcaacctcgtccaggcaaagaagctggtggagtccctgccccaggaaatcaaagccaatgtcgccaaagctgaggcggagaagatcaaggcggcctggaggcggtgggcggcaccgtggttctggagtagcctccagctcggaggacttgtgttcaggggtcctgggccccgggcgaggtcccgccctcccgtggtcactggctccgcccccagcaccaggcgcccagtggagccgtttgggagaattgcctgcgccacgcagcggggccggacaggccgcacagacctactgtggcgggagggaggggcggctgctgcctggtgacggcacccggaggcccaccaggacgcgccaccggtgaatgtgcctctggtggctgctgagaaaaatacactgtgcagctcagaaaaaaaaaaaaaaaaacaaaaanaananaaaaaaaaaaaanaaaaaagggggggcgaagtaaaaagagctcccacaagagggacaaaagagtgcaggaagaccaagatagatggacaaaagggagacccaaaagagggcgaacaaaacagacgagaggcgcggcgcagagacgtaaaccgagcgggacacaacagggaaaacacaggagaaaggaagcacacaagaggagaaggacacacaaaaagcgaggaaggaaacaacaagaggaaaacctacacgagcgagaatgaacagaccaagacgaaaaaaaaagaaaggacaccg

SEQ ID NO: 565559 - DNA, 2826 bp, Homo sapiens
  misc_feature (1725)..(1725): n is a, c, g, or t
  misc_feature (1729)..(1729): n is a, c, g, or t
ccgtcggggccgtgggcgcctgcgcgggccggcgcgggagcaagcggcatggcgttccggcaggcgctgcagctggcggcctgcgggctggccgggggctcggccgccgtgctcttctcggccgtggcggtagggaagccgcgcgcaggcggggacgcggagccacgcccggctgagccgccggcctgggcggggggcgcgcggccgggccccggtgtctgggaccccaactgggacaggcgagaaccactgtctctgatcaacgtgcggaagaggaacgtggaatctggggaagaagagctggcgtccaagctggaccactacaaagccaaggccacgcggcacatcttcctcatcaggcattcccagtaccacgtggatggctccctggagaaggaccgcactctgaccccgctgggtcgggagcaggctgaactcactgggctccgcctggcaagcttggggttgaagtttaataaaatcgtccattcgtctatgacgcgcgccatagagaccaccgatatcatcagccggcacctgccaggcgtctgcaaagtcagcacagatctgctgcgggaaggcgcccccatcgagccagacccgcccgtgtctcattggaagccggaagctgtgcagtattacgaagacggagcccggatcgaggccgccttccggaactacatccaccgcgcagatgccaggcaggaggaggacagttacgagatcttcatctgtcacgccaacgtcatccgctacatcgtgtgcagagcactgcagtttcctcctgaaggctggctccggctctccctcaataatggcagcatcacccacctggtgatccgacccaacggccgagttgcgctcaggaccctcggggacacggggttcatgcctcccgacaagatcactcgatcctgagggctccggcctctccttccctctgtcctccctgcacaggccgcacacacttaacgttttgttcccaaggagaccggcggaaagtagaaacctgcaatgctgcatctgggaactgacttgtgaccaggctgagaaggggagagttgggatcagacagcctgacttctctgcagggttttatacctgaccatgaacccccaggatggcgtggggtttaaggtgaaagcgtctcacgcacaagtcaggcctgttgtggggacttgaaagaggcctgacccagaccaccatgttcgcacccacagctgacccgtgctgagggtccaggctccattggcaaagccggtcaggcacgagggcgactgaggcacgtggatgaggagggcacccaggttctgttcacaactcacttcacttcatacatccttttaatttcttaaaaccctcttgtcccttaaatatttgtcaattaaagattttctggctgggcacggtggctcacacctgtattcccagctactcaggaggccagggtgggaggatcacttgaactcccggctcaggagttcaagaccagcctggacaaggcaacatagcgagaccctgtctctactaaaaatacagaacttagctgggtgtgtcgtgggcatctagagtcccagctacttgggaggctgaggtgggtggatcacttgggcccgggagctggaggctgcagtgagctgtgattgtgtcactgcactccagcctgggcaagcgagggagacttaaagcaattttttcttttgaaacggagtttcactcttgttnacgnggctggagtgcagtggtgcgatctcggctcaccgcaacctctgcctcctgggttcaagtgattctcctgcctcagctcccgagtagctgggattacagtcgcccaccaccatacctggctaattttttgtgtttttagtaaagacagggtttcatggagaaaccaatatagaattgttcaggctggtctcgaactcccaacctcaggtgattcacccaccttggcctcccaaagtgctgggattaaaggtgtgagccatcgtgcctggcctaaaaaatttttttttcttcatctgggtttttgctttgaaaacaagtttctccaaatttacagatttcctgatgatgttgggtctgaactcaccaacttgattaggtctttaggggccgagggactagccagctgcacaggtgactggatgggggaggggcaggtgaggtgggtctacagaggtggcttcgcctttgaccttcatgctggtctcggctgaggtgacacgctagtgacagcccaatagggggttacccttattgagtaaaatacttcagattgacggctcaatcttagtttgcctccagttaatcttttatgcttagggattaaatgtgtggtttttttttggttttttttttgggagacggagtctcgctctgtcacccaggctggagtgcagtggcgcgatctcggctcactgcaacctctgcctcctgggttcaaacgattctcctgcctcagcctcccaagtagctgggattataggcgcccaccaccatgcctggctaattttttatttttagtagagatggggtttcaccgtgttggccaggctggtctcgaactcctgacctcgtgatctacccacctcggcctccccaagtgctgggattacaggcgtgagctagcatgcctggccagggattaaaatattcaaacatgttgtgtgtacccagatatgctgttaatttaggaaaaacagtacaatttctatgaagtggttgtgactattttctgtagtcaatacagttgggatatctgatctatttctctgtctactttggaaatgattgcataataaataaaattttactgttttttta

SEQ ID NO: 565560 - DNA, 761 bp, Homo sapiens
  misc_feature (2)..(2): n is a, c, g, or t
  misc_feature (19)..(19): n is a, c, g, or t
  misc_feature (30)..(30): n is a, c, g, or t
  misc_feature (459)..(459): n is a, c, g, or t
  misc_feature (462)..(462): n is a, c, g, or t
  misc_feature (464)..(464): n is a, c, g, or t
  misc_feature (477)..(477): n is a, c, g, or t
ancccccttttccggtttncccccaaaggnggcccaaaaaaaaggaaaagctggtggagtccctgccccaggaaatcaaagccaatgtcgccaaagctgaggcggagaagatcaaggcggcctggaggcggtgggcggcaccgtggttctggagtagcctccagctcggaggacttgtgttcaggggtcctgggccccgggcgaggtcccgccctcccgtggtcactggctccgcccccagcaccaggcgcccagtggagccgtttgggagaattgcctgcgccacgcagcggggccggacaggccgcacagacctactgtggcgggagggaggggcggctgctgcctggtgacggcacccggaggcccaccaggacgcgccaccggtgaatgtgcctctggtggctgctgagaaaaatacactgtgcagctcagaaaaaaaaaaaaaaaaacaaaaanaananaaaaaaaaaaaanaaaaaagggggggcgaagtaaaaagagctcccacaagagggacaaaagagtgcaggaagaccaagatagatggacaaaagggagacccaaaagagggcgaacaaaacagacgagaggcgcggcgcagagacgtaaaccgagcgggacacaacagggaaaacacaggagaaaggaagcacacaagaggagaaggacacacaaaaagcgaggaaggaaacaacaagaggaaaacctacacgagcgagaatgaacagaccaagacgaaaaaaaaagaaaggacaccg

SEQ ID NO: 565561 - DNA, 2807 bp, Homo sapiens
  misc_feature (1605)..(1605): n is a, c, g, or t
  misc_feature (1609)..(1609): n is a, c, g, or t
tggaatacaccagcgcatgctcctcccaaatagtctaacaatttggaaataacgtcttgtagaaaaactcaaacttgggaacagaggtctcaaggacatatcttgtatttcaacatcaggcgagaaccactgtctctgatcaacgtgcggaagaggaacgtggaatctggggaagaagagctggcgtccaagctggaccactacaaagccaaggccacgcggcacatcttcctcatcaggcattcccagtaccacgtggatggctccctggagaaggaccgcactctgaccccgctgggtcgggagcaggctgaactcactgggctccgcctggcaagcttggggttgaagtttaataaaatcgtccattcgtctatgacgcgcgccatagagaccaccgatatcatcagccggcacctgccaggcgtctgcaaagtcagcacagatctgctgcgggaaggcgcccccatcgagccagacccgcccgtgtctcattggaagccggaagctgtgcagtattacgaagacggagcccggatcgaggccgccttccggaactacatccaccgcgcagatgccaggcaggaggaggacagttacgagatcttcatctgtcacgccaacgtcatccgctacatcgtgtgcagagcactgcagtttcctcctgaaggctggctccggctctccctcaataatggcagcatcacccacctggtgatccgacccaacggccgagttgcgctcaggaccctcggggacacggggttcatgcctcccgacaagatcactcgatcctgagggctccggcctctccttccctctgtcctccctgcacaggccgcacacacttaacgttttgttcccaaggagaccggcggaaagtagaaacctgcaatgctgcatctgggaactgacttgtgaccaggctgagaaggggagagttgggatcagacagcctgacttctctgcagggttttatacctgaccatgaacccccaggatggcgtggggtttaaggtgaaagcgtctcacgcacaagtcaggcctgttgtggggacttgaaagaggcctgacccagaccaccatgttcgcacccacagctgacccgtgctgagggtccaggctccattggcaaagccggtcaggcacgagggcgactgaggcacgtggatgaggagggcacccaggttctgttcacaactcacttcacttcatacatccttttaatttcttaaaaccctcttgtcccttaaatatttgtcaattaaagattttctggctgggcacggtggctcacacctgtattcccagctactcaggaggccagggtgggaggatcacttgaactcccggctcaggagttcaagaccagcctggacaaggcaacatagcgagaccctgtctctactaaaaatacagaacttagctgggtgtgtcgtgggcatctagagtcccagctacttgggaggctgaggtgggtggatcacttgggcccgggagctggaggctgcagtgagctgtgattgtgtcactgcactccagcctgggcaagcgagggagacttaaagcaattttttcttttgaaacggagtttcactcttgttnacgnggctggagtgcagtggtgcgatctcggctcaccgcaacctctgcctcctgggttcaagtgattctcctgcctcagctcccgagtagctgggattacagtcgcccaccaccatacctggctaattttttgtgtttttagtaaagacagggtttcatggagaaaccaatatagaattgttcaggctggtctcgaactcccaacctcaggtgattcacccaccttggcctcccaaagtgctgggattaaaggtgtgagccatcgtgcctggcctaaaaaatttttttttcttcatctgggtttttgctttgaaaacaagtttctccaaatttacagatttcctgatgatgttgggtctgaactcaccaacttgattaggtctttaggggccgagggactagccagctgcacaggtgactggatgggggaggggcaggtgaggtgggtctacagaggtggcttcgcctttgaccttcatgctggtctcggctgaggtgacacgctagtgacagcccaatagggggttacccttattgagtaaaatacttcagattgacggctcaatcttagtttgcctccagttaatcttttatgcttagggattaaatgtgtggtttttttttggttttttttttgggagacggagtctcgctctgtcacccaggctggagtgcagtggcgcgatctcggctcactgcaacctctgcctcctgggttcaaacgattctcctgcctcagcctcccaagtagctgggattataggcgcccaccaccatgcctggctaattttttatttttagtagagatggggtttcaccgtgttggccaggctggtctcgaactcctgacctcgtgatctacccacctcggcctccccaagtgctgggattacaggcgtgagctagcatgcctggccagggattaaaatattcaaacatgttgtgtgtacccagatatgctgttaatttaggaaaaacagtacaatttctatgaagtggttgtgactattttctgtagtcaatacagttgggatatctgatctatttctctgtctactttggaaatgattgcataataaataaaattttactgtttttttaaaaaaaaataagaatagattagaaaaaaaaacggcggcagcagcgtattccattaggtagggttagtttaggctgacactgcgttcgtttagcacgtcgta

SEQ ID NO: 565562 - DNA, 269 bp, Homo sapiens
gaggctactccagaaccacggtgccgcccacctttgatggccgctgctcctcatatgtcgcacggcacagaccagcaccaggcgcccagtggagccgtttgggagaattgcctgcgccacgcagcggggccggacaggccgcacagacctactgtggcgggagggaggggcggctgctgcctggtgacggcacccggaggcccaccaggacgcgccaccggtgaatgtgcctctggtggctgctgagaaaaatacactgtgcagctcag

SEQ ID NO: 565563 - DNA, 2471 bp, Homo sapiens
ccgtcggggccgtgggcgcctgcgcgggccggcgcgggagcaagcggcatggcgttccggcaggcgctgcagctggcggcctgcgggctggccgggggctcggccgccgtgctcttctcggccgtggcggtagggaagccgcgcgcaggcggggacgcggagccacgcccggctgagccgccggcctgggcggggggcgcgcggccgggccccggtgtctgggaccccaactgggacaggcgagaaccactgtctctgatcaacgtgcggaagaggaacgtggaatctggggaagaagagctggcgtccaagctggaccactacaaagccaaggccacgcggcacatcttcctcatcaggcattcccagtaccacgtggatggctccctggagaaggaccgcactctgaccccgctgggtcgggagcaggctgaactcactgggctccgcctggcaagcttggggttgaagtttaataaaatcgtccattcgtctatgacgcgcgccatagagaccaccgatatcatcagccggcacctgccaggcgtctgcaaagtcagcacagatctgctgcgggaaggcgcccccatcgagccagacccgcccgtgtctcattggaagccggaagctgtgcagtattacgaagacggagcccggatcgaggccgccttccggaactacatccaccgcgcagatgccaggcaggaggaggacagttacgagatcttcatctgtcacgccaacgtcatccgctacatcgtgtgcagagcactgcagtttcctcctgaaggctggctccggctctccctcaataatggcagcatcacccacctggtgatccgacccaacggccgagttgcgctcaggaccctcggggacacggggttcatgcctcccgacaagatcactcgatcctgagggctccggcctctccttccctctgtcctccctgcacaggccgcacacacttaacgttttgttcccaaggagaccggcggaaagtagaaacctgcaatgctgcatctgggaactgacttgtgaccaggctgagaaggggagagttgggatcagacagcctgacttctctgcagggttttatacctgaccatgaacccccaggatggcgtggggtttaaggtgaaagcgtctcacgcacaagtcaggcctgttgtggggacttgaaagaggcctgacccagaccaccatgttcgcacccacagctgacccgtgctgagggtccaggctccattggcaaagccggtcaggcacgagggcgactgaggcacgtggatgaggagggcacccaggttctgttcacaactcacttcacttcatacatccttttaatttcttaaaaccctcttgtcccttaaatatttgtcaattaaagattttctggctgggcacggtggctcacacctgtattcccagctactcaggaggccagggtgggaggatcacttgaactcccgacctcaggtgattcacccaccttggcctcccaaagtgctgggattaaaggtgtgagccatcgtgcctggcctaaaaaatttttttttcttcatctgggtttttgctttgaaaacaagtttctccaaatttacagatttcctgatgatgttgggtctgaactcaccaacttgattaggtctttaggggccgagggactagccagctgcacaggtgactggatgggggaggggcaggtgaggtgggtctacagaggtggcttcgcctttgaccttcatgctggtctcggctgaggtgacacgctagtgacagcccaatagggggttacccttattgagtaaaatacttcagattgacggctcaatcttagtttgcctccagttaatcttttatgcttagggattaaatgtgtggtttttttttggttttttttttgggagacggagtctcgctctgtcacccaggctggagtgcagtggcgcgatctcggctcactgcaacctctgcctcctgggttcaaacgattctcctgcctcagcctcccaagtagctgggattataggcgcccaccaccatgcctggctaattttttatttttagtagagatggggtttcaccgtgttggccaggctggtctcgaactcctgacctcgtgatctacccacctcggcctccccaagtgctgggattacaggcgtgagctagcatgcctggccagggattaaaatattcaaacatgttgtgtgtacccagatatgctgttaatttaggaaaaacagtacaatttctatgaagtggttgtgactattttctgtagtcaatacagttgggatatctgatctatttctctgtctactttggaaatgattgcataataaataaaattttactgtttttttaaaaaaaaataagaatagattagaaaaaaaaacggcggcagcagcgtattccattaggtagggttagtttaggctgacactgcgttcgtttagcacgtcgta

SEQ ID NO: 565564 - DNA, 622 bp, Homo sapiens
agcgggcgggtgcggcgaggcctgggcggcctgaggagcgcggaccccggcgctcggctcccggcgccatgtgagggggctcgggggccgcggggggccgggcgctccccgccggagatgaggaaactgaggctcagagaggtcacatggcttgctcgaggccccccagccagtgtgaacccacaccctgccagcctcgacgactacctcaaacgaaataatacacaaagagcagcgcagcagtgtcgtgatcctctttgccctcatcaccatcctcatcctctacatccaacagtgccaatgagtcccattacggctccatgcggggcgtagccgcgactgtcaactcaagaagtgagcatcactgacggctatgtccccattctcggcaacaagacactgccctctcggtgcacagtgtggatgtcagcagtcagcactgctggcacaactgggcctgaatcgacggctgagtgtcaaccgatatgatgcaccacatggtatcagtgagtggcaacaaacacctacgcgtgtggccatcagtgtgtccgcgtgctgagaggcccggagttgtcacagaccctgaaacggtcatctctggggccccgacaagatgcaaagc

SEQ ID NO: 565565 - DNA, 212 bp, Homo sapiens
ccccccccccttaggatttattcccgttgattgattttttgaggggctcccaggaaagcgcctccccccctagcaaaagtgcaaaatggggagtgaaaggttgggaatggaggggcagagccaggaagttcccccagaaaagaaagctacaaaaaaaattggggttcctccagggtggcagcaccaataaatagacacgcccggcaccccca

SEQ ID NO: 565566 - DNA, 923 bp, Homo sapiens
  misc_feature (23)..(23): n is a, c, g, or t
attgcatggtcgaggcgggtgtnaatcggccgaggcagcccgcggaccgatgctgccggcggccgctcgccccctgtgggggccttgccttgggcttcgggccgctgcgttccgccttgccaggcgacaggtgccatgtgtctgtgccgtgcgacatatgaggagcagcggccatcagaggtgtgaggccctcgctggtgcacccctggataacgcccccaaggagtacccccccaagatacagcagctggtccaggacatcgccagcctcactctcttggaaatctcagacctcaacgagctcctgaagaaaacgttgaagatccaggatgtcgggcttgtgccgatgggtggtgtgatgtctggggctgtccctgctgcagcagcccaggaggcggtggaagaagatatccccatagcgaaagaacggacacatttcaccgtccgcctgaccgaggcgaagcccgtggacaaagtgaagctgatcaaggaaatcaagaactacatccaaggcatcaacctcgtccaggcaaagaagctggtggagtccctgccccaggaaatcaaagccaatgtcgccaaagctgaggcggagaagatcaaggcggcctggaggcggtgggcggcaccgtggttctggagtagcctccagctcggaggacttgtgttcaggggtcctgggccccgggcgaggtcccgccctcccgtggtcactggctccgcccccagcaccaggcgcccagtggagccgtttgggagaattgcctgcgccacgcagcggggccggacaggccgcacagacctactgtggcgggagggaggggcggctgctgcctggtgacggcacccggaggcccaccaggacgcgccaccggtgaatgtgcctctggtggctgctgagaaaaatacactgtgcagctcag

SEQ ID NO: 565567 - DNA, 2838 bp, Homo sapiens
  misc_feature (1636)..(1636): n is a, c, g, or t
  misc_feature (1640)..(1640): n is a, c, g, or t
ccgtcggggccgtgggcgcctgcgcgggccggcgcgggagcaagcggcatggcgttccggcaggcgctgcagctggcggcctgcgggctggccgggggctcggccgccgtgctcttctcggccgtggcggtagggaagccgcgcgcaggcggggacgcggagccacgcccggctgagccgccggcctgggcggggggcgcgcggccgggccccggtgtctgggaccccaactgggacaggcgagaaccactgtctctgatcaacgtgcggaagaggaacgtggaatctggggaagaagagctggcgtccaagctggaccactacaaagccaaggccacgcggcacatcttcctcatcaggcattcccagtaccacgtggatggctccctggagaaggaccgcactctgaccccgctgggtcgggagcaggctgaactcactgggctccgcctggcaagcttggggttgaagtttaataaaatcgtccattcgtctatgacgcgcgccatagagaccaccgatatcatcagccggcacctgccagcagtattacgaagacggagcccggatcgaggccgccttccggaactacatccaccgcgcagatgccaggcaggaggaggacagttacgagatcttcatctgtcacgccaacgtcatccgctacatcgtgtgcagagcactgcagtttcctcctgaaggctggctccggctctccctcaataatggcagcatcacccacctggtgatccgacccaacggccgagttgcgctcaggaccctcggggacacggggttcatgcctcccgacaagatcactcgatcctgagggctccggcctctccttccctctgtcctccctgcacaggccgcacacacttaacgttttgttcccaaggagaccggcggaaagtagaaacctgcaatgctgcatctgggaactgacttgtgaccaggctgagaaggggagagttgggatcagacagcctgacttctctgcagggttttatacctgaccatgaacccccaggatggcgtggggtttaaggtgaaagcgtctcacgcacaagtcaggcctgttgtggggacttgaaagaggcctgacccagaccaccatgttcgcacccacagctgacccgtgctgagggtccaggctccattggcaaagccggtcaggcacgagggcgactgaggcacgtggatgaggagggcacccaggttctgttcacaactcacttcacttcatacatccttttaatttcttaaaaccctcttgtcccttaaatatttgtcaattaaagattttctggctgggcacggtggctcacacctgtattcccagctactcaggaggccagggtgggaggatcacttgaactcccggctcaggagttcaagaccagcctggacaaggcaacatagcgagaccctgtctctactaaaaatacagaacttagctgggtgtgtcgtgggcatctagagtcccagctacttgggaggctgaggtgggtggatcacttgggcccgggagctggaggctgcagtgagctgtgattgtgtcactgcactccagcctgggcaagcgagggagacttaaagcaattttttcttttgaaacggagtttcactcttgttnacgnggctggagtgcagtggtgcgatctcggctcaccgcaacctctgcctcctgggttcaagtgattctcctgcctcagctcccgagtagctgggattacagtcgcccaccaccatacctggctaattttttgtgtttttagtaaagacagggtttcatggagaaaccaatatagaattgttcaggctggtctcgaactcccaacctcaggtgattcacccaccttggcctcccaaagtgctgggattaaaggtgtgagccatcgtgcctggcctaaaaaatttttttttcttcatctgggtttttgctttgaaaacaagtttctccaaatttacagatttcctgatgatgttgggtctgaactcaccaacttgattaggtctttaggggccgagggactagccagctgcacaggtgactggatgggggaggggcaggtgaggtgggtctacagaggtggcttcgcctttgaccttcatgctggtctcggctgaggtgacacgctagtgacagcccaatagggggttacccttattgagtaaaatacttcagattgacggctcaatcttagtttgcctccagttaatcttttatgcttagggattaaatgtgtggtttttttttggttttttttttgggagacggagtctcgctctgtcacccaggctggagtgcagtggcgcgatctcggctcactgcaacctctgcctcctgggttcaaacgattctcctgcctcagcctcccaagtagctgggattataggcgcccaccaccatgcctggctaattttttatttttagtagagatggggtttcaccgtgttggccaggctggtctcgaactcctgacctcgtgatctacccacctcggcctccccaagtgctgggattacaggcgtgagctagcatgcctggccagggattaaaatattcaaacatgttgtgtgtacccagatatgctgttaatttaggaaaaacagtacaatttctatgaagtggttgtgactattttctgtagtcaatacagttgggatatctgatctatttctctgtctactttggaaatgattgcataataaataaaattttactgtttttttaaaaaaaaataagaatagattagaaaaaaaaacggcggcagcagcgtattccattaggtagggttagtttaggctgacactgcgttcgtttagcacgtcgta

SEQ ID NO: 565568 - DNA, 444 bp, Homo sapiens
caagtaaaatagatatgtatattagagggtctgtacacggtaagctagataaggtcatagcttgtatggaggaagaaaaaaagaaaagaccggtgggaaaccaggaaggagggttaaggtggagaacattacaggcagggccccaattctgtcattacctagtaatatgttttaatacaattcattggaccaggctgcacgtctcaaagacctcatgtccaaaaacagagggggactaggcaattggccaagaccaaaattctagaaatagatcctttcctttatttcaatctaattgggccggagttctattcctaaggtggtcttccaatgggtgtatcccttttttcattctggggcccaacctttaagctccataatcactcataagactatcccagtagatcccaaacttcatctcttcacggagggtctccctcttgg

SEQ ID NO: 565569 - DNA, 131 bp, Homo sapiens
accgcgcctggcacgaatgagtatattactgatatttaccacaaactgacagtaatttttaaacagaatttaaaaatgtgtctgctggctactgtgtgtaagactgaatgtgggtaacgctgggtattccg

SEQ ID NO: 565570 - DNA, 944 bp, Homo sapiens
  misc_feature (22)..(22): n is a, c, g, or t
  misc_feature (24)..(26): n is a, c, g, or t
acatcgctagggtcgaggctgngnnnaatcggacgagcgaatgcccggcagccgtggcggctagagcgttcctccccagctcgaatgcccggcggccgaggcggctagagcgtcgcctcctcccggggaaccgcgtgtgaccttccagcccgcggaccgatgctgccggcggccgctcgccccctgtgggggccttgccttgggcttcgggccgctgcgttccgccttgccaggcgacaggtgccatgtgtctgtgccgtgcgacatatgaggagcagcggccatcagaggtgtgaggccctcgctggtgcacccctggataacgcccccaaggagtacccccccaagatacagcagctggtccaggacatcgccagcctcactctcttggaaatctcagacctcaacgagctcctgaagaaaacgttgaagatccaggatgtcgggcttgtgccgatgggtggtgtgatgtctggggctgtccctgctgcagcagcccaggaggcggtggaagaagatatccccatagcgaaagaacggacacatttcaccgtccgcctgaccgaggcgaagcccgtggacaaagtgaagctgatcaaggaaatcaagaactacatccaaggcatcaacctcgtccaggcaaagaagctggtggttctggagtagcctccagctcggaggacttgtgttcaggggtcctgggccccgggcgaggtcccgccctcccgtggtcactggctccgcccccagcaccaggcgcccagtggagccgtttgggagaattgcctgcgccacgcagcggggccggacaggccgcacagacctactgtggcgggagggaggggcggctgctgcctggtgacggcacccggaggcccaccaggacgcgccaccggtgaatgtgcctctggtggctgctgagaaaaatacactgtgcagctcag

SEQ ID NO: 565571 - DNA, 2347 bp, Homo sapiens
ccgtcggggccgtgggcgcctgcgcgggccggcgcgggagcaagcggcatggcgttccggcaggcgctgcagctggcggcctgcgggctggccgggggctcggccgccgtgctcttctcggccgtggcggtagggaagccgcgcgcaggcggggacgcggagccacgcccggctgagccgccggcctgggcggggggcgcgcggccgggccccggtgtctgggaccccaactgggacaggcgagaaccactgtctctgatcaacgtgcggaagaggaacgtggaatctggggaagaagagctggcgtccaagctggaccactacaaagccaaggccacgcggcacatcttcctcatcaggcattcccagtaccacgtggatggctccctggagaaggaccgcactctgaccccgctgggtcgggagcaggctgaactcactgggctccgcctggcaagcttggggttgaagtttaataaaatcgtccattcgtctatgacgcgcgccatagagaccaccgatatcatcagccggcacctgccaggcgtctgcaaagtcagcacagatctgctgcgggaaggcgcccccatcgagccagacccgcccgtgtctcattggaagccggaagctgtgcagtattacgaagacggagcccggatcgaggccgccttccggaactacatccaccgcgcagatgccaggcaggaggaggacagttacgagatcttcatctgtcacgccaacgtcatccgctacatcgtgtgcagagcactgcagtttcctcctgaaggctggctccggctctccctcaataatggcagcatcacccacctggtgatccgacccaacggccgagttgcgctcaggaccctcggggacacggggttcatgcctcccgacaagatcactcgatcctgagggctccggcctctccttccctctgtcctccctgcacaggccgcacacacttaacgttttgttcccaaggagaccggcggaaagtagaaacctgcaatgctgcatctgggaactgacttgtgaccaggctgagaaggggagagttgggatcagacagcctgacttctctgcagggttttatacctgaccatgaacccccaggatggcgtggggtttaaggtgaaagcgtctcacgcacaagtcaggcctgttgtggggacttgaaagaggcctgacccagaccaccatgttcgcacccacagctgacccgtgctgagggtccaggctccattggcaaagccggtcaggcacgagggcgactgaggcacgtggatgaggagggcacccaggttctgttcacaactcacttcacttcatacatccttttaatttcttaaaaccctcttgtcccttaaatatttgtcaattaaagattttctggctgagccatcgtgcctggcctaaaaaatttttttttcttcatctgggtttttgctttgaaaacaagtttctccaaatttacagatttcctgatgatgttgggtctgaactcaccaacttgattaggtctttaggggccgagggactagccagctgcacaggtgactggatgggggaggggcaggtgaggtgggtctacagaggtggcttcgcctttgaccttcatgctggtctcggctgaggtgacacgctagtgacagcccaatagggggttacccttattgagtaaaatacttcagattgacggctcaatcttagtttgcctccagttaatcttttatgcttagggattaaatgtgtggtttttttttggttttttttttgggagacggagtctcgctctgtcacccaggctggagtgcagtggcgcgatctcggctcactgcaacctctgcctcctgggttcaaacgattctcctgcctcagcctcccaagtagctgggattataggcgcccaccaccatgcctggctaattttttatttttagtagagatggggtttcaccgtgttggccaggctggtctcgaactcctgacctcgtgatctacccacctcggcctccccaagtgctgggattacaggcgtgagctagcatgcctggccagggattaaaatattcaaacatgttgtgtgtacccagatatgctgttaatttaggaaaaacagtacaatttctatgaagtggttgtgactattttctgtagtcaatacagttgggatatctgatctatttctctgtctactttggaaatgattgcataataaataaaattttactgtttttttaaaaaaaaataagaatagattagaaaaaaaaacggcggcagcagcgtattccattaggtagggttagtttaggctgacactgcgttcgtttagcacgtcgta

SEQ ID NO: 565572 - DNA, 1091 bp, Homo sapiens
tactcgacgagaacacgactgaactgtgatctcgtatcttctcgtttcgttcttggacgagttttctaggcgtcgtcttggttagcatcttgtacgttgctcatcgctgctttgaccctttctcgtgctttatgctggtggtcccccctttgtcgccctgggcttctcccactgtcttcctgttctgctgtgtccgacctccggttcttgtcgtaccccccttcgtcggttctttggctccctcgcgcgtccattccactgggcctcccgtgcctgacccttcaggcacggtcactatgttcagagggcttctttccaggccctgctggggctctgcgcctgaggctcgttcccacccccggtacccttgcggacttgcctttcacgcatccttccggaagtgagcctctccatccctggcgcgcctttattggcctccctggcctctgtccccctggaagactcagtccgtgcccccgacctagccttaggcctgtgccgcccccctgggagggctcctcagagtcaggcctggactggtctggggcccgcttctcccccgggctccgatgtgggcggccctggatgagccgatgctgcacggagggcactcccggcctcgcttcttgacgggcccgccccggatcccccgagcgccccctggctgtcccagtcctctgtctcctctctgcggctgcacgcacgctggaggcgccactgggcttccctatcggagccacggcgcgtggtggcacctggcacgcccaccacggccgctttgtgaagggttcccgctgtcacctcgttggttggaggaccagtgggccctgagaccctggtgacccctggaaagggtgggcctgccccctccgagggtcctgggcctccctagccccggcacgagagtggggcaccacggcacggcccctgggtgctaagggctgggctgcactgtgggtatgcccgagctcctactctgttctaacgagggcccccctggggagcccggggcacacctctggaggccggagaggcccccccgcctgctgccctagtacgtgtttagaataaaaacccgtttgtttttccca

SEQ ID NO: 565573 - DNA, 2172 bp, Homo sapiens
ccgtcggggccgtgggcgcctgcgcgggccggcgcgggagcaagcggcatggcgttccggcaggcgctgcagctggcggcctgcgggctggccgggggctcggccgccgtgctcttctcggccgtggcggtagggaagccgcgcgcaggcggggacgcggagccacgcccggctgagccgccggcctgggcggggggcgcgcggccgggccccggtgtctgggaccccaactgggacaggcgagaaccactgtctctgatcaacgtgcggaagaggaacgtggaatctggggaagaagagctggcgtccaagctggaccactacaaagccaaggccacgcggcacatcttcctcatcaggcattcccagtaccacgtggatggctccctggagaaggaccgcactctgaccccgctgggtcgggagcaggctgaactcactgggctccgcctggcaagcttggggttgaagtttaataaaatcgtccattcgtctatgacgcgcgccatagagaccaccgatatcatcagccggcacctgccaggcgtctgcaaagtcagcacagatctgctgcgggaaggcgcccccatcgagccagacccgcccgtgtctcattggaagccggaagctgtgcagtattacgaagacggagcccggatcgaggccgccttccggaactacatccaccgcgcagatgccaggcaggaggaggacagttacgagatcttcatctgtcacgccaacgtcatccgctacatcgtgtgcagagcactgcagtttcctcctgaaggctggctccggctctccctcaataatggcagcatcacccacctggtgatccgacccaacggccgagttgcgctcaggaccctcggggacacggggttcatgcctcccgacaagatcactcgatcctgagggctccggcctctccttccctctgtcctccctgcacaggccgcacacacttaacgttttgttcccaaggagaccggcggaaagtagaaacctgcaatgctgcatctgggaactgacttgtgaccaggctgagaaggggagagttgggatcagacagcctgacttctctgcagggttttatacctgaccatgaacccccaggatggcgtggggtttaaggtgaaagcgtctcacgcacaagtcaggcctgttgtggggacttgaaagaggcctgacccagaccaccatgttcgcacccacagctgacccgtgctgagggtccaggctccattggcaaagccggtcaggcacgagggcgactgaggcacgtggatgaggagggcacccaggttctgttcacaactcacttcacttcatacatccttttaatttcttaaaaccctcttgtcccttaaatatttgtcaattaaagattttctggctgggcacggtggctcacacctgtattcccagctactcaggaggccagggtgggaggatcacttgaactcccgacctcaggtgattcacccaccttggcctcccaaagtgctgggattaaaggtgtgagccatcgtgcctggcctaaaaaatttttttttcttcatctgggtttttgctttgaaaacaagtttctccaaatttacagatttcctgatgatgttgggtctgaactcaccaacttgattaggtctttaggggccgagggactagccagctgcacaggtgactggatgggggaggggcaggtgaggtgggtctacagaggtggcttcgcctttgaccttcatgctggtctcggctgaggtgacacgctagtgacagcccaatagggggttacccttattgagtaaaatacttcagattgacggctcaatcttagtttgcctccagttaatcttttatgcttagggattaaatgtgtggtttttttttggttttttttttgggagacggagtctcgctctgtcactccagcctgggcgatagagtgagactcagctcaataacacacacaaagacaacaaaccttgcgccagggtgaggacgaggtggcgcccctataaatccccgagacatacagcaagcgcacgcggcccacaaaggggcggcacaccctggaccctgggagcacacaggtaacatcgacgccaacgggcccacggggcactcagcgtggccaacccagacacccgattccactttaacacaccg

SEQ ID NO: 565574 - DNA, 201 bp, Homo sapiens
  misc_feature (8)..(8): n is a, c, g, or t
  misc_feature (10)..(10): n is a, c, g, or t
  misc_feature (18)..(18): n is a, c, g, or t
  misc_feature (28)..(28): n is a, c, g, or t
  misc_feature (48)..(48): n is a, c, g, or t
  misc_feature (78)..(78): n is a, c, g, or t
  misc_feature (85)..(85): n is a, c, g, or t
  misc_feature (98)..(98): n is a, c, g, or t
  misc_feature (102)..(102): n is a, c, g, or t
  misc_feature (113)..(113): n is a, c, g, or t
  misc_feature (122)..(122): n is a, c, g, or t
  misc_feature (150)..(150): n is a, c, g, or t
  misc_feature (152)..(152): n is a, c, g, or t
  misc_feature (155)..(155): n is a, c, g, or t
  misc_feature (157)..(157): n is a, c, g, or t
  misc_feature (176)..(176): n is a, c, g, or t
ctcgtgcngnaaattttntacagtacangacccggatgaactcaatgnatgatgactcttcttatcacactcgcaaangaatgcntttcaaacatcgngacngctagaaccangcactaccngtatctccatccttaaccgtccagtccngngangngggaagttaccttttatangacaaaatttaatcgcgtaaccgtt

SEQ ID NO: 565575 - DNA, 414 bp, Homo sapiens
  misc_feature (15)..(15): n is a, c, g, or t
  misc_feature (20)..(20): n is a, c, g, or t
  misc_feature (70)..(70): n is a, c, g, or t
  misc_feature (410)..(410): n is a, c, g, or t
gtttgttttttgttnccagnagaaaaaaggcctttttaaaatgaaaaggtttccaaaagaaatatgtccnctgtaagtttatgacctgttaaaatattcctagaaagggaaagcctataagaataggactttgggctggatgcagtggctcacacctgtagtcctgtcactttgggaggccaaggtgggaggatcacttgagcataggagtttgaggccaccctgggcaacatagtgagaccccatctctacaaaaaatttaaaaattagccaggcgtgatgccgagtgcttgtaatctcaattacttgggggtctgaggtgggatgatcgcttgagcacaggaggtcaaggctgcagtgaaccatcattgcaccactgcactccaatctgggcaacacagtgatacctncaaa

SEQ ID NO: 565576 - DNA, 1939 bp, Homo sapiens
ccgtcggggccgtgggcgcctgcgcgggccggcgcgggagcaagcggcatggcgttccggcaggcgctgcagctggcggcctgcgggctggccgggggctcggccgccgtgctcttctcggccgtggcggtagggaagccgcgcgcaggcggggacgcggagccacgcccggctgagccgccggcctgggcggggggcgcgcggccgggccccggtgtctgggaccccaactgggacaggcgagaaccactgtctctgatcaacgtgcggaagaggaacgtggaatctggggaagaagagctggcgtccaagctggaccactacaaagccaaggccacgcggcacatcttcctcatcaggcattcccagtaccacgtggatggctccctggagaaggaccgcactctgaccccgctgggtcgggagcaggctgaactcactgggctccgcctggcaagcttggggttgaagtttaataaaatcgtccattcgtctatgacgcgcgccatagagaccaccgatatcatcagccggcacctgccaggcgtctgcaaagtcagcacagatctgctgcgggaaggcgcccccatcgagccagacccgcccgtgtctcattggaagccggaagctgtgcagtattacgaagacggagcccggatcgaggccgccttccggaactacatccaccgcgcagatgccaggcaggaggaggacagttacgagatcttcatctgtcacgccaacgtcatccgctacatcgtgtgcagagcactgcagtttcctcctgaaggctggctccggctctccctcaataatggcagcatcacccacctggtgatccgacccaacggccgagttgcgctcaggaccctcggggacacggggttcatgcctcccgacaagatcactcgatcctgagggctccggcctctccttccctctgtcctccctgcacaggccgcacacacttaacgttttgttcccaaggagaccggcggaaagtagaaacctgcaatgctgcatctgggaactgacttgtgaccaggctgagaaggggagagttgggatcagacagcctgacttctctgcagggttttatacctgaccatgaacccccaggatggcgtggggtttaaggtgaaagcgtctcacgcacaagtcaggcctgttgtggggacttgaaagaggcctgacccagaccaccatgttcgcacccacagctgacccgtgctgagggtccaggctccattggcaaagccggtcaggcacgagggcgactgaggcacgtggatgaggagggcacccaggttctgttcacaactcacttcacttcatacatccttttaatttcttaaaaccctcttgtcccttaaatatttgtcaattaaagattttctggctgggcacggtggctcacacctgtattcccagctactcaggaggccagggtgggaggatcacttgaactcccgtcagcctcccaagtagctgggattataggcgcccaccaccatgcctggctaattttttatttttagtagagatggggtttcaccgtgttggccaggctggtctcgaactcctgacctcgtgatctacccacctcggcctccccaagtgctgggattacaggcgtgagctagcatgcctggccagggattaaaatattcaaacatgttgtgtgtacccagatatgctgttaatttaggaaaaacagtacaatttctatgaagtggttgtgactattttctgtagtcaatacagttgggatatctgatctatttctctgtctactttggaaatgattgcataataaataaaattttactgtttttttaaaaaaaaataagaatagattagaaaaaaaaacggcggcagcagcgtattccattaggtagggttagtttaggctgacactgcgttcgtttagcacgtcgta

SEQ ID NO: 565577 - DNA, 110 bp, Homo sapiens
caggttagttgttcggtagttctcaggcgggcgtctcagagctgttcagagtcacgttggctgcgcggagaccacggtcatatgtaccaagtgaccttgaatgctggtca

SEQ ID NO: 565578 - DNA, 259 bp, Homo sapiens
acccctttttttccaaggcttaattttaaaccccgggttaacctccatggtccgaggttgcctaatttggggcttttccgggattgccgagaaatgcctttttccccaaaaccaaatggtttttttggtttctttttccctttggcccctgtgtttcctttgccggaatccggtttttaaaggccgatgggaaaagccccttaagtccctgaaaattgaaatgttattttttacttttcccattaagctggggggggga

SEQ ID NO: 565579 - DNA, 783 bp, Homo sapiens
  misc_feature (168)..(168): n is a, c, g, or t
tgggagcctgtacctttattcatgcccccctgaccaattgcagtgaaaagacaaggcccttgccgaaaacaattccaggggcctgggactctgggtcccctactgcaagacactttcctggtgacgccaaaatgttgtttaaacgtgctggttgttgtgaccatcctntggggagaaggtcaaaagggggcaaagatccccagggtgccctgaggaagggcaggccataggctgtggtctcccagagcgctggatagtgcgagggccctgtgtgccaccaccttcggggcttaaaaacacaatgtgcagtctccttgggcaggagggaacgtgaaaatgtgggacgcctttcagcttgtggacgcccttaaggagcgttggggtttgttagggggcactcatctacgtgatacccccgtttttaaaccggccacgagggagccactttgtacgcacacaccgctgcctttaggagagacactctactacaacaaacctgtgtgacaactctccccccatctagaaacacgcatgcgaccaaatgtcgacagaacccatgtgagacgcaccacaacccaggccagactgccccacacattcattcaaacaacaccacccccccactctacactccccactccctgttaagcacagtaggacactagcatctctacatccagcgagaacccccacagagagcaactgccacgtcgcacggggatccccaacccattgccccccgcgccacttcccacaccaccacccggaaaacgagcgccctct

SEQ ID NO: 565580 - DNA, 561 bp, Homo sapiens
tcttaggtataaacattagaccggagctcggccacacagtcgagtaaccatgaatcatgctctcgtgtcttgattctgcaagatattgttgctatccgcatcccgacgtcgtcggatacccgtggtacacacatgaggatttatatgcgtgggcatcatcctctgaggcagagtttcgtaattatgctcgagacggtcgtcgagcgaaagtctaatagtgaaaacctcataactgggtgatattggatgcccccacctacacacattcgaagaaccgtatacataaatcagacaggaaggaaggaatcgaaccccccaaagcggtttcagccaaccccatgcctcatgactttggcagaagaaagacagagaagacaaaaaaagtgtgtgggggccggtggggcccggagagttgataaaacatgatcggagcgcgcccaccaagtagggacaaaggggacagagtagtcggggaacgggccagacaagcggggatgcccgcagaaaacgcgggggaggacctggtatgacaaaccagaggcgtaaggggatagacgggcc

SEQ ID NO: 565581 - DNA, 606 bp, Homo sapiens
tcagcgaccttctcaagagtactcaagtgatccgtccagctcagccccaaagtctggggatcacaggcatgagccccatgcctggcaacctagcagtatgcttttatggttcttactttatgtgtgtgtggctgcatagctgatttctttttattgctgaataatattcccttgaatgaatgtaccatggtttggttatccattcacttgtagaagagcatcttggttgcttctattttttggcaattcatgaataaagctgctataaacatttctgtgtaggcttttgtgtggacctaagttttcagctcatttgcgtaaatacgtaggagagtgattgctagattatgtggtcacaagtatgtttagctttgtcagaaactgccaaactgtcttcagacgtggcaggaccatttttgcattcccaccagcgtgaatgagtttctgttccacatccttaccagcatttggtgttgtcactgatttagattttagccattctaaggtatcttatagttttaatttgcaattccctaatgacatacaatgtcatcttttccatgtgcttattagacatctgcatctttatagaggtaatccgtgagg

SEQ ID NO: 565582 - DNA, 599 bp, Homo sapiens
aagaaccggggctgcgtaagcgatcagaggcttaaggtcttcagcggggcgctccaggaggcactcacagagcactacaaacaccactggtttcccgaaaagccgtccaagggctccggctaccgctgcattcgcatcaaccacaagatggaccccatcatcagcagggtggccagccagatcggactcagccagccccagctgcaccagctgctgcccagcgagctgaccctgtgggtggacccctatgaggtgtcctaccgcattggggaggacggctccatctgcgtcttgtacgaggaggccccactggccgcctcctgtgggctcctcacctgcaagaaccaagtgctgctgggccggagcagcccctccaagaactacgtgatggcagtctccagctaggcccttccgcccccgccctgggcgcggagcggcccctccaagaactacgtgatggcagtctccagctaggcccttccgcccccgccctgggcgccgccgtgctcatgctgccgtgacaacaggccaccacatacctcaacctggggaactgtatttttaaatgaagagctatttatatatattaaaaaaaaaaa

SEQ ID NO: 565583 - DNA, 104 bp, Homo sapiens
ggatcaaagatacaattgtctctactaagagtaactaaagtctgacattcttgagtccgttgaacatgaggggacaacagggactttccataacctgttgacac

SEQ ID NO: 565584 - DNA, 379 bp, Homo sapiens
tactaagaataacttactacctcattacattaaaaaggaatatagagattgatgtgtaaaaaaaaaaatacgcacattgtccaatccagtgatttgactcatacagttggactgggcacacttaacagctgctagtgaatatatagctatatacaggacttgacactgattcggatttgtgcactctaataaaaaaatatattgatgctctatagtgcagtagcatttcatttaagataaggctcatatcgtattacccaactagttgatcaatgtgattatgtggtaccttggctttaggtttccattcgcacggaacacctttcgccatgcttcccttcctggtaccaccttcagggtcccgagctcgactacgtcg

SEQ ID NO: 565585 - DNA, 172 bp, Homo sapiens
ctttgggcaaggtggacttttaatgtttattatttttttttccgcccaaagttaagggcctaattttgggtattctgggggctgctttcatggggtggttaaatgttaaacaaaacttttgtcaacgttgaaagggttaactttgctggaaaactttttaaggacctttgga

SEQ ID NO: 565586 - DNA, 325 bp, Homo sapiens
ctctctctttggggcccactacgggcgggcagtgaggatgtgtttctatacctgacgagacctgctctacccctgcgcacctggacctcgccaaggcttcccaaagaggctcaggctgcccaacacaggctggtgtgcatgcccatccccagaggcagccgggtagcccggggcaggggccgaggacgagcagcagcagctggcggtcaaacggtacagcctggtggagaagctgggggagctgtgtggctgggtgcccacgcactgggtgagggccagttccccttccccactgctctgtcggccacccccacagagagagcgt

SEQ ID NO: 565587 - DNA, 246 bp, Homo sapiens
gtagctgggcaggcgcctgccaccacatccaactaattttttgttgttttttggttcttttttttgaaacggagtcttgctctgtctcccaggctggagacagaggtgccatcttggctcactgcaacccctgtctttggggttcaagggattctcctgcctcagcctcccgagtaactgggattacaggcgcctgccaccacgcccagctaattttttgtatttttagtagagatggggtttcac

SEQ ID NO: 565588 - DNA, 162 bp, Homo sapiens
cccatcctcctccctgggggggtgcctgattatccctcaggcagggcctttcagtccttgtgggtttgtgtcccccccatttcagttttggcctggctataaggggaggaggaatgggaaagggggctcaggggccaataaactttcccttgagtcctccta

SEQ ID NO: 565589 - DNA, 81 bp, Homo sapiens
  misc_feature (37)..(37): n is a, c, g, or t
  misc_feature (54)..(54): n is a, c, g, or t
agataattatgttcctgaggtctcagccttggatcangagattattgaagtagntcctgacactaaggaaatgctgaagct

SEQ ID NO: 565590 - DNA, 105 bp, Homo sapiens
ccggactccctgcatcagctcctcgacgcttctcgcgagatggagcagcagcaaactttctgcggtggccctgggcggcgtgctactggatggtggccatgcggc

SEQ ID NO: 565591 - DNA, 144 bp, Homo sapiens
gcagacaagacacaagtttcatgaaaagattggcacagctgtatcggcacatatatttgggtgtaagaggaggcacgttcagaaactatgacctactatatcttctttgctttatacctattgactggctatgagagtagttat

SEQ ID NO: 565592 - DNA, 400 bp, Homo sapiens
ggatgttcctttgtctacaataacagtttattagccataaagtctagaagaataattctgttagccataaggtatttcatatatcataccctcctctatctccgttttcccccagttgagttcttgtgaaggagaagggactttaagaacagcaggtcattttaaaaaaatgaacttactctcaccagtaggtaacactgcagtagcaagttcaaatcccaaggcagtgctcaagcaatggccaagtcgtggcttgcttcaaaccaccacccggtcttatcggcactcaatgcatttcaacatccagccagtcacagcaacattcgtttcttcatgcagttccaaactcattctcacaacatccaaagcaccaaagggcaaaccaccgggtcacccgagc

SEQ ID NO: 565593 - DNA, 375 bp, Homo sapiens
acactcatcatgctctcagtaactaagactcttcacacattccacgaacactgtatttaggaggagggtctgttctgtgccaggtgctgggaggcagaagtaaccaggacagggtccttagagagacttactctgcattggaagaggcaaagcaggaccatggtagcaagcccagagcaaacagaagagcagggctattttcacagagcaagctgggcgtggctcacgcctgcactcccagcacttcaggaggctcaggcgggaggatcgcttgagcctagaagttcgaggctgcagtgagctgtgattgtgccattgcgctccagcctgggtgagggaacgagaccctgtctctcagaaacaaaatggcagatg

SEQ ID NO: 565594 - DNA, 195 bp, Homo sapiens
  misc_feature (16)..(16): n is a, c, g, or t
  misc_feature (55)..(55): n is a, c, g, or t
gaaacaaacattagcngcccgaacaactggattgcagatgattacaattgtccantcacagatggcatcacctctactattattaatattagttttaattgccaaatcataattgtatatatttgtagagtacaatgtaatattttggtatatgtatacaatgtgggatgattaaatcaagctaatatatccagc

SEQ ID NO: 565595 - DNA, 370 bp, Homo sapiens
  misc_feature (12)..(12): n is a, c, g, or t
  misc_feature (132)..(132): n is a, c, g, or t
  misc_feature (156)..(156): n is a, c, g, or t
  misc_feature (163)..(164): n is a, c, g, or t
  misc_feature (170)..(170): n is a, c, g, or t
cgacacgatgcnagaagacgacagaaggggatgcgataggaatcatgtctggtcgcggcaaaggcggaaaggcggggagggtggtgctagcgcctcgtaagtgctccgggataactccgggcttacaaaacngctatcccgccgggctcggcgcgntggcgtnnagcgcntttccggtcttatctatgaggagactcgaggtgtgcttaggcttagagaacgttattcgagacgccgtcacctatacggagcacgccaagcgcaaaactgtcacagccatggatgtagtatatgccctaaaacgtcaggggcgcactctgtatggcttcggcggctgaatctaagaatacgcggtctcctgagaacttca

SEQ ID NO: 565596 - DNA, 306 bp, Homo sapiens
  misc_feature (274)..(274): n is a, c, g, or t
aagggcaaaagcttcaagacattggatttggcagtgatttctcagatatgacaccaaaagcacagacaaaacaagtagatcaattggacttcatcaaaatttaaaacttctggtctcgaactcctggcctcgaacgcctgacctcataatctgtccgactcggcctcccaaagtgctgggattataggtgtgagccaccgtgcccggccctaaatttttattttccactctgttgcccaggctggtgtgcagcagcatgatcacaactcactgnatcctcaacctcctgggctcaatccatcctcc

SEQ ID NO: 565597 - DNA, 710 bp, Homo sapiens
tatttggggagatcacatgcggtttaataggtgggaggctgagagcagcatttttaccaaatgggtgtaaaaatgaacggggttccagacgtgtacactgacagttacagataaattttcaaaatctccaagcagcaatttgtgaactcattttcgttgaaaaacaaacacagacaaacaccaaacatgtggagttgtgggtgcccggcgccgggcaataagggcagcaccccagcgggtgtggcgtgctgcgggggagcccgcgtgggtgtgtgtggccggggccctgtggtggtgccgtgttgcgaggggctccccagctctcctctcgagggaactgtggccccagcgaacccccccacactctccaggcgggctgtgaagcccaaagtgcctgtggcccgaaaagaagagagagtagcgcccaggcaagccacagtagcaagtggcctattggagagtgagagcatgtgcgctcgtgggaggcccccgcgcgagggggggggagcacactcttcgtgggggaggacacaatgtgcgggggcggcacatagagtgtgccggagagaacccccaaacaacagcgcgtgtggcgcctgaggagagagaagagtctctcatgagagccaaggcgggtgtaggaaacaagagcgccctgatggggggaggggactcctcaataccacaaaagcgcaaacgtggcgaaacat

SEQ ID NO: 565598 - DNA, 170 bp, Homo sapiens
acacgtcgtaccgcgacctgtggactggtggggactgggtgtgctgctctacgagatgcaggttggcgagtccccattcccaggggatgatgaggaggaggtcttcgacggcattcgtcaacgaccgagtttcgcttaccccgcgcttcctgtacagcaccttcaagtgg

SEQ ID NO: 565599 - DNA, 118 bp, Homo sapiens
  misc_feature (96)..(96): n is a, c, g, or t
  misc_feature (99)..(99): n is a, c, g, or t
gcggccgcctactactactactgctcgaattcaagcttctaacgatgtacggggacatgccagataccctgcctgatacaggggaccaccagactnatnagtttaaaaaggaaaaaaa

SEQ ID NO: 565600 - DNA, 800 bp, Homo sapiens
tggaaagatttggttttggtttccacttgacacagtgaaggaaaaatatatttataaatccgcactggagggaagaggtctttggaacacctccccgcctgggtggggcaagaagacccaaaccagccttgctgggaatgttggctctgggacataaatggttgggaactcctacccccagtagctcaatggcaaccgagactgtttctgagacgcccccaagaatctggatccaaatcccgggacattataaacgagaccgccaaagaaagacagggggctggtctctaagcacattctctcagaggagatgtctgtggggccccctttccacagaagcgccaagcgtgcaaagaggagagggcataagcgcccagtggcgcgggccccggggttataactttataatattccgaaacaagaggtgcagcggacagcccgtgaagcgtggccacgtgggaagtgcacacaagaacggtgtctcgtggagaagcgggtctcaagcgggggaaccgcgccgggcgggaaccgtgctcgcggcatgggactctccaaggccgtctaaccaaaccggcgggaaatgcctcgtgcaagtctccgcagtgggtggccgccttcttttcctcccgccgcaagagttgggcgccgacaagggaccttggacgttggagagacaagctgtgaaagagacgcggcattgtgagagtccaagagcccggagtccattggcgcaccgaaggccaggagactgggcgggccagggacgggcagacttgtgcccgtccaggggggcccccgcg

SEQ ID NO: 565601 - DNA, 244 bp, Homo sapiens
ggtggatggcagccagggggaagcccaaagcacagatatggctgtttatttttaaattttttttgagacagaatcttactctgtcacccaggctggagtgcagtggcatgatctcagttcactgcaacgtccgcctctcaagtccaagcagttctcctgcttcagcctcccgagtagctgggactacaggcgcccgccaccttgcccggctaattttgtatttttagcagagatggggtttcgc

SEQ ID NO: 565602 - DNA, 1802 bp, Homo sapiens
  misc_feature (22)..(22): n is a, c, g, or t
  misc_feature (61)..(61): n is a, c, g, or t
  misc_feature (92)..(92): n is a, c, g, or t
  misc_feature (98)..(98): n is a, c, g, or t
  misc_feature (175)..(175): n is a, c, g, or t
  misc_feature (182)..(182): n is a, c, g, or t
  misc_feature (397)..(397): n is a, c, g, or t
  misc_feature (399)..(399): n is a, c, g, or t
  misc_feature (414)..(414): n is a, c, g, or t
  misc_feature (570)..(570): n is a, c, g, or t
  misc_feature (862)..(862): n is a, c, g, or t
aaggcaaaagagcttaacatgnaaatgcacttggccgggaaaacagggcaagccaaggctntcctggcccggctggccttcatccggaaacngcgggnggaggctgcccggaagaaggaagaggaaaggaaagcaaaagacggtgccacattttcaggaaaacaaaagaaataantctcccngaataagtaactgcaacccgtgggagaagatgccggggacctgggccgcgctgccaggacatctgctatatctcgcccaccctgtgacctggcgccgctgcaacagcccctcatggccaggagccccccatgcctggggcctcctcttcatcttggaacagaaattgtttgggggatggggggggggactgggggaggggtagctgctatctttnanacagaaagatgcagnacagcatttcatatgtaaccatttgaatgtttttgctgtttttagaattcagagcccttgctggggggtgcctgggagatggggtaagaagagctttcatttgtctggtagatagatagcatgtaagggggtggttgtcccaggaggcagctgctnacaggtttgcatacacacagccccggactgtgttgcctgggtgctcattcagagaggggctatcatctgggagcctgtgcccctgggtcctcgagggtcatggcttgtccctggtcagtcctgtctgactgacctcagggcctcacctctctgcccttccctgcccggttcctactcacctggctagggccagtgcccattttcagccctacccattgatcatttcaagaaacctctgtttactgtgtggcacccaggcaaaacatgctccacaaattcaacttgtatattnggcagattaaacttgacattatcgtaaaaaaaaaaaaaaaaaaaaaaaaaaaaaaaaaaaaaaaaaaaaaaaaaaaaaaaaagaaaacatatagaaaaaaaaccaaaaaaagaagaaaggcaaataaaaaaaaaaaaatggcgagagccaaaacttacattactgagacaacaaggaagcaaaaaaaatggaggaaaaacaatttaataaaaaaaacatatagcaacactaaaagagcaatcaataaaaaaaacaagataaaagagaaaacacaactcctagccacaacttaaaaacggaaacaaaagcaggagaaagcacacacaaacaaaatatagcgaaataataaaagttgtacaagtaagatagaataataaataaaagaattataatatgtggttaataataaagctatattacaatcagaagattagattaaaaagttaatgagagcaagaaaaaggatataggaaataagacgagatactaaggacaaaaagaacaggatcagaaacacacagcatattatatagacaaatataataattgaataaatttatggaaagtaaaataataaaacaaacacaaacaaacaaaaaaaagtaaaaaagagaaaaacaaaaaagaaggaaagcaaagcgagcgaaggataagagaagagcagggagacgaggcaaaagaaaggagagacaagaaaagaaaagaagataaagaaagaaacagaaaaagcaaagcagaaagaaggaagaagaaacaaaaaaaaaagagaaaagaagaacaagagaaagagaaaggaaggaaaaaaagaacaaagagaagcgagagaaaaagaaaagagagcgagagaggagacaagagagaggagagattaacgagaagcagcaaaagaaagcaaaagaagacggaacaagaaagcaagaaatagagacagacaccgaag

SEQ ID NO: 565603 - DNA, 1855 bp, Homo sapiens
  misc_feature (22)..(22): n is a, c, g, or t
  misc_feature (61)..(61): n is a, c, g, or t
  misc_feature (92)..(92): n is a, c, g, or t
  misc_feature (98)..(98): n is a, c, g, or t
  misc_feature (175)..(175): n is a, c, g, or t
  misc_feature (182)..(182): n is a, c, g, or t
  misc_feature (397)..(397): n is a, c, g, or t
  misc_feature (399)..(399): n is a, c, g, or t
  misc_feature (414)..(414): n is a, c, g, or t
  misc_feature (623)..(623): n is a, c, g, or t
  misc_feature (915)..(915): n is a, c, g, or t
aaggcaaaagagcttaacatgnaaatgcacttggccgggaaaacagggcaagccaaggctntcctggcccggctggccttcatccggaaacngcgggnggaggctgcccggaagaaggaagaggaaaggaaagcaaaagacggtgccacattttcaggaaaacaaaagaaataantctcccngaataagtaactgcaacccgtgggagaagatgccggggacctgggccgcgctgccaggacatctgctatatctcgcccaccctgtgacctggcgccgctgcaacagcccctcatggccaggagccccccatgcctggggcctcctcttcatcttggaacagaaattgtttgggggatggggggggggactgggggaggggtagctgctatctttnanacagaaagatgcagnacagcatttcatatgtaaccatttgaatgtttttgctgtttttagaattcagagcccatggcctggggcctcctcttcatcttggcacagaaatgtttgggggatgggggttgctggggggtgcctgggagatggggtaagaagagctttcatttgtctggtagatagatagcatgtaagggggtggttgtcccaggaggcagctgctnacaggtttgcatacacacagccccggactgtgttgcctgggtgctcattcagagaggggctatcatctgggagcctgtgcccctgggtcctcgagggtcatggcttgtccctggtcagtcctgtctgactgacctcagggcctcacctctctgcccttccctgcccggttcctactcacctggctagggccagtgcccattttcagccctacccattgatcatttcaagaaacctctgtttactgtgtggcacccaggcaaaacatgctccacaaattcaacttgtatattnggcagattaaacttgacattatcgtaaaaaaaaaaaaaaaaaaaaaaaaaaaaaaaaaaaaaaaaaaaaaaaaaaaaaaaaagaaaacatatagaaaaaaaaccaaaaaaagaagaaaggcaaataaaaaaaaaaaaatggcgagagccaaaacttacattactgagacaacaaggaagcaaaaaaaatggaggaaaaacaatttaataaaaaaaacatatagcaacactaaaagagcaatcaataaaaaaaacaagataaaagagaaaacacaactcctagccacaacttaaaaacggaaacaaaagcaggagaaagcacacacaaacaaaatatagcgaaataataaaagttgtacaagtaagatagaataataaataaaagaattataatatgtggttaataataaagctatattacaatcagaagattagattaaaaagttaatgagagcaagaaaaaggatataggaaataagacgagatactaaggacaaaaagaacaggatcagaaacacacagcatattatatagacaaatataataattgaataaatttatggaaagtaaaataataaaacaaacacaaacaaacaaaaaaaagtaaaaaagagaaaaacaaaaaagaaggaaagcaaagcgagcgaaggataagagaagagcagggagacgaggcaaaagaaaggagagacaagaaaagaaaagaagataaagaaagaaacagaaaaagcaaagcagaaagaaggaagaagaaacaaaaaaaaaagagaaaagaagaacaagagaaagagaaaggaaggaaaaaaagaacaaagagaagcgagagaaaaagaaaagagagcgagagaggagacaagagagaggagagattaacgagaagcagcaaaagaaagcaaaagaagacggaacaagaaagcaagaaatagagacagacaccgaag

SEQ ID NO: 565604 - DNA, 552 bp, Homo sapiens
atcctgcagctagcgtcgcaccaatacgagacacggcccagtccactgaacatcatcgagacacggcctcctctacaacctctatctgtgtgtgtgggcaggtgctggctgggcccgggagctctgcagagtgacctgtgtcaggactggttccatgggcggtgtgtgtcagtgcctcgcctccctctagctcgtccgcaggcccaagtccccacctcatccccactgctgggactggctgggaaatgggaacaatctgtgtcatgtgtatcgctcagcgcccggctggaacatcctggactgtggtagcctgcagaactgctgtgcgctgccgggcgagcctcgtgctcaagagagggcacactgcaggcggccagagcctggctctgagtgtgatgtctttggaggtgctgactccgcaagtacggtgaactaactgagggctctaatacctgagcctgttgaccctcaaaggatggagtatgctaagtcagttctgaaatgacagtacgctgaagaccgagagtcagtaaaattgtggcttgcatatgc

SEQ ID NO: 565605 - DNA, 977 bp, Homo sapiens
  misc_feature (93)..(93): n is a, c, g, or t
  misc_feature (456)..(456): n is a, c, g, or t
  misc_feature (463)..(463): n is a, c, g, or t
  misc_feature (469)..(469): n is a, c, g, or t
  misc_feature (486)..(486): n is a, c, g, or t
  misc_feature (488)..(488): n is a, c, g, or t
  misc_feature (495)..(495): n is a, c, g, or t
  misc_feature (508)..(508): n is a, c, g, or t
  misc_feature (511)..(511): n is a, c, g, or t
  misc_feature (540)..(540): n is a, c, g, or t
  misc_feature (542)..(542): n is a, c, g, or t
  misc_feature (562)..(562): n is a, c, g, or t
gtctcctggagagacaggaaggcaattgggaaggcgtgagcagacagaaccacagactccacaattgcctcctggagagacaggaaggcagcnggaagaggagccgatgtacttactgggaagcagaaacccctagattccatcctggctgctgctgtttgcaagtgtcaaagatgggggggcgtgtttatattttatatttctaagatggggtggcataggaaatagggaacagatgtgtaaaaccagatgggaaggacagtctgtgagaaaggagcaagcagttgctgcaggtgtgggagagcaaagcccttctccacgtggaaagagcccagatggacgctaagcatgttgggcacctgtaaccccgcactcgctggactgacggtgtagctcagtggtggagctagtacttggaacgcctaagactctgggttcagtccttggggggggggnatgtgtnattganaggaaggtgtacgtacngnaggtcanaggacagcttacnggngttgtctctctccttcagctgtgagtccngnggaatgacctcaggtgtcanagtggggggcaggtgccttgggccagctgagccatctgtgctgtctctgctttaatttaaaaaaaaatgaagcacaaagggggggcgcgccaccgaaatatccccgccagggggccacaaaacagcgcggcccagagtttcgtggtgaaacgtgggcccaaaagagagcggaactacagactagacacgtgccgccgtacacacgccggtgaacggaaaccagcgctacttggaaacctgggagaggaaccataaccgtgggggggcaccacactgtgccaaccacccacggagatacaaggcaccggaacataaaacaacaaggcacagtgggcaccagacgcactgtttgggctcaaccatgctcgcgcctctatgaatacgcgcgtcatatcacagaccccgccaacacaca

SEQ ID NO: 565606 - DNA, 400 bp, Homo sapiens
tgagtaccgatgccacgttgctttatgaaaccgagttggcaggatgtctgaggatccaacggttatgatcactacctcccgataccgcagttgccgctcaagatgttgctaaggagctgatgtgttgtcccgggcgcgcagtgaatgaaccgagttcgacatgaagtgggggcactggtgcgagcctgcaaagccaatggtgtcaccgatctgctggtcgtacacggagcaatcggggcaacacctgtggggctcatcggtcagccacctgcccttcggtcctactgcctacttcacgcttgtgcaattgtggtcatgcggcatgacatcccaggagaggaaggagcggctgaggcgcgcgttgaaagaaaaccgcctgattcccactgagttacgccga

SEQ ID NO: 565607 - DNA, 264 bp, Homo sapiens
ccccccggggccaaccccggggtgggggtatttaaggcccaaaaaaatgggtcccaaagggccccctttgggcccccccccctttttgggaacaaagggaaaggttttcccgggttttttttttaaaaaaaaaaggcctttttgggcccctttttttggccccccttttttttttcccccccggggggggggggggcccttttccccctttttatttttttcccttttccccccaaaacccctttaaattttgggttttcccca

SEQ ID NO: 565608 - DNA, 613 bp, Homo sapiens
cgctttccgtggagacttgtgagtcgaaggccgtgagtcagccataattggcatggtgaagaaattaatgaagactatccagtagaaattcacgatgtattttgtcagctgtttgagaattccattggttgctgtggatgagattgctgaagacatgatgtcatgtttctagaaatgagttgtatgcatgaagttggatccaacttgacacaatgcaaaagtggattttggtttcttgcatacacattacaattcactgtttgtgggttatattttggcaacccaaaggagttaattcctaaagtgaacatccagtaagaaccatggcactttggaacagaatcaacgacgtatactatagaacaggaagtcaaggacacatacacaagaccaacgaacagaagtgctgggcaaagctcgccacagcatgttgcacagcttcaaggacttagtgtaaaacaacattggcccctcctggcggacaccaacaatctgaagcaaatgcacatcaaaatatgttgccaataaaggggaaaacacgttacaaacagttaccataatgtgcgccaatgactgtacaacatattcaaaaaacagtacaatctttacccca

SEQ ID NO: 565609 - DNA, 277 bp, Homo sapiens
ctgacatctgatcggccagagcaatgatcaatgcccactacctaaaagaaaggctgagaaattgttggggctctgcccttatgcccttagctcacatcatctttctctaacctgctgtatggtcccattggatgtaactaatgtatccatcatcaaactatggagcagatgccaagagaatctgaggcctcacttttggcaatattaatctgctgagccaatactagcaaccactactgtacaggttccacattacacgagagactagctgaggcca

SEQ ID NO: 565610 - DNA, 248 bp, Homo sapiens
  misc_feature (149)..(149): n is a, c, g, or t
gcagtcctaatggactgtactttgtctgcatttttgaccgcatgctcaagaaacaaatctgtgagtttacttgattcctgggacagccctttgatttttgcttccaaccgttcattctcttctttgagctgagtgactctctgcagtgngccttgtgctttctgcttgcttttcaaccggctctttttcacagccatgttgttcctctctcggcggtccgatactcgtcactgtttcgatccatgggc

SEQ ID NO: 565611 - DNA, 343 bp, Homo sapiens
tttccccccccccctttttaaaatttttcccgtttaaacttggccggggggggaacccccccagtggtttcgttttggggggtttcccccaaggaaaatttttagtaaacggggggatttgggccaaaaaggtttttgctttttttttgtttttttttttcccccccaccggttaggggggaccctttttttttttgtgggcccaatttttttttttttttatgtttttaaaaatgccccttttttgtttttttttattggggggggaaaaatttttttttttccccggttttgaaaaaatgggggttttttacccggaaaaaacccttttgggggggtttta

SEQ ID NO: 565612 - DNA, 394 bp, Homo sapiens
  misc_feature (33)..(33): n is a, c, g, or t
gaaccggcccgctatccggttcaatgattgtgntcccacaagaatataataccatatttttactgtaccttttctatgcttagatacaaaaatagctgggcatggtggctcacgcctgtaatgccagcactttggaaggctgaggtgggcgaattccttgaacacaggagcttgagaacagcctaggcaacatgacgaaactctgtctctacaaaacacacacacacacacacacacacaaacaaacaaaaattagccggttgtggtggtacgtgcctgtagcctcccaaagtgttggcattacgggtatgagcttccacacctggcctccaagttttggtatagtttttttgtgtgcccattattgaaccggatagctcgcgggtaccgagct

SEQ ID NO: 565613 - DNA, 251 bp, Homo sapiens
ggggaagaggccggcgactgggacgatgggctccaagggcaaagaagcgcgtgctgctgcccacccgcacgcccagtgacaactggagttgcggtcgcgcaagtcagtgtcacatcctggcccgaaaccccagtccttcagatgatgaggtgcgagccggggagcagctctacacaaagcggctacgtgtgcaacacgtgacagcggcacgtgctgagcaagtgtgactctgcacgagcgcgagactgacg

SEQ ID NO: 565614 - DNA, 102 bp, Homo sapiens
ctaccgacggggtggtaatctcacgacaccatactgagtgtatgctcactccccttccaccctcagcggatgataatctcaagacacctcccgagtgtcagc

SEQ ID NO: 565615 - DNA, 243 bp, Homo sapiens
gagctttaagaggcaccaaggagggtggcgtgatcttagtgactgcagccttcacctcccaggtcaaacgattctggtgcttcagtctcctgagtagctggaattacaggcgcgcaaccactacgcccagctaattttttgtatattttagaagagtcggggtttcaccaatgttggccaggctggtttcgaactcctgacctcaagtgatccgcctgcccgcctcagcctccttggtgctgg

SEQ ID NO: 565616 - DNA, 893 bp, Homo sapiens
  misc_feature (314)..(314): n is a, c, g, or t
tgtccatcctgggcgcagctcaacgttgatgacaagatccagatcatcaataatatgctgcacaaaggcactgagatgattatagctgagtggaatggcttaacacccttccttaaggtgctcaaggacatggagattggcgacttctctgtttgatgacaagaggtgagccgcgattgtcaaagagctaatgtccaaagctgagaagaatggtgtgaagatgtaccttgcctgtggatttggtcattgctgacagagtggatgagaatgccaagatggacaagtccaggtgattgattctggtgatacctggntgggtggatggacttggatgtggtcctgacctcagcaagaagtatgctgaggctgtcactcggcgctagtcagatgcgtgtggacatggtccttgtggggagtatttgaatgggaagcttatgtccggggaaccaaagctctcatggatgaggtggtgaaagccacttctaggggctgcatcaccatcataggtggtgaagacactgccacttgctgtgccaatggaacacggaggataacgtcagcatgtgagcactgggggtggtgccagtttgagctcctgaaggtaaaagtccttcctgggggtggaatgctctcaggcactattcaataatttcctgcttttaattccgggggcaaagccctaagtcaataagcactttcgatctcactggggcgtaggttaaacctccaggagatcagctatgcaaaagttgagggcgacccctaaagtgcacgatacagaatttaaggccgggtggacacttacaaccctgattttcggcacctgcgccagggctttttgcggaaaagagcgacctggagtatagggcaccaaagaacatgggacgcatgga

SEQ ID NO: 565617 - DNA, 692 bp, Homo sapiens
tgggccgggtaggataagagggttttaactcattctaaagcttggaatttaacacttgggtaacaaagttatgggtttttttaaacaatggcttggtattcaaattttatcgtggtctcatagagataacataggtagactttctccaagagggttttcaaaattcaaattatattatttcaaagatcttccaggggtagagcgcaatttagggaatttggaaacaagcgccattggagagaaaagcgcagagaaatatttggggagggataatatcctccatggcgcttttctttataaaaggggagagaagggggccataatctaaaacagggttaaacagagaagaccacaaagaagtttcaaaagtgttagattttacccaaagagaaagtgtcccactattcgtgggtgaaacccttctctttcaaacatctgggggggaaagcacccaggagacatcgtcaacgggggagaggggccattcacagggggcgacaaatattatctccagtttagcgcaaggcttacaaactgcgtggggaaaacgagaaagaagaacccccagtggttcccctttttcacaaaaggccctttcccctttcggtgggccatttcaagcaatgtggggcgccttccctttttcccacaggggggtccaaacaagatgtgggccctatttcacatgtggc

SEQ ID NO: 565618 - DNA, 730 bp, Homo sapiens
agcagaatagtcattcaccccgctggataatcgtcagcatactgacattaaacaccaaagcataggcggggatcaagcaataatctgcttcaacgttacgattcggtggggcggggggggcaacttaattctatatacggcgttcgtatgcaccaggcggggggggtacgggtcccccgcttaaacacctttttgaaaggggttacccttttggccccggccgttgaccccgggcaaccgccaaaaaaggtggacaaaaaaccccccctccccccagagctttttttttttaaaagaagctttttggaaaaaagtcccccctcgccctctttaccacctttaaaaaaaaacggcccaaattgtttttattgccgggacagaaaacaactctttaaccacccccccccttgttcaaaataaacacccgggtgccaccctcccccctgtaaaaaaaacgggaacgcccggaaccaactcattttaccgcctattacaaaacaccactttttccctttttgaagggccggaccccaatattcccggcggcaccccctcctctctttttttatcaaaaaacaaggtgttttctaccccgggcctcttttaaaaaaaaaattttctgggggggatgtgggcgcccattcccacacctttttggggggtttcaaacccccggcccgatgtttattcttgggtgtggggggcgccccattacaagaaagaaaaaaat

SEQ ID NO: 565619 - DNA, 235 bp, Homo sapiens
gcccttgggtacgccaatgtctagaaggccctttccaatgttatcttctagactgtttatagtttcaggtcttagatttaagtccttaatccatcttgagttgcttttatataagattcattctcctacatgtggctagccaatgatcccagcaccatttgttgaaaagggtgtcctttccccactattgtccactgtggtcaaagatcagttggctgataggtatctgagtcta

SEQ ID NO: 565620 - DNA, 194 bp, Homo sapiens
gtataagagatcaggtgcgtccattcagctgttggtgtatgtgctatcatccgtctggaggtcagtttgattagtcatggctgggtggtgcctggccggtcgctagatgagatatttggaggtggggatcaatagagggggaaatagaatgatcagtactgcggcgggtaggcctaatttctctcggaccaatg

SEQ ID NO: 565621 - DNA, 119 bp, Homo sapiens
accgccatccctcccaccccataccaagcatgggggtgctgtgcaggcagcagtgtggcatgacagttggtaccagtcctgatgtccctcggctgagaataaaacccatttctggatga

SEQ ID NO: 565622 - DNA, 212 bp, Homo sapiens
  misc_feature (24)..(24): n is a, c, g, or t
  misc_feature (70)..(70): n is a, c, g, or t
  misc_feature (72)..(72): n is a, c, g, or t
cagaaccacaggcacacagtgagngggcagtgtggctccctgcctgtgttgtccccatgccccgtccgcngngttaagctgctgctgtgatgtccctgcgatgggagtcttgtctcccagcctgtcagtttcctccccagggcagagctccccttcctgcgagagtctgggaggcggtgcaggctgtcctggctgctctggggaagccgagg

SEQ ID NO: 565623 - DNA, 497 bp, Homo sapiens
  misc_feature (59)..(59): n is a, c, g, or t
  misc_feature (62)..(64): n is a, c, g, or t
gatatcaactaaatagtgtgtgaatactgcactattaggtctaattatcatacaattancannngaaactaaaaaggtcagaggagaagaggaaagtgcttaatcttatttggttactatgttacctgttattcagcaaaatgttagaacacttaatatcccgatgcaggaaattctttttgtgacagtattccaatccttccattagctgtttcatgaacgacttgatatggtcctcagaaaagtgcaccaaaccagattctagcagtcccattaagtcatggtccatatactcaaatacaaggtaaaaggcacctacataaagacgaaaaaaaattaaaagcaagaaaaaaaaaagaatgctgaaataacaatgcctcaagtcctaatataattttggagttgaccacaggttctctagaaaaaacccttgaattttacagatgaagaaactgaaacgaagagtagttgaataattagtccttcctaataataac

SEQ ID NO: 565624 - DNA, 871 bp, Homo sapiens
acggcttcctctgaaaactctggtgcaaaaggtgagagacagatctggacctgcaagggtagtcccgccagcgaacatgacgtgtttgaccctgtctctgtggcgtggttggcatggcgatggaagagcatgagttacacgttagaaggtgtgatggccggtgtaatcgcaagtacgagacacctatactcattctggcggtgcctgcaatcaagttcctccaagacgcgacgagatcgcacccaacattgcccctgtccttgaaagcgattgtgtataactaataacagacacactcttctcttaataataaacatgagaatatgatacaagggagggggcgaagcctcataccacatttatccaccactttgagggcgtgcccatgctctactgtctttgtcaccagagttaccttgtgtgaaaaaaggcggtccccgtttcctgtacggagccttgattaagaattaacgtaataccgtaggtgtccccgatcgcttcttcctcttgtgtgaggccatagagcgccaaaactcttgtttgccatggaggactactatagcgatttaccagtagaccatggcagggctacctaggcggatgactaataatcctggagttggggccttttgaaacccttggtaaggactctgaggaagcctgtagggaggtggattaagagctggactgtgctttctgggtctgatcatccagttctgactattactgccttgccatgataagattcggaattccgaggataataaggttctgaactcattgtattgttcacgcggatgtccgcgcggttaaaaatttggtgttcaattaacacaaattttgtaagtgaacaaaacaacaacaaatacag

SEQ ID NO: 565625 - DNA, 223 bp, Homo sapiens
gcctcctggattcctgaagtttaggaagaaataaggtagccaagggcaaccacaatggaaggttgtgaccagcctcccaagcggccgcgcccccttttcgtgtgtgcccggtacctcggcttaggagttgcccgctgaccaccttgaatgaaggaggtccccttgccagccagcaggccgagctccaggagctggaggagcggcctccagctgcaattcgagg

SEQ ID NO: 565626 - DNA, 1262 bp, Homo sapiens
agtgagccaaggtcgcgccactgcactccagcctggccacagagcaagagtccatctaaagaaaaaaaaaaaaaaatcggtgaaaaaaaggtatcgtattcttctaacacgtttgggtgagggtttacaacaggtttttcatctataaaagtaatgaaaaaagtggtatccctttcttaagaaacattgggtcaggaagtggggtatttaaatttcaattcaagtgtgtgttttctgtggggagtgcactcagtggcgtgacctagtgggtttctcatacattggacccgtggttaacatagtgggtgacattaagatattaacgtgaccattattcactcgaatcattcctttcaattccaaaatcttatatttggggtggtatacactttatagattgtgggtataatttctcttaagggacttattgggtggtcaaatatttcagaacagttcaaatttcagtggtgttggtacactagtgcttggcgcagtgctaactaatatttctcaaaatattggggtgcctatctcttctcattaccattacaatattggcggatagaactttcacagtttcatattagtctctgtgtgtgggacaacatcgtgaatggggcataacaggatttatctgggcattggcgcatgagtgatgatgatgatgatgatgtgatgtgatgatgatgatgatgatgatgatggtgatgatgtgataaaaaagaagagggagaaacagagcggctaatgagatcaacataacgaagatcaggaaggacgcacgaataaaatcatactcacaagaagcactaggaaagtacaacaacgacccataggtagacccccaggggcgaggaaaaaccacaacgaagtagcagacacaagacacagtgagaaacaccacgcgaacaaaacacctacacaaacggaacaccaggggcgcaacagagagaacaagatcaccgctcagaggggcacgtagagggaccgcacccaaggaaagaaacgaccagcggcagcaaaattaagacaggagcaaatataaaacaaaacggacgacccactgacaagcaagaaaaaagacagggagacaacaaagaggaacaagcagaagaggggaacacacaccacaaaagggaaggagcaaaggaggaaggcaaacaaacagtcgaaaggcagccacagaggagaccggcgcccgccgccgcggcccccacaagatgcatggagaaaacaacgagcacgacgaacctaaaacacgg

SEQ ID NO: 565627 - DNA, 525 bp, Homo sapiens
atatccccatcccccaccagaaaaaaaagaaattagtatattgaagagatatctgcactcctatgtttgttgtagcactgttaactaagctaagattttgttacagcacagtttactaagctatggaaacaaccttagtgtccatcaacagacgaatgcataaacaaaatgtggtatttatacacaatggagtactattcagctagccataaaaagaatgagatcctgtcatttgcaacaacatgagtggaactggagattattatgttaagtgaaataagccaggcacaaaaagacaaacattgcatgttttcactaatttgtgggatctgaaaatcaaatcgattgaactagtgaacatagagagtagaaggatggttaccagaggctgggtagtgtagaggggggttagaaggaggtagggatggttagtgggtaaaagcaaacaaacaaaaatagaattaataagatctactttttgatgtcataatagggtgactatagtcaatgataatgtatatttta

SEQ ID NO: 565628 - DNA, 905 bp, Homo sapiens
ggagagaactagtctcgttttttttatgtgtattataaacgtaacggtttcctttatatttaaaagatcattcacaaaataccatatccataaattaactttctgtcatatagctcgaatgtgtaaggtgttgggaattccattcttacatttaaaagtcaacgggattgcccagcagtttaaatgcatgtgtctggtccttatatcttatccacatgtgacaaatgtacagtaggctcatctgaaagcactcgggttggattcacgcaccaacataaagtgcagtggtctttctccttgaacgctttaacgctgtgtggctgttatacacacaagtgggcttcatatattctctcagaaacaggcagaacaaaccttgcaccaggggtggaaacggaaacgcgaaacgaaacacctcactctcctgcaggcaacttggacgcaacaacgtgcgcctgtgttaagaaccaacaggaccacacccggaaaagcagaaagagagcacacaaagcgcaatcaacccacgacatgagcggagcacccaaaaaccagtgctacaacacaccaactatcaccaaagcgtgcaatagaaggacaccccccaagcgaggcaaaccccagacgggggcacacaagaaaacgacacccacccgtggtagccaacagggcggcgacacatccactataacacccccacgggaagataccactgagcgtgcacacacgaacctccccagaccaccatcaaacaaaacaccaagcacagcaccccacaaaccacggggcaccgcaggacaacatatgggggcaaccactccgcccgccgtccaacgagaaaccagaaggcaatcaatcttcaacgacaacacagcaccactagaccaaaacccagccaccagaacgaa

SEQ ID NO: 565629 - DNA, 1632 bp, Homo sapiens
  misc_feature (774)..(774): n is a, c, g, or t
tggcactatctagtcagagggatatatctacgaagcgggtcactattagaagggggggcgccattaacaacaaagcgcggcgacaagcgtgtaatagggtggacgacagaaccacacttgccgcggctcataatagagtcgtcgcggctaaaacaatgggtgtgatgaggaccaccacttggggggtaataactccccggcgaatggtggcgaccagaaggtgatggctccccaacaaccgccatctttttagtagcctgcacaacatgggggcaaacacccctaaaaaagccttccgtccccccccgctagatagtagtgagagcgtgttcgcacgaccgctcagaaacgtcgtcaaaaaccgtgtcgggtgatagataaggggaaacaagggggtgacgggggaacaagggttgttcatttaacgaccccttttctgcgtgtttagacgcgagaagaaagagaggtggtgtgcccgcaacatgtgtgggtgtctgtttaagagcccccacaatgtcccccgttgggggtgttggaaaaatattcgtttgttacgggggggatgattggtgcaacaccacgctggttttcctttctccagaaaggcgcttcctaacttttacaacacgctagtgttgcactaggtgacccccactactcttgggggttaagatttggggcccacaccttgtagtaatgaaaagccctctttgtcacaacgggggacatcgttcgctgaagatttttgtttgttggacccctcggaaatttggnttctcgtaaaagagattgtcacctgatactgttatatattgtatacacaaaaaaataagatatgggtgtccacatcataaagggaggttccccaacatatatggttaatggtctctaatatagaggaacacacaacatccacgcgggtgtgtttgtgttctttatattaaaaaaaatgggagaagacaaatgtcatgggtgggcgtttgtttgttaaaaataacttgggtgcgcataaagagacgtttccacacagacaccgtgggtggagattacttctcgcgcggtgttaatatctgttaatatggcacacacccctttgtagagacctcccacacccttcttgccaacagagggtgtgttttttctctgctagagattaaaaaatataggggatatatataatgtatatataagccacaaatttctacagagagcacactcttgagagtatcctcgatatctgtataacaaagagtttatatctcttgtgtctcgagagaggtggagagctagcactccggagaaacattttatccgagcacacaaatagttcttctggggacacacaaagagagagagtacacagaagagaagagagagaagcacacaaaggagcacactataatttcaatctgtaaatttactgttaggtaaaacctagcacgtaaaagagagacacattggtcacacattgctcttgagaccctgagtgagaattattataaactgaggaatcacttgtcgtttaatgctctgcacagaatgttaaaatgggaaagattaaatatgcataaacctttttttcctggatttggcagatatgtataattatcacttcaaatggttttagcacca

SEQ ID NO: 565630 - DNA, 488 bp, Homo sapiens
gagaaaacttataacttatataaattcgctaattgtagtgccctttctgccatcaagttctttcctagagtaacttaagataaaatagatatgccaatttttcccaatgaactaatttattttgggaattgcctcaaagttacagagactgtaattttcgtatagtgaaaagttaaataaaagctggggggggggggagtgcaagaaagaaagagatggagaacgagagcgagctggagatgaaccacctgcgatgagtaggccgtgtctggatcctgaatcgaacacaccaactgtaaaaatatgtttaagacgcatcgggaaaattgggacacggattcgatatttgatgtaaattagggaattgatgtcagtctttttaggcgtcaccgtagtcttgtgattatgtttgcaagttatccttttttgtagagacatgcgaaattatttacggattaaataatgtctgggattggcttttaatttca

SEQ ID NO: 565631 - DNA, 136 bp, Homo sapiens
gaagtataaagcgtgagaagtataaagcgttagaacgtataaagcgttgaggaagtataaagcgttgagagtataaagcgttgaggaggaagtataaagcgttgagagtataaagcgttgaggaggaagtataaag

SEQ ID NO: 565632 - DNA, 671 bp, Homo sapiens
ctatcatatagtaaaacccagcccatgacccctaacaggggtccctctcagaccgctcctaatgatcctccggcctagccatgtgatgtcacttccactccataacgctccttcatacatacgtcctactaaccaatcaacatccataacctatatattcctaatgaatggtcgcggaaagataacaacgagaaagcacattatccatgggccgaccatcaatacctacctgctccaacagaaggcccttcgactacgggcataactcctaatttattacctgcaggaagttccgtattcccttcgctgtggactttcttctgtagcctgtttcacccactcgagtcctgagaccttagacctcacaactgagtgacgggcgcgtggcacctcctaaaaaggccataacactcacgttcacataccctagcataatacacacctgcgctaaactgcagtacctgtatgactgctgcgattcaagggagatgatacgaaatctaccctgatgtcggtcagcatcagatctcagatatgaataatataaacagtaaaacaagaagtgatttcgaaagccacctggtgtcatgacaactaaacatgggtctctatttgatgctccctaccggccgtcagagtacttcgaagtctcccttgctcattgtaccgag

SEQ ID NO: 565633 - DNA, 667 bp, Homo sapiens
  misc_feature (437)..(437): n is a, c, g, or t
  misc_feature (471)..(471): n is a, c, g, or t
  misc_feature (522)..(522): n is a, c, g, or t
atttttttcaccctgagaaatgaggtcctaaggaagctagagccttaatggtgtggtaaggtagaggtggtgattgctttcagagtcctgtccttgaaggactggcaaatgagaacatggatatattctaaaggtgactttttctaggctactggagaagaggcaagaatggaatcttttaaggcaatgatcaacaagttagaatgtcaaagacttgggtgccctggtaaaatgtaatggtctgtataaaatcaaaatgtacaaaaacacacagcctttctgatggctgctatatagagatacttggaggttaaattctgtaccaaatttcaaaacttaatagctgcttttgcatgtgtaaaattagttttcagtatgcaagaatatgagagactagaatagtgtattattgtcatatcataagggctttataattntgcaaggtattttatgtaacctttttggttcagnacaaacataatgctaagtgcgattagaagattattttcccagctagcgtgngggaggtcatgcctataatctcccaagacttttgggaggccgagatgggagaaattgtttgaggcccagcagttagagaacagccctgagcaacataatggaaatcccatctgtgcccaataattttcattgccggcttcgggcg

SEQ ID NO: 565634 - DNA, 1653 bp, Homo sapiens
  misc_feature (67)..(67): n is a, c, g, or t
  misc_feature (671)..(671): n is a, c, g, or t
  misc_feature (1336)..(1336): n is a, c, g, or t
gtcgatcatctaagccaatggtgatgtccaccccacacaccatgtggatattcatattgatcgtatnatcacgcccgtgatatatatatggtgagctccaacaacgatcctcgtgtctccttgatatatccacgctgcttgtgccacccaactagattatgtggggcgactccacaaggttgcttacacactttgtcgcggctaattttccacacgaaatgagctcgttttctcaagacgagtgtctcgcccacatacttccactacacctccaccacaacgtgtgttgtatatgcacaacaagggagatggttgtgtttttataaggatgcggcttgttcaatgttataaaactattgtctgtgtgtgatcttgttcggcgatcattaccaaaaatattatttgggggcgggctcagcaccttttatgatccactcgtcgttgtcgcccgcagtgagagagaagttatttgtctgtggtgattgtgtggtgttggaaattacatccgcacacccctccgcacagatgaatgatgtgtttgtttggtggaaaaattggcggtttcttctgtggtgggaatacatagaaatgttgtatagtgtggacatgatgtcgccccgtcccggcagagagaactgtttcgccaccgacgagaacgcgggttaatctantccgtgcgtgggaagaacaaacaatcggttgaatggtaatggctgtagcagaaccaatgaagattttcttcgtctgccccgcgctttgtgctcccacattatatatcgcgccccacaatgttgttatccttatatcccacagaagaaatgttttccccccccgcccacattaatttgtgaaacacaccccttcgtagagttataatatcgccccccacacacctccgtttgggagacctcgcgcaccgtctatgttgtaacacaccagctttcctctttgaaattcttgtggttcctctttttttgaagagttttaataccccccatctagattggagatgatcccgcactctgtccctcggatatgaaaggaagacaccacatcttttaatatttgagcccacattatagatacgagatatccccctctcacgcgagatatatccacagagctgtccccctctgtctccaccaccgcgttggggcacatctgtgggctcgcggagacataaaaggagagcacttgagtctcgctcgtataggtcccacacaatgggggtgagaatatacctctccccacaaatgtgcaccgctcgggcaccactgtacacacttttcaccacacattggtttctaagccgccgctcgtgtccacgcgagaaggngtgttcgcactccacaatgggtggagggcaccacacgcccctcgagaatgccacagagaagcgcgctctccacgctatttctccccaaggggtgaccctctctcacggccacagcccacagctgtgacacctgctcttataactgccactctttttctatattgcgctataaacccacgatggtttcctaaggaaatcaccacggctttctgaggcaccacagctgcacttataaacccacaaggaaatttctccctttgaacttgtcccgaattccctcttgtaaaggatattataatgttgcctttaaccctgta

SEQ ID NO: 565635 - DNA, 113 bp, Homo sapiens
ctggaatactgctgagtggtttgctgactcatatccaatcaatatccaattgccctgggacagcgcgggaagtgcgattccagcctcccatttattctttcacctatttggat

SEQ ID NO: 565636 - DNA, 266 bp, Homo sapiens
aagaatctctctggctcaagttctaagtaggttggattaccggtgtgcaccaccatgtcctggtaattttagtatatctttttttggtagagacagggtttcacccatgtctcctgagtagctgggactgcaggtctgtgccacctggctaatttttttttcttttctttttcttatctttctttttttctttctttctttcttttatttttttttttggaaaaaaatttttgctgtgttcccccggctgggttaaagggccttgc

SEQ ID NO: 565637 - DNA, 275 bp, Homo sapiens
  misc_feature (164)..(164): n is a, c, g, or t
  misc_feature (269)..(270): n is a, c, g, or t
ccatttggctggctgcacatccttcacctgaagtcagtgcttcagcccggagctgccccttgaccatctcttctcctctccacgtgccatcctcactccctgggccagcctcttctccaatgccaattcccaactcctctccccttgactagtcctggtgtccntctacatgtgtcacgttccatttgtcatctctcactcccccatctctgtccccaaccacacttccgtgcccctagcctcgtgctccacttcaccaatcccctatnnctcag

SEQ ID NO: 565638 - DNA, 163 bp, Homo sapiens
gcggccgcctactactactactgctcgaattcaagcttctaacgatgtacggggacatgagaatcgtttgaactcaggatgtggaggctgcagtgagccgagatcacaccattgcactccagcctgggcgacacagtgagactctatctcaaaaaaataaaaa

SEQ ID NO: 565639 - DNA, 469 bp, Homo sapiens
  misc_feature (38)..(38): n is a, c, g, or t
  misc_feature (64)..(64): n is a, c, g, or t
  misc_feature (67)..(67): n is a, c, g, or t
  misc_feature (73)..(73): n is a, c, g, or t
  misc_feature (77)..(77): n is a, c, g, or t
  misc_feature (79)..(79): n is a, c, g, or t
  misc_feature (108)..(108): n is a, c, g, or t
  misc_feature (127)..(127): n is a, c, g, or t
  misc_feature (136)..(136): n is a, c, g, or t
  misc_feature (140)..(140): n is a, c, g, or t
  misc_feature (185)..(185): n is a, c, g, or t
  misc_feature (192)..(192): n is a, c, g, or t
  misc_feature (218)..(218): n is a, c, g, or t
  misc_feature (226)..(226): n is a, c, g, or t
  misc_feature (259)..(259): n is a, c, g, or t
  misc_feature (303)..(303): n is a, c, g, or t
  misc_feature (345)..(347): n is a, c, g, or t
  misc_feature (350)..(350): n is a, c, g, or t
  misc_feature (360)..(360): n is a, c, g, or t
  misc_feature (364)..(364): n is a, c, g, or t
  misc_feature (461)..(461): n is a, c, g, or t
cccctcgcacagcttggacttacaggccactcacctcnaacaggggagatagttacccatgtantgnaaaaanaggnantaccggaagcagcctagggcccagaagtntggaagcctggagtagagntgggtcggnggcnaggcttgctgcactgtgccgactgctcccagggtgacggcctgtncccagtncggaatatggcccatagagaggatgntgttaggnagaggctctagcatctggcttttattggttgcntttcttaaacccagcattttttaaaaagttacctgaggtggtantttagtcagggctggagataggggtaggtcagttgtcagttnnnagntgggtaccgntgtngcatgatgggtgctttatatgtagtaccaggccaagatttcagcagctagggccacaccagcggccaggatgaactggaggctgggcttcctcagcncagccata

SEQ ID NO: 565640 - DNA, 316 bp, Homo sapiens
tgacttccgtgtcaacgcgagaacctctctgcgtttggcgtgtgtcctctctgcgtttcaaacgcagagaggatcagcaagcaggagtattccttggtcaacgcgagaacctctctgcgtttgacgtttgtcctctctgcgtttgaaacgcagagaggacgttccgttgctactcttctcactcttctttgcgtatgttagccgccatatatgcttaatcgctactgcaacctcaccacttacccattccttacccattaagctttgctagtcttgaccgttccgttgctactcttctcactcctctctgcgtttg

SEQ ID NO: 565641 - DNA, 190 bp, Homo sapiens
  misc_feature (141)..(141): n is a, c, g, or t
ttgagggtcttagggaccaaagctgataaaatcagtcacgagtcccacggtgtttagtggtgtctttcgactgttataattttctacttctttatcttaagtatgtagaaccagagagagacagtgcctcttttatgtttnctggtgtttgtagcacatttcggtttgttcatggttagggtctacgctg

SEQ ID NO: 565642 - DNA, 356 bp, Homo sapiens
  misc_feature (315)..(315): n is a, c, g, or t
gggcatcactgggtggagggctggggtttctcctaaccagaacagagtgcagtggctggcatggatctgtggttacctctgggcagagctggactcactcaatcctcttgggatgtgaggtgagctcagtgaccctcactgagcagggtctgagcaggtgaggccaaccctcaaacaggtggcactcatctcctttagggctgggaatgaggtgcaccaggtgctccgagtgatggggcatttgtgccacaggaagcctcatgattccccttctcaggtatgtgactcagatactgattcctcttcccaggctgngagattaaacaaactttggtttcacatgatgcccaacatgg

SEQ ID NO: 565643 - DNA, 138 bp, Homo sapiens
ggacccacttgaggacatcagaagagtctatagagttaccttactgtgctggcttgaaacatcgtcaagacgtaagagatcctcttgccaggattttatgttgatccaatgacttgctaacagacacaagattcgaga

SEQ ID NO: 565644 - DNA, 1169 bp, Homo sapiens
  misc_feature (1169)..(1169): n is a, c, g, or t
gggatttgggctgagtgaaccatctagaaaaagtagagctttgagtattatcgattcctattatagaaacggtcatcttgctcggtctcccaggctggtacgtactagtggctacgatctccgagctccttgtccttgcaacctctgtcagttcccatggtaggaatgtgacatgatacccaggcaggctggcagcttgccatgagccaatatgtcgcacacatgcactccagcctgggtagacatgagagtagagtctggttctctaaaataaaacacataaatacacaaaagacatagggcctaaatcggtgcgccaaacagagtctcataattaacgtgagcgcagacatgagcatgaacatttccacacaaaaaaacactaatattagaagtccaattatcaatcacaacacgcagcgagggcgtatttatcatgtaaggcgagtcgataccccggcgtgactgaggtctcttcaaaactcaaaaagtctaatcatacaacgcctattttagggctgtttcgccgcggaacctttgcagcttctagcgaagaaccccgcgggaatctaacacactcaactttccatacattgctttaaatctgaggactgacaaacttctttaaccccactaaatataaggcgactgagggcaagtactttaacccatctctcgttatcaagtcacgagacggagggggcaaactaattccagcgcagacccaataagacgggtcttaccccgtgcgtcataggtagcaacgtgtcaaaccagggggacccttggaacctcccagggagaccaccccataatccaacttttccaacaaggcccccacatagaaaaaaaccgcgtatacgtacgcaccaagacgcgcggaaataaaaccgcaaccgacctccgcgcacgcagagcaaacacaccaggacagtattaccccagcgcaataccgcgcgggggagaaaatcccaaccggccgaacctggaggggggaacacccccaaggcaccatacatatccggggcggcaagaaaaaacagccatcatgcggctccaccacaccacgaccaaaacacccatctacacaacgcgcgtctaacgaaacagccgccaaccacaattacgcgccgtacaccacccactaggtgccacccgagcgctgacan

SEQ ID NO: 565645 - DNA, 243 bp, Homo sapiens
ccacctcagcctcccgagtagctgggactacaggcacgcgccaccgcgcccggctaatgttttgtatttttagtagagacaggatttcaccatattggctggtcttgaacttctgacctcgtgatccacctgccttggcctcccaaagtgctgggattacaggcgtaagccaccgtgcccagccaacaatgctttatttcttgactctctttctacacccctactggaaaagactaatttggg

SEQ ID NO: 565646 - DNA, 1013 bp, Homo sapiens
gagtgctcggcggcagccgggctcgtagtgtacgtgccactatgagggtccgtccaatgaacgcatcttctggagatgaagtgatggctggccgggacgacggcgtgagtgtctggcaaccggggcgtgccaccgtttttatgccgcctgcggcaccgggaacacaaaaaaacaccaatgcacccggaattggcgggcacacgtgcgcgagctacgcccgaggtggccgacaccgcacgggaacgcgttaagcccggggaaaccgtttgagggccgaagccggcagggccacccgtgggccgtgtccagccggttggtgcccagaaagtcccttgagggccccgggcaccatgccagcgcccacctgggcgctgtaaagactggccagtcccctagggtcataggaaggccccctcccggaatgacggcggaccgatgaaacgcgggagaaagaaacgccggcgaacgtgcaacgggcctaaccgaaggtgccccgggattggccaaaggtgttccaagagaacagtatagccttcagtgccgaaattgtcccttcctgtccaagcctcaaagccatttctgaacgggtcaggtaaccttacccccacgagacgctcccagggggtgccaacaacggctttggggagacccttggcacatacccccgtttggggatggcgataaagttggccccatattccacaggcaaacgtgggtaacgggccggtagtcaacaccaagcgtggagaaggaggaaggtccccacgggtggccacccgacgctagtgaagctggctacgactatcagcacccctttaggtgtggcccacatgggctcggacgccatgcagggcaacaaacggtgccaagccatgctgccggggttcacgcaacatgccattgcgccgggcactgtgaccacacagagacagcacaacggtccgcaccactggcgtactgaacaccccaaacaaacagccctggggcgaggcacaccaccttccatccgtgac

SEQ ID NO: 565647 - DNA, 238 bp, Homo sapiens
gagtggggagatgggcaaaaacggggactgtttcagacatcggattggcagagactagagtcggtggcataggtcagcgtctcgtgtgcagggggcggcagatggcggcccttagcaggaaagaactttgaatctcttcccttgtactgagccataagaagcagtgagtgctcccaggcataagtcccctggctctgctccgtaaaaatgctctctccccaccacgcagctcgcccct

SEQ ID NO: 565648 - DNA, 150 bp, Homo sapiens
  misc_feature (1)..(1): n is a, c, g, or t
nagatgccccagaccggtcttgaactcctgtccaagtgatttgcccacttcagcctcccaaagtgctggcatttcaggcgtgagccaccacgcttggtcttgctctagctattctaaacatgaagaagtcatatagcttccttggtgcgg

SEQ ID NO: 565649 - DNA, 134 bp, Homo sapiens
gctaatagtcgctctggtacgaacacttcccttaagaaagttgtgaaggagacctcctacgagatgatgatgcagtgtgtgtccgcatgttggccaccccctccagcccaagagacccaagagcgactgacagg

SEQ ID NO: 565650 - DNA, 401 bp, Homo sapiens
tgagatcggcccttatgccagctccctgtgtgctttaagtccacattttcttccacagccatattaccccagtgcaagagactacactgactcgggtcatgctgggtgatgcgtccggaacgggctgtggttctcataatgtacttaaaaagtatcctgactataggcaggcacatctctgaaaggcccataatccagtaggtcctcagagcgcgtgaggtaccccagctaggtgtagctcaccacattccgagaggcaagcttcacacgcatggttagtagtcttcgtaggatagggagagtagaaataatggttcccctcaaacaccacaaactgtttctctgactgggatgatctgggttggatatggatgaagcaccgataatagatgagcaggtgg

SEQ ID NO: 565651 - DNA, 842 bp, Homo sapiens
ggcccagcgaggtgcgcagctacgcgatgagcgcagtcaccgacgagcgcctcagctacactgcagctgctcagtgcggtgccgtcgtgacgacggcaaccgtgccagctgctcctgccagctgtctggactgcccgcaagctgaccttccgtggcctgcggaaagcagatcaccatggaggagctggtgcagctcgcagggtcatggactgatgccactggcgctgccaggcttgcgaggagggcctgaccttccatcgaggagggtcaggcgaatgaacgtttgcaggaagttccttggacagggcaccaggcttgcagtctgcatgactagtcattccgttggaccgcaacccaatgtggaacgggcatcatcgtaatagtaccagtgccacttgaaaggaacgggcacttcattctcatggcccgggacaacagagtcccttttgaagccttcctttggaaggggacgcatgtggtgtgcccaactcggtgattaaccgtccattcggactcccacaatcagatggtggaccttgaacatcgttgcacgtgatgggaagggaaggggcttgtcgccggtaatctgggcgccaattttgggtgagggacacccccccaggaagggtatcccaaaaggtggactcaacaactgcacctttgcagttcgatactagtgcccggaaaggacccgcatagacctatgatcacaccatttcgtgaggttcacgccaactggggcacccccccataaacattgcgtatgggctacaaactgtggctcaattactttcccccttatctttttcgcaatggggccacaagtagacagtcaaacaagg

SEQ ID NO: 565652 - DNA, 274 bp, Homo sapiens
gcgatctagagatccctcctcaagcaggaaaagataaaggctgctacactgagacaacagtgttgcctgcagacccagctgttctccctacaggttctctgatgcgtagcattggttgggcctggcagctttgaatgagtattgtggccttagactgcatgaattctctttctccctaggaatgcccttcaatcagctgggcaccctggcaggcagcaagtactataatgtggaagccatgtattgctacctgcgctggtgagtatttgccagc

SEQ ID NO: 565653 - DNA, 1385 bp, Homo sapiens
tacacagagagtgtaagcccaatgctatgatcccagtgatggtactcctgaagagcgtaaataagagtaagaaaaatgtcctcaggcgaaagcggatatgtggcgtccaaatgcgctccagtcttatcagacggggctaggcgtgagcagggattcccttcgaacattcgtgctcgtggtattcatccccaagactaacagatgtttgaagatacagattacacttatcaagacaaagcaacaacaggatgatagcacgggatcgaggcttgtagagaactccatccatgacggaggtacccccgtttgagaggtatcaatcaccttgttctacatatggaagcctggattgaggcgcagtatgggagtggaatgccctatatcgtgaggctaaagcaaggacagtggttgacatgttgaatccagaggcgtaagagcatgaagaaagggcaaacaccgctcgaggaataaccatggggacaccttgattgcggtgtggaatggagtcgcctcttttcacaatgtccgaggagtcatagtaactcagactttttacgtaggaaggcagaccccaacctgatacataggcagatatagttactacacttcccaatggcataggccgtgcgatccttgttgcccgccatgtggccccccaggcgcgttcagtaacgttcgtcgtttaatacaagcggacacattgagactaaccggatcctggacggtggccttataggataattggtcaagatagatactccgcccaattctggatcatccttcatagggagcagcttagatttcacacctatcaagggtgacaccgacgggggccatatcataggcattgtcaacgaccctggtgccagtaaccgtggtcaccgacaatttggtgggcaagacgctgggaaccaggaggtaaccccctacgtttcgatagccccctccgtgttccattgaactggtgcatgggtaccccaagagccaaccgcgagggacatcccccaattggaagtcgtcaacgcatggggatccgttgtgggacaaaccaagacgtaccaacctatcatagttataagagtcgcttataccctttatggagctttggaacaacggtcacagtctaccgctgggcaaggtcacacaaaacaggccccaaatggtatggaataccaagagcccaatacctcaacaggcccatatgaaacccaaagaggaaccttggtaggaacccagaaaataacacatggaaggtgccattaggggaaatacacaaaggtgtccaaaatacagctataccatcaggagccacaaagagaacagaggaatgcagaaaaaggtgaggcaaaaacatagcaaacggaggccaaagagaatgacaacgt

SEQ ID NO: 565654 - DNA, 130 bp, Homo sapiens
gccgtgctgatagcgtccatggaacgcgtgaaattgtaattatatctaacggaatctgtatagatagaattctgtatagataagagagtgttgaaacggataatttctatgctggatcagcggatcgagt

SEQ ID NO: 565655 - DNA, 315 bp, Homo sapiens
ttgtatgtggaatcaccaaaaattatacaattcatagcttgtaaatgcatatgtattttgtgctatcagagcagtgtaaactctgcacaaaacaaaactattttgttttcccttcttgatatgcacacagtatctaccaatctccaattccttctgcttactgatgagttacacggggaaggatgaaggaaaaggtggacgtgctgagttgccccctactttccctttaatattacccctttgtcatcatttgtggtttaaaaatggttggctaatagctgggtacagtaacacatgagctaaaagggaaaggga

SEQ ID NO: 565656 - DNA, 179 bp, Homo sapiens
gagtagctgtgatgtctacacagcttcaaccttgacaacagctattatctttcttactctttttatcatgggagacagagtctcgctctgtcgcccaggctggagtgcagtggcacgatctctgctcacttcaacctccacctcccaggttcaagcaattctcctgcctcagcctcccg

SEQ ID NO: 565657 - DNA, 391 bp, Homo sapiens
  misc_feature (284)..(284): n is a, c, g, or t
  misc_feature (332)..(332): n is a, c, g, or t
ctccctggagcagcccccagcagctcatgtccttaggaacaccccgaagccaggcagaaagaagtaaggtcctgtctgtggggccgtggactcagttgttacccgggtcaggccatccaggggataacagggctcctgcctgtgctgtgtcccctcaatgggcccggtgtgctctccccatgcctccactgccagcggggtgtcaagagtaccacaaggaggccagggcagggtgtctcacggctgtaatcccagcactttgggaggccgaggcagggaatcanctgaggtcaggagctcaacaacagctggtcaacatggtgaaccccatntttattaaaagtacaaaaattcgttgggtattattgtgcacgctttaattccagttatt

SEQ ID NO: 565658 - DNA, 117 bp, Homo sapiens
agatccccgcgtacagttggcggccagccgctcgcgccagctgacgacagcttagagcatcttatcgaagtaggatcggcttgcgcttcccttactacattgtcagcatgcagaggt

SEQ ID NO: 565659 - DNA, 234 bp, Homo sapiens
tacgatcccgttaaatcctcctcctcctatcaccagatctagtgaggggagatggagacatgacagcaagaaaacaccatgaggcaatgaatctgtagacaggccatggtttcttgagcaatgaacttgatgctgggtgtgtccctgcatgcagttgtggaacaatgtgagttttttgattggtattggttgtagtgttgagtggcttggcttgcagtagtgaatggatgtgat

SEQ ID NO: 565660 - DNA, 270 bp, Homo sapiens
  misc_feature (181)..(181): n is a, c, g, or t
  misc_feature (243)..(244): n is a, c, g, or t
ggagttcgagacctgccttggcaacatacggagaccccgtctacaaaacaacagcaacaccaatgtctctggcattttcatgagtatattttcacttttctcacaaagcagtaatcaatagagagcaggtgaattgctcagggttcctggtaaaatactagattagtattctaaatctttntggatttcacatccatactcagggatgtcttccttatcttaaatgactcttttcttagctgnngtatctactgggtatgatcttcctga

SEQ ID NO: 565661 - DNA, 226 bp, Homo sapiens
ggtcgtccacagtatggaggatgcttcgtttaccatttccctacaccctgattcccaaaagctatttgcttatcacctggactgaccctgacaccctccagtcacaacaactcacatggactgtcctccctcagggcttcagggatagccctcatttctttggacaagctctagcccgaaagctcacttccttaaacctgtctcccagtcatcttcaatatgtgga

SEQ ID NO: 565662 - DNA, 128 bp, Homo sapiens
ccacgtatatgtacatgtagtctgttccagcttgtgctctgtagtgcactgcacgccaaggtgcaggtgggtgcagggagcgaggactgaagatagcattaaaaagttgaatttttcagcttccttcc

SEQ ID NO: 565663 - DNA, 447 bp, Homo sapiens
cttccacagcgtaagcactggcacaacagtgtaaagcctattcggacattcgttaccgctcatctccacggtcaaatgaggtcactgtgttcgggtcacagctcgagtcatccgtaggttggtccaagcgttcgaggacagtgttggccccgatgacaacctcatccggaacagtatgcctctgctggtctgtcagtgcctccgcatatgatgacgtagatggcacctctggtgaggcatgtcagagtggcactggtagaagttccaggaaccatgaactgcaagggttcttcatcagtgcctgcagtatgccagctaatgatgctctcataagtgtcgtggaatcgggcccataagttggctgtctgagagaaagcttcttgtcctgtagaggcactggaatcgagtagcggtcagtgtgggcacaggcgatagtatgcatgtagc

SEQ ID NO: 565664 - DNA, 372 bp, Homo sapiens
agatagtagatacggttattcttggagcatgctataatcggcttcctatgaagatgtctgtgtacgagccgttcaataagggaaattggattacagatatcgtgtcagacaccaaagaccaacatcgccatcttctgtgagaccagggccgtgtggataatagctgcacaggcgtgtataatgtatcagtttgcagtgtgatgacagttatatgccagtcgtaggaggtccagccagtagtgcatgcattaagatgaaacagaggtgaccaacatcattactagtaaagaactcttacaaacaaagttgaaggatatagtttctttggtcccacgcctgcggcacatcatcactgttgatggaaagccaccg

SEQ ID NO: 565665 - DNA, 108 bp, Homo sapiens
tgaatattatgcgatccgaatttgggaatgccttaaagcaagttcataaccctatcgcactctgaataatggaccatttatgtgctcctggtctcacagaagatattg

SEQ ID NO: 565666 - DNA, 324 bp, Homo sapiens
gaatttatcgtaatctgggagaggtctcagatgcctgggttctgatggcaggtctggcacgactctgagtgagtgaggtgggcggagggtgagggcagagggaggtggtgcagctgttgagccttccggcctgagggagctaggatgcctcgcctcttcctttccctccccacttcccctttcccccatggggtcgctaatggcattgccgcagtccaagggctccttcctgttactgactcactgtgtgaatggggggtctgcagcaggatggagggagtagagctgtagggtgggctggggccccctacccaaaaccacctg

SEQ ID NO: 565667 - DNA, 192 bp, Homo sapiens
tttttaaaaaaaacccacccccccccccggggggggggggggggcccctttcccccccccccccccccgtggggtttttacccccgggggaaaggcccccttttttttttaaccccccccaaattttccccccccccctttttctttttggccccaaaaagggggcccaaaaaatttttcccccttttttga

SEQ ID NO: 565668 - DNA, 489 bp, Homo sapiens
ggatccctataactccccactcagacgtgttcccaaagtcacagctggcacaaagtcacctccactcatggaggacattggaagtggggacagcggtgaaggaagggactgcaagtgatctgaagagcaggcagtcttgctggttggaaaccaataccttgctggtagaacctttgccaacatctacacctgcagagaagagctccttctctggccacccagataaaggtctctgaagccttacaaccacccctcccttatcttgcccattgacagggcactggggcttactcctatgacactaactctgtaggcgtttctgccatgcaccacccccacctcatgtcagcctctacttttaaaccctctctgggtagtaataatggtggaacttatagagggtcagctgcatgcagggaattgtgcatgggtaatgaaatagctgattagtaaggttccggtcactgcaacctctgcctcctggaattc

SEQ ID NO: 565669 - DNA, 221 bp, Homo sapiens
agtctgtcgacttctgtctctctgacctctcttgtgtttcacgtgctgtgtctgatgattccaatgagtatctctaagttctagtcttacctttaaaaattgtctaaaatcaaagttactttccttaaactctaccttttcttactagccctggcttaattgtgttcaggctgctatgataaacctaaagtacctgagactgggtaatttggtaaaacaat

SEQ ID NO: 565670 - DNA, 147 bp, Homo sapiens
ttgcgtgcatgtctgcgcatatgcaatggatggtcgtgcggaactgctccagttatctgatcaagagtgaataatgcagacctacatgcactgagcccaataacttgaaggcctgcaattccttcctgctacaactgtgacttgatt

SEQ ID NO: 565671 - DNA, 474 bp, Homo sapiens
acacatagtgaggataggggagtgggtggggacctggggctgggggtacatagttgcggtggggcatggtgataacagcgcggggtgggaggtttccgtatttagtggatagatgctttggagaatagtgagtggaggggggggggggaagtagtctgacggggcggctgccgggggcacgtttgagaaaggccggggggcagcatggcgataagggggcgtttgggacaaccgggagctgccgggaggtatggggatctagatgagggagacaatggtggtaaggggcggggcgaccctgaggacggacggtgggacgccggagcaccagcgggggggagggggtgcgcctaccctgtgcacctatgactaacaggatttgctgttaacccgccttggccaccggccgtactaacgctctgccgcaatgcattgcttaccctggtgacctggggattgcatatagtttggggg

SEQ ID NO: 565672 - DNA, 83 bp, Homo sapiens
  misc_feature (8)..(8): n is a, c, g, or t
  misc_feature (10)..(10): n is a, c, g, or t
cgactatntntgtgcgctgtttagaagttgtgtgattttttggcatcgttgataaaaatgcaaagtcaaataaaaggtgtctt

SEQ ID NO: 565673 - DNA, 380 bp, Homo sapiens
ttttttttttttattgatggagttttgctctgtcacccagcctggagtgcagtggcgtgatcttggctcactgcaacctctgcctccaggattcaagcgattctcctgtctcagccttcatgagtcactgggattgcaggcatgcaccaccacgcccagctaattttttgtctttttagtaaagacaggatttcactatgttagccaagctggtcttgtgctcctaatctcaagggatccacccaacttggcctcccaaagtgctgggattacaggcatgagcaccacacccaaccaagactttcttaaacatgtttaagctaagattgtagacaaaaagaaaacagaaaagttcacagaactttgactaagccctgctg

SEQ ID NO: 565674 - DNA, 625 bp, Homo sapiens
tagtaaagaaatggctaaattttcgaggggtgggaatcgttatttcacagatgattccgaattcaccacaaaaaaaatttagccattctttactaaaaaaaccgaaaccaatctgttgtagtaactcacagagttattatagcacaaagttgtctggtactcaggaagaaatacaaatttggtcatgtttctcaagcagttttctctgagtagttcctgaggaggaacaaattacaagtgtacccaataactgaaaatgtttaactcactctcattggtaagcagctccacatatgtagacaaggggtttccaagcttgggcaaggtacattgtaacttcagataaattcaggtttcccatcatgtatggtgagtgttacactgtgagccacacaacaaacaagggctcgaaactggtgtacatcacaatgtgatttggaaaatgaacaccttgaatacgcacctaatactaacatggggggtcattatcctataaccaaaacaagtcagctcttaggaaaagaggttcaacttgatcgtcaacgaccattgtgagacctccgacactctcgtggcctaatatttctcaatacagctcaccagtagattaattcttgagacatcg

SEQ ID NO: 565675 - DNA, 218 bp, Homo sapiens
tcattgtacgggagaaagtatttatcgtgcatgaatgttgcacctgcccagtgattggctatgagggaagtacattagtttaattagcttaacgttctctctgactggactattccccgtacttctagttacttgggacagtttttatgcaaggagactaatttccaaagttatttaggcaatgacaggtaggaagattggtctgtgctggtgggaag

SEQ ID NO: 565676 - DNA, 124 bp, Homo sapiens
tgtccgccgcgccacggtgcggtccccgcttgacgcgcccgccccaccgccgttccctgtgtttccggctgtgtctcttcggggactcctctacgacgtcgaccctgccggcatgacacgcttg

SEQ ID NO: 565677 - DNA, 709 bp, Homo sapiens
gaaatcatggatgccgctctggtcctgaacgtgagaagtgggtccggaaaaccattctgcagagggagagcacggagggagctcccaaggttcatcaccggatcgcgagtgatctttcatttccggacctaatgaacatgtgattaggagcggacagatcatttgcacgacgacgtccgtcgaggttggggcccagcctcattgtcacaagtcagtccagtcggggaaaagatgttaccaacgccttcagtagagtcgtgggtggagatctcggtgctttaggctcaccattgcgcggtgtcacgacaggtgcgcctgagatccggtcggagcggacattacattcaccactagcgtgtggggtctgagcccccaaataggtatcaccagggaagcacctaagaagggcggagaatataggcacccgagggggcacagaaggggaattcgcctagcgaacgcagggtgggccagcatgtatgcgaacaagcggttgctggggcattaggagtgcggaaggcaattgtgcttgccaagccgtaaacgaacgaacaggcattcgtggggtctccatggcaggagaaccacttggagagtctaggaaagctcggagatacaaaggcgaggcccttccatgggccgtacatagcgatactaaataggtgcgaataccggatagcgtggccttggcatggggtaacgattgcac

SEQ ID NO: 565678 - DNA, 267 bp, Homo sapiens
cagatctgtgacaatctctgtggacgtgacaaaggcatgaaactcggggtttgcgtcgttgcgcaccgtgaaggtcctgttgtagaaggtgacgattgtgttcttctcccccttcttgatggccttcctgtcccactggccaatgcaggggccacaagcattgtccaggacaatgccacccagatccctgaagatctgtgcatagccggcccgctcaatggtggcgcggatctgctcggaacctgaaatggccattcaacgcctccg

SEQ ID NO: 565679 - DNA, 399 bp, Homo sapiens
tttcctctataccacaatactctattagaattttaaatttttttaatttaaaaaactataacggacagcgtggtggcttacgcctctactcccagcactttgagaggccgaggcagacggatcagctgaggtcaggagtttgagatcagcctgaccaacatggtgaaaccccatctgtactaaaaatacaaaacttagccaggtgtggtggcgcatgcctgtaatcccagctacttgggaggctgaggcaggagaattgctgaacccgggagacagaggtggcagtgagctgagatcgcaccactgcactccagcctgggccacagagtgagactccatctcaaaaaaacgcacgcaagcacgtacgctgggaggcagcgagaatctgggaggccgaaa

SEQ ID NO: 565680 - DNA, 562 bp, Homo sapiens
  misc_feature (214)..(214): n is a, c, g, or t
  misc_feature (216)..(217): n is a, c, g, or t
  misc_feature (219)..(219): n is a, c, g, or t
  misc_feature (267)..(269): n is a, c, g, or t
  misc_feature (407)..(407): n is a, c, g, or t
  misc_feature (488)..(488): n is a, c, g, or t
  misc_feature (500)..(500): n is a, c, g, or t
tcagcgggccccaagccagctcaggaaccacgcccagctcggtctctcattctctccaactcacggccacggcacccaaacggaccttatcacagtcagcacaggtggcctccacatcactaaacacaacagtcaaagcacagccccagtcttccttgatctatcaatagcatctaccgtgatggataactccctccttaaacgcctatatagngnntncaggaaactacattctggcagctcctcatctctgagtccacgtagtgnnntcccccagagttcagagctcaggcctctgccacactccctgggagagctcacccagactcaggacttttcatcgctgcctgctgacaacttccaaaggtaaaactccattcccagcctctcctcagaacccaaggctngcttccttgacatctccatgtggatgtctggtgaacaactcaaaagattcaaaaaaacaactcaatttaaaaatgtgcaangggtcaggcatnggtggctcacacttgtaatcccggcactttgcgaggttgaggtgtgaaaactgcatgaggcc

SEQ ID NO: 565681 - DNA, 334 bp, Homo sapiens
ccataaaaaagaatgagatcatgtcctttgcagggacatgaatgaagctgtaagcatcattctcagcaaactaacacaggaacagaaaaccaaacaccacatgttctcactcataagtgagagttgaacaatgagaacacatggatacagggaggggaccaacacacactaggacctgtcatggggtcggagtcaaggggagggagagcattaggacaaataccttaattgcatgcagggcattaaaaccttaggttgatggggtttgttgagttgcagccaaaccaccatgggcacatgttttaccttttgttggaccaaaccttgccacttt

SEQ ID NO: 565682 - DNA, 188 bp, Homo sapiens
taataaaattattagttataaaaggggaaataggtaggagtagcgtggtaagggcaataagtgtggggaggaagtggggtgggtttggtatgtccaaacggtcatttaattttaacgtggttaaatatggggagtagtgtgattgaggtggagtggaggacgggggtaccgacctcaatatcgtaatc

SEQ ID NO: 565683 - DNA, 162 bp, Homo sapiens
ctttatcattgggttgtctatcacctctgtccttgatatttcatcttttttttcctcttttattccttttcctttggatttggggaggctctcagttgggcttctgtagctatcaccagctgatgagacctgtcttttttatagataaatcagccagttact

SEQ ID NO: 565684 - DNA, 418 bp, Homo sapiens
tcttagaggtgagtgaagctctgctcgagaatacagccagagacgagcatcagtgctgcagactatacaaggtgtgaagagtagaacacgtcttccaataatgaaggcacacatacataacagagctacatgagatgaaacactatcaccaaaaacttcctcttctccttccacggggcagtgtatttgcatcacaagtctggagttctggtgtgtctctcacattccacgtctatggtttagacttaaattcattagactctgtagggtaaccctttccctgtattctcatataaatcactaccttattctttcagaatgttcagttcataaaatacatggcgggactgttctgacaggccatgatatacaaactcttccttatagtacacgatactaaataatgctacatgcatca

SEQ ID NO: 565685 - DNA, 140 bp, Homo sapiens
tgttagagctatgtatctcattttacacatgtaaaatattcgcactcttcaaaaagaaacttagttcctgtgtaagacccttatttaaatattgctcacgatgagtcatgcttagctctcattgatacgcggggcttgat

SEQ ID NO: 565686 - DNA, 845 bp, Homo sapiens
ggaactcttcacactactattggatctagttaccagttggtggaccactgggtgatccctgccatctctgcagtgggcgacggcttgatgtatgggctatacatgggagaggactgaacacctgctcacaaggcacccgcaggaagagcctgctttggacaccggacaaaagaaaccattgctgactacttcgactgacagaagccttgcctcgagagcgctgagcgtactgcgcctgcgtgtttctctagcgacggtcgaaacaacacagcaaccactgccctttactgcccgacaacgtgccagtgcgcccttccatcggtccgctgcccgggggggcgcccctaaccgcgacgcacacggaccgcaggacccagcgtttcaagaaagccgatgctccccccacagtccattatggcccagatgcgccagcgcactaggatcggcgatcaacgaccactaccgtcgttacatccaacacgttccacaaagccctccaactctgcaacccaccctccccacactacgaacctcccacccccccactcctgctacacctatttctctcagacgaaccggagccgcagatccccgacgcccacctctttccacggcgtccccatctcggtatccgcacccgctgcaaatactaggcggatcctgagtcggctcggccccgggaacaacccgccccaccctcctataaaatttgtcaacaaccactaccacgcttcatcacaaccccccacccatgccctacccttctcacattacaaatccgggtagaaacgccacccctaagaaagctagagacaatgtaggacagtctctaagtagaaatgatg

SEQ ID NO: 565687 - DNA, 399 bp, Homo sapiens
ggtgtggtgatctagaggatcccagcagagactgttggcccgggtcgagaagaggctgctgggaaaggggacgtccaacgaagagaccacctgttctcgttcgagcaggtagtcaacaccgtcaccaccttggtgggagaacaagaaagctcagctggtggtgattgcacacgacgtgaatcccatcgagctggtggtcttcttgccgtgccctgtgtcgtaaaatgggggtcccttactgcattatcaagggaaaggcaagactgggacgtctagtccacaggaagacctacaccactgtcgccttcacacaggtgaactcggaagacaaaggcgctttggctaagctgggtggaagctatcaggaccaaggacaaggacggatacgaggaggatccg

SEQ ID NO: 565688 - DNA, 607 bp, Homo sapiens
  misc_feature (4)..(4): n is a, c, g, or t
gctncttaccacatctaatttgatcacccctgtgtgctatgtatggaattatctgggcatcgacgacgacgacgacgacgacgacgacgacgacgacgacgacgacgtcgacgacgacgatcacggacgacaatcgagggtatactcgacgacagaatgagcatctaacacagactctggggtataatcgaatcatatgacatcttctgtgggtataacacacactcttagttaagacaacccgatcgagtgtattcactagtgctaccggcaaataccgtatgaactcagcatcccacacatgtggtgtgtatatacaggtccataaacgcgcatcaatatatcaacgccactacttacctgcatactctcagtacctggcccgcacagcactggtggtcgtacaccgttcgccacgctttggtacgttgcgtatagatcactcctgacatagattcggctggtatgcgttgtggctctaacaggacgctatacaccaccgtcgtcatatactggacgaacacattagcgcgctcaatgcgctcagcgcactagtcatactagcaccatagaccatatttgatacccactgttctcacgatggcac

SEQ ID NO: 565689 - DNA, 216 bp, Homo sapiens
  misc_feature (150)..(150): n is a, c, g, or t
  misc_feature (193)..(193): n is a, c, g, or t
gattgttgctgactggaggcatacctaaagcggatctcaccgcaagttagggcggcgagggtccgagatcagcctctcctcgccagcgatggcggtatcaagcccctggggaccgggcattgaagaagatgcagacgggttgggacgacnaatattcgagggccatgtgcaagttgccatcagtggaacggcnatggacagcaacaatcccccgca

SEQ ID NO: 565690 - DNA, 277 bp, Homo sapiens
  misc_feature (20)..(20): n is a, c, g, or t
  misc_feature (24)..(24): n is a, c, g, or t
  misc_feature (274)..(274): n is a, c, g, or t
gggcgaaacaatttgaatanagtncatcaaagaatataaatggcaaataagcacatgaaaagatgcccaaagtcgtaagtcattagggaaatataaatttaaaccataatgagataccactgcatactccctagaatggctgtaatgaataggattagtcacatggtgcaagaatggaggatcatctggaactctcatacactgacgataggaatgtgaaatggatcaactactttggaagacaattgggcagtttctttcaaagtaaatgtgnaga

SEQ ID NO: 565691 - DNA, 228 bp, Homo sapiens
cactcatgcagagctctgccacccattagccacgcaggcgaggtcctgctgatccctgccgggccctgtgtttcccattagccatgcaggcgaggtcctgctgatccctgccggtccctgtgtttcccattagccatgcaggcgaggtcctgctgatccctgccggaccctgtgtctcccattagccatgcaggcgatgtcctgctgatccctgccggtccctgtgtt

SEQ ID NO: 565692 - DNA, 1100 bp, Homo sapiens
  misc_feature (52)..(52): n is a, c, g, or t
  misc_feature (71)..(71): n is a, c, g, or t
  misc_feature (85)..(85): n is a, c, g, or t
  misc_feature (113)..(113): n is a, c, g, or t
atctctaatgctatacagccacctccaatatctataaatcagatcaccccanaactaagatgctgaaaccntgtgaaaacccacncatgccgagtgaaagatgagtccgctanctgccttcattagctgctgattttgttgaaagtaaggatgtttgcaaaaactatgctgaggcaaaggatgtcttcctgggcatgtttttgtatgaatatgcaagaaggcatcctgattactctgtcgtgctgctgctgagacttgccaagacatatgaaaccactctagagaagtgctgtgccgctgcagatcctcatgaatgctatgccaaagtgttcgatgaatttaaacctcttgtggaagagcctcagaatttaatcaaacaaaattgtgagctttttgagcagcttggagagtacaaattccagaatgcgctattagttcgttacaccaagaaagtaccccaagtgtcaactccaactcttgtagaggtctcaagaaacctaggaaaagtgggcagcaaatgttgtaaacatcctgaagcaaaaagaatgccctgtgcagaagactatctatccgtggtcctgaaccagttatgtgtgttgcatgagaggcgaccatgcttttcagctctggaagtcgatgaaacatacgttcccaaagagtttaatgctgaaacattcaccttccatgcagatatatgcacactttctgagaaggagagacaaatcaagaaacaaactgcacttgttgagcttgtgaaacacaagcccaaggcaacaaaagagcaactgaaagctgttatggatgatttcgcagcttttgtagagaagtgctgcaaggctgacgataaggagacctgctttgccgaggagggtaaaaaacttgttgctgcaagtcaagctgccttaggcttataacatcacatttaaaagcatctcagcctaccatgagaataagagaaagaaaatgaagatcaaaagcttattcatctgtttttctttttcgttggtgtaaagccaacaccctgtctaaaaaacataaatttctttaatcattttgcctcttttctctgtgcttcaattaataaaaaatggaaagaatct

SEQ ID NO: 565693 - DNA, 467 bp, Homo sapiens
  misc_feature (448)..(448): n is a, c, g, or t
tatccttttgaggccgactgtaaggtggtctacaaaaggcaaaggctgccactagaaagaggtgcttaaggagagcagctgtgagaaattgacaaggcatttggctccccatgaggactgccaagttaaggctggaaaccacatactggtaccagttccggctcatgattaactaatgctctcctataaaacagatgccaacactcagaaggagagaaaacacatctgtgtcctcaatacctagaacaactgttggcatatcaacaggccctcaataaatatttcttgaatgagcaaataaacataaagtttacattgatctagaactggggaggggtgaggtggttgggaccaaagaacaaaagacaaaggtaactgagggtgtggtaaaagtgtcttgaactcctgacctcagttgatccgcctgcctcggcctcccaaagtgcanggattacaggcgtgagtca

SEQ ID NO: 565694 - DNA, 125 bp, Homo sapiens
ggggaatgggcagactgaccagtccaggtggtgattttccaggacatagttagtgattaaaattctttggattcagagctctctagctgtattttgtatcttaataaataaaatcataccaggga

SEQ ID NO: 565695 - DNA, 609 bp, Homo sapiens
  misc_feature (93)..(94): n is a, c, g, or t
  misc_feature (131)..(131): n is a, c, g, or t
  misc_feature (143)..(143): n is a, c, g, or t
ggctgacttcctgttggtttgagcccctccgcaagccggactacaactaactcgtgctctcctcgctcaggcgtaagccaaggctgtgcaggnntggcaggaagcaggatgacagaaacccattctgaacncctagcaatcangttcactgtaatttaccttggagagtttaatgctgaaacattcaccttccatgcagatatatgcacactttctgagaaggagagacaaatcaagaaacaaactgcacttgttgagcttgtgaaacacaagcccaaggcaacaaaagagcaactgaaagctgttatggatgatttcgcagcttttgtagagaagtgctgcaaggctgacgataaggagacctgctttgccgaggagggtaaaaaacttgttgctgcaagtcaagctgccttaggcttataacatcacatttaaaagcatctcagcctaccatgagaataagagaaagaaaatgaagatcaaaagcttattcatctgtttttctttttcgttggtgtaaagccaacaccctgtctaaaaaacataaatttctttaatcattttgcctcttttctctgtgcttcaattaataaaaaatggaaagaatct

SEQ ID NO: 565696 - DNA, 843 bp, Homo sapiens
taaaactcactaatctaaccatagctgacctttgtagtagaattgacaatgttataattacaattgcacaatcttataattcacaatatgtatttatgtcttttgctatggagcaaatccaggaaggcaagagaaacgattgctttacctaaatataaatgaagaatctatcctttaaactcttccactagacgttgtaatgcacacttatttcttttcccaaggagtaaccaattactttctaaaacacatttaataattttaaaactattgatgaatattgatgaaagaagacataattcacacattaataaagcaatctcccaagtattcgatttaacgttcatttttctaagtaatcataaactatatttctgtgaccatgctaattgtattagttcaagatgtcacgtcgttagttcgaaagcctctcactaaggtatgatctatgctatattcaaaattcaacccatttactttggtcaatagttggatctaagttgcagtctttgaagtcctggtggtcttgccttctgattagacaatttgtatccttttctattaatgatatatcccgtcagtattactcttgcaatatgtattacggatattcccaagcaatccaaaaagggtataaacgctgcttaaacacgcacatgtggccacacgctgcgggctcaagcaagcacttgccctgtaagcccacagctcagaggacaccgtgccaacactgaaagggcaagggcacaccgggcagccaaaagaggagacctcagagagaagccggggctcgacacaaccgggcgaagagacaacacaaacaaaatgggcccggggcacacc

SEQ ID NO: 565697 - DNA, 1154 bp, Homo sapiens
  misc_feature (52)..(52): n is a, c, g, or t
  misc_feature (71)..(71): n is a, c, g, or t
  misc_feature (85)..(85): n is a, c, g, or t
  misc_feature (113)..(113): n is a, c, g, or t
  misc_feature (615)..(615): n is a, c, g, or t
  misc_feature (619)..(619): n is a, c, g, or t
  misc_feature (642)..(642): n is a, c, g, or t
  misc_feature (644)..(645): n is a, c, g, or t
  misc_feature (652)..(654): n is a, c, g, or t
  misc_feature (660)..(662): n is a, c, g, or t
  misc_feature (664)..(664): n is a, c, g, or t
  misc_feature (696)..(696): n is a, c, g, or t
  misc_feature (701)..(701): n is a, c, g, or t
  misc_feature (703)..(703): n is a, c, g, or t
  misc_feature (718)..(718): n is a, c, g, or t
  misc_feature (725)..(726): n is a, c, g, or t
  misc_feature (732)..(732): n is a, c, g, or t
  misc_feature (753)..(753): n is a, c, g, or t
  misc_feature (757)..(757): n is a, c, g, or t
atctctaatgctatacagccacctccaatatctataaatcagatcaccccanaactaagatgctgaaaccntgtgaaaacccacncatgccgagtgaaagatgagtccgctanctgccttcattagctgctgattttgttgaaagtaaggatgtttgcaaaaactatgctgaggcaaaggatgtcttcctgggcatgtttttgtatgaatatgcaagaaggcatcctgattactctgtcgtgctgctgctgagacttgccaagacatatgaaaccactctagagaagtgctgtgccgctgcagatcctcatgaatgctatgccaaagtgttcgatgaatttaaacctcttgtggaagagcctcagaatttaatcaaacaaaattgtgagctttttgagcagcttggagagtacaaattccagaatgcgctattagttcgttacaccaagaaagtaccccaagtgtcaactccaactcttgtagaggtctcaagaaacctaggaaaagtgggcagcaaatgttgtaaacatcctgaagcaaaaagaatgccctgtgcagaagactatctatccgtggtcctgaaccagttatgtgtgttgcatgagaaacccccantacncgcccgcccccccaaacgccgcncnnaaccccnnntgcccnnncncccaccgcctcccagccccggaagccgacganacatncncccccaagagcccancgccganncccccnccccccacgccgatccacgcncccnccctgagaaggagagacaaatcaagaaacaaactgcacttgttgagcttgtgaaacacaagcccaaggcaacaaaagagcaactgaaagctgttatggatgatttcgcagcttttgtagagaagtgctgcaaggctgacgataaggagacctgctttgccgaggagggtaaaaaacttgttgctgcaagtcaagctgccttaggcttataacatcacatttaaaagcatctcagcctaccatgagaataagagaaagaaaatgaagatcaaaagcttattcatctgtttttctttttcgttggtgtaaagccaacaccctgtctaaaaaacataaatttctttaatcattttgcctcttttctctgtgcttcaattaataaaaaatggaaagaatct

SEQ ID NO: 565698 - DNA, 901 bp, Homo sapiens
gtaatgtagaaagcaacagaaaaaaggaaacggaacttcttggctctttttctaaaaatgaatcagttcccgaagttgaagccctgctggcaagattacgagctttataagttaaactggtttttaaaaaaaatgattaagccaaatataaagccatgctctaaactataacacttgaaaaaattgcttttatgtaagtgactttatatagttttaaattatgatatatattagaaaaataaagctaaatatatgaatgcaatgctttttctatgtactggaggttttggtttattcaagattgtaccgggctttaatccttttttttttttttttggtcctccgggtatccctcagtctcttatattggggggttaaatttatccttatggctttagaagagcaggtaggttggccattgttgtccagcagggtgcccttaaagaaaattaccatcttctctaagccacgggaatttttactttacctatttttaacctttaacgggatgtcagggtcattcaacctcaagtctttacattatccatgtttttcccatatatttggtttatatagggcccaagttcccccttaatggggatctatatactaccagcacaacttcaaaaacttgtactggaatacttcagagctatatatgtaacggaaatgacggggtgaccccattatcatcatggtcggaatccatgttaagtaaaccctctaggggaccatagggcaatggagacccttaccgaaaatgtggatgccataagcatctgttttgccctcctcttgggccacatgcagtgggccttggtgctacagtggcattgttaaccagaaattgccgtgcttgcccaaaatccttgaacctggggctcagaaacagttttcaccc

SEQ ID NO: 565699 - DNA, 298 bp, Homo sapiens
aacgcaaattctgctgcctcagcttcctgagtaacttggactacaggcaccacgccagcacgacccgagctcattttttgtatttttagtaaacactgtgtatctccgtgttggccgggatcgtctcgatcttctgatcctcgctgattccacatcaccttggcctcccatacgtgctacgatttaccggcgttagccactgcgcccggtccatgtttacatacattgggtttataaggtaaagatcttttgttgggcctttagtgtgatgagatgccctctgaattgactagtgaag

SEQ ID NO: 565700 - DNA, 365 bp, Homo sapiens
tttaaacaaaaaacaagactttttttttttagagtggggccacctatgccccccccaacagagattttacatggaaaccgggctcagtgagaattgatttccggccccatatttgtctttggggggtctttagtgtttaattattaaggaataaagctggttaaacagttcaaggctttatgggttgtaaaggaacctcaaaataaccgttaagatagtgaaacacagcagcaggtttccaatgcaaacaggtagtttgcatttatgtaaaacattcagaaaatgaagttttgaatttgttggaacattcaaaggacttgagagcattttattgtaacttaaaaaaataaaaacaactgtcccca

SEQ ID NO: 565701 - DNA, 238 bp, Homo sapiens
gtgcacatacaccttaacctctgtgctctactttctcaaaccccacagtgagcaagcccgtatcgtcctcatttggtactccctgttgttccattgttgtcccgaaacgcggatgcctctcctggctgatgatggccccgggcctggaaactgggttcatcctgagctctgcgaggggcttgggttccatgcacagcaggcacctgcgcatccccctcccccatcccccttatccgag

SEQ ID NO: 565702 - DNA, 1202 bp, Homo sapiens
  misc_feature (52)..(52): n is a, c, g, or t
  misc_feature (71)..(71): n is a, c, g, or t
  misc_feature (85)..(85): n is a, c, g, or t
  misc_feature (113)..(113): n is a, c, g, or t
  misc_feature (1168)..(1168): n is a, c, g, or t
  misc_feature (1170)..(1170): n is a, c, g, or t
  misc_feature (1174)..(1174): n is a, c, g, or t
atctctaatgctatacagccacctccaatatctataaatcagatcaccccanaactaagatgctgaaaccntgtgaaaacccacncatgccgagtgaaagatgagtccgctanctgccttcattagctgctgattttgttgaaagtaaggatgtttgcaaaaactatgctgaggcaaaggatgtcttcctgggcatgtttttgtatgaatatgcaagaaggcatcctgattactctgtcgtgctgctgctgagacttgccaagacatatgaaaccactctagagaagtgctgtgccgctgcagatcctcatgaatgctatgccaaagtgttcgatgaatttaaacctcttgtggaagagcctcagaatttaatcaaacaaaattgtgagctttttgagcagcttggagagtacaaattccagaatgcgctattagttcgttacaccaagaaagtaccccaagtgtcaactccaactcttgtagaggtctcaagaaacctaggaaaagtgggcagcaaatgttgtaaacatcctgaagcaaaaagaatgccctgtgcagaagactatctatccgtggtcctgaaccagttatgtgtgttgcatgagaaaacgccagtaagtgacagagtcaccaaatgctgcacagaatccttggtgaacaggcgaccatgcttttcagctctggaagtcgatgaaacatacgttcccaaagagtttaatgctgaaacattcaccttccatgcagatatatgcacactttctgagaaggagagacaaatcaagaaacaaactgcacttgttgagcttgtgaaacacaagctcaaggcacctaaagagcctccccccagctcccatggacgacttcccagctcccttagacaacaagtgctgcaaggctgacgataaggagacctgctttgccgaggagggtaaaaaacttgttgctgcaagtcaagctgccttaggcttataacatcacatttaaaagcatctcagcctaccatgagaataagagaaagaaaatgaagatcaaaagcttattcatctgtttttctttttcgttggtgtaaagccaacaccctgtctaaaaaacataaatttctttaatcattttgcctcttttctctgtgcttcaattaataaaaaatggaaagaatctaaaaacaatnanaaanaaatcacaaacgcgagactagttctctc

SEQ ID NO: 565703 - DNA, 1094 bp, Homo sapiens
  misc_feature (52)..(52): n is a, c, g, or t
  misc_feature (71)..(71): n is a, c, g, or t
  misc_feature (85)..(85): n is a, c, g, or t
  misc_feature (113)..(113): n is a, c, g, or t
atctctaatgctatacagccacctccaatatctataaatcagatcaccccanaactaagatgctgaaaccntgtgaaaacccacncatgccgagtgaaagatgagtccgctanctgccttcattagctgctgattttgttgaaagtaaggatgtttgcaaaaactatgctgaggcaaaggatgtcttcctgggcatgtttttgtatgaatatgcaagaaggcatcctgattactctgtcgtgctgctgctgagacttgccaagacatatgaaaccactctagagaagtgctgtgccgctgcagatcctcatgaatgctatgccaaagtgttcgatgaatttaaacctcttgtggaagagcctcagaatttaatcaaacaaaattgtgagctttttgagcagcttggagagtacaaattccagaatgcgctattagttcgttacaccaagaaagtaccccaagtgtcaactccaactcttgtagaggtctcaagaaacctaggaaaagtgggcagcaaatgttgtaaacatcctgaagcaaaaagaatgccctgtgcagaagactatctatccgtggtcctgaaccagttatgtgtgttgcatgagaaaacgccagtaagtgacagagtcaccaaatgctgcacagaatccttggtgaacaggcgaccatgcttttcagctctggaagtcgatgaaacatacgttcccaaagagtttaatgctgaaacattcaccttccatgcagatatatgcacactttctgagaaggagagacaaatcaagaaacaaactgcacttgttgagcttgtgaaacacaagaagtgctgcaaggctgacgataaggagacctgctttgccgaggagggtaaaaaacttgttgctgcaagtcaagctgccttaggcttataacatcacatttaaaagcatctcagcctaccatgagaataagagaaagaaaatgaagatcaaaagcttattcatctgtttttctttttcgttggtgtaaagccaacaccctgtctaaaaaacataaatttctttaatcattttgcctcttttctctgtgcttcaattaataaaaaatggaaagaatct

SEQ ID NO: 565704 - DNA, 770 bp, Homo sapiens
gccggaactcggggcgcgcatccgcaagtagtgagcccggcggatcggatcccgcagatctggagacggggcctggagggtggctagtacgcaacagggtgtccctgtccctcaaggggtcatgggctccatgttgctgcgcccgagctgcgctgggcctgcaggcttccagctagcagctaccggctgctggtgcctggatccagacacattagatcaagctgcgagccgagaagtcgacgttgaagttgtgattagtgatggggcgctcgtgatgaagactggaagtcccatgggccataggatctcgggagttaatgaaacagcgtgaatatatattcagaatgcaagaggctgtgcattgtttcactgcaattacgaagagagccgaggcaattgacctggttgatgtggagcggcaaccgaatgctggatctttatgcccagatctcctctgtccccataggttacatgccatcccgacctgctgaaactcgatcctaacgagtccgtcaataatgcgagcatgtatgtcaatagacccggcctcggaatcctgcctccggagaactttgtggagaagctccggcagtccttgctctcggtggctcccaaagggatgtcccagactcatcaccgagtggcctgtcggctccgtgctccgaatgagaaacgccttagagaccagcttcatgtggtaccggagcaaggaacgagggcagaggggcttctcccaggaggagctggagacgtgcatgattaacaggccg

SEQ ID NO: 565705 - DNA, 724 bp, Homo sapiens
  misc_feature (208)..(208): n is a, c, g, or t
  misc_feature (211)..(211): n is a, c, g, or t
  misc_feature (698)..(698): n is a, c, g, or t
aaaccccggcggcaccgctagagtcggtcactcctctatagtccatggggatccatctcccatcaaacctgacagcagtgcgtgccttgggccgcgctttggcccagacaccggttcacagcaatagcacgacgggcacaatatttcctgacttgagtgttcccttctaaatgcgaacttttattcctcttaaactatcctcaaatanttnaacctttgtcttgatcttaaagatcgtgtagattggggttggggagggatgaagggcgaggaatctaaggataatgaaataatcagtgacgaaaccattttcccatcatcctttgttctgagcattcgctgtaccctttaagatatccatctttttctttttaaccctaatctttcacttgaaagattttattgtataaaaagtttcacaggtcaataaacttagaggaaaatgagtatttggtccaaaaaaaggaaaaataatcaagattttagggcttttattttttcttttgtaattgtgtaaaaaatggaaaaaaacataaaaagcagaattttaatgtgaagacattttttgctataatcattagttttagaggcattgttagtttagtgtgtgtgcagagtccatttcccacatctttcctcaagtatcttctatttttatcatgaattcccttttaatcaactgtaggttatttaaaatnaattcctacaacttaattgaaagggg

SEQ ID NO: 565706 - DNA, 207 bp, Homo sapiens
ggaacgggctgtagaggtgaactggtcgaatgtaccccttttacagatggaaccctgaagctcagagacttgtaggtcccgggctttggttgtacaaccagtatctggtactgcttgggctaggaaagaggcttcgcgtccgagcattagggcctaccctgtattttgcgttttacgaccctgtaacccccaaaggtccgtgactga

SEQ ID NO: 565707 - DNA, 133 bp, Homo sapiens
gtgtgaacagtcagaataagaggtcacttgtgtgaagagcatgctttaaagggtgctagagtagcgagtaatacctgcctgagggaccaggacaggagaccgggatgagaagctttcaagaagcaggaactgg

SEQ ID NO: 565708 - DNA, 1029 bp, Homo sapiens
  misc_feature (12)..(12): n is a, c, g, or t
  misc_feature (98)..(98): n is a, c, g, or t
  misc_feature (122)..(122): n is a, c, g, or t
  misc_feature (173)..(173): n is a, c, g, or t
  misc_feature (220)..(221): n is a, c, g, or t
  misc_feature (270)..(270): n is a, c, g, or t
  misc_feature (272)..(272): n is a, c, g, or t
  misc_feature (274)..(275): n is a, c, g, or t
  misc_feature (277)..(280): n is a, c, g, or t
  misc_feature (288)..(288): n is a, c, g, or t
  misc_feature (381)..(381): n is a, c, g, or t
  misc_feature (428)..(428): n is a, c, g, or t
  misc_feature (484)..(484): n is a, c, g, or t
  misc_feature (493)..(493): n is a, c, g, or t
  misc_feature (504)..(504): n is a, c, g, or t
  misc_feature (519)..(520): n is a, c, g, or t
  misc_feature (1003)..(1003): n is a, c, g, or t
gctgagccagtngcctatggacaacttatttaaaaatatttcagatatcaaaattctagctgtatgatttgttttgaattttgtttttattttcaagngggcaagtggatgggaatttgtcngcgttctaccaggcaaattcactgtttcactgaaatgtttggattctcttngctactgtatgcaaagtccgattatattggtgcgtttttacatttanntttttgcaataacttctatattttaatagaaataaattcctaaactccntngnncnnnnccctttcnggaatttaaaattaagtagaacaaaaaacccagcgcacctgtcagaggcgtcacgcgctattggcatggggagcaatggtcattaaacgtgangcaggcggggctgtggcagggttttggggcagacacctgggcacagnaaaagcatgaggggaaaagagggcctgacgtgagtgggccttgggaaaggggaagngggagggcnggttaaggagnggaaaagaggtaagnngttgtcttgatcttaaagatcgtgtagattggggttggggagggatgaagggcgaggaatctaaggataatgaaataatcagtgacgaaaccattttcccatcatcctttgttctgagcattcgctgtaccctttaagatatccatctttttctttttaaccctaatctttcacttgaaagattttattgtataaaaagtttcacaggtcaataaacttagaggaaaatgagtatttggtccaaaaaaaggaaaaataatcaagattttagggcttttattttttcttttgtaattgtgtaaaaaatggaaaaaaacataaaaagcagaattttaatgtgaagacattttttgctataatcattagttttagaggcattgttagtttagtgtgtgtgcagagtccatttcccacatctttcctcaagtatcttctatttttatcatgaattcccttttaatcaactgtaggttatttaaaatnaattcctacaacttaattgaaagggg

SEQ ID NO: 565709 - DNA, 234 bp, Homo sapiens
cagtcgtaaggcgcccccatgtcccagatagctgtctctccctagcatcgactacgcagagctgctgccgcactttgagaaggtccagaacaagcacctggaagtgcggcaccagcggagcgggcgtgcggaccaacctggaccgggaggtttgtcctctgaaaggcctgcacggaggagggcccaacgagtgttcccatgaaccactaagggtcgtcacgccctccccgagga

SEQ ID NO: 565710 - DNA, 888 bp, Homo sapiens
  misc_feature (339)..(339): n is a, c, g, or t
  misc_feature (441)..(441): n is a, c, g, or t
  misc_feature (444)..(444): n is a, c, g, or t
ttgtgttcaggtggtttttgttttggttcgcggtctttcgtctgttctcgcggtctcttgttgtttgttgttctcttgtggtttgtttgtctgctgcgtgttgtgctttgtggtggtgctggtgtgcatcttcgtatttttgagggttgtggtgttggtttatggatttgccgtgggtcctgttatgtcggttccttgtcttttgtcgttgttgctattgggagttcggtgtttatgatggtggttcttgccgtggataaccgcatatgttctgggctggcaagacagaccggggttcccgtgtgcctgagcggaccttcccagctagattcactccanttggacatgggcccagataccatgatgctgagcccggaaactccacatcctgtggacctgggccatagtcattctgcctgccctgaaagtcccagatcagcntgnctcaatcagtattcatatttatagaccaggtacctgtcgtcaacctgtgagagccacaagttgagctctaggggggtacaggccaggccactgcttacgtgatcagctaaaagcagcctgcagactgcgctctcccagtctctatcccaacctctcgcctaactataatatcataggatgctgcagcccccatgggaaccaggcaccgctccagaatgacctggccgacagtgaggacggattgagaaggagctgcccaggaggggcttctgggaagactctggtcaagaagcatcgtgtctggcgattgtggggatgcaactagtgtatgttttgtatcttccgtcatgtagttcttcaaagatagggagggaaagggggaacatgagcctttgtagctatcaagcgccagaacatacgttggcattattcaacctttcaccg

SEQ ID NO: 565711 - DNA, 646 bp, Homo sapiens
  misc_feature (19)..(19): n is a, c, g, or t
  misc_feature (24)..(33): n is a, c, g, or t
  misc_feature (43)..(46): n is a, c, g, or t
  misc_feature (48)..(50): n is a, c, g, or t
  misc_feature (52)..(52): n is a, c, g, or t
  misc_feature (54)..(54): n is a, c, g, or t
  misc_feature (83)..(83): n is a, c, g, or t
  misc_feature (114)..(114): n is a, c, g, or t
  misc_feature (117)..(118): n is a, c, g, or t
  misc_feature (137)..(137): n is a, c, g, or t
  misc_feature (163)..(163): n is a, c, g, or t
  misc_feature (200)..(200): n is a, c, g, or t
  misc_feature (206)..(206): n is a, c, g, or t
  misc_feature (221)..(221): n is a, c, g, or t
  misc_feature (228)..(228): n is a, c, g, or t
  misc_feature (237)..(237): n is a, c, g, or t
  misc_feature (247)..(247): n is a, c, g, or t
  misc_feature (252)..(252): n is a, c, g, or t
  misc_feature (296)..(296): n is a, c, g, or t
  misc_feature (314)..(314): n is a, c, g, or t
  misc_feature (340)..(340): n is a, c, g, or t
  misc_feature (363)..(363): n is a, c, g, or t
  misc_feature (367)..(367): n is a, c, g, or t
  misc_feature (371)..(373): n is a, c, g, or t
  misc_feature (376)..(376): n is a, c, g, or t
  misc_feature (415)..(415): n is a, c, g, or t
  misc_feature (452)..(453): n is a, c, g, or t
  misc_feature (457)..(457): n is a, c, g, or t
  misc_feature (490)..(490): n is a, c, g, or t
  misc_feature (497)..(497): n is a, c, g, or t
  misc_feature (504)..(504): n is a, c, g, or t
  misc_feature (517)..(517): n is a, c, g, or t
  misc_feature (528)..(528): n is a, c, g, or t
  misc_feature (577)..(577): n is a, c, g, or t
  misc_feature (641)..(641): n is a, c, g, or t
ggagcagccgcagcctgcnccccnnnnnnnnnncccccccccnnnncnnncncncgccctccgccgccctccccccgccccgnggtctctttcccccttcctcctccccctccnccnnacccccttcctcctccgcncgcccgcggggcccccctcgccttanccgcccgcccctattgttccgcccccggcctcccgcnctttcnctttccgcccgctcnccttttnccctcagtngcctcgcgcntgcantttttggctttcacccccaaccagtgaccaaaaactttaccacncaaaatccagctccccanaacactgctcgacatggacaccggtntgattgaaggtggattaaatgtnactntcannntcnggttatttattcatggaaaggaagttggcagtatcatcngaaagaaaggagaatcagttaaaaagatgcgcgaggnnagtngtgcacgtatcaacatctcagaagggaattttnctgaganaattatnacttttgctgganccactaatgcnatcttcaaagcctttgctatgatcattgacaaactgggaagaggacatnaagcagctctatggaccaataagcacagctggccagtagaacccccggtcaccctggaggctgngtggt

SEQ ID NO: 565712 - DNA, 411 bp, Homo sapiens
ccgggcgcggtggctcatgcctacaatcctagcactttcagaggccgaggcgggcggatcacttgaggtcagaagtttgagaccaggctggccaacatggggaattcttcattttcacttaaaattccaaaattagccggtcgtggtggcttgaggctggaattccaggtacttgggacgctctagcaagagaatcgcttggacttgggaggtggaggttgcagtgaaccaaaattgcaccactgtacttcagcctgggcaacatatcaagagttcttttcaaaaaatataaatttaaaaaattcaaatattcaaaaaaaacaaaacatctttcaattttagcccattttttggagtacttgctgtaccctgtcacaattgcataatttaaaaacgcggggaaattaagtt

SEQ ID NO: 565713 - DNA, 415 bp, Homo sapiens
tagccagtgaccctcaagcgtgtgttgcacaagaattacttaggaattccatttacagattgtaatttcaccacaagcattcccttccccacctctcacttcttcaaatcccactaaaatgacagtagaggaataaaaacacattaatctacaataataaagacaaagagaagggagacacaattagaattagagatttcgacaagtatttggacaaagacacatgtttggaagacggaaagtgggtgaagaagtagtaattaacttagcagagaggaacaggtcaaaacctaagtgtaaagataggggccagttggcctcagagatccttaaagtgtcaacatttgggatataggaggtgtcactaaaggataggtcaggtgtttaggctcaaacatgggagatgtttgaaagt

SEQ ID NO: 565714 - DNA, 276 bp, Homo sapiens
tctaagatcctgctgctcctctcacagatgcggtatatgtaaatacatacataacagaactagcctcaatatataaggtgggaaatgacatagaagtaaggcagtgcagggtcctgctgtactcccagcacttcgggaggcaagtggggggggttgcttgattccaggagttcgagacagtctggcacatggaaaacctgctccacaaaaaataaaaaaattagccggtatggtggtgcacacccgtggtcccagctactcaggaggctgaggcgg

SEQ ID NO: 565715 - DNA, 191 bp, Homo sapiens
aatcaaccacatgcccagccctgaaggactgagggagcttgtgcgggatcccgtcatccggactccccacacaggtcaactgattgatggccatgggcatgagtctctggatctcctggaggttagcccagcctcggcctggagcacagggcctgtgatctgagaatctcagatccagaatcaggagctgg

SEQ ID NO: 565716 - DNA, 1452 bp, Homo sapiens
  misc_feature (426)..(426): n is a, c, g, or t
tggatacttgcctaacatgcttgtgctgtaaaaatagttaacagggaaataatcttgaaatgatggctagcttgtgttaaaggtcttatgaaatttccatgaacaatccaagcataattgttaagaaacacggtgtattaaatccatgtaagtggaataaaagttttatgaatggcacttttcaactactttctctacgagctttccagtttaaataagctctgggtcctgaaacttctctaagaggaaatgtgtcacatttttggaacattaatctccttatctccctctgtggcagctaagtgggcttcttaccaagttttaaacaccaaaaattatatcaataacaaaaattactacctaattatataacatacgtgtttctccagtgttcccatgtgattccccttcttctttccttccccnacccttgaaaaacaaagtgagtttccatatattatttctggggaagaaaggggcgggacatgtgcattcagaaaaacacaacagtgctcaggtggtgtttctccattttaacaatttctgtggccaataagtggcccatttctcataacctctaaggaacagccacaaacgtgttcacgtgtgagcaccaaatcaagtgcaccaattggggatacgcatcttaaaccgtgtaaagttataggggaggcttcccacaaattcaagcctatagaggggaattgcttaaacgaaaatttctttggaaaactcctaaaataaggccgtggctttcacattttgtgactcctcgttataaatgtaccttatgacataaattgtggctccagggtgtgtccaccgaaagaaaattaacccgtttagcggtggttttataacgcccctgtcttggttcttttgttacacccgaaacccaagtttctttaacttggtgggtggggcccatgatatcctcgtgtggaaaacaaatgagctccgaattgatgacatcttttctgtgtgataccacccatccaaagtgtcctatagcggacaccccccgggagtacccaattgggcatgtgagccaccccccaacggcagctgtagtgttcgccccacctacacataattatacatgggagcaagaacacttccctataaggctggatcaagagacagcggggggaaacatcccccgtttagaaaaccgcaaccacacctcgctgcagagagaggctggtgccgagtagcgagccacaaagaaaccgactaccagcaagtagtagcaccaccacatctcaaaaagaggcgggggggcagcatcccaccaccacagaaaacaaaagatactcaccctgctgggtgaagaagccaaacaagcgctcacacagagcgtcctctacaaagcgcacacacgacacgcggagttctgtgactagagcacaagctcggctgccagacaaaaaaaaggcggcgcaccgctgttgc

SEQ ID NO: 565717 - DNA, 306 bp, Homo sapiens
  misc_feature (38)..(38): n is a, c, g, or t
agtgactagaggatccccgactgctccctctatcaggnctgggataacaggcatgagctataacccagcgcatgctatggtttgtatgccttgccaggccattgttatagttgcttgtaattttcacagacttaagtctaagtcttcagtttccaatttccagacctccggtccccaccttttcctatttaacttgtctcttgttacctctcagccttggctctgctctgaccactgaggctccatactatctccttgggttataccctttgggtctaagatttaggccgtgaagagggaggcagc

SEQ ID NO: 565718 - DNA, 607 bp, Homo sapiens
ccacaggatctattgcagaattgacccccaaaggttaaccacctggtcccagctgagaagaggaagcccatcctagttctgtctctctttgatggaatcgctacaggactcgtggtggtgaaatacttgggcattcaggtggaccgctacattgcctcggaggtgtgtgatgactccatcagggttagcatggtgcgacaccaggggcaagatcatgtacgtcggggacgtccgccgcgtcacacagaagcatatccatgagtggggcccattcgatctggtgattgggggcagtccctgcagtgacctctccatcgtcaaacctgctcgcaagggcctccacgagggcactggccgtctcttcatagagttctaccgtctcctgcgtgatgcgcggctcaaggagggagatgatcgccccttcttctggctctttgagaatgtggtgggcattggcgttagtgacaagagggaaatctcgcgatttctcgagtccaaccctgtgatgattgatgccaaagaagtgtcagatgcacacagggcccgcttattctggggtaaccttcctggtatgaacaggccgttggcatccactgtgaatgataag

SEQ ID NO: 565719 - DNA, 401 bp, Homo sapiens
aaaaacagttctctctgctggataagtgtgccaagagaaccacgtgtgctggtggaaaagcgctggacctgctcccagcaccacagccgacagcagcaaatggccattgaacacttcaaaatgcggttatcagtggatgcctcaccttagaaaagtcccgtaaaactgaggaagattgtgggaggtatccttgggggtcatctagaccagcactccagcttgccccaaatctacagatcaaaaaagcaaagtccagagaagtaacgtctcaaggtcacataagtcagtccctatcaacaacagcactaaaatcaaggcttcctaaaaccagtcggatcattgttccattatagcatatggtaattcttgttagatggaaaacagaaatatttagaaaaaaa

SEQ ID NO: 565720 - DNA, 116 bp, Homo sapiens
ccatgttgtctggtccctgttcaacaccctcttcatgaacccctgctgcctgggtttcatagcattcgctactccgtgaagtctagggacgaggaaagatggttggcgacgtgacc

SEQ ID NO: 565721 - DNA, 708 bp, Homo sapiens
gggctcagcataccacgatcatcgaggttctcttggccgacaccttctgcgtggaagcttacttgcagaatctcttcagcctctgtcagctggacaagtatgctccagaaaacttagatgagcagattaagaacagtgtccacatgcagatccttgagaagtcgagcctatatgctagtgtcctcacacctgcgtgtgaccaaggaaacattgactgaaggtcacggggaacagtgttcccccgtgctaaccgcccgcccactactccataggtctccgttgtcttggatgatctgttactcttttttcagaaggtgttgggattatcacaggttaagccttttgttccccgtctgcacctgaagggttgtcgcctggcctgggagagcctcttccaggattcttgacctgcaggcagatgcgtctctcaacaggaccatcacagtctgtactgaacctgagccgtgagagagagaatggaattgctgaccctggatactggcgggtattctggtcattgagcgagacaccatacgtggccaactggggctttatgctgctgcctccagggtgtgaggtgggtggggacctgtgtccaggtgtggatagccatttctgctcaaccacacattctctaagaaacagcttgaaagctcatgtctgggtcattcatttaaactagaagacatgaggcacttaaaacatgta

SEQ ID NO: 565722 - DNA, 691 bp, Homo sapiens
ggataccacctgcgtggtttcaagtatgtgccgtacgatgggtgacagcaagcgcgcgctggatgagtatacctcgagagctgatgctgggcggaaccaacacacaggatgcgtgcacaacacgctgtgaggactcgcatgctggccgcacccaatcatgcatggaccgtaacgctagactgacacagagactagtgaccagcagcgatgagacttactagcactgacatggaaccccgagaccgacagcaccttaccacacaccgatgtctagtccctagctacagaatatacactcttacaaggacgaccacataagatgaccgacccaggaaagaccggtaggatcaaatagacgactatatgaaccgcgcagacagacagactgacaatcgaagacaacagtcacatcagggccctgcagatggaggacatccacggacacaaacgagaaaacacaacaaatgaccaaacacttgcggaaaacaacacaggacatgagcaggccgacccagaggacccacagaagcatcaaagacgacgatatgagaccccggtggacatgaccacacatacacacatagtggattgaaacaagagacaacggacccggataccacgcatgcccacacaactgagcatgccacacggatgcattgcccaatgggcaatcctgccaacgagggagcac

SEQ ID NO: 565723 - DNA, 1413 bp, Homo sapiens
  misc_feature (286)..(286): n is a, c, g, or t
  misc_feature (546)..(546): n is a, c, g, or t
  misc_feature (903)..(903): n is a, c, g, or t
ctttgtgttcctgtgtgttggtctggtcttctgcttcttttgggtctgtggcgtttcgtcctcgctgtcgtgcttgtgttgtctcttgcttggttctctactgctggcgtctgtctgctcctcctgcgctgctctgtgctcctcttcgcgcttgcttgctcacgtcgcctcttgagctgcgtcttttctgctcgttggctgtcgtcttcctcgttgtgccgttctttctctgctcttgttgttcttgctgtgttttgttgtgttgtgttttggtgtgctcggtttngtcgcatggaagaaaacagcgcgggttggacgtggggtggtcgtcagccaccggaggttgtgttttgtgctagacgtgtggatcctcctagtgttggtttgagagtcgtcctttctcgggtgtctctctctcttcacaaatggtcggtgaaacccacgttggttcccgtggggagcccctttcttttctgccgccccaatgtgggctctttcttcctgcgtctggaaacccccctggggtctctctgtcccctcctagancgcccgtggtgtgtggagccgctgcatctattggggcgtcctctgttgtcatgagcttgtccgcgtgtggtgtgggcaatattcgcttgctctgttttgtgagccttcccgaatatacgccccggggggcccccccccccccttattggggggggtttctcaaacacacctcggggcgcctttgtgaccgcccacggtacatacctttcttggcgggtgtatgcgcccctcgtgtctcgccttcccatgcaacccctggggggttctttttgggttgacatggaccccccgccacggctctgtttgttcagggcccgccggcctgcaccgcacgcgttcctctccattttggggcanccggggagatccacacattttgtgccacggggccctcccgctgtcaggcgcgccctacggctcttgcctcgcccttttcttggatacatggcgcccactcgccgtggcttttacatagaatagagcaccctcggcggcggtgcggaaaacgccgcggcaaagaagacaggagcgttttcctgagtagaaagcgcagggagaggcggtacttccacacaggttctctgttatcactcaccacgctggacgcacaccgcggcggcgtgtttctttgcctccaccccccgtctagagagcagagtagcagagagagcgtccacgacgagtaaacactcctcgttgtaatagtaacagacgtgctctctccacaagcacacctgttgtctttcaccgctgttgctctccgcggtccgtccaggccgctcgcgccctattgaggagtctttctcccccgggagtaggagaagacaaatacagacgcccccggcgagaacaaatagtccgagaaaa

SEQ ID NO: 565724 - DNA, 1406 bp, Homo sapiens
gagcagtgcgccgcttcgaggccctgcgagaaaactgcgcgccgagaccgctcctgcagtattagttcttgcagctggtgtgtggctggctgagtgcggcatggatctcagctgagctggagagagacaatacatggcctgctgtctgcctgagttctgcctgtgccctgctggtgtgcctgcaaggagccttgctgtcctgtgtgctgtccgactgacgtgctgggcatgtgggcccctgtgcttgtggccccactggatctactgccactctgttatttgtccccctgcctcgccttggcagactctcggagtgctgctgacaatgttggccacgactccaaatgaccctatttgccccgcagccgacgcggcgacaacggcttgttcttgccgacacaacttggaagcgacactggaccttccgtccggcctcgccgcgctcgggatcgttcgctcgtctcccaaaacctccatctctaccaagcatgccttggggccgcggtcacacactacacaccgtgcaaactcccatgtcaacattgactacacgccaactgcgcgccttactaccacgctattgccctccggacccacgcgcaccttgcacaccgctcaccccgagcgtcattcaggtgggcaccacccgctacggcgcatgccgcacgagcaccatacacacgggtcgctggcctgcaccaacacgcttctcccccggcgcatctgcagcgcttgaccggtccaccgccccaccagccacgcattgccacctcctaacccctgtgctgcgcccagggtcggccttcggcccacgcattcgttgcttgcccatctctcggcccccgtggaccccaccgcccgctcgcccgaactcctcgcgctgcgtcccgctgccaccaccgctttccctcggacgctttgcgcatcacctcgaccttcattgcggctcccagggtacactcccagttggaatcccccaacgaacagaaacagcaccgtagacgtcagcaagtccgcgcacaccgttggcaacgccctcgctcgtacccgggctttccccccgcgacagttctggcaccccgcgtacccacgccctggcgcggcacgagggaccccaagaacccagtcccgcgttcaaacaagaccgcgccgaccacacagtctacacacctgcgcgacgcgaagccaccccgcccactcgcgaacacaccgacacagcgcaccccacacgaacagacacccaccacacagcagccccacaggacgcggacccaacccgggaccacagcacccccacacgcaacacccgcacacacccgcgcagctcaccaccacacgctcccccaccccactcagccaccggcccccccaccccgcacctgcttctgccgcaacacccaccgcca

SEQ ID NO: 565725 - DNA, 687 bp, Homo sapiens
tgggtgagcctttatttccttcttttttctctttagcctcgcctattccaggggtgtggtttcgtccggatgccccccagaagggagggtggctcattcggtttaaaagattgggggggaaaaaaaatttcaaaacccctggggggggaatgcccttttttctcaaaatttttaaagaggggccttttttggaaccctctaaaaaatttgggaggagggaacccggttttttcaaaaaaaattttgttgtgggggggcccccaaaaaattgggaaaaaaattttttttcctttttttgggaaaaatattttccgcggggcgctttttttttaacaaacttggggaaggggggggtttggggggaaaaaaaaaccccgggaaaaaagttttttttttttcccaaaaaaaaaaccccccccccccccccccttttttgaacaaaaaaaaggggtggggcccccctttttttttttttaaaaaagaaattttttataaaaaaatattttttgggggggggggggcttttttttttttttttccgccccctttttttttttttttaaaaaaaaaggttttctttatttaaccgcccgcccctataaaaaccccccccccccccccccccaaattttttttgcgggggaggggggttttttcccccaaaacaaaagaggggggcccaccatg

SEQ ID NO: 565726 - DNA, 210 bp, Homo sapiens
tagtacaatataacatttaccatgctaccaacaagttcatttcaagccaaaaagtagctaaatacagttatacatttattaattacaggttgaagttctgggatccaggagaaacttaagtccttgtattgcaatagccatgtcttaagtttatgtgaatgtgaaatttctattaatcattctcatcttactcttatataaagtgccgac

SEQ ID NO: 565727 - DNA, 190 bp, Homo sapiens
ggttctttctggagctcttccttttctgaatctgtgatggtagacattacccctgagtaggaagcaaagccggcatgcctgcccaccagcttcctgtatttaccttaatggagttttaaaacacagcttctgacatgtgtacaaaccatgcatggtacaatgtggacgcctctgttggaggtcttcatta

SEQ ID NO: 565728 - DNA, 362 bp, Homo sapiens
ccccacccggcccaaggaaatatttaaaaaataaaataaaataagttatttaaaaattggggcaaagttggctgggcaacgggtgtcgcgcctgtggtcctagcactttgggaggctgaggaagggggatcgcttgaggtcaggagttcaagaccggtctggccagcatggtgaaacactgtctctactaaaaattcaaaaaattagccaggcattgtggcaggcacctacaatcccagctactcaggagactaaggcaggagaatcgcttgaacctgggagacggagattgcagtgagttgaaatcatgccactgcactccagcctgggctatggagcgagactctccctcaaaaaaaaaa

SEQ ID NO: 565729 - DNA, 201 bp, Homo sapiens
gcatctcagaccaagggaatacccttgcattttaacgtgatagaaaaagctatcagtggacaggagccaaagataggcctgagatagtgaacgagctaccgagtactaacaatccatatagagtagagcttaggaacgcagatagcttctcccggtatgagacctagagatagactagtatgacccgagtatagacaccta

SEQ ID NO: 565730 - DNA, 146 bp, Homo sapiens
ccccgacgtaggggaaacaaacggcaaggggaattggcaaaagtagagaagttggcaagacatatccttacaggcagagaggcttgcgatacaaaataattgacaaaactcagttgaatccaacaagtctacagagaagctcttca

SEQ ID NO: 565731 - DNA, 107 bp, Homo sapiens
cagctcacaccactttggtgaggatgccttcctccctgagattttcagcaccatctcggactggaaccttccaggaatccctggacctctctgagtcctaccaatca

SEQ ID NO: 565732 - DNA, 658 bp, Homo sapiens
  misc_feature (72)..(72): n is a, c, g, or t
  misc_feature (121)..(121): n is a, c, g, or t
tgctattgttgcagaaagtgctgccattggaaatgcagaggcaaatgcattcagtgtacttcagcatcttcnttggtgctggaccacatatcaaaaggggcaacaacaccaccagcctccntgagccagagtgttgccaaaggaagtcaccagccttttgatgtttctgcatttaatgccagttactcagactctgggctctttggaatttacactatttcccaggctgcagctgctggagaggttatcaatgctgcctacaaccaagtcaaagcagttgctcaaggaaacctttccagtgcagatgtccaagctgccaagaacaagctaaaagcaggatatctaatgtctgtggagacgtcagagggcttcctgagtgaaattgggtcacaggctctagctgcaggttcttatatgccaccttctaccgtccttcaacagattgactccgtggctgatgctgatgttgtaaaggctgcaaaaaagtttgtttctggcaagaagtcaatggcagcgagtggaaacttgggacatacgccttttctcgacgagttataacacatgcgtgtatttaaagctcagcccagaccagcaagcacatcaaagtcaggtctcttaataattaattaatgttaattcaacattttctcaatgaagt

SEQ ID NO: 565733 - DNA, 694 bp, Homo sapiens
atgttttttaaagatgttttggggcacacaaaataaaaaagaggatttaaaatattttatttccccccggggggaaattcttttgtaaagggccaccctaaaaataaaatttttaccagggagtgagggagtagttttctggtattggggggagatctctgccactcaaatgataattatgtttctgtctcactctcttgctctccccgtgcgatttttgcccgacgcataggtaaaggcccaaatccctcggagcgtggtgatagctggttgacaagatagactctgagccctcttttaaatttgcccacagaacccttcaatgccccttgtaactttaactgttagtccaaaaaggcacagctctttgtacactagcaaaaaaccttgtatagagagtagaattttcctccaccatagtaggcctaatagcagcctcggtttaagagagcgttcaagatcaacacccactacctaaaaaatccctaacatatagctgaactcctcacacccaattggaccagtctatctccctatagaagacctaatgttagtataagtaacatgagaacattctcctcggcataagcgtgcgtcagattaaaacgctgtctgacaattaacagcccaatatctacaatcagcgaacaagtcattattaccctcactgtcacccaacacaggcatgctcata

SEQ ID NO: 565734 - DNA, 405 bp, Homo sapiens
cccagccgaccaggaagtcgagctggaagcaaagctggcagcagggccagcagccgccgaggcagtgatgcatcagactttgacatttcagaaatccagtccgtgtgctcagatgtggaaactgtcccccagacacacagacctacaccccgagcaggttctcggccatccacagcgaagccttcaaaaatccccacgccccagaggaaaccacctgccagcaaattggacaagtcctcaaagagctagtgcaactggtcctcccaaggcccttccctgagcatctattctttaagttcgcaccatctaaactatggtgtcgcaactcctgtgcaatattgccacagccgcgtctcaaactctgcacgtcgccacacaaaaaaaacacaacaacaacacaaaaaa

SEQ ID NO: 565735 - DNA, 122 bp, Homo sapiens
tctcggtgtgtcgtgtggtatgtgtgtgtgtgtgtggtaattgcgtgtgtgtgtgtgtgtgtgtgtctgtgtgtgtctggtgtgtgtcagagtctcgctctgtcgcacagggtggagtgcag

SEQ ID NO: 565736 - DNA, 165 bp, Homo sapiens
gtcccacgaggcttccatccccagctggcctccgtgctcttacctcccggtggtcgggcgcgaattactggaaattggcttttcccgttggggccgaaggtacttcccttcggcggcgacttaacgggtgtcgttccggcccgcgttacgcaaccccgattcgcg

SEQ ID NO: 565737 - DNA, 228 bp, Homo sapiens
  misc_feature (47)..(47): n is a, c, g, or t
aaaaaccactctatatttattctttatagaacacacttttcttcctngatggataacaaactgtctgaggtttcccacattaataaatcccattctgtggctttacatcctgaatttctgttcttaatcagggttcagtatcattatccccagtgattaaaatttttccctgggatcatcagggctgtgcctttgcctttgaaatcccttaccctcccaaatttcggg

SEQ ID NO: 565738 - DNA, 217 bp, Homo sapiens
  misc_feature (44)..(44): n is a, c, g, or t
tcttcaggagaaggggcaccactgctttaaaaaacaatactccnttatagacttgaacatttgcagacattatgatcttgcttccaactcccaccgtatgtccagcaaactctcgcatgtggccactaggaggaatgcgcaagaatgttcatattacatatttataacattaataactggaaaaagtgaaatgcatgtctgttacaggaaaataggc

SEQ ID NO: 565739 - DNA, 150 bp, Homo sapiens
cgctgcacccgggccgccggttccagcgccgccgtctggaaaaagagccaaggtgctgcagcagcccccgaagaccccagggcggctccgacgccgcctcatgggctaccgccccgagccgcatcgtgtgggagcacacacgacggccgc

SEQ ID NO: 565740 - DNA, 205 bp, Homo sapiens
ttcatattgcccatctctggccctggggcacttcctgcagttggccccttagcccttttaataccccttcagttggctattatgatttctgttctgttttctattacaaggtacttccgtttcaacttgaaactttccttccctagtgttttggagcagccatattcttttagggtacacactgagctctccctatatgtgggaa

SEQ ID NO: 565741 - DNA, 130 bp, Homo sapiens
cagctagcgtgcattgccaaaagttcacctctcgtgtctagaacacaagatattcatattttcagacaggtaaccagtcggggagaggcacatttggagctgaatgcattttgatggaagcgtcgcgcat

SEQ ID NO: 565742 - DNA, 246 bp, Homo sapiens
ataacgatacatatgatttttctgtgcttgatatatctcagtctattagatgtacaccaagtactgtaataacttaaggagaaaacattttgtagtatagagatatctctactatacccggtttatacatcctataagtagcaacgtttaactataaacagacaatcaaaaaaacagcaaatgagcatttaaacaaaaaaaaaggaaaggggcgaaacaacacacaacaacactaacaaaaaaaca

SEQ ID NO: 565743 - DNA, 1077 bp, Homo sapiens
  misc_feature (52)..(52): n is a, c, g, or t
  misc_feature (132)..(132): n is a, c, g, or t
  misc_feature (285)..(285): n is a, c, g, or t
  misc_feature (805)..(805): n is a, c, g, or t
  misc_feature (807)..(807): n is a, c, g, or t
  misc_feature (809)..(809): n is a, c, g, or t
  misc_feature (813)..(813): n is a, c, g, or t
  misc_feature (818)..(818): n is a, c, g, or t
  misc_feature (823)..(823): n is a, c, g, or t
  misc_feature (827)..(827): n is a, c, g, or t
  misc_feature (829)..(829): n is a, c, g, or t
  misc_feature (838)..(840): n is a, c, g, or t
  misc_feature (844)..(844): n is a, c, g, or t
  misc_feature (850)..(850): n is a, c, g, or t
  misc_feature (852)..(852): n is a, c, g, or t
  misc_feature (855)..(855): n is a, c, g, or t
  misc_feature (863)..(863): n is a, c, g, or t
  misc_feature (918)..(918): n is a, c, g, or t
  misc_feature (1006)..(1006): n is a, c, g, or t
gatagtgtgagtgggtacagtggcgttgagattgcgagctcgctggtcgtgntcgatcgtcagtgtcagcgcactctcgttgataagaggcgtctcggcctatcgacatgctgcggaagacactacaacgtncaggccgtgggaatgctctgtgacctgcgtacgaatagtctacctcgcctgtgtaggggtcgattgaacgctcgccacggctgttcgtgtccatcttgcgttatactattggcgtgctcgttctcgaggtggcacgggcggtacgcgcgactncatagcgtgggaacggacgccggacgtagtagctggttcgcgggggccgcgacgtataaagaggcgcggctgaggccaaagcgtccgaggctgcagacaggagcgggccggagtctgctcagacgccggtgggtcgcgctcaaattgcggggtcagagcggcttctcgccgagtgagggcaaggcgtgtgttatagcgaggagagggacgggaacgagcaagaggacgcggcggatgggttgggcgcatgcgcagcgaggtggctaaggggtggtgtggggcgtccgaaccgaaacgacccccgcgctcattcgggcgggggcgatgagataattaggcgtttcgtgtctctatcggtaggccaaaggaaggcatcctatgaatggtgaactggctatatcggaatagatggaataaacgaggtcagttatgcaatgcaatcataaagtttcatgtgatattttgcgtgcgaggcagaagtcagctgcgtctgattctcactccgcaggccggtcatgtnantntgtngttgntgttngganantagcattgnnnaaanctatanancanaggaaatnccaagtaaaatcaaacagtgttcactcttaactctaaacacagtgctcccactantggttctgcattgaggcggaggggaaggccagaggcaggcttagcttcggacggacagcgtattggggctgtcacggactggagctgnctgcccaaggtatgccctcggaaaaagcgtaatgaaaaagaaaaataggtaaagccaatgatttttctgct

SEQ ID NO: 565744 - DNA, 1437 bp, Homo sapiens
gaagctaggagccgcgcgagtcgtagtgtcgctgtttgcagggtctccgcgcgggaccggggcagcagcgagggtcagctgagtgcgaggagtgtcatgtcagacaacgaggcacaattttgatggccgacgacatttgatgatgtcggcaggaggatgcacagggctagcatgcacttggcagcacatgccagcaagcaggcacggccaaggcagcaatgtcagagcatcctccccgtcttggcggcagcgcaccgcacgggcccacaccaagcaagcgcacatcaaccacacacatcacactcggaccacaaaggtgacggaagacgaggccccagccagcgacgtggaggcaacccccgcaggcggcatccgagggaactgggcggatcgctagtaggagcccacttgatcggactctgggtgagacaggcctcgggcacgcgcggagcacgagcacggaataccctcctgaccctccaataaggagcacgtgaaccgggagaacttcagacgtacaagggtccaacgtccaagcatccaatgagaattccaacaatagcttccaagacacgtcaatcatgagagacgaggtaaaattcatgataagaggccatcatccatgactctgaaagccacagttaaggcagcacaaaacgaaggcccatgagacctgggacacgaaccggctcgggacacggacctcgacgcaccactaccaagcacatccactcaacggcccacccaggcctcgacaaaccagggcaccacaccacaggcacaggcaaacgcgagcgcacgcacgcacgcggagccggccacgcgaccaacacaagtggcagcaaaaggcagacccaccgagagcgacgaacgccagagcgggaacagcacacaccgactggagcagagaacggaaacacactaacacacatggaaaccagtgacactacacagggcagggaccactgcggccaacaaagcagcagaacgaaccagagagcacacaccataccaggaccgacgcaaaagaaaagaacgagatagcagggcaacgcacgagcacaagacggcgagcacgtcaccaacaaagacgacagagcaccaaagacaaccagcaaaacgacgtggagaacagcgagaaccagcagcggtcgcccgggcatccgcacggaacacaacgcccgggagcacgtgcttcctgcctcagtccgcggggtcgccagcgtctcgcgtgtactggggataggccacgacggaccgggggccagctgggttcccgaacgttacacagcagatccggccacggaggccagctgaaagggagtacgggaatcgccgtcagtaggagtgagcgatcgaccgacacacgacgcatagtcgacggggagtgaccaagtcttgcactaggatcaggtcgtgctagctagcaacgtcgtc

SEQ ID NO: 565745 - DNA, 606 bp, Homo sapiens
gcaaacaagcaaacacagcacagaagagactgaagacgccagaacaaacaaacgcagaaggacaagatacgaaaaacaacacaacaaaaaaaaaacaagagacagagaagaagaaacagcaagaccacaacaaaagacaccagagacacgaaccaccaacaaacaaacacaacaagagagagaagaacgacgacgaacagccaaagaacgagagcaaagagaagaaagcagcaggaacacacaacagcccaggcagagggaaaagaaagaccgcaagccaccaaagcaacaagagacgaggaagacacatgaccaatcgacgcatcgaacacacaaaaaaacgaagaaaaaaggccacacacaaccacaacaacacaccacccagaggacaccgagccacaccgcagtaacataaacaggacacgaagataagaaaagcacagaaggacgccaaaagaacgcagaggacaccaaactagcccggcaaaacactgaaaccaacaaagacaacagaagcacaaacacaaaaaagacgcacagaccacaagcgaaaacaaccccaccaaacagcaaacagggacaagcaacaaccaagagacagcagac

SEQ ID NO: 565746 - DNA, 784 bp, Homo sapiens
  misc_feature (6)..(6): n is a, c, g, or t
  misc_feature (77)..(77): n is a, c, g, or t
  misc_feature (79)..(79): n is a, c, g, or t
  misc_feature (81)..(81): n is a, c, g, or t
  misc_feature (85)..(85): n is a, c, g, or t
  misc_feature (90)..(90): n is a, c, g, or t
  misc_feature (95)..(95): n is a, c, g, or t
  misc_feature (99)..(99): n is a, c, g, or t
  misc_feature (101)..(101): n is a, c, g, or t
  misc_feature (110)..(112): n is a, c, g, or t
  misc_feature (116)..(116): n is a, c, g, or t
  misc_feature (122)..(122): n is a, c, g, or t
  misc_feature (124)..(124): n is a, c, g, or t
  misc_feature (127)..(127): n is a, c, g, or t
  misc_feature (135)..(135): n is a, c, g, or t
  misc_feature (190)..(190): n is a, c, g, or t
  misc_feature (242)..(245): n is a, c, g, or t
  misc_feature (249)..(249): n is a, c, g, or t
  misc_feature (255)..(257): n is a, c, g, or t
  misc_feature (265)..(266): n is a, c, g, or t
  misc_feature (270)..(271): n is a, c, g, or t
  misc_feature (273)..(273): n is a, c, g, or t
  misc_feature (276)..(276): n is a, c, g, or t
  misc_feature (280)..(280): n is a, c, g, or t
  misc_feature (282)..(282): n is a, c, g, or t
  misc_feature (285)..(286): n is a, c, g, or t
  misc_feature (291)..(293): n is a, c, g, or t
  misc_feature (301)..(301): n is a, c, g, or t
  misc_feature (304)..(304): n is a, c, g, or t
  misc_feature (310)..(310): n is a, c, g, or t
  misc_feature (313)..(313): n is a, c, g, or t
  misc_feature (323)..(324): n is a, c, g, or t
  misc_feature (327)..(327): n is a, c, g, or t
  misc_feature (334)..(334): n is a, c, g, or t
  misc_feature (343)..(343): n is a, c, g, or t
  misc_feature (349)..(349): n is a, c, g, or t
  misc_feature (363)..(363): n is a, c, g, or t
  misc_feature (372)..(372): n is a, c, g, or t
  misc_feature (384)..(384): n is a, c, g, or t
  misc_feature (390)..(391): n is a, c, g, or t
  misc_feature (395)..(395): n is a, c, g, or t
  misc_feature (399)..(399): n is a, c, g, or t
  misc_feature (402)..(404): n is a, c, g, or t
  misc_feature (406)..(407): n is a, c, g, or t
  misc_feature (413)..(413): n is a, c, g, or t
  misc_feature (417)..(417): n is a, c, g, or t
  misc_feature (419)..(419): n is a, c, g, or t
  misc_feature (427)..(429): n is a, c, g, or t
  misc_feature (437)..(437): n is a, c, g, or t
  misc_feature (440)..(440): n is a, c, g, or t
  misc_feature (454)..(455): n is a, c, g, or t
  misc_feature (458)..(458): n is a, c, g, or t
  misc_feature (460)..(460): n is a, c, g, or t
  misc_feature (466)..(466): n is a, c, g, or t
  misc_feature (468)..(468): n is a, c, g, or t
  misc_feature (472)..(472): n is a, c, g, or t
  misc_feature (484)..(484): n is a, c, g, or t
  misc_feature (515)..(515): n is a, c, g, or t
  misc_feature (522)..(522): n is a, c, g, or t
  misc_feature (525)..(527): n is a, c, g, or t
  misc_feature (541)..(541): n is a, c, g, or t
  misc_feature (552)..(552): n is a, c, g, or t
  misc_feature (556)..(556): n is a, c, g, or t
  misc_feature (585)..(585): n is a, c, g, or t
  misc_feature (587)..(587): n is a, c, g, or t
  misc_feature (632)..(632): n is a, c, g, or t
  misc_feature (634)..(635): n is a, c, g, or t
  misc_feature (641)..(641): n is a, c, g, or t
  misc_feature (644)..(645): n is a, c, g, or t
  misc_feature (649)..(649): n is a, c, g, or t
  misc_feature (669)..(669): n is a, c, g, or t
  misc_feature (704)..(704): n is a, c, g, or t
  misc_feature (708)..(708): n is a, c, g, or t
  misc_feature (715)..(715): n is a, c, g, or t
  misc_feature (769)..(769): n is a, c, g, or t
gcagtnatatgtaacagtaatattttctttaaatacagaatcacctacttttatacaacttaacaggcaaacatgtnantntgtngttgntgttngganantagcattgnnnaaanctatanancanaggaaatnccaagtaaaatcaaacagtgttcactcttaactctaaacacagtgctcccactantggttctgcattgaggcggaggggaaggccagaggcaggcttagcttcgggnnnnagangtatgnnnatgcatannaatnnanatnattnanaanntattnnnagttgtgnaanatgagnttntgaaagcgcnnagnagcagcnattatagcngcgcantgcatgcgctattnatgcatgcnatgctgcgcttnatgcannagcntgcnttnnnanngcagcntgcntngcatgcannngctttgcnatngctggcataatgcnngcnanatattntncaanatagctgcagcnagcaaaaagcataagcaattggggcataatntgcaaanttnnnaaaagcttttgctnaagcatttttnaagngcttcataaattcttctcatttaaacctnanagcaattatatataaaaaaatttataagcatttgtgcaaaggcantnnatttanaannttcnagcatttaagcttctgcaantgctattcaatcaaaatgcaactaaggctcctggnacantctctcnaagcttttttccaaaagcaaatttgcatatcttcgctgcatatcttcatcatcngtacttctgctgttc

SEQ ID NO: 565747 - DNA, 492 bp, Homo sapiens
  misc_feature (143)..(143): n is a, c, g, or t
cggctgacccttttttgtggtgtactccgtgccctcactgtccgtcctgacccccctgctgcttcggggcttgacccggctcggcccggcggctccccgtgccgcgcgccccagatcccttcgttgcccccgcgaggggaagncttgggatcactggaattggcccttgggcttacctcctgcttcgtgaccttcctcctgccacgcgggctggatactgtcaccaccctggagacctacccggaggccacgagtgaaaggggtcccttctgtccctcacccctgtgacctgaccagcccccccggcccactcctggtcatgttactgcactttgtggccggcctcccctggatcactgtcaattcacaattccacgtcaccctcttctgccatcatgacctcttgatgtctccctggtgacctccttgggggtccctgaccctgcttggtggggtccccccttgtaaccataaaatctatttaaaccttta

SEQ ID NO: 565748 - DNA, 365 bp, Homo sapiens
tcatctgtcctcattttttgggcctttcgcaaagcttccagcagcggtatgttgggccagagcatccggaggttcccaacctttgtggtccgtaggagcccctatgaggagggccctgggaaaaatttgccattttcagtggaaaacaagtggtcgttaccagctaaaaagggtttgtactttggatctgcatttgctacccccttccttgtagtaagacccccactgctttaaacataaggatgtttcagttcctccctttaacaaaaatgaaaagcattttaaaaggggcagcctttggaagtggatcaaactagaactcatatgccaaactaaatatgtttgtcaataaacttacgccgtga

SEQ ID NO: 565749 - DNA, 208 bp, Homo sapiens
tgattctatatatttttccttggttttgttgcctgttaagctgaagaatagaattggacaggaactaggttactcatattcttggtattactactggatggaaaggactgttggcatcaataggggacagaggctgatgctggagtggacagtagaggtggtggagcagagcagacatcttttagtggggctgtatcaggctgggttt

SEQ ID NO: 565750 - DNA, 931 bp, Homo sapiens
  misc_feature (373)..(373): n is a, c, g, or t
  misc_feature (601)..(601): n is a, c, g, or t
  misc_feature (637)..(637): n is a, c, g, or t
  misc_feature (754)..(754): n is a, c, g, or t
  misc_feature (829)..(829): n is a, c, g, or t
  misc_feature (931)..(931): n is a, c, g, or t
gagacagtgttgacagtacaagggtcggagactacgggcatctcagatcatcatgaattggtccttgacactcccgggaattataattctctacttctatgctcttatatgttctcctcttcaccgatgtgctacgcatactcgttgctatccacgagacaaactgactcgtcaatctctaagatgtacatacgatacggcgttcagtgtatatgtcacaatctgaccttgatggtaattccgtcgagcactttccttcgatctatcattactcctacaatccaacacgttaccactacacggtatcgtcactacgctctttaggtaagcacatcgttgagctactcacaggttcgaataaccatataaccantcaagaaatgctcatatagcgagccatgcatatagagatgacatagtacccacatcatcgaaacgttactacactgcacttgaatgggaagtgcacttccaaatcatctcaaaaattactcgaatacagaaacgtctcgcctaccatttttgtatccgttccaaagggacaaaggaggtgcgtataacgaaagaggaacactcccacttggaacactgactcgacacngcattcgagagttattgtaaactcacccactggatnctgacaaaggtcaccttctccctgattcagttcttcggcatagggataaatcatactacactttgcaacacgattatattccaacatacgatttagttctagatccctccgcaacangtaagagaggcgtttatgaccacaacgacggtattgaaagcctatccacgtggcaccagtgtataacctccgacnaaaaacggaactatctggatggcgagaaatttcccatagcactgagtcaggctgggtgcaaaacggagttgcgtaacaagcgaacatttttggcctaattan

SEQ ID NO: 565751 - DNA, 355 bp, Homo sapiens
  misc_feature (235)..(235): n is a, c, g, or t
tgactaccgtccgtgcggaacacggggccggatcacgctagagtgactcatgggtcataaacgtagcttgcgcatacagcacgatgcatgttctctattgacatggatgtcgtatgggattcatcggcacgaagtactcacaatggccctcgagggacagaacacagagggcaggtagcagtagagcgagaatccacagagatggacatgtacagtgaatgtcaatttgactgcntatcataatcgagagctcgcgtcgatcccagaggcgaagagttcgtatgcttctaatattgtagccgtgccctccccccctagaagacggcatactgaacttacttttctctgacaaacg

SEQ ID NO: 565752 - DNA, 252 bp, Homo sapiens
gcggccgcctactactactaaattcgcggccgcgtcgaccggcgagatcaaggcatggacggcccacgtcgtcatcctatgcaccggcggatatggatcggtgtaccactggtccaccttggccaaagggtccaacgccaccgcgacatggcgtgctcaccgtcaaggtgcatacttcgccagcccctgcttcgtgcagttccacccgaccgcgctgcccgtcagttcgcactggcagtccaagacgtcgac

SEQ ID NO: 565753 - DNA, 329 bp, Homo sapiens
tacgaatcgagctcgtaccctcataaggcaagcctaatattgctatactctatacacatcctccccgtatactttaatctctagattacttaaaataccaaatacaatgtaaatgtcatgtaaatagttgttatactatattgtttttaaatctgtattatttttaattgtattgttatttttcattttatttcattttccccaaacattttcagtgcagttggttgaatctgtggatgtggaccctgggatacagaagctgggataaagacagctgactgtgtaggtccagaatggttatgttagatgtatccttggcccttatcgag

SEQ ID NO: 565754 - DNA, 521 bp, Homo sapiens
tttggtgtcatatcatgtgtagaaatccatgtaacaccaaagggacttcatagatttgtgcacgatgagtagagatacacagcttacggtattctctatttccctgaattgcgtcatagctttgtgctttattaaagtccattcaattgtgccttctttgtattatgataagatgggggtacttaaggagatcacaagttgtgtgaggattgcattaacaaacctatgagccttcaatggggaagaccagaagggtgagaggggccctgaaagttcatatggtgggtatgtcccgcagcagagtgaggagatgaagcttacgtgtcctgacgttttgtcgcttatactgtgatatctcatcctagctaagctctataatgcccaagaacccaaacagtacttttacttcgtccgtacaacaacaaagacatatagccaatacaaatcaaatgccggaggtgtttgatgccatatttgcaaattgccatctatcgaactcctcgtcacactacatagaccta

SEQ ID NO: 565755 - DNA, 621 bp, Homo sapiens
gtgagtgaagtgatgtgatgtgcaaatgtgatgaagccccagctgcctgcatgtgggccctgatgtgacaatgatgccatgatgcaatgctgcatgttgccatgtaactgatgaatgtgatgtcatgcatgccccatgcctcacctgtgcaccttctgcctgtgctgccctcgcccaccccatgccctgccgccgataacaggtgattgcaagccgctctctgcttgcgatgacctcccgatactagaactgcttagcttgtcgtttgaacccatcagatataatcaggcactagcattgattagagacctggtttttaaatgccgatatgagagataatgaaggatagttacattgctaaactaaagtcgcaaactggaatatttgacacataccatgcgtcgtggtatcgattggggcattgagtgatcatatcgttcccgcccataagtacaccagtgagtatacaattacctcgagaaagaagaataatgttatgtgtaagctactgaagtgagtcgctatataatggcatatttaccaactgtatacaaaattttaatccctccatcaatatagctcgattactaggataaagagtaaaatgtatgagtcccaatg

SEQ ID NO: 565756 - DNA, 929 bp, Homo sapiens
gagcacttctgcgttcccaaccccgaccagccgggctctactacgtgcatgtgcgagaccggctaccggctggcggcgaccaacaccggtgcgaggacgtagggatgactgcatactggagcccagtccgtgtccgcagcgctgtgtacaacacacagggtggcttcgagtagccactgctaccctaactacgactaggtggacggcgagtagtagtaggagcccgtggacccgtgcttcagagccaactgcgagtaccagtgccagcccctgaaccaaactagctacctactagcgtactagcgccgagggcttcgcgcccatatccccacgagccgcacaggtgccagatagtatgcaaccagactgcctagtccagccgacttgcgacccaacaccaggttaagctgtagagtagccctagaaggctaacatacctaggacgacggtaatacatactagcacggacatacgaccgagtgcgaaaacggggcttctgcttccggggtgtgccaacaactaccccggtaacttacgagtagcatctagcggggcccgactcggccttgcccgcaatatggaccgactgtagactccggcaaggtggacggtggcgacagcggctcaaaggcgagccccgccccaggcctgacgcccggatccaccttgactcctccggccgtggggctcgtgcattcgggctttgcttcataggctctccatcgcgagcctgtgcctaggtggtggcgcgttgggcggcacgtctggcgacctgcggcacgaagccaggggccgcggggcaagatggggtaacaagttgcgcggccttacaccgagggacttgtcgctgccttgtggacgcaccggaccgctaaaattagagggctcgtcacgaacctggacgcaggagctgtgtctacacaggttga

SEQ ID NO: 565757 - DNA, 181 bp, Homo sapiens
ttgcggttgctggttcgcaatctgtctcctgcggacagccgggtcaagcctccatctgctgctgctgcgttctcaaacagcatggcagccatgttcttctgctccgagtgggctgtcaggagctggtcccgcagggtggacagctggtgtatcctgaccatagagctgtaggtccttctct

SEQ ID NO: 565758 - DNA, 465 bp, Homo sapiens
ttagctgcagttgtcgtgagcaccgtgcccagccaagaaaaaatttttgaggcatcaaaagcccatttaaatttggtgccaggaacggagacaatcgtgaaagctgctgatagcctcacaaatcttaagccagtcacttgggttaaaagcatcagaagtttcactattgtaaatttcatattaatccttgtatgctgttctgtctgttgttagtctacaggtgtatccagcagctccaaagagacagcaaccagcaagaatgggccatagtgacgatggtggttttgtcaaaaagaaaagggggggatatgtaaggcaaagagagatcagactttcactgtgtctatgtagaaaaggaagacataagaaactccattttgatctgtactaagaaaaattgttttgccttgagatgctgttaatctgtaactttagccccaaccctgtgctcacgacaactgcagc

SEQ ID NO: 565759 - DNA, 1053 bp, Homo sapiens
ggatcttttgcatagtacctcattcgactccttgacccaatggagtcggctaccgatgtcgcgcctccaccgacgtctcggactcggagaatattcatcgtcagagtgactcgtgactctcgctcttctgtctgaagtcccctagaaatcaggcatgcgaccgcgcgtgaccccacccacgtacacgtaccggctagcctgttagacacccagctaccgaaatacacccaccaaagggacttataaagtgacgaagaaaggaaggtgtgtagcgaaaaggcgagcagacatgggacagagaacgccgcctgcacacagccggcgagatcggcgaattgagagaagacaccggcgcgcatggcagtgccaggctggacagagggaaggtaccacgagccaaggatggacgtagatggcgcgagcctgagagacgatgacgaggagacgcatggggtgagttggtgcagcgcccgcatggatgttgagatcgatcagtgaaaagaatggactgatcctagactagagctgttcacagagtggccattccgtaaagagaggtttggatgtgacttactagtgggttgataccttttaccccagaaaagggctgggaattcattctggtgtcttaatcaggttgtgttccacctctctgctacacaggtggactccgaacggctttccagtgcggagacgctcgaggatgacatccctgacagtgccagagccccggagtacctcacgtgcaagcatctctgcggtcaggacctgaggcgggtatgcctgggtcccctctccagcaaagcctccaccatggcaagctcgggccagagttgcctttccggctggatttgaaccgtgcgtggtgctacacctgcagtcttggagaaagcactgcggagtgtctggaccaggcaagtgtgacgacgggcaagggcccggggggagaatagcataggaagcgtgggagaatgccaaacaatggaggggaatttcaccagacaatggaaaccctggaacagccgacaacaagtgcagcaggaagcagcaaaa

SEQ ID NO: 565760 - DNA, 944 bp, Homo sapiens
tggcacgagggggacacaggtgtgcttacctataagcaaactggactggacattatacctgagggtggcctcatgtacctgccactgttctcacattgcccagatgcctgcataactgggaggtgctacactctcggtttttgcaagtgtaatgagcaccctggtggttttaccccttgacaggcactagccctggagtgtgtgtcacaactgtagaagccaagttactgctcttgcagagcatgctgctcaggctctgaattacacctgagtggccctcttcccattaatggatgaggttgatcagatcagaaaggtggtgttgcgaaaccgaatggtcttagacatagtaactgctgcctaaggaggcacctgtgcccttttaggaacacaatgttgtacctttatccctgacaattggcagaacataacagcagccctgcaaggggtctcacaggagattaaggtagtcaagagccttactgatgaccccctgcagagatggtagacatccctgggctctggcctacgctgggccctgatagtcataagtagcatagctggaatcctagtcgtgagctgttgctctccgtattgttgctgtggattatggattcagggctccaccctacgggcacatgtccctacctggaggatgccccgtgggcctagggggtggagtgtaacggaaagatggctgcgctttagtcaggagcaggctgagggcactttttggtggcacatgactcaagtgggttggaggcgtaggccccacgactccgacattatgaaccatggcacttgaggtggcttaggtggccactcacgctggagctccgtgatgcttcagagccctatggtgtaaaggttatttccctgtggcacggtattggtctgccaaaaaggaaagccgtatgccaaacaccgggttgaacccccacaag

SEQ ID NO: 565761 - DNA, 368 bp, Homo sapiens
  misc_feature (361)..(361): n is a, c, g, or t
gaagggtctagaagcaatgacaacccatggcaatgattttagtttctaaataccattccttactaaaaagaaccagagccttggagaaatggctgattcctgatcaccttatggaaatataaggtgagtctgggacatcttgttgtgccaaaaaagccaagggaaaacaaacaaacaaacaaaaaaaacagtgatggggtcatgtcaaaatgaaacaggaggagctacctagaaaaagttatcagtagccaaacctgagacaatctgagcattagcaaagactgtaattgattgttaacactgaataaataaaagtccaggagagtatggtgatataaaaaaaggaaggaagaaaaatggnggcagcc

SEQ ID NO: 565762 - DNA, 124 bp, Homo sapiens
caaatgtggaaagctactaaacaatctgtcatgaatgataagaagcaaaggcagcacatatcatctgcaagttccttcccaagtctataaatatatcatgttcatatttttcctgctttgtgat

SEQ ID NO: 565763 - DNA, 148 bp, Homo sapiens
acaagcatagtatgcacagcaggatcacagttctgcccacccagaacacctccaccctctccgagtcgtgggcagaaacgagtcgtgggcagaaaacgagtcgtgggcagaaacgagtcgtgggcagaaacgcgtggtgggcaagaaa

SEQ ID NO: 565764 - DNA, 877 bp, Homo sapiens
tgttataaatggggaaaaatcctccttgatttctttatagaacttgacgatgcactgataaatgtatatagcttggagtttcacctatttatctttctgggtataagatctggtttgtcacacatatacctcaaagagagttatatgattccaagaagtttaagatctatttagaacaagaaaggcgaaatatgtgcacacgttggtgaaagacaacattccattttggtactctctaaagtaaatctggtataaattggttgtgaaggaaatgactcaacagtatggtattgtgcttgtgacacatcattttaataaatggctcgtacttctccgggtgaccgggaaacctcaaagcaacaggagaattcctcttgtggcagataatagcctgtgcaaatccaagaacctgtcacatcactttaaaaaaacaaaatctcttttctcctcttgccatatcgtatccacacagtggatatcacgcatacaaaagcctccagtagtcataatacacgggtggaacaaaattctgaaagtcttgaactcaattaccaaaaaggtaggtctttaggggaaataggtccgtattactggtggtatcccatccttctgaaagctgaaaactgtgggaccgcataagcaaacacaaaggcatgattttgcacactggtgtgtcccctcattaaggggtgtctacctaataaggcacgacaacgcgcgttggtcaataagccacactaggtgccaacactctgggtacgcagtacgtagccacggcaacttcatactgctcatatgttttacacatagtattaatccatagccccacacgggctagataagacctctgggtggtacggagaaacacatgatccaa

SEQ ID NO: 565765 - DNA, 173 bp, Homo sapiens
aaggtcatcgctgagagccagcttggcgtcggcatgtggtagacgccagtgtaccatccggtcctggagagcttcctgtgttatccctactcggcggagagtacatccccacagggtgacccagacgatgtgagcctaatacagtccaggggaagacgtgctcatcgacatat

SEQ ID NO: 565766 - DNA, 390 bp, Homo sapiens
ccactgttattagtccttaatcttttcagaattttgcctgggctcttaaaaggatatgtggaaatttttaattcttgtttaaaatgtcatttagccaggcaagggtggctggacccggtaatcctagcactttgggaggccgaggtgggaggattacgagatcaggagatcgagaccatcctggttaacatggtgaaaccccgtctctactaaaaatacaaaaaattagctgggcgtggtggtgggcgcctgtagtcccagctgcttgggaggctgaggcaggagaatggcgtgaacctgggaggcggagcttgcagtgagccaagatcgccccactgcactccagcctgggcaacagagcaagactccgtctcaaaaaaaataaataaa

SEQ ID NO: 565767 - DNA, 360 bp, Homo sapiens
gtgctgacatagcagccctctctttgaagctaggcagtcttgcagtggatcccgagtctgcctatctgtttgctgagtgatccctgctttaaatatcaggcatcttatttgtgaaatgtggctcaaatctaccatctcaggcatctgatgacagatgaaatgggctaccaatgcctgacatgtagtcagcacatgcaatacatttgttaactcatgtattctcatgtatttacagagcaggacactgttctgagcactgggtgtataggaacgagacaggacctctgccctcatcaagacacatctagtataggccgagggacgtggctcacgcctgtgatcccagaactttggggctga

SEQ ID NO: 565768 - DNA, 152 bp, Homo sapiens
ccccccccccccccaaaaaccggggggggcccaaaggttcccttttccccccccggggggaaaagggggggtttttcccccccccccccccggtgttttttttaaagtttaaagggggttttttttttggttaaaaggggggccccttggga

SEQ ID NO: 565769 - DNA, 212 bp, Homo sapiens
cagctcatcagcagctcccccctcctagcgtcgctggagctactgtcgcccgccccgcgctccgctcactttttgtagtattagtagcagcggtgtgctaccatgttggtgcggcggctgtacacattgttggccgcgccgctggttgtcggcgtctgccgtcgactacgtcgtcatggtggtcgttgttgtctgtggtgtgttgttgtcct

SEQ ID NO: 565770 - DNA, 388 bp, Homo sapiens
ggacggtagccaggtatgcggacttacatttgtctgactataagtctggagcaactgcatcatatcatgctttcgtatggggaagagatgagacagaggagatgtagcggtactgctgcattcactgccatagccaacccctttccagatcaccctcatccctggacacaggtaccttgccctactccagaggctcattttcttgttcctagtaggttgactgcccttgcggtgggccggcagaatcactgtggtctccagggtgggagtcttctgctgcttttatagtccagaagcccactatgctgaagaatatgttagagactgatgtatttctctggggagagattgtaggtcaagctgttcataggtaaaatatacatatata

SEQ ID NO: 565771 - DNA, 106 bp, Homo sapiens
tagatcgagctggtaccgatcccagtttttgcaatatgggtattgtttcatgaggcttataaacttctgaaatacaaaggcctgataaaacaatacccatattgca

SEQ ID NO: 565772 - DNA, 257 bp, Homo sapiens
gcttataaggaacacaagtatatcacagtgatatatactgagagctcactatgtgccaggcacattcagagacaagctacatcaagttaacacacttaattctccagaacaccttaacagtgggtacctagtatcattatgtctttcacagcataagcaaacgtgaggcactgcagaattaagtaacattgcccagagatcacaagattagataagctagggagacagggccatttgaagcccaacgcagatctaag

SEQ ID NO: 565773 - DNA, 1325 bp, Homo sapiens
gccttcccagaattcattactggaggttagttgcccagttggtgtccatcccggatgactgtgaccggaaacgaagagcatgaacgtgcatgagtgaccgtgctagtgtggggccttatagcttggcatatttcaatcgctgatgtgcagcgcccagaattccagtgatgcctagtctgtctagttggacgacccaagggggggtcctcgccttcctaatggaatggctcacagggaatctgagagtgagaccgtcaacgttagtgacactacagtgcgcctgtgctcgtgatcctatgatgcgaagcaccatgaggccccttgttgtcaagggcgagtttgggccgagatgcggtggtggggaacttttcgataagcacattgaacgttgatgctcttcacatgaccaagaggccgagacacgggtagatttgttccaggacgttcaacgcagtatgcgggcgcgatgtcaccaagagtggactccaatcgctttggatcgtagaaaaaccatatggggggacgcccctggattatggaaccgtaggtctagaaggccagaattgtgaatgtcgaaccacggaatctaagagggcaattaccccaaagagttatgtactcttggggctgtgggcacgagggcacaatgggtgtaaaaacataaccctagataagcgcccaaaaaggggacgaggttattgcaagttgtccgttcgcaacaacgcgggctgtggcaagtgcaacagatgggcgcacaaagtcaaaccaagcggcaggcagtaaaaggacacaccgaacgaccgacctacgaggcaacagtcggagacacagcgggtggtggctcccccccgaatcggcaaggtggccaacccgacgaccccaagcgggatgggaccttttgaagaccacacttgtaacccttggggacaaggtagtgagcgacaccccctcaaagagaggaacagcgggaaaggagtcgtgtacaggaacccggccggctgggattacccacagcgatttgatataaccctccacacaaatatgacgtagttacgagcgcgagttccccctatttaacgaccttcacagggagggacagccccatttgtgctgattcaacagagtaggaacacatttggggtaagaacgtcacagcttgcccgcgcattacgtttagttgcgtgaaatgtacccccatttgggggaaaaaacccccgccaggggaggatatcactcggattggacgcacgcgccaacgtgggagtacggtagccaccagcgatgagaaaacacacccagcacaagggccaaaggaaaacccgccc

SEQ ID NO: 565774 - DNA, 198 bp, Homo sapiens
tgacctgctgcttagacctgacctgagcatcaaggagtacagcgcattcctcccacagactgtctgagaggctcctgtagacaatctgggatgatgagctgagaggagtctttggatgctcgggtgagctacaatgcactccagcctgggcaacagagttagacactgcatagacaacagagttaggccgtgtctcta

SEQ ID NO: 565775 - DNA, 375 bp, Homo sapiens
tgagtctgcgccttcgcctctgtcacttccgcaaataatttcttgttgaggaggaggatgagaaggttgacattgacttaggcctttttgaaagagtttcatgacagccacaccctcatactggagctgcaggagatcctgattgtgaagctgaaatcgctccacgtccacacccaggaacttggcatttacttcagactttcctgcctcatctcccggcgctgatgtcatagctgtcgcctggatagaataagaggcgggaagatcttcaatttccaccaagacacccttttccaggagctgagcagcagtgtaatgaagagaaggctgcttcttccccttcccagaactcttggagtcgggggccaggtggtc

SEQ ID NO: 565776 - DNA, 344 bp, Homo sapiens
tctagaggatccctttctctgatcgctctcctgactcaggtgataacctggctcagctcccaaagtgctgggattacaggtgtgagccacacgcctcgtcttagtggaatggagcatatctaagtaaaatgaacaagcactttgtaccagcaggagacctagttataacggtgtattacagagttcatccctaataacacaaagttcatcatatgcttgctgtgtagcagaatagtctgtgtagggacaagaatgggagccaggagagattaggcagtataggacagaggactgcagtgtactgtgtcagcacatgtagcagaacgtgctgagtagtggttgga

SEQ ID NO: 565777 - DNA, 305 bp, Homo sapiens
gctcgacgaaattccaggtacattttttaaaagatggaaactttaggccgagagcagtggctcacacctgtaatcacagcactttggaaggccgaggcggttagatcacttgaggtcaggatttcaagaccagcctgccaacatggcaaaaccccatctctactaaaaatacaaaaaaaaaaaaaaaaaggctaggcatggtggtgtgcacctgtaaccccagctactcgggaggctgaggtacaagaatcatttgaactcaggaagcagaggctgcactgagccaagatcacatcactacactc

SEQ ID NO: 565778 - DNA, 191 bp, Homo sapiens
aggaaacttcacccggatgaaattgacaccgactctgaatacattcttttctatgagcagcaggcgatagactatgcaccatttctgccaaagcctgatggcaaaaagatggcagacacaagcagtatggataaagactacgagtctgattacaaaaagtactgtgtgttacagtaaaggctacactcctg

SEQ ID NO: 565779 - DNA, 317 bp, Homo sapiens
agggtggccagtgccctcctgtttgaggggtcggggctaggctggcgtggtctatggctcagacccctcctgcgacagaaacacacttctgaggataatcaataggattatcccgtatcgaaggccataaaggacagatggtgtgtggtgaccttggtatgtgcattctcgtgtatacatcgcgccatcattggtatctggtacgtgtgttgataagtaagcctagtatgaggagcgtcatggagtgcaagtgaaatcacatggataggccggaggtcattcggagggctgagagggcccctgtaaagggtcatgaa

SEQ ID NO: 565780 - DNA, 147 bp, Homo sapiens
cgaaggtgttgggggaattaaggaccttgctgtgtttcccccgagaaaagtggccttttaattttccccctccataaacatgcttttgacatgcatagcagagctgaaggcaaggggaaggggaccacatagtaagtgacgttcctc

SEQ ID NO: 565781 - DNA, 373 bp, Homo sapiens
tctttccatggcatatccattaagtcccatattgagtgaagagtctagtatcacgatacatacatccagtcacaatgacatatgcaaggctgattaaaatatattcatatattgtgtgtataagttcagatgtccagggtgctagtcactcaacgccacatctccttacagttacttggattatgctagctgtcacattatttaaatactatcttatctcccaaagttatctctagccctgcctatacccctttacttgaaattagtatattgtagcttcccacattatattttctacctaatgtttaaaatgtatctcaaacttaacatgtcagatttctccctagaacctgtgccttctgcagtgtttccc

SEQ ID NO: 565782 - DNA, 190 bp, Homo sapiens
gcagactcgagatggcatcgatatttggagcgtcagcgctggtgctcacgtgtcgagagagcttgtacagggaggcatgcaccgcagtggtgaatacacgtcgaccaggatccatgtttacgatatttggaggtcagcacggtgctcatatattgaaggaacttgtataggagaggtatgcatggcagtg

SEQ ID NO: 565783 - DNA, 151 bp, Homo sapiens
tacggcgcagttgctgaattcggcttagcggcgcccttttttaagcccagcatatacaaaggcacagagctaagaggagctagggcaagaaaggaaagccaggaaaggtaggtagagagatagagtctcaaagctaagtagtggaagctag

SEQ ID NO: 565784 - DNA, 288 bp, Homo sapiens
gcgataacagtaaacaggcgaaccagggccagcaatatcgcacaaagatcttacgcttctgccagtaacaaccattctctacgtttctcccttcgtttttttcctcagagacttcctacatcaagtcaatgaaggactcaacgattatgcttttcataaaaattcccaaggggagcggcgaggaggcattttcgctaagacttcaccttttcccttaatctagagggatcatcccttcactttgaagaacaaaactgcatcaatttcttccagcaatttctgctgaac

SEQ ID NO: 565785 - DNA, 892 bp, Homo sapiens
ccaccacaatcaatgacaaattattaataaataatcgaatgtcttgtactaatctgaggtagattctgggaccctgaaacatgaggagaagggagagaatgggaacacccttccactcctggctctggactgaaccctgagtcaccccaatgctcctgcacactggacttcagtggaatcagccacccaggaagcacatgcaaactgacccatgcagacacgtgcgttatgctagacacaaggcactgcactactgaaccgatgaagtgactgacaccccacatcagattgaacaaacaaagttggacattttttttagacaagctacttcttaacgcgaaaagaagagaatgaaagaacaacgcaatggtataaatgaaccagcagacgcaccactggattagtataactgggatgtataatgatacggtcagtaatactgatgtgggtatgtacactagtgccatgatagacattaatcagtcacaacaaaccccaaagagtagaccgcgcttacgcatcacattaaactataatcaacagacatacaagcttgaaaacacactccacgactaactaccaaacattatgggctctcgtactgatatcatgagcaggagtacaataacaaatcgagacgcctcagatctaccatcccaccacgcactaaccataaaatccatcaattatactccctaacctactataaaacacacactatcaaagtaaatcacacacccatcataatagttaaattagaaacaaactactcactccagcacgccaagtgaaatcacattacgacagacgcatacagcaaatatccttagtacataaaaacaccctttaacctaaaagatccacgacactccacgacacgctaacacaaatg

SEQ ID NO: 565786 - DNA, 339 bp, Homo sapiens
ctacttatactctatgtcgcagaggaactcaaatctgtgcaccattagagtcccctgggaagcattgacaaatactgctccctggccaggtgtgatggctcacacttataatcccagcacttgacgacggccgacggggggtggcttgcatgcggccacggagtttgacgacccagcttggccaacactggtgacaaccccttctctactaaaactaaacacaacacttacgccacggactggtggcaggtgcctctaactcccagctactcacggaggctgaacgacaggcgacactttgcccgtggtacccgacgctccgaattcgtacatcaactt

SEQ ID NO: 565787 - DNA, 436 bp, Homo sapiens
  misc_feature (53)..(53): n is a, c, g, or t
ttgaggatcgtggcggtgaagggtgagcgaagggggaagagcgccttataaanacatcagatcttgtgagaactcagtatcatgagaacagcatggggtaaactggccccacaattcaattacctccacctggtctctaccttgacacgtggggatgataggcattatggggtttacaattcatgatgagatttgggtgggaagacaaagcctacccatatcaatggctcactgcagcctcaatctcccaggcacaagtgattctcccagcctcctgagtggctgggaccacagtactgcgagaccactcacagttcatttttgtatttttcgtagagatggggtctcacaatgttgctcaggctgcgctcagacgattcgcctgcctcaggctcccaaagcactgggattacaggtgtgagccattgcactccgg

SEQ ID NO: 565788 - DNA, 776 bp, Homo sapiens
ggcgcagggttagtgcctgcgaggctgcggcacggtggagtggttccgggctctcattgcggaggccgggacctgggacctgaccagccgcgcctcctggctgggggttccgctgctccggagctgcagtgacctgtgcacgtcgccgatggactgcctggtggcttcggtgggtggtcctggctctgctgggccccagacgtttttgctcctaggactccgcgagttgtcgcgcccacgtcgactggctgctcttcagtgcttccctcactgtgttgggcggtcactccctgccttgtggcccagctggccggtcgcttccctggctgcctgcatcgttacgtgttgtgttcttcatccgcttcggtggtggcctggtggtgggtggtgggtagagggaggggctagacggggggacagacgccgacaactgcgacgaaaccgcacactagagagccgcacgagaacgcccacaccaacaggtaccggggagcggccgcgagggacgcacacgtaacgagagcccgtcaaacaagaatcacacgtgaagcaggtaggagtaccagcacccgcaagggggggggccccacagcgtacagcacccacgagcctagcacgtagggcgcataaacagaagcggaaggggcacacccacacaggcaacgcggcaagcaggccgcgcgggctacaggcaggagcgacgagcggaggagccagaggacccgaggaggggggggcaggagggcggggggaacgtcgcggcggcgaatgagagg

SEQ ID NO: 565789 - DNA, 177 bp, Homo sapiens
actctagcaggatccccgcatcttgctcccatcagagaaatgcaaatcaaaccacaatgagataccatctcacaccagtcagaatggctaattattaaaaggtcaaaataaataacaaatgcttgcgaggttgtggtgaaaaaggaatgcttgtacactgcatgggacgaagactgg

SEQ ID NO: 565790 - DNA, 413 bp, Homo sapiens
cgacactaccatggggacaagacttctggaaaaactccgatatcttagcttattgtacctgctcgagggtccggaacatcctcctggtgtctgatgggcacctccaggatgagagcctgacattacagctcgtgaagaggagccgcccgcacaccaggttattcgcctgcggtatcgggtgagtctcagagagctggtcacatagtccagacccacggggaggtcgtcttgttgccctgcaggggactttggcaagcttggaagttgacactagaatacagaagccttacagcatagagggatggggctccgggctcccagccagactgcctgagtctcagaacctgggttggccactcattagcttagccgtgaccttgagcaagttccttaacctctcatctggtaaacca

SEQ ID NO: 565791 - DNA, 185 bp, Homo sapiens
gttgtgacaagttaacccaccttaagttgtaaaattcgataagtttataatttctgggctttttacaatgaaaatgtgagcatgttaagttaccaaaaggcttttcatcaaggagaatttcaaacaaagtaaaccaggcgttttatagtcctcttaaatctatggtgctcccaaccaaccaaggc

SEQ ID NO: 565792 - DNA, 1856 bp, Homo sapiens
gggaatcaccatggcggctgggaccctgtacacgtatccatgaaaactggagggccattcaaggcgtcatcatcgcttgcttcagtacaggcggggctcaggtcacgcgatgcgtctccggcaccagcaccacttccgattttggagcaaagccaaccgacacccctggaagtttctcacgcgaaatttccgtgccggcacaggctccccagccatctcggcagggctgcatgcatggcattcctgctgtgctcctgcagcagacaacgaccaatttgccgtcacgtcatgctgcagccaatggccaggcagactgctggcgagcaagttacatccacagagggcagtccaggcccaacggattggctgccagcatggtgctgctgccatatgtggcactgacatatcacagcagtacataggatagcacactcacaagacactaggatcacccgtgaggagatgattccgccaccaaccgatatgtgagcccagttcaactagacaacgcaaacgagaccgacaagcacagaggccacaacgatggacaggcgacatggcacaaaagcggtatgggcacacgctggcaggggccggcaacatatccctagggagagctcgtggcactgacgcacactgcccgctactaacacctaccgcaccacggcacccgcaagcggcaccactacccaccctcgcgcatgcggagcacgagacacacggaacagcttgaaccgcactcagggcaaccgtcggacacgacagtaccagcccacaggacaagggccagccgttgagacccaccacccgcagctgccacacagcactcgcggcactgcccacaactaacacagcaccaccggcagcgccactcacgcacgcgccacacaaaccactataactccgcaggcgacccaagggcgccacatcatccaccccacgaaactatacaacaccaaaaccccggcaccagtagagcaattcacagcaagaccacacgcacaccctgggcccaccattgcacaatcccagcacaggcacccgcctcaacagaactacccagcgaggggaccacttggctaccttcagccagcgcgaggcgaacacaacgtcggcgcaacagcacccgtgagccagggatatagcaaagccacacagagcaacattggggcacacaccgaagcggacgagggaacacgggcgtcgcaacgcacatgaggcctccagcgcacccccgagcaacacccacacgacgcccgcacaacacacacagggggccaaaccaaccacacaccggtacaccaccctaacagaaaagcagggcaatgcaccggcgcaccagacgccacgacaagcaccacgacaccaggcacccacagcagcgggacgaaccacgccagacaggaacacgactgacacacccacagccgcgcgcgcacggtcaccaccatgagacaacacccgcgacagtcagcaccccaaacagctggcacaaacgccaccgaagttcacggacacggacgccagaatgacgcgacagatggagcacacgaggcgccaagaggacccacgacagtcgcacaccaccagagggacagaccggacgcagcacacgaccgcgcagcgcatcgcgcgaaaagcgcgcgaaaatgtatacaccaggcggagcagcacacgaacacgtgacacacgacacacaacaacggggacacgaggaccagaacacgcgaggcagcacaccccgcacacacaacacgaagcgagacacccaaccaacgagaaccaaccagcgtgagccgactcaccgctacagtgcggacagacgcaggagacagaagacgcacagccaccgacgc

SEQ ID NO: 565793 - DNA, 85 bp, Homo sapiens
atcacttgaatccgggagtagaagttggcagttagcagaggttacgccactgtactacagccttggcaacagagacttcatctca

SEQ ID NO: 565794 - DNA, 332 bp, Homo sapiens
ggggccttcgggggaaacagcactccctttttaagggcttgggcaaggccaaaaaggaggccccgcccatggaaaagccggaagtggtgaaaacgcccctgcgggacatgttcttcctacccaaaatggtgggcagcatggtgggggtttccaacggcaagcccttcaaccaggtggagatcaagcccgaaatgttcggcccctacctgggggagttttccttcccctccaagcccgtaaagcatggccggcccggcattggggcccccccctcctcccgttttttccctttcaagtaatggctcagctaataaaggggcccatgcctccca

SEQ ID NO: 565795 - DNA, 200 bp, Homo sapiens
  misc_feature (158)..(158): n is a, c, g, or t
  misc_feature (188)..(189): n is a, c, g, or t
tctacgacctaccttcagggcagcgcttctgcctgggccagctcaacctggagcagcgcagcgagtcggtgcggcgaacgcgcagcaagatcggcttcggcatcctgctcagcaaggagcccgacggcgtgtgggcctacaaccgcggcgagcacccngatcttcgtcaactcccctgagctggtacnnccggcggtcgc

SEQ ID NO: 565796 - DNA, 796 bp, Homo sapiens
agttctttatataacgtcccttgttaaaaatgaaagaataaaaacaaaccgaaaaaggggggcagggttaaaattttttaaaaaaaggaaaggaaagagaggaaaagaaaataaaataagacgatttatggcttctcctcagcatcctccttggtctcctccttcaccgagagagcttctagcttttccgccactttttcggcatgatcattttggcctgatccgtgctttcttttctctctcttcgatctctttccgtgcatttcttcaaacttgtgtttggaattttcgtgtgcatttcctcagcatttcaggaagcggattggccagcagctcgtggcttggggcactcgtcggcaaagtctcagcggtggggtgttccagaacccaggcacggatcgcttaccgtgcgtttgggccttcagcctccattcatcgggcggtgagtttagtgtggttgggcaccagattcttcagggctctgtggtccctccgcattgaggacggcggattggccccttttctccttggtgcttcaggagcttgaggtcaccagtgcctcgctccttccattctgggagatcgttctcagaggcaaatcggaacagtttggcccgcattttaaaaagttcctcttcatcttcttcccagtgtcctaattactggctcaggaagagaaacttatgtggcctcaacctggagggtcactggtgggactcgcctggaatcctcaagcgaaagtttcagtggccctcataagtgtccttaggggcccgcactaaaatatccccgaggg

SEQ ID NO: 565797 - DNA, 220 bp, Homo sapiens
taaggtgtgcttactgacgactggaaatgtatataaagaatggataaagcaaaagaacttcagccaagagtaagctgcatcaatacacatcatgcctgctctgaatttactaatttgttcagtttaaatcgtaaactttttactcctgtggaaatttagccaaacgtttcaatacatatacgattataaatcttaaagctaacactgcacagagaaagac

SEQ ID NO: 565798 - DNA, 457 bp, Homo sapiens
catagctgactcctgaggataaaacgccgcctggcagattcctgggttactaagtccagatcatccaggattccaatctgggacagtaaaagagttcatgtgctcagcctggccagcaccaaagcagctaaaaacagggatcacaggccctcagtgtttccaccactcctgagctgcttggaagcttcctctcagggtgtgtctgtggaaagcctagtccgaccagtatgacaccgtttctcaggtatctcaaatgtccccacagtcgcctggaaggagaatcatcatctcaagccagtaagcccttgcaagaaccagaatttgagggaagaagaaacattggtggagactgccttggttactatgataaatggccagtaacccttaacatcttctaaagccaaagtcacacagaaaaaagtctgccctaccagactcaaagaaatgttaaaagaaa

SEQ ID NO: 565799 - DNA, 687 bp, Homo sapiens
aactgtaaaatggggattcgaaggagcacatgtatatgcacgcactcactggagggttttgagaagaatgtcccgccattttggagattggagatgaaatgtccccaaatttctgccttgctgtggtctttttaaatatatttgagataatgcgttaatagcacccttacaccctgttaatgcacccaaaatgtaaggggttataataaatgttaacactggacactgagtcttctttataaattctaactttgaagtgctgtctccacatgtttgaaagtatctgaagccaggttgctccaccacggtagctctatggaggggctggccaacttaagaaggtggggagaccacgagagattctcttatacccgacatccacatacttggtccagatattggacatcttccaatactcttgccactccaagacttgttaagaatagtttaagcgtgcattaagattaacattcccatttgtgacataactctgctttagaattattggggggaaaattttaggaaataataaattgaccaggattattggaaatttgttataatgaatgaaaccttttgtcatataagattcatatttactttttatacatttgataaagtaaggcatggttgtggttaatctggtttatttttgttcccccagttaaataaatcattaaaccttga

SEQ ID NO: 565800 - DNA, 350 bp, Homo sapiens
  misc_feature (1)..(1): n is a, c, g, or t
  misc_feature (230)..(230): n is a, c, g, or t
  misc_feature (237)..(237): n is a, c, g, or t
ntgagaccagcctggccaacatggaaaaccttgtgtctactaaaaatacaaaaattagccaggcacggctgggcacggtggctcaatcccagcactttgggaggctgagacaggcggatcatgaggtcagaagatggagaccatcctggctcatatggtgaaaccccatctctactagaaaatgtaaaaaaagaaaaaagttggccaggtgtggtggtgggcgcctgtgncccagcntactcgggaggctgaggcaggagaatggtgtgaacccgggagcggatcttggctcactgcaacccctgcctcctgggcttggacagtcctcccactctagccgcgcaagtagc

SEQ ID NO: 565801 - DNA, 328 bp, Homo sapiens
cggagggagggggggccgagggagaggaagaagagacagaatgaagacatcgaggaaaagctcgggggaagggaggagaggggggcgggtcgcaggaggggaagaaaaaccgagtcgagacaaaagaatctcgcgggagacgggaagagacgaaagcaaaggggctcgttttggttttctccaagacctcggagactaccgacccccaacgccttctcgtagagagagggtggcgggcactggggcgtcaaggagatctcctatgaaggggaggggaattgtttggactattgtcttcaaggattggaataaaaataacttattttgg

SEQ ID NO: 565802 - DNA, 973 bp, Homo sapiens
gatctagaatcgcagagcggacgaccattaattattcgttcggcacatgtatgtgagagttctccgttgagctaaggggttggggttggcagtgttaaatcatgcagaatggtcgtaatctggatagtagcagcaatggatggtactaaatcagcaccatggatgccccagccagcccgtgggccctgcagaccccagagggaggtatggggagagctcaggggagtgggtctgagggctacggtctggggacacctctgaagcttacggtaccttcctctccccatgaagacaccatgaatagagtctaacatgcctcttctccaacttcctacctacgagacaagcagaacagttctaatgttgcacggcctagtggccaggggcaagctaaagaggctgtctggaggcttatatgtgtctggcgtcaaggggagaggacggcgggtagacagggcgtctctccccaggtgggatctgaaatatctgttcctcccctcttcttttaatgggcaaacctgattccttcggccccctggtggcttttaggtgtggtactgctgacaaccttgttgtactgctaatcagcacagtgaaaaaacttctccagcctggcaagggccacgttggttaaatagttccttttcccatgtccagtcctaaaaaatatgtccccttaaatgcctttggtgacattttacacctcaatcatgtgtcttttcctaatcactcttcatcattcaaagcataaatctatgtattttatgggatgaccgttttgtatttggattttttttatttggccgattgtttaaagaaatcagggggggcgtgagagaggccaaattggagcgactggtgcggagagagggtggccgttttaaacaggaggaggtgaattgggagtctggaaaaaaggcgatcaagcagcattatagatataacaattgtgtctatgatatacatatagggt

SEQ ID NO: 565803 - DNA, 311 bp, Homo sapiens
gcttctcccaaaggtacctgcttctgctgctccatgccgcactagtttggtgtcattggtctcagacaccactttgccatccacgatccggcggtggtgatcattatggatggtctgcatggagttgctagctgtccaaggcataaccaagattaaagtcctcaccatcttccagcaggcggcggtaggtggcgatctcagccgtgcagcttgaccttgatgttcagcagggcctcatactcctgggcctggcgctgtccctctgcccgggtctgtgccagctctgactcaaggtgcagcaggatcccgtt

SEQ ID NO: 565804 - DNA, 523 bp, Homo sapiens
atagtgcagtcaatgggtcaatggtagctctgttttaaattccttgagaaattttcaaactgctttccacaggggctgaattaatttacatttccacctacattgtataactataccattttatctgcagcctcaccaggcatttgttgtttggactttgtaataattgccatgtttgacttgtgtgaaaattcatattcattttgatttgcatttctctgataattaatgatgctgagcatttttttcatgtttgctagccagtcgtatgtcttcttttgaaaagtgtctcttcatgccttttgtccaatttttaatgtgtttatctgttatttttcttattaagtttcctatagagtctagatgttagacctttgttgaatgtagttagcaaatattttctacaattcagtctgttgtctctttattatattgatagtctatcttgctgtgcagaagtccttgggtttaattaggtcccaagaggctttttaactaaaaattaattctgcttgctcattat

SEQ ID NO: 565805 - DNA, 1327 bp, Homo sapiens
ggtctttaaaccctgcgtggcaatccctgtacgcacctgccgctgatgcccatgggcaacgacagggccgacctggaagtccaactacttccttaagatcatccaactatttggatgattcatccgaaactgtttcattgctgcgcgagcacgcacaacgctgcggctccaagccagactgcagcacgcatccgcatgctcccttcgccgggcaacggctgctggctgctgactgcggccacgaactaccatgcatgcgccatggcctctcctgacggcgcacctggccaccacccaccccacgctctgcgccgcaccccccgcctgcccctcatatccgggggcactgctgcggcttctcgctgtttctcccatccgcgatggacccctcacgtgaccactcagggcccccctgtcgcccggcccaccctcccgcgctgccagtctgcctgccccgctgccttgcctgcccctttcgccccccgctgctgacactttcccctcgctgcccaggctccccagtatccacctgggctcttcgttgcgcccccgaccgaaaggagctctcccctctcttgcccacgtgccttctacgcgtattccacccaggctaccgcattctttcattgtgcgtcttccccatttcgacaaattcccttgccgctgacttgcctgccatgtcttgaattcacaggaccctcggtccgaccaccacccttcgggacgcccagctagctgaaagaccacttggcttggcttgaaaccccttgcttccaagcatccctccccctccatatctttcctcattggcggccctgtgaccacattcccacaaaaggtggctgcattcgtacccaaatgggaccacgcattcttaagcacacaccattgaagggtgcattggcacgtactcaccaagaacgggaaacccatccctggcatttcctctggccatctccctcgcgcagcgctggttgcgtcaaatagatttgccccgatagctcctggccctgccacaacccgagcctcacccacaaccggccggcagattccagcgcaacccccaaatccgacataaatccacacagcgaccaacccaacaggacagcccaggggccagtggacccaggtggagaacggaataacaacacacccccacgacgtgcagaaagacgagctacagggccatacttgggcgagcactcaaaccggccccaagaggagttgcacaccccatgaggagataatagcaacacacaagccgtcaactcagcaagaacagagctaccacccagcactactggtgcagaaacgccacgagacagac

SEQ ID NO: 565806 - DNA, 386 bp, Homo sapiens
  misc_feature (54)..(54): n is a, c, g, or t
  misc_feature (134)..(134): n is a, c, g, or t
  misc_feature (252)..(252): n is a, c, g, or t
cctaacgctaagtcaattgcctgtaagtgcagggcttcctacctgagggatganactgccttcctacttgaaaaaatcccccattttagtttcattgttgaagaagaagtcagggctgaattgtggtggcccanacctgtagtcccagcactttgagaggctgaggaggttggatcagttgagtcccaggagtttaagaccatcctcggcaatatggcaaaaccctgtctctacaaaaaatataaaaattanccaggtgtggtggtgcattcctgtggtcccacctactcaagaggatgagaagtgggaggattgcttgagcctgggaggttgaagttgcccaggtggtcgaggctgcatcaagccgtgatctgggcgacagatgt

SEQ ID NO: 565807 - DNA, 329 bp, Homo sapiens
agaagaaaatggggggctttgctcccttggacccaggtgggttatcctatccagtgggcaaggccccccgaataccccctcatggtccctgcagcaaggcccctgaaagtgattcatggttttggggggccttttgcatgtttagggattgttttggggatgtttccctgctacccgcctccagggggttgcagcccccgaaaacgactaatggaactatgcagggttggttgggctttttcctgggccggggcccagtgggggggcctgaagaatccatttggggggggttgtttttcaaaatgaaataaaacccccttttttttgga

SEQ ID NO: 565808 - DNA, 202 bp, Homo sapiens
gatcagaggaccccgtactgtggtgtacgtaaaatctaatctagtgtgttcatgcaccaggcaatgagcatgaacatagaatttagtctctgtggtgtgtactggggttagaattaggatcagacttgcatggttttttttggttggtttttggttggttggtttggtcttttgggggccatacccacggcacatggaggtt

SEQ ID NO: 565809 - DNA, 369 bp, Homo sapiens
gcaacaaaaagggcacttacacattcgtactcctacaagacacaggatgtttagtcttatataaaatcagatgggaacaggaattcctctgtgcaacatcccctcaacctcatccctttcagggattgagatatctcccaaccattttcctgatgacagccatagttcattagagatactagcccctcaggggtgccttcctgtttcttatatagcccattatctttagattttttgaaatcttcatttgttactttcattcttcgttctcttatggccatcagaccatcttctgtacagattgccttgtatatcagcaccagagaggtcatctttagccatgatcaggtcgtccagggttacttcatc

SEQ ID NO: 565810 - DNA, 276 bp, Homo sapiens
  misc_feature (24)..(26): n is a, c, g, or t
  misc_feature (33)..(33): n is a, c, g, or t
  misc_feature (41)..(41): n is a, c, g, or t
  misc_feature (45)..(45): n is a, c, g, or t
  misc_feature (63)..(63): n is a, c, g, or t
  misc_feature (82)..(82): n is a, c, g, or t
  misc_feature (95)..(95): n is a, c, g, or t
  misc_feature (97)..(97): n is a, c, g, or t
  misc_feature (135)..(135): n is a, c, g, or t
  misc_feature (175)..(175): n is a, c, g, or t
  misc_feature (192)..(192): n is a, c, g, or t
  misc_feature (229)..(229): n is a, c, g, or t
  misc_feature (238)..(238): n is a, c, g, or t
  misc_feature (274)..(274): n is a, c, g, or t
tgaggatgaagaggaggataccannnagggaangccgatgncccnggccagtgcccacagctntcatggggttcttgcccgntctgttcgtgggnantgtattccagctccggggaatagggggttcaggttccnccttgccctctggggagctgtggctttgcagggcccgggncgtgttatgagaagccntgttagctgtggctcctgcgagaatcccccggaggangcgggcatntctcgccccccggcccttcagcgccgtagcagctancg

SEQ ID NO: 565811 - DNA, 113 bp, Homo sapiens
tctagtcaccagggcgcgtacctatcggacctatgattatagcttaaaacattgacaatccaaacccagagccaagatgacaccatggcacttcagtctggactagaggggcc

SEQ ID NO: 565812 - DNA, 641 bp, Homo sapiens
taaaactaggagaaaccaaatctggaagccaaaaggtaggcttagttgggtggtgtgtgtcctcttgaagtttgtgtcgcctcagtgtgtgtgtgcaacagggttagtggacatattcgtgtcgtgggtggccccgatttcgtgggtggctcgtgtgtggcaggctgtggccagttccaggcgtgccgtgggggcacgccgccttctttatacaagacagtctctgtgtgcctgtggtgtatcacatgtgcgctctcagggggcacagtgcagtgaggagccgtgggcccggtgtgcacacgttgtgagaagaacgccccgtgtgtgtagaaagagtgtgaaagtgctgtggggacacctcagagggcctttcgagaaacgagaagagaggcacgtgtgatcagggaagggtggacggacaagggggggcctgtggagagaaatcctatccgtgggggagaaaccaagaggcccgggtccctgtgccctgtgtgtgggaacgccacgggtctctctcgagggggggcgcagtggctatttcaacactcactgtgggaaaaacatctgtgcaaacgaaagaggcggagaagtagctacatgatgggggccgagaaaagactgtgggaacactcagtgggaag

SEQ ID NO: 565813 - DNA, 406 bp, Homo sapiens
cacaaagtataccctgaactgcacatcaccaatttggggggggccaaccaaccagtgaccatccagaactggtgcaagcggggcctcaagcagggtaagacccatccccactttgtgattccctaccgctgcttagttggcgaggttgaaagtgatgcccttctcgttcctgacaagtgcaaattcttacaccaggagaggatggatgtttgcgaaactcatcttcactggcacaccgtcgccaaagagacatgcagtgagaagagtaccaacttgcatgactacggcatgttgctgccctgcggaattgacaagttccgaggggtagagtttgtgtgttgcccactggctgaagaaagagacaacgtgtattctgctgatgcggaggaggatgactcggttgtct

SEQ ID NO: 565814 - DNA, 364 bp, Homo sapiens
taacgacaccctcctctttcagcttccagtagtcggactacaagcatgtgcaccacacctatacatttttgaaaaattttgtagggctgggtgcggtggctcacacctgtaatcccagaactttgggaggccgagacaggtggatcacgaggtcaggagatcgagaccatcctggctaacatggtgaaatcctgtctctactaaaaatacaaaaattagctgggcatggtggtgctcgcctgtagtcccagctactcgggaggctgaggcaggagaatggtgtgaacccgggaggtggaacttgcagtgagccgaggtggcaccactacactccagcctgggcgacagagcgagactccatctc

SEQ ID NO: 565815 - DNA, 785 bp, Homo sapiens
  misc_feature (258)..(258): n is a, c, g, or t
  misc_feature (263)..(263): n is a, c, g, or t
  misc_feature (276)..(276): n is a, c, g, or t
  misc_feature (289)..(289): n is a, c, g, or t
  misc_feature (295)..(295): n is a, c, g, or t
  misc_feature (299)..(299): n is a, c, g, or t
  misc_feature (310)..(310): n is a, c, g, or t
  misc_feature (393)..(393): n is a, c, g, or t
  misc_feature (403)..(403): n is a, c, g, or t
  misc_feature (444)..(444): n is a, c, g, or t
  misc_feature (449)..(449): n is a, c, g, or t
  misc_feature (480)..(480): n is a, c, g, or t
  misc_feature (683)..(683): n is a, c, g, or t
cggacattaatctggatgtcccacattcatactctgtgctggagcggttgtagaagaatgttttcaggctggaataatttccaaacaactcagagatcttgtccttcaaggggcagaaagcgtttgtaagcgaaggagatggaggtcgtcttaaaccagagagctactgaatataagaactcttgcagtcttagatgttataaaaatatatatctgaatgtaagagttgttagcacaagttttttttttttttttttnaagcncttgtttggggtncaaggctttctgntttttntaancctacttttanggggaattttaaaggaaatgttttttctttttttttggttttccgagggggcagggagggacagaaaagtaacctcttcttangtggaatatnctaataagctacctttggtaagtgccaggtttattatctantcatnccaagtttggctttgatgtctgacggccacncctttctttcagggacagtgttttggtagtaaaatcaggggtttatacaaagccttaattagggggtaagagttaagctgttaaaaccccagtgtgggttgctgctgtggaaatacgtggctggggagtaaaaaaaagaaagttatttcttgggtcttaaaagaattttaaaaaattagtcatgagacttattcatctttccngggaacatactgattggtcttaaagactagaccgttagtaaaggtggtgggacatctatttctcacagtggaaatgactggttctaagatgtctcaattaat

SEQ ID NO: 565816 - DNA, 183 bp, Homo sapiens
  misc_feature (1)..(1): n is a, c, g, or t
naatcactcgaaatgaataaaagacttaaactaaaaagataaaactctaaatctcttagaagataacatagggttaaatcttcatgacactggattccacaatgatttctgtggatatgataccaaaggcacaggcaacaagagaaaaaaaaaccagataaacgggtctacttcaaaataaaa

SEQ ID NO: 565817 - DNA, 385 bp, Homo sapiens
ctttgtgtatttgtctgccatcttcagagagaccttccagataagaatttctgcttagagctccagtaccaagtatatgggccagcacagccacaacacagacttggtgctcctcacaggtcctctggccaatgtcctcgttaatattctcaaccagctcagaaggtgggccgttatcagaaaccaactcaagggcccgggactcaatgtcggttcttgtcggcccacggtcataatccacaggagactggcctttttgaaatatcttgatgtgtaggaaatcctctaatccggtatcgggaggccagacacgtgattgactgtagcatccacagctgacagtctcactcctcctttcgtgtgctcttacacctctaaatctgcg

SEQ ID NO: 565818 - DNA, 793 bp, Homo sapiens
gagcagcccagcgtgcccattccagcgcccgcgtacccgcagcatgcctgcgcccaccgacctgctaggccgctgctgtgctgtgcgctgctagctactgcgcccccagtcctcctcgttcgccctgtgatatctagttccaaagaacccctgctcatgaacggtggtttatagcgacggatgatttcccaatgaagtgctgaggagatgtcttcccctcgttacacctgcacgtgccttactcgggctacgcaggtgcaattcactgtgagacgaaatgtgtcgagccactgggcactggagaatgggaacacttgccaatctcatctatgatctgccgcctacatactagtcgcgtagtagacctatcttgcggcttttgctctgcattggtgtacctcggagcttgtgtcctgcctgacatctcgttgtcagtgcataggtcaaatgccttaggacatctcctatgtcatgtccaattgacgatatatccccttgtgactccagcgctgaatccttgtcatgcgagagggactgtgcggtacacacggtgctgtgtgacctgcacgtggatgtccacccgtccttctggcccagctccctgaacgcttcccccatgacaaagtgtcccttttcacacgtgcttgtggccctacttatgcccattacaactgctgcacactctgatagttccgcacatctccacttccttatcactcgtttacatacataccaaaccaccaacgtaagaataagatatgtagataacactgtagaaactactaacacatcg

SEQ ID NO: 565819 - DNA, 140 bp, Homo sapiens
cgtgtgctggctggctactggtggtgcctgacatcaggttaggggctctcacgccactctgcgtgcctctgccctcgctgctcttggccatgcgcccccaagatgctctctcccttctccaatgagggagccacagaact

SEQ ID NO: 565820 - DNA, 142 bp, Homo sapiens
ggtcgacatctgctctggtcgacttctgctctggtgaactttgatattcaagattaaattggcgtggtattaagagggtaaggaatgtttaattggctttaaagagccccttagttgagatggaggaagaaacagaaataag

SEQ ID NO: 565821 - DNA, 416 bp, Homo sapiens
ggctggaagcatagttcaccacgtaatagatacaataaattatgctcagggcgtgatgtgtggcaccatgcagtcccagctattcagagagtgcttgagtgtagaatgtgtgtgaacctgggaggcggagctatgcggtgagtccaatattgtgccactgcactccagcgtgggcgactgagtgagactccgtctcactaaaaaagaatcatttcctttattttaagtttcatctgcctgcaaacacaagcattctgttgatcaacggaaatatttagatgtgccatttcttgtctaaatcaaagtttcatatacagcaccgagggggccacgagaggcagaggcccagacagaaggtgaacatagccttgcagggagacatatgccaggcaggatgaccattgggactgcatcat

SEQ ID NO: 565822 - DNA, 196 bp, Homo sapiens
aggtggttgctcgctggtttagcggacagtcgcattagcaagatcctccgtcgtggtcgggatgccgtcctgtacgaggggacgaaggtggtgttcgctatgccttgggcatttccaagtacaacgagaaggagatcttgaggctacagaatggcctggaaatctaccagtacctgcgaacctatgagggtacgca

SEQ ID NO: 565823 - DNA, 405 bp, Homo sapiens
accgcttatacagaggctacctaagatcaagcattagagaaaaacagtggagtcatgcaggcagtaatatgtcagatttggtacaggattaaaatactaactgttttgaatggtcctggtctcaaattgaagtaaatacgaagacaatatagaaatatacaaccagttgataagactgtactgcagatgctcagaaagttaaatctcgctctcatatgtagtgcaggtatgtctagactgtcaggatctctgggtagctgcggctggtctttcggaagaagtcgcaggctggtgagatgttcaatgtcgcgcgccctgaggctgtgtgcggtcttcatgagtgcttctacccatgttgattcgtcgtctgagctattgctgctctcctcgttgtccggccggtga

SEQ ID NO: 565824 - DNA, 626 bp, Homo sapiens
tatggcagaaatatgggccttgatgtgaggacagcatcaattaatgagggatcctctcccttgatcaaaacaccttccaccaagacccacctttaacgctgagcattacctctcaaagtgagaattgggcagggactaatatccaaactgtatcaacatctgacaaggtgttcacaaccagaatatataaggagctataacaattctatagacatacaaatggcaaacaggcatatgaaaaggtactcaacatcattgatccattagagaaatgcgcatcaaaactacagtaagatatcatctcaccccagttaaaatgtcttctcccaaaagacagataataacacatgcttgagaggatgtggagaaaaaggaaaacctcgtgcacttggggaaatggtattagtacaaccacatatggacacacacatttgaggggccctctaaaacttaaaatagagctattataccattccaccatatcacctgtgggtatataccccaaagacccgaaaatacggtattggagagatatactggcacgcggtgaccggtgcactatctactaggccagaatttggagcgacctcaatggcttaccgccgatgggagggttttttggcccc

SEQ ID NO: 565825 - DNA, 304 bp, Homo sapiens
  misc_feature (32)..(32): n is a, c, g, or t
  misc_feature (102)..(102): n is a, c, g, or t
  misc_feature (214)..(214): n is a, c, g, or t
ccccccacaaatcaacctaagccttgttatanccccttgaagaaagcccaattgattaaataaaatatttagaagtttcagaagagtaggccataaaagtgnccttataatctaccacaaaagtcaaagaattataagtatgaatcaggaacatcattctgaacagcagcttgcatgtgtggtatattttgaagaaaagattgctcctttcaantttctgaaatctgtttttaaacattttttgtttgtttttttaccaaatatatatatttttttgcctttgcttgtttctaggaattccata

SEQ ID NO: 565826 - DNA, 951 bp, Homo sapiens
agcggacgggcgcgcggactatcgggcggctaggctctctgaggaggctgccacaggtgaagcagccgtgacaagtggtgcccgaccaggacctgaacgaggaaggtctgccagagcagagaaagtgaaactgaacagacaaacaacaaacccccaagacgggagaagttctagccgacaagaaaataaaaaaaaaaatacaaatccaataaagaacccaccaaagaaaaaataaaccatataacttgaatggaccttgaggaggaaccagattataacaggtcatagtctcttgagatgcgtccgaaacaatccttaaaccgagttaaatacaaaagacgtgaacttgagacaaagaccgtgcggagtacgtgtagattttgccatttgcgttcttaaatatattaaacatatgcgaaagttgcaatttcaaagatttcattttaatgcttttttattttttcgtcattatgtgttcattctgggggattccttaaactgtccatattaactatatttctcaaggtgcttgggctatttaattaccattgattgtactgataattaacttttgaaaaaccgatctctagccaagtatttgaagttgtttaacacaagcccaaaaaaaaacgcgatgattgatcaataattttagcgatttagatcaggaacaaaattgagatgaggtttttaactctctgaaatatacttacgtttacgaattttaagtttcgggtaaagaactcgacttgggtggatcttctagaaattcaagatcttttcgattaccaattatcgctatagttgaagtcgtgaataatattgactaaattgaaaacaattcttggttacaatgcgcttcaataagtaaatatctagaaaccgaggctttagaccccatgtttctcttgatttccgaaatgttagacttcaagaaatctgatctaaatc

SEQ ID NO: 565827 - DNA, 129 bp, Homo sapiens
cacattctgtagctttaaaacattattaaagaacatgaaaataaatgcttgggaagtataaagcgttgaggtttctctggaaagcactagacattgtggtgttcatgggtagttaaacataaaatagct

SEQ ID NO: 565828 - DNA, 577 bp, Homo sapiens
  misc_feature (331)..(331): n is a, c, g, or t
  misc_feature (333)..(334): n is a, c, g, or t
  misc_feature (370)..(370): n is a, c, g, or t
  misc_feature (394)..(394): n is a, c, g, or t
  misc_feature (453)..(454): n is a, c, g, or t
  misc_feature (513)..(513): n is a, c, g, or t
  misc_feature (515)..(515): n is a, c, g, or t
ggagcagtaggggcacttgaagggcttgctgccggcgtgcaggtgcatgtggcccagcaggttgtacatgcggtccacgcacttcccgcacaccctgcatctgaatggcttcacgggcgagtgtacaatcatgtgggtcttgagagtctgcttctgtacaaaggtcttgaagcagatgtggcactggtagggccggacgctggtgtggatcagcatgtgccgcttcatgttcgcctgtagggtgaactcccggccacacacctggcacttgaactccttcacgcccttgtggctccgccagcgctgcccagcgtggtgaatctggctgaantnnacgccgcattcagtgcacacgaagggtcgcaggttntggtggttgagcatgtggttctgnacctggctgcggtagtggaaggacttgtcacactcgaggcactggtagagggtggggcnntggtgggaaaaatagaatctttatattttttgttagggctggagaagtccaggccgcantngacgcagacatggcagcggccactctcatgcttcacttcgtgggccttgagctcgctggggt

SEQ ID NO: 565829 - DNA, 382 bp, Homo sapiens
ggtaggtgggggtagatctggatgtgatgtgttagtctgaggtgtctcaggtagtccctgggtggtgtgtgcagtgagatggtgtgttatgaagtgacttggatgttgtagggcatgtctgtgcatcgtggggttttacgcatgtttgctcagcacttctgcgtgctctcagctaagcgttggtgttatgaaataaaaaacctatttttcaggaccagtctttgttgtctggaaattatatgtatgatgggacacgtccatgtattttggggaaggcctgggtgtcatgggataagttcagttgtccccaaaatatacggacatgtccgataacacatacaatgttgtgattctgtgtggcttgcctaagttcagagccagg

SEQ ID NO: 565830 - DNA, 588 bp, Homo sapiens
atttgaatatcttcttgatgaatcaatccttttatcattctattgcatatctaaagctaggtaacaaattattctaaaactttgcagcttaaaataataaacatttatttaacaaacactggttctgccgatcagaaattcagaaattcaggggtagcttagttgcgtggttctggcctgcggtctcccatgaggtagccgttaacaggttggctggggctgcagttatctgaaggcttgactgccgttgctggatatgctcccaagatggctcacacacgtggctcttggatgcaggtcttcgctgctcactatgtgaaccctctcttcatccatagcagttgacctctctcagagccacatgactaagtagagagcaactaagctggacggcacaatatcttttatctctttaccatactctattcatgagtcacaacgtccaatcaacattcacgaggagacgattacggtctaccctctaacgacaagcacttctaccaatacgaagccctattttttcacacaacattttacaacgcctctttccccgccgctctcgtctctcttcctctctctctcttcccg

SEQ ID NO: 565831 - DNA, 358 bp, Homo sapiens
  misc_feature (201)..(201): n is a, c, g, or t
cgaggcggggtgttggctgcgacacgcccctcactgggtccggagctggtaatctccgttctgcgtagatataaacgcacccagtgcagggcctggtacccatctcttctcaagtgatcttcagtgtagcgcacctggagcgccggagttagtagaagtaggggatctcgaacttgacactgatcgggggcttgcccttcnttgtcttcggcctccacactaggcaggccgaattgggcccgcatcaggtactccttgcggccggggaaggctttgatggaccacacgatctcgctgtcctcggggacccatttaacgctccccacggtcgtcttgaacttgggtgagtcggcttcct

SEQ ID NO: 565832 - DNA, 355 bp, Homo sapiens
  misc_feature (303)..(303): n is a, c, g, or t
  misc_feature (339)..(339): n is a, c, g, or t
atctaggctgagtgcagtggcgtgatcagggctcactgcagcctcaacttccttggctcaggcgatcctcccgcctcactcagtctctcaaatggctggaactgcagttgtgcgccaccatgcctggctaatttttttatttttttgtagagatggtctcaccttgttgcgcaggctggtctcaagggaattcaaacctttggacttacgctgtcccccagcctcggcctccccaagggttgagaatacagggcatgagccaacacacccagccaataagatttcattcttgtgtagtattanttgtgctactttttttctttccccaagagtaacttntatttcaaattaaatt

SEQ ID NO: 565833 - DNA, 218 bp, Homo sapiens
catcttcccctgaaacccagtagtatatctagttgtatgctcaacttttctgcttggattctaactaggaatcttaaaattaacatgtccaaaccctgttttttcttgtttttttagaggcagagatctcactctgtcgtccaggctggagtgcagtggaaagatcttggttcactgcaacttccgactcctgggttcaagcgattctcctgcctcag

SEQ ID NO: 565834 - DNA, 143 bp, Homo sapiens
cgagccaggaaacgtggcatgcacgcgcagaacgcctgtcagcgtgaaccgaacgatggcgcgctgcgcggtgatcagtacgtcaaaatctccagtccgagcaaggcgctgggtttgcagcgctcaagcgtacgcggggaggc

SEQ ID NO: 565835 - DNA, 212 bp, Homo sapiens
tggcgctctctgtcatctgctcgaatctttcccgtctgaagttccttttggggctgatcttggaggaggtgtctttcttgcctgtcacaggtcagactaaaggggagacttcactaggtttgctgcaaatttacttccctgtctttttcttgctatccattgataccctttgtgctgataactgataagggcagttgactgagcccagcaag

SEQ ID NO: 565836 - DNA, 670 bp, Homo sapiens
cgaattcggccattatggccgggtgctttggctcatgcctgtaatcccagcactttgggaggctgaggcgggcagatcacaaggtcaggagttcgagatcagcctggccaatgcggtgaaaccccgtctctactaaaaacacaaaaaaattacccgggtgtggtggcgagcaactgtagtcccagctacctgggaggctgaggcggaacaattgcttgaacccgggaggcggtggcggaggctgcagtgagccgagatagtgccactgcaccccagcttgggcaacagggcaagactctgtctcaaaaaatcccagcactttgggaggccgaggtgggcagatcacgaggtcaggagatcgagaccatcctggctaacacggtgaaaccccacctctactaaaaatacaaaaaattagccgctcgtgctggcggccgcatgtagtcccacctactcccggcaggctgaggcagtagaatggtgtaaacttaggaaggcgagcttgcagcgagcagagattgggccacttgactccagcctgggcaacagagtgagactctgtctaaaaacaaaaacaaatgctcccatataggatgaacactcatgaatcgcaagataggtctcaacacggaaattgacgctttaacggatcggaaattttcggaactcc

SEQ ID NO: 565837 - DNA, 490 bp, Homo sapiens
  misc_feature (28)..(28): n is a, c, g, or t
  misc_feature (38)..(38): n is a, c, g, or t
  misc_feature (63)..(63): n is a, c, g, or t
  misc_feature (100)..(100): n is a, c, g, or t
  misc_feature (441)..(441): n is a, c, g, or t
cctcttggaagtttccctcattttgcangtgccagctnctttccccctgcttgaacaggggantgtactgagcactcccagatgggcctttccccaagcnggaacccaatgggcccaaatgaatcaagttgaaggagagtgagcagagtcagcagtgagagaaagacttagctgcaaggtcaaaatccgtctgaaaacagacacgatggaagacagacagttcctcctggatcatcgtataaagaaaagggatggatcaagacagggattgctgatgcatatctgctcgctgtttgactacaaaatactctcatgattgattctgtgtctgccacccaagatcagtctcaaggaaatgctgacaaaaccctggcacccagagtcacagagctcagtttccagccctagcaccacccttgataacttgagtgaccttggacncctggtctctgcctcagtttccaaattaaatgagtgtggtgaaaactta

SEQ ID NO: 565838 - DNA, 768 bp, Homo sapiens
  misc_feature (768)..(768): n is a, c, g, or t
agatggaaaatgttgtccagagttcaggggaagaggatattgggttcttttctctgaggtcactgtttcaaaacgttacagaagaaaaggctaatattgcttcagcccttgcccagatcccacagaagttataaagagtatgctatgagtttatcagggattcaccatgatcaacctgtgaagcccctgatcgagcaaacttctggatcgagtttgtcatgtgccacaaaggagccaagcacctgtggtcagctgcccacagcctcacctggttccagcactactctatagatgtgattgggttcctgctggcctgtgtggcaactgctatattcttggtcacaagatgttgtttattttcctgtcaaaaatttaataacactagaaagatagaaaagagggaatagatctttccaaatttagggaagacctgatggggtaatcctgttaattccagacacaaagaatttagtgaaaacatgttcccttcctattttcatattatctattctgatattttatcttagctaagtagcctagaattccacgatcatgaacttgcgagtatatctcattctttcattgcattttcctaggtgtgcttactctcttctctcactttgtgacacaaggacatgaatacatgtaaattttcatatttctgatatcactgcttccatgatgtcatcacttctttaaccttaagtgaaggggtgacctgcaatatgctgattcctggtgttgcccaccacttgatgtaaaaaatcn

SEQ ID NO: 565839 - DNA, 880 bp, Homo sapiens
  misc_feature (91)..(91): n is a, c, g, or t
  misc_feature (100)..(100): n is a, c, g, or t
  misc_feature (107)..(107): n is a, c, g, or t
  misc_feature (119)..(119): n is a, c, g, or t
  misc_feature (130)..(132): n is a, c, g, or t
  misc_feature (139)..(139): n is a, c, g, or t
  misc_feature (146)..(146): n is a, c, g, or t
acttcggcacgagggctgccttttgaaatatttgatgtgttgcctggcaggatactgcaaagaacatggtttatttaaaatttataaacangtcacttanatgccanttgtctgaaaantcttataaggnnntaccctngataggnatttacacaggtagggagtgtttagtggacaatagtgtacggttatggatggaggtgtcggctactaaattgaataacgagtaaataatcttacttgggtagagatggcctttgccaacaaagtgaactgtagggtcgttttaaactcatgaagtatgggttcagtggaaatgttggaactctgaaggatatagacaaggttttgaaaaggataatcatgggtgagaaggaagtgtttcgaaagtctcttcgaaagttagtttagggccatcacggtagctcaccctgtgtaatcccagcacttggggaggctgaggtgggtagattagtctgagcccaggaatgcaagaccagctggtgcaacatggtgaaaccctgtttctatacccctcgtatctgggctttgtagcatatgcctgtggtcccaggtactgaaggaggctgagcgtgggaggattgctttgaggcccaggtaggcaagagagttgtgtgacgcaggatcacgtctttgaactctagcctgggtcaactgagtaagcacctacacatgttctttattgaagtcccaggaggcaaacttgtgggacggacggaagtatctgtaaccactaggtttcctcaggactatataaagctaaccagtctccattacacaatgacagccgaatcagactaaaacaaatcaataaaacacggtggacaaaaattccaataaaaaatttcaaatgtaagcc

SEQ ID NO: 565840 - DNA, 154 bp, Homo sapiens
atgcagtgtcacaccatgggccataaaatacaccagaatgatatctgcatcattcacaacttcatcaaagttctctttgtgtcaacacaatggtggatccatctacgagtctgaccgtgcagtgacatgcaatgcttgtgcacttggcctgtct

SEQ ID NO: 565841 - DNA, 148 bp, Homo sapiens
ggcaaacccctccaggcctgggtaattttttttttttcataaagactaggtagctccataatggtcaggctggtttagaacacccaaccttagggggaccccccaacttgaccccccaaagtgctgagattaaaggggtgagctccga

SEQ ID NO: 565842 - DNA, 789 bp, Homo sapiens
cgagagcagaggacgagccgggacgcggcgccgcggcaccaggcgcgcagccgggccggcccgacccctaccggccatacggtggagccatcgaagcccccacccacaggtctgacagagagcaccgtttcaccagagggactcaacaccggcgatctatgtttaaggtttgtaactctcgccgtccaacaggaccagcgagtaacttcctgtccccaaaggcccagcaggcccccctagccccgcgcggccccctagcctgcctcccggccgcccggactgccgcgccatgtcctccagtcggccctggggacatcggcagctctgcatgcagatccgcgtgaggaagtgaccgtagacaggaccggagtaggagcagcgtagggatccagctgctggccagaggcacggcaggcgccaaagcatgccccatcatcacgtgaacgagacaggtgtcggcggccttgacgatgcaagcggcaagacggcccgcccaggtggaacagctggtgacacgcgcaataggaccctggcggtgatctcctaagtccccatccatggccccagtgactcatggcgcctcaaagctattgacccaaatggggacgttgcgagaagtcgcgacgtgatgccacatgccagacggagagggagcccctgcttggggagcgctggcacagggacggaggtcaccagacacgagctgagcagggtgccaggtttgacacccactgccttgaaggtctcaaagacgcacgctggacacaatgggctgcagtgcagtcgaca

SEQ ID NO: 565843 - DNA, 856 bp, Homo sapiens
tctttaacaccctgcgtggcagtccctgacgcaccgtcgtgatgcccaggaagacagggggacctggaagtccaactacttccttaatgatcatccagctattggatgattataccgaaatgtatcattgtgggagcagacaatgtgggctccgaagcaagaatgcatgcagatccgaatgtcccttcgcgggaaggcgtgtggctgcattatggcgcaatgatatcaccaatgattgcgtcgaaggccattacagtagcggcggcctggaaaagcgaagccccaggctcgtggtatgaagagctgctgcctccatactcgctgggcggaatgtgaggccttcgatggtatcaccaatggagagatcatcatgtgaagagtcagaggacattgtttgctggccatataagagtgaccacgtcgtgcgagccctgtgctggtgccatttgccccgatgtgaaagtgcgacatggtgtccgagcgctcgagtaagcaactgggtctcgggcccggagaagagctcctaaaataccggaggcttgaggtatgtcaccacttagaaatcctccatggggcagcagtttgaaatcctggagttgatgttgctgctgatctagtgactggggcaccaaaagtgtggaagcccagcagaaggccactgcttgctgacacatagcacgaagaatctgctcccattctaccttatggggacgtggtcaatccgagcaggtagtacgaaagtggctggattttacaagccctgaagtgcgttgatatccacacgaggagaactctgatactcgcttccgtggcaggggtgtcccgcgatggtgaccagtgttctgtctgcggattg

SEQ ID NO: 565844 - DNA, 141 bp, Homo sapiens
caagtaaggtagaaatgtactcgataacccaaggagccaggaagagcaagaactactaaagagagataggggataggagaagcaggtagagaacaagaacacagaagtatatatactaccaataaataccactcctaaagt

SEQ ID NO: 565845 - DNA, 314 bp, Homo sapiens
ggtaactttaatgtccgttctttttatatatagctcggcttattacagaggagtgtttagttgatatacgcacctgattgaagcatttaagttgtttaaagaatttatacatggacatatcataggcttgtgggtgagtgcctttgcttaaagtcttcagcggatatacattttgagatcatggtcactcattgaatagggctactgccttagcgtcatcatgctgtagatgagttgtgatgtgcatctgttcgaatacctgtggagagactgctgatcgttgtgctgtgtacgaacctgacagtctgtgctgg

SEQ ID NO: 565846 - DNA, 200 bp, Homo sapiens
agtttttcatttctgtctagtgctttctaagcctctttctaagctctttctctaactaactctccccaactccccctttttactttgtgttttccttttgaaaaaggaactttttctttgtggggggggggccccccaaatttgtgggggaaggaaggaaaaggggtgtttttttttttttccggtcttttttctaaccc

SEQ ID NO: 565847 - DNA, 82 bp, Homo sapiens
ctcttccttctccttttctttctccttcttccttttcctcttctccttcttttcttctccttctcccttctgtcgtcttctc

SEQ ID NO: 565848 - DNA, 562 bp, Homo sapiens
agtaaggagcggaatatcaaagtgagaaagggtgatgccatggagtgtcaatttaatatcaggatattcttgtgttagaaatgtagatattgaattttacagtttgaaaaagggtacctcagcctcttcagatactggtttattggcacatttcaacagaaatattagattccctttctttttcttaatagtgatcttctaacaagtttcttggaaaaactatcattctaagggaaatccctgtttataacctattaatatatttctattcctagaagagagtctagcagggattctagtaggaattactgagtgtttaggaaggcacttgatagaggcatctctgctttccagcacagggattctcagccttctaaagatctagaccagtttccaagctagcttctccacagcccaccactgactagtgtttgcttgtgtattctctaatggattttaggaggataggccttctgacagagtcatgaaagactgaaggcatgtctagggacataaaagctgactggcccttcagcaggaatgactgacagcggatctctgg

SEQ ID NO: 565849 - DNA, 347 bp, Homo sapiens
ctccctcacggatgtctgcgaaccttcaataaatgagttttatacttgcgtttaggtttttagaacatacggtcttactgtgttgccctggctaaattcaacactcctgggctcaaataatcctcctgcctcagcctcacaagtagctggggctccaggctcatgccactgaaaccagctagtttccacttcttaaaggtgccatcatgtcacagcgtgcacagatcatagagaaagcctgtgttagcacatttgcattcccatgggcattgagccaaatctgggcttgtaggctattctctcatgccaggcagggaacccagggcaggcaggttgtcgccaacaat

SEQ ID NO: 565850 - DNA, 127 bp, Homo sapiens
tgggcacgaagcagcgcgtactcattcttcagctcctcgatctgctagcctcaggagctcgtagtccatctgcagccgatcggcctctatgaaggtatcctgcatgcgctggttggtctggcgcaac

SEQ ID NO: 565851 - DNA, 397 bp, Homo sapiens
atccgtacacatattggatgttctgaatatgtcttgggtaacttaactatcctctgttagaagaacattttggatacttgtagggttttgcccatgttttttttgcgacagagtctcgctctgttgtccaggttggagtgcaatggcatgagcttggctcactgctaatctccacctcctggattcaagtgattcttgtgcctcagcctcccaagtagctgggattacaggtgtgcgtcaccacacttggctaatttttgtttgtttttgttttgttttgttttgttttttttgagacggagtctcgctctgtcgccaggcttgagtgcagtggtgcaatattggctcactgcaacctccgactacctgggtcaagcgattctcctgccttagcgtt

SEQ ID NO: 565852 - DNA, 155 bp, Homo sapiens
cttgtgctggcctctggtggcgcggcacccatcccctccacatcccacagctccaggcatccatttgtcaacacatcctcaccaacatgcaccaatcaacaccccggtggggttttttttttttttttttttttttttttttttttttttttttt

SEQ ID NO: 565853 - DNA, 875 bp, Homo sapiens
aaagtggtgaaggcagcagcccaggtcttgaatacattcatggcaatatcgggacctccggagcatctatagaataaggatgggtggaatcagaaccattttacttacaccgtgtgtcgacattggacgcgagaccgatatcaaattcgacatgccgtgtccttgtctacgcacactaagcccagagcatgatggtcacccagtcagttgcagtcaggtctccagctaaatcgcttcatccaatttgtaccatcagttcctattcctcaccaggcaagagaacaataatagacggctacagcatcagcagctgtattatagtcaggatgactccaacagagaagaacttgtgatgctactacagatggtattggcagtctccgtcatagctatgaagcatccttagtgttagatgaccgagttacactgtgtccagctttcgtacgtgagttactcaacaccagtatggactgtaaatcgcacgagaaattatgtagcacgtttattccactaaaggagcttctgtatagagcagaacagtacccaggtccccagacgtcatgggtgtagcatcaagagtgcccaacctgaggaaactctttctttgctaaacctgtgcagactcgaagggtgaaccagtccatctgggctgatttgatgattgaactgtgaaagtgaacgtggccggcatgaactgaaggtgtcaagaaatcctatccgaggatgatccgcgccgcgagcacatgccgggaaaggacctcaccccaataaggtggaagatctaacactcataatctgggacggtgaaagtggcagaaggaaacttgaaccgggcacaatcgggttcgccacaacagatgacttccggaaaaacc

SEQ ID NO: 565854 - DNA, 154 bp, Homo sapiens
gagaaagactgtattcaataatcaagttggaggccagacgtggtggctcacacctataatccctaccgtttgggaggccaaggcaagcagatggcttgagcccaggagttcaagaccagccttggcaacatggcaaaaccctgtctttagggca

SEQ ID NO: 565855 - DNA, 124 bp, Homo sapiens
agactcggcacccgttcgagtaggagggcgctggggtgagcttgaaggctagtggcgcggaccctgtggtggcgtccggcggcaggtgcagattttgagtggtcagtagctaaatattctaaga

SEQ ID NO: 565856 - DNA, 186 bp, Homo sapiens
ccccctccccgggtatcatcacccgaggaggcaaccagccttaacgcctgaacgcaggcacatacttcctattctacaccctagaaggctcccttcccctactcatggcactaatttacactcacaacaccctaggctcactaaacattctactactcactctaactaccctacccggggaggggg

SEQ ID NO: 565857 - DNA, 237 bp, Homo sapiens
  misc_feature (47)..(47): n is a, c, g, or t
cccgctaatttactcgggtactggaggatctctagagtcgtccaggntcctcttaacgatatttggaggtcagcacggtgctcacgtatcgacgtgaacttgtacagtgcaggcatgcaccgcattggtgaatacacgtgaccaggctccatctatacgatattaggagagtcagcacggatctcacgtatcgacggaacttgtccagggaggcatgcaccgcagtggtgaatacac

SEQ ID NO: 565858 - DNA, 711 bp, Homo sapiens
tacggtccctgcagtgcctgctgctgaggaggccaccgaagctcgtgggacgcgatggagcctggcgtggccctgtgaaagacgccccgatcctggacgctggtgcagctgcatccaccatgctgcatgtgctgagctgctgcgcatgtggcttcctgcctgacttggatgtgatgttgatgttgtggtgtgcgctggatgtgtgtgcatcagtggttctggtccccctgccctgctcctggtgctgtgtggctgtgttctctgtgctgtgtgcgtgcctggatgtgagtgagctgggtccttgtgtggctgcatgagtcagattgtgggctggggatttctggggcaccgtggtcctcaccttcacgaaaaaggccccacagcacgtccccactaccctgacgactcactcttcgtggcttctctctcctccccaagagcatggggtgggcctgtctcgcgttcccctgcgtggagtcagtgaagcgtccttcctacctaccagtcctcccctctggtgtcttgggtgacacttcctgtggggcctttcaggtggtttggcgccgtgtgcaggggccttgagaggcctggtggtgcgcggcctcagggtccccacattgcctgcaggaggccaccgccagtacctgcggcagtcgggccctgaactacgacttcgcgcgcctaccggagcacagtgccacggggtgacca

SEQ ID NO: 565859 - DNA, 270 bp, Homo sapiens
  misc_feature (29)..(30): n is a, c, g, or t
  misc_feature (35)..(35): n is a, c, g, or t
  misc_feature (44)..(44): n is a, c, g, or t
  misc_feature (49)..(49): n is a, c, g, or t
  misc_feature (53)..(56): n is a, c, g, or t
  misc_feature (58)..(58): n is a, c, g, or t
  misc_feature (60)..(60): n is a, c, g, or t
  misc_feature (78)..(78): n is a, c, g, or t
  misc_feature (80)..(80): n is a, c, g, or t
  misc_feature (82)..(82): n is a, c, g, or t
  misc_feature (234)..(234): n is a, c, g, or t
  misc_feature (259)..(259): n is a, c, g, or t
ggatcggcacgagccacgacgaccacaannccaanccttccagnggcantcannnncntncctacctcttcaactcantntnagtatctgtgtcctcccttcttgtctttccctgtacctctgtttgttgtacctgttgtacccctgtgtcatcctgtctgtagtactcccagtagtttccccgtgttgtcaggtcagtgtaaaattgtgttgtaacgttgtgtgtctgtcgtntgtcccaatccgtagtgtagtcgtntgttgtctgtc

SEQ ID NO: 565860 - DNA, 237 bp, Homo sapiens
  misc_feature (181)..(181): n is a, c, g, or t
  misc_feature (215)..(215): n is a, c, g, or t
agtagagacagggtttcaccaggttggccaggcatattacgaattcctgacctcagctgatccacccgcctcagcctcccaaagtgctgggattgcaggcatgagccactgcgtctggcatatcttagttttattatgcaaatagttttgaccttgcagatcctctgaaagggtctcaggnacccagacaattgtaaccagaccattctttaagnaccactaaacagttttgtagag

SEQ ID NO: 565861 - DNA, 314 bp, Homo sapiens
ggggcccccaagatccgtgtgaatcatgttccctccccattggtgatgaggttcatgggccaggccccttgtagtgccccccccaaggcaaaggttatgttgaaccgattcccccttggcaagtttgtttgggtaggggacgtggtgaacgccatcctttttttggggaggggcccaagggggatgcccaggggttcccttttgccggtggaaggggggttttgggcctgttggggtccctccacacccctcaagccccatgcgggggttttcctccccccaatccctccaataaacctgtttttgttgcccca

SEQ ID NO: 565862 - DNA, 445 bp, Homo sapiens
  misc_feature (23)..(23): n is a, c, g, or t
  misc_feature (192)..(192): n is a, c, g, or t
  misc_feature (370)..(370): n is a, c, g, or t
  misc_feature (407)..(407): n is a, c, g, or t
tggtggggaatggagtttcactnttgtcgcccaggctggagtgcagtggtgtgatctctgctcactgcaacctctgcctcctgggttcaagcgattctcctgccttagtctcctgagtagctgggattacaggcgcccgccaccaagcccagctaatttttgtacttttagtagagacagggtttcaccatnttgggcaggctggtctcaaactcctgacctcaggtgatccacccgcctcggccttccaaagttctgggattacaggcgtgacacccgttgcctggcccctctgtggttactttctctggtgaagtcaaacccctcaaagtcatccatgatgattgagtcaacttttttcaaactcctntaaatgttggacatattgacctttttcaatgaatcantaatgttcccaatggcatttagggtggttaatctttcc

SEQ ID NO: 565863 - DNA, 776 bp, Homo sapiens
taccaatatttgaatagtaactaagatcgtcagtgtatctggacttcttgttttttgaagttctaaaacaattatagtagggatttattatttggggcctccatccagatgttttgtccaagatcatttttataaaacttcatttgtcttctgttgtccagataacatactttccgttctataggaatcttcactgccaatcatagatatctaccagttggctttcttagactattcacgtccaaagctggagactgatgtcctgccagtagagaatctacagaaagttaatttgaatgaattaggaatccaacattcttgtatatgcaggagacagcttcctgatctagatgtacaattagagtttaggttgggaaattactttaaaagtgtgttttaccgggagatgtcttcaatctctgtgtaaatacccacatgcttatgcattgtaaaccagtgtgtgtaattcctgtgtatgaatttggtagaactgatttctgcttcaaagaagaatgctgcacctttaatttttataagtgtcccctccacctgtaaccctgatatattgtctgtagagctaaatactactaaatattgtgtacgtgactaggatcaggtttcgggaatatctgctgatgagacctaaaatagttcgatttttttaagtaccttggttaacagagtaaagattattcctcttattttttacagaagaatgcactttaacaaaacatagagctgcatgggcaattcaaaacaaatctgtgaagtgcagt

SEQ ID NO: 565864 - DNA, 228 bp, Homo sapiens
gcggcgagtgaatcgagctcggtcgtcgattatagaatgactgcgccggttcaagcttcagtgaggtttggatatgaatggctgttactacgagggcttatgtgtgtctgattgaagagtatgctaatgagctgattttaggtctgtttgtcgtacgcacgatagagcttgttataattatgcctcatatggatagtacaaggaagggttataatcgccggtcacgag

SEQ ID NO: 565865 - DNA, 109 bp, Homo sapiens
cccccaaaaaaatgggggtgcatgttgggcttggcccccttggccccacccccccctccagggcaaaaagggcccagggttataataagtaaataacttgtttgtccca

SEQ ID NO: 565866 - DNA, 388 bp, Homo sapiens
gaccctgtctagctttcagcagagaggagacccacatagggtagctcgtcaccgcaggcaggtcttcccgacaagtggaggagacctggcctggagtgggtagttccttcctgtacctggtagtcccaacatctgtctgagtctagctgagtcctgggattttatgggctcagaagggaggaagtgtgtgctgtttggtccatgggtgaccaggagcaggctgggggaaaaagcaccataagttctcactctgggctgaggactccacctggaactggcagcccagcccccaggcttcaggccatccctggcttgtaggtggcgtttcactgaggacccacccctttctgcccaggagcctgtctgccttctgctgccatcaacatgt

SEQ ID NO: 565867 - DNA, 977 bp, Homo sapiens
cagtgctgagcgcgcggccccactcatatggggagagccaccacgccaccgggggttgcgggaccagacaccacatgttgtggctccacaaacaaaacgcgggggggttctctcaccaaaagagggcaccgggtcatccagtacgaagacgcggcttgtttgccaaaccagcacggagcgctgcgccgctcaaggaaaggcgccaccgcggagtggggccaccgcacaagacgggactgaatcccgtcagtagttcagtaaaggtggtgtggaagcgaccccgtcagcgccccccgtcaacttgtagcaacacaaatacacacggtgcggtgaaagaaagcggcacaccaacacggagcacacacgcgatgtcaggtgttcggcttaaacaagaaccaccaccgcgggacgggtcgttgcgtgatgggacaccaccacaccggggtgggagcgcgagagtcaggcgcgcacacaatattcgcaagattgtgtgcaggaaaaataatcccccgctttgtctccacatatgttgtggcacacggtcgcacattcggctagttcttgagtcggtgactacatcgtctcgaccaaacaagctactggtcgcctgtcaccacacgacggggttgttaccaacacaaaaatagaaactcacacccgcacacgctagtgacacttcctgtactgacaaccctcgttgcaacaccatctaggaggagcaattctcaagggttgctctcacctgttagcaccacgtgtagtatgcacccacggcgctcattcatataaatagccttctttttcatgtgggcgttgttaacgaacaggtagcggcgaccgatgcgtcccggaaataatagggcaagaatagaacagctgtcacccaccgaagaagaaacacctcacatgtgagtcttcccgcgcacacaacgcgggctttcaggtgtcgacaaaaaaattttttgtcccacataaca

SEQ ID NO: 565868 - DNA, 297 bp, Homo sapiens
tcctatataacgagatctacatcgggttcctagctaggagacactcgtcgcgagactccctcagaatgcattttcagattctcttctgggtctagattgagaagctcagattttcccatcatgctgggtaccagtgcaccccaaaggcctcgcagaaataattcggacgggccgtgtacctgtaagactctgccttcccacctccctgggggccatctaccttctccatcatcttcttggtttgcccatctcggattcgaagccggcgagcctgggtatccgtgcaattagaacagg

SEQ ID NO: 565869 - DNA, 399 bp, Homo sapiens
cacacctacgtggttctgtgcattccgggtgggatcatgttccatagccctgctggggatagggtccttcgcagctgtcatatgcatgagagacgactttggccgtctcccgttgggttctagggggctgccggtggtaaatgggatgacaggggagatgtgtgcagtcctctgtgtcgctggatatgtggggcacaagcataggaggtgcttgagtggactttctcttcccggtaatcctgtggtccagcctcatggcagcatataggtctttttaggttagctttgcaatatgggttgtggtcaatatccttgtggagatggattcccgagtcgtgccttgcagggccccccactcccctcgccacctaataaaggaatagttaacactcaaaaaaa

SEQ ID NO: 565870 - DNA, 423 bp, Homo sapiens
  misc_feature (104)..(104): n is a, c, g, or t
  misc_feature (151)..(152): n is a, c, g, or t
ggtcatcactacccacgcgtcatctccacacactgtcctctctcccctcccgaagtttacatttttaatatttgctttactgtttcagataacatgtcaaaacnatttccaaagagtgggagccgtggagggaggtgtccatcagcctgcnntgccgcaagccgctggctgaaccaggcaaggctgagactgtcttattttcaaagttctgataagtgttaggaagaaatcagcttggattgtgaaggtttcccttctccttgcctattttttcactgtaaatatttatatactactgaccagatgacggaggggactgggttttggttttttttgtaaaaatgtcttatccagtcacataattatgccttttttatgttgcataagtgaaaacttagagaattaaaaaccattatctttcaa

SEQ ID NO: 565871 - DNA, 705 bp, Homo sapiens
cttggtaccggtccggaagtttctagatcggcagtgcagcccgaagccccgcagtcccccgagcaccgcgtggccatgcgtccctgcgcccccgcgcctgcgctgctggcgctcctgtgcctcgctcctggccgcgcccccggtggccccggccgaggccccgcacctggtgcatgtggacgcggcccggcgctgtggcccctgctgggcgcttcttggaggagcacaggcttcttgccccccggcgtgacacaacatgccaggcttgaccagtacgtcctcaggcttgggaccagcgagctcaaacctctgcctaatgtcgggcgcctgtccctcacctgcgagcatcaagcaggggggtccactggacgggggcctgagctaccaacttcaccccacctgggacgggtacttggacccttctcagggagcaaccagctcctcccaggttgagctgtggggcatcctggccaccttcccacaaggacacggcccatgcgaaaccaccacgtttgcaccactgaacaacaacacacatctataaaacgtccaacccacaaagacgaccatcatggaaaatagcattagagacatagtcacaaataaacagaagaggattagaaacattatagggaacgagcagtgagagcataaaaaagaacatatgaaaaaaagaaaaaggcgaataaatagagaaaataataa

SEQ ID NO: 565872 - DNA, 138 bp, Homo sapiens
tggaactcctgcagtcggatttcacgtggatgttgattttttcccggtctaactcccgaagcttcggcgatggcctgcacgaaattagcatctgaaagccactggtaacccaggctccccgagactgcctcgccaaat

SEQ ID NO: 565873 - DNA, 420 bp, Homo sapiens
  misc_feature (79)..(79): n is a, c, g, or t
gtcaatgtcaagatactaggtgaagagtgtcataggtgtagaagcttgtcaaacggtggaggagcgagagaaaaacggnaatgaggaaggtgagagaaaggattgaccaagcctcccgtgcaggagatggtagatgagttacaaggccccttctcgtatgatttctcttactgggcgcggtctggagagaaaatcactgttacaccgtcatctaaagagctgctcttttatgccccttcaaatggaaagcccgttgtccagtggagaacagctgcccaggggaaggctgatcgagaatccactgggaaggcaggcctggtttttaggaaggcccagattccaacccggaggttggcaaggagttcgagatttgtcattcaggtgaacaagggagcgcacagatttgcgagtcggggtacc

SEQ ID NO: 565874 - DNA, 1026 bp, Homo sapiens
ggattcggactcggggcgggcctgcacgagggcatcgtgctccacagggaccagtcatccccaaaactgaggggatatcagcttaccgaggccgcaggtttgcctagtccctacctcatagatatgtaggacatccccgtggccctggaatgctggtctctgacaccatctctgtgccctcccccgaccccacgaaccaggcttgtgcgtggctggagtgctgccagctggatgtctcatgcaaggatcgtctctgtggctaagcactcacatttcctgatcctgacactgggttgctcatctagagaccctggtttatcgagtggcagtctccagggctgccgcatacagcagcgatggagcaacggcaccgggccctacggagaagaacgtccacgtgaagtccaggagacgacagtcaccgcgggggctgccacaatcgcctttcccagatgccaacagaggtcttattataacccggtgcaggaatccaatcagggacctgacatgtgctgtgatcaccgagtttgctcgcatacagactaggggccaaaggaatccagatcaaggaccaggagcagaacggcacacgccacacagtggacgggaacttgtcagagccacgaggcggcacacggtcgcactgacacgacgagtgaacacctggcctccgtgagacccaaacctcgccacaagcagagccgagcgaggacaactctgggacagacagagctgcactggtgctagtgacggactggagagcaccgagactacggtacacatcgaaatgccctaaacgtagctggaaccagaccatggtggatacaacaaagcactccaacgggaaagagacaacaccagcggcaagagcagaccaagcgaggacacagggaaaggcagacagagaggccggagaagtacaaaaacgaagaagaaaacaaacagagggacaaggaaccgaaagcaaaagacaagagaaaaagaaaaacgaaacagaaagagaaaagaaacaacaaagaaaaagac

SEQ ID NO: 565875 - DNA, 131 bp, Homo sapiens
gcactacgacctataagtaaataagggctatcgtagtaaactaggggtagaacatgtagcccatttcttgccacctacatgggctacacctgtgacctaacgtctatacgtagggtactatgcgctatact

SEQ ID NO: 565876 - DNA, 477 bp, Homo sapiens
tcagaggtcccctcacgcccatgtcacaaaccatgcaagtctaaagatcacaaacaattgtaaggaagaatacaaattataccaacaatagagaacacactttctttaggaaaagacatgaaagaggctttgagaaatgggtagactttgcactgacatggagaaataaaggatggcatactaggcaatgagaagaaagaaagaacaaaggtatgcactgaatataacctgaatcgacatttctccacagaagacataaacgtgcccaacaggtacatgaaaggggctgaacatcactagtcatcagggaaatgcacagcagatatcacctcacacctgttagaatggctattgtcaaaaaaggcaaaagataccaagtgttggcaaagatatggtaatggactaaaactgataaataaaaatgtgatatataggctgggtgcggtggctcacgcccgtaatcccagcactttggga

SEQ ID NO: 565877 - DNA, 126 bp, Homo sapiens
aagcgtgctgacagtgaggccaggattgcgccaccgatccacatccgagatacttgcgctctgtgggtgctatgcatcttcatcttcattgtgctgggcgccaggtcggtgatctccttctgcatc

SEQ ID NO: 565878 - DNA, 404 bp, Homo sapiens
  misc_feature (132)..(132): n is a, c, g, or t
  misc_feature (171)..(171): n is a, c, g, or t
  misc_feature (194)..(194): n is a, c, g, or t
  misc_feature (197)..(197): n is a, c, g, or t
  misc_feature (206)..(206): n is a, c, g, or t
  misc_feature (260)..(260): n is a, c, g, or t
ccccccgggggtttaaaaaaatagccccttttccaattagaaatatcattcggggcactgaaaatatgtttaatattggcccccccccctggaccaaaatatatctaagatgggtagcatcaaccaaaaaancaagggatgtctatgcttaaggaaccccccctctgcatnaaaatgtgaggatgggaaaaccnagnccacttttnaaatgtccatgcataacacaatgaagtctaagtctcctcttcccttaactttanaacatttagtggctttttgggaagacatctctttggctactatcaaagctgcttcccagaatatgatttttccaagtcctggttcctgtgcagttcttaagaaagaaagagtgtgagaaagagaataagaagtccaactaagga

SEQ ID NO: 565879 - DNA, 265 bp, Homo sapiens
  misc_feature (4)..(4): n is a, c, g, or t
ccgnttcacccacccaggactttcctcgggcttatcttagctctgataagatccacccctcagggcccacaatctcaacagtgtcctaacctcggtaagagtctctagcaagaggtgcagcctgcaagatgatcttcgcattcctgcgctcacttccttgaagatgggcaccatggctttggagtttgagaccagcctggccgacagggtgaaaccccgtctctactaaaaatacaaaaaattagccggggtgggtggagagcgg

SEQ ID NO: 565880 - DNA, 152 bp, Homo sapiens
  misc_feature (60)..(63): n is a, c, g, or t
cggctggtaccctgtacacgtttcctgaaaactggagggccttcaaggctctcatcgctnnnnattccagcggggctcaggtccgcgttctctccgcaccacccacttccatttttggcaaaccaaccgcacccctgattttcttccgcaaa

SEQ ID NO: 565881 - DNA, 167 bp, Homo sapiens
  misc_feature (10)..(10): n is a, c, g, or t
  misc_feature (28)..(28): n is a, c, g, or t
  misc_feature (32)..(32): n is a, c, g, or t
cacgcgtaanaagcggcttgcaaacgangaanagagccggtggagtgtacttgtccctgacaggctgacctacctgagtctctgagcttttcagtccaaatctttgcaaggctcaaaatgccacagaacctctcctcttctccccactccccatggcagggaccgga

SEQ ID NO: 565882 - DNA, 384 bp, Homo sapiens
caccgtcatatgtaacgtatgctaggattatcatagttctctcttgtgtggaaaggaatctggcagggccccccgggcgggagtccaggggggaaaccccagctcacggcaaacctcggcccccggggtacaggccattctccggcctcagccccgggagaagcgggaacaacgggcccccgccaccaatcccggggccatttttaatatttttttaagaaagagacggggttccacgggtgtaacccagggagggtctcgattccctgccctcgtgacccggccgcctgggccccccaaggggcgggagataacaggcggtagacgccatgggcgccgggccttgggggatccttgggtcctcttgggtaacatataacgggg

SEQ ID NO: 565883 - DNA, 145 bp, Homo sapiens
  misc_feature (35)..(35): n is a, c, g, or t
gggggggccccccccggggggcccgggggggtttncccccccttttttttcccccgggccggggggggggggggggttttttgaaaaaaaaaccccccccccctttggggccccccccaaataaaccctttttttggggggggga

SEQ ID NO: 565884 - DNA, 407 bp, Homo sapiens
  misc_feature (407)..(407): n is a, c, g, or t
tgagatggaatctcgctctgttgcccaggctggagtgcagtggtgcgatctcggctcactgtaacctccgcctcctgagttcaagcaactctgctgcctcagactcctgagtagctgagattccaggcacccgccaccacacccagctaatttttgtatttttagtagagatggggtttcaccatgttggccaggctggtcttgaactcctgacctcaggtgatcctcccaaagcactgggattacaggcgtgacccaccgcacccagccggattctaatttcttcatgataaccagtttaatccctacagttgggagtaaagttctgcacttggaatatcatgactaatttgggccataagtgaattctattactaatcctaactatgtacgtttaaatgatcacn

SEQ ID NO: 565885 - DNA, 539 bp, Homo sapiens
  misc_feature (22)..(22): n is a, c, g, or t
  misc_feature (62)..(62): n is a, c, g, or t
  misc_feature (82)..(82): n is a, c, g, or t
  misc_feature (203)..(203): n is a, c, g, or t
  misc_feature (235)..(235): n is a, c, g, or t
  misc_feature (241)..(241): n is a, c, g, or t
  misc_feature (254)..(254): n is a, c, g, or t
  misc_feature (264)..(264): n is a, c, g, or t
  misc_feature (269)..(269): n is a, c, g, or t
  misc_feature (525)..(525): n is a, c, g, or t
tctacctccaaacactttaggnccataataactctgacctccacccatcacatctttatccnaaaaggaagtagagatgatnctcatctcccctctgtgtagaagaacagcctcatctcattctcttgtgttcattgttccaaaagggacatacacagaagatgttatagaagtttggggcaagatgtcagaacacgtgtcanagccctaatggatgagaaggtctggcaaaganccaggnaaaggaatctcanaggcaaacanacatnaaatgccctgaggtgtcagagagtgacctgcaggggcacaagaaaggagaaggggagtagaggtgggcaggctggcgacaggctgtgttgggcactgggtttattctgagggcctcaggaggattttcagcagacagtggcgtgatctggctgatttatgggagagcttggctttgcaagccttcaagtggtttctgtaattttccatttacagtgtggacttgggatagctttgtggggattatttttggttctntggccattttggtc

SEQ ID NO: 565886 - DNA, 914 bp, Homo sapiens
  misc_feature (683)..(683): n is a, c, g, or t
gaggaaattgaagctcacagaaagtgtgactcctcaaagagcacaccactgatagtaaaacagggagaagaaagactaattctatgcatttggaagatacacgccatctcatgttactgctatctctgacaggcaagaggatgcccagcctctcccttctgagatccaggtggattgctgattaggtaaaagttttagccctggaaaaactatttctatccacaagatagctttacaagattaaatagagacagtagatgtgccatgggactgaatgtatatgtacgcccggcaaataaatacccagctttctaatcgttgatggttcaggaggtggggctgtcaggaggtcattatggtcactactggttggagcccgagagaacttggagtcatgccgagccattaggagagtaagagaagccccagatatcatggttgaccttgaggccctcttcctagaccaaatgatgagggacctatgcagggtagacgtaaagcttggtcacgtatctgaaccaacctgtcaagatagagagtggctcgccttcctctaagggaacatgttgtaactctgcaatgggcgtacacttggaattggttgtggccaagtttgtccccctaggccccctcctaaaggtacatcctggctgctacaataacaactacagatccatactatngtatcgggaatcggtccaaagagctatagcttccatgcgtttatctatgggcgtgaacatgaccgctaagtgctgaagaatacgaaagtggtgaatgaaacgggaaaaatcgcgtgcgatcttattatatgcacacaattcccagttctctttgcaaaccgctctggtagtgaacgcgttcaaaaggcacaaattcttctaacttgcttttcccagatttaacccagaacg

SEQ ID NO: 565887 - DNA, 767 bp, Homo sapiens
  misc_feature (126)..(126): n is a, c, g, or t
  misc_feature (129)..(129): n is a, c, g, or t
gctgggggacatctgtgtcggaaatgtgctgcagcctggggccggggcaatcatggcccgaatcgcccagtttctgagtgacatcccggagactgtgcctttgtccactgtcaatagacagtgttngtnggggctacaggcagtggccagcatagcaggtggcatcagaaatgggtcttatgacattggcatggcctgtggggtggagtccatgtccctggctgacagagggaaccctggacaatattacttcgcgcttgcatgcgcagaaggcacgcaagcgccagagattgcctgattccctcatggggataacctcctgcacgaatgtggctgagcgcgtttggcatttcacggggagaacgcaggatacctttgccctggcttccccagcagacaggcagcccgagcccagagcaagggctagtttccaagctgagatcgcgcctggtgaccaccacggtcccatgatgacaagggcaccaagaggcagcatcacctgtgacccaggactgagggtatccgccccagacaccaccataggagggccttgtgccaaccacttgtcgcgctgcccttccaagtgacagactgggttctcaccaactgcttggatcccctcctcgccgaggttgcgtcgatgggggccggctgccatgcctcggctgccccgtgcgcgtctcgcgttcccgagtctgcgcctcttcaaccttgcgcgtccttggggtctctatgcaccggctcccggtccccacctcgcatcatgc

SEQ ID NO: 565888 - DNA, 261 bp, Homo sapiens
agaccctaatgtgctaattcaacaagcttatcaaacactcgtatctattaatcacccgctagttgagtattcggcaacagtagccaaggtcggcaacttgtcacttggtgccacagttttgattatgcacagtgaccgtgatttaagttataagacacgagtgtttgaagttaagtatgacttgttaaatcctgaaatgactgaattgtcattaggagacacttatcagcacagtatcacggcacagattatcattatcgg

SEQ ID NO: 565889 - DNA, 303 bp, Homo sapiens
acttatttgttcttcatagcagacctatgaggtaggaatcgttactggtacaactttatagtggaggaaaccaagagacagattaaatagcatgccccaaatcacttatctgctgtgggtagagacaggattgaatttcatgagattggctatagaacttgtgaggtaagccacctgtcaaatggactaaaccagaggttttaatactatcttagttttagtaacccctaggtcagaagaaatacagaacgtactcacttaatgtcatatataataagctactggccattgtgactttaaacg

SEQ ID NO: 565890 - DNA, 266 bp, Homo sapiens
  misc_feature (121)..(121): n is a, c, g, or t
  misc_feature (178)..(178): n is a, c, g, or t
  misc_feature (180)..(180): n is a, c, g, or t
  misc_feature (239)..(239): n is a, c, g, or t
tccatagagacgtggtctcactctgtcacccaggctgctcttgaactcctggccttaagtgatcctcctggctcagattcccaaagcactggccactataaggattgcctggccacagctntagatacttagtctctaaaactgcaaaagtaagccagtgagccctgaggcccggcgntntcaccatctccctgtccttcctgtgtgggggacagcagcccaccacagtatttcctttnttcttcagtcatagggatgtacagatt

SEQ ID NO: 565891 - DNA, 107 bp, Homo sapiens
gtcacatgaccatccccaacctctcctctaacccactagagatgctgtgtctgcctcttgcctcttgtagaatgcagctctggcctcaataaatgcttcctgcattc

SEQ ID NO: 565892 - DNA, 134 bp, Homo sapiens
gagcgtctcatttgagagtacataattgcatacaatctgcgctcactctgcaaatcttacgtaagctggcaccttcggcaccaggtggtgcaggcgcacttctaagtgggctctttttgttacagcacaaaatc

SEQ ID NO: 565893 - DNA, 909 bp, Homo sapiens
gggtgaagaatctctctgccttggtcgggtgataatcccgtccttttgggttctcaatgttacctgactaggtatgctgaaggtcttagaatcctagataaaggtcttgactcttctccaggtgattgggaaggtgtaagtgccctaaaagctgtacgtatcttgtgtatatcttcccttgagtattgttgcctggttccaaagtctattcaggctgttaaggaataatcctgttgggataatgcttatgtgtgctatgtaagtgtttattgttttgtgcacttagaagcttactcagaattaacgagtggctaagagcctctgagaccgaaattttgtgtcccagtctctacctccttcacaactgcttacagaatggactcagtgtcccccttatgttgaggtgaccacttaattagctttcctggccatccttgaaagaaatgaaagaaagtaagactgctgtattttgccactgatttagccaatgtgaaactcagtctcattagcccttttgctgggttatgaagactgctgtctacgagaagtggccatactcaagttgtgcttatgtatcagtcatgtgctggagaaatcttagaatagcttatgtacaaaactttttaaattctaatgattatatttgaaactttgctttgggtttgtggcaccctggccaccccatctgggctgtgacagcctcgtgcagtccgtagggctggcagtttgttgatctatttaagtttccttccatacccagtccccattttctggtaaggtttgctaggaggtctgttaaggtgtacatcctgcagcttattggcgttaaaactgtactctccttttatgtggtctctttggggccgacttgggagaaagagaaatcaactagtgcaagctgttttgata

SEQ ID NO: 565894 - DNA, 279 bp, Homo sapiens
atcgtgaaatcttaaaccttacgatactaaggacgtcgtttaggttgtacttaggaattcttagtcacaaaatatatcttgtttacacaaaaatttcatgtaacacaggttatcaacagtgttaaaagtctcagtttcttgcttggggaacttgtgtccctcacatgtgtttagattgctcagattgctaaggagctgatactttgacagtgtttttagcacctgtgttactaaaaaaaaagatgaatgtcctgaaaagggtgttgcagtgtgcttccg

SEQ ID NO: 565895 - DNA, 198 bp, Homo sapiens
aacccagctacctgcaatgagacattgggtcacaaacaaaatcaagatagacattatttgaactgaataacaatactgacacaacctatcaccacctctggagatacagacaaaggcagtgctaagaggaaagttcatagccctaaatgcctacatcaaaaagactgtaagagcacaaatagacattctatggtttgt

SEQ ID NO: 565896 - DNA, 132 bp, Homo sapiens
ccccgatgtcgcacgatggcgcgtcgggtacaggatctccagggtcccctggtttacagagtaggccaggacagcactgtggtgagtggccagcacccgtttgatgctggacttactctccaggtggccaaa

SEQ ID NO: 565897 - DNA, 136 bp, Homo sapiens
cctggaaaggagggaggcttcgacgtcgagagggagaccgctgccagtttagttccgagcttgagtcataggatttctctcaaacttctgtgctgaggagactcagatgttgggcctcagctcctaggctgactca

SEQ ID NO: 565898 - DNA, 432 bp, Homo sapiens
  misc_feature (193)..(193): n is a, c, g, or t
  misc_feature (214)..(214): n is a, c, g, or t
aggccggaaaatggtgcccgcaaaaaaacaaaaaattcgtggagtcgatcaactttaggccccacctcgttataaaaagtgggaagtacgtcctggggccacacacgcctctgaaaatgatcagccaaggcaaagggaaattggtcattttcgctcaccccggccccgctttggggaaatttgaaaaaggggnttatgctatgtgggctaaaangggggtccccccccccaggggcaaaaatattgaacggggccccgcatggggaaaaaactccagggggggcccccgggctttcattgatccggggggctttgccctctttagaggcaggcccgaccagacgggggaaaagtaacccttttcccccccaaaatttcccccgccccccttaaccccgcaaaattttcctttaataaaattggcttgtttta

SEQ ID NO: 565899 - DNA, 160 bp, Homo sapiens
  misc_feature (59)..(59): n is a, c, g, or t
tcagtatgacattcaattaggtttaaaatttaaatccctccgtgtgtggctgggaattngtctgtgtgtgtgtgtgtgtgtgcatgtgtgtgtgtgtgtgtgtgcaagtgaaacgcaatatacatacactcaattctccaacaattcctatgggatgact

SEQ ID NO: 565900 - DNA, 356 bp, Homo sapiens
agctgctccccacgacgttaggtgctcagaccttggttcacagtcggtggttctccacaccatgcactcctgtagggtgagggtgggagcaccccaggatgttggatggacttgagcctaaaggctgacagctgtaaggcccagaagtggcaaagccccctgagtattagtggcaggatgtttctggcaccgtctgtagaggagcccctagactgtcgttgcaggaagccaggctttgtgataatgaccgctactcctgactgagcactgacgtgtgccaggagctgatgggcactttctgtgtaatctcgtacctcattccttgcaggaggcctgggtgctaagttactgttact

SEQ ID NO: 565901 - DNA, 201 bp, Homo sapiens
  misc_feature (17)..(17): n is a, c, g, or t
  misc_feature (30)..(31): n is a, c, g, or t
  misc_feature (38)..(38): n is a, c, g, or t
  misc_feature (81)..(81): n is a, c, g, or t
  misc_feature (153)..(153): n is a, c, g, or t
  misc_feature (180)..(180): n is a, c, g, or t
  misc_feature (189)..(189): n is a, c, g, or t
ctgtttcttgctttaanagaagggtaaagnnaagagtnttggaccagtattgcagttctgtagtgtcatttcttataaaanacaaaacaacaacaataatttatcaaaattgggcatatttaaagcctaacattctaataaaggcacaaattntctttttaatacttgtctcagcctctntaatctctntataggtcacct

SEQ ID NO: 565902 - DNA, 490 bp, Homo sapiens
  misc_feature (17)..(17): n is a, c, g, or t
catgtgggcatcacggnggcgcgagggaaccgggtgggctttcggtgaggctttactttctgagcgcggggttctgatgccctcagttcatgtggaggtgtttggatttgggccgcagcctttaacgtggcaattccgcctaccacgtggatcccacaatggatacatcattcctacgggcccattggtttggtagtttcctaataaaccaaaggcaggggttggctgtggtcttattaaacagcctgggccagtgtctacgggtttttggtttttttttttcctgggtagtgggccagggcagagacctgggaaccttactcatccaggggagagatgtcgggagtccaggtttggacaatcagaaaccttaggtaaaaggcggatcactggggaagacctttgggggtggcttcacctcaaattggccaagagtagttaaatcgctagggggactcacggggtaccttttttcaggaggcccaacatg

SEQ ID NO: 565903 - DNA, 388 bp, Homo sapiens
catctcatcaaacctaacagattctaaagtctctggtgataatgacaatatctgctacggagagactagcctgggggaagaggatctccctgaacaaggatagcggagttgctgcagctttcaaatgaagctggacatttagctgcgggggtagcaccctttgatcaaggcagcccaaagatgagtttcagggatgggactgacagaagagaaaagttcttcccagccctttctactttttctctttgtttctcaggcttctggccgtcttcagttttcacagtttcactctcaaccctaaacagtacttctgtgaagtacactttggcccctcgttttcagctcctaaactcacctggaaatagatgtcaatctaattttggtctga

SEQ ID NO: 565904 - DNA, 269 bp, Homo sapiens
tctcaggatctcaagctttggtcaggctggtctcgaactcccaccctcggtgattgcctgccttggcctcacaaagtgttgggattacagacgtgagccactgtgtccagccgagagtaagtcttttttttttttgggaattgggattctcgttgtttgccccgggtggaattgcgggggcccattctgggtccagtgcacccccggcctcccaggttcaagcaattctcggtgctcagccctccagagtatgcttggacctatacggg

SEQ ID NO: 565905 - DNA, 1173 bp, Homo sapiens
  misc_feature (417)..(417): n is a, c, g, or t
  misc_feature (504)..(504): n is a, c, g, or t
caacgccagtttatccagtgaaccactatcacgaaaaaaactctatcctcttctattacgtaatctcccttacgtaagtctcctttaatttatatagcattctacgatggcacacaagtaactaactctatcttttatagtcattacttcagtataatcgcacacgttagtcccctactctttgtgcataatcatctagcctcgaaatgagggctagacctaggctccgatgacacgcactgaagaacagcatggcacaatactttaccttgacttctatcgagccactaagtaaggcttgcaccattcccacatactcactccgccgacttgagttgtacaaacatcgacgagattagacccgtagaggcgtcgactttatggacatttcctatcgtacgtcagcatctcgacttntgatccaagagaaactaatccatatctccgtgaagtccggaacagaacttaaattattgatctacatgtcttaatcgacacatgagncttcttcactagctatatatggattaccctcgttgtatccggagcttcgcattcttaatgagcatccgcttagaacgccccatgttcgatagacccctcgatcggctgcggttcgaactagtgactttgaccgacagtacgtcttagaaagtagaagcggtctcatggtggatcaatacgccctcatccactcagttgctcaagatctccctgaacataatagcaacgataaggctatccccattacctttggtagctagtccgctactgagtgccatacattataatacaagctccgattctaggcctaagcgagaaagatctagcacctataaagtcggctcgattcgcattactcctttcacatccaggcactgttagccctcggtaggtcaacgagccgattccgtcgattccaaagacccgcgctgaaagcttcgaccgagggcagttcagttctcattaattcgacccagaggacttaacattctcgattaggtaattctggcgtagcaaaactcgaaaggtacgaaaccgcaactcgacagttgcgcattcgtaattccttctcttccaaggacctttgcagacttctgcgtcccactaatagatttttggagtggcaattctagcaaagcttcggtaacatcgctcttaccccccaattat

SEQ ID NO: 565906 - DNA, 179 bp, Homo sapiens
cgtcgacgctaaagacaagttctggaactatggcgaccacttaagtatttttttaagcgcctgcaaaatgggggctgacgtgcataaaacaacgtccccctgtcaggccctagggagaacatagcaggaggatggagggagccaccatgtccctttgggtcgacgcggccgcgaattta

SEQ ID NO: 565907 - DNA, 101 bp, Homo sapiens
aacattgcgtatcaatgttatacatacacattcctggtccaactcaatgcggtaggaaccccagtggtgtccactctatgcttgggattggcctgtgatgg

SEQ ID NO: 565908 - DNA, 916 bp, Homo sapiens
  misc_feature (525)..(526): n is a, c, g, or t
  misc_feature (666)..(666): n is a, c, g, or t
  misc_feature (680)..(680): n is a, c, g, or t
  misc_feature (810)..(810): n is a, c, g, or t
  misc_feature (852)..(852): n is a, c, g, or t
  misc_feature (883)..(883): n is a, c, g, or t
taacttcattgctatatagtaaacagaggttccaaagaaatatagttaactcagtgtcaagggacttaagaggcttagaagaatgagcagacataaatgtgtaagccagaaaacagtgtgtaagcagggtgactgtcatctccatcccaagtgagcagagtctacggtggaaatgctagagggaacaaacaagaagagaaagctgatggtaataagaatagtggagaaattagcacattgtcaatctagcatgacatttactgcagaattacatcccaaaaaactataggaaatcagtttgcttatcacacaattcaaatacctcacaactgtaagaagatatacagtagaacacagcgatacatctcacacacacacacagacttttcactgctttcatggtttatttttatagaggtttctctgggggaaaagaagttacagaagcagcagcttcattctttccagcataatggagtttgggtggggacagggatcttcaggttaagcttttcaaaaaaaaannaaaaaatctaagttaattcatctcttcctgattttggaaaggttagtttcctaggataagaactgggaggcagtttagatatgttattaaaaaaaaaaaaaaaaattctagcaccctaaagctttcccagttcagaaaangttccaccggcctngctcacacttaccagcattaaagtgatgatacacctcatggccatgtgccatcagtagcctgaagatgtacagtactagtactgtggattgtattttcaatttttattgaaatctgtcctttgcccacantcgggtttcttttcacctggcccaatctctttcagttcctgngcttgaagcctgtgctatctgtatcaacatnaggcagatcattgaagggagactcactgtggaa

SEQ ID NO: 565909 - DNA, 177 bp, Homo sapiens
acgttttattacatatgacatgtctgtatcaaaacatttcacgtgtccaggctcggtggcccacgcctgtaatcccagcactttggtaggcaaggtgggtggatcactttgaggcgaggagttacagtcacgcggagatcacaccaatgcagtcaagcctggatgacatcgctaact

SEQ ID NO: 565910 - DNA, 156 bp, Homo sapiens
tcagtgcgcgcggtttttacagtcacttcaaacaactcctctaggggctgacccgacactagaagcagggtatgtgccacacaggcttggttggtggaggtgctcgcagcgctccagaataggggagacccagcagaggtgcaagagacagccgcg

SEQ ID NO: 565911 - DNA, 348 bp, Homo sapiens
ggagatccgctgcgagtactccaggtgtttacttgggtcgtgagcgccgctccctgttcgctatctctactgctcctcgttccctgtgtgagctttgttcttgcaaagatggggctcagcagtggtgcggtctgagtgtgctgccggcggcttatgtgatacacccgtagggtggtcgcgtatgagtcccagggctagtttcatctttccaccatgacagacatgccctatgtgaggctggcctccttggcgcctgtccccacggcccccgcagcgtgagccacgatgctccccataccccacccattcccgatacaccttacttactgtgtgttggcccttatcgag

SEQ ID NO: 565912 - DNA, 917 bp, Homo sapiens
ttccccctacgccagatcctggaactgatgctgcctaccaacttgtgatgaaaggtcctggctggagcctgaagcgcggagctggaggccatcctgtgaggactatcctgcgatgagcgggacaccagaccctgacaagggtgagctggatcagtgacgaggatgtgatggagtaccatgagtgtggctcggtgatgctgactctatcccttccttcacaaccaaagtgtgcccaaatgggtgaaagtgacacttaaaagacccagaatgtaacgtgtgtgtcactcttggggatcatgcatggggcagatgtcaccaagccaggctgacccatatccatcaattttcacacaacttgtgtcgtgatggtggcagatgggcgatgaggaagggtactaagtcattgatttaaccaagagcatatatactgatgcacatagacatatatgggattaacaactgttaatcatcgaagatcacgacattaacctatgccattgtgatttggatggagatacatcagtgcctaacccaggttggaatactagtgaaatggaggaccttggaaagcacagggcacgtcacgaatcgaagcgcgatggacaggagttgggatcattgaagagcccatcttgtagaaccctatgcgcttctgccgttgtggcaatactcacacccataattcatcgtcagacccgttgtacaataagattggaggccaagaggatgttgatgtgaatcatgaacatcgggagtgctaatacagggaatgccagactgtgcaataactgcccactgtgggccaaacgggttagtgcctcaggcatcagtgtggatatgaacgcggatgcaattcgaagacaggcacatccgtgtcccaatagggcacggtagaaagctggaacctcaacaagtgg

SEQ ID NO: 565913 - DNA, 430 bp, Homo sapiens
gcggtccgcaaacttcgtccactcagactgattttaagaagtgtgtggaggtcggcgtgtgtgcacacgccgagcaccatacacttcttgaagtcaggtctctatggacgaagtgcacacgccgagtatccacacctacgccaaaatccatttcactatcatattcatcggcgtaaatctaactttcttcccacaacactttctcggcgaggtcgtaatggacgaagcaacaacttcgtccaccgggaccttacttcatgtgtgatggatcctcgtggtgttgcagtctggggtctcggcagtagtgcaacaggttctggccacaagagagctgcaacaacttcgtccatgatgatctcaagaagtgtctgggccctcggcgtgtgcaacacgccgagcatccatacgccgcaggtctgggtggacgaag

SEQ ID NO: 565914 - DNA, 282 bp, Homo sapiens
cagaggagcttggtcagtgtctcagagagagatcgctcaagaaaaataaaagagtatcactgttactgttgggattaaatctctgatgtggtaatatttaacttgctatggttctgttaactctattgaggagatgagtgtacttcagaaggatgatgaaacagatttggattccattgtgacgttttcaggaaattccattttttgttatttgctttaaagtatttgtatgaaagttcatattcttctgtgtgcagtgacttaacgcttgtaatcccagca

SEQ ID NO: 565915 - DNA, 425 bp, Homo sapiens
cacacacacacccgggcacacacacggacacacaaagacacagacacagatagctcaaagggagacctcccctcatattgtcttatgcccaatttctgcctccaaagaaagaagaagtaaaatctaaaaggcagagatgaaatccacaggcagacagccccgcgccacaccctgggcctggtagttaaagatcgatccctgacctactcggttatgttatctatagattacagacattgtatagaaaagcactgtgaaaatccctgtcctgttttgttctgatctaattacctgtgcatgcagcccccagtcacgtaccctctgcttcctcaatccatcaagaccctctcacgcggacccccttagagttgtaagcccttaagagggacaggaattgctcactcggagagcttggtttttggaga

SEQ ID NO: 565916 - DNA, 391 bp, Homo sapiens
  misc_feature (387)..(387): n is a, c, g, or t
atttattagctagtaattttataaatgccaaccattagattaatcagtgattatcaaattcctatttatatattatagagacttaaataatgtgtagaatttacttttacaaagctaattatggtagcatctgtttgtcctacataataaaaaaaaaagctattatacataaacctaaaattaatataatctgatttaaacaatatataattaatataatctgatttaagtctgatttaagaatctgatttaaatattacccttgtttcttatatatttagcagtgtttgtggttaaactatgattcaaccatttgcctaagggtagtttattaaaattgtccattcacaggtggtgttttttagggactataggttgcttgctccngggg

SEQ ID NO: 565917 - DNA, 124 bp, Homo sapiens
tctcatcacggatcccgcacgatccttgcatagtacatgccttaatgtgtttttttgaatctgacatcttaagctaaggaatttgaattttctattgttcggctattgcaatatcccattgata

SEQ ID NO: 565918 - DNA, 230 bp, Homo sapiens
aagctaagttccctgcactttggagtgttacagtactatctagtggttgtctttttcgacgctgactatctaaccccagaccgtcttaagatagtaggacgagtcctcatgttacaagcacatcggagttccatgaagttccctggtctcgaggagcacctgatagtctacatactaatatcgaacctgacaccagacggccgacgtattagtgatcacttaagcgccgg

SEQ ID NO: 565919 - DNA, 356 bp, Homo sapiens
ggaaaagtggaaagcattacctgtgagaactagaacaagacaaggatgcctgttctcaccactcctcttcaacatagtactggaagtcctagccagaacattcagacaagggaaagaaagaaagggcatccaaactggtaaagaggaagtcaaactgtcactgtttgctgacaatatgatcgtttaccttgaaaaccctaaagcctcctccagaaagctcctagaactgataaaagaattcagcaaagtttctggatacaagattaatgtacacaaatcagaagctcttctatacaccaacagtgaccaagcagagaatcaaataaaaaactcaaccccttttccaccagctgcaa

SEQ ID NO: 565920 - DNA, 1529 bp, Homo sapiens
acccctaaaagccaaaatgggaaagtgaaaagactcatatcagacattgtcgctcatcggacacgctagactcgcggcaagtccaccactacatggccatctggacgtctactacaagtgcgcgggctatcgacacaacagaaccagtggataaacattcgagaatgagagcgctgctgcagactggcgaacacgggctgccttcacagctactgccctgggctccttgggcctaacacctgagacacgcctgatgcagtgaaccgcctggcgtagtcacgcaacatccgactactcatcgctatgcatgcaacacacgtccccgagcaccccgagcacacgcgtaccctacctggatgaccctacgtcagtcgcacctgcctcccaaggcacccagcaccgcacggacgaactcccaatcaagacaccacacccactcgcaacccccacgagcggccacgacatcctccagcgccctcgccccctgccgccccgcaccccctgcacgtccgcctccgcccccggcccgagccagccccggcgccgagagcacccgcacaacgcccgcgcccactcctcccccaaacgccaccactcgcgcgacctcggtcactccccgccacacacgacctctgaccccccactctcccctcgccgcccgtctgacccaccccaccctcgcacgcctgcctgaccacacccccacccaccctcaacactcccggcccccgacgctctgcctcccaccccgaacacacacccgccgccactcacccccaacctcggaacaccgcgaccccccacgtatcccggcccccactggcacacacaccgcacctacactcgcaccggcaccacacctcccgccgcaacatcgcgcaccaccggccaagagccacacagctcaaccaccctaccaccccgacccacccacaccacgcgccgccaccccaacaccacccccgccaccgccaccccacacgacggcaccctcccaccctgcaccccacaccgcccccccgacccccgcccccaacatcgcgcacgcacccaccccacctggccccggcgcacccccccacacaccccgcccaccccacactcgcccccgccagcgactccccacacacacgcacacgcaacccaggccgccacccccccgcccacacccaaccacgccaccacccccccccgcccgcgcccacccccacgcccccgccaccgacccgcaaccccctccgcccaccgccccccacccccccaccccccaccccaccaccctcgcccccgcccaacacgagccccccacccaccacaccccacccccaccgcccccaccacacgcacacggacgccccccaaccacacacacacccgagccaccccaactcccgccgcaccccagccaccaccccgcaccacccccacacccacgaccccccaccccccccccccaccctcccacagccccccccccacccacacccccacacaacaccccccgacgccaccccagcccacaccccccg

SEQ ID NO: 565921 - DNA, 477 bp, Homo sapiens
tctacagctgctctcactatgttttatacatttgcaaaagatactcagacttggtgtgttctacaagcttgctatatatagcttcaccatgaatagcaattacagtgggtgcatgtacaatcaacaaatgccaatgttgactggtttctatcaaactgacctctgctatcctctcacattcccttagcagacaggctaaccacacacaggcaaggaggtcactgtgcctctaatggagcatcctgcctagaaattgaggcacatgaaatccttcacttcagaatttaaacactcactcagttccatggactcgccaggcctatgaagaagatcacagagagatgatgtgtgtaccagaagacttcaaattaagacctccggatggttttggtggaggaagtgataattaatatgaggcacagcgtgatgacgactccagtgatgcctgccaacaaggtcacatagctagcaagccac

SEQ ID NO: 565922 - DNA, 342 bp, Homo sapiens
tggctggaggttgggggcaggatttgggccgagctttcctcagacctccccagacctgtttttttatcaacccccgctgttttttttttccgaacaaggggtgcatttttgggacacagtggaccccctcccaagccctcccttaaccgttttcctgagtcccttagggcaaacacagctccaggggcccagggcgggtgccccacccccgacactcctgctgtcccctggccttaggtcctgcaggtttcccaggggccgcccctgttcccttccctgacctcccctttctggggtttgtggctggctggagataaaaataaaagccattgtggcccctta

SEQ ID NO: 565923 - DNA, 105 bp, Homo sapiens
actctagcaggatccccgcttcttagctgaatacctctcctacgactccagtgacccatgcccggtgcagttcacgtgccgcacggggcgttgtatccggaagga

SEQ ID NO: 565924 - DNA, 170 bp, Homo sapiens
atctcaggatcttagtcgctcggacgactataggtgaagttttcggcgagtaaaggccatagcgagaaggaggttgccgatcgccatcaggtctcaacgaggaactcagagtggacgaggaaacacaggaagtcctggagaacctgtaaggaccgctggtccgagcggac

SEQ ID NO: 565925 - DNA, 481 bp, Homo sapiens
  misc_feature (13)..(13): n is a, c, g, or t
  misc_feature (33)..(33): n is a, c, g, or t
  misc_feature (38)..(38): n is a, c, g, or t
  misc_feature (88)..(88): n is a, c, g, or t
  misc_feature (115)..(115): n is a, c, g, or t
  misc_feature (120)..(120): n is a, c, g, or t
  misc_feature (122)..(122): n is a, c, g, or t
  misc_feature (136)..(136): n is a, c, g, or t
  misc_feature (143)..(143): n is a, c, g, or t
  misc_feature (146)..(148): n is a, c, g, or t
  misc_feature (161)..(161): n is a, c, g, or t
  misc_feature (169)..(169): n is a, c, g, or t
  misc_feature (181)..(181): n is a, c, g, or t
  misc_feature (201)..(201): n is a, c, g, or t
  misc_feature (227)..(227): n is a, c, g, or t
  misc_feature (247)..(247): n is a, c, g, or t
  misc_feature (260)..(260): n is a, c, g, or t
  misc_feature (265)..(265): n is a, c, g, or t
  misc_feature (269)..(269): n is a, c, g, or t
  misc_feature (302)..(302): n is a, c, g, or t
  misc_feature (304)..(304): n is a, c, g, or t
  misc_feature (332)..(332): n is a, c, g, or t
  misc_feature (364)..(364): n is a, c, g, or t
  misc_feature (377)..(377): n is a, c, g, or t
  misc_feature (380)..(380): n is a, c, g, or t
  misc_feature (398)..(398): n is a, c, g, or t
  misc_feature (478)..(478): n is a, c, g, or t
tcacaaggaaaancattttattactgtaatcanaaaancgtaatttctgtacaggaatgtataagtgaacattattcaaagcattggnaattcacttcaaaaagaggggaaacanactananaacaaattgtaaanaaaaaanatnnnaaaattttctggncttgcagngcactatttagngcaagtatttaagacacaanagtgttcaattcagcaaagtattgcngaatgtcatgccacagtccncttaattcaaagnggggnaggncaggcagcttgtaataaaatgtcagagtgtgtntntttttttttttttttttttttttttttntaaaaccacaagtaattcaaaaaaaaaaaagnggtttatttaganggntttaaatgatttcactgnggaatccagcaaaacgggaacaacacccaagggcttcttaacggcaacaatcttattgccaggcaagggcttgggcttcnggg

SEQ ID NO: 565926 - DNA, 86 bp, Homo sapiens
ccttacttcccagtactccctgtatgggtatctctgtcagagtagtctccatgaccttatttcccgtagacgcggccgcgaattta

SEQ ID NO: 565927 - DNA, 302 bp, Homo sapiens
agctgttctagaggatcccatcaaaacgtatcagaacatggtatgttcaagccacttgtgcccacaaggaactggtctgtatgaaggacttgacttggctgtcacatgagactttcaaaacgtataaatgaaatatggatatctaaccaagtgacatgtttgataaaattggtctaggcttgtaacaacaaaattagtttgtatcttggttatcaaacagtatctgggactggttagagcagaatattaaccttcatataaagtatgccaataattgtataccgagtatactgttgctatat

SEQ ID NO: 565928 - DNA, 330 bp, Homo sapiens
ttttttaacctttgggaactagggtatgggctctcccttgtccgccacctgggatatatatttaattttcttaaattccccgtaaactccattttatggttttgatttccgattgccaacctgttaaacctgcatagccgcgagtcctcggttttgccgggttctttagttctttaccgtccccgtcctgtaatccgctaattctctgtggatggtgctgtaaagtatgcctgttcccttcctgtggatttaatcctgatgttttattttgcccccctatttgtaatgtttctttttaataaaagtggctaattttgttgtagtctggga

SEQ ID NO: 565929 - DNA, 363 bp, Homo sapiens
  misc_feature (244)..(244): n is a, c, g, or t
  misc_feature (277)..(277): n is a, c, g, or t
  misc_feature (325)..(325): n is a, c, g, or t
ccactcatggcagaagggaaggggagctagtgtgtgcagaaattgtatggtgagagagaagaaacaagagagagggaagggagatagcaggctcttttcaacaaccagctctcatgggaaatcatagagtgagaactcattcactaccatgagaatggcactaggccattaatgagggattcgcccctatgacccaaatacctcccattaagctctacctccaacactggagatcacacatcancataaaatttggaggggtcgaatatccaaaccntagcaacttggaaccaccagaagctggaagaggcaaggaaagattttntcctagaggcttcagaataaggtattgcaattctgaaa

SEQ ID NO: 565930 - DNA, 151 bp, Homo sapiens
  misc_feature (2)..(2): n is a, c, g, or t
  misc_feature (13)..(13): n is a, c, g, or t
  misc_feature (18)..(18): n is a, c, g, or t
  misc_feature (22)..(22): n is a, c, g, or t
  misc_feature (36)..(36): n is a, c, g, or t
  misc_feature (96)..(96): n is a, c, g, or t
angggggggggcnaaatnattnggccaatttagttnggcagtgggcctgttaccggttgggattggtggggtgggtttaggtaattgtttagtttntgattgcagataaactcatgccagagaacttaaagtcttagaatggaaaaaaaaa

SEQ ID NO: 565931 - DNA, 140 bp, Homo sapiens
cggtcctgaacagcctgtccagtctgcacgcgttgcgggagtcctggggccctcctccttcagcgcattgctactctggtctctggcattgctggtggagccatccctggggcaggcaccagggtctgtgccaggcccag

SEQ ID NO: 565932 - DNA, 841 bp, Homo sapiens
ggaccagcctgggcaacatagcaagacctcatttctacaaacaaaaaaaaaattggcccggcatggtggtacttgcctataatcccaccttagcctcccaaagtgctgggattataggtgtgaggccacagtgcctggcctaattattttcttgtgatcaaattgcaggttaaactgttctctgggttacagaagtttcctacgtgaatgttcgtgtacttattttgtgtcattgtagacgttcagtaacattaattaggggtggtacttcctctaaactagagatagtttaaacctagagtataaccttcaaaagcgtctagattgtgacgtagctaccggtgatgaggattgaaattgatctgatactagagtaatgaacaagaaagcctgccttttgtgcgccagaaccttttgctctcccccagtcagtacttggagcagcactagttcaggggcccagagttcggccgtatctgtgtggggatcttacgctctggctaaacaaggagcctacatcttttagctcctattccacccttctcgacacgtcttggtgttgtgaggtagtatgaaatgagagacagagtctcactctgttggcccatgtgctggtagtgcagttggcacaatctcggttcattgcagcctccgcctcccgcgtcaaggggatgctcttggcctaagctcccaagtaactgatattacggggcccgaggaacaaacccgggtgatttgtgattcgagcaccagacggggttttccccgtgggccgggctggtttaaacctttggcctcagtgacccccggctggtctccaaggggggggattcccccgtgc

SEQ ID NO: 565933 - DNA, 210 bp, Homo sapiens
accaggacatatcctagctatgcctttgtcctcttgtcctgtttgcatttcacgtgggagcttgcactatgcagctccagtttcctacagtgatcaggttcctgcaagcagtggggacagtggagcgaggtattggaggattccctcccagctttggaagcctcatccgcgtgtgtgtttgtgtgtgtctgtgtatcaaattgaacggtc

SEQ ID NO: 565934 - DNA, 935 bp, Homo sapiens
  misc_feature (16)..(16): n is a, c, g, or t
  misc_feature (18)..(22): n is a, c, g, or t
  misc_feature (714)..(714): n is a, c, g, or t
  misc_feature (732)..(732): n is a, c, g, or t
  misc_feature (761)..(761): n is a, c, g, or t
agcggctgtggtgctngnnnnnagagcgcagcggctgacgggccggatcgccttcgccgccgcccgcccgcaaaccttcgtgcccggcccgtcctcgcccccgcctccgccaccgcctcggcccgcagagcttgccccctccccacccgcagacatgtccgagtccaagagcggccccgagtatgcttcgtttttcgccgtcatgggcgcctcggccgccatggtcttcagcgccctgggcgctgcctatggcacagccaagagcggtaccggcattgcggccatgtctgtcatgcggccggagcagatcatgaagtccatcatcccagtggtcatggctggcatcatcgccatctacggcctggtggtggcagtcctcatcgccaactccctgaatgacgacatcagcctctacaagagcttcctccagctgggcgccggcctgagcgtgggcctgagcggcctggcagccggctttgccatcggcatcgtgggggacgctggcgtgcggggcaccgcccagcagccccgactattcgtgggcatgatcctgattctcatcttcgccgaggtgctcgggctctacggtctcatcgtcgccctcatcctctccacaaagtagaccctctccgagcccaccagccacagaatattatgtaaagaccacccctcctcattccaggaacgaacagcctgactacatacgcacggggncgcgccccagtagtggcntgtacatgcgcagtgtctagtgccatcgnctgaaccacggccagggagacaaaaaaagagcaaaagagaacgcgaccacacacagacaggagagagcatcaagcagcaatagcccaaagacacgcgacaggaaccgaccccaaacagacacgaccaaccgccggagcacccgagacagccgaagaagacagaacgacaacaac

SEQ ID NO: 565935 - DNA, 1823 bp, Homo sapiens
ttttgtttttgttgttgcttttgttttgtctttttgtttgtgttctttttgttgttcttgctgtgtctttgtgtttcttgtgttgtttagtctgtgttttttgttttctgttgtttgtgttcttttgttttgttgtctttttctttttttctgtctttgtgctgtcttgtttttcttctctctctttgtcttgttgtgtgttttttgttgttttctgctgttgtgttttgccttcttgtttgtctgtggtgcttgtttggttatatgtgttgttttgtgttttgtggtgtgttggtttttgtgtttttattatttatttttgttattttggttttagtttagttgttgtgttttttgtaattgtttgtgttcttgggttgtttgattgtgtggtttgtgatgttttttgtgtttttgtttttattttgagtgtttattattgtatgttgatttcatgtctgtttctgatgattttattcttcgttattgttattgtgttgttgttattcttgttctgctggtatgttgtcgtagtgtatggtgtctcgtctgtagtctttcagttgttttgtgttcttacttgttcgctgatgtatagcagtatgatgagaagcgacgcagcagcgagacgcgggacgcagggaggaaaagaagatgacacgaagataggttagttgcatggactgtcgatcatcatcttttggtatggtgggctggtatttcgccgcgcttttctgtctcctctcgggggattgataggatcggcgtgatatgtgatgcgcaaattttcttgggagcaaagatagccctgcgcgggtttttcgtatattatagggaatgtgcaaccaaacaagggctggccccgtcccacaggaccactagtgtggtcacatgctcgtatgtagaccatttataccgggaacctatttacactttggggaaaacacactgtgtcgggctatcaatatcccaaagggttggacacacacaataaacccataatgaccagctttccaccatgtggaggtcttgtatggttgggttaccccacctggctggtggaaacgggttttcgttgtggttccttactctttgagtcccggtgctccagggtcctagccccactgtgcagcaccctgggcacctgtggagtggagcccctcctacttgtttttatgcgcctagccctctataccgtatttccctccttccccatctccttaagggacctgagcccccaaatggtcgtcctcccctgcccgaattttggctatcacttctcttggccctcttcccaatctcctgcttacctcctcttaatttttataagatgcccaaaccaatctccccttcctctttttccaaagccaccagattaatagtggccactgagcccttaccccagccacactccagtgcaagaggggccctgaccttgctcttttatatttggtctcccgatccctggggtgcgggccagaaataattttcttgggcctggggttagagcagagaaggtctgcttgcacgccactctacgtcgctgctgtatccctatggaatattgtgggaacactggaacctcggtgtcccactgcccccgatgagtaaacacctgagctgcccaaacatttttttaaatacacccgaggagccccaagggggaaagggccaatgcctaaccccccgcgttatttttggggaatgagggctgtgcatagggaccatattctcttagaatctattttattaactgacccggttcttgggaccctgttaccccaataaaagatgcttttcatgaaacaaaaaaaaaaaataac

SEQ ID NO: 565936 - DNA, 190 bp, Homo sapiens
  misc_feature (16)..(16): n is a, c, g, or t
  misc_feature (18)..(22): n is a, c, g, or t
agcggctgtggtgctngnnnnnagagcgcagcggctgacgggccggatcgccttcgccgccgcccgcccgcaaaccttcgtgcccggcccgtcctcgcccccgcctccgcacgctgccaactgcccctccccaccgcaaatgtcgagtcccgctcacgcctccgcccccccgctcctccccgccccgccc

SEQ ID NO: 565937 - DNA, 517 bp, Homo sapiens
  misc_feature (517)..(517): n is a, c, g, or t
gaacaaagctggaggcatcacactacctgacttcaaactatactacaaggctacagcaaccaaaacagcatggtactggtaccaaaacagagatatagatcaatggaacagatcagagccctcagaaataatgccgcatatctacaactatctgatctttgacaaacctgagaaaaacaagcaatggggaaaggattccctatttaacaaatggtgctgggaaaactggctagccatatgtagaaagctgaaactggatcccttccttacaccttattcaaaaatcaatttaagatggattaaggatttaaacgttagacctaaaaccataaaaaccctagaagaaaacctaggctttaccattcaggacataggcgtgggcaaggactttatgtccaacacacccaaagcaggggcaacaaaagccaaattgggcaatggggatctattaaactaaaggagttttggccagcaaaaaaactccctccgggggacgggcccccccaccgtgggagan

SEQ ID NO: 565938 - DNA, 354 bp, Homo sapiens
tacttcgatcgcggagaacttatcaagctgctccctataagaagcaacttccttccatccactcgagttatctaaaaggagaggaaaaaatagttatagatattttggttaatagaactagaatcaatcattaatgcaaagttcaatgtttggccactaacatagtgtttctctaaataactttatttaattttaggattgtcactttaatctgcattctaataattaattgttttttaaaatctaacacattttcttagctttagctttcatgcaccatagtaacatccctttcaatagagtctattctattcaagctattctcctgtcctcaggctcccaagtagctgggac

SEQ ID NO: 565939 - DNA, 675 bp, Homo sapiens
caaaaggaagctacccaaactcccacagccgacaacacgacccctataacccaaccacaaacccccagccgccccgaccacccataccacccaacaccgaccgcatccaacacctccccccccacccccaccactacacccacaacccccccccccccccacacccccccccaccgccacactcccccaccacccaacccccccccccccaacccccccacacccccaacccccacccccacccacccaccccccccccccaacccaccccccccccccccccaccccccccaccccccccccccaacacccccccccatacccaccccccaccccccccacacccccccccaccccccccccacacccaccaccaccccccccccccccccccacccccccccaaccccctcccacaccaccccccaccaccctacaccccccccccacccccaccccccacacccccccccccccccccacccaacccccccaaccccacaatccccccccccaccccctaccaaaccaccacacaaccccccacctcccactccatcctccccaccactcctcacaccctacccccaccccaccaccacacaaccccccgcacaccacccccgcccccccctccccccccccccccccccccacaccacctccccccccccc

SEQ ID NO: 565940 - DNA, 113 bp, Homo sapiens
gcgttagaggatccccccttgaagtcctgacaggtgaaatgtagtttacagcagctctctcatcagcagttctctcacactagctcttttatactggttcgcctttatcttgg

SEQ ID NO: 565941 - DNA, 781 bp, Homo sapiens
  misc_feature (244)..(244): n is a, c, g, or t
  misc_feature (247)..(247): n is a, c, g, or t
  misc_feature (256)..(256): n is a, c, g, or t
  misc_feature (265)..(266): n is a, c, g, or t
  misc_feature (271)..(271): n is a, c, g, or t
  misc_feature (277)..(277): n is a, c, g, or t
  misc_feature (285)..(285): n is a, c, g, or t
  misc_feature (300)..(300): n is a, c, g, or t
agcgggtcacctggggtagggactgttgaagacaggtctccatcactacatgtctccatctatgcctaggcatttgtccaaccttggccatctgtccagaacctgctcccacctcaggcccaggccaaccgtgcactgctgcaatgggctctgagctggagacggcgatggagaccctcatcaacgtgttccacgcccactcgggcaatgagggggacagagtatccaagctgagcaatgaagngangctgataanagctgctgnnagacnggagcntctctggnttccctggatgtganaaggagcgttaatgcatgatacggcaaacaagagagcccgtcgaagagcttcttagaggtaggcactagcaatgaggtccacataatgttcaactgcatgcttccttcgtacgctcagtcatttgctgctcctgggctcctcagaccatcgccccttggcctctggagctctagtgcgtgtacccgttcccgtatacgacctcccttcttgcctgctctctcccagcctacagggcccagtagagcgcatgtggactgtctgctggatcaagggtcgagtgacatcggagcctagcacgagaattggatgaacggcggatggctggatcttcccacggaggtatgctggtcgctgtgtggcatgcatctctacagctggccatggtagccacatttcttactggggagtaacaagtctgagcagtactagaccacattggggcgagtcgcaccttccatctaccagctctcccaagaactg

SEQ ID NO: 565942 - DNA, 375 bp, Homo sapiens
  misc_feature (359)..(359): n is a, c, g, or t
caagatcagtgccatctgcactccagccatgggcaacagagcgagacgttgtgtccccaccacgccgacccaaaaaaaaaaaaaaaagaagcatctttcatgcagctgtgcagcgcctagtgagagttgcccaccctggaatgagcacatcaccttcccgcccagagaggtcagacccctggcttcctaccccaccaagggcacactcagaaacttctctccgtgcctgagcaagtgcaggccagactccctgctctgttctccttaaatgaccaccccctcccacttcctggggatttcccttgcagccagagggaaagggagcccaaggaggggacgggggattattcattgggggncacgatggttgatttt

SEQ ID NO: 565943 - DNA, 717 bp, Homo sapiens
  misc_feature (478)..(478): n is a, c, g, or t
  misc_feature (485)..(485): n is a, c, g, or t
  misc_feature (552)..(552): n is a, c, g, or t
  misc_feature (582)..(582): n is a, c, g, or t
  misc_feature (639)..(639): n is a, c, g, or t
  misc_feature (680)..(680): n is a, c, g, or t
  misc_feature (686)..(687): n is a, c, g, or t
  misc_feature (691)..(691): n is a, c, g, or t
  misc_feature (694)..(695): n is a, c, g, or t
ccgggctgcagggcctgggccacatgactggacttttttttttcctctctcatctcctgcatccaacctgggcctgttcctgtgactctccgggtagctctcaattctgtttactttttctctttgactacttctacttaaagccaccaacatttctccactaatcactgtagccacctcctgtcagctacatcttctcttgcttctttcctgttcattccatgctagccagggaaatcttgtaaataggcaggtttgatcatggcatccttgtttaggagcctttaaggacatggctttggtgtgacgagaatatctcaaagtaatcatgtgctccaacttccctctccagccttgtttcccactcatcctcacggttgccaattcttatgcctactccttcctggtctcccacctccttgcccacctgacttctgctgatactttgcaattaagatggggcagatttcctactctncctttgntcccgcttctttggcatagcaccaggacccactggaggacatatcctgctagactggaatattcagntaaccctgtctcaattcccccgctagacangtaagctccttgaagcaggagccatgccatgctttcgcttgtgcctacttcagcttnaggatggttaaggacatattcctatgaatagtgcgacctanagggtnnaggnccnntgatgatgaagaggtgcctgcc

SEQ ID NO: 565944 - DNA, 429 bp, Homo sapiens
  misc_feature (267)..(267): n is a, c, g, or t
  misc_feature (342)..(342): n is a, c, g, or t
  misc_feature (355)..(355): n is a, c, g, or t
  misc_feature (364)..(365): n is a, c, g, or t
  misc_feature (367)..(367): n is a, c, g, or t
gctagtaaattaccttttacgtgttaacatggtaaggccacagtgggctgaattgtttgcagatagacgacaataagaagccagaaattgtggggaaatggaatgtatactgtggtaaagatgggggagatggaggctacaagaaagaagagatcagcatagaagactgagttttgtgaagaagagagaggtgaatcaaatcatgagtcaaacaacaacatgagaggatggtatggcaggcttcagttctccaaagaggttataagnagaggaactcaaagaaatgaaaatggaatggcaaactaataaaaactagcattacgtagcatataccaggtgcgngcactgttctaantgctttatnnangttaattaatgtaaacaatgaccctgttaggtcagaatgatttcacttctctatcatacaga

SEQ ID NO: 565945 - DNA, 203 bp, Homo sapiens
gaactatctaagatggtagcccttagaagctaggaataattgacccttatagcactatttttcagaatacaaaaaggtacacactcatttctgctctctgaaatttcatgtgatttcaaactgtttcctattatcttgggtattaactttgcacttataggcaaaattgtattggcagattcagccttgagagtggtcctagg

SEQ ID NO: 565946 - DNA, 1254 bp, Homo sapiens
aaaataaagaatttatatcagctgtagcacaagtcaaagctttcagatctctctggcccagtgatatctttggcagttgtgaagatgaccctgtacagacactgttacatatatatttccatcatcagacgctgggccagacaggaagctttgcagttataggctctaacctggacatgtcagaagccaactacaaactgatggaacttaatctggaaataagagagtctctacgcatggtgcaatcataccaacttctagcacaggccaaaccaatgggaaatatggtgagcactggattctgagacacttcaggcctttaggaaagaaactaaactgaagatgatgaagaatattaaccaagcaccttttatggacccttgcattcactgataactttctggcagcatctactttttagtgtaactaatgtcaaactgtatcatcaaaaacaaagatctgaaagaaaaaaacatctgatattttaacagctgccaatatctcccacaataactgcgtgaagaaggaattttttaattacttaacctacgtgaaaagaaaagggctaaaagtgatgcctacaaatacattactttctggggaaagaaaagaattccaagaatgtttgcaataatggcctccaatactgaaacaaccaaaagcaggtgaaatgaggctgaaatcaaggctgtttcattttagctgaagacctgcaaagctgcttggatttctagcagttgaaaacctaacctgcaattgatgcttaatcatccatccacatgaacatgcagtcagctatacgcatcaagactcgtttgcaaaaaccattgatttttcagtatgtgggataagggtttgggtttttttgttttttggtctgtataaggaattatgtgtgtgtgagttgggatgtatggatatgtgatagtcatattttcaaggtatggatgtttggtgataacgtctcagagcatgcctaaaagagcactgcaagattatttttgaagaaatgttattttattagatctaactcttcatagtatgtaaatgttagaacattttaataatattttaaaactgggctttcccagtatttcaaaaagaaataatatatctgttaacgttattggaatgctgctcagttctctgatcagtgcttatgttatgattgttgataactaaccaaagtagatgcctgcagagactttaaaatgtaaaataaagatgtatgctgcctgtcagctattctcatta

SEQ ID NO: 565947 - DNA, 1263 bp, Homo sapiens
tccaccattacttacatctataacggaactaatttgaagaaccgacaaacctcattactctctggcccagtgatatctttggcagttgtgaagatgaccctgtacagacactgttacatatatatttccatcatcagacgctgggccagacaggaagctttgcagttataggctctaacctggacatgtcagaagccaactacaaactgatggaacttaatctggaaataagagagtctctacgcatggtgcaatcataccaacttctagcacaggccaaaccaatgggaaatatggtgagcactggattctgagacacttcaggcctttaggaaagaaactaaactgaagatgatgaagaatattaaccaagcaccttttatggacccttgcattcactgataactttctggcagcatctactttttagtgtaactaatgtcaaactgtatcatcaaaaacaaagatctgaaagaaaaaaacatctgatattttaacagctgccaatatctcccacaataactgcgtgaagaaggaattttttaattacttaacctacgtgaaaagaaaagggctaaaagtgatgcctacaaatacattactttctggggaaagaaaagaattccaagaatgtttgcaataatggcctccaatactgaaacaaccaaaagcaggtgaaatgaggctgaaatcaaggctgtttcattttagctgaagacctgcaaagctgcttggatttctagcagttgaaaacctaacctgcaattgatgcttaatcatccatccacatgaacatgcagtcagctatacgcatcaagactcgtttgcaaaaaccattgatttttcagtatgtgggataagggtttgggtttttttgttttttggtctgtataaggaattatgtgtgtgtgagttgggatgtatggatatgtgatagtcatattttcaaggtatggatgtttggtgataacgtctcagagcatgcctaaaagagcactgcaagattatttttgaagaaatgttattttattagatctaactcttcatagtatgtaaatgttagaacattttaataatattttaaaactgggctttcccagtatttcaaaaagaaataatatatctgttaacgttattggaatgctgctcagttctctgatcagtgcttatgttatgattgttgataactaaccaaagtagatgcctgcagagactttaaaatgtaaaataaagatgtatgctgcctgtcagctattctcatta

SEQ ID NO: 565948 - DNA, 1601 bp, Homo sapiens
aaaataaagaatttatatcagctgtagcacaagtcaaagctttcagatctctctggcccagtgatatctttggcagttgtgaagatgaccctgtacagacactgttacatatatatttccatcatcagacgctgggccagacaggaagctttgcagttataggctctaacctggacatgtcagaagccaactacaaactgatggaacttaatctggaaataagagagtctctacgcatggtgcaatcataccaacttctagcacaggccaaaccaatgggaaatatggtgagcactggattctgagacacttcaggcctttaggaaagaaactaaactgaagatgatgaagaatattaaccaagcaccttttatggacccttgcattcactgataactttctggcagcatctactttttagtgtaactaatgtcaaactgtatcatcaaaaacaaagatctgaaagaaaaaaacatctgatattttaacagctgccaatatctcccacaataactgcgtgaagaaggaattttttaattacttaacctacgtgaaaagaaaagggctaaaagtgatgcctacaaatacattactttctggggaaagaaaagaattccaagaatgtttgcaataatggcctccaatactgaaacaaccaaaagcaggtgaaatgaggctgaaatcaaggctgtttcattttagctgaagacctgcaaagctgcttggatttctagcagttgaaaacctaacctgcaattgatgcttaatcatccatccacatgaacatgcagtcagctatacgcatcaagactcgtttgcaaaaaccattgatttttcagtatgtgggataagggtttgggtttttttgttttttggtctgtataaggaattatgtgtgtgtgagttgggatgtatggatatgtgatagtcatattttcaaggtatggatgtttggtgataacgtctcagagcatgcctaaaagagcactgcaagattatttttgaagaaatgttattttattagatctaactcttcatagtatgtaaatgttagaacattttaataatattttaaaactgggctttcccagtatttcaaaaagaaataatatatctgttaacgttattggaatgctgctcagttctctgatcagtgcttatgttatgattgttgataactaaccaaagtagatgcctgcagagactttaaaatgtaaaataaagatgtatgctgcctgtcagctattctcattagaaaagttttaacttattttactccatatagaaactgtagagactaaaaccagttattttcttgtacatttgtgccatgcactgttgttatacaagaataggtgtacaaagctaaagaaaaattgtggtcattgatgatggaatatatgacttgcaggctttgaagtctgcagaattcaagaaaagagctgcaaatgcatttttgtatctttattcaggactcacatgctttaccctaaagaaactgggggcctaggggcacatgacacagggaagcctgtagactggttaccaaacatgcatataccttattccctgtctaaagtctgcggtataccattgaactg

SEQ ID NO: 565949 - DNA, 1096 bp, Homo sapiens
gcgctggagagagctgagatatgccttactagatgtagagcactcactgatgactatctgaatagagagtctctacgcatggtgcaatcataccaacttctagcacaggccaaaccaatgggaaatatggtgagcactggattctgagacacttcaggcctttaggaaagaaactaaactgaagatgatgaagaatattaaccaagcaccttttatggacccttgcattcactgataactttctggcagcatctactttttagtgtaactaatgtcaaactgtatcatcaaaaacaaagatctgaaagaaaaaaacatctgatattttaacagctgccaatatctcccacaataactgcgtgaagaaggaattttttaattacttaacctacgtgaaaagaaaagggctaaaagtgatgcctacaaatacattactttctggggaaagaaaagaattccaagaatgtttgcaataatggcctccaatactgaaacaaccaaaagcaggtgaaatgaggctgaaatcaaggctgtttcattttagctgaagacctgcaaagctgcttggatttctagcagttgaaaacctaacctgcaattgatgcttaatcatccatccacatgaacatgcagtcagctatacgcatcaagactcgtttgcaaaaaccattgatttttcagtatgtgggataagggtttgggtttttttgttttttggtctgtataaggaattatgtgtgtgtgagttgggatgtatggatatgtgatagtcatattttcaaggtatggatgtttggtgataacgtctcagagcatgcctaaaagagcactgcaagattatttttgaagaaatgttattttattagatctaactcttcatagtatgtaaatgttagaacattttaataatattttaaaactgggctttcccagtatttcaaaaagaaataatatatctgttaacgttattggaatgctgctcagttctctgatcagtgcttatgttatgattgttgataactaaccaaagtagatgcctgcagagactttaaaatgtaaaataaagatgtatgctgcctgtcagctattctcatta

SEQ ID NO: 565950 - DNA, 128 bp, Homo sapiens
gcctgatctcctttccatcccaagcgatctcccagctcagactactcgggcgctgacgtaggaaaattacttgaaaccgggaggcaagaggttgcagtgagacgagtattgccaccactgcgactacc

SEQ ID NO: 565951 - DNA, 841 bp, Homo sapiens
gctcgcgatctagaactagtccccacgcgtccgcaaaaacaaagatctgaaagaaaaaaacatctgatattttaacagctgccaatatctcccacaataactgcgtgaagaaggaattttttaattacttaacctacgtgaaaagaaaagggctaaaagtgatgcctacaaatacattactttctggggaaagaaaagaattccaagaatgtttgcaataatggcctccaatactgaaacaaccaaaagcaggtgaaatgaggctgaaatcaaggctgtttcattttagctgaagacctgcaaagctgcttggatttctagcagttgaaaacctaacctgcaattgatgcttaatcatccatccacatgaacatgcagtcagctatacgcatcaagactcgtttgcaaaaaccattgatttttcagtatgtgggataagggtttgggtttttttgttttttggtctgtataaggaattatgtgtgtgtgagttgggatgtatggatatgtgatagtcatattttcaaggtatggatgtttggtgataacgtctcagagcatgcctaaaagagcactgcaagattatttttgaagaaatgttattttattagatctaactcttcatagtatgtaaatgttagaacattttaataatattttaaaactgggctttcccagtatttcaaaaagaaataatatatctgttaacgttattggaatgctgctcagttctctgatcagtgcttatgttatgattgttgataactaaccaaagtagatgcctgcagagactttaaaatgtaaaataaagatgtatgctgcctgtcagctattctcatta

SEQ ID NO: 565952 - DNA, 957 bp, Homo sapiens
  misc_feature (719)..(719): n is a, c, g, or t
cgcagtggctcacgcctgtaatcccagcactttggggaggccaagggaggcggattcacgaggtcaggagatcagatgaccatcctggtccaacagtggtgaaatcccctgatctcctactataaaatactaataaatttagtaccggtggagctggggagttgtcagtgtccctgtgatttccgcagactaaactctgtgggagggggatgatatgccatgtgaggaaatttttgcgtccaatgaacctcgtggtagagggagatgtgtttgatgagttgaaggacttgagggagtcgtgggcccaccgtgtggaactccgcgatgtctctatgggttgagctagaacgtggggggatctgccaatcgttcagacatattaatttacaatgagaagataaaataaaattgttaattatacaatatgaagggggtcgagaaagaaagatggatcttagcaaggaagtctgcctgaaaataaattacgcgatggtgagcgaacagggcgagagtggcgtaaaaaaagggatttaagaaatggaaagcggtggaacttgtatagagcactgcgctaaagagggttccacggtgaggagggaacgagtttgtaaggggtgagtgggaagtgatttatactccaggatatggggaagtaattcctctctgtggagagaaggcaagaatttaaagtatccgcaaaggatgaaatttcaacacgngagcgcgtttggtaaaaggtggggagtggaactgaccaggggagaggaaaactttgcggggatcagaggtggtgttcaataacgcccgtgagttattcaccggcggactatttttatcttataaagcgtcatggaccgggaaagtggtgggtgggaaacaaggagtttaaatatagggggaaggatggtgttagggtaactgaaacaccggaattgggggcaagtaacggaattagga

SEQ ID NO: 565953 - DNA, 210 bp, Homo sapiens
gaagatcgaggctgcagggagctatcatcacaccactgcacttcaacctgggcgactcagcaagagcaagaccctgtctgtaaaaaaaaaaaaaaaggagagagacagagtgaatccaagggccggggggcgtggctcacacctgtaatcccacgcattggggaggccgcgggggctgggcccctggaggccaggagttggaaaccctgg

SEQ ID NO: 565954 - DNA, 209 bp, Homo sapiens
attttatagatggggaaaattgaattaagaaagaaagtgacttgcccaaggtcatttaagtagtaagtggtggagctaggatttgagctgtggtctgtttaacactaaagcccaagcttttaaatactgctttacaccttaatatccggtgctttaatattcttggccttctttcaaaaacttccctcttcctgtcaattccagagata

SEQ ID NO: 565955 - DNA, 273 bp, Homo sapiens
agtgaagcttgaaattgtgccactgcaatcccaacctggacaacagagtgagactctgtctcaataaaataaaataaatttgctacttatatgtgaatgtgtcttcacactgtatatcttgggacgcgtctaaattttttggaccccctccttaagggggatcccaatgatagtattgaaaataagcagcatgaaaattttaaagccatcctagacaacatttccctgtatttaaaccacccgagttgggaagaaggatggatatgttgtttc

SEQ ID NO: 565956 - DNA, 920 bp, Homo sapiens
ggggtgggtcaattcttccgtgattgtactgggctccgtgcatctctctaggtcttcattggtcttccatctggaactatataaatgtcccacaaaatcatgtctcgaagatatgattccaggaccacttatattttctccacgaatggtcgcttattaccaagtagatctatgctctatgggcaagtctattgtgcccatggcgacccgctaccttagtctggggaactttctaggcaaatgatgggtgttgtccgcattgcataccatgaggtacgtacgctactcactccaacaatgactttgctctggagtagaaagtcttttattttccttgaaaacataatttcctaaagtcaaatgagagactaatggcctatgcacgttgttgtgtcaagcgtcataactgtactgtagttagctaactcgttctagacctaattgatatctgaaggctcattgctcaaacaacggtatctattacatgtatcatggagcccaactaccttgttgagcacgttggtcacagcgctgttatgatatcagacaacgcttatacacaatttggacggaaaacgtccctttgtgtgtttcatttgctgtactagtgtctgggattaagcaatattggtttcagcatctatcatgagtgacctgagtgaaattacggggggatggaaggccacatgcattgaaataatagcggctgcagcctgttgttcatgttgaaacaagacttattagagagggaatgacttgaagtcagcactgttttagctatcaagtacaaataaagccatgggtgttggaacctctgctgaaaaggggaacttgcgctcaccggagtgagtgacagccgatcccgattccacaaagattgtggcgcgtcaaaccgggataacccctgggggggagaaaaa

SEQ ID NO: 565957 - DNA, 786 bp, Homo sapiens
tgtacggcccgaattcgggatagagacttcagagagtcctaccgacacatagaagtcagactttcaacgaagaattacgtcaacaaacgagcacccgttgacaatactacaagttgcaatcaacatagaccaacagtggagagaagtgcgagaagatctagactaaccagagtgtcagcgtcgtatcagttaaccagtcctgcttaaataaacatttatgagatatgcaaagaaacaagaaagtatcacgcatacacaggggaaaaatggcatgcaagatcaaataaaaaactttcttttggagcacgatccagacattttttagaacaaattgcaggccaggcacagtcgctcacacctgtaaccccagcactttgggaggctaaggcaggcagatcatttgaggtcaggagtttgtgaccagcctggccaacatgttgaaaccccgtctctactaaaagtacaaaaattagctgagtgtggcagcacatacctgcagttccagctactcaggaggctgaggcagcgcaagaatcacttgaacccagcaggcggaaggttgcagtgaaccaagattgtgccattgcactccagacctgggggacaactaacataactaacagacacctatattcacacaaatatttacactcaattaaaataaaccatgtctaaggagctaaacaggatactactgagaagcaagggacacatacacatacagagaacataatccactaacagcatgaccagacacatattgaaaacggcagccaaaatagacaa

SEQ ID NO: 565958 - DNA, 244 bp, Homo sapiens
gaggacacattaggcgcgtctgcgtcggctatttttgtatttttagtagagatggggtttcaccatgttggccaggctgatctcaaactcctgacctcatgtggtccacccaccttggcctcccaaagtgctgggattacaggtgtgagccactgtgcctgaccaggattgtttttttctatttctgtgaaaaatgatgttggtacacacacacacacacacacacacgcagaacgcgcctaat

SEQ ID NO: 565959 - DNA, 426 bp, Homo sapiens
gcagactcagaccaaccatgggaaagatctgactttgggaaagatatggaagtatgacactctgtggaaatcaggcagaatatgcctagtagccagtctccaaagtggctctgtgattcctgtctcccggtgttcacagcctggtttagaccctttccacattgtaccagaacactcatcctggaagaagccagctaccatgacttgaggacacttagccccaaggaaaagccattagcaaggaactgagacttcccgtcaacagccatgtgagtgggccttcctggaaattgatcctgcagtttcagtcaaggcttcagatgatgcaacccagatgctgaaccagaaacacccagtgaaaccacgcctagattcctgactctcagaaactgtgggagaataaatgtttgttttaagccacaaaaa

SEQ ID NO: 565960 - DNA, 231 bp, Homo sapiens
  misc_feature (15)..(15): n is a, c, g, or t
cccacccccccttcnccgggggccctggcagaattgacccaagaccaaagggggtttcttgggttcccgcctgggtgcccagccccagttctggtggataaccaaggccccctgttttggaaaaaggccgggtgcttttagggctggccgccccctttccctgggttttttttcccataaacgggttttttttttagggttgggccggggggggggtccccccggccttga

SEQ ID NO: 565961 - DNA, 748 bp, Homo sapiens
  misc_feature (64)..(64): n is a, c, g, or t
  misc_feature (269)..(269): n is a, c, g, or t
  misc_feature (410)..(410): n is a, c, g, or t
  misc_feature (426)..(426): n is a, c, g, or t
  misc_feature (432)..(432): n is a, c, g, or t
  misc_feature (435)..(435): n is a, c, g, or t
  misc_feature (459)..(459): n is a, c, g, or t
gataacaaatgcgcgtctatcaggtactcagactcgcctgggaagaaagagttcagaaaatttntaaaaaaattaccggaggtggctaaatgccgttgttagatagcttcacagtcgatcatacccggatggaagcgcctgcagttcgggtggcgaaaacaatgaacaccccgcatggcgacgcaatcaccgtgttcgatctgcgcttctgcgtgccgaacaaagaagtgatgccagaaagagggatccataccctggagcacctgttngctggttttatgcgtaaccatcttaacggtaatggtgtagagattatcgatatctcgccaatgggctgccgcaccggtttttatatgagtctaatggtacgccagatgagcagcgtgttgctgatgcctggaaagcggcantggaagacgtgctganagtgcnggntcagaatcagatcccggaactgancgtctaccagtgtggcacttaccagatgcactcgctagcaggaagcgcaggatatggcagcgtagcattctggaacgtgacgttacgcatcaacacgcaagcgaaggaactgggactgccgacaagagaagttgcgaggaactgcactatctagtcagtagactatcttcactaattcacttgaacacaaagcagttcaagtgaactggcttaggttgtacttaagtgcgcagcgctccgcacgcagctgggcaaattggcggttagcaatcacaccaggcccatagac

SEQ ID NO: 565962 - DNA, 210 bp, Homo sapiens
tgctggtcggtccgagtgtatggattccctctctcttctccctcacccagcaggcacccccggttccgccaggccctcctgccatgtcggacccagacgtcccagggctcggatgtcccgccatgtggccccttgtccagggtgcctgagccccttcagaggtacccctctgcacctgcgggctcgggcgagaatttgtccaattctcta

SEQ ID NO: 565963 - DNA, 1401 bp, Homo sapiens
ggaggagatgactggggagcgggagctcgagaatactgcccagttactctagcgcgccaggccgaaccgtagcttcttggtttaggtagttctactcacagccggacgatttcgaggggcaactccagcatagggcttgtgcaaatctgcggaacagggctcatcaagtgacagctcgggacccattgcttggcggagagatcttgcgaagatggaggtgctgcgaaggtgtgtggagaaaggccatgagaccttcagctagaagatggtagctgactagcggcacgctgccagtgacttgtgaagagtcctctattgattacgctactgtccacacaatggtgagccgctgaattgtacttcataacggcagactggatgacatacgtgccaaggttgagttggagcaagggggcttgggcaacagggtttgtgggagcaagatgttgggagtctcgggaagtgcacgcgaagcatagggacatggggcagtgcctgtagagtgtaaatggaaacaagcgcagcccaaggtgagggaagacccaggggcttcaagtttgcgctgacagaaaaccttcgacgtttgcttgggacacatgcattccgattgtagacccgttgggcaccccagggggccaaaggaattattcggccacaacaaaagtagggtcctaggaaatgtctggtggacatgttgtaccaggagaaattttgggcacaatcggtggaaaactctgggtgggtacgagaacacaacttttggagcgcagatgaagaaggcgactcctgtgtggagaaaagaacaaggtgcacaacacaagcggtttgttagaccacaacttttcggagcgggtgcggcaaaacaaaacacggccccagcagagcgagggacaacaaacagcacgcagccgctttttgcgcggggacaaaccaaagcacacgattattctagtgcgtccgggcggcaccacacacaaccaacgcgcacacgagcgcgaaacacaaaaacggcagccccaccacccccattatgttgggtagaggatagtgtagtgaccaaaacaaccgaaacattgcgatcttgacccaccgacaagttatatcattagagggggcgggaggggcagaccaccaccacgcacgccaaatcatctaattggaggagcgaagaagagcgaggcagaaaacaaaccacaaataaaagcgaggcggaggcggggcgggaacaacaaacacgcaagatggatttcacaaaataactggggagggaaggacgaaatggaaaaaatagggaaagaggaacacaaagcaacaaactacaggaacagcggcagcacaacgaacaaacacacgaggcgcggagcagacaagaaacgacaacaaaaaacaagaggaagagag

SEQ ID NO: 565964 - DNA, 234 bp, Homo sapiens
acgtcgtatagagccgtgtgtgtttctaagtaaacaatacagaatgatatgttagaaaatacttgaaagctacagataggatgggtgggaccaagatggacaactagtaacagcagcaatcagaggctcacatcaaaaagaatgataattagtgtgtgactccttcactggcaaccaaggtatccagattctctcatcagaactgactaggtggctgacataataacggtcagg

SEQ ID NO: 565965 - DNA, 239 bp, Homo sapiens
tagttgctactagtagacttgtccacctttcccactgttcgggattgtttatctctcaagtctctgctgtaggcacggatttccgaatccatgatcactaggcttttcccagtcttattgcaaggaatgtagaaggtgaatactggggattttctatctcatcatcgcttatttcttgaagacaggtcacaatgccaggaactgatgatggagtcacacaggctactacttcactgaaa

SEQ ID NO: 565966 - DNA, 824 bp, Homo sapiens
gagtcggcgtgaggcgctatgccgggtcgaaaaggttctcgagtccgggcattgtacaagcgcgtcttgaagtctgcaccgtgttctgcccccggactcaaatccctgggtgaccagatacgtgaaagacgaattgaggagacataagaccgctcggttctgacgaggcactaggctgttgtcttgcatagaatggtcaggtgtatgcaaacacgggttattgcacaccatgggctaaccgaagacagaacaaatttcaagtggaatcgcttgtcttggcactcttcctcccaagaagaaaacctttaatggactttcggtgatgaccaaattggacagttgcaggagctgatgcaagaagccataaaatccattaggcaattgagtatttgctagagtatatgaaaccaaaattttagtctatacaacaaagcttattatgacatgcaagaatttagaacccggctagtttaatggtcatggggtttcgaaatatatttaagcttgggaataagtgagcttgataatctgcaagattggttcagaaagattgtaattgtgggggccgtgagcgctaaaaatctgaaaaccatggtttgtgcgcgcagcgggccagttgcacacggaagcggtcacatgctggcgctaaagaacttcgcagtaacatagtcaggagtgccactaaaagcgcagggacacgagtttgtagacaccagagggtccggcgcaagggataacaggccagagcaaaatccccttgtgtggccaagacaaggactgcatggactgtcaacaccgagcgaacatgctcgtaataggcaacg

SEQ ID NO: 565967 - DNA, 534 bp, Homo sapiens
tttgatattttcaacgcagcctggccttggggtgcaagggtgctgcccacttcagggctcttctcctttacaccttttctgtggctctcaaacccttggagccaatgagagctgtctcaaaagggaactggtggcccgacagctgggcacagggcagtgggacagggcatggccaggtggccattcagacccctggcttttcaatgctggctgcattagaacctttgttacattagcagtttgctttgtatgcagtctgtttgttttgtgtgggtgtagttttttttttccacttagaaattgcatttcctgacagaaggactcaggttgtgtgaagtcagtgcacagtgcatgtcagcccacatagtgatggttcccctgttcactgagtataggatgtccctacagagtctcttatccaatggatggaggaaaaccaagccgtggcttcccgctgagccctccatgcccctcccttcaaccattccccatgggaaatgtcaacaagtatgaataaagacacctagtgagtga

SEQ ID NO: 565968 - DNA, 302 bp, Homo sapiens
gaggggctgatgactgtgggacgagagctagcagacgcacattagatgatatatagctcttcctgctggaggaggaggtggtggtgtactatctagtggaactgccgcctccaacagagactgaggacacccccaatggctctgccactgctggaactgaagccacctccaacgccaagaccactgccataggaatagctgcttcctccacccaggcctaagccactgccgacaccactggcaccgccatagccactggagacggtggaccgcaccacagagatgttgcctttcggagaaga

SEQ ID NO: 565969 - DNA, 355 bp, Homo sapiens
cttagtgctccctggcttttcggcagaactggacagaacgtcccacgaccccgatcacacaacacctgccggcttgacatgtcatcggtttagcctcatccgctttcgctcgccactactcacggaatcacgattgttttctcttcctgtgggtactgagatgtttcacttccccacgttccctccacacgccctatgtgttcagacgcgggtcacaccacatgactggtgcggggttaccccattcggaaatcctcggatcaacgctcggttgacagctccccgaggattatcgcagcctcctacgtccttcatcggctcctggtgccaaggcatccagggagcactaagcgag

SEQ ID NO: 565970 - DNA, 212 bp, Homo sapiens
tctacctccacaaacaggtaacagtttgtctttgggtttctccatgttggtctggctagctcaaactcccgagctcaggttatccgcccacctagccctcccaaagtgctatctctgcctcctgggttcaagcgattctcctgcctcagcttcccgagtagctggaattacaggcatctgccaccatgcctggctactgtttgtggaggtag

SEQ ID NO: 565971 - DNA, 470 bp, Homo sapiens
  misc_feature (2)..(2): n is a, c, g, or t
  misc_feature (180)..(180): n is a, c, g, or t
  misc_feature (182)..(182): n is a, c, g, or t
  misc_feature (232)..(232): n is a, c, g, or t
  misc_feature (307)..(307): n is a, c, g, or t
  misc_feature (464)..(464): n is a, c, g, or t
tnggtgtatgaaatgagggtgtttttttgtgtgaatgagggttttttgttgttaatgtggtgggtgagtgagccccattgtgttgtggtaaatatgttgggggggtatagggctgtgactagtatgttgggtcctgtaagtaggggggtgatatttgatcaggggaacgtggttattagnanagagagttttcccagtaggttaatagtggggggtaagggggggttagggngggttgctagaagtcatcaaaaagcttttagtgggagtagagtttgaagtccttgagagagggttatgatgcgantgtgagtgcgttcgtagtttgagtttggtaggggggatagtaatgggggtgtaagtccgtgggggtttttgagaatgactgcgccggtgaagctttagggggtttggatgagaatggctgttaatagggggggtatgtgggtgattgaagagtatgnaatggg

SEQ ID NO: 565972 - DNA, 1314 bp, Homo sapiens
gtactgttgagtgaaaagaaaatttctagtatccagtcctagctgctggcatcactatactactaacagaccgcaaactcaacaccagacttcttcgaccccgccggaggaggagacccacagttctataccacaccacgctattctagagttataacagggtccaccctgaagtcatatacttcttcatccatacctaggcgttcggcaatcaatctcccatactcgctcactatacatacataccggacaaacaccacgaacacacattaggcactacatacaggtactgagtcctgcagctactgcatatcaaattgcgcctacccctcagaggctcaaacatccgatgctgaagccaacaacccactccatatattaccacacgcagcgacatcacgaccggctacgaaacacacgcacagacagaccacatagtagacaaacacatcacgcacataaaccacatacacatcagacaagactactacccccaacacggacagctccaacacagcgaacacgtacacagacgacgaaacgaagccacacaaacaaatcacaacggcaaacgcaaatacagaacaaaatgaaccaacatggccagtcgcacacacgtgccgtcatgaaagccgcaaacaacaggacagtagacaaaccataacacacagacaaacacaacacggagacagcacagtacccaatagacactagggcaccactacagcaactacacgaccaagaacacacaatcacacactacaacaccacaccagcacagcaacaaagcaagacgcaaacgagacaccaaaccagacccagaaaaacaaacaacaaacaccaaaaaaaggctcgaaaaacacacaaaccagaaacaaaaaggcacaacaacagaccaacatctacacacgaccacggcacaatacacaaaaaaacaccacgaatataacaccccaaacacccaccaacaagacataccaacgcaacaagacaacaaaaacacaaaccatcacagcaaacccccagaaacatacaaaagacaaaacaaacaatcagagcagaaacaaaacataagaaaaataagccgcaacgcacaaaccaaacaacagacgggaacacaaccacgagaaaaagacacacacaaagaaacacacgagaaaaaaacacaagacagcaacgcagcacaacacaaacaacccacccacacaaacacgagaagaaacaaaaccaaaactaaaaaacaaaccaaaacaatataaaacaaggaatacacaacacaaacgacacacacaaagagcgctaacaaacacaaaa

SEQ ID NO: 565973 - DNA, 405 bp, Homo sapiens
  misc_feature (12)..(13): n is a, c, g, or t
  misc_feature (18)..(18): n is a, c, g, or t
  misc_feature (24)..(24): n is a, c, g, or t
  misc_feature (30)..(30): n is a, c, g, or t
  misc_feature (36)..(36): n is a, c, g, or t
  misc_feature (49)..(49): n is a, c, g, or t
  misc_feature (51)..(51): n is a, c, g, or t
  misc_feature (69)..(69): n is a, c, g, or t
  misc_feature (71)..(71): n is a, c, g, or t
  misc_feature (83)..(83): n is a, c, g, or t
  misc_feature (89)..(89): n is a, c, g, or t
  misc_feature (94)..(94): n is a, c, g, or t
  misc_feature (100)..(100): n is a, c, g, or t
  misc_feature (145)..(145): n is a, c, g, or t
  misc_feature (151)..(151): n is a, c, g, or t
  misc_feature (177)..(177): n is a, c, g, or t
  misc_feature (221)..(221): n is a, c, g, or t
  misc_feature (236)..(236): n is a, c, g, or t
  misc_feature (257)..(257): n is a, c, g, or t
tgggcacctgtnntcccngctacntgggangctgangtatgagaatcgntngaactcgagaagcagagntngcagtgagccantgtcgngccantgtacnctagcctgggcgacagaatgacactccatctcaacagaaacgaanaagaanaagcattcataaataaataggacttntaatcctctggttacatgttgatctaatagaactgcaagcttcntctgaacaccatatnggtcacatgtgttccttctangtcattagtcttttttttttttggggctcacttgggtggtttcctccccgggaccctttttccttttgggaaaagtttgggcctttcctttataagtggccgggatattatttattccttaattcccaacgggttgttggccctttct

SEQ ID NO: 565974 - DNA, 299 bp, Homo sapiens
tacaaaactgcacctgcatttcaatttgccaatctcacgttaattaagattctccaagaaatgaaatgcaaccaatacgggttcatactccaaatgaatagtctgcaaggtctcagattaatacatggaatgtttcatattataagtaattaaaaacactattggattttgttctgttattgaactggaataaagatgttgacattttcttttgaatacttggacactactagattttcattttttccaaagtggttctatcattttttgtcttagttgggtcatagactgtttccgtg

SEQ ID NO: 565975 - DNA, 112 bp, Homo sapiens
aattttaagacaaatggataaaaaggtatgatgaagcaggtatggtaaaatgtttaatggaaactaagtggcaggtatactagtgttcaccgtaaaattttctcttgttttt

SEQ ID NO: 565976 - DNA, 616 bp, Homo sapiens
caggctgtacgcctcgggtttcgggatggcgatgcggggctggagggggcggcgggagtgggtgggcgacgggggtggcccaggtcgcgggccccccagtccacgcctcgtgcttggctcccatcggtcctccgctgggcactggtcgcccgagctgccgctctgtcgcagcagcctgactggtatgcctgggttccggtgaccacgccgtagcgtggtcaggtgtggctggctgtgcttgcgtgccactgcttgtggttctaaggcgtgttaactgtgtgtgatggcactcttacgttcagttgatcctacgcagtactagtaccgtttatgggcctgtggtaagccctatagctcgactttcatcgttgcctgccgtctttgcttgcccagtgagagaccctggcagcttggcacgtcaggaccaatgggttgttgcgcccgggcccgctgtcggtgcaagcgaccacacgctggtagccctttctgtaatcactccacttggggtattcgtcgggtagaacgtcagggatacccgcatggacgctccattgaatgacaaccgtgcttccgtcaactatgtgtcaggaatgaacgtccagggccgtaggtagaa

SEQ ID NO: 565977 - DNA, 431 bp, Homo sapiens
aagcctcttggggagagctggcctcataccttgtctacacagtgtggcacagggttcctaacctctggtcagtcaggaatgtcactttctaacaggtctgggaactaactccatgttgatcttgggaactcaagagaaagactcacacaactcatggaggatacgaaccatggctgggctcggctttaaatgtcttatctgaaattccttgtggaacagtttcttcaaagccaatccaaaaggcatatgtagatgtgaccattcttgctgcacattatgcaaataatcaggccaagtataagactatagtgtattccacccccagcatccagggtcttgtcacaggttgtttgaacccaaaattggtaatgtatagaatgattgtggtacaaatgatttcatgcatttgacattatattttagtctttttc

SEQ ID NO: 565978 - DNA, 404 bp, Homo sapiens
gtcgacatggagtggaatggaatgtaacacaatggaacggaatggaatggaacagagtgtagtggagtggataagagttgagaagagtggaacggagtgcagctggagtggagtggaatgcaatggagtggagtggagtggattggagtggagtgcaattaagtggaatggaatgggatggcatagaatggaatggaaaagaaaaaatgtaacggaacgaaacgggatggagtggaggggagacaagttgagcggagaggatcaggatgcagtggaatggaatggaatggaatggagtgaagtttagtgtagagtagagtactagagtggagtggagagaagtgaagtggagtagaatggagtggaatggaattgaatggagaaaagcggaatggaatggaaag

SEQ ID NO: 565979 - DNA, 696 bp, Homo sapiens
tcaggcccctcaaatcctgccggggaaccagcccaagccccgaatttcctggaaacggtggatttgcaaatcactttgaaaaatttattgatccccagaaaggacaagcgcttctcgggcaccgtcaggcttaagtccactccccgccctaagttctctgtgttgtgtcctgggggaccagcagcatttgtgacgaggctaaggccgtggtatatcccccactatggactatcgaggcgctgaaaaaactcaacaagatttaaaaactctgggtcaaaaagtcttggccaaaaatgttattgatgcgttttgggcctcaggagtctctgatcaagcagtattccaccgaatcctcggacccaggtttaacataaggcaggaaagttcctcttcccgggtcacacacaagcgaaaacttgtggtggccccaaaggtggttgagggtgaaagtccaccaaatcaagtcttccacaagtgtaagaaagcgtgtttaatgtcgtggacgtgttaacctgttgtggtctcccggtgaagattgtaccagacagatgacctttggtgtttttaacatttcacccgtggcgtgtcacacttcttgggcggttcaatgtgcctcacaaaaaacctgttggcaagaagttgttccgggaccttattatattcaaggagccccagtggggcaaaagcccccaaggg

SEQ ID NO: 565980 - DNA, 121 bp, Homo sapiens
tcttggattagacataacgccattgatcacgcagctttgtgaggagtgagtaattgtcgtaatggtgagtcctattcgtcctgagccaccttatttttttctgaggcataagctcagataa

SEQ ID NO: 565981 - DNA, 157 bp, Homo sapiens
tgcgtctgaatggcatacatttgtaaaatgcgtcactattgtcaggagcagcgttttgcacctgaaaacccaccaattaggaagtcaaagttggtacgattgcttgagcccacgaattcaagaccagcctagtcaaccttaatgaaaccccatcttt

SEQ ID NO: 565982 - DNA, 173 bp, Homo sapiens
agtgatcccagtcatatattgggagtgcgagtgtagcactggatcacctgagtgatcaagagtacgaaacagcctgggcaacatggtgaaaccctatctctactaaaaatacaaaaattagctgagcgttgtggcacgtgcttgtagtcccagctactcgggagtgctacgag

SEQ ID NO: 565983 - DNA, 177 bp, Homo sapiens
cgcaggtgggcacccacacttttctgccgtcttttcaatctgtacccttgaccctcctcctttttctgctttgtcagactccttaaggcactgcagaaattaaccatttccagggactttcccgcgtcacacatgagttattccatgtggacagtggcagcctctatgggatgccta

SEQ ID NO: 565984 - DNA, 271 bp, Homo sapiens
cacccaggcgcacttctagcgccaagccattcattcaagaatgactcagggccgggcgtggtggctcacacctgtaatcccagcactttgggaggccgaggcaggcggatcacgaggtcaagagactgagatcatcctggctaatatggtaaaactccatttccacgaaagatacaaaaattagctgggcgtggtggtgtacgcctgtagtcccagctaccagggaggctgaggcaggagaatggcgtgaacccagaagtgcgcctgggtg

SEQ ID NO: 565985 - DNA, 379 bp, Homo sapiens
gaggcggagtcttgctccgtccctcaggctggagtgcagtggcaagatctcggctcactgcaacctccgcctcccgggttcacgccattctcctgcctcagcctcccgagtagctgggactacaggcgctcgccaccacgcccggctagttttttttgtatttttagtagagacggtgtttcaccgtgttagccaggatggtctcgatctcctgacttcgtgatccacctgtctcggcctcccaaagtgctgggattacaggtgtgagccaccgtgcccggcgataaggccctttttaccacattcttgaaaacagtgggcactacccttaacttttgtgttatagttacaggtctatcaatttgtatttggtcgacgc

SEQ ID NO: 565986 - DNA, 451 bp, Homo sapiens
gactgcctcctcaagtgggtccctgacccctgacccccgagcagcctaactgggaggcaccccccagcaggagcacactgacacctcacacggcagggtattccaacagacctgcagctgagggtcctgtctgttagaaggaaaactaacaaacagaaaggacatccacaccgaaaacccatctgtacatcaacatcatcaaagaccaaaagtagataaaaccacaaagatggggaaaaaacagaacagaaaaactggaaactctaaaacgcagagcgcctctcctcctccaaaggaacgcaattcctcaccagcaacggaacaaagctggatggagaatgattttgccgggctggagcgggggtccggcaaccgctctcctggcgccgccccccacaccggccggcggggcacattgcaaacccaagaggcaacagaagttgaaaacttc

SEQ ID NO: 565987 - DNA, 1231 bp, Homo sapiens
gtgtctctgcgtcctcccccccttgttgtgtgcccccccccgccccccgcgcttttttggggggccccccccttgtggtatctctcgcggggaggtctcccccccgtgggtgccccccccctgggccgccccctgcggtgtttctccccccggcgcccccctatggttttttccccgtgtgtttctatcggggttcgcgcacgcccccctggggggtcccaccttttggggcccccccattgtgggcgggacgcgccccccccttgggtgtacgtttcccccactccgtgggggtggttctctcgcgcgctcttcctcatgctggggtgtgtccccttccgccgagaaccgttgtgtttttctcccctctggctcgagggttttcctctcctgtgtgtcttcccccgtcgtctctcgcgcctcctcgcgggccccacacctctggggtgtgtactccccccgctcttttttcctcgcgcggattgccccccctctttcccctcggttttcgctgggcccccacgactcttgtggacacgtggtgaggcccctcgctcctccctacacgcgcgctcttattgttcccactttgtgcgtcatctcgtcgtgccccccccctctattgggggggtcccctctctgcgcgctctctcgcgagactctcttctttgctcttctcccaccgcgcgcgctcccccttttcccaactctctctcttctccctcgtgaacaaaccctcggcgggcgcgcgcggagaatatagagagagactcctctctcagggcgttgcgctccccgcagagaggagggagtcccgctcctgcggcgccccccggcgcccctcccctcgtgtctcccctcacacagagagagatattctccctcccgcgcgccccgcgcgcccgcgggcgggcggttcggtccccgcgcgcacacacgtctctttgttggtgtgtgttctctccccctctgtgttaacccgcgacggtttcccccgcgcggtgcccccccccccccccggccctctccccccccccctctctctatatatatatagacgccccctcccctccgcgggcgcccccccgggggggacccgcccctcttgttttgtcccccaacacaccgcggggggacggtgttgtgcgtgcagaagaccagagggccgcccccccctccccccgccccccccccactcacccacccccattaaaaagggcagagagaaaca

SEQ ID NO: 565988 - DNA, 115 bp, Homo sapiens
caaggaaaaccccacttttttttaacacttttcaccctaaattcctaaaattgttctacacagatgttcccgacatataataaagtcccaatcaacccatttgggcgtacgggga

SEQ ID NO: 565989 - DNA, 119 bp, Homo sapiens
tcggattactcatcttccttctctccttaatgacattaacactatgctcaccagacctcctaggcgagccagacaattacgacctagccaaacacttaaagaccctcctcaaatcgccg

SEQ ID NO: 565990 - DNA, 1759 bp, Homo sapiens
  misc_feature (120)..(120): n is a, c, g, or t
agtcggtctcgtgagtttaccatgtgaagatggaggacgcacgctgatcgtagttacacactgtgatagcgatgatatagtcgtagagtatacatcgctactagttctagttgtcccccntttgcttcgtaccgcgtaacgtcttgccctagcaggactgcttcatgcgacgtctagtatgtgtgtgtacaacgtggcgcacgcagggataatctgcaccctaatcattcgcgcactctggcgtagacatcgaggggtgctatctaatgtcgtggagggacatggcaaccgacacgccgtacttactcaagcaccattacacagagtctcctcccttgctatctggtgcaaaagctcaacgaatccctggattctccacaaggtggacgggcgctttacgttggaattcgcccattgattggcagcgctcgtaccatatctatttgtgagacgaaattggggattgcacgggccgcccatagccaattggggtactatagataacgcattggacttgaggggagactttgtatgggtgcgcaaacaaagtaaggctcgcgcctacctacgtgcaactgcatgcgtctttgtggcctattttctataggacagcggcgaccctgcctaggaaccaatatcaaatatccctcggtgttccatttgagctcatatgatggggaggatcggccagatttagacatcacaaggcgtaacgccattttacccccttggaccagaaatacattggggaaaagaacccagtgggctaaagtcgccgaatcgggatttatccaaccaccaatggagagaccagagttgaacctccttggggtttaccccattcggttaccggtcctggggacctggtttctatcgcacatttgaccaccggcgctaaaaacccttggcactcggagggattccgaggtcacacataccgtgatccgaagatacaagccttatggaaacacgcccaattacaggttatccgccgacccaataatggtttcggctatcaattaagtattacccacacttgcggtttgtgcaacccttttttcgacacacacaccggacatggcggtctcactgtgggcggcaaattaattggtggccaaatgccttttgcttcggcactaattatcccaactccggtaatgtaggcaaccctattttctatttaggcggctatagagctcaggttaccacatttacgcgaacgagaccaactgcggtggggattccaccccaacgccaaaatatagacgggtcagggttccacctagaataaaactgtgggctaatttgggggggggagaggcgccccaatattgacacccagatgcctgtgagagaaagaataatatggccacaccccatgggtgaacacgtcctgtgaaggagatcaccaaccaaacaacactgttgaacccccatgaaggtggattacccaaacgcgttgtggagagaaacggagggttactttatcccacgtcttgggcagcatgacatccacattaggtccaatctgaaaagtataacccccttcctgttttggcattggcggatagcgaacacgcaagcttgtggcgcacaaattagcaagtgtgttgtggcaaccatcttgggaggacctgggtttcggtcataagcgacgtggaacaacgatgccctatgtaggtgcgcccccttggactggtcggagagctcacacagagtgtcaagggtattcggcgaccaattgagagtccaccaatag

SEQ ID NO: 565991 - DNA, 144 bp, Homo sapiens
aatgttgaggaggaatgtgttcacttaactcccagcaaacatactcctgccacttaggaggaaacacctccctatgtgtaccatttatgtttctcatgaaccagctagaatcagtgcctagcgctgtgcccatgcaaatatgtt

SEQ ID NO: 565992 - DNA, 439 bp, Homo sapiens
  misc_feature (150)..(150): n is a, c, g, or t
  misc_feature (158)..(160): n is a, c, g, or t
  misc_feature (164)..(164): n is a, c, g, or t
  misc_feature (166)..(166): n is a, c, g, or t
  misc_feature (379)..(379): n is a, c, g, or t
  misc_feature (436)..(436): n is a, c, g, or t
cagctgaaggaggccaagcacatcgttgagtattcaggccgcaaatattaagaggtggccaggaagctggtgatcctggaaggagagctggagcgctcggaggagaggtctgaggtgtccgacagccgagccaaacagctggaggaggancttcgaannntggncnaggcccttaagtccctgaaggccctaggggaggagtattcccccaaagaagataaatatgaagaggagatcaaactgttggaggagaagctgaaggaggctgagacccgagcagagtttgccgaaaggtctgtggcaaagttggagaaaaccatcgatgacctagaagagcccttggccagtgccaaggaggagaacgtcgagattcaccagnccttggaccagaccctggtggaactcaacaacctgtgagggccagccccacccccancca

SEQ ID NO: 565993 - DNA, 186 bp, Homo sapiens
tttgttttaacttgctccagattgagatgcatattaaaccctgtattacaaattcaattgaagtgtctctcaagtctctttcattcatgggtacccttctacatcagttttcccccttgtaattcttttgttaaactagagtagtttattctttagcgattccccagacctagcattttctcgact

SEQ ID NO: 565994 - DNA, 123 bp, Homo sapiens
tgttctgtggtctctctggtgactgagaaagaggcgtcccattgattgattgattgagagagggtcttgctttgttgcccaggttagagggcactgacatgatcatggctcattgcagcctcc

SEQ ID NO: 565995 - DNA, 445 bp, Homo sapiens
  misc_feature (92)..(92): n is a, c, g, or t
  misc_feature (385)..(385): n is a, c, g, or t
  misc_feature (442)..(442): n is a, c, g, or t
taattcctgcaggcccagggggccaaggttaaggggagcaaaggggcagttagattgggtccccaagggaaggaaggtgaggggcccagggnaagtaggggttgggtgttctacggaggcaaaatgaccaggagcctacggggtcaaatggaaaaattaaggatttgtggtagcgctgtactgatggggtgtgtgtgtccccaaaagtattcccccaaagaagataaatatgaagaggagatcaaactgttggaggagaagctgaaggaggctgagacccgagcagagtttgccgaaaggtctgtggcaaagttggagaaaaccatcgatgacctagaagagcccttggccagtgccaaggaggagaacgtcgagattcaccagnccttggaccagaccctggtggaactcaacaacctgtgagggccagccccacccccancca

SEQ ID NO: 565996 - DNA, 580 bp, Homo sapiens
tgcagtggctcacctgtaatctccgcactttgggaggccgaggcaggcggattacctgagggcgggagttccagaccagcctgaccaatatggtgaaaccctatctctactaaaaataaaaaaaactagccaggcatggtggcatgcgccctagtcccagctatttgtgaggctgaggcaggagaatcacttgaacccaggaggtggaggccgcagcgagccaagatcgcgcctctgcactccagcctgggcgacagagggagactccgtcccagaaaaaaaataaataaaataaaaaacatatcggtcacatgaagcaactttttaattttcttaattgtttatttttttgagatggggtcttgctctgttgcccaggctggagtgcagcggcgcaatcatagctcactgcagcctccaactcctgggcccaagcgatcctcccacctcagcctcctgagtaactgagaccacagatgtgcgcccccatgcccagctaatcccgtattccctgcagtaatagggtctcactttgctgccaggctgcgctcgaactcctgagctcaagccatagagctca

SEQ ID NO: 565997 - DNA, 733 bp, Homo sapiens
gaaagtactgcatacctattagaatggccgaagtcgctgggcgcggtggctcacgcctgtaatcccagcactttgggaggctgaggcgtgtggatcagaacagcctggccaacatggcgaaaccccgtctctactaaaaatacaaatattagccaggcatggtggcacacacctgtaatcccagctactcgggagtctgaggcaggagaattgcttgaactcgggaggcagagcttgcagtgagctgagattgtgccactgaactccagcctaggtgacagagtgagactccatctaaaaaaaaaaaaaaaaaaaaaaaaaaaaaaaaaaaaaaaaaaaaagagagggggcgcgcgcggccaaaaaatatatctcccccggggggggcccaagatattatacgcgcggccccgcacggtttttgtggagaaaagggggtgcgcccacaaaaaagagggagggcgcgccattatataaacgacgaccaagcagacgctgcggccgcgcgacgattaacaacaacaatgctattgtgatagtgtgggggaaacacaacttgtgtgatacataggggggggggagacaaatctttggggtggagcaaagagaggacccactatatatattcaggggagggggggggggggagaccaaatatatgtgggggaaaagaaatacacttagaacgaggagagattattttaagagcttataggaggggaaaatattttag

SEQ ID NO: 565998 - DNA, 219 bp, Homo sapiens
  misc_feature (133)..(133): n is a, c, g, or t
atcccgatatctgtctcagtggatgttggataatggatggatggatgaacagatggatggatgagtggatggatgaggaatgagtgagtggatgaatgaatgaatgaatgagtgaacgaatggattcatgaantaatgaatgggtgtctgaatagtgggtgtattgatagatggatggatgactgagtagatggatggatggatgagtagatggatgga

SEQ ID NO: 565999 - DNA, 434 bp, Homo sapiens
taggcaactgtgctatccgagggagcaacgcccttcgtgcgccacatgacgcatactcacctgccacatctcacgctcgtccaccgtcggcgcgcaccacacttgcacgcccttggcgtacatcgccgtacgcagcagcggcatcatgttttcccagcacaccgcgccgctgacccgccctaccgccgtgtcgatcaccggcaaggtggagccatcgcccttgccccagatcaaacgttcggtgccagtgggcatcagcttgcggtgcttgaccaccaggccgccagacggttcgaaatacagcacggtgcaatacagggtgctgccactgcgctcgatcacacccaggaccaggctcgcgccggttcgggccgacaaccccgccagcgcctcggtcttggtgcccggccttccttggatagcacagttgccta

SEQ ID NO: 566000 - DNA, 225 bp, Homo sapiens
tataggcgctatatataggcctaggtatggtagatcatgactgtaatcccagaactttgggaggctgacatgggaggatcgctggtgtcaaggagttcgagaacagcctgggcaacattagggagactgtctttacttttaaaacacacacacacactcacacacattaacaacataaaaccctcattcacacgagaaaacaccctcatgttcatacaccaaggc

SEQ ID NO: 566001 - DNA, 349 bp, Homo sapiens
ggtgtacctgcagctctctctgactggagactatgagacgtacgcaatgggggctgatcttcgctggactggccttcatcggtggggctcctcatccgcctcagcagaagattccgctgtgggggcaataagaagcgcaggcaaatcaatgaagatgagccgtaacagcagcctcggcggtgccacccactgcactggggccagctgcgaagccaagcatggccctgcatctggcgcctcccccattcttccctgggctaaagaaccttgtccccgtcactgccagcgcttgaggtgaagggaaagctcaagactcaatgtgaccccaggggggatcggcaaattcctg

SEQ ID NO: 566002 - DNA, 129 bp, Homo sapiens
aataaatattttttcccccttaattgagggttttttttttcatttggggattacaccttaggttttaggcacccataatttaacctccaataggtttaaaagcaagaaggttacccctaataaaagagg

SEQ ID NO: 566003 - DNA, 962 bp, Homo sapiens
atctgatatcagcaattcatggattgtagaacttgtgctgatatttgaccttggtattgaagtataactgtaacccctatggatatattgtttaatacacctgtacatgatcttatagagctttacgaaaccatttagattacagtagtgcgactatgggatatcactctatccgtggtgcctgatatgggctaaaggaacacggctagttcctattgttcgacgaagagaccacagctacgtaagatagcgccgctgttgaagctaggaaaaaacgtactgggctagcttgcgcgctccccaggtcccaaggagcccgcattaccgttggaattgcataggttgctcaatcgtggtcgcaatttaagcgtttcttaacaacgccgggcgttggttattgcgaaggtatgcgaagcccactggccaagcagcaatagcgattaatacaagcataggaggctggcaacacgtttagttgctcccgccttccctttaagcctaaagggcaggcctccaattcgtgtagactcccataacatcagcgtcaaatgaacagccctcctaaaaggggcaatcctatggggggcttctacctagtgtggggccttctccgaattgatatgccccccagcggaatgggatatgccattgcgactgcaagcaaggggcatttctgggcaagaaatcgtgctaaccccccaaagcaatgggtagccgtccgacatctaagcttaggggaacactccaccaacctaaaatagggggacgacttttcactcttcattatagcgccccccccggcttagactgtttgagagtagcacacccaatttacttgatgaaggcgcatcccagttttctgctccaacgcgtcttcgggcgcatttgcgcccgatatctattttactcttgcagctctgttaccctcactctcccaataggtggttgcataaaacgacgac

SEQ ID NO: 566004 - DNA, 132 bp, Homo sapiens
gatccttgagaggcaggacactgaagatcaccatcacggggtacgaaccgcttacagttgctatgagcacagtgtcttccttaaacggagagcccgaacaaggggttgccatggaagcggtgggccagaacg

SEQ ID NO: 566005 - DNA, 243 bp, Homo sapiens
ccggtatcccacccctataccacatataaagtatctcaaatgattcttatataaaaatcacaaaagatactttatatactgcctgacatgcagaaagagctccacaaaggttgacgaattattcaaaccagcaacgatgtgtttaaagaaaaaaaaaggtgggtgaattaaatataactttcaaaaaggcaaaacatttccaaccactctaccagtaaactagtatacctatagaaaacatgt

SEQ ID NO: 566006 - DNA, 327 bp, Homo sapiens
  misc_feature (8)..(8): n is a, c, g, or t
  misc_feature (210)..(210): n is a, c, g, or t
  misc_feature (272)..(272): n is a, c, g, or t
  misc_feature (280)..(280): n is a, c, g, or t
gtgggtgngggcagggggagggagtgtatcaagataaacagctaatgcatgctgggcttaatacctatttgaatgggttgataggtgctgtaaaccatcatggcacacatttacttatgtaacaaacccggcacatcctggcacatatgttcctagggacttaaaataaaataaaataattaaaaattccaaatgggctacaggcaaagnactgcttgcaaataattgaaattcatgttccataggacagtatttccttttgccgggaatgnacttttgntcccctaaattaaaccctttttcaacataggctatttacttcgttga

SEQ ID NO: 566007 - DNA, 578 bp, Homo sapiens
aggagaactggaacgctgagaagaggtcccccaccttccacctgggagatgcagcccacctccaggcagaaatccacactggcagccacgtgccactgcggttgtttgtggaccactgcgtggccacaccgacaccagaccagaatgcctccccttatcacaccatcgtggacttccatggctgtcttgtcgacggtctcactgatgcctcttctgcattcaaagttcctcgacccgggccagatacactccagatcacagtggatgtcttccactttgctaatgactttcgaagcctggtgttcctcccctgccacctgaaggtcaccctagctgagcaagacccagatgaactcaacaagggcctgttccttcatgaagcctttacaacagcttgtttcccaggggaaggctcggctgacatctgtcaatgctgtaacaaatgggactggggcactttaaaccatttcagagaggcatccttcatgtcatgagcctaaggtccaggtctgcttacccgtaaccgctagctagtgacagaagaagcaaatgtccccggggggccccttttctttttg

SEQ ID NO: 566008 - DNA, 914 bp, Homo sapiens
  misc_feature (414)..(414): n is a, c, g, or t
ctccataactccttcatagtacccatgctaatcgcaatggcattccttaatgcttaccgatagcgaagaaatactagggctacatactaggtatgcaaaggccccaacgcttgtagggcccctacgggctactgtacaactccttcgctgtacgccatgtaaaactcattcaccaaagagcctcctaaaaactcgtcactagtctgccatcatgcctctacattcacacgtgccgaccttagctctcatccagtcgcatcgttctatctagtgaaaccaccctctcaccacatagaccaagccccgtggtcaggcctcaactgtaggcctcctatattattggctacgccaggctctagacctagaccggtgactcaacttcgcttctggatctagggctcgaggctgcagaanctccagaaatgaacggcccagatgctggtcgcatctggcaaggcaaggaatgcccaaaaccagacctccatgatgaaggtgcagcgcctgagccatgcatcttctaaacttatgcgacaccatttaccttaaattcaagtcggacataccccttgtagacactacttccacaccccgttatgcaataaacacaaatgaacctaccatctggtagtgtagctcctcttggcccactacaatggagccccttgtgggcccagtagagtactggagttctcatcttcaccaaggcacatacgcccacagaagaagcccaaaagcggaaaccgcccctaacgaaccctttgggccctggaagggcgcgaagttacgcgaatcgaacgatcctgcagggctcttcataacagaactgatattacgctcgcgagagacccctttacggccgcagtattcctccaataccgcgcacgttaacatctgaaactctactcttggattaa

SEQ ID NO: 566009 - DNA, 606 bp, Homo sapiens
aggtactctagaggatcccttgagcacgaatgtaatgcgctcgatctcgtcctggctcagggtcgacagggtcagcatctggggagtgatacgctcggcgttggccgggatgccattggccggcaccagcacctcaccggccttggtcgcggtgtattcaccggccttgatcagttcgatcagcgccggcttgtgttcacgcaaggcggccaatatcgccgggtcgctcaaggcttgcttgttgccgttcaccgacaactgctcgcccttgagcgccagttgcacatccttggttttcagggttgccagcagctcgaggatgttcacaggacgatctccattcgttcggtcattgcggcgtagccggctagggtcggttgttcgaacaagccccgcacatcggcttccatgccttcctggcgcaggcgcccgatcaagctcacggcaagcaagcgagtgcccgcccagttcaaagaagttgtcgtggcgccctacccgctccaccttgagcagctcggcccagagttggccaggaggatttcggtgtcgccttcgggcgccgcgtactcacgtacctgcaacgcgtccataccacattcgtgctaa

SEQ ID NO: 566010 - DNA, 180 bp, Homo sapiens
gacgtccttccagacctcacgccaccatcttggattgttctcgatcccgtaccccagctacgcatctttggttcgaagacatccacctcactggccggtcctcctgccgcctggaggccgagcccttctgcgcaccgtctttggcagccagagcatcacgatgtcaccatgtccttaccc

SEQ ID NO: 566011 - DNA, 152 bp, Homo sapiens
gcggtgctctgagaagccggactacgacggcagcggctctatcaaagcggagccgggcagttttttgctcacagttttctgccaccatgcagtcagcagctatacatgcatgcagctgcagttcttgagagcaagatcaaataaacaactag

SEQ ID NO: 566012 - DNA, 500 bp, Homo sapiens
tgtggagacggggttcatatgtggcccaggtgggtcttgaactctcagcttcaagcgacccttagcctgagcctcccaaagggcgaggattacagtggtgagcccccaggctgggctgccatttagtttctgatgatcattttcctgcctttttttttgggggtgcaaaaaaaagggttttagtcctcagcatcttaccggcatcaggttcaccaagggggccccagccggagggttcctggcctcaaagcaggggaccatccatctctcccaggagggctcggtagcaccggagagcgcagtgagatagccggggattggagaaaaaccaggaacccagacagatcacagttggcagagctcagggtccctggctgtcctcggagagcagtgacctcccagaatcttccggcgggtccaggtatggtgaagcctcagggcccaaaaccagcctttgtgcttccatcctggcagtggggtggccacgagtatggccaaat

SEQ ID NO: 566013 - DNA, 222 bp, Homo sapiens
  misc_feature (70)..(70): n is a, c, g, or t
  misc_feature (101)..(101): n is a, c, g, or t
gacagtgacaaataaaggatttatcacacagaacaagatatccagcagtacacagtccaggcctggtatngcaagcacttaattatgttatcagaggcccngggtcttttttttttttttttttttttttttttttttttttttttttttttttttttttttttttttttttgtgtgtggggggagagaaaagagatttttttctcaaaagagagagagaga

SEQ ID NO: 566014 - DNA, 506 bp, Homo sapiens
acaaatcccaggaatctcatgattttaggagagcccttcccagtgagttaaagctcattgctcatcagcaaactcaaacaggagtgagaccctactgatgcaatcaatgtcaaaaagccttcattacaaattcagggcttgtgtatcatcagaaaactcatcatagagaagggaaagtctgtacatgcagcaaatgtggagaagttttcccttggaagtcagaactcattttatgtcaaagaaatcattcaggagagagaccgttcatttgcaaagtatgtgataaaggctttgtggttaggacacatctcactgtacatcagagagctcacacaggagagaaaccatatgcttgctcagattgtgaaaaagccttctcaaaaaaggctttattcatgattcatcagtgaattcacacaggagagataccctattaatgcattcaatgtcaaacagctttgaagaccagatctgagctcagttatcctcagaaagttcttcatagg

SEQ ID NO: 566015 - DNA, 645 bp, Homo sapiens
cggcgtctggcgtgctttgagacagccccaggtcgcggagctgctggcgaggtccggcgagctctgccgggaggagttcggggccgagtcccgagctgggcgtgtgaggcgccgggcctgggtctaacgcgtcatcggggaacaggacggactacaaccagggcctggtgctggctatggctcctgcgagctcatgaaccggtcgctgtgtgggcagcctgccggaacggagtgagcgactggtgtcgctcctcgagcacctctggaggggtgccgatgagcccgagcggctgcagtgtcgactgcccacagtccagcgctcgctggagcctgggactcctcgcgtgggccaactatgtcaagggagtgattcaggtactacccaggcatgtcccccatccctggcgttcagtgaaggtaggtggtcagctcagtgcccctgggggggtggccgtgtccagctcagcatccttggaagtggccacgtacagccttcctccagcagcttgtccagactcgggcacaatagctgtccgcgcccaggtgtgtcagcaggtccgagcacagcttcgcagggatgccctgtggcatcatggaccaggtcatctcacttatgggacagaaaggccacgcgctgctcattga

SEQ ID NO: 566016 - DNA, 167 bp, Homo sapiens
gtctgtgaaaaggatgggtctaaaaaggtggggacgctgtgggagaagcggggtttagtggaaggaatttctacctgaaggccaggacatgggtgcattcgtcgctgaacagaagggtggagtatacccggggagaggagtcggaagccccttggccgagagggcac

SEQ ID NO: 566017 - DNA, 1145 bp, Homo sapiens
  misc_feature (290)..(290): n is a, c, g, or t
  misc_feature (343)..(343): n is a, c, g, or t
  misc_feature (381)..(381): n is a, c, g, or t
ggaggtcctggtgcttgatggtcgaggccagctcctgggccgcctggacgggcatcgtggctaaacaggtactgctgggcctggaagggtggtgcgtctgtacgctgtgaaggcatcacacgaattttcgtggcgaatttctacgagaagactacagttgaagatacgcgtggcatttccttcacgtcaagtcggagtgaacaccaaaccctgtatccctgagggcctcatactcgactgtccggggcccctctagccgtgatcttctggtgcggaccgatgctgacggntaatagcttagacgcgcacaagatagccaagcgacgaggggcctagaggcccntgcgtctttggagcgccgatcatctaacggatgttctntgaccggggtgatttcgccatctcagcccgtatccgaaccaaagggacagaaacattgctggggaaatgggggttagggggattcttcgccgttggggctttagagcacccccttccaccaagggattcggggttggggccggcctccttttggcaacaacggggccaccattaaccccaggaagcacaacacatacggcgttatacatggtcccgctttaatatcctttggacgaagggggcctggaccccagtggggggcctggttcaaaagcaggagaaagtgggcctttgggggggccgcataggggccagaagaggttgacaccacaagggtccacaagcggtgggccaacaaaaggggcaccgcaagcggccccctttggtggcaaagggcggacacgacaagaaggcaaggcgggcaacacacacggaacggagaacaagacggccggccggaaggaccggagacagtttccccccccaaagggcggttttaaggcacctcccggtgtggccacacaaagggcgcaacccaacgggggcacacaagtctaccgccagaatgttggggcaaattacccagacaggttttgagacacaaaagcgggcggcaatttcaacttcgggccggcggcacaccaaaacagcacctctagggtggcgggcaccacccgggacaaggttggaccgcacgttgggaacggacaccctggttggtgttggcggttaaatggccgcaccacaacgaggggaacaaacac

SEQ ID NO: 566018 - DNA, 1714 bp, Homo sapiens
  misc_feature (68)..(68): n is a, c, g, or t
  misc_feature (609)..(609): n is a, c, g, or t
  misc_feature (1132)..(1132): n is a, c, g, or t
  misc_feature (1693)..(1693): n is a, c, g, or t
ccagatgactcagacgaggagaatgactttcggcaagatctgcagccaggagagcagcagtttgcagntgacgcattaaatgagatggaagacatcgtccaagaagatggagaggtggtggccgagagtggaaataatactccagctcacagccaggcaattattcctgtggatgttgatgaggaacaagcaggacccagtggtcttcagcgtgtagtaaaaccaacctcaattactgttcatgattcagagagtgatgatgaagaagatagtctagaactccaagaagtctggattcctaagaacggtactcggcgttactctgaacgtgaagaaaaaactggagagtcagtgcagtccagagaattgtcagtaagtggaaaaggcaagactccacttcgaaagaggtacaactcccatcagatgggccagtcgaagcagtttcccctcgaggaaagcagctgtgagaaaggctgtcaggtcaccagtgagcagatcaaagccgatatgaaagcagctagggatattcctgaaaaaaaaaaaacaaggatgtttatcccagctgcagcagcaccaccgccagcacagtgggaaactccagctcacacnacactgcttctcaaagccccgactttgtaaggacggtgaacagcggcggctcttccgagcctagccctacagaagtggatgtgtccaggcagtgtgcctgctcccccggtgggtcagaggactctgaggccatggaggagggagatgcagagagttctgtctgccccagatgctgctgtcacaggccccaggaatcccaaaggagaactagcaggtgttctgatgaggaacgtccttcaaccagccgagcctgtgttgtgaatggcccggatggtacgagatccgccttttcctttaggactctgccacaaggggggtcttcaggcccagcacatgatgagaggactaatgggagtggctctggggctacaggtgaggacagtgagggggagctcccagcctgagagttgtgacgtgcagtctaatgaagactaccctcggaggcccctaaccagggccaggagcagactgtcccatgtactgctggtatctgagtcagaagtagccaaaacaaagccacgtnacgccatgaaacggaagcggacagcagataaatccactagtacaagtgatcctgtgatcgaggatgaccatgtgcaggttcttgtattaaaatccaagaatcttgttggagtcactatgaccaattgtggaatcacagatctagtgctaaaagactgtccaaagatgatgttcatccatgctaccaggtgcagggtactaaaacatttaaaggtagaaaatgcaccaattgtaaaccgatttgactatgcacagtgcaagaaactgaacatggatcaggtactagaccagatactaagaatgccacccgagagaaaccgcatcatatacctacgcccaatgcagcaggtggacactctaactttggagcagaagctatttagtggtccctacccctatcacatctgtattatccatgaattcagtaaccctcccaatgtccggaataaggtgcgcattcgcaggctggatggacactatagcaaacatcaatcaagagctcattaaatatgaattcttccctggaaggccacttcgaagtgaaggaaggactttaaagganatacccccaagtacccctggg

SEQ ID NO: 566019 - DNA, 342 bp, Homo sapiens
acatagtgatgatcccatctctacaaataaataaaaaaattagctggacatggtgaatgtgcacctgtagtcccagctacacaggaggctgaggcagaaggattgcctgaagccaagagtttgaggttgcactgagctatgatcaagccactgcagtccagtctgggcaatagaatgagaccctgtctcaaaacaaacaacacatataaaaagaaacagaaaaaacaaaattgtgtgcgttgtgtagcgacaaaaaacaaaacaacaaaaacaacatacaccccccccacaatatatagatacataacaccaaaaacccataaacaccacacccttttcttt

SEQ ID NO: 566020 - DNA, 1509 bp, Homo sapiens
  misc_feature (106)..(106): n is a, c, g, or t
  misc_feature (1488)..(1488): n is a, c, g, or t
ttagtctgtaggtagtggctaagttaatgacagcggagatgattaaatgagattagaactgaccttagtatgtcggattttatagctaagaaccactggatccttnctgtcatctagcgctctcctttcctctgttgctgtcctcaacaacagttccccttctttccaccaagtcacaaaaggagaaaatgaacgtgagaggcgggagtctctctcagtgtttaaatgtcaagttagttacattagattgcacaagacgatgatgacatttgggtcaaggatgttacagatgtctgtgaaatgttaagatcagacaaatgagcctgtggttttataatcttttccatttgatctctctcaagttggacctggttgaaatctgcagtgaaaattggaccaggttgaaattggagattaaaacccgagaaggaaatatttttctgaagttgatatactagttcagttaaatgtgtttattatatcaaaattacttttttctgacttcatgttttatatgtcaaacagaaaaactaatcatgttttagatgagcatttcaatagaactttaatgttctgtgtctacactgttcagtattatggtaaccactaaccacatggctactagattggactgaatagctttagaccaaagtatccaaatgtgtttctgggtcttttttttcaaggttctacttttacgtttgtgacaggaattaaaatccaactctgctcattcctgagagtgaatgtaaggtaacataggtgaattatttcaggtctgactattgactataaaaatgtataatagttactcattttttaaataaatatttcctaaacagtttctgtctgggcaagtcattttctgagacttggttttcttaacagtaaaatcttagaaaaaggcactttaatgccccttctaccttcttttgaattgaacagaaccacattttcaaatttttttgttaactgtgatttgtactctatgatattatttgacctctgttaaagatgtttgttactgcagtattttgtgccaacaaaaattaggccatctctccaaagatgatatgtacggagcttaccattgttttcattttgtagctaccaggtgcagggtactaaaacatttaaaggtagaaaatgcaccaattgtaaaccgatttgactatgcacagtgcaagaaactgaacatggatcaggtactagaccagatactaagaatgccacccgagagaaaccgcatcatatacctacgcccaatgcagcaggtggacactctaactttggagcagaagctatttagtggtccctacccctatcacatctgtattatccatgaattcagtaaccctcccaatgtccggaataaggtgcgcattcgcaggctggatggacactatagcaaacatcaatcaagagctcattaaatatgaattcttccctggaaggccacttcgaagtgaaggaaggactttaaagganatacccccaagtacccctggg

SEQ ID NO: 566021 - DNA, 717 bp, Homo sapiens
ctttttctgctatttttttctcttgtcggttgttgtcttctctgtggtatccccctccctttgtcttgctttgcctggacttccgtgtgtctttctgtcgtcgtcttttctgtgtttggctcttgattccccccttatctggcgtctctttgcctggcttcttgcttcctctggttttgtcttgtatttttttttttcgcgtctggcccctagtgccattattgaccctctacgctggcccgtaggcagctcagtcttttgtccccgtcgtcccgtcctcacgcctgcggcgcctctgcgacccccgtacaccccgggtctaacgaccgacacggtcccagcgggcccggaatgactgacggacggccaaggcgaccgagaccacccgacgtggaccccgagctgttgaggtacttgcctgggacggaattccttgacgggaagcgcggactccgacgggtgtgagcacgccccgcgccagcctccgccgtgccagccgacacacgagtgtgggctgctgagcctgcacgccctgagggcgtgctgggggcgctgactgcgtgtgaaacgcctagagacccacggcgccccaggtgcctgcacgccgcctcttgccaacctgagcactgcccggatcccgtgcatcatgggacccagaagtgcccaccgccatcccgccacaaggactgctccccgccagacgtcagagcaactgac

SEQ ID NO: 566022 - DNA, 209 bp, Homo sapiens
ttgttggcattgatacatttttattcatttgagttatataaatttattaaaatattactcaaacttctattatagtctgctgtcacaaaagatttcctattaacttttctgaactaccctccacttgatactatggcaaaagagagatcacactcagaaacttttccttaagaaagatacatggagagagcctaagaattttaagaatt

SEQ ID NO: 566023 - DNA, 170 bp, Homo sapiens
  misc_feature (25)..(25): n is a, c, g, or t
  misc_feature (65)..(65): n is a, c, g, or t
  misc_feature (72)..(72): n is a, c, g, or t
  misc_feature (98)..(98): n is a, c, g, or t
atataaagtgttaaattaattgatncccagatttcactggaacagtgtcaactgatagtttatgncaaaagnacatacctgtaatattgaaattaganagtgaaatttgtcataaagaatttcttttatttttgaaatcgagtttgtgaatgtccttttaagagagggag

SEQ ID NO: 566024 - DNA, 680 bp, Homo sapiens
tcataagccaggcccctcacccgccttatcttcacccccaagctttctgccccaggcctgaaagaggcttaggcctggactttcctgccactcaaggactttgcagccggcacacgggtctgctctttctctgcccgtgacagacaggctcttagcagcttcccagattgacgaccagtgctgaaccatggaggaagagggacagatgaatgccctggattgcacgtggcctcttgagccgtggctggtcccgggctagtgacttgtgtcccctgatccctgtgttgtctctagagccgggatttacctctgcactactgacatgtggggcccggtcaccctttgctgtgaggctgtcctgtaccttgtgggatgttcagcactgtcccttgcctcaatgcccgtacgcgtcttcctgagtggtgcccaaccaaaaggtttctcaggtgttgcccaatatgtcctggggtataaaactttcctcgcctgacaacccctggtctgtagggatttttggctacacaccaacccgtatcgctcatagatcagccaaccggggcctaactagagtctgaacagctgtaatctatgaattttaagtgaaattttataaaattgttaatttttcctatattgccttaattttaaaaaataaatctgaggccaatatggactctcca

SEQ ID NO: 566025 - DNA, 117 bp, Homo sapiens
tgctcactccccgcccattcccatgtctagaccaccgctactactatgtcctatcataacatttccatatcataccttcaacaaccaatgcaacagggtgcagttccatctgttaaa

SEQ ID NO: 566026 - DNA, 283 bp, Homo sapiens
gaggatcccccaagctgaacttatctcaagttagatgccttgtcctggatatactgatggctttttcccaagttatctgattttataatggatgctcaatctgattcctcatggttacctcttatggaaaaagacttcaggtgattgtttgctctgccactttgcattctttcgatgtagagaaactgtccgataatattatgcattttcctacataggttgacttacaaggagaagactctgttccaggaaccccaccatgatgtccatgaatcccattatg

SEQ ID NO: 566027 - DNA, 211 bp, Homo sapiens
aggaaagacacaaggtataggaccccggtattatttttatatgaaagaagccaggcgtataagaagatgatgaaagagacggtgccacggagctgggaagcctgatcatctgtgctactcagcatgctggagagcatgatcaaagaagccccgaccacacatcgcgcctgacaggcagctgatgatggccaactgcagctcctggcatggc

SEQ ID NO: 566028 - DNA, 354 bp, Homo sapiens
  misc_feature (78)..(78): n is a, c, g, or t
  misc_feature (337)..(337): n is a, c, g, or t
tatacatatgtatatataatcaaactaaaatgaaaactagacatcataattacaggtagaaattcaagctgggtgcgngtgtcacgcctgtaatcccagcattttgggaggccgaggcgggtggatcacgaggtcaggagatcgagaccgtcctggctaacacggtgaaaccctgtctctactaaaaatacaaaaaattagccgggcgtggttgcaggcgcctgtagtcccagctactggggaggcagaggcaggagaatgtcctgaacccgggaggcagagcttgcagtgagccgagatcgcaccactgtacttcagcctgggcgacagagcgaantccgtctcgaaaaaaaa

SEQ ID NO: 566029 - DNA, 596 bp, Homo sapiens
  misc_feature (1)..(1): n is a, c, g, or t
  misc_feature (55)..(55): n is a, c, g, or t
  misc_feature (65)..(65): n is a, c, g, or t
nttataggaggttcagtatgaccactttgaaagttttaacctccaggaggacccncttcatgggnaacccccccatttttgttagcttacctacatgagctcaattagattctccaagtaaatattgcagaaaaatccctatgtgttctggcagggggaaggtgaaatgaaccattttgaaatatgccagagcactgtgctcttcttaacaaggtctgcccccaggagaaattagttagctaaatcctaacctgctggggtattattagagcctgacccaagggaagggaaatacctaactcttgtcagctctaaccttctgcatcagagaagggaaatactaaactccagacaactctagccatcctgtcctaccaaagaggggagaagaatactgaggaaacacttagaagtttgtacaccagaggcatatgcttactaaaagactgagacttaatcataggatgatagaatgtctcccctcccctttcccccacctaactgctacattgctaaaagctgatttataaaagttccttttacctggtacatcatgtccagctaccaagaaaaaattaccaggcataccaaaaggc

SEQ ID NO: 566030 - DNA, 414 bp, Homo sapiens
  misc_feature (161)..(161): n is a, c, g, or t
cccccttcctgccgtttttccggtttaaagggggaatcgggtattgagtttggcccttttccgccccccggggggggtgacccattaaaggaggtgggggttgggccccccctcccaatttggggggaatacccccggggggccccccccccaaggttggnaccgaaattttttcccaggggggttttttccaggaaaggggccctcccaaaagtagttttgagggggggggggggttttttgccccccaaaaacagccctggtcccaacccctggggttctttgggccccccccggcccccctaaattttgcctgaagggggggggggggggcggtttgggggggttggggtagttttccccccgcgggaaaaacccgggggcctttgttttttttaaaaaggggtggcccca

SEQ ID NO: 566031 - DNA, 132 bp, Homo sapiens
cgtatatcattaagagaggtgggattatgagactggaggattttgaacgaactcttaaagtgacatacatgactctgctacaggatcattacattctgaccactacgactggcgaagcttctggccttccat

SEQ ID NO: 566032 - DNA, 134 bp, Homo sapiens
cggtcgcggccttcgcacgcacgacaacggggctgtccctgatagctcccgatggagatttgaggtcgtgaaacctccgcacgagactctggcccggcgagacgaggcgccgtccgatcgacacaagaccgcga

SEQ ID NO: 566033 - DNA, 392 bp, Homo sapiens
agaggacccgagacggtaactggtagattctatgtctttgctatctgaagctgcagtgaacatacgagtgcatgtgtctttttttttagtagaactatttattttctttcgggtatatacccagttgtgggatttctgggtcaaatggtagttctgtttaatgttctttgagaaatttccacagttttctgcagtgactgcttttctccacaatctcttcaggtttttattttttttttacttttaagtaatagccattttgacaggtgtaagatggtatctggtggatttgatttgcatttctctgatgattagtgatgatgaccttttttcatatatttgtgggccacatatatgtcttctttggcgaagtgtctgtccatgtccttggc

SEQ ID NO: 566034 - DNA, 186 bp, Homo sapiens
gacctttgcttacgttttcctgctgaccctcctccccaccataagcctgtagtcctgccccattcccctccctgagatagtaaaaagagtgatcaataaatactgagggaactcaaagaccagtgccgatgcgggtcctccgtatgttgagcgccggtcctctgggcccagtgttctttttctata

SEQ ID NO: 566035 - DNA, 639 bp, Homo sapiens
  misc_feature (404)..(404): n is a, c, g, or t
  misc_feature (445)..(445): n is a, c, g, or t
  misc_feature (452)..(452): n is a, c, g, or t
  misc_feature (461)..(461): n is a, c, g, or t
cacctggtctacctcgctagcatgtctgggcctgcggcaatgactggctggcaatggccctgcgccaaggccaatgtctgctgctcgtcgcgcgccggcctccagttcccagtgggcctgtgtacacctggctgctgcggaagggccactacgccgagcgcgttggctgccgtgcgcgccagtgtacctggcggcagtgctggagtacctcacctgctgagatcctggagctggcgtggcaatgctggccctgcgacaacaagaagacgcgaatcatcccccgccacctgcatgctggccatcctgcaacgacgatggatgctcaacaagctgctgggcggctgtgacgatcgcccagggaggcgtcctgcccaacatccaggcctgtgctgctgcccaagaangaccagcgccaccgtggggccgaaggcgccctcgggcggcnagaaggncacccaggnctcccagtgagtactaatgaggtgccctgctgcctgtggccgggccgccatggcctccccaatgccacccacaaatgggcccttttaagtgtgccaccaaccgcccctcatggacaagagctgagcctgcttcagactgctgttgcaactgctggtgccgcggttcccgttccggcgg

SEQ ID NO: 566036 - DNA, 152 bp, Homo sapiens
atcatacatcacagcactaacaataacaaaagtaataaatcgagacggtccttcatatccggcgtatatgacttttctgactctgacctagggaaggcaccattatccccattttactgctaaggggaactctgctatgagatgttggaagg

SEQ ID NO: 566037 - DNA, 255 bp, Homo sapiens
ctcttgaggatccccggcgcccccgcaagacgagagggtatctgcttgaccgtggatccctggggatctactcctgagttcggagatctcctgctcgggccgcccctcctctgagcggagctttgtggcgctttaagcttacagggcaaggaaaagcctcgccccggcgtctgattcgcggtagccgcgcttgccgcagcctgggatttcctccacgggacccccccgtgagccgccgagtcttgcgtggggctg

SEQ ID NO: 566038 - DNA, 676 bp, Homo sapiens
ggatgggggataaggggtatatgtgggcaatctgtttgctccttttaaaagtaaacattgaataggctgttttaacatgcaaaaaattaatgttttgttcaagaacctcccaatgcctacgggtggaatgttcccccccatcaagcccggggattcggcagtcattacactttgcatagcatagtccaacattcgttgatcccactgcaggcgaacaccctggtcagccttttgaagtagaactgatcaatatagcttgacgagattacaagttacctattccaatgttgtcctgacagttaccatagatctgtctatgcagataagaagtaccgcgtgtctcttctgtgtataacgactaggcagctgttacaaatgcctaagagcagtcatagtgggacatctaaggtcctctgtaaacagttgattagcccacctcagccaaagtgtttcaacccggatttttttcgtttcatgggtctatgaagctgttaagttttttcaagaatggagtgtcccaaccttgagtccaactcaacacttaatgcaatgtcctgtcttgccaatttcttggaatgttaatgaaagccttttaatgtaattagcatggcgctcctcgggccctcacctccttccctggcccctccttgtttgactttaaaaaagggttgttctg

SEQ ID NO: 566039 - DNA, 294 bp, Homo sapiens
gcggcggcggcggcgggggaggggggggccctgccccccccccctccgtaacctttccccgggacctgtgccaagcctagcccttgtgatgcccccatgccccgagggccctttttcagttttggggggatgactccagtccctgcccgccctggccccccctttccggttgtttcccagggggccaagctccagcccgggccagaccccggggccccagggcctttgttttttttttgttccccgcctgccgggccccgggggaaataaacctgcccccgttgttgtttttta

SEQ ID NO: 566040 - DNA, 685 bp, Homo sapiens
ctgaggaagaccggaaagcttatggggccacgtgagccacggccacggcgcataggcaagtcgaccggaagctgccccggcggccgcggtacatgctggttggtctgcatcaccaccggatcaacgttcgacaaataccacccaggctactttgggaaagttggtatgaaggtcattaccacttaaacgaggaacccagagcttctgcccaatcgtgtccgaaccttgacatgattgtggagctctgtggtcatgtgaagcagacagcgggtgaatgcgtgcgtagagaagagcaagacatggggctgtctcccatcagttgatgtgagtgcgatcgggctactacaaagttctggtgaaagggaaagctcccgaaatgcagcctgtcatcgtgaaggccagattcttcagcagaagagctgacggacgaagattcaacagtgtcggcgggcggcctgtgtcctggtggcttgaagccacatggagggagtttcattacttgctaagctactcttgttcatagaatagaaggagccaatgccaagaaagcctcgtggcgtccttcttcctcggggctgcggtcaacaattcgcgtttgcgtgcatggcgctgtttggtgtgtcactcgcttgccttgccccggggttccgtggtgcccccagggggggattgttccaggggtcct

SEQ ID NO: 566041 - DNA, 382 bp, Homo sapiens
tttttgagagacggggtttccatatgttggccaggttgttcttgaactcctggcctgaggcaatcctcctgcctcagcttcccaaagtgtgaggattacagcaggagctacggtggtctgccaacgctcattagcattctaaatcacacacccaccaggggcatgatagtcccagaaacactgatatttggtgtaaaaatgggtggcatcacagtttgagaaatcactacttgcttccaagatttttcatgaatggggccgaggctgaagatttcactctaacatcccaaatttgggaatgtgagcggcttaataaggctttcatcaagacaagagcattctttttctcgtcgacgcggccgcgaatttagtagtagtaggc

SEQ ID NO: 566042 - DNA, 96 bp, Homo sapiens
aattcaagcttctaacgatgtacggggacatgacagtggggatttttttaaatgtctacattctttctaataaactgttggaagacaaaaaaaaaa

SEQ ID NO: 566043 - DNA, 134 bp, Homo sapiens
  misc_feature (44)..(44): n is a, c, g, or t
  misc_feature (46)..(46): n is a, c, g, or t
  misc_feature (53)..(53): n is a, c, g, or t
gcgacctgctcctgtgtatcctccacatgcactaaaaaatcaangnaaactcnacctcttaactctaacacctacaaatactttgttttgatcagtgtaaatcttgtttgctagtgaggcagtttcatgcctcc

SEQ ID NO: 566044 - DNA, 902 bp, Homo sapiens
  misc_feature (902)..(902): n is a, c, g, or t
agatattatactagcatataccatctcacttctagagaatactaatatatcgctcaggacctcgagtatcctaccctaatatgcctagaaggaatagtactatcgcagtccattatagctacctctcataggccctcaagatccattccctcttaggccattgattgtgcctatctgtcacggataactaagttcgtttaggcccgacctgtggaggacatgggttggaggctagcccctaacgttagtgctctagatgctcctagagcatcattattggactgaacagtgacggtgacatgaaggctatacacctaatctgcctaatgtctcataagatcttaaatcgtcgccgaaccaatttatgatttatttagcgaaatggatcatgagttgccacaagagaacacatagtttgaattcaacacaaatcgatccaacagggctatttcttaggtagtcattgcccctcgtactagtatttgttagattcgattgtgcagtcaggagacactattatagcttgttctccccaaacactatattgctcacgaccccgactaagcatgcccttcttcgtatttacataactggcttgagatcactaacctcttcaagaaactggaggggcaagcccaatggctactaatgccacgtgaaaccctactaattccaggaaagaagaatattgcattagccatcttcgttataacgtgaaatcttcacgctaatttaactcttccctgtaaaatttatggataatttcaaccaggcaacaagagaatacatcattgattgtcaatattccttgcttcgggaaatcgatcgaacttaatatcgcctagcgtgtgggatattcgatcaaccccgactgagggcacacaagggccaggaaaagcctn

SEQ ID NO: 566045 - DNA, 259 bp, Homo sapiens
atattttttaaagggattacctataatcagaaagacatcccacctgtcatagcaacaacaaccaaaaaaacagaaaacagtagatcagtactttcaaagtgctgacaaaaaggagttgtcaacatagaattttgcagtcatttaaagtagtgttaaggaataacgtacaaataaagatgttttcagacttatcaggactaagagagtttaaaatttatagatctcatgaaaagactattgaaggatgtatttcttgaag

SEQ ID NO: 566046 - DNA, 546 bp, Homo sapiens
atctcactatagtgtgtttcctaatgtctctgtcagataattccactgtgcatgttattgactgcttggtgtccactgaatggccatttgccataccagtggctatttttgcagcttatccttgaattctcagtaattccgatatgtaccctcaacatgtgaatgctatcttatgagactctgtgttatttgtatccaacacaatatgtttatatatttatttggctatctgtgaactgaggtcttaatatcagctcattttgtctttgcagtggtattcggatctatcctgtgtgtgcctatgagattgtgtgcagtgtatcctgttagctccattctcacggcgttcgaatgtgtattaagaccaccgcaatgaatgctcaagttaaggttgggcgcttgaactcatgtatggacactggaattttgcagtgcctataccttatcttgaactataactaaattgttacatttgaagaatcgtctttataaatgtaccagtatccttgacatccggtaatgttattatccggcacacattttatc

SEQ ID NO: 566047 - DNA, 223 bp, Homo sapiens
cgtctgactgacgtgcatagtctggactctttcaacttatccattctcctccccaaatcctgttatatctgcaaggaaccactttagagggttatctagcccagtcctgccttgcatgatccaggaaaccaaaatctcacagacacagctggccactgacacatgtgaccacgagcacatgtgcaccactgacacatgtgcaccactgacacgagagcaccgt

SEQ ID NO: 566048 - DNA, 372 bp, Homo sapiens
  misc_feature (67)..(67): n is a, c, g, or t
  misc_feature (97)..(97): n is a, c, g, or t
  misc_feature (235)..(235): n is a, c, g, or t
  misc_feature (256)..(256): n is a, c, g, or t
  misc_feature (278)..(278): n is a, c, g, or t
  misc_feature (289)..(289): n is a, c, g, or t
  misc_feature (306)..(306): n is a, c, g, or t
  misc_feature (310)..(310): n is a, c, g, or t
  misc_feature (316)..(316): n is a, c, g, or t
cccccgggtttacccgccccacatccagtttaaaccccgatatccagccaccattccccctgtccanccatccaaggtgttgggcctcagatttaanccttaattggatgtttaaagccatgtacctacccttgttacagttggtttagtgtagtggattattgacatgacatcatgagaagatgtgtaattttatacccacatttataaaacatgattttgttttctacccttncaaggtaacacattccgaatngcctggtcccttgtgtacttgnacatgcctccncgaatttgtagttgggnaatntaatanatctatatatgaaaatgtcaaaatcattttaaaagtattattttcaaataaaatgg

SEQ ID NO: 566049 - DNA, 220 bp, Homo sapiens
ctggaccctcatcattatacttcctcaacgctttatacttcctcaacggcttatacttctcaacgctttatacttcctcaacgctttatacttctcaacgctttatacttcctcaacgctttatactttctcaacgctttatacttcctcaacgctttatacttcccatttcatttcccggtatgaagtataaagcgtttagaaagtataaagcgtttag

SEQ ID NO: 566050 - DNA, 226 bp, Homo sapiens
cccaggtggcagagaactgcagcagacttcatggtgttaggggaacaggaacctaggagagccaggtgacatcgttttaaaatcaacaacccatcttgtgcgggcgcggtggctcaagcctgtaatcccagcagtttgggagaaaaaaattagccgggtgtggtggtgggcacctgtaatctcagctactcagggggctgaagcagaattgcttgaacccaggagg

SEQ ID NO: 566051 - DNA, 104 bp, Homo sapiens
gcccgtcgtggccgagcgggagaccaagtccgtcagcgtcgagggcacctacgacaccgacctgaccgaccgcaagctgatggccgcgctgctcacgcggcagg

SEQ ID NO: 566052 - DNA, 362 bp, Homo sapiens
tgatctagaggatcccttcgattggcgggcacttagtgaaagcccgtctctagtaaaaatacaaaatttagtcagacatggtgggcaggagagagcatgtgcaggcgaacatccatttataaaaccatcagacctcatgagacttattcactaccatgagaacagcatgggggaaactgcctccatgattcagttatctccacctggccccacccttgacacatgggaattgttacaattcaagatgagatttgggtgcggacagagccaaaccatataattcttccccggcccctcccaaatctcatgtcctcatatttcaaaagcaatcgtgccttcccctaagttgcccgccaatcgaa

SEQ ID NO: 566053 - DNA, 309 bp, Homo sapiens
aaattaaccccctaataaaattaattaaccgctcattcatcgaccttcccaccccatccaacaccttccgcatgatgaaacttcggctcaattccttggcggcggcctgattcttcaaattaaccaaaggctttttcctggcaatgacattattaacaaagaggcttaaacccgcccttttaataaatcgcccacatcactcgagacgtaaattatgggctgaatcatccgctacctacacgaccattcgctctcattatactatatctgtctctctctacacatcgcgcgaggtctatataacgcatc

SEQ ID NO: 566054 - DNA, 133 bp, Homo sapiens
tatctggctttgatcattcctagaactctttcgtttctaagagggagtccatttctttgcagtcagatccagcacttttttctggttggaaactcctctttgcctctatgtcttagccatacatccttagcag

SEQ ID NO: 566055 - DNA, 207 bp, Homo sapiens
gatccttactgtgtgtacgtgtcggactgttgtatgcgtagttgagacctggggatccttatcaattaatcgccaaagcgagtgtggaggacttcagcaagctgggggtggcgttcctggaagacagactgcagatggctaatgggctgatagcccaaaagatcgtttgtaagtaactttagaacatgtgtcatacgtgtgggtgtc

SEQ ID NO: 566056 - DNA, 1052 bp, Homo sapiens
caacccacccaccgactaatatattgaagcatgcatcctctcttactatttgtcatatcgaagagtcacacaagcacaacccatattctattgctttgtgcctctagacgttcactccgaaaactcataatatagtgtcccctcgtaaaatcatacatctcacactgtaccattctttttacccaccctccataaaattcccagtgcgtaaacacgcgcgaagtcctgaattctcactgcacgcggatatgctacctacgtcaccgtgaatagaagacctgcatatgcctctctaggtataataacttcctacctacatggtcgtctgttaaattatataacatagcataggtcggtgaactatctcatatatcactgtcttactttgaacagaagagttaatgctccaagcttggcgtactcaatcatccgagtgatggtaacgcacaggagagggcgtgaacgcaggaaaataattgcctatttcttagaatcctgaggtagcgactacgccaatatggactcaatgctatgcgatggtaattattacaacaaccctgacagcctaatggtcagcttaaataacttctaactcatatcaagtcttcaagggccaagaagctattcaagatctcctgcaagccatacactatgatgctggctgatgttaaaccaatacattgatcatgtagagaatgcctgcgttaatcacatccatggtatgatttccctaaaagggttgtgagaaaaacaactaccgcggatgcaaatagtatttaccgtgggtgtactaaaccaagaccgtgggaatatatcacgtgaacgtggtgtaacctgaatacccgaatcaacgtcccggtgtgtccggagcaatatgttcaggacagtgtgaaaaacccaagagggggatcataacgcaatgcgggggaggaacattacaacctgagggggaaacaaagaggaacaaaacaaagagaggcgggaaatagagacacggtaaaagagacacaaagacacctgacgctaccaccccaaacaataccctatctgag

SEQ ID NO: 566057 - DNA, 1285 bp, Homo sapiens
gcagcggtggcgagcctggtactgcggggaatggtgaatcctaggtccctgagctgatcacctccccccgcctccctggcccccgacatggtctcaggatgaagattggagctaagacctaggatgctgcctccggtgtacggggcgggatgctcctggcgggagtggacggtgtgcagacgagttgagtcggcaggtgggcctcacggaggtctaagcagcgcacccgcctgatcacatcggaccgtcagttgacacgttacgtccggtagttccaggtccgaaggcgccgagcctgccatggtcggaatcgagtcacaagcggattcccgagaccgccacggccttgcttgcctgtccgtgccttcccctgtccgcatgtcagctagcacgccgcttgcagccatatcgaaagcaagaagagggcatggacttgatcatagcgacgtatggacggtccacgaacgggatggtgcataccgggcaatgcagcataatggcctactctcctggacaggagggtttcagccttgagtgacaacgatcggtgcgcagaagatccgtgcttcccccaagtcgcgatcgatgtacattcactgtgtcactcgagcaaccggtcatcgcactcgggggcacttggggaagcagtgcttatcggcggcccattcctttgcgaacagtttcgtgtacaagtatgcaagcgggacttggcactccaaagacccgtaatttcccaagacaccaggcggaccccggattgttatccaccccgtgagaaaaggccaaggaagcccgccgtacgcagtcggccttgaggacccagagtcgttcctttgggacccacttgagccgccgacatcacttggtcgacacatgggacaacctcgtactattcacaagcccgagagagaattccaccaaggaggaacattagcactcgacgaatatgcgatagtcagtttccttagaacgcgttcggccaccgcagcacggttccagaaaatccctgtgacatggagcggagcaggggtaactcgtatggggaaattcacgcctttgtatgtgcgagaggcagccggtcgcgaggctgaccgcggaatagctcagtgggatacacgaccacactacatccgatcaagcggtcaagcgactattcacacgcgcgacttctcccgctggttcgtgatcacatgtcgcacaggggagcgttatgccaagtgtacatccaccgtcgagtgcaacattgtggtggctacaggggctgaaaccacagtgcgtcggcaaa

SEQ ID NO: 566058 - DNA, 92 bp, Homo sapiens
agttgcgggtccctcactcggcaacggaacgcaaatcagccacttagaattaaggctaagccctatactagaccaaggggacttaaacccac

SEQ ID NO: 566059 - DNA, 201 bp, Homo sapiens
aatgtggacacctttctgtatgtatgtacacttaaagaagaaaggttaatttaagataaatccagaatgaaagcctctttagtcaactattatgttatttatacccaataattatcttcactatcaagccatctgtgtgacctttggaaaatcacttaatgatctgtgtctatttcttttctttgaggggaaaagaccctg

SEQ ID NO: 566060 - DNA, 312 bp, Homo sapiens
taaaaaaaatgagggcatagggggggggaaataaagtctccctagcaaagtataaaacgacaaaagctatggttcccatgtgaataagattaaatatatataaaacaagtacactgactgtggggtaggttgggaggtgccggaggaggaaagtattggtgctaaaccaccagaaaaaggggctggggggagagggggcccccaattaaaccatcaacgggctgtgctgtccagtgagggcttataaaaaaaaagccgactgtttataaaagaaacggagttggatttgtctccggagcaggtggttaacgt

SEQ ID NO: 566061 - DNA, 755 bp, Homo sapiens
tgcatatttcatctgatatcaaatgtgacatttatagtgctaatctttacctcaagacttcacatctttctggtcgattgcatctttctaggctttatagcatgctaagctttgcatgaaaacaccatgggctgtcccatttcagtcaagaattaatgttcattgattgtgcttctgccctttcatgtcactattgtatgaatttgtcttatatgtttctattgcatgcggaagtaattgtatccaatcttctatataactcaggaatttactctcaaacaacactgtcaattagttacttatctctctggcaacatgatcgtgggacacactggatgagcggacacacgggaggcacacggggcaaaatctgaccacttaaatctaagcatattagattcattttatgctagaaatgtcctgaatgatgtgactttcgtctcttgtaacaatccacctcttctccatgagattcatggcccaacatcagtcactatacataatgagtgggtgacacgtgaactgcatttgcaatatagttcatatcattgctccatcttaactacgctagttcacaaacgtgtgcaatgacatattggtgatccatctcaaataaagaatacatggggaacagaatatgttctgtcctgtgacctttaaagtcttgcgaatattttacatctctgataatgggtgcgtttaataatgaacccttgatactcttggctatcgtatccacctatgcctttctccag

SEQ ID NO: 566062 - DNA, 151 bp, Homo sapiens
  misc_feature (15)..(15): n is a, c, g, or t
caattgtgcaggcanagggctctgaagggaatttttaattggggggcagggagcagttgtgtacgagggaggatttgggccctctggcttgtaggtgacctcttgtcagacaggggaaggtgcgttgctgatatcacagggagcctctaga

SEQ ID NO: 566063 - DNA, 476 bp, Homo sapiens
attccacctccgctaccataatcatcgctatccccaccggcgtcaaagtatttagctgactcgccacactccacgtgaagccatcatcgaaatgatctgctgcagtgctctgagccctaggatccatcttgtcttttcaccgtacgtggcctgacatgggatggtattgagcaaagtcatcactcagactatcgtatctacactgacacgtacgtacgtgtgtacgctcatctgtccactgatgtcgctatcgaactaggacgctggtcattgcgcccatcatcaggaaggcttccattcactgggatttcccctgattcgtcatggctacgacctcttgagaccataactaggccaaaatccattgcgatatcatatccatcggcgtaaatctaactttcttcccacaacactttctcggcccagtccggaatgccccgtacgttactcggtactaccccgtatgcatacaccat

SEQ ID NO: 566064 - DNA, 353 bp, Homo sapiens
ctgtgccgcaggaactgtggcctccaccgacacctgcttcttccctcacctcgcagactttcacacctgtggatctgacactctgtcccgctgtcgcccacgagtaacctaaggcttttggcctgattcgagctcacttcggctaaacctctaaatgccgtgcgaaattcgcatcaacttctctttacaggcatctttatacggaattcaacttgtgccccccacgtggtgtagctctgcttgtggttttgaataccggggcctctttgaatcagaagccctttgtgtagagataagtatcctttaagccacaatcaggctccatttttttcgcagtcccatttcctcccggt

SEQ ID NO: 566065 - DNA, 89 bp, Homo sapiens
  misc_feature (32)..(32): n is a, c, g, or t
tctcagtgagggccatccttgtacaatattcncacaggggtaaatagttacatgaccaacaggcacgacacctggatctagtactgtcc

SEQ ID NO: 566066 - DNA, 1424 bp, Homo sapiens
ctcttcttctctgtttgtgtggttgtcgtctgttgtgtttcttctgctgtcgtagtctgtgctgtgtcggtgctgtccttttgttctcatggctgctgctcctggttgcgggattgtgtgtgcgttctgttggtgcgtggtcggcgttcgttttctgtggtggtgtgctttggttgggtgctctgttcgcgggcggctgtgcgttgtgtcgctctctcgtcgtgccctgtgtttgttggttgccgtttgtcgcgtcgctggttctgttgtttccctgtcttgttgcgctgtcttctttgttgctatttgtgcgggggccggttctcttttctgtttgactgttctagtttggtgtgtgtgttagtggtttgatgtgtgttgtgttgtctttgtttgtagtgttttgtgtgttggtgttttcgttttctttgttttccttgagtgtgtgtttgtttgtctctgttggtgtctttcttgtttgttctgtggttttgtatgtggtcgtttgtgttgtggtgtgtttcgttggttggggggtggtgtgtttttgtttgtttgtgtgtttatgtgttgtggttgttttcgggttttgttgttgttgggtttttgtcccttttgcctgtgtatgtgggtttctgtagtgtcgtgttcgtccgcggctttgttgttgtctggggtggatgttggggggttctcgtgtgttgtcctgtgttgtgtgtttgcgggattgttttttgttttttgttcttttgtagttgtttatgttgatttggttgattggtttgtgtgtttcccgtgctgtcgtcggttatttttggcttgggtggttgttgcgttggtgtggtgtttggccgcgggggttggttttcctgtgtgcgcctccttgttcatgttttcttggtgtttggtccgttcgttgtatgtagccctgtggtcttgcgttgttgctctaccgctgttggtatgggtgttggtgcagggcgcggcggatgccgctgcggtgcccgttgtgtcgggagcttcgcgagtggcgtgttctcgtgccttgggctctctgttgctcttgccaagtcaagtttgtcttccccgtggtaccctgtattgtgttagcggtagtccccgtctcttgtggtggcaggtcaccgtgtagttgtatcgttttcctgtcaggttgtccgcgctgtctccggtacattccgggtccagcggtaccccttgagtgagaatgagtgtggatgtgtaccagttcacgctcctggacggcacgcgggagtctgggactttcccagtaccaatcagagacttcatctacctgttgagtctagttcggaatttttagtatgaatgtgagatttttctcctgacttgtcgaccttaagaatataataaacattcgtgatttatcagtaaaaaaacaaaaaaaa

SEQ ID NO: 566067 - DNA, 411 bp, Homo sapiens
  misc_feature (27)..(27): n is a, c, g, or t
  misc_feature (200)..(200): n is a, c, g, or t
tgaatgtattaatgcctcctgaattgnttcactttaaaaatagcctaagtttatgttatgtgaatctcccctttcattagggaaaaaaagccttttaaaaaagtattggcccaggtgcccatggcctcatacctgtaatccccagcactttgggaggccgaggcaggcacatcacctgaggtcaggagtttgagaccagncctgaggaacatggagaaaccccatctctccaaaaaaatacaaaattagccaggcgtggtggcgcatgcctgtaatcccagctatttgggaggctaaggcaggagaatcacttgaacccaggaggccgaggttgcagtgagttgagatcgcaccattgcactccagcctgggcaacaagagtgaaactccatcacacacgtccaaaaaaaa

SEQ ID NO: 566068 - DNA, 551 bp, Homo sapiens
  misc_feature (33)..(33): n is a, c, g, or t
  misc_feature (80)..(80): n is a, c, g, or t
  misc_feature (87)..(87): n is a, c, g, or t
  misc_feature (96)..(96): n is a, c, g, or t
  misc_feature (98)..(98): n is a, c, g, or t
  misc_feature (105)..(105): n is a, c, g, or t
  misc_feature (107)..(107): n is a, c, g, or t
  misc_feature (123)..(123): n is a, c, g, or t
  misc_feature (153)..(153): n is a, c, g, or t
  misc_feature (171)..(171): n is a, c, g, or t
  misc_feature (181)..(181): n is a, c, g, or t
  misc_feature (192)..(192): n is a, c, g, or t
  misc_feature (212)..(212): n is a, c, g, or t
  misc_feature (215)..(215): n is a, c, g, or t
  misc_feature (226)..(226): n is a, c, g, or t
  misc_feature (255)..(255): n is a, c, g, or t
  misc_feature (261)..(261): n is a, c, g, or t
  misc_feature (285)..(285): n is a, c, g, or t
  misc_feature (292)..(292): n is a, c, g, or t
  misc_feature (325)..(325): n is a, c, g, or t
  misc_feature (342)..(342): n is a, c, g, or t
  misc_feature (381)..(381): n is a, c, g, or t
  misc_feature (389)..(389): n is a, c, g, or t
  misc_feature (398)..(398): n is a, c, g, or t
  misc_feature (430)..(430): n is a, c, g, or t
  misc_feature (449)..(449): n is a, c, g, or t
  misc_feature (451)..(451): n is a, c, g, or t
  misc_feature (475)..(475): n is a, c, g, or t
  misc_feature (477)..(477): n is a, c, g, or t
  misc_feature (479)..(479): n is a, c, g, or t
  misc_feature (486)..(486): n is a, c, g, or t
  misc_feature (514)..(514): n is a, c, g, or t
tagatgactccattctgtgtagggggtcattcncatcttagctccagaacacggaggacctgaagattactcacggattnctccttnaggcagggntntgctttnanatgtggttgctctgtntctgtctccagggccctgaacaccagcctnaggctcttaccaggtgtntggacaggantccaggctccntgcaaagtcctgtggtaccncgngcaccggcagnccggcttatggatgtttttattgtgtgtntttttntagtgtgttttgttttataaagcngggaggntagtgtcgaaaatgaaaagggggttttttagantataattggctgtattnggttagtttatttgtattttggaagtagggagggtaganagggtagnagtgggggnggagattaaatggtaggtgaatggaatggtgnagtggtaagtagatggagngnttgaatgtttgtcacagatgttanantngaagggntttaactccgagtgggtgatgctgtgtngctgaaggtaggaaatgtaatcgaagaaccttgagca

SEQ ID NO: 566069 - DNA, 1226 bp, Homo sapiens
  misc_feature (317)..(317): n is a, c, g, or t
  misc_feature (414)..(414): n is a, c, g, or t
agcgggggccctcccggcccgcgtgaggccgcccgcgcccggcggcggcggcggcgcgcaaggggcccggcgttcgggaaccgagtaaggaacgcgaaggaaccaacggccacggagaggaagaagaggccgccagggcgtggacaggccacccaagaaaggaactcgagaagagcagagctggcggaagaggacacagagccgaggtctcatacggggaccaggcaacggctggctggcgagccgtggggtgtgggctgggagcgaatcttctggtgtaaaaagcgcataccatatgtgtggaaagcgcagatatnagaggggtatcttgggcatttggttggatatgggtggttgcatagggggaggaaggggggggcgcgaaaagagaggaccccccgggcaaaggcgtcntgcgaaagggggaagacgcaaacaaaccggatatgggtgtgaaagacaagggcgccaagacccgccaagagggttgtcgaccgggagcaccaatctccagagagaacccaagccgcttgtagaaagaggaaaggaggcgagaaattggagaagcccgcacattgggtgtgcggcccggcacattgaaacgacaataccgctggtgggtggcgccccccccccgggtgggatagcgctgggcggcaaaacaccgcccggaggagaaaaaccacagggttccacagaacacgtggtggatctcttacccttttcccggtgaaagtgtgtcgtgactagtgcaaaaggttgtgccccgtgaaacgtatttgtgacacttttccgctcttgcccgggaaaattttcctaatggggaagagccctgttgcccaagggggccctcacctggggagagcgaaagggatgtggccacagggagactgtgcgcgttgtgcccttgttgctttaagcgaaaaagggcttttgcgacaacgaagaaagttttaccaatagggctggtgcaatttggagcactggtgtgttggcccccagacggtatcgcttttcgcccttggggaacaccacaggaaatccgcggacgcgtggtagatctacgacggcgccagggtgcttgtgacacctatatgtgttgttcccccaagaaggcggagaattacaaagggggaaccccttggcgctttctcggggatgttgccccgggtggtttctccctgtgaagccttttccctgtggggaaaatattctcatgtgggagg

SEQ ID NO: 566070 - DNA, 181 bp, Homo sapiens
gaattatcatacggggcagctgcaaaggtgggggtcatttgcactgggtccagcgagaaggttttcctttgagttccaaggagcggcttcactcagaccctgaggctcacattcagatgctactggccgccgctttacacattcaagataccagctggaggacgaggacagccaccatcga

SEQ ID NO: 566071 - DNA, 227 bp, Homo sapiens
gggtgggggtttgcccctcccaacaaggcctttgtttcccttggaggggcccgtgtttttttcccccccgggtcccccccccccaaaaagccagggggtcctttggcattcccctttccatgtgcctttgggggggggggcctttttggttttttttttttttgtccccaaaggcccccacccctccctcccccaaacggggggtcaataaaccttttttgggcgga

SEQ ID NO: 566072 - DNA, 336 bp, Homo sapiens
  misc_feature (19)..(19): n is a, c, g, or t
  misc_feature (72)..(72): n is a, c, g, or t
  misc_feature (77)..(77): n is a, c, g, or t
  misc_feature (84)..(84): n is a, c, g, or t
  misc_feature (92)..(92): n is a, c, g, or t
  misc_feature (121)..(121): n is a, c, g, or t
  misc_feature (123)..(123): n is a, c, g, or t
  misc_feature (128)..(128): n is a, c, g, or t
  misc_feature (135)..(135): n is a, c, g, or t
  misc_feature (144)..(144): n is a, c, g, or t
  misc_feature (157)..(157): n is a, c, g, or t
  misc_feature (161)..(161): n is a, c, g, or t
  misc_feature (163)..(163): n is a, c, g, or t
  misc_feature (167)..(167): n is a, c, g, or t
  misc_feature (173)..(173): n is a, c, g, or t
  misc_feature (201)..(201): n is a, c, g, or t
  misc_feature (203)..(203): n is a, c, g, or t
  misc_feature (209)..(209): n is a, c, g, or t
  misc_feature (221)..(222): n is a, c, g, or t
  misc_feature (232)..(232): n is a, c, g, or t
  misc_feature (239)..(239): n is a, c, g, or t
  misc_feature (259)..(259): n is a, c, g, or t
  misc_feature (271)..(271): n is a, c, g, or t
  misc_feature (309)..(309): n is a, c, g, or t
acagaagatagcatttgtncagcttcttgggaactggatttgtttattaatgcattttatggccacatgtgnaagtnctaaggntctttgancaacttccttaaatgatgtaatatctttntnccaanaattggnctgggtgtnacacttgtatgcntttnanaggnactggnatgccttttcattttcatcaggcttttnantctgcncatttccatatnngtgggcatanagcctcnagatttctccatcatttgtnactcttgaagtnactctgccaaataactcctgcagctttcctttgaggcnagttgcaacatctccacttcgatcagt

SEQ ID NO: 566073 - DNA, 122 bp, Homo sapiens
  misc_feature (23)..(23): n is a, c, g, or t
  misc_feature (40)..(41): n is a, c, g, or t
  misc_feature (49)..(49): n is a, c, g, or t
actgcctgtacaccagcatttantgagcagcgccggtgannatgaagtntgggtcgagtgtttgggacggggtgagcggatgcgggaggcggcacggtgggccacgctaccatctatcttcc

SEQ ID NO: 566074 - DNA, 528 bp, Homo sapiens
  misc_feature (15)..(15): n is a, c, g, or t
  misc_feature (196)..(196): n is a, c, g, or t
  misc_feature (470)..(470): n is a, c, g, or t
  misc_feature (481)..(481): n is a, c, g, or t
taaggcacagacgtntctccctttcttatttgtacaccttttctcttggcatctcagttggcaagaatctttctccattcctctattccaagcctataaccattttcatttccctattccaaacctttagccatcttcccagccagagagtgccctatagccagagaacaccagggtgtgaaggcaccatttggtnaagcattcatatgttacagacagggacactgaggttgtagaagaggccaagtgaccggtggcagctctgggcctagagctcagagttcctgaatcctcccagatcctaggtcagaggtcttctcactttagctcccctggctttgagatttcaacctgctctgcttcctcactgtcccagattggggagattggactgactttgagagacagttttttgtgccatgaatctccagtcctctgcatctggcagtgggtgaaagtcctttgtaaangctgcctgcanaaggccaggcgggggttttttgacttccaaggagggcatcctgaagc

SEQ ID NO: 566075 - DNA, 443 bp, Homo sapiens
gcatacccataaccagactgattggtaccttcatttttcctaattgctagttcatctgattcattcagcttgtactgctagctgtctcgtccagatcttcctccgtgtcactgatgtttatatcttcttcatcttgatgctgggtctcatcttcatcctcactgctgctcgctgaggtcattgaatatctcccgaagctcatcatgttctaatgagtcatggccctgcctgtgaccagacattcctggagaagagatatccaggccttgattttctgcctcctttgtttcatcttcggcaattatttcccaccgagtactaacagcttcagcatctgtactcagcaatcgtttcacttctttttcaacatctggagattcaatatatttcttctttgctgtcttccggaaccttctcttcctgacattctttagaggcagagt

SEQ ID NO: 566076 - DNA, 541 bp, Homo sapiens
aatcagcataattagtccaaagctatgatctcagatgtaagaagaacagcaaaatcaaataatataataccaaatagaatcttctagtctctctgaggtactaactcatcagctacaaccacctaaaactgaaattatacagtaacatatagtttctattagtacaacaccttcattcttaatgcttcttagggcatcaaaggtatcagaaattaatgtattataaagcattccacagtaatgctcacttacaaacaactgcaatatacatctgcatgtaacactgacatacaacacataagtataaagacacacaatcaaacatatagactcaaataatacaatacaaaaagctacactggacataacaacacagaacttttgaatatccccttatacccaatagttaacaggtagtaacttttaatctaaagagcaagtgatgaaaaatccaaaatttctgcatccagtgtttgactccaactttctacttactcgactcctggatacaccatatcctagaatgagcggggtaaaattt

SEQ ID NO: 566077 - DNA, 214 bp, Homo sapiens
tcctagaggatcccgagcccgatcagtcggagaccatatgatatttttatggtacctgtttcaaaacatatttattctagtttttactagtagttgatgttaattaaactcttggcaatattatcttctttcttataggaaaatataccttaactttttttcttttacactgtgaaactatacactgtataacttctgttactcctctgttatt

SEQ ID NO: 566078 - DNA, 352 bp, Homo sapiens
  misc_feature (5)..(5): n is a, c, g, or t
  misc_feature (282)..(282): n is a, c, g, or t
  misc_feature (333)..(333): n is a, c, g, or t
  misc_feature (344)..(344): n is a, c, g, or t
cgatntcttgacctcttgatctgcctgccttggctcccaaagtgctgggattacaggtgtgagccatcacaccagccaacacacacacaaacaaccccacaactcattgaacagaaacccttgttgccaagggactccagagaaagtctgaaaactgagttcccagccatgactggacaggagcccagacacaccttgttatacccccttcctcactaaccaccatgaggctttcttcccaaagggctaaacaagcaatcagccctttggggaagactccancactgacatcaaccaagttgccaagactaatggccccttccaatttttttncgggtttccancaacaact

SEQ ID NO: 566079 - DNA, 274 bp, Homo sapiens
aggtcggggggtcgacgtccggcctggtggtcttacctggcggccccggtgcgggcaggtcggcatcctggtcagcctgcacgaccagcgcctgtacgtgctgcgcgatggcgtgatgatcggcgagtcgccgctgaaggccgacgccctgccggcgttccagggcaccaccctgttcgtgatggggcagggctacagcgatacgcccagcccgttggacgcgaaccagcgcctgcaccagtggacagcctatccgctgctgggccaggaccgt

SEQ ID NO: 566080 - DNA, 217 bp, Homo sapiens
gaaggttaacgtataagattatacatcatattttaaagtggctcagaatgcattttctggcatagtgtaaatatagactttaaaaaataaaacggttacattgttttttgaaatgtatcaagtggtatgtaaataccttaatgaatagataattaccacgcccaggtaatcttttggattttgatttatttatcaggtcgctcatactactggtggt

SEQ ID NO: 566081 - DNA, 306 bp, Homo sapiens
  misc_feature (166)..(166): n is a, c, g, or t
tgtgagctccttgataaatatccctccattcagaagagaggggactgtaagcttcaaccagagaagagatctgctcctatggacttcccaggagcaagacccctgcccctccaagggaaggccactcctcagggcattcctcctggtgtcacgaatgacctgcgtnttgagttctggcgctttgcacacttactggatggcgtgaaccttgagcgcagtcactgtaatctcgtttaatgcaaggcaggctcacatgtcaagtgaggctcacattgtacacaggaggctcacatgtgctgggttacc

SEQ ID NO: 566082 - DNA, 584 bp, Homo sapiens
  misc_feature (30)..(30): n is a, c, g, or t
  misc_feature (110)..(110): n is a, c, g, or t
gaagaaagctcgagggttctgggcctctcngcttctggagccaggggaaaaaattgccccaggctgaagacaggagggaccagattgctgcttggtgatgcgatctcacngcagaggcagccaggagaccctcctgagacgaatcggagagtccatgctgcttttacacacatcctagttcttttataactagccttttcctattaacggacatcattcaaaagccagttttaagcaacataaatattgaaaacaatactatactatttagaattaattataagttttgtttttaaagcctaaatcttttattgttgtttgaaccctgggcactgaagctaataatgtaacttttctcccttctttcttctttggcatagatttaaagaactgttagactcatttaaaatgctattaggcattttaaagagtaattgttaaatgtgttgtctcttgtgggactggaaatgttctgttcttatctggcgctggttacatcctgtttttcatttgggaaagtgcattgagctggaaatttatatgttcaatttctgtatgtaaattgtacttcagtaaaaattttc

SEQ ID NO: 566083 - DNA, 122 bp, Homo sapiens
tgggtatcattgttggttgattgttataagcttttgacgtacagtagggtccacagtttcccaaggttctggatttttttttcgatcaaggatcacatcggttttccaaagagaatacacag

SEQ ID NO: 566084 - DNA, 108 bp, Homo sapiens
aattaaatgactccgaggctgggacgtctttagaaggcaccgtgtctgcgccgttcggcaagttccaggcagacggtgaccatttgggagatcatcaactcggaatac

SEQ ID NO: 566085 - DNA, 433 bp, Homo sapiens
  misc_feature (136)..(136): n is a, c, g, or t
  misc_feature (192)..(193): n is a, c, g, or t
ggtaagctgatgatacggcactctagttcctaaaactgactgtagttgtcagtgaccgtgtgaggactccaggagaagtcgtggtgagatgcccgctaggatgcttgttttcatttcccagtgatgccttcaactngggcagaactcaggccattcttagagatcggcctacactaagggcagcttcgttgnnagaacacacagcattatttgagttaattggtgcaatctcctgctctggtttgcgagaccatttttgaaagggtttatcaaaacacatctctctatccaaaaaatgtggcagtaacaaatgacaactccttccaaggtaaacgcctgtcataaacttgtcactgtttgtactacatttaaacaaaagtcatcagcagtgttcattggacttgtagctgtacagcacccttcaagggggggt

SEQ ID NO: 566086 - DNA, 334 bp, Homo sapiens
gagacgactatttttaattcgaataatcttaaaaacacagtcatactgttcaattttactaggaactccccattactacaaccatcgctcctgtgaactacacaacctgacacgcatgagggatcgagcacgtgtacacacacagagttcttaaaatctgagccaggtttcaatcacaaagcatcgtaaactcatttctaaatatctaaagacagacaatgcctactgcagaaagagaacctgtcttataaacccaatcccaaaacatttaaaaatatttgggcgcctatattttgctagacttttattctacaatgagatagataaaaatggc

SEQ ID NO: 566087 - DNA, 1354 bp, Homo sapiens
  misc_feature (161)..(161): n is a, c, g, or t
  misc_feature (308)..(308): n is a, c, g, or t
  misc_feature (313)..(313): n is a, c, g, or t
  misc_feature (576)..(576): n is a, c, g, or t
  misc_feature (640)..(640): n is a, c, g, or t
gctcctcactttcaccggtaacaccacatgaagctgtgggaccagctgaatcagactgaggtcacagctctttcatgtcctcgttggtggcacttctctcttagctggcgagtgcacttgctgaggggcttggtgatccctgttcgtacgatgcgactagnagagatctcgcccggtgggcagcatgtctggcctagaaagaacagatgagaaacaaacatatgatcaacggatcgagcgcctaagctttgcccattatagcatcagctcatctataccagtcggagtgttagcttactgccgtatcnaatcncattgattacacagatcaagctgagagacttgaaagctaagatctcgaaatagcgcacacaaaataatcttgtcgttcgtctcgcctagaatgtagcgactttcggcataaactatggtcgtatcagacaatctaggctttcctactcacctcgcgtgtgtaatctcgggaaggacctagaaactatcatttcgaccagcaatggtatagactacaccttgcctaatgcgggtccgccaataggaacaacttttattcgagantcgcattacaaatcgcgcagagaaacttccggggtggatagggcctaccaagaaaatacgcaanagccatagggggccagtcccccagctgcaaaagtcgttcttcttcctctagttaaaccaccgttccaaagagccagttgtcaaccacgagaacccagcaaccacaagcgctttcccccagcctcttgaatatcgcgcatcgcgagcaccacctgggaggggcttggtaatcgctgcaagtgcgtgagcgagctcgcctttgtaatagcctttagggaaggcgggaattggaaagagttataggaaccgagttagggggatgagattcaaaaataacgttttgagttaatccgaaaatatctaagcacaaggccaatattcaacattgcttttaaaactttctgagtggggacccacaggggaaaaagtaaggggtataaacgagaaaaaaaggcaatgaattcaaaaggcgctggaatttaaaaaccggctctgggggcagtgaacaagggagcgggggaatacttggtgggggcacaacacgagtctctggctcggggcattttcaacagggggtccttagcagcgtaggccctttgtgtaacggacggcaagacaacgaacctaacggtaatttggaaaagcctttccctggggcgtcaggcagaacactcggcggaattacagtgtgcctttccgcaacacttggggcgccaaaaattcgggcgaaagaacgtaccacaccgtttgttggaacccgattcctacatcggca

SEQ ID NO: 566088 - DNA, 296 bp, Homo sapiens
ctttgatcctgaaaagatctgggtcagcaggtaagaatacaggaaatggtttgacatgttaattacagtaacaggaagaacacaaaggtagaaacctgtaatggaacgaggaatgaggatatgaaaatgcacacacctacctacaacagtgtagaccctgcctaaggagggccacaaatctggctctaaactagggatgtccaatctttttgcttccctgggacacactggaagaagaactgtcctgggccacacataaaatacactaacactaactacagctgatgagcttaaaa

SEQ ID NO: 566089 - DNA, 364 bp, Homo sapiens
gcccactggccagtgcatccaaaacacattcaggaaacccgagagttgtaagttagcacatgtgtggaccatacagatgacttccatgtagataacagggctgagcaaggcaggactctccaccagacattaaagacattcaaaccaactcatgacccccaggaccgaacacatgacatcgtgttcacatgatcgactgccacagcatggccacctgtgttcagtctccatgaaggattcaccttcatgctctcactgacatctacctatggctacacaaatgtgcaggtgtctcattgtcaaagctaatatttcttattctaaataaacatcctttaatacacatcaaaaaaacaacaaaaag

SEQ ID NO: 566090 - DNA, 289 bp, Homo sapiens
aggtgggaggatagcttgaacccaggaggttgaggagcttgatgctgcagtgagattgtgccactgcactccagcatgggtgacatagcaagactgcctcagggggaaaaaaaaaaaaaaacaccaaaaaaaaaggtatatggaccctagttttggccaggctgtaatcccagcactttggtaggcccaggcaggaggatcacttgagcctaggagttggagaccagcttgaacaacatggtaagacacttgtctctactaaaaaaataataataaataagtatcttgg

SEQ ID NO: 566091 - DNA, 336 bp, Homo sapiens
cccaaattaagttttttggtttgattgcccaccattaaattttttaaagcagttctgatttttggctggactaaaactgtgtcttaatgtatgtgagaaggacctaaaaattttaatccatgtggtcccccccctttttttttttttttgcattgtatgtcaaaagcgcttgttctttcgggcatgtgtaagatttaatggttccattgtattatttgcccatgacattttggagaaacattcccagctgtaatgttgggtatggtagttctccctggatgctagagttttcaaaacccctattcttttaataaattttgccgtgaaaaactgtta

SEQ ID NO: 566092 - DNA, 380 bp, Homo sapiens
  misc_feature (178)..(178): n is a, c, g, or t
  misc_feature (274)..(274): n is a, c, g, or t
  misc_feature (280)..(280): n is a, c, g, or t
  misc_feature (288)..(288): n is a, c, g, or t
  misc_feature (336)..(336): n is a, c, g, or t
tgacctgtaagatagaagcatgaactaagataatgtccctgtgtaagcttcttttacatgagagaaataaactgtgtgtataaatcattgttattttgaattcccaagttgtatgcaggcaaagtgtaatcccagatctagccaggatattggtattattcattgataatgagcttcnatatattcagtgttgacatgttttcctttgatttggcccccatgatgatatggtatttgtgaccaatgacctgtgtaggctatccatgtgtacttnggctcncctatagngagaatccatggatgaaaatggaatgattacagtaggcagcctcctgnagccaatgatacggtatagtgtagggtaggtatgatgaaggacg

SEQ ID NO: 566093 - DNA, 293 bp, Homo sapiens
acccccctcagactgcgcccgatcagcacaggtatctacaaagaagtctgctctgttcctcacaccagctctcagtacctatagcagggcatgaactgatgttccatttttcaaaaatgcacattgtcaagacattcatcggaaaagtgctgccgggctgtcgataccctttggtgtatagcataagctctcccccaaccatcccgatcccttggcacgccacatgcactaagatcaaccctgctatcacaccttgcagagcaactatctggctacgtcagcataacgagccc

SEQ ID NO: 566094 - DNA, 979 bp, Homo sapiens
  misc_feature (337)..(337): n is a, c, g, or t
tattgatggattataactatctccaacattgtggtggccgtgtaggtgctgccttctaatcgtacgatagcatatcatgagacctagtatcatcgcgctagcttcatcatctgtccatcgttcggcgaaagttggtgctgatctattacctgtacgatcatacccattgggattctcccgtaggtctttgaaattcctgttcgagaatgtcctctgcgtctctagagcgtgagatgaatcggatggtcttgcctcgttctatcgaatcttagtgtgtggcctaacccatgacatgaatcttggatcgtacatgaaatatatattcttcccacgtgantctccaaatgaaatatggatataggatctaactgtgttgtgctgttttgttccgtatattgaggcttatcgcgcttgtgaacgttcctgtggcttgcatgtcacgcgggttgcttgcttgccttgtatggaacgaatgtcttgctggtcgcgtggtccaaggagctgtcggatcgaccatggttgtagtacatgtcttagtgtgtatttgacctgcacggcccggagttcttatggcagtctataggtgcttcttttgattccctatatgccctaggcaaatggtgctgccgcttgatctagtccgttacgaaatgtgtatcgcccgtcaacgggttgtcccgtataccgtccgttgctgggtgatgcctgccctgggagaccactctggctcgtgtgtcggacctgcggcctatgtttcgatttgctgagctctatgtcgaacccttgcagtcatcttgccagatcaaactggttatcgtgtcccttgctgatttttggtgcgctcttgccgtttccctggatgtacggtcaggttgggcggggggacctggaccgcagttggttcagtctagtgcacgggggtgcgggggaccggggtaaattcccctgcgccctttgtgggggtgccccccgttttgtg

SEQ ID NO: 566095 - DNA, 263 bp, Homo sapiens
acaggatcatatttattccacttttggcccggggaccacgttggagaagaaacgaactgggggtggaccatttggctttattttcccgccctttgaggaacagttgaaatctggaactgcctttggtgggtgcctgctgaataacttctattccaaagaggccaaactaccctggaagggggataacgcccttcaatcgggtaacttccaggagagtgtcacagagccggacagcaaggacaggccctacagcctcagcagca

SEQ ID NO: 566096 - DNA, 252 bp, Homo sapiens
aaaaaggaggatgaggatgaggactaggatgaagataaggatgaacggcacgatactgggtagaattgacgaaggaactggagagggatcctgcttctgtcagaccgagaccggctccgctcggaggtgaaggctggtatggagcgggaactgggaatcatcatccaggatacagagatagagctggacccagatcggcttgacagaaggagtcatagctgcttcctgctttgtaggatctccacatctcct

SEQ ID NO: 566097 - DNA, 784 bp, Homo sapiens
agcgggtttatctcgttggggactaaggcgtcggttggcgcgcaacggtgttctagcgctgctaggcagcatcgaggacgccgcgggcccgccccggctcgagcgctgggagatagcagaggcagcaggccgtgtcctgggggggcatgtatgctgtaactcagtggtcccaggcgatgttacggtggactagtgcacctggtagggcgggccccgcagggtgaaccatgctgcagctggctgtcgggcatcgtggttatactccttcgggggttacgtgctctggtgaagactatgagagactgggtcagatagatgtgcacatgttcaatgcagtgtccttgcgttggacaaagctggccccggtgaagtctgccatccgtgggcaagctcctgtggtagcctacatgcgctatggagcactcgaatgcgtgcctctatcgacgacacagtgctcctgttggggcgggcggaatgacatccgaaggggtcctgcaatgtgctctatgcctttgacgtcagcggactgtttttccaagtgacatgcagcaagctagataccagcgaccatgacatggactcttatctgtgcaaagggcaggcctgcacgctggagggacttccactcaggcacaatgctgggaagtcacatgtatgtcgttgggggccgtgccgatcgtttgggcatgccattccaacaatgagattactgaaccgcatacgagtctatgacacagaactgaggcttggctggactgtccccgactcagtgctgcttgagggc

SEQ ID NO: 566098 - DNA, 751 bp, Homo sapiens
gtgaggcggctgtggaaggctgagtgagctcaagcccggacaatcccacgttcctgggcggagcctgaccctgcagcgtacctgggaagcgaaaccggcggatgggccgctgagcccgaatcgggcactgtgtggagccccctggagctgagatcaggatgttccgcttcatgagggactgtggagcctgagtgatcccatgttcctgatggcatccctttgctattcacctgtcagcatattgagccgtatgtttgtcacggtggcttttggatatagccccttcctcagcttcacagatggcgacattgccaagggaccagtgccttgcccagccggcggggatgcgacgcaggctggaagcttgtctccccctttgggatgctggcgaatgtcgggtggtttcatggacatgtctggggatggatgaatgacctgatctggaaacatggaacacattgacacgcttgggaggcaattgccagaccttctcatcattccacatgtcatctccttactccaatacgggtgatggtagccccccaaggtctaccaagagacatcacgagactgccgctcggcaccccagggcgggactccgggcagacaagggaggaactgttcgcggattcacaccgtgggcactgtccgccgattgtacattggcccattcacaatccggggcacagggctcaattccttcagcgctccccgaacaccaatcgccacggggtgaccagtgcaggcagcg

SEQ ID NO: 566099 - DNA, 253 bp, Homo sapiens
gcacgagaagaagtttattttggttcacagttctgcaggctgtacaggaagcatggtgctagcatctgcttctggtaagggcctaaggaagcttccagtcatggcagaaggccaagggtgtgcagacctatcacgtggtgagaaagggaacgagagagagaggggagagatgccacactctttttaaacaaccagacctcatgtaaactcattgccacttattattgtggggtaggcaccaagccattcatga

SEQ ID NO: 566100 - DNA, 494 bp, Homo sapiens
tccctgtttaagcttccctcttgatgaacattcttacagattgtggtccacagatgacctgcatcagaatggcttgtgatatggttaaaaatatagactctcagagaggattgtaggaagatggcagagtagcaagcaccaggaacttttctccttacctagacaataattgcacgggcagaatctgtctgatacaactatttgggagttcaggagtctatggaaggcttgcaaatttcagggacagctgggacaataaagtacagttaatttcagtcagtttcaggccttagcacagtaacagcttctccattcttccctgccaaccaagcccatgacaagcagctgtgcatatgtgtccccgaaaaactggcacacagcttataggagccagggtgagcaaagaggaacctttcctccaaataatgggatccatgctgtggtcactgagtgctgcttctgatcacagaagtacagacaaagaggcagcagtc

SEQ ID NO: 566101 - DNA, 474 bp, Homo sapiens
tagaggatccccaagcttttaccgcctgtataattaacgtaattcttagctttcttggattaggctgcaatggattcctgcatctcaatgatcttcgttccttccacattctgaattatttttctgtcatttcagccatctcagcccagttcagaacccttgctggagaggtagtgtcatcatttggaagaatgaaggcactctggcttttgtgttgtcagggttcttgtgcttgttttttctcatctttaggagctgatgttccttcagtctttaaagtggctgccctttggattttttggtatcttttattcaatttatgctcttgagggtttgactgtggtataaggtgggttcagtcaactggcttcacatctctaagattttagagagttaaggctccactcccaactcttggactgcatgttctaactctggggaacttgtatcaggccttgaattcgttttctggct

SEQ ID NO: 566102 - DNA, 265 bp, Homo sapiens
tatctcttgtacataatgcaacaaaaaaacatttaaaaaataaattagaaagctacaacacagagataatgggccctctggttacaagggatcccagcattctagttcagccacctgtgacagattagactttgacataatcagctccagtgaagggaactctctcctgagggagcccattctatttttggagaacttttgtaaggtccctccttgtactgacccttgaatccttctctctgcaattcttgccaattagtccaag

SEQ ID NO: 566103 - DNA, 150 bp, Homo sapiens
cactgtctcacgttttcatatacagccagatcaggttagagcttagcttatgacagatggaggatattcaggagactaggggctctcagctggtcgtattcttcacctggactgggccacttagctttgggggtgagtgctggggagact

SEQ ID NO: 566104 - DNA, 178 bp, Homo sapiens
agtgatctaatataaacataaaactttaaagggtagtttacagggatttttgtgtaactctctatgttgatatttaaacttaaaagagaaaagttgcaagaacagaacagggaactttcttattccttttacacagattccctaattgtttacatttcccccatccgccttatgtatt

SEQ ID NO: 566105 - DNA, 273 bp, Homo sapiens
  misc_feature (138)..(138): n is a, c, g, or t
tttagatcaaacctgttgtcctcagggctgtagttctcgggtggtacgccgtgtgagcgggtatcttgtgtctgttcatggagtacttggagaaaagccgttactttgtcagcgacctgtctcggggtgcagatggtntccatgccgaggagttgcaaacatgctgagggccatttggcaccttctgagtttccataacgaagctccgatatgtatcccattcttctcgtggctggaccctgtcataccaaggctcacttgcgggcgggccac

SEQ ID NO: 566106 - DNA, 1546 bp, Homo sapiens
  misc_feature (272)..(272): n is a, c, g, or t
  misc_feature (1275)..(1275): n is a, c, g, or t
acgtgaatgatgactcccttacctggctgaacgatccctgtcccctgctctgatgctgcactcacccgtctgtgctgaatttcaatgatgctgtccgttgccatgctgtgccctgctgtgtgctgcccaatgttacttttcttcaacgtgtctatacttgtgactcatcgtgactctctctcgtgtgtgcattgagttgaatcgtgaatgacaattttcactgacttgaccaagctgcccctgccctcccctcctgtcctatcaacctgtgnaacggtgttgtgctacctcccttgttgcttgtgttgtccctcatcgataatctccccaaaccctgatcgattgtgccccccttccatgctccactgatggccttcgttgtgcatgacaccttgtgcctgccattccatgacccccatcgcttttacccttccatttttgcccaaaccctgaatgatgtgaaccaatgctgtgccaatttgtgtgtgacctccaattgtgcctctcatcccttttacgcataccccttacaattgttgtcccattgcatgcccaaatagacgacactcttgtgatgccccttgatcgaacatgatacacccctgacgtcaccgtacggttgtcaacttgcagtgctggcgatgctgtgcccatctgccaacgcgatccacgcaccacagcatgtttgatgccattgggcctgcttgtgtgtgtgccaacatgtgacctttggttgtgccccgcttccaaatggcttgggaatgctgcccaaccctttgtgcccgtgattacagaagatgctccttcctacaccttcgattgacccatgcgaagcttgtgaagaagttaccaagtcttggggtggacctctgtgaactgaagtgagggacacccatttgatgcatggtgttccatgacaagccttcccactggtgaagcacagaaggcaagatggcccagttcccctgaccattcccttttaaacgcaggcccaaacctgggaccgtgccgaaaaagtggaaacgccaaagaatggcccaaccccccgcccttagtgaacgaactgtgaccggttcaattccctttccaggccaagccgtgatccacaccaggaattatccccgcgaaatatgggtccttccttcaaagatattcacattccacacacggcgccacactgccaaacacagccactgccacgatacggtaaccaacacatatacccggggcgaaaattctcatccaactggtgtttgggtgcacaaaagtcgacancgacagccgtcgggacaacacgcgtaagggcaatacatcacaatggggcaccccacacaagtcaaacggcgtctggagccatagtatcatagagcgcgacacgcaaccatttgaaacccaggaggacagaagcacatacacccggcctacaagaacatgaacaacttacgcaaacactagcagcacaatatcaccgtagcccgaccgccgccagtctcttacacccaagctgcacacaccgtgacgcagcgacaacaggagcggacacacg

SEQ ID NO: 566107 - DNA, 139 bp, Homo sapiens
tgactttcagcctgcgagccttcttcccagggcgccataacgccccaattccctactgctaaagtagagtggtcttgactagacatgtctcagatagtgacttctcgattcccgacgatctacggccgagactgactac

SEQ ID NO: 566108 - DNA, 111 bp, Homo sapiens
  misc_feature (64)..(64): n is a, c, g, or t
ataagctggaggctgagcagctgtagttactttgtggcatggatccccaacaatgtcaagacangcgtctgtgacatcccacgctcgtgggctcaagatggcagtcacctt

SEQ ID NO: 566109 - DNA, 338 bp, Homo sapiens
  misc_feature (306)..(306): n is a, c, g, or t
cagtggtgctgagccgcctggcgctcatggccttcagcgtgggctggccactggccgaaggtctgcaacaacttccgctggtgtttgtctcccgtcacggcgaaaccccgcgcaccctcgatattctcagcgacctggccaacgacgagccgctgtcgccgacccagttcagcctgtcggtgcataacgcggtgattggcctgtggtcgatcctgcgcaatgaaaccagtgaaatgactgccctcgccgccgccggcgacggcctggaacacggtatgctcgaagccgcggcccttttgaatgaangcccaccggctgtattgctgatcattaccgaa

SEQ ID NO: 566110 - DNA, 441 bp, Homo sapiens
  misc_feature (71)..(71): n is a, c, g, or t
ctcagaggttcccgagtggcagtgtcttcttgtcaacggccttgtattagtgatagtatcttgtctctttnccgtactctagtgcacagcagagacattgagtataccattggcatcatgtcaaagtgacttcaatctgaggaacacctcgggctgcaggaggtatgctgtgagttcaacttgccagcaggttgttatcttgtcatggacgctcgccttcataaactgaataagcacaccaggctggttgtcagaataggtagtgaaggtctgtgtctgcttggtaggaatggtggtattacgcttgatgaggacagtcatgactccaccagcagtttcaataccaagggaaagaggagtgacatccaagagcagcaaatcttgaacattctcagacttgtctccagacaagatggctgcctggacagctgcaccataagc

SEQ ID NO: 566111 - DNA, 326 bp, Homo sapiens
  misc_feature (13)..(13): n is a, c, g, or t
  misc_feature (153)..(153): n is a, c, g, or t
  misc_feature (173)..(173): n is a, c, g, or t
  misc_feature (181)..(181): n is a, c, g, or t
  misc_feature (210)..(210): n is a, c, g, or t
  misc_feature (213)..(213): n is a, c, g, or t
ttggtgctaaccnagctgcttcggccttcaaggtgacctccctccccacggatcctgctctccgggtggaagagcagctttctgtctcccagaaggcatcgcttttccctcttgagcagatcggagcccctgggaggtttggaagctgcctcnaagcctaggacacggaccgnttgccggnggcgtctggcccctgacgctggctgagancangccgtggggcggggttttggggcgtgaacaaggctggcagtaagtggacaagctgctcccctgctaagccctgccctgccctcagccagaggtgccatgccatgcctgcacac

SEQ ID NO: 566112 - DNA, 238 bp, Homo sapiens
  misc_feature (28)..(28): n is a, c, g, or t
  misc_feature (62)..(62): n is a, c, g, or t
  misc_feature (64)..(64): n is a, c, g, or t
  misc_feature (106)..(106): n is a, c, g, or t
  misc_feature (116)..(116): n is a, c, g, or t
  misc_feature (196)..(196): n is a, c, g, or t
  misc_feature (199)..(199): n is a, c, g, or t
  misc_feature (228)..(228): n is a, c, g, or t
tcaaaacaaaaaaagtaggcctttcccntttttttgggggggggggggggggggcagggctntnccctctttaaaggcatttacttgtttaacccttgtccagctncagtgggggncagtagctggctattcccaggcatcatcatagccccctagtttcatattattttccttttgagaaattggaaactctttntgntgctattatattaaaaaagttggggtttnttttttggta

SEQ ID NO: 566113 - DNA, 419 bp, Homo sapiens
  misc_feature (102)..(102): n is a, c, g, or t
  misc_feature (245)..(245): n is a, c, g, or t
taggagctgctgtgagaattaactaaaattaaaaaacccaacaaaatgacaggcagttagatagactgaaatcttttctctttaagagttgtgcttatggcntgagtgcagtgggtcatgcctataatttcagcactttgggaggccgaggtgggaggatcacttgagcccagcagttcaagaccagcccagagcaacatggcaaaaccccaactctacaaaaaatacaaaaaaattagcttggnatgctggtgcatgcttgtagtcccagctactagggaggctgaggtgggaggatcatgtgaacctggggaagttgaggctacagtgagccatgatctcaccactgcactccagcctgctgggcaacagagtgagaccctgcttcaaaagaaaaaaaaaaagtcgtgctatgaatt

SEQ ID NO: 566114 - DNA, 186 bp, Homo sapiens
  misc_feature (44)..(45): n is a, c, g, or t
  misc_feature (158)..(158): n is a, c, g, or t
aataggtgttaggatatgtataaatcttggcttaaaaaaacagnnggataatggaaccattcacagagataatgaacacaggaggacgaacaaaacaaattggggtgtgggttggaaggtgcaccaatggtaggggagttgactgcagtatagaacanctttatttaactatatacttatttttgg

SEQ ID NO: 566115 - DNA, 557 bp, Homo sapiens
aatcctctccccagggcatgaacagaagcttaatgtttacaatgtgcttgaattgtgatctgaaataacacaaaattaaaaacatgatttctctaattttccaactagaggaagagaaacttgtggaaaagttctttttttttcttttttttttcttaaagaagggcagccaaggtagtaacctaaaaatagtgcccaggcatatgagagtggtcctacgaggttaaagaacacacgtgtccactgtatggcttgggccctgagtggccaggaggtcaacttgaccctgccagtgtgcggttggacttactaagacacaggaatcatggttttccttgaccagggtctcacaccctggaggaactgttacgtacacagaaagaacctctttcctgaatatggacatgtcaaaggaccaaagtaattttctggaactctctgcaattctggagaagtctccaaggcaatctaccggggatccaagggctgtgtcacgccatttttccatgaggactttcatacattggactctctcagtcacaggttccattgatgtg

SEQ ID NO: 566116 - DNA, 1645 bp, Homo sapiens
ggttcctatgttctgtcgtgggttccttgtcggtgttagtctctggtgtgggttcttctctctctctggttttttccgttggttcgtttgcagttgcgtctgtgttggtcacttttctttgcttcgtgtgtggttgttgttgtgttttgcttagtggttttgctatgtttgctctatttttgttgtctcggttttgctttgtgtcatcgtcactgtttttctgtcttgtcttttttgtccctctttgtttcttttgcctctctgtctacgatggtctttgcagctgttccctctcgctgtgctctgtttgcgatcctacgtacttgtcccgactcgtgtatatcgtgagcttgtgtttggtatttatgtttattattgtgtatatgttgttgtttgtgtggttgttattgcaatttgtctattagttttttattgtctttgtttgttttttgttttgtgttgttatgttttgttgttttttttgttgaattagaggtttagtgttggtcatgatgtgattttggttttatttttgttgtggttcgattgtttgttttgattggccgtgctacatccaattcgtttgtgattctttctgtggtgccttgtttgcttctgtactgctcctatctttccgtgagtgggtgccccgcctagcgctagtgtctacgctattcgcttatcgaatcagtattgctatctctgtttggtactgttatacgcttagtgtcgttccctagtgattggccgctgccgattttcttcccttctggtcgtgcttaacagttactgtgtcttggtgtcctcgcagtttgattcctctgatgaagccactgtcgtcttgttctcactctgttttagtccgttctttcccctatccggcctctcctgtgttcctctgttttatgtttggtaccgtcttgtttgtgagtatccttgtgtagtctcttgtgccacttatgatcttgtttgcctaagtcagtgtgtctgtgttggcggcgcgtgatcctatgcgcatgcagatgctttacatgtgctcagtccattgtgtagcgttcggtgcgatcgggtttggtcacctctctagaggctcattaaatctggtgactcttgtgacgctaattggaagtaggtacgtggtagggtacttggcgacagtctgttgctcgtggtgtgtgttagtcgtatcttcgctgttgattcttctctggccactctgtatggtaatggcgcttgggcaattgtgcacttgcaagctctctcgggtccgtcctgtcatcaccaacgtatccatctgatggtggtctttgctccaagctgagccgtggtggctactatcagcatagcagtcattggtgtcctgttgtgcgacaccctagactactcagccagctgctgcctatacctgccctggcctattgtgcactgttttgagggggcactaggcaccacacagtcctgggagttggggagatgggtctctgctggtctcacccagcttctctgagttcatgttccgcgtgcactgaactgaatatgtcaccttgctcccaagtacacggccctctctaggaagctcccggagtccccgcctctctcctccgcccacagggttcgtggctacagtacttcgtgggactccccg

SEQ ID NO: 566117 - DNA, 453 bp, Homo sapiens
  misc_feature (453)..(453): n is a, c, g, or t
tttttttacttatgattcgtccgacaaactgggtcgtggacttacctggcccgcgctactccatcttttggcctggaggctattcagcgtgctccaaagatttaggcttactcacgtcattcagcagaaaatggatagtcaaaactcccgaattgctatgcgtctgggtttcatccatccgacattgaagatgacttactggagaatggacagagagatgaaaaagcggtgcatacagacttgcctttcagcaaggactgggctttctatctcttgtactacactgcaattacccccactgaagttaagtgggatcgagacgtgtaagcagcattattgaggtttgaagatgcccgatttggattggatgaattcaaattttgcttgttcgtttttaatatgaaatgctatacacttacctttatgcacaaatgtagggtataataatgttan

SEQ ID NO: 566118 - DNA, 1079 bp, Homo sapiens
  misc_feature (210)..(210): n is a, c, g, or t
  misc_feature (259)..(259): n is a, c, g, or t
  misc_feature (269)..(269): n is a, c, g, or t
  misc_feature (271)..(271): n is a, c, g, or t
  misc_feature (283)..(283): n is a, c, g, or t
  misc_feature (296)..(296): n is a, c, g, or t
  misc_feature (298)..(298): n is a, c, g, or t
  misc_feature (323)..(323): n is a, c, g, or t
  misc_feature (326)..(326): n is a, c, g, or t
  misc_feature (333)..(333): n is a, c, g, or t
  misc_feature (359)..(359): n is a, c, g, or t
  misc_feature (361)..(361): n is a, c, g, or t
  misc_feature (370)..(370): n is a, c, g, or t
gacgacaggccttgaggcccagcgctagctacccaggctctgtccagcagtgtaagctccagcaagctgttctccagcagcactgcttcctcatgagacctcctttggagaaagaggtggaggtgcacagatcgtacttgatcattgacctaactacagccatttgagagtgcgtcatgcccaccaggtttctgcagaatgaatatgccnctcaggtctgagtttcgcttgcaaggcatgtggctaaagaccccaacanttacttcatngngggcacagcaanggtgtatcctgangnggcagagcccaagcagggtcgcatngtngtctttnagtattcggatggaaaactacagacngnggctgaaanggaagtgaacggggccgtgtactctatggtggaatttaacgggaagctgttagccagcatcaatagcacggtgcggctctatgagtggacaacagagaaggagctgcgcactgagtgcaaccactacaacaacatcatggccctctacctgaagaccaagggcgacttcatcctggtgggcgaccttatgcgctcagtgctgctgcttgcctacaagcccatggaaggaaactttgaagagattgctcgagactttaatcccaactggatgagtgctgtggaaatcttggatgatgacaatttttctggggggctgaacactgccctataaacatcgctagagatgtcacaaaaggatagcgctgccaccacttgcctcaaggagccggcaacaccttccaagaagagcagaacatcaaccaccatcggagcacactctggcaaaaaggcatcgccacaggatcacccggcaactagcaacaactcccagggcaacgaactaaccacccgaaacgacagggcacaggaggccccacagcagaacggcaaccagcgacgcgcaacacgcgactccagacaaccccttgcccagaacacgcaatgagcaaacacatcacagcatgaaaacagcgaaaaccgaaccacaaccaggccacaccagcgtcggaaacaccacaagcgcacattagggacaccacaaacacacgcg

SEQ ID NO: 566119 - DNA, 701 bp, Homo sapiens
gctcccagccatggcgtcacgttcgcggcttctgctacatgctggcgctgcttgctcactgccgcgctcatcttcttcgccattggcacattatacgcattctgatgagctgaagactgattacaagaatcctatagaccagttgtaataccctgaatccccttgtactcccagagtaccctcatccaccgcttccttcgtgtgtcatgtctcttgtgtgccagcagagtggcttacacttgggttctcaattattgccccttcttgggcatcattcatacttgcggaggtactatgagtagaccagctgactgagttgggcccaggaccttcctatgacccctacaaaccattccattgaaatttgcagattatctctaagcattatgtgtcagaagggacaggcgactggtggcacaatttcacagctctcttgcatcccttttctagcccatttctcttttataccttaaccctttatttattgggcaatgtgattccctactagttcctgggggatgcgaggccctccttaacgacaccacacccccacccaaggaaccggacactgtgggcccccaggttaaacggcgcccatttgcagagaaaagaggcccaacccaaaaattgaccgggggactcccttatcccacgccaaggaatcccggttcccaaagaacttaggcccggtggaatctctg

SEQ ID NO: 566120 - DNA, 772 bp, Homo sapiens
tagttcgcggctaatatcgaggacaatctcattctcgtactcgtcgatgaaacctgtgtaaattgtgatcgctagggccgtgtactctatggtggaatttaacgggaagctgttagccagcatcaatagcacggtgcggctctatgagtggacaacagagaaggagctgcgcactgagtgcaaccactacaacaacatcatggccctctacctgaagaccaagggcgacttcatcctggtgggcgaccttatgcgctcagtgctgctgcttgcctacaagcccatggaaggaaactttgaagagattgctcgagactttaatcccaactggatgagtgctgtggaaatcttggatgatgacaatttttctggggggctgaacactgccctataaacatcgctagagatgtcacaaaaggatagcgctgccaccacttgcctcaaggagccggcaacaccttccaagaagagcagaacatcaaccaccatcggagcacactctggcaaaaaggcatcgccacaggatcacccggcaactagcaacaactcccagggcaacgaactaaccacccgaaacgacagggcacaggaggccccacagcagaacggcaaccagcgacgcgcaacacgcgactccagacaaccccttgcccagaacacgcaatgagcaaacacatcacagcatgaaaacagcgaaaaccgaaccacaaccaggccacaccagcgtcggaaacaccacaagcgcacattagggacaccacaaacacacgcg

SEQ ID NO: 566121 - DNA, 580 bp, Homo sapiens
  misc_feature (35)..(35): n is a, c, g, or t
  misc_feature (155)..(155): n is a, c, g, or t
  misc_feature (580)..(580): n is a, c, g, or t
gggggggggggggaggcgtacttaccctatcatanaggagcgttatcacctttcatgggcacgcgctcataatcattttccttatgtgcgttcctaggcctgtgtgcgctttttcctaacactcacaacaaaactaactaatactaacatctcanacgctcaggggggggaaaccggctgagactatcctggcgggcatcatcctaggcctcatcggcctcccatccctacgcatcctttacataacaggcgggggcaacaatccctcccttaccatcaaatcaaggggccaccaaggggactggacctacggggacaccggctacggggggctaatcttcaactcctacatacttcccccattattcctagaaccaggcgacctggggctccttggcggtggcaatcggggaggactcccggtgggagcccccattcggataataattacatcacaaggcggcttgcgctcatgaggtggccccacatgagggttacgcggggggatactacgggcaagggtctgaaatctgggggggaaaccacaggttcatgcccatcggcctaggattaattcccn

SEQ ID NO: 566122 - DNA, 961 bp, Homo sapiens
gttggagacccgggacccggagcagttcggaggaggtgaatagtagctcttcacgtctgcgatctaaaatggcctccgaatcaaaactactagttgcagagccatatgggataaaccatgagaatggaaagagtcaagtacgtttgccagaggcagagcctgcaacgaattcgtcgatggcaaagcacagtactatatcgacgtgtactgaatggcgaaatgtggaaatatttcctgaatagtggaatgggatttacacgatgttgatcatactagttgggagacctgatagaaaatttatgacttgtcccagaactcgatttgaagcttgtttcttaatcgtctcatgagaagttggcaatagagaaaattagatgggtcatctataaaacatgtacatagaatctttactctgggatcagttgcatatcgtgattgcactagtgaaaatctccgagacatggaataagaagattgctgtggtgacaaaccatagaggatttgtcagaagggtcttgatccttgataagaaattaattgggtgagctacaggaccatgttacggttggaagtaatttggaatgttcttccttcattggaaattggggcaagaggcatttccggaatgtagggctagaacctctgagtggctggggaaaaggaagggcaacattattgaaatgtgttccttcaattttggttcaattggcgtgtattgaattgaaagaaggaggaactaaacttggtgaattactttgttccatgaaggattgacagtctcaagttaaagttgttcaacaatttgttccttaataaatataataggtaattaatatagttattttagggatatggggcccgtgagacttttgggatgttaacttagttgtgaagaagaagtatgatacaatgcttaatttgattgaattagaggttgaaaatgcgggtgatggaaagtatc

SEQ ID NO: 566123 - DNA, 151 bp, Homo sapiens
gtagactaacccaggtccctgtcaaatcaaacctggccagagcttcaggctgggttggctagaaaaaccatcaactatgtacgtgtgtgtgtgtgtgtgtgtgtgtgtgtgtgtgtatataaatgcttgtgcctgggttaggtctacctgg

SEQ ID NO: 566124 - DNA, 921 bp, Homo sapiens
  misc_feature (26)..(26): n is a, c, g, or t
  misc_feature (69)..(69): n is a, c, g, or t
  misc_feature (84)..(84): n is a, c, g, or t
  misc_feature (96)..(96): n is a, c, g, or t
  misc_feature (131)..(131): n is a, c, g, or t
  misc_feature (265)..(265): n is a, c, g, or t
  misc_feature (297)..(297): n is a, c, g, or t
  misc_feature (306)..(306): n is a, c, g, or t
  misc_feature (308)..(308): n is a, c, g, or t
  misc_feature (316)..(316): n is a, c, g, or t
  misc_feature (318)..(318): n is a, c, g, or t
  misc_feature (321)..(321): n is a, c, g, or t
  misc_feature (324)..(325): n is a, c, g, or t
  misc_feature (328)..(328): n is a, c, g, or t
  misc_feature (331)..(332): n is a, c, g, or t
  misc_feature (334)..(335): n is a, c, g, or t
  misc_feature (339)..(339): n is a, c, g, or t
  misc_feature (344)..(344): n is a, c, g, or t
  misc_feature (358)..(358): n is a, c, g, or t
  misc_feature (370)..(371): n is a, c, g, or t
  misc_feature (373)..(373): n is a, c, g, or t
  misc_feature (378)..(378): n is a, c, g, or t
  misc_feature (385)..(390): n is a, c, g, or t
  misc_feature (395)..(395): n is a, c, g, or t
  misc_feature (397)..(397): n is a, c, g, or t
  misc_feature (403)..(403): n is a, c, g, or t
  misc_feature (406)..(407): n is a, c, g, or t
  misc_feature (409)..(410): n is a, c, g, or t
  misc_feature (412)..(412): n is a, c, g, or t
  misc_feature (429)..(429): n is a, c, g, or t
  misc_feature (431)..(431): n is a, c, g, or t
  misc_feature (439)..(439): n is a, c, g, or t
  misc_feature (447)..(447): n is a, c, g, or t
  misc_feature (460)..(460): n is a, c, g, or t
  misc_feature (462)..(462): n is a, c, g, or t
  misc_feature (479)..(479): n is a, c, g, or t
  misc_feature (486)..(486): n is a, c, g, or t
  misc_feature (492)..(492): n is a, c, g, or t
  misc_feature (494)..(494): n is a, c, g, or t
  misc_feature (505)..(506): n is a, c, g, or t
  misc_feature (521)..(521): n is a, c, g, or t
  misc_feature (529)..(529): n is a, c, g, or t
  misc_feature (564)..(564): n is a, c, g, or t
  misc_feature (576)..(576): n is a, c, g, or t
  misc_feature (590)..(590): n is a, c, g, or t
  misc_feature (594)..(594): n is a, c, g, or t
  misc_feature (603)..(603): n is a, c, g, or t
  misc_feature (637)..(637): n is a, c, g, or t
  misc_feature (640)..(640): n is a, c, g, or t
  misc_feature (653)..(653): n is a, c, g, or t
  misc_feature (665)..(665): n is a, c, g, or t
  misc_feature (670)..(670): n is a, c, g, or t
  misc_feature (692)..(692): n is a, c, g, or t
  misc_feature (730)..(730): n is a, c, g, or t
  misc_feature (732)..(732): n is a, c, g, or t
  misc_feature (757)..(757): n is a, c, g, or t
  misc_feature (807)..(807): n is a, c, g, or t
  misc_feature (844)..(844): n is a, c, g, or t
  misc_feature (847)..(847): n is a, c, g, or t
  misc_feature (857)..(857): n is a, c, g, or t
  misc_feature (919)..(919): n is a, c, g, or t
tttttattccataatccatttaagtntttaatcaaatacaattaaacatttaaaataaaaatcaactanagtagaaccagaggnggttgtaggatngattttatcaatgtgattaaaaatatttaaaaggnggaacagcttcagaaaaggaaacaaaaacacaaaaaaaatattcaaagtgtttatcaggaaaagaaacactgaatagcactcctagaccacaggcttcttaacatgaaacccaacgaatattcaaaattcaaangtctcagcccttgatattgaggcagtccagangtagaaatncnccctaaancnccnccnnggnggnngnntccnggtcnccattttatcatgntttccattccgnngngggcnatccggnnnnnncttcngngtctgnggnngnngnacagggggcggcacggncnggggggcnttcctccntttccccttcccncncctttgctctagaatcnggaagancatcantnaaagtccccanncccctacaggggggntccagtgnactagtaaaatgcgggctaatcaagataaagtggntccaagaaaggnctttcatggtttgncggngaatcttcnctggtcacccttctggcattagggaaacaaggtngtntgtgttcttctgntgtttctcctcngtccngctcttccggttcccctggggnttctgccccagtccaagacccgatgctggtgccaacananagggtgcaggtcctgccctagaggngctcagcccttgggtctaatccatgattcctttggaatagagcggcccanatggcaccactcaacactgactgcagtcgcactgaanacnaggccagaanaagtgtgggttctactcctgaagcaggcttctagagatcagtatcctcatcacttcattgcnac

SEQ ID NO: 566125 - DNA, 205 bp, Homo sapiens
tcagcctcaggccctcgggcgtctcttcctcgaccagcaggtagcggccggcgcgggctatcacggccgcgacagtcacgttggggcgaaacctctctgtaccagccatgaaacttcctctcgaattcccgcaccgggatggcgcaggcattgtgtaagctgccgcgcaccccagcccctgcaaggaaattccatgcaagttcgg

SEQ ID NO: 566126 - DNA, 133 bp, Homo sapiens
ataaaaacccaattttggggggggttttggccccctaggataggggatggggtggaatttaactttgggaggtgggggggggggggtggtcttttttttccctcccggcccccctaattaaatttccttttta

SEQ ID NO: 566127 - DNA, 112 bp, Homo sapiens
aggttactcgtggggggtccggcgcggttcgcgcggcttgctacgccgtcctccccccgctcttcgtgggcgtcgcgtttggccgtccttgcgcgccggcttctgctgcgcc

SEQ ID NO: 566128 - DNA, 236 bp, Homo sapiens
ggtgtaaatcaggaggcggatctgcgtgagcccgagatcgcaccactgcactgcagcctgggtgacagagcaagactccatctcaaagaaaaaaaagtctacaattaaattggtaaaaagagctggcacagatggctacacacttgcaatcccaaacacttggagaaggccgaggttggttggctttgccttaagccctcaggagtttcgagaaccttccctgtgggcaacatgtg

SEQ ID NO: 566129 - DNA, 122 bp, Homo sapiens
cggcgacctagaggatccccctgcccagcagatgattcacgcaaggcaaccgcatccatatccttctaatagctatcctcttcaacaatatactctccggacggagtgaaccatacaccaat

SEQ ID NO: 566130 - DNA, 583 bp, Homo sapiens
ggaaatatgtgtctcagatattatcctaagacttagagtggagatcagagcctcagctgttgacgaacgctctagcacaagagcagtagagaggggccagttcagaacagataactggcaaagagtgctatcgtgggacatatcacagctgcacgcaaatcacgggtgcacgaaacccactggcttgagtaggaagcctgataggagatatagcaatctatgtactgccattgctgccatgaatgcagccggaacgcaacatgacttcgtaaccacactgcctcatgtacaagacacgcatactgtcactaaaagaacatcaccccaggacaccaaacttcctaacctattaacaaatgacacttaaaggcctgacaacaaaaaacccatgcagcaacactgcccgacaaaacgcaccatggagatagggactgtgacacgcaataatcattcatgcgaaacaaatcgagcttcaagatgtgaacaccatacaacagaatcatgctatctttcacactactctaattacacaagacaccagaggaaaataaccggttacacccagaaaagcaccccagaccca

SEQ ID NO: 566131 - DNA, 123 bp, Homo sapiens
gctggtttaagtaagctaccagtgagacccatgtgatatgcccagctgagccctgtcaacccagaaccatgaggcagaagcagagtggctgctgcctgtttcagtgcctctgaagtattgggg

SEQ ID NO: 566132 - DNA, 334 bp, Homo sapiens
cggacccgtataaaccacagccctgacaagcgtgagtgcatgttgtctgtcggttttttgacaaaggacccagggtttgacgatgacacagggggctgtctttggccataagcaacctgaaatgaggcttggcctccttcccaggatcccacaccatgcctcacatggtagaccccagcgggaagtatgtgactgcctgactcaggtgcctctcgtgagccaagacatccccgccctgtcccttccctgggtgtcgccagacctggagcccctgctccttcactttgcagcctcctcttctgtcaccaactgggaacccacctcttcctgaaag

SEQ ID NO: 566133 - DNA, 231 bp, Homo sapiens
ggcgattttctatattctgatctcagatacacgatcattatatcgagaaggtttggaataaatgggtatatgacatgagatttactaaagggtcccaagatgtccctcgaccaatttgaaattcatcaagactgtccggattctttcggatgtctacacgtcgaattgatacggtctatatcatacctattacagtcgattaccgtcgattcgacctagatatatgagcat

SEQ ID NO: 566134 - DNA, 101 bp, Homo sapiens
gatctacactgggttcgagtcgagatcagctgaggaaggtggcaaaaccctgtctctctaaaaaaaatacaaaaatgggcgggtgcagtggctcactcctg

SEQ ID NO: 566135 - DNA, 377 bp, Homo sapiens
  misc_feature (280)..(280): n is a, c, g, or t
tataagcaagggggtgttcaccaggcggggccagggcatatcaccggagggcagggagtccaaagatcagccgggccaacagggcaaaactccgtctctactaaaaatacaaaactgggccggggcatgggtgggcacatggcgtccaggtcccacctaacagtggggagggcgtggagcccagggaaaatgggctggaacctggggagggtacagagggtggcgcaatggagcgccagggtccatggccacctggggactcccaggccggggtctggancagtggagagaactcgtgcgtcctcaaaaacaacaaaaacacaaaacaacagaggggcgggggcgcgcctcaagagagagaatactccccgagagag

SEQ ID NO: 566136 - DNA, 614 bp, Homo sapiens
  misc_feature (43)..(43): n is a, c, g, or t
  misc_feature (62)..(62): n is a, c, g, or t
  misc_feature (69)..(69): n is a, c, g, or t
  misc_feature (99)..(99): n is a, c, g, or t
  misc_feature (105)..(105): n is a, c, g, or t
  misc_feature (121)..(121): n is a, c, g, or t
  misc_feature (136)..(136): n is a, c, g, or t
  misc_feature (141)..(141): n is a, c, g, or t
  misc_feature (144)..(144): n is a, c, g, or t
  misc_feature (174)..(174): n is a, c, g, or t
  misc_feature (196)..(196): n is a, c, g, or t
  misc_feature (205)..(206): n is a, c, g, or t
  misc_feature (215)..(215): n is a, c, g, or t
  misc_feature (218)..(219): n is a, c, g, or t
  misc_feature (230)..(230): n is a, c, g, or t
  misc_feature (274)..(274): n is a, c, g, or t
  misc_feature (305)..(305): n is a, c, g, or t
  misc_feature (310)..(311): n is a, c, g, or t
  misc_feature (317)..(317): n is a, c, g, or t
  misc_feature (321)..(321): n is a, c, g, or t
  misc_feature (353)..(353): n is a, c, g, or t
  misc_feature (422)..(422): n is a, c, g, or t
  misc_feature (446)..(446): n is a, c, g, or t
  misc_feature (461)..(461): n is a, c, g, or t
  misc_feature (508)..(508): n is a, c, g, or t
  misc_feature (522)..(522): n is a, c, g, or t
  misc_feature (535)..(535): n is a, c, g, or t
  misc_feature (542)..(542): n is a, c, g, or t
  misc_feature (565)..(565): n is a, c, g, or t
  misc_feature (600)..(600): n is a, c, g, or t
actccccctcccccggccatttctggcacagctcctaacccgnccacttcccaatggcacanaaccccnaggccgcatcgtggaaacccaagcataccngcgcgnccagaggatgaagccncccactccaggggtnccccncancccccccgcaacccaggcatgttcatgaanccggggaccctgtacgtgtacntcatttacnncatcgcacntcnncatgcacctcnccacccagggggacggggcttgcctcttgctgcgagcactggancccctggaagctctggagcccatgcctcacntcccnncacccnccgnaaaggcacccccagccgtgtcctcaaggaccncgagctctgcagtggcccctccaagctgtgccaagccctggccgtccacaagagctttgaccagagggncctggcacaggatgaagctgtatngctggagcgtggtcncctggagcccagtgagccggctgtagtggcagcagcccgggtgggcntcggccatgcaggngagtgggcccggnaaccccnccgcttctatgtccggggcagcncctgggtcagtgtggtcgacagagtggctgagcangacacacaggcctg

SEQ ID NO: 566137 - DNA, 421 bp, Homo sapiens
atttgcccttccggggctgaagccttgggatgataatttctaacccctgtagaagggccctggctggaattttacccatgaaaagcctttaactgttttggattcccaactagccgccctccaatgctttgctaaagctggtaaaatggaacccaatcccctcttcaatgggtttggtccccctccaccccctggagctatgccttgattactacggggccacccacgttttcctttgtgaaaatccattacctgccccctaatttccacttttttcccttatgccgaccgggattataatccaaaaacctgtttctgttaattttccccggaaaagctaaaatggttaaaaatgtttataaaaagccttattaaaaaaggatggatgacttaaggatttccaataaaaatttttcttata

SEQ ID NO: 566138 - DNA, 351 bp, Homo sapiens
ctaacacggattcttggtcgattatcacggtctggtgcacgtcacgctagatggagatatccgtcgtaattttggtccagtcgtcacgttgccattcgtagacattcattcattcctattgttatatattacatgcccgaactgccacttgcctcttgtacccaaattccaatggactttcttaccctatcgctggcttgccccatccgtggttttccccagctccgtgttatcggttgtgttttcatcctggacttcagcccgtctccgttgtctccttggggagtagcgggcactactcccttttcgctgtcatagctttttcctgtttaaaaatggggattcccggtg

SEQ ID NO: 566139 - DNA, 2444 bp, Homo sapiens
caccgccaccgcctggtccaggcccaagcccaggccctgcgcggagcggagcggcgcggcgtccacccgggcccagccagccggcgcggcgggggcgggtccaggatcttcggcggatcttcggcggatcttcggcggatcttccattctcagggcgggagccggagtccgggcgcccgggatcgggctgggcccgcgcccatggcaagcgcggcctgcccgggccctggggaccctgccatgtgaggcaggcccgggctgggggcccggccatggccggggaacggcccccactgcggggccctgggcccgggcctggagaggtgccgggggaggggcccccggggccggggggcacgggcggaggcccgggccggggccgcccctcctcctaccgggttctccgcagcgccgtgtctagcctggcgcgtgtggacgattttcactgcgcggagaagatcggggccggcttcttctctgaggtctacaaggttcggcaccgacagtcagggcaagtcatggtgctgaagatgaacaagctccccagtaaccggggcaacacactacgggaagtgcagctgatgaaccggctcaggcaccccaacatcctaaggttcatgggagtctgtgtgcaccagggacagctgcacgctcttacagagtatatgaatggggggacattggaacagctgctcagctcccctgaacccctatcctggccggtcaggctccacctggccctggacattgcccgaggcctgcggtacctgcactccaaaggtgtatttcaccgcgacctcacatccaagaactgtctagtccgacgggaagatcgaggcttcaccgctgtcgtgggtgacttcgggctggccgaaaagattcctgtgtatagggagggggcaaggaaggagccattggccgtggtgggctccccatactggatggctccagaggtgttacggggtgagctgtatgatgagaaggctgatgtctttgccttcgggattgtcctctgtgagctcatcgcccgagtacctgcagaccctgactacctaccacgcactgaggactttggcctggatgtgcctgctttccgaactctggtgggggatgactgcccactgcctttcttgctcctggccatccactgctgcaacctggaacccagcacccgtgcccccttcaccgaaattacccagcacctggaatggatcctggagcagctgcctgagccagccccactcaccaggaccgccctgacacacaatcagggctctgttgcaagagggggtccctctgccacgcttcccaggccagatccccggctttcccgaagccggtcagacctcttcctgcccccatcaccagaatcaccccccaactggggggacaatctgactcgagtcaaccccttctcactacgggaagacctcaggggtggcaagatcaagctcttagacacacccagcaagccagtcctgcctcttgtgccaccatcaccattcccatccactcagctgcccttggtgaccactccggagaccctggtccagcctgggacacctgcccgccgctgccgctcactaccctcatcccccgagctcccccgccgtatggagacagcactgccaggtcctggccctcccgctgtgggcccctcggctgaagagaagatggagtgcgagggcagcagccctgagccggaacctccagggccagcgccccagctgcctctggctgtggccacagacaacttcatcagcacctgttcctcggcctcccaaccctggtcccctagatcaggacccgtcctcaataacaatcccccagctgtggtggtgaactccccacaaggctgggctggggagccctggaaccgggcccagcatagcctgccccgggcggcagccctggagcggacagaaccctcgccacccccttcagctccccgggagcccgatgaggggctgccctgtcctggctgctgcctcggccccttcagctttggcttcctgtccatgtgcccccgccccacaccagctgttgcccgctaccgcaacctgaactgtgaggcgggcagtctcctctgccaccgagggcaccacgccaagccacccacacccagcctgcagctgcctggggcacgctcttagcagtggagcccgtggtctcaggcctccaactttggccttcaggacaccctgtaagaacagagcacacttgctggacagtgccagttccagatgggctgaccggctcttctccccgtgtaggggagccccagcatggactcaagggacagagcacttccagtcgaccccccggctcgcgttcccgtggggatcactgaaccagacacagcattgctgacacatgagactaacacgtgcaattatttaaaaagatttcaataaaactgcctggctggctccgggccgccccta

SEQ ID NO: 566140 - DNA, 211 bp, Homo sapiens
  misc_feature (37)..(37): n is a, c, g, or t
  misc_feature (123)..(123): n is a, c, g, or t
  misc_feature (172)..(172): n is a, c, g, or t
gggcaatcaccaatctgttctccatttccctaatttnggtgtgtcaagaatgctaaataaaggaatcgtacaccgtgtagcctcttgggattggctttttccaccgagcattaattctctggngattcatccaggttgttgcatatatcagtagttcattccttggatattncatccgggctatggatgtaccaccgttgatttaactctt

SEQ ID NO: 566141 - DNA, 195 bp, Homo sapiens
  misc_feature (18)..(18): n is a, c, g, or t
  misc_feature (53)..(53): n is a, c, g, or t
  misc_feature (61)..(61): n is a, c, g, or t
  misc_feature (81)..(81): n is a, c, g, or t
  misc_feature (161)..(161): n is a, c, g, or t
  misc_feature (172)..(172): n is a, c, g, or t
agctatgccgatttgtgnatgctcgtcccaccccacttctggctccatctacncccgcaancctacaaaaatccatatccntgcagttttgacctactcatctgtagaccttgctcaagagtaattttcgctgggtattaacctttgtacaacaaagttgnttgccaacagntagcattgcaacacggtctctca

SEQ ID NO: 566142 - DNA, 962 bp, Homo sapiens
catactttaacttctatagttttctcctttagagggtcgtctatcagattctgagaggtttacttctcccttgcctttgactcatgggactagtgcagaggctataaagtagtttaaaatgggcttttgcttgtctaggtcataaaacgtaattaattgtagtattctttagccaatagtggctgagtttcgcacttgattttcaatattttatagtacagaaatgacagactgctttgtttcatttcataaacaaactctgcattatagatcactatatacaggttgttaagatgaagattgactgtatctcttgttactcgtaggtacagctgatagtgaaacttgcacattagtacatatacttactgttctcagatgccttaattgtgtaaaatctctggcttcagagtatctaggggaaaggtcgagatatagctcacatataagattccatgtagtaatatactaggtaacatcacaaaatgtatcatggtgccatggcctgtccacgtataaagtgagtgctgtaggattacattcgaaaataggcagaattccattactcacaggtggacacaatacactatactgatgtaatgacatataactgggatgacttccagaaaacatcatgtcaacatatgtagcaattgtgagaaacaaataacacttgaacacaggaatttgaacaatggctagtacagctaaattaactaggaaaatagacagtacaaagtgatctgaacaaatcaagcgataactattgcactattacaaggttattctgagaccatatcggggagaaaaacaaggtatttacacataaatacacaatgtagtacatttctaagagtataataagaataacacacggtataccattacgataaacagataaaaaacgtatgaaacagtctcaatgagctgataaatcgacctccactcctcaataaagtaaa

SEQ ID NO: 566143 - DNA, 265 bp, Homo sapiens
ggccttggacatcgctcgcctccagtacctgtgtggatcctcggcgaagttttcttgggggcctatgtgaacctcttcgaccgcggggacattaaagaccggcgcacgagtgggactggcgcgcgctcgccctccggagcggacctgggaagcgcgagaccggcaggcgcagtaccggggtgccgcccaggtgatcgcatgcgcaccgggtagcagacgtagcgctactcagtaaaaatccaatatttccattgaaaaaaaaaaa

SEQ ID NO: 566144 - DNA, 675 bp, Homo sapiens
gggctgggcaaggcatcagcctcattggtgggtcccctgtgaatcaccacctgagctgcccaaaatggttgctccaaggcacatgtggctatttaaatgtaaataatttacattaaatgttaaaattcagttccttggtcatcccagcctcgttgcaagtgctcaatagccacaggtagccctaacagccatcatatcaggcagtgcagactagaatgtttctgccaacgtagaactgcccttacgttcttgttctggagggaccacgcacaatggctgtgcagtgattaaaagaatcccgcaaccagcaccctgcacctgcctgctttgtgcccagctctgtgcctgtggaagttaaaaatggggatgcaggccccctcttcaggcaacacggtctaattgtgccagtaaaaataacattaaatctcacatattagagatgtgaagaaaaaccttaaatggcacactattaatacccatgatagacttttgaaggataaagaccaatcaaaactagagttagaacctaccatggcacccgatacgatttgacgcttgagttataatggttacaacccagcttttgcaaaggaagtgaacggaagggcccccctgctcctatggaccatcatattcccacaagcactgggaaacgcagcggggggtaaaagccca

SEQ ID NO: 566145 - DNA, 139 bp, Homo sapiens
tttttaaagctgtaataagaataaatcacttttttttttgtcttgtgggatggagtctcgctctgtgttgcccaggctggaactcagtggcacgatctatgggtcacgtgcaaccatcgtgggtaccggagctcgaaat

SEQ ID NO: 566146 - DNA, 142 bp, Homo sapiens
cctcatccccttaccatccaaggggtcacaccctatggtaggatgatctatgacagcacaggggacaggtggcacaccatgagaggtctgcccaggctgtgaacagtgtcactgtgctagcaagagttggcttctcccctgt

SEQ ID NO: 566147 - DNA, 375 bp, Homo sapiens
gagatatgttgtatataatcaggaggagaggaggaggcttaccatttgatatttgctgtaggtgcaagttttgttctcatagggaaatctgacccacctgtcatgttggctctaaggacctcctgttgtagcgctcatcaagagttgactcacgtgcttgttgggatatggaaaggaagaagcacagactcccatcagtcttggaagattgggatgatctcacagcaaaatgactaagttatgtatagcacactctaccatccatcttcagctgactgaatgtgtatgatagccctcctcaaagcagaggtagatgtcaggttcacatggatttctacttattcgttttggatcagctacagatccaggcccttt

SEQ ID NO: 566148 - DNA, 337 bp, Homo sapiens
tcagcgatcttctgcttggatccaaagtgtactttgtatggtgaactaatatagtttactgttgaaacaagtgataaggaattgtgttgaggatagatgttcttaatcgctctattgtaaatgaaacttctcactgagaatatctgaatggttacacccccaataacaagtttatccagaaagcatgtgtcggttatctgcatttcattaaaaaaaatttggtgtagagatagggtaactctgtggcctgggctgtagtgcagtggcatgatcatggctcactgcagcctcaatttccggggctcagatgatcctcccaccgcaatcaagtgggagg

SEQ ID NO: 566149 - DNA, 392 bp, Homo sapiens
ctcatttcagatcgcctcatttcagtttgatattggctgtgggtttgacatagatagctcttattattttgagatacgtcccatcaatacctaatttattgagagtttttagcatgaagtgttgtcgaattttgtcaaaggccttttctgcatctattgagataatcatgcggtttttgtcattggttctgacaaaaaaaggcaggggttgcaatcctagtctctgataaaacagactttaagccaacaaagatcaaaagagacaaagaaggccattacataatggtaaagggatcaattcaacaagaagagctaactatcctaaatatatatgcacccaatacaggagcacccagtccttagagacctacaaagagacttagactgccaca

SEQ ID NO: 566150 - DNA, 194 bp, Homo sapiens
ctccacaggcagctgccgttctcacactgctctacttagactccaatagcagcaccattaagtatctagcactttgtctttgctgtgcaaacatgcaaaaccgcattttatctgcaggcagtgcacaccatccagcatgtatcaggttcatggctccgttttcagcattgcacactaacaatctccagctcact

SEQ ID NO: 566151 - DNA, 399 bp, Homo sapiens
cttgtattatcctcgtccactctactaccaatgccaccaccacatagaatttgcctaaagtacagcagcagcttctggcatggcctcctggactctgactttgcccatggacagtctattctccacccaaaagccagaatgatctttctatttttttgagacagagtctcactctatcacccaggctgcagtgcaatgatgcaatcctggctcactgcaacctccacctccaggactcaagccgattctcccgccctcagcctccagagcagccgggaccacaggcctgcaccaccacacccagccaacctttgtatttttagcagagacagggctccaccatactggtcaggccggtctccaactgctaacctcaagcgatccgcctgcctcagcccc

SEQ ID NO: 566152 - DNA, 156 bp, Homo sapiens
catgagagacagaggatcactgcagcacaccccatgttcatgaagccctctgtataagaccccttattttcctcatctcgtgatagctggatttgtaatttagtagaactactgcctgatcctagagttaaatccattcattaagctttcgctaca

SEQ ID NO: 566153 - DNA, 1070 bp, Homo sapiens
  misc_feature (305)..(305): n is a, c, g, or t
cggacggcgtgggtcgacccacgcgtccggcggattaaacaaggtccgtcatgagtcgggacgcttcgatcacaattgatgacgcctttagaaggatccgagagatcgcgatcattaccattacaggaacacaggaccagatacagaattgcactagtgattatgctgcgagaacgagtgtggaagcagtattctggaaagtcttaccgagacttagttgaagaactgcacaggagtcctggcaatctttgtttactagtatgtaatactggcgttctgtggtgaaagaggcgcccatagattcnctcttgctcctatcagtgttgttcatgccattttgacgggcttgtagctgaaaaatcgttggctggttccaccccaggcatttgtagactggggtgttgcacgtatcgctgtgacgaaaaaccatgggttctgagcggggagtgagagcaagcgtgcgctagcaaaaaaaacttaagctagttggagagatcttgggcagacagcgaggcgacgccaacaagctcgtaggtgggatctctctaataacttattatatcggcggaagtgcgctgaggggggggtgtcctgagaaataattttttcgacccgctaatggtagatttatgttgatagcaaccacccctgtgtgcgataatgaggtgggctcaacgatgctcaacaacatctttcgtgagcgtgagcgttggttgaccaacggggacgcgaaaacagttaaccagaatagcatcgcaccaatgtgtgcgctctgggcccattctgggtttgccagccaagaccaaagttgtttgcccagggaaaagcgcgtaaaagtgggcttccttgtggtgtggtcacagaaaaagaccgctcctctaattggaattgtatatgtacaccaaactttaaacatgttcaggtgttggaaacccttgaagtaagcgggagggggggggcaccaataagtagtgaggtggtcacagagcggacacaacgtccctgtgtttttaacacacatggggtggggccttgggggatatatgccccaaaacccaaaccccgcgcga

SEQ ID NO: 566154 - DNA, 266 bp, Homo sapiens
ttgccatggttctctacctagagccagggatatcggctatgtcgacaccacccatgggaagtgtctacgtatagccagaggggtccagccttgggtcatctgcgatggccccggctttctcatgaactggtaggaaatacgaccttgtgcacatggaacatgtttccatgagcctgaaaaccatggtggaacgggggcacacacaatcaaaaaccaaaacacgcatgaaactggcgttgcgtggggggtcgggttacacttcagtt

SEQ ID NO: 566155 - DNA, 151 bp, Homo sapiens
  misc_feature (42)..(42): n is a, c, g, or t
  misc_feature (139)..(139): n is a, c, g, or t
tctttgcagggtcgcctgtttccaggcagtgcctcacccgangccacctttctcaacacgctcgggtcatgcacatttggcagcacttgtcaaccatgaatcttacaatttttctcatagaatagatcatttgtctttnggagagcttgtt

SEQ ID NO: 566156 - DNA, 219 bp, Homo sapiens
acgacgatgaggaggacaaggaggatgatatgaggaatatgtcccggcaggccaggacgagcctgtacgacgatgcctgtctccagtggctggactgtaggcctgagcgctcttgccgcagagcttgccgcgccatataatgtcgtttgtgacactcaacatctttgcatttttttccaggctggttcggatttggggtggattttggttttgttcccc

SEQ ID NO: 566157 - DNA, 320 bp, Homo sapiens
ggggccaggggggcccggggggggggggggcccccccccccttggggtttttttaatttttttcccgggggcccccccccccccgggggaaccaggggggtttttttttttttgggggacccaaatttagcctttgggggggggggggggggggaagggaacaaccccttttttttttttttttccccccgggggggaaaaattttttggggcccccccccccgggggggttttttttttttttttttggggggacccccctttttccccccggggtttttgggccccttgggggggggggaaaggggggccccccttta

SEQ ID NO: 566158 - DNA, 363 bp, Homo sapiens
aggctagggcatgaatgatactaggaaactggagaccagcgtgagcgacatagtgagacagcatctctactgaaatagattagccgggaatggtagcccacgcctatggtcccagccactcagagaggctgagctgggaggatctcccgagcgcaggaggtcaaggctgcagtgagccacgcgcacgtggccagttctctctctttcatctagctaggagagtacaggtgatagaattacagactctgtttcgtatctgttggagagataactgtatccaattcaatacaactctcctactagaagctaatggccttcagtaggtggaaagctacagctataaagaaaatttcctattgcttg

SEQ ID NO: 566159 - DNA, 340 bp, Homo sapiens
ttctattatattgcatgctcattaaattaaaaaaaaaacctgggtaaactttccatactacacatcatatcagtataaatgtggtaattttaatttcttttcctgatatatacaggcatacttaacaaaatatctattttactttatatttttattattttcatgttttcctttattattattatttttctcttctcttccttaattacatcctttgcagggacatggatgtagctggaggccattatccttagcaaactaacacaaaaacagaaaaccaaatactgcatgttctcactgataagtgggagataaatgatgagaacacatggactcatag

SEQ ID NO: 566160 - DNA, 517 bp, Homo sapiens
  misc_feature (130)..(130): n is a, c, g, or t
  misc_feature (301)..(301): n is a, c, g, or t
tacgagtgtcagtatcaggctgcggttcaaagcgaagtggtggttggatgtgaagtgcaattttagttgtcgtagtaagcacactgtaggaaagtagatccgatgattacgtgcaacccgatgaaatccntgtagccacaaagaaagtggatccatacactccgtcggagattgtgaatggtgcttcgtaatattctgaggcttggaggagggtgaagtatacgcctagtgcaatggtgatggatagtgcttggattatgtgttttcggtccccttctattaggctgtgatgggctcaggnaattctgggcagagaggagtgggtagaggtgaggagtgatgggacagcattaggggttccgggtactgtacgtagaattgcccggctataaagtgtgaggagagaaaggagtggtggccagtgaaactggagacggacagggactggataacgtgtctcagatgccatgtgtagcagttcggatgtttgtacacgtaggctgtgggggcagtccgc

SEQ ID NO: 566161 - DNA, 1802 bp, Homo sapiens
taacgcgacgcaggtcttactactgtcagggtaagacaacgttatgactgtggatctggctgttaaggacgaaccaaacggagcttctacaacggtttgggaggtttacctggtagtacacctacttctacggaacactactttactgcttcttacacgcgtcgatgcttcaccatgcggttctatgtaaggcaaggcaaccatagtccaagtagtagcataggcattcaacgtctcattatcagtcgtttctaccatctatgtagcagtagtcaggcaaatctagacctagccagtgtccagtatagatagtgcacaagcagcatcacacagaacagccaccaggtcatttctcacaacatcgtcacaagccagcattccatttgcatctagcaacaacgcacagtcagtgcacaacacaattcatcagcatggcattgtcttctgcttggaaatcgtaaacgaattcagctccatatatccatgcagcaccagcagtggcctcaagcaattactcttcactgttagctaagaccatatctgaagcatacatcacgttgagtgtgccatagcacctttgaaaacgtaacgcttttctatctcttagtgacattgacagtttacattcccaacagtatattacctcatgtatctcgttgataacgctgttacgaaacaggttccctctttggaccatttagacttcatgggccttgaacactagtatcattacaacacgtcagcagcaaccaccaatcgaggtgcacaggtgctgagagacacagataacacattcacatcgactgctgtgctcatactcgggaccccaatggctcacacccgggcgttccacagcacttcggcaaccccagcattcatacaacactgcgctcagctattctaaaaggcatactgaagggcggcgcacaaataaaggggcgattcaattggaaacgaaaaaatcggggactttaccagcatgtatgcacatacagacacacaactggaatacaaatgaatcattataacagtacaaggaggatgcatataactctgacaacatgacaaccgatcaaggaaaagcaagcgacacatcgcaacaaccacaacacacaagtacaaacataacaaacagaatcaaatgatagaaaactaaacaagcatcagacgacgtgttccgtctcctcctcttcctctcctcccttatttttctttccatcatagaaggagcagacaagcagacgaagcagaggaagacaagaggaggcaagcggcggtagaagagaagaacacagcgagacaagagagcgagagaagagaagacaaggacgagaacgagggaagaggaaggaaacgaaagaagaaacagaggaaagcgaaggaagcgagcggcaggagaagaagagagaagaagaagaagaaaaggacggctagcgaagcaggggagaggagaaggcgagcgagaggacgagggaaaagcgagaagacaggagagcgagaggatgaacggaacgagcaaggagagcgaagcgagagaagactgagcaaaaacagagcagagcgaaccaacgaagaaagaaggaagggagaagacaagcagaaagagcgaggagagacaggaggagagacgagagaagaggaacaaaggagaagagaagagagagaagaacacggcacgaactggagacggaggaggaaagagagaacagaagagcgggacagagacgagagcgagagaagccaaagacagcgcagcagacgacgaacagagaggaggcagaagcggaaagagaaggagaaga

SEQ ID NO: 566162 - DNA, 211 bp, Homo sapiens
cggatgacgaagtgaggtgtgcgtactttcgatgtccgtgccgctcttatcggtctagatgtcgccaacggatgtgtgcgtcttatgctgcgcggcgtcacgccgttagttcggcctgatgatgtactgcgagccttggccacaaggtgtccggcagtcgatgcggcgcgagtgacgcggctggcccaaggggcttgtaacgagggtgaag

SEQ ID NO: 566163 - DNA, 577 bp, Homo sapiens
  misc_feature (265)..(265): n is a, c, g, or t
accagatagtccaacatgaaagtatgtcaccattttccagaccgtgactacagagccattaaacccagcactgggccctgtgtgactatacttgtcgcatgttcatgaagttgatggctctgagcgcttgggtttctccaatggggcttctggcatttttggtgaaaccagtttttccattgtgccaggaccatttaaccatccctggccccccatgcactacatgcccactgtaaccaattcaaaattcccccatgtatttctnaaatgtcccccaaggaggagattgctgctcttcccactcaaactctctagaggtgaccctcccaccgtggtaccagcgtatgaacccaatgagccactaccagagttgagttaaaaaggatttccaaattctcatatccccgggaagccagaattatgatgacttttttcgtattgtccaaataaataatacccacctaccttgatgatgaaaccaatatttgagataaccatttaaaggtggttagtgggttctatgtgtcacatataaatggtagttgactccagatagatgcccatttctgatagttta

SEQ ID NO: 566164 - DNA, 132 bp, Homo sapiens
  misc_feature (79)..(79): n is a, c, g, or t
  misc_feature (97)..(97): n is a, c, g, or t
gatttttacttaaaacgtagaatctgtcactagcagacctgtgctacaagaaatgctaaatgaagttctttagacagangggaaataataccagatngaaacctgaatgttcaggaaggttgggtgaggctc

SEQ ID NO: 566165 - DNA, 121 bp, Homo sapiens
ggcgcgaagatacttccagcagctttgacaacctgtatattgacaggtatacagaggatcaccattgcggcccaaggtgaacaacagtcagaagaaaacgcaattactaaaaaacttgacc

SEQ ID NO: 566166 - DNA, 797 bp, Homo sapiens
gagggcgccccgcaccccagcagtgtgttgcgctggcgccccacataatgtatcccccggggggccacagagggtgtcacaagggcgccccaacaccaagtggtgtgcgaaggcgggcccagatatgccgaacagactcgtgtccgtgtgtggaacacaaaataagagggagcggcgccccaggggaaatagagcccgtggggcggaagagaagagaacacacaaatcgttcgctcggggccacacgtacaccgctctcagatgggtaaccgccccgcagacgattacgtcccaaagaggactagtcgcccttataggccccccgagagaccaggagagcccccacaaagtctctcctgaggagagagtccccccccagagagacgggcgcagacccccaaaaggcgcctgcggggtgtgtgaggtagagagtctgatgtgaaagactgttagaaaggccacaccacagggtggcaacaaacgccccggtgggcgcactcctatggccctacggcgaggcccgccagcagcgaccacacgagtttgaggaagcacgctcccacgacacgcgacagaaagatacactgtgcgtggtgtaaactgtctgtggaccgcataggtaggcatcgacagtgcgcccacaagtggtccgatgtcgagaggaagttcgtgtttcatacacgcaggattgaaagtccatctggttatggttaatccatctcgcgctgggcccgccctgaggaattgtgtaccgcacccacaatcaagcccaagctagttctggccactgcccgcag

SEQ ID NO: 566167 - DNA, 284 bp, Homo sapiens
cgtagtagatatgactcgtatcgtcatattagtaccacgaaagctgagactctggacgagtaatgcaggcgagcttaataagagtgtgacactgactgatgatgactctattgtagtcatcttcaatcgtctgatttcagtgcagctcgatgcgaagttttaatcctgaattgataagggcttggctaagaagaagatcgaggtattgattagtcagaatatggccaaaagtggtcttaattgcaaacattaaaaggaagctaggccagcgtgtagagaagatg

SEQ ID NO: 566168 - DNA, 151 bp, Homo sapiens
  misc_feature (8)..(8): n is a, c, g, or t
  misc_feature (12)..(12): n is a, c, g, or t
gggcgtgngctngcgcccggccctagttgaatcatttttaaaatccattcttgagccgggcgcggtgggtttatacctataatcccagcactttgggaggctgaggcaggaggattgcttgagctctaggagtttgagaccagcctgggca

SEQ ID NO: 566169 - DNA, 712 bp, Homo sapiens
  misc_feature (18)..(18): n is a, c, g, or t
  misc_feature (63)..(63): n is a, c, g, or t
  misc_feature (89)..(90): n is a, c, g, or t
  misc_feature (92)..(92): n is a, c, g, or t
  misc_feature (96)..(96): n is a, c, g, or t
  misc_feature (171)..(171): n is a, c, g, or t
  misc_feature (221)..(221): n is a, c, g, or t
  misc_feature (259)..(259): n is a, c, g, or t
  misc_feature (282)..(282): n is a, c, g, or t
  misc_feature (284)..(284): n is a, c, g, or t
  misc_feature (302)..(302): n is a, c, g, or t
  misc_feature (313)..(313): n is a, c, g, or t
  misc_feature (324)..(324): n is a, c, g, or t
  misc_feature (329)..(329): n is a, c, g, or t
  misc_feature (337)..(338): n is a, c, g, or t
  misc_feature (346)..(346): n is a, c, g, or t
  misc_feature (365)..(365): n is a, c, g, or t
  misc_feature (369)..(369): n is a, c, g, or t
  misc_feature (382)..(382): n is a, c, g, or t
  misc_feature (401)..(401): n is a, c, g, or t
  misc_feature (432)..(432): n is a, c, g, or t
  misc_feature (450)..(450): n is a, c, g, or t
  misc_feature (462)..(462): n is a, c, g, or t
  misc_feature (488)..(488): n is a, c, g, or t
  misc_feature (495)..(495): n is a, c, g, or t
  misc_feature (499)..(499): n is a, c, g, or t
  misc_feature (519)..(519): n is a, c, g, or t
  misc_feature (526)..(526): n is a, c, g, or t
  misc_feature (530)..(530): n is a, c, g, or t
  misc_feature (533)..(533): n is a, c, g, or t
  misc_feature (567)..(567): n is a, c, g, or t
  misc_feature (569)..(569): n is a, c, g, or t
  misc_feature (582)..(582): n is a, c, g, or t
  misc_feature (590)..(590): n is a, c, g, or t
  misc_feature (592)..(592): n is a, c, g, or t
  misc_feature (595)..(595): n is a, c, g, or t
  misc_feature (608)..(609): n is a, c, g, or t
  misc_feature (612)..(612): n is a, c, g, or t
  misc_feature (615)..(615): n is a, c, g, or t
  misc_feature (651)..(651): n is a, c, g, or t
  misc_feature (675)..(675): n is a, c, g, or t
gccaactggttttgctcncaagggttcacggcttcagtctgagaggtcctgggtttgcgctgngggagcccctttttgaatgaaggcgnnanaggnctggactccatgctgactccagttccattggtccctgcagagtgagtctggcctctttcaatggtgtttcctggngcctgaaatggagcactctgatacctggaaccagatgaataccacgagcngtttctgtaacgacccatactgtcatgccgcccttggntcatggggtcattggactttaananttaaagcctatagccctntactcctcgtntgtaccctggnaatanctcccganntggctggnagggctggccactggagtntgcnatggctgcaggantctctcccggtgcaaagtntttcttgttagcacttgtaaggctggggggngaggcacaggtggaagangaagcagcagangcatcacttgggctactcaaggacanagatgtnactnagctacatcttgtttctggncgaaaanctgntcnttggatgagtacacttgttccaaatgaatcaatncncttgctttagggnctctgcgnanganaggtgggccgggnnaancgncccagatcctcatcatatttacgttcactaacaaantgcttgatatcagctctgagctcnaccaatagctgctctgacattggacagccacatgagt

SEQ ID NO: 566170 - DNA, 686 bp, Homo sapiens
  misc_feature (244)..(244): n is a, c, g, or t
  misc_feature (249)..(249): n is a, c, g, or t
  misc_feature (252)..(252): n is a, c, g, or t
  misc_feature (271)..(271): n is a, c, g, or t
  misc_feature (283)..(283): n is a, c, g, or t
  misc_feature (351)..(351): n is a, c, g, or t
  misc_feature (354)..(354): n is a, c, g, or t
  misc_feature (356)..(356): n is a, c, g, or t
  misc_feature (373)..(373): n is a, c, g, or t
  misc_feature (378)..(379): n is a, c, g, or t
  misc_feature (381)..(381): n is a, c, g, or t
  misc_feature (402)..(402): n is a, c, g, or t
  misc_feature (405)..(405): n is a, c, g, or t
  misc_feature (422)..(422): n is a, c, g, or t
agatatagtttatagctgcctggttagaaagtagatatgaagttagttcgtaagctgcttggataaaagcttagatttatatgataggttagacttttatgatagatatttagaataataaacatcaaatgtcatgactatttgtttaaataaacaaacaaatctttcgacaaatatcgttaatttaattagcctaaataatttattctcagttgctaaaaataccaactgttcaaatgacatnttctnacnaaacatggatgaggttacntcgagatgatcnaaaatatcgagatggtgtggaagctttcctcaattttgcggaattttcaatcaaaagagacaaaatgncangnccttgtatgaagtgtgnaaatnnanattttgaggatagaacaatcntgnaaacacatttaattgtntttggtataagacccgattatgatttttggtactttcatggggagaagagacctagaagtaatgacattaatgatgatactgatgatgctgatgatgatactgataatgatgatatcgagaaaaatgatgatgttctacaacaagatgatgaaatcgagaacactaatgttccacaacaagattatgttccacaacatgatgacgaagtattggtggagacctgtaaggatcagtatatggacgaaataactgaaggatttata

SEQ ID NO: 566171 - DNA, 427 bp, Homo sapiens
  misc_feature (340)..(340): n is a, c, g, or t
  misc_feature (368)..(368): n is a, c, g, or t
gagtctcgctctgtcgcccaggctggagtgcagtggtgcagtctcggctcactgcaacctccacctcccaggttcaagcgcttctcctgcctcagcctcccgagtagctgggattacagccacacaccaccatgcctggctaatttttggatttttagtggagacagggtttcaccatgttggtcaggctggtctcaaactcatgacctcgtgatccgcccgccccagcatctgcaacaagttcccagggtgatgccgatgtggctggatctgggagaccacactttgaaaaccactggggttaggtcaaccttatttaaatgaggagtttattcatgtnaacttttatttaaatgtggacagtggantatgtaatcatgggattacaagtaattacatgtttaggcatttacagattcgtccttct

SEQ ID NO: 566172 - DNA, 618 bp, Homo sapiens
gttagagatagtgcttaaaatttttttctattacttctaaggaaataggtctgtgaagaagttctatcttaataccaaaaaaagttagacattaggaatttattgtagttgtagatataaagagaaaaatcatctgattagggtttttgtctgtttcattcactacttgtagtatattgctagtgttatatgagtgaatgctaaaaatgcattcaacaaaattcaatatccaggttttattaaaacaatcaacacaatggaaaagatactttgacaaaacgattaaaaataaaaagcctacccctagttttcatcatacagttggccctcagtttcataggtgccacatctatggtttcaaccaagcatggattgaaaatattcaaaggggaaaacaatttccccaaattccaaaaagcaaaacttgcattagctgagcaccaagtactatacggaatccacatgaatgaagtgatgtgcaggcatcataataggcactccaagtaacctggagatgatttagagtacatgggaggaggtgcgtaggttatacgcaaatactatgctactttatatgaaggaacttgagcgtccttggatttcagcatctgcaggggt

SEQ ID NO: 566173 - DNA, 289 bp, Homo sapiens
taaataatttttaaataaaagcacaaatggcattgcacaataagagattaaaaatttagattggccaaaaacattctcacttcaaagcaattttaatatcttaaaaaaatgtttcaaaattcttgatgggcaaaaaaaacttttaagaatttccctagaattctatcttaggaaaagaaagaaatatttattttggtgatgaactcattatattcatctttaatacactattcctaaaaaaattcaggagaaaaaacaaacgcctgaggaaacaatagaacctcccaga

SEQ ID NO: 566174 - DNA, 207 bp, Homo sapiens
acggctggtgcgttcgtaaaagtcgtctgagcgagtacgggatggttccttctcattctgagcccgggttacgacgttctgactctctcttgtccttccgcctggacctcgaccttgggccctcactcctcagcgagctgctaggggtcatgagcctgccagaagcccctgcagctgagactccagctcccgctgccggttgccatt

SEQ ID NO: 566175 - DNA, 113 bp, Homo sapiens
tcgagcgcccgggaacgcaggggcggtgtggaccgctctaacttggcgaagtccagggcaaagagcgtaccaggcctgcggccacggcgcctttatggacgggtgcgactatt

SEQ ID NO: 566176 - DNA, 211 bp, Homo sapiens
gggtattgctgcgtagtttatggctcccagtagcctactagaccccggacaggtcccggggtgtgatgttcccctccctgctgtccatgtgttctcatgtgttcaactcccactctagtgagtgagaacatccaggggttgggttttctggtcccggatgttacgttcgctaaagaatgagtgctttccaggcttcatccagtgtcccgtg

SEQ ID NO: 566177 - DNA, 892 bp, Homo sapiens
tctcccctccccccctttaaacaatttcccctgccggaggggcttcccggggaaggggaaaagccggtctaacccggtttatccaagggactagagcagactatatggtaaaaaggaatagacatacatacaaaaaagtgaggatagatgatgaagatatgatatatagagaagtagatataataaatagagagaaaaaattatagtataattatgataaaaaaaaagatagaaagctatggtagtatatacaaaattagaaatcaaaaatactgaagtatgaggacacaacgaaacacacacacagaaaaataaagcgtatcccacaatattaatatagaaaaatcacaaaatgtaatagcgcaactgaataactataatcaaggtaagagaaaaaacaaatataaatacggtatccaccacaaaatagaaatacaaaaaaaagataggtaagacgaaagagaacacaaaaaagtaaaaaaaaacaaaaaaagagttaacaacaaaagagaacacagcaccaaaacaaaaaaaaacacaacgagaaaaaaacaacaaaacagaagaacgaacagaaaagataagacaaaacagagatgacatcagaagaaggaaaaagacatagatgctaaaagaaacagtgcagagagataacgtagcaggtataataaggtagtaagaaataaagtatagcaacagagacaatgtataagggataaaaatagatggagaagatatggaggaatataatgaagtagttatgtgggaaaaaaaaagagctaaaactcgaatagaggaaaaaaagcaaaaaaagtaatgtatagaaaaaagtatagaaaatgtaatcagttatagaaaaagagaagttaaaaaaattagagaaatgtgttgt

SEQ ID NO: 566178 - DNA, 946 bp, Homo sapiens
gcttggctggcatgaccctctgcagtcccttccagcgcaacggacgcatgggccgcgcttctcctggacgcgcttgatgcttgcccgttttgccgggtttgcccttagcgcagcgcctgaagccactcatggctcgggccgtttccgaacaaccgttcccaggctgggcctccaagcaacccccgtggccgtccagtttatttcccttccaggaccacttcttcccccttttccaagcggcaaccccggcaacccccccccttaagtttcccacctcatcatcgtctaacaaccactagggcggcccacctgggccattggcgccggccaaccccgccccactttggggccccaaaccggggcccttaaatcgcgtaagtgttaaacccaagccaaattcggtggagttctccacccgcccgggcaaaggacccccgaaacatccaaccgttctccccctggggggccctatttcccccgatgaagggggcacccattgggcccccacctttcccattaccactttccccccatagctctttggggggcaaacccgtttaaacggcccccagtgaaacagcaacgccggcggccctctcggcccttcccatcggcgcctggcgcgttctacgactgtgggcccccttcccccctctggctggtgggccttcccgcttgggcccgcctggtgcccccccgggccgccccccgttggccccgccttctcgtaagcttgtctgccttggacacaacctctccacacccttctgtggagcacccttgccattcggccccgccaaccgttcgggcggcaacccccgttaaccttggtagacacacacccttgggtgcgcaacccttggggcccatagggacccaccacccctatgaaccaaagcacttttcacgtcactagccaatcattggggggactttcccaagaccg

SEQ ID NO: 566179 - DNA, 420 bp, Homo sapiens
  misc_feature (106)..(106): n is a, c, g, or t
  misc_feature (118)..(118): n is a, c, g, or t
  misc_feature (127)..(127): n is a, c, g, or t
  misc_feature (133)..(133): n is a, c, g, or t
  misc_feature (171)..(171): n is a, c, g, or t
  misc_feature (212)..(212): n is a, c, g, or t
ctaacgtacacagaaaactacaaaacactgttgaaagaaattaacacaaataaataaaagaaaagctgtgtttgcagattagatatttcatcttggaatgatgtcnacactacttgangtgacctanattcantacaatccttataaagattccaatgacatttttgatanacagaaaaacctatcctaaaattcatatggaatctccaggncccatgaataggcaaatcaatcttgaagcagaacaaaattaaaggtctcaaaacaattacaaaactgcaataagccaaaaaaaagtggtcatggcgtaaagacatacttggcacacttatggaccaacacaacagagacctcagaaaccaaccctggcatatatggtctgatgatcttccacaaggatgccaagaccactcaatggcg

SEQ ID NO: 566180 - DNA, 327 bp, Homo sapiens
tgcgcagtccctgagtcctgtgagatgaattcacttggctggttatcaggagtggcctgtcccagagcaaatgctgcatgagggtgagaggaaaacagcccagctggagtggtctgtttagaactactggcctgaaaaaaaaaaaaaaaacaaaaaaccagaaaatgaaaaaagctcctgaccaattcagcctctccaggtgggagccaaaaaacctacagttgctatgggaatcacagcttccaggaactgaaggaacaaggcttcgagttagcattttatctgaaaagggaaatctaataggtggactactccaaatacctttgg

SEQ ID NO: 566181 - DNA, 1092 bp, Homo sapiens
agcggacagaagcgagtccgactgtgctcgactgctcaggcgccgcacccggcaagatgaggctctggaccgctgggcagccactgttggtctgcgcctgtcctggggctagtgtctggctgtccctgatacaactgtgatgatggtgtgcaggtgtcgcgaacatgacggccacttaagtgccagagtttcccgcgaccatatgaaacagcgtcattccatccgactggtcccaagtgctgcgcttgtagtaaacgaaagcctaccataccattgtaattgcgactcgagtggtccaatgtagacgggacataagcgaaaggcagaagatgcatgtgcacacctgtgatgctagcgttctggcgtggtatgactgtctttagcctaggctccgcagatataacccctgaaacgcctagtgagcttgtgtcaatgcatgaattctcatagcgcgttgcaacacagcagtgagtccatctacgtacttttctcatccatcgcgtagtcagctactgagttgcagcgtaatgggcactacgcttggcctatcccaggaacttggaaatcccagcacatattcgcaggggccaaatgaaaagctccctatgtccctatccacaggggtatccctacgggcaagtctgtcccggctttggcgggatttgcaaaccgaatccacgcgagtaagggccttcttaacgttgttcactcgttggtagaaaccctttaacggcctttggaggcctccaacctggttaatacacgctgtgccatttttgtacggtaacaatagggcacacgttaggggtcccagagttcatggccgtaggtcccttacacggagccggccaaccggacagttagattaagggccccacccgcattagatggagttggccccgggaaactttagatggcgaaggcacgagtgaagcccttattgccactccgcgccctaagtgtcattcggcttaggtatcgcataaccctgtgggttggggtcccaccaacggcggggagggttgggattggcgcccttcaggtcctacccaccaaaggccccccggatttagataccccaacatatttaac

SEQ ID NO: 566182 - DNA, 828 bp, Homo sapiens
agtgctttcccaaaggtactttatgttacgcaacttaagttaggtcgtagattacatttcccccagcacttttataaaataaacacttcagtcttcttgcgggggccaaacatgtcataattcaagcctggggataatctgttccatgcaggtttagaattcatctctatatacaagtccacgaatttgctcctctcgccgtgttccctcccgtactgggccttcccccccccaggctacggttcacctgtaaacttggtcttaatagtcagtttgttttggaatagttgctgtggtactataaagccaataacaatagtatacacacatttctttttcttctcagtcaacagcatgtgtattgaacactctggcatgagatgcctgtggatggagtgaggttggagtctcgaaagacagaagcaagcgctggcctggcccttgaaagaaccgaagtctttcccattcactgtctctagaaagctggccaagacagaggctagtgaagtacaactggatgatagttctctgtcaagcgacacttctgttctcgtagaaccttagaagtgtttctaagaggacaacaagtaatgaagtagtaaacagttacgctgtggaattccacatctttggttggatcgcattggctttttttttcttgttttgatagacatggaattacgcaaaagtagtttttgtcttttcgtgttgtcttcatattttatgccgttgttattgttaatgtaatcccgttcaattatttaattgttatacaatgacattactgctgtatttgacgttgttaactctgtgtctcgcgcctgcttc

SEQ ID NO: 566183 - DNA, 379 bp, Homo sapiens
tcgtctattgataggcagaataaacgcagcagagctcagacttcatagcagcagtcatagtaattctagcaacagcaagggaagtttcggatgctcacccggaagtcagattggagcccatgttggcttaaaaccaggaccggcccgttcacagaacagtaatccctctttaaaacttaataattctcctaatgaaggtaccggaatattcctagcacacaggtcctgtcttccaggagaccggttacttctggattggcaccaggcccagatgccaaccatttcttttcttctaatatttcgacattaagcttctccgttggcatgacaagtaagtggctgttattaataataacccgatcttattccaaacattccc

SEQ ID NO: 566184 - DNA, 737 bp, Homo sapiens
tggaagtgaacataaacccaagattttattggtcttcataataaaagctattagtggggagtagatgttgtgaagcccttgagaagaggtaattatggaggcgatctggtgatgtgctgtccgtaagttggagtttgtgcataggcagaaaatagtaagtgaggagtgtaagtctccgggggccgattatgaaaatgacgtgcgcccggttggaagctctcagggggtttgggattgaaaagtggcgtgtatacatacgaagggcatagtggtggtctgatgtgaagagttatgcaagtgagcagattttacaggtcctgagtgttggtccgtaagcgcagaatgggactcttggttcatatatttatgcctccataagggtatatgtacaaggaaagtggtgtaaggctaatgtggttttggtccagggtgtgtttgaacaatggagtggtagaggcgttatttatacccataagccgcctaagtttataagagtacggcggcaagtactatgtgacccagcgagtggtgggcttcgacagtgggcttaagggagtcaataaggggagtccgtaaagaggtatctttactataaacagctattggtgtacagctagtcatataaaagtcgtgggccccgggagttttgatagtcccttgggcagctgagagtgcatagcagaaggtttaggggaacccaagggtgttgtgcgctgtaacaggccacacgcatggcc

SEQ ID NO: 566185 - DNA, 221 bp, Homo sapiens
aatcttcatgcaccagtcgtgtgtgtgcattccatgtgtactgtgtctttgtgtgtgtgctgtgtgctagtgtgtgtgctgtgtgtgcatgtgtgtgcgtgtgctgtgcgtttgtgtgctgtgtgccgtgtgtgtgctgtgtgtgcgtgtgtgctgtgcgttagtgtgtgctgggggtatgtgtgtgtgctgtgtgtgcatgtgtggatatatgtgccttt

SEQ ID NO: 566186 - DNA, 244 bp, Homo sapiens
atgatgaggcgcacgtgtgtgcgcgttcaggtcaacttctggaatttctgcttcatttcttgaatcaatctgtctgttcaggtgtcagcactagactattttaatccctgtatgtatgtatgcatgcatgtatgtatgtatctattatgagacggagttctgctcttgttgcccagagctagagtgcaatgatgcgggctcgactcactgcaacctccacctcctggagtcaagcgattcattc

SEQ ID NO: 566187 - DNA, 1191 bp, Homo sapiens
  misc_feature (300)..(300): n is a, c, g, or t
gctgcacttgtagttggataatccatgagatccacgctgacattggaggctactctccaggatcaattagaagcaccccaattataagcacgtgatactcgtgcttagtccacacgcagttcgacacgttagttttaggagcgtcgatgggtcattagtcaaccttgtccggcatctgataagatggataaagacccctaccaactaaccacatgacagcgaaacggtaatcccttataggctgctggggtctcaagcttggcagcagctcgacgagttacaaagtttacggaatggatngtcacagcttttggaagagccaggggactcgtgtcggtggacgagattgccacattttcgcatatacgagaaactatgtaagctagattcttagggagccaatgggtgcgtaacagggtcttgagagcgtgaagtcctactggcctgtgcgtcctgcaagtcaagtcaaactaatggacaacttgagcccagggcatgcaagactacataatatgccgcccgactgttatgaagcgcccatggagcagcgaagctggatgcctaaaatgcacacaactggatcgtaatactgggctaaggaagccacctgaggtattagggccgtggatgccgtagagagatgctcacactgcgttgactcttagtgcgagtgaaacccatcaagaccgcaaaagtggtgccttcctaagaatccctggacaatcgccatcgttggctcgcacttgtgggccgcgacgtgtcccctaaggcggtagaagctcaagttccgactctggcagagggttttaaccaaaggaaagataggtcgatttggtacaaccggcgcactttgaagtcaacgaagattttgaaaaccatagggggaaaaggaaaaggggattagtgctccttacacacacctctgatggacccgaagtgttctagcaataacccttaacccaatgggacttccagtggggtccagaactgtcggtccagatgattagtccaaagggatcggcctcccataagctacccgcaaatacccaaaaggccaagtctcgtataacgtgggagctccaagggagaactattattcaggagagaaacgatttttggtggccgacatatcatggttaccacgcagtgaaccagaccgggccttggttcacccaagatgtttggcttcca

SEQ ID NO: 566188 - DNA, 1043 bp, Homo sapiens
  misc_feature (39)..(39): n is a, c, g, or t
  misc_feature (1043)..(1043): n is a, c, g, or t
atttgggagacagtgtctgtgctcggtatacccaggctngagtgctggtggtgcagccacaagctcatgtgcaaccttgaccttctgggctcaagtgatcttcccacctcagcctcccgagtagctggtatgacaggcacaccaccagcgtctggttaatttttaatttttaatagagacagggtctcactgtgtggtccaggcgtgatcttaaaactccgtgacctcaagtgatctacccacctgtggctcccaaaattctgagattgcaggcatgagacaccaaacctggcctatacaccttttctttggtctaccctttggtatcttctaaatttggtatcatatgcatatattacttattaaaaatgaatggtaggccgggcacagtggctcaggccggtaatcccagcacttgggaaggtcaaggcaggtggaacacttgaggccaggagtttgagaccagcctggccaacatgtgtgaaacccccgatctctactaaaaataccagcacagtcacccgggcatggtggcagggctctgtaacttcccaagctaatcgggaagactgagcaaggaagcactcggctgacacccaggcaggggagctagagtgagccagatcggcgcatgatcagccgggagaaagggactcaccaaacaaaacaaacaacaaaaaggtggagcgtcacggaagcatataacacctgggggggccctcggataccatgatccgtcacaaccccgaccaggcggtgacagaacacccccgggggaaccggtcactggagctcccgcacccacccgtgagggtgggacacaaatacgagacagaactagcatagatggacacagagacgacaaacacatccgaagagcgacacagacacagaacgagtcgcgacagatacgagagcagagtaagcgagcaacagcgcaaaaagacagcgaacgaacaagagcagcagcgaaccacggcacgcagcacgcagcgagcgacagcgacacaccaacacacgacagacagcagcaccacaggagn

SEQ ID NO: 566189 - DNA, 707 bp, Homo sapiens
  misc_feature (463)..(463): n is a, c, g, or t
catggtggctcacctgaggtgagcagcactttgggaggctgaggcgggtggatcacctgaggtcaggagttcaagaccagcctggccagcggggtgaagcccgtctctggtaaaaatataaaaattggcgggcgtggtggtgcaggcctgtgatcccagctgcctaggaggctgaggcgggagaaccccttgggccagggaggtggaggttgcagtgagccgagatcgtccagcctgggcagcagggcgagactccatctcaaataggataaccataaaataataacaactacacacagattaaggtaatacagaagactatcctaacttgattacttaaacatcagaacaatacactttttttccataaagtgaacagcaagtttattcaagaaacagtcaaacgaagcaaccagaacaatccacctttcatatatttaatcaaatctcttctaaagcatgngcacctggctgcatttatgcaagttgcattgaaaaaactacattttagactacagtgactattttgacctgtaactctgatcaaaactgatcttttatttcaatattgatgggagggaacaaaagaaaacaaattaatcttttatgcattttgtagtcaaaatccatttaggagaatataaattgcagtaagtaataaatttggcttgttattacatcagattatttacttctagaacttctaa

SEQ ID NO: 566190 - DNA, 93 bp, Homo sapiens
ggtcgacgcctgggaactgcaggagctgcccaggttatggaaggcggccaagtggaatataagcccctttcgggcattcggtacatgtggtcg

SEQ ID NO: 566191 - DNA, 399 bp, Homo sapiens
  misc_feature (58)..(58): n is a, c, g, or t
ggacaccatgccccctagcgggtagcgggaagatgcaaaagctctgaacacagattgnggtgatgattgcaaaacaatgtgaggatgcttactaaatgccactgaactgcacacttaaggttaagacagtaacttacacgttatgtgtatttgttttgtttttggtttgtttttgagacagggtcttgttctgttgcccaggctgcagtgcagtggtgcgatcatggctcactgcaacctccgcctccagggttcaagcgattcccctgtctcagcctcccgagtagctgggattataggcgtgtaccaccacacccggctaattttgtattgttaatagagatggggtttctccatgttggtcaggctggtcttaaactcccgacctcaggtgatttg

SEQ ID NO: 566192 - DNA, 236 bp, Homo sapiens
tcgctagcgactcggtcactgttgcctcgagccaaaagccagcatctccaacacaacagcacacatttttttttcaacattgcagctgggtgtctggcatgcatctcgggacccagctacttggaaggctgcggtgcagaagcatccacttcagcctgggaatttgcaggcttcagtccagctcatgcattgtatccactgcactcccagcctcaggcccaccaggggcatcctct

SEQ ID NO: 566193 - DNA, 381 bp, Homo sapiens
atggcagcagaaccactgcaaagcctaaaggagtcccttgagaccgtggtcaccccctttttcacctttgcaaggcaggagggccggaaggatagcctcagcgtcaccgagttcaaagagctggtttcccagcagtttccccttcgcccaaggatgtgggctctcttgattaaaatatggacagcttggatgttcatcaggtttcggagctccagttcacttagtccttgaaatttatttgggagctggcccaggaaatcacccattaacaatccttgaagatcaggaaacagtaaaaccctccgcctcaatcgggtgggcaaggccaactttttccgggcttgacaacacaacactctttcgggcttaaaattcctccat

SEQ ID NO: 566194 - DNA, 1106 bp, Homo sapiens
gccggttggcggactccagcagctgtcggcttctctacgcagaacccgggagtatggagactcagaatcgaatctcttctccctccccttcttgtgagatgctgtgatcttcagctacatgttcggctttgtgagaaaccttaccatcaaagcacgatggccagcaacgttaccaacaagacagatcctcgctccatgaactcccgtgtatacattgggaatctcaacacatcttgtggtcaagaaatctgatgtaggaggcaatctatacgaagtatggcacaaattagtgggctgctctgatcataagggcttagccttcgtacagtatgttaatgagagaaatgcccgggactgactgatagcaggcagaggataggcagaatgattgctggacagcgataacagatataaacctggactgcagcagccaaaagtagaaccagagagaaaaagcacagtgaagaaagccgaacagacaaacggaagactagtacgagacaccatcacggacaaggcactaatgaacaaaacaacggagcacacatacacaaaaggaagcaccaggaaaccaagaacgaagatacccatcctaacaaccactccaaagtagacacggagcgccgataaaggaccacaaaacacggtaaagagaccacaacaaaggcaacacacatacaaagaacggggaaaaaaagcaggccacacaaaccatcaacaatggagccacgaagagacacacacaaaacgacagacacgaacacagacacaccacacacaccggccgacgaaagagagcacgaacccccacaacacacaaagaggaacacaccggcacacccgaacaaccacaaggacagccagaccagcgcacacagccagaaaagaacaaccacggacggaccggcaagcaagaccggccaataaacagggacaaagagggagagcgaagcgaggagggcgccgagaccgacaaccagaggcgcaacacaagcgggcacaagagaccaggtgaaaaggagcggcaacgaggggaactggcgcagagcatgcaacgaccgaagaaaaaaaacagcgagcagcgaacggataatggatagaatacg

SEQ ID NO: 566195 - DNA, 162 bp, Homo sapiens
gtacgccgttgctgcgtgttcatgcacgtaaaggggacggaggggattaagtctgtttcttggcacattgtcgccgggcattgccctggctgctacctggtgactggagtgctgcccaaactgaaaatggggccgtgcaatgcctggcccccctgaatacag

SEQ ID NO: 566196 - DNA, 222 bp, Homo sapiens
cgcctcctgcgtctaaacgattctcctgcctcagcctcctgactagctgggattacaggtgcccaccaccacgcccagctaatttttgcattgttagtagagacaggtttcaccatgttggccaggctggtctcgatatcctaaccttgtgatccccccacctcggcctcccaaaatgctgggattgtcttacttgtcttctgtgggagaatcctgtcatac

SEQ ID NO: 566197 - DNA, 105 bp, Homo sapiens
tcttcacacagattgaatattgagcagttcttcaaacgaaagagggggaagaaaaaaagcccaagtgtaataatacattgaaactattcccctgtggaaacagta

SEQ ID NO: 566198 - DNA, 726 bp, Homo sapiens
  misc_feature (241)..(241): n is a, c, g, or t
catcaacctccatcggaacttacgtgctcctttgtgatggcacccgcgaattcggccattatggccgggatgtaaaaacgttggaactgtatttccgaaggcatcatttctctgcatatgtctgctctctggaatgttctaaagggaaaaaacatgtttgtttcggctgcaggattatttttgagacataccagtcagtcctttaccagcgtaatcgtgaatatctgcagggctgcacggnaaggcttttcatttccccatagcaagagccatgctgccctgaccctgccacattccgacagaaggccccctgggatcagctctgggtatgtttgggaagccaactccatgttctgaggcacaccggccctgaggatagggcatggttgaatggtcttagctgttccagaaggactgaaaagcccaagagatttcacagtatggatgcaggcacgggcttcccagtgggctactcaggggtgccctgcacaccactcttgtgtgtgggcacaggctcatgtttttttctgcattgtatttagctcattctttttctgtgttcccttatttctcttcataaaacatctttttgaaagtgtagaaaacttaaatgactttttgtatacttttatctgtgccttgtcttgtgtttgaccaaaaaataataagatccccaaaaacaaaaactgcagggtagcctatttggatgatacacacgttgtgctt

SEQ ID NO: 566199 - DNA, 151 bp, Homo sapiens
aggggataggggggtcggggatcattgaattgtggttggcaggagcaagccctgctcacagtctcacactcgcacccagaactgtcaacagatacagattgtaaaaatctacgatcctctcagtctcactcacaagaagaataaaatctca

SEQ ID NO: 566200 - DNA, 442 bp, Homo sapiens
  misc_feature (316)..(316): n is a, c, g, or t
  misc_feature (415)..(415): n is a, c, g, or t
  misc_feature (436)..(436): n is a, c, g, or t
ataagcatcattatctatggagtctgagaggggaacgctgagaggaagggtcggccagccgtgtgcagcaggaccaggaggccctgcaagccccagatcacgtctaccgcgcgtgtgtgcactgatccacccacacaggcgttcagggccctacctggccaatcgcgtgaaaggctggctcagaaggcggtaaactctgtcaggtcaaaatgagtaataacatttctaaagcgacaaggctacaaaggaagctggactcaccggatcccgggaggtttgcgaggcccagcgaagggcgtgggctgggaggcccatngaaggagtcatggagccaatacggggctcaccaccccgcaagcggcgccccggagcccctgcttggttcccaaatttttgacctgaacccttcaagttnttgttcctctgacctgagganttttga

SEQ ID NO: 566201 - DNA, 132 bp, Homo sapiens
tgtctgcggatcctttacgacgaagcgtagaagggtaatgctggctcgcagttttctcacgtgctgactgaagggtttttttgccgtggctcaacagctttcgagatggttggttggtggttgggtggtttc

SEQ ID NO: 566202 - DNA, 391 bp, Homo sapiens
  misc_feature (1)..(1): n is a, c, g, or t
  misc_feature (180)..(180): n is a, c, g, or t
ncgagtgggtctgcatgattccctcacagtgttttgtcctgaagcttctcagaacccgctgttcaccacaggacgtcttggtgaaacagtctctgtattatctgccttatctgttaggcaaatgccaaattcttccctctctaggacgaccaagttgtgctctgctcttaaactgaggancgtctggaattcaggggtcagcccaagtcacacccaggagtaaaagaaactgaacattctctacatgcaagcctccattcccaaaatgccctcctttaagctcacgttgcctaaaaaatgaagacgtgtgggattaacacagccaagtgaagctctttcacagaggtagcatgggcttgcattatgtattatgtacctattgcatagacgt

SEQ ID NO: 566203 - DNA, 114 bp, Homo sapiens
tacgagcatagtttccatttaacgtcacatacttaaagatgatgattatgctatacaatcagatgaactctgtcatcactttcttctctgtcccaacaattgctcattcagact

SEQ ID NO: 566204 - DNA, 185 bp, Homo sapiens
ctctagaggattacattggatacgggatagcggtcgttcgtcctcagcggatgataatctcaagacacttccgagcgtagctactccccttcaccctcagctcgacgcctcagcagatgataatatcaagacacctgccgagcgtctgcggggcgcgattccaccctcagcggacgataatctca

SEQ ID NO: 566205 - DNA, 279 bp, Homo sapiens
aaaaacaaatccaaggccacatcataacttctgaacaagtgtgtgcccgtatatatatatctatatagatgtattaagttggtgcaaacgtaattgcaggttttgccataaaactcatggccaaaaccacaattacttatgcaccaacctaatacatgtgtgaacaacagcgaacgatgtcaaactacttaatttcctttctgtacaataaacttcctcactttgaaaccaacattttgcttgctcaacatgtgttcttcttcgggttgtttgatcccc

SEQ ID NO: 566206 - DNA, 288 bp, Homo sapiens
  misc_feature (169)..(171): n is a, c, g, or t
gcacgcagcatccaggtggggggacgactccagcagggtttccatggagattcctctgggtctagcctaaaaacagcagatcagctgacaccattagctcaggacctaattactgcttattggagcaacaaatgagggaaagggccagctgcaaaggaagagtttttannnccccaccccattcccccatctcctttctccccctctctccatccctcttgagtcccgggtgaattctcattaacttgcaagattcctgcaacaacagctccccttctccagaggcca

SEQ ID NO: 566207 - DNA, 103 bp, Homo sapiens
aaacaccgcaatctcaaccattttgtgttgtctcccccacctgcagaagcaaccatgaaggacgctcttcaactccccccttacatgttcacgtggatgagaa

SEQ ID NO: 566208 - DNA, 106 bp, Homo sapiens
gcacggggggtaagtccatgacaaccaaaccaatctcggtggaaactcctatcgtattcatgtagatgtgcccgaagatgattgagcttggcactcgtgcccgtga

SEQ ID NO: 566209 - DNA, 190 bp, Homo sapiens
aggagaaggagaggtgtgggaacagctagtcaggggagcagtgagaacacactcaacatttattgatgaagttcgcagtctaataatgagcatggtagtagcacccaaaaacaattacaacagtcacatcaagatcgctgtcactgatcacagatcaccataacacatatgccattattgaaaagtttaa

SEQ ID NO: 566210 - DNA, 386 bp, Homo sapiens
agggtgacctaggaggttaccggagtggcgacatttccaccaaagttatctacagttttattgtacctcacccatatttttttgttgttgttgttgttgttggttttgttgttgagacggagtttcgctcttgttgccaggctggagtgcaatggcacgatctcggctcacttcaacctctgcctcctgggttcaagcgattctcttgcctcagcctccccagtagctgagattacaggcatgcaccaccatgccaggctaattttgtattttcggtagagacgggctttcgccatgttggccaggctggtctcaaactcctgcctgcctcagtctcccaaagtactgggattacaggggtgagccactgtacccagccaacattc

SEQ ID NO: 566211 - DNA, 607 bp, Homo sapiens
gttggagtcctgacccatggtacctcagaaagtgactgtatttgaagataggtctttaagagaggtcattgtaaattaattaataaggtcattagggtggactctaatccgatatgactggtatccttataagaaaaggaaattagcacacagacacacaatcagagggagaagacagccagtcatctacaagccgaggagacagacctcagaagaaaccaaccctgcctgcaccttgatcttggacttctagtcgccagaactgtgagaaaacaaatctcatgtttaagccagaacctagcacgtggtacttgttaaggcatccctagaaaactaatacactcactgaatgaggcaggtagctgtttcttttattttttgagacagagtctcactttgtctccaaggccagagtgcagtggagcgatcacagctcactgcagcccctgccttccgggctcaagccatcctcccacctcagctacttgggaggctgaggtgggcaggatgcttgggcttgggaggtgaaggctgcagtgagccttgacagtgccactacactccagcctggacgacagagtgagaccctgtctcaaaaaacacgagt

SEQ ID NO: 566212 - DNA, 122 bp, Homo sapiens
actgccacacatactgggcagtgagcgaggactgctcccaacagcgggattggctgatgggaggtcccaaggacaaggaaggaggcgtgttttgactgggggccttcattgtagatctgatt

SEQ ID NO: 566213 - DNA, 834 bp, Homo sapiens
ggataatcgttagccacccgagcatatgttcacccccctcgtaccataatcattcggtattccccaccggcgtcaaaagtatttagctgactcgcccacactttccccgggagccatatggaatgatctgctggcagatgcctctgaaccgcctaggattcatctttcttttcaccgtaggtgggcctgactggccatgtattagccaactcatcactagacactcggtttctacaccgaacaccgtatgctaccgttgtaggtcaccttcccactaatgtcctatcacacatatggaggctgtattttgccacatcaattaaggaagggcttcaattcacactgagtttcccgctacatttctcacagggtaatacacccctagagcccaaacctaacgcccaaaatcccatgttcactaatcaataatttactcggggtaaatactaacattttttcccacaacacatttttcggcgctatccggggatgccccgacgttactcgggataaccccggatagcataacaccacatgggaacatcctatcatctgtgaggcgtcatatcatattctctaacagccagttaataattaataaatatttcatagatttggagaagccttcgcttcgaagcgcgaaagtcctaatagtaggagaaccctccattaacctggagtgaactatatggagtgccccccacccctaccacacactttgcgagtaacccgtatacataaatttagaccaaaaaggaaagggatcgaacccccccaagctgggttcaagccaaacccatggcctccatgacatttttccaaaagaaaaaaaaa

SEQ ID NO: 566214 - DNA, 262 bp, Homo sapiens
aaaacccgatctcttaatctactaatcgtgtcagtgataaggaaggaaaaaggtaactcatacagtatacttgcacgaaacatcatccactcaaaaaagtgtctggcacacgtacaggagagagaatggcaccatgcgcaaatgtgaaaaacacatatctcagcgaaacactatgcagttcacacttgcagttatcctagtcaactgagtatttgaaatgatctgatactcactgttatctctggtgtcttatacaagttgt

SEQ ID NO: 566215 - DNA, 183 bp, Homo sapiens
tcggtacgatcttcacatataataatggattcatctatttgtctctgcagtcacccttatgccatgctaaggaagtctagaaatcccccagaaagaaaaatcatggcaaattcttctctgccatgattttgctttctgggggattgctagacttccttagcatagaatgtgttggaccaaaat

SEQ ID NO: 566216 - DNA, 1161 bp, Homo sapiens
ggtggtaccggccctagacactgagccgcggtggggatccccatcggctctgcaaggccctgagatgcgccagtggaggcgccacgagggagccgggcagccagcgggccacttcagtgcgaggcctgactcgccgccccgggccggtcgagagatccttgggggcacaataatccgagggttgcgtgtgaaccccgacacagggacattaacgaggaggatagagcgagccgcaattgcccaaggggaaccattcttgggaagaccccggccccatgaaattacatgtcagcggtcttccaagagataacaccccttgggaactagcgcctaggacggccttggatatgcccctatacgaacatgaggaccagacaccaggggtgaaggacaccaaaaaacgacaagcgaattgaaagacttacagacccgggggaaacatccggacgcgatgtgcacagggtcaaggacaacagtttggcacaaacaccacagcacaatggacaacttggccgatcagaaggaagcaccacccatagtgcgaacgagacaggcgaaccacacacaacgccattgtgcgtgaaacgcggccacacccatggagaagaacacgacacccgatgaagaataccacgccacctataaaccaagttttgacacacagccaccacatcacgaggcaaagatgacacatggtaacgaccacaccgataacagtggaatctcactaaacagggattgtgggaaccccctatgcgctattccacctgatgacagggaagtcgaacaacaatctgggtcttgaacatgaggaaacatattcccacatgtagggatcaacataattctaaaccggatgcacgcaggtttagtcaaccaattcacgacagtctggaggacaacagcgtattacacgaacatatacggaggattacacatatatcaccaaaaataacagtgtttagcgagagacaaccgcaattacgcggagataacacattaataacaacacgttatggtcaccgcacgctagagtaacgggatacaagcacacatattgtggggaaacaccacatacagcgtggaacgagagcacaatccacaggaatagggagagaaacaaccacatatgaagagagaagcgaacttgtgacatctata

SEQ ID NO: 566217 - DNA, 452 bp, Homo sapiens
tgcagcaggaacacgcctttaagacacagattgctcatgcttttgtttgtggcttaagaatgcctttaagcagttttccgccttgggcgggccaggtgttccttgccctcattcccgtaaatccacaaccttccagcttgggcattagggccattatggacatatcacagtgctgcagagattttgtttatggccagttttggggccagtttatggccagattttggggggcttgctcccaacagtcaatagcacctaaaaaggtgctcaacattagggaaatacaaatcaaaaccactgtcagataccactccacacctatttaggatggctattattaaaaaaaaaagtgttggtaaggatgtgaagacattggaactcttttgcattgctggtgggaatgtaaaatggtgcagctgctatgaaaacaacatgaagcacctcaaaaaaaa

SEQ ID NO: 566218 - DNA, 853 bp, Homo sapiens
ggggcgctgccactacgggacagtcagatgttagaaaggaggaaagtgtgaagtcaggcggccaatgtgctgtgaataaaggaggacagagcatgatgttgggtgcagagtggcccggaggctccactctgacgttgagcagagacctggatgcgcaagcgtcggtccatgcgggtatctgggaaggcgaacagcacgtgcccaggccccggggtcgtatttcctgggcatgccgcgcacagaacaaggcgccagcccggggtcgcatttcctggacatgccgcgcccagaacaaggtgccggccccggggtcgcatttccaggacatgccgcacccagaacaaggcgccggccccggggtggcatttcctggacatgccgcgcacagaacaagccgctggccccggggtcgcatttcctggacatgccgcgcacagaacagggcactgcccctccctggctgcactgcccatggccgctgtcctctggggacctggaactggccgaaaccatgaagccaggttttaacctcggctgtcctggccaacctggtgtgtgaggagtgcccttccctgacggccgggtgacaggacagggcgccctcctggagtaagtcagctcggaggacaccacacggacaaggctgcccacagctgggggagggcagggcgctcaccccgaatcgggggccggcgcaggactctccagttcaggacccacccgcacactcagcggagggagcctcagccccgccggccgctccacccgacgggaagggaaggcgtttgcatccacatcggtttcaatctgggactgccgaggcagcaatgccgaaacccgcgcaggtcaaaac

SEQ ID NO: 566219 - DNA, 851 bp, Homo sapiens
  misc_feature (231)..(231): n is a, c, g, or t
tgaaaaaaaattctctcttttgtccccagggggaagtgcaggggcttaatcccggtctcactgtgcaccctctcgtgatttcgtgcctttctgtgggttcaagaagattctctcctgtgccctaacagccctcccaagtatacgtgtgggccataacagctgtgctttgccaccacgcacaagcaaattgtggatattttaagataaaaagtggggttcactcgggtgtgncgccaggagtgtggccttggactctctcttgtgaccttgtttgatctcttcccgtgcctgtgggccctccacagggttgctggggatcttccgggggtgtacgccatgtgtggccccagccatttgttggatttttgtggataaagaagtgggggctcctcaagtgtggtgtgtgcgcccaaggcgggattataaagtcctctataaagaggactaagttataatttcctataagggattttcttacttcttaaaccaccgtgttaaagtgttgaggggagatccaattatagcctaaaattctaaaataacgccgtggaattcaactagaaataactgctgtgggttaaaatctttcaaaaaacaaaaacaaaaacaaaaaaagacacaaaacaacaaacgacaaaaaccaaaaggggggggcgcccaacacaagaacccccacaaaagaagggcccacaactgaagagcagaaacaccaaaagagatatggacaccaaagaggaccacccaaaagaagaaaacgcataacacacacaacagcagacagcacgagaaaaaaaaccaatagaaggagaaaaaacacacaggagagagaacatgaagaaaaaaaacaaaat

SEQ ID NO: 566220 - DNA, 849 bp, Homo sapiens
  misc_feature (486)..(486): n is a, c, g, or t
gcctcttcccatcgcgcgggtcctagccaccggtgtctccttctacatccgcctctgcgccggtgcacccggctccctccgccgctgcgcttgtgtgtcaaagctgctgccgccccttgggctaaaaaggttttcacatggcacatttgtgatggcatcacttagtacctatttcaaggcattgtaggccctcgagatactagagtaacaaggatggtttcttctggacaattatatacccacattttatctggctctgtcatatatttacctaatttgtatgggctggggacccaaaatacatgaggaataaacagcattctctttgccggggatttagtggtgtataacctgtggactcacactgtgtctcctgtatatgtctgtgagttagtaacaggagtctgggaaggcaaatacaattcttctgtcagggcacacgcaccgaaggagactcacgatatgaacgattatccgtgtcctctngtgtactacttctccaaaactcataggaattttattggacactttcttcttcatccctgccgcaagaaacaagcaccagatcacggtcctgcacgtctaccaaccatgcctcgatggctgaaaccatctgggtgcttctgtggatgacacgttggtccccctggggcacctccttatttgtgctggccccctttaataggcttcctcccacgtctcctggacctcttacctatggttggcgcaggcccttcctggggtcattactctgggggcgacagcgtcttccctcacgggggggttcgttgggccggcatcttccgccccctggcggcttctgggcggcgatctctggggcgtcccccg

SEQ ID NO: 566221 - DNA, 769 bp, Homo sapiens
agcggagggtggatcaggcgctgcgccggcgccggcccggtgagccggatttggagcgcgaggcgccggtggtggctggcaggggtgctggcggggaggctcccgtgtgctcgggatgctcctcctagctaagcggtcggtctgacctgcgcgtcgatctgcagcactctcgagtcgtccttcgtccccggcaggagcccaggtcgtccgcattacagaaagctcacgctggaggaagctgcgtcagcctgggactgcagctccaactgttggacagcgctaccttgccatccagggcgtcgctggtgacttctagtgcatgaatgagaccagatctgaagagcaatgcatgaataggcacatagacagttgacagcagagatgatgatactgactgcggttgaggattgcgtatacgagctacacacgagatttgtagtgagtagctgatgttcttttctgagattgaggaaactcgggttaagattgacaagatctcagaacatgtagaggaggctaagaaactctacagaatcattctctctgcagccgaacttccagtagtcctaacacaacgataggagtgaaacatacgagcgatggtcacgatctgagattaggcaaagaggtgccgaacaacgtccggaacaaactgagggagcactggagaacgcatattgaaagaagatgaggtcaggtcatcggcagaccttcggattcggaaatcccagcactctgtcctttctcggaagtttgtggaggtgatgac

SEQ ID NO: 566222 - DNA, 256 bp, Homo sapiens
tcgcacactgcccagctatttcgtattatttagataaagacggtgtctcagcgtgtatgacaggttgagctcgatagcgtccatgaccctctgagtgatccggctggcttggcctcccaaagtgctgcgtttacaggcatgattcagtatgcctgtctggtccagttttttaatctacaaactgaaggcatctggaggttgaaggcagtctggagagtctgaaggcagtctggaggagaacctgactaggacagag

SEQ ID NO: 566223 - DNA, 410 bp, Homo sapiens
tgtcagtcgctctcaggatcccgcctcaggtgcgagctgcagcccgggccgcttcccacacctgccttccgtccctgcaggttgatggtggcatcacccttgagaatggacatctccacagacagagcttggttgccgtcctggagctctaccgggagggccggggggcctcctcggatgtcaccaggctgctggagaccctctcccagatggagagataccagcaacattccatggtgtttctgggacggctatcaaggaccaagagcgagctgagcctgaagatgtaccaggaggagatccaggagtggtatgaggagcatgccagggagcaagagcagctcgccctgagttgcagctcgccccttatttagcagctcgccccttagttagcagctcgcccctgagtt

SEQ ID NO: 566224 - DNA, 609 bp, Homo sapiens
gagaaaccctacaaatgtgaagaatgtgacagagcttttagccagtcttcaaaccttactgaacataagaaaattcatactggagagaaaccctataaatgtgaggaatgtggcaaagcttttaaccgattctcaacccttactaaacataagagaattcatactggagaaaaaccctataaatgtgaagaatgtggaaaagcctttaatcaatcctatcaacttactagacataagatagttcatactaaagagaaactcaacaaatgtgaagaatttggcaaggcctttaaacagtcctcacaccgtactatacataaaattattcatactggagagaaaccctacaaatgtgaagaacatggcaaagtttttaaccagtcctcaaaccttactacacaaaagataattcatactggagagaacctctacaaatttgaagaacatggaaaagcttttaacctattctcaaacattactaaccataagataatttatactggagagaaaccccacaaatgtgaagaatgtggaaaagcttataaccgattctcaaacctaactatacataagagaattcatacgggagagaaaccttaccaatgtgta

SEQ ID NO: 566225 - DNA, 495 bp, Homo sapiens
ggcaaagctcaccctcccgagttgaacaaatttaggacaagcaagttatcattaaaattcacgctggcagaccatgtccacggactattgcggggatctgatccctttatgaacctcgtgatgcagcaacgtgtggagacggcgactagctggacaccagaacactattggaatgctggtaatccgaggaactcgtctcaccacgttagaagccttggaacgagtatacatcatggctgtccagcagagaaacccatgtcctctctccatagggcccgttctactctgccgtaaaaatcaggtcatgtacattttcatactcgactttttgcttaacataaacttttgtaatactcaaacctgctttctcagatgctctgactatagaatatcagctctcattccagttctttctaacatgaattttcctcgttgacattcattccaaagggctttatccatcaaagtgcaaagcctcttattaaacctgaaaca

SEQ ID NO: 566226 - DNA, 298 bp, Homo sapiens
  misc_feature (22)..(22): n is a, c, g, or t
  misc_feature (172)..(172): n is a, c, g, or t
  misc_feature (291)..(291): n is a, c, g, or t
  misc_feature (297)..(297): n is a, c, g, or t
tcgaggcgagttggcggagtgntgcgcgcggcggggcgatggggggctcgggcagtcgctgtccaaggagctgctggccgagtaccaggacttgacgttcctgacgaagcaggagatcctcctagcccacaggcggttttgtgagctgcttccccaggagcagcggagttgngagtcgtcacttcgggcacaagtgccttcgagcagattctcagccttccagagctcaaggccaaccccttcaaggagcgaatctgcagggtcttcttcacattcccagccaaagacagncttagnt

SEQ ID NO: 566227 - DNA, 325 bp, Homo sapiens
aaaaaccgggggggggcccccccccccggttttttttttggggggggggggggggttatttttttcccgggggggcggttttccccttgggggttttttgggggccctttttacccgttttttttaaaaaaaggggggggggggggggggggttttccggggtttttttccccccgggggggttttttttttccccccgcgaaaaagaggagggggaaaaaatttttttttttttctttttttttttggggggggggggggttttttttttttttttttttttggggggggggggggggttttatgttttggggccctttcccga

SEQ ID NO: 566228 - DNA, 600 bp, Homo sapiens
  misc_feature (358)..(358): n is a, c, g, or t
  misc_feature (540)..(540): n is a, c, g, or t
  misc_feature (571)..(571): n is a, c, g, or t
  misc_feature (573)..(573): n is a, c, g, or t
ggtttggaaggttgcaaaagatgtttagcacgaaggatgctgtatatgctgctgccagtgcttggaacacagtgacaaaacaaacagctgtgcatgcctggcacaacctctggcacaacctctgggctgtgactctgtgttcagtgatgatgatgaaccaagtggtgactttgaaggattctgtgtgtcaaatgagacaaaaacgatgtctgacctccttacatatgtaaaaaatataccttcaaggtccatcagaaaactgggagaagtggatatcaaagaagccctccacatcgataaatgaggtaccagttgttaaccattggaagaagtggatatcaaagaagtcttccacatngataaatgcattaccagttgttaaccatcagtagatgtggaaatagccaaaatggttttgagtccaggtaactgtgatgatagtgatgatgaagatgatgacgttaacactgtagaaaaagcatctatagatgacatggcgaaaatgtgcgacaggcttactgaaggactagggcagcatgngatcacagcagggcaaggaatcacgtcaatngnacaaaattcaagagacacttaaagaca

SEQ ID NO: 566229 - DNA, 107 bp, Homo sapiens
cgttatttctacccagatgctctgcctcccgttcaaaaccactcatcctcagcttgcacaaactggttgaacggcaggaatgaaaaataaagagagatggcttttgt

SEQ ID NO: 566230 - DNA, 82 bp, Homo sapiens
  misc_feature (8)..(8): n is a, c, g, or t
gggactgnctcctcacactggggctcactcacctcaacaaggcacagaccctccagttcctgttgtagctgagtaagtggtc

SEQ ID NO: 566231 - DNA, 191 bp, Homo sapiens
aagttcatgcagcagtgcctcggactgggaacacccaacagaaagtctgcagcaatgccatgaggtcctgaccagagggtttctgcaatgcctccaagtggtcaccacctcagaactataagaagcgtgtggcagcttggaagccaagcaaaagccagacttcccagagccagggctacacgacaagacag

SEQ ID NO: 566232 - DNA, 108 bp, Homo sapiens
agttatatatgatagctcaggaaatagaaagcggctataactatctgccagcatcatcctagatctcatcgcctcccatcccatacgacatcctttacataacagacg

SEQ ID NO: 566233 - DNA, 641 bp, Homo sapiens
gcacaccagaccgctgcagtgctcccatgggctgagtggggagcagttttcccctggcctcagttcccagctcacccccgaacacccagcatacacacatgcccatcctggacaagtgtaacatccacacttagacagagacatgcacactgcatgtcgatccaccaacataccacataggatggatgagggacgatagacacacatgggatattaaggacatagagagggacagcacaatcacaatgaaacactatcacatgctacaccatatggcactctacacaataaaatgaaggacatgacgaatcggacaaccacgctgggacctacacacaacgcggcgaccaaacagcaccccagatacataccatacacctagcaagagaagacacatcacctacacaaaccaggcacagacgccacagacaccacccagcctagaccccctcaagcagccacccgagcgcggagacagtaacacaacacaaccagacaacagccaggaccaaaagaacacaggaccgacaggacagaccagaaagacgcgagcaacgaaacaaacaacacacaagagcacaccaaacagtaacaaacaacaccccccagcacgcgaaacagacgaagcacacgacgccgaa

SEQ ID NO: 566234 - DNA, 115 bp, Homo sapiens
tatgggtgaatggagcttctgcagctggagaagtcatccacctgcagacatggggcgcagaaagtcaaaactgaaagccgcctcccaagaagaagatgacatggcaccctcgaga

SEQ ID NO: 566235 - DNA, 442 bp, Homo sapiens
tgccatcagaccactgagtcccatatggtagaaaatgtgtacctgtgtgctgctgcagtggcacatggatgtggacctaccctctgggaaagcccttgtgtccctcccagagtccttcagtgtaggccctcgcagatgctgattgctcagaacaacaccgtgcatcccatgaccatggattctagcagtgacctcagcaaggagttggccattcggttctcagcgaacctgcagcagtggcagtgagtgccagccattgcaggacaggagtactggagcagcagttgtctgctgtgactccactttgacaagctccacacttaagaccccagtcctgtctttgcccatggtagatccactgtgcctccaatgtagactgggggaactacaaaagttaaacaattgctcagtaaaatgccttaggctggcccgcagcagttca

SEQ ID NO: 566236 - DNA, 410 bp, Homo sapiens
aaggagagcgctgaggtgatgactcatggggggtggggtggaggtgaggtgcccagtgtggcgtatttgcccatgacagagctggtgagtttcaccccgcaacccaccaccatgttctctccttacctttggacatcctttggcctggtgtgggaaacagaggaccagggtggagacctaagcgggtataagaccaggtggcctgctccttttctgggccctagcacaggtgggtaacccccacccaacccagctcctgctgctgtcccagtcttgggctggggcctggaaagaggaagaggctgcctggggctgggccagcccgctgtgcactttgaccccagttccttgccagcacggctgctaacagactgccacttgagtgcgccttgcaggcacccccagagcag

SEQ ID NO: 566237 - DNA, 916 bp, Homo sapiens
tgtcacatggtgcgcgctgttactaatcacgtggctgccacccaggcctctctgctcctgtctttgttggatgccggcgctgctgcctgtggactccctgacttttgttgctaccccgagtcttgctgaccatggcactctgggaagccctccgaccccagccctcgccggcctcggattccggctctggctacgtaacagggctcggtctctgcagcctttgttactatgccccaaagagaaggtcgccaaggagatcgccagggcccgtggtggagaagacgcctagcagactgagtcaacctcatcacctcagataaacatcacattctcatgaagtggaaagggcaagatcgaggaagaacagtgagtgtgctggatgcatgacttacaacacctacagtatctacggattcacagcttagacaagatatctgaacgctctgtgcacacctttacgacaactggccggagggtacatatggccttggctgttggcacccggcagaaccttccgtaaccttgcagtgaggtgtagccaggtccatcagacacaagcaatattgacactatacacagcaccgccatgactgaagcccgaacactgccatcatgaacatcccgggaatcctacaagcaccttccgagattcaggagatgatgggccccaaataaaacgacatgagctcacacacaacaaacaaccagaaaataaaagaaaaaaaaaacaagcgcccacccaaacaaaagacaaccaacagcgaacgacgcaagcagcaacgcgcaccaccaacacccgcaaactagctgtcaccccccaacagatccacaccgcaaccacactcgcacaaaaagacgacgacaaccacaggacaaaactgacaaacaaggaagcaacgacacaaacaaccaagcc

SEQ ID NO: 566238 - DNA, 270 bp, Homo sapiens
tccgacaactgcaccagagagcaaaaatatatgaagatacatggcccgccactcttctggagcttagagcaagagcagacattaagacagggcgagagacggccaggcaaggtagaagctggctctgtccacgtctctcaagtcatgagtactctgggctggaatttcacgtaaggccttttgggcataatgaattaggaggcggggaagcgggactttgtgcaggatacagttcatgcttccgtggctactttctccacatcagtccag

SEQ ID NO: 566239 - DNA, 224 bp, Homo sapiens
  misc_feature (129)..(129): n is a, c, g, or t
aatcagggttgactgttgggtcacctgaaacacacacaaacacacacatgtggatggttaagcactgttggatattcacacacccacaggtaagccccccgctaactccttgcccggtgtggtcatganggagacctaaccaccagatcggtcaaactctgtggaacacaatgtgtgctgtgtgcactcctcagactattgtagtgttccgtctgccagtgatt

SEQ ID NO: 566240 - DNA, 411 bp, Homo sapiens
gtcattcctagaggcagctgctacaggaacagaggtgccgtgcagtcccgggtactccttgttgctgccctcctggcgctcctggcctctggccgagcttcagaggccgaggatgcctcccttctcagcttcatgcacggctacctgaagcacgccacccctaccgccaaggatgcactgagcatcgtgccagagtcccatgtgggccagcatgccaagggctgggtgaccgatggctttacatccctggactactggaagcacgtttacgacaagttctctgaatactgggagttggaccctgaggtcagaccaacttcagccgggggtgcctgacaccttaataccgcaggtacacctgcctatacatcctgccagctacttgggaactgctgtacaggcttcccctgt

SEQ ID NO: 566241 - DNA, 1375 bp, Homo sapiens
  misc_feature (1138)..(1138): n is a, c, g, or t
ggcaaggtgaacatgctagccagtagtccatgcattggcgggactgtgataccgcttcaggcatcattattcagcttattcagtccacgagagcacccgctgcaactgcgaaatctcctttccaagagcggcagcagctgggtcccacgacacgccttctctctagtgcgctggcatggacccatccgatctgcagaaacggacaggcctccatctcgtcatcagcgggcagcccccgtggaaacgtcctttaatgcttcaactcatgcagagcgacgttaggtagcacatggtcaacagcacagttgggcagccaagctattaatcaccaatatactgggcttcaggtcttggccctatcacaagacggtcatatgtgctcttggcatcatttcaagttcaacttggacccattgcaccagtactcatgtgataacactccatcgcaactttgccgctagccttagcagcgcagtgttcattaaatgctccgtggccaagggttgcaaaccacccccatccagttcacctccccacagaacacacggaagcctgcccctacccttaagtcgtttacccttcaattctcgtaaacggcacacagtggctcaaacctgtcggccacttggacttaccgcgggtacactttgtccccttagtttcgggaaacgcacacacaccagctatttagcacccaatcacgtagtttgagagccatgctatgtaacttaacgcgtacttgatcacgccgtcatttaagacctacacgacacattggctttgcggacggcattttaactttcaagcggccaaaccaccctttatgatgaccaaacaccttctacaccccaattggggggtcaacacccccgttggggcactttatcagcatgattccctcacggcaaatcacaccggcaactgggctgtattggctcataccaccatattacccgctgatggtcaccaagacaaaactgtagcatcccctgggcattcatccccaatcagagggaggccccctaacaacccagacaaacatcggggttgcacctagtcgtacacccggcgcatacacttcccgcccatagatttagttcattcaaccctacacatgcgactatccgcgccatttcancccttagaaatgtgacgcggctttataaccgaatcgttacagacataacctcacgcaaagaataaactgcgattaccgcccaccacacaacctctggctacccaccttgaagtgatcagagcactcagggggggtccgaaattatatgtggtcactgtctgcagcagggttttaattctaacatgcaatagtgattatacagcaccctcatggccattaggtttccacccccccaga

SEQ ID NO: 566242 - DNA, 177 bp, Homo sapiens
tctggttgtagccgccaggtcagttgtgtcatcatcacaggatgtgatcttggagcccagcgtgaacaccaggacacatatggtggccagccgcataaagacacaccttcggggagagaaggagagagtgatgggaagatgaggccctcagggtggctggtcccttggaactggggc

SEQ ID NO: 566243 - DNA, 1200 bp, Homo sapiens
ggtccaatgcgcccgctccagatggcaggcagtccgcgagcccagtccgcctgctgtcgccgccagatagctaggccttctgccagcgagcgccgcggcaggaaccgggcgcagggtgagcgagcccgagccccgccagacccagcccagcccagccctactcccttccctcgatgccagggacatgcagtcactgttgctctagcagagaagggtgagaggaagaacactccagatcgctagcgacgcgccgcaccatctgatgtgaccagttgaatgatatcgtcgagcaaaccattcggattacaatgacagcctggaagtagagactgggaccggggacctgctccgtggtacccggtgctggcgagtcaagcaggccgaagaggaaatgcatcgattcgacggcatcggtgtaacgtccgcaccgtccgagaaggcgggcgacacagcatcgagaaacatcgacagaggatcttccggggtcagtggcctgagagcatcacttgctagtcttgcattgggacgggtcatctctacgagtgaacagcttgtggccaaggccaaggcaagcagagggcaatgatgacgaagttgcacaaggatcttccatagcgtcaaacaaaggcccctgggattttcattagccagcaaaggcgtcaagactaggtgtccatcgtgaaccgaacgcaaagtcgtgggatgggaaattgtgcacgaatgacccctggagcattgaatctgaggacctccatccttgcgcctttcgcgcagtcccacggaacaattataccgattggaaacaagaacgttacgagcccaaggaaaacggggcggaaaccctggtgggtgtacgccgagacagacccagggccccttaaagcaagcattgtgtccccatgcccgaaactctcacacaatacgcgttgaacagcgatagaccctcagggaatactaggacagttggggccaccacgggaagacccgcggtcccaaaggtggcgataagccatcaccggggcaaggaccagtggcagagaggtgatcaccacctgacaacgatggcgagatctacgggatgctagcaacgggggataacgtatttccttgctggttccacccaaaaatctggatgcccaccaatccgtggcaaggccccagataggacagcggatcacactcgacagtctatcgcagacg

SEQ ID NO: 566244 - DNA, 414 bp, Homo sapiens
  misc_feature (154)..(154): n is a, c, g, or t
  misc_feature (242)..(242): n is a, c, g, or t
  misc_feature (252)..(252): n is a, c, g, or t
ccccggtatgtcatgctctttgtctgtcggacccagatgtctgccaaggccccgtagaggctgttcccagaaagcccttctgggtgtcacttgcccgagcagtgcgtctcagagttctcccgccctgattgtcctcccagcatgccagcccagncacaacagtgccttgcttctagtcatgtgtctggctgtttgctgggtccaggccagccctggtagggcacaatggggggccgctctgncaacccatanctctccccaggatatctcatgccccagttctctccctagttccaccaagcactggcactccttagaaaacacagctctagactagttacttgcctagcttacagcacagaactcccctggtctccaaccattcatgggtccctagtgctcggcggccgcaca

SEQ ID NO: 566245 - DNA, 351 bp, Homo sapiens
agcttgaatgctgtaacatgtcatagcttgtccaagatgcatgtggacaatgactcccatgcctgacactgcatccctggtccacagcattcagcatggcttgggagatggtttcaaacatggtgatccgggctcccatgttgggctcccagaaagaactcacacattcctgtacatttgttctggcgcaggtgccactgaccaccaaagtcatcagtccaccatggtgcagccgcatgaggtctcagcagcagcaaatgcacgggcttaacaggtcttcgtggccccaaccctggccaatgccttggctccagtgtcagtaaggcgccaaaacggtttctcaatacaaag

SEQ ID NO: 566246 - DNA, 103 bp, Homo sapiens
  misc_feature (78)..(78): n is a, c, g, or t
  misc_feature (101)..(101): n is a, c, g, or t
aacctttagcaataaacgaaagtttaactaagctatactaaccccaaggttggatcaaatttcggtgccagccaccgnggttcacacgattaacccaaggnaa

SEQ ID NO: 566247 - DNA, 234 bp, Homo sapiens
tggagtgtaccttgtacacatcggaggacagtgtctgactcctgaagaaggaaacgtggtaaaagtattgtccagttctttctaagttggtggctgaacttggtgaggtgtgtttttaaaagacctttagtccgttctacttttcttgaagacagaggactatacgggatataaactgaaaaactgcttgactaatttgactaataaagcctggtctgtcatcagacaatgtat

SEQ ID NO: 566248 - DNA, 263 bp, Homo sapiens
tggcagctatggtaaaatggatggagtcctgtaatttaatcctcagctgtggtagcgtgtggctggtatacgcagtactactcgtttggtgtactttcaatttggcatccagaaaatttggctaaatccatttatcagttctgggaattttttgggatgagtctccgggtttcctaggtatatgatcatatcatcagcaaacagtgacaggttgacttcctctttactgattgggatgccctttatttctttctcttgtctga

SEQ ID NO: 566249 - DNA, 252 bp, Homo sapiens
tgtttttggattggatgaatgttcatgatgcgtccctgtcctgaactgccttttttcctgtagtgggtgaggtctatgctctgttggctcactatgtcttttccctcctattcagagttaggggacgagttggattacacatggttaatcggtttataaaataaggttgacgtagttccatagaaacgcaagcccctttaactgtttagtgataccagcctgggggacagagcaggattccgtttttctata

SEQ ID NO: 566250 - DNA, 1088 bp, Homo sapiens
gcacggatagctgctcttcattcctcttctgacatgtgcatgctgctccccccagttctgggatttcctgaattgccaatgcctggtgccttttcaaatgactagcaggtcctcgtggttgagatgccagtggaaccacaacggagagtgcccttgcctgtctcagtgtagaaggtgtatcattggttgttatacggataagaaccagaggccttgaagggagccaaaaggacaggaaactcctcgagcactgtgtacatctattggaatgagcacattatatcatttcatgaactgcatgcccacctctcttcggcaccggcaagcatatgaaaatcccgttttcatcgtcctaatttgcctattgttttgacacgtacacattacgcggtttagctacttaacaaccattctttggaaatggtcttcagaatcattaagtggcgcctcttgaacgattccaaactagcgcgttaaaatggacgtttaccaatatggtggccttcaagggaactcacattgtatacttaacaacgccagggaactgcgacccagatcgaacggcgcattccttgtgaacaaccagggttaattattcccaagaacaaggtttacacttccgttggctcacggcacattagcaacatagggatatgacataggcagaacaatgtcacgaaataagcattacgcctcaccctttgataacaccaagcccgggacaacattttgcaaactggccttattaaccccacacgtgagtacagatatcgagcagattacggaataagagttcggcacaataggtgaccgtccaactgccgatcgccccacagtgcgtagccgcgtgtcgtgacctccccgatacgcaagacgttcgcgatacccgatcaattataacaacaactgggccgcctgttaacaaccgtttgttgttccccacctccgcgtggaataggatcttgggccatcaagggctctctcattgcgaaggaacgttaggcgcgtagtgtgcgcaacttccatacccgtatatggccacctatctttgagagcgtttaggacagaataattgcctcttataacat

SEQ ID NO: 566251 - DNA, 952 bp, Homo sapiens
ggagggccggcctggacccggcgggcgcactggttccgtagcccattgcgcagctcgagtcctggtctgcagagtgggcccccagaagctttgtgtgtgtgtgtgcacgcgcgcgcgtggtgtgcccaggtgcgagggttcgcgcgatgtgcatggcggggagggaatctgacccgaaagagagcccctacgctgtgcaaggagtgtgctcgctccgatctcgacagaccggtttggcgctctggcggagtcgtctttcagttttccatggtgtgagcccatgtgcctgtggtattagtctctgagagagatgttgcctgaggtgaggagacaatagtactggcatgagactgccttggactgaatgtggagctagatttgtctgggttgagattggatgtttaaagtagaacggcgagaacgaacgaactagcgtacgtccgacatcgatgctatctctcaatgactggtgatgaagttagaggcctcaagacatcccaatggcttgctcctttgcattgggaaagctcttgagattcttatccagcccatgggttttgcggggaaacgcctaaaatggtagactcaagaaacgtctgtattggatccctcttgtgtgggggtacctatcgttgtgtccgtcggatcgttcgactggcctagtctcgtgaggccatgcacattgagtcaaagcagagtgttcgggccggaggaaactttcaagttaacattttaccaatcaggacatgtgccggtcagaaggattcgggggaggttcaaaggttcaggggaggcccgaaagaggcgggttgcatgggttattcaccgttgtggcacaacgacctgggccacgaaggggtccaacagggtgctccggtgagggtaccggggtaatcaggtcgttgaacaaaggttgaaacgaaagtatgtgttccaccctcaattcaggcca

SEQ ID NO: 566252 - DNA, 774 bp, Homo sapiens
  misc_feature (88)..(88): n is a, c, g, or t
ggcacgagggagaaagcaacataaagaaatactcttttggccgggcgcagtggctcatgcttgtaataccaggactttgggaggccangtggggcagatcacttgaggtcaggagttcgagaccagcctggtcaatatggtgaaatcccgtctctgctaaagatagaaagattagctgggcgtggtggtgggcacctgtagtcccagctacttgggaggctgaggcaggagcatcgcttgaacccaggagttggaggttgcagtgaaatcctgccattgcactccagcctgggcgacagagtgagactcagtctaagattatttctttttttgagatggagtcttgctctgtcacctggactggagtgtagtggattgatctcggctcactgtaacctctacctcctgggttcaagtgatgctgatccctgtcaaatacagataaagtttaagttcctcagtggggcatgcaagatccataagtgggctctatgtaactatccagcttcatctcttggccattatgtgcttccctcttcttgctctagaaatactgacctgtttacagttttccagacataacatgttattttcatgtttatgtacttttgtgcatgcagctgcttctgcctagaaatttgatcacccacccactgtcagtttttcagataaattcttattcatccctcaaggttacacctttccagatactctcaaattcaaagtgaaaaaaaattgaccttaataaatgtttactgaattggaaaaaaaaaa

SEQ ID NO: 566253 - DNA, 1017 bp, Homo sapiens
agtccgcctcggttctggttcacttgccgctttagcgtggccccgttgtgatctcttgtggcactcggcgtgttcttacaggcgtctcgtcttgctaacgtcttgggtaagagcccggccgttgtgtgggccgcgtcttgtccatcctatacaggttgctccatccccggtggtacagacccctgcgttatctcccggtgtgggtcctctggcccgcctttttcgtgcccattttccgtatcccgccatgtgggccaccccacgtggtgacccccaatgttcggacatcccacctcgctggtgtgttgctccggagacccctcctccttggggggccctaaagttcacagcgcgacttctgtgaggaaccaaggccccacccactgtcactgcccgaagattttggtggtaataaaatacgcctttggcccaagtggtccgtgggtaataaaccttttctcgcttcaggggggagtaaccaatcccccggttttttgcccaataaggctgcgtgggctaatctacgacgcccgcagtggggagcaacaatggcggttgtcttcctgggtgcccgcaccagccccgtggtttgctctctcaccataggctcaatctgcgttgaactattatgtcatgggggtaacaccacgagcctttctcagaaaaacacttgttctagcgcccgaggtatcatccgacagtgcacctgtttgacccaggaagggctcgtactatttggctgtccccacaataatttctcacggccgtctttcccgcagacactctgctgtcagaggactttccccgggcgcactgggaatcgatgagccccccagtccccgcactcctggagcccacttatatgtcgttgcggcctcctgtgaagtgagtgtcagcacccttctcgcccccagctgtgttggtagaaagtaagaggtgagattaaacaacagtcgctcccagttccgccatttttgcgttccagaaacaacaatttttttccccccccccaagaca

SEQ ID NO: 566254 - DNA, 335 bp, Homo sapiens
ggctcggaccttagctcatgggctgtatggaaattgcaggtattgagtggccatgtaactatccagcttcatctcttggccattatgtgcttccctcttcttgctctagaaatactgacctgtttacagttttccagacataacatgttattttcatgtttatgtacttttgtgcatgcagctgcttctgcctagaaatttgatcacccacccactgtcagtttttcagataaattcttattcatccctcaaggttacacctttccagatactctcaaattcaaagtgaaaaaaaattgaccttaataaatgtttactgaattggaaaaaaaaaa

SEQ ID NO: 566255 - DNA, 156 bp, Homo sapiens
ggatttaagagctagcgaatatagatatacagtgaggtatgacatagtgacaaggcactactaccctgggcgacagggtgagacctgtactcacaaaaaaatcacacaaagtataggtgtagtcagctgtgttctagcaacctgctgctacgcact

SEQ ID NO: 566256 - DNA, 391 bp, Homo sapiens
  misc_feature (36)..(36): n is a, c, g, or t
aagcagtatacagactcaccaagccacagacttgtnttccacaatgcacgtacttacctatagccacgaaggtacccaaggccacacgtttctaaagggttgaactcaaagatatgtacggggtattaaacaaatcccagggggaacagttaacttcaatacaaggtcaaaatcagcaacaagttctacaatccagtgctgatatcagatcacaagcttcaaggcacaattcctttccgaaggcttatcccagttccgtgaggctagcatgaggtgtgtcgcatttcccaggggcaattttctatcctcaattaacccatgcggcaaatgctacgatatttcgtggagcctgtttaacctgcttggggataaccgagctcaaatccgtaaa

SEQ ID NO: 566257 - DNA, 343 bp, Homo sapiens
  misc_feature (137)..(137): n is a, c, g, or t
ctctgctctggaatcgttagagtagaaaatagtgagcggcctagatctaggaaatacttttccagatgagagggacatacgtacatacataagttggtacccgaaatgcattttcttgtttcttttagtctaccatntgacatctaaaatactgtgatacaaactgtcacaagtgacaatttgtctatgaaaggtatattgtttaatacatcctctactatagagtgatcagaagcaaaagacgtatattaatgaaacatcaagaccccactcatctcagcactaagtctgtcagcaccaccatccttcctaaaggaaataaattaaacttgattccttaagg

SEQ ID NO: 566258 - DNA, 281 bp, Homo sapiens
tacagaaggatttgctctgtacccaggctggagtgcagtgtctcgatcactactcacatggccactcaataccggtattgagtggccatgtaactatccagcttcatctcttggccattatgtgcttccctcttcttgctctagaaatacaaaaactggtcaggtgtggtggcgcacacctgtaatcccagctactcgggaggccgagacaggagaatcacttgaacccaggaggcagaggttgcagtgagccaagatcgtgccactgcactccagcctgg

SEQ ID NO: 566259 - DNA, 1072 bp, Homo sapiens
agcgggcttttcccaccccctagcgccgctgggcctgcaggtctctgtcgagcagcggacgccggtctctgttccgcaggatggggtttgttaaagttgttaagaataaggcctactttaagagataccaagtgaaatttagaagacgacgagagggtaaaactgattattatgctcggaaacgcttggtgatacaagataaaaataaatacaacacacccaaatacaggatgatagttcgtgtgacaaacagagatatcatttgtcagattgcttatgcccgtatagagggggatatgatagtctgcgcagcgtatgcacacgaactgccaaaatatggtgtgaaggttggcctgacaaattatgctgcagcatattgtactggcctgctgctggcccgcaggcttctcaataggtttggcatggacaagatctatgaaggccaagtggaggtgactggtgatgaatacaatgtggaaagcattgatggtcagccaggtgccttcacctgctatttggatgcaggccttgccagaactaccactggcaataaagtttttggtgccctgaagggagctgtggatggaggcttgtctatccctcacagtaccaaacgattccctggttatgattctgaaagcaaggaatttaatgcagaagtacatcggaagcacatcatgggccagaatgttgcagattacatgcgctacttaatggaagaagatgaagatgcttacaagaaacagttctctcaatacataaagaacagcgtaactccagacatgatggaggagatgtataagaaagctcatgctgctatacgagagaatccagtctatgaaaagaagcccaagaaagaagttaaaaagaagaggtggaaccgtcccaaaatgtcccttgctcagaagaaggatcgggtagctcaaaagaaggcaagcttcctcagagctcaggagcgggctgctgagagctaaacccagcaattttctatgattttttcagatatagataataaacttatgaacagcaactaaaaaaaaaaaaccaaactcgagactagttctctctctcc

SEQ ID NO: 566260 - DNA, 276 bp, Homo sapiens
ggaaaactgcgaggcgaatggtgaccggggaccgagacatttcacgatctgctcggtagacctggtgcaccgaccaccatgttggctgctagagggcgtggtgtgtcgtccgtgacactaccttctagggttggaccacccagctttcatccaatggcctccccatgttgtgaaggaacttccatcacgaagaatcaatgggtggtaacagactagcacgggaatatgtgcacacaaaacacgagatggggtactgccggtgtgagagcacctggt

SEQ ID NO: 566261 - DNA, 1221 bp, Homo sapiens
  misc_feature (1221)..(1221): n is a, c, g, or t
atgaacaagatgcatgtataaggaagacttcactatgatgaagagagcccatctttgtctaacgctatgctggcatggttctttcccatctgattgtgcatctatagatattgctaggatagattgcgctcaagaacctcactatcctgatcacgctatcctggtctgaatctggccctcttctaatagcatgtgctgaatgggttgaatgtgattctctctcatcctgtgagttcctctcctccacaagccccctgtctccctgtggagctatgaggagtttgtccgtggctgtcaccttgtgagtcttcccgcatcgtactatgagccttggggcatacacaccggctgagatgcacggttatggtgaatcccctagtatcatccacacaatcgtctccggacttcggcatgcttcatggaggaacacatcgcagacccctcagacattacggttatctagcggttcttgaccggcggttccgacagcctggatgattcctggctcgcagatacacctccttcctctacagtttctgtcagcagagccagagaggcagcgtatcatccagcggaaccgacacgtgagacgcctctccgaccttctaggacctgcgaaatacctaggcctggtactatatgtctagcgctgcgaggatggccgctgttcccacgcgcctttccagagacacttcacctacgagcccaactaaggcggatagcggcccattgggtaccgataccgagggccaaacataggtggccaacagttgggccccctcgccatgctcacgcaaaacgtgccagatccgcgaaccaaagtgagggaccaacgagggacaccccggaacggtatcagaaagcacgaaaaacgccgcacgccaacaacgagcgacacacataagcaccaagacacgtgcaacagacacagcacaaagcagtacagccacaggacactgaccacgcaaaccacgcggaccaaggcgagacaaatagagaggagggcgcactcaaggtaaacgacgaccgggaggggagggaaccactagtaagactgaaaaaagagaagcacgaccaagaggcaagagacaagacagcccaaagcaagcgaggggaacaacgcaacatataggctagtcgtagagaagaaggccgcagccaacgaccagcagacagaaaaagaagaaacaataaaaagtggctaatgagacgtccaccaan

SEQ ID NO: 566262 - DNA, 966 bp, Homo sapiens
agcgggcttttcccaccccctagcgccgctgggcctgcaggtctctgtcgagcagcggacgccggtctctgttccgcaggatggggtttgttaaagttgttaagaataaggcctactttaagagataccaagtgaaatttagaagacgacgagagggtaaaactgattattatgctcggaaacgcttggtgatacaagataaaaataaatacaacacacccaaatacaggatgatagttcgtgtgacaaacagagatatcatttgtcagattgcttatgcccgtatagagggggatatgatagtctgcgcagcgtatgcacacgaactgccaaaatatggtgtgaaggttggcctgacaaattatgctgcagcatattgtactggcctgctgctggcccgcaggcttctcaataggtttggcatggacaagatctatgaaggccaagtggaggtgactggtgatgaatacaatgtggaaagcattgatggtcagccaggtgccttcacctgctatttggatgcaggccttgccagcggggacctggagctgacgcctagacacttgtattagctttaatagaaagagaaatggaggagccatagaataattaggatgaattcaggaaggcctgagaccatggaaaacttgcctgtctctacactattttccagagagtttggtgactgaacagtgctccaaagagccgtatgagacctgaagataagtttgttgtatggtgacgccatggggctttcaaatccggggtcggaggcggtgggcctcgacccattctccgtggggggtaccctgtgttatttgggcacacgtgggggcgctggggcgggaagatgaaagcccctcagggtcgggggggacttccgtttggagaaggggccttggggccccggtctcaggggggctgcgggtctcggaggctggtatagtgctgcggtcgcggctggtt

SEQ ID NO: 566263 - DNA, 108 bp, Homo sapiens
  misc_feature (82)..(82): n is a, c, g, or t
gcagtacctgcccagttgatggtcgtgccctcctgggagttgatgaagtccccataggcaaggttggctcgctgcaatcacntgtgtgcaactgcctcctgtgtactg

SEQ ID NO: 566264 - DNA, 919 bp, Homo sapiens
agcgggcttttcccaccccctagcgccgctgggcctgcaggtctctgtcgagcagcggacgccggtctctgttccgcaggatggggtttgttaaagttgttaagaataaggcctactttaagagataccaagtgaaatttagaagacgacgagagggtaaaactgattattatgctcggaaacgcttggtgatacaagataaaaataaatacaacacacccaaatacaggatgatagttcgtgtgacaaacagagatatcatttgtcagattgcttatgcccgtatagagggggatatgatagtctgcgcagcgtatgcacacgaactgccaaaatatggtgtgaaggttggcctgacaaattatgctgcagcatattgtactggcctgctgctggcccgcaggcttctcaataggtttggcatggacaagatctatgaaggccaagtggaggtgactggtgatgaatacaatgtggaaagcattgatggtcagccaggtgccttcacctgctatttggatgcaggccttgccagaactacacctggcaccacagttttggtgcctgcaagggactgtggtgcaggttgctatccctcacgatcaaggatcccgggtatgagtctgaaagcagggactttgcgaagactgggagcatcatggccaaggttgcgttactggactacgggacctacagttcagaaggttccaatacaccggttcccctgggatttcacgccgttataaacgtttaacgaagtacaagtgccacttcaagctgcaggcatctgggggccctgtatatcaaaggttgttgttctatcttagcaccagccagctacatacccatatcgtaaagccggaaggcactacccactcacatccaactagcaacgtgccgcgacatccactcgtcgccc

SEQ ID NO: 566265 - DNA, 916 bp, Homo sapiens
agcgggcttttcccaccccctagcgccgctgggcctgcaggtctctgtcgagcagcggacgccggtctctgttccgcaggatggggtttgttaaagttgttaagaataaggcctactttaagagataccaagtgaaatttagaagacgacgagagggtaaaactgattattatgctcggaaacgcttggtgatacaagataaaaataaatacaacacacccaaatacaggatgatagttcgtgtgacaaacagagatatcatttgtcagattgcttatgcccgtatagagggggatatgatagtctgcgcagcgtatgcacacgaactgccaaaatatggtgtgaaggttggcctgacaaattatgctgcagccaagtggaggtgactggtgatgaatacaatgtggaaagcattgatggtcagccaggtgccttcacctgctatttggatgcaggccttgccagaactaccactggcaataaagtttttggtgccctgaagggagctgtggatggaggcttgtctatccctcacagtaccaaacgattccctggttatgattctgaaagcaaggaatttaatgcagaagtacatcggaagcacatcatgggccagaatgttgcagattacatgcgctacttaatggaagaagatgaagatgcttacaagaaacagttctctcaatacataaagaacagcgtaactccagacatgatggaggagatgtataagaaagctcatgctgctatacgagagaatccagtctatgaaaagaagcccaagaaagaagttaaagaagacgggggaccgtccaaatgttccttgtccgaagaagatcgggtgctcaaaaaaggaggtctcaaatcagaggggggggggaataaccacattctaggatttccgttgataaaactt

SEQ ID NO: 566266 - DNA, 490 bp, Homo sapiens
cctggttatgattctgaaagcaaggaatcgtttggtactgtgagggatagacaagcctccatccacagctccaaacgattccctggttatgattctgaaagcaaggaatttaatgcagaagtacatcggaagcacatcatgggccagaatgttgcagattacatgcgctacttaatggaagaagatgaagatgcttacaagaaacagttctctcaatacataaagaacagcgtaactccagacatgatggaggagatgtataagaaagctcatgctgctatacgagagaatccagtctatgaaaagaagcccaagaaagaagttaaaaagaagaggtggaaccgtcccaaaatgtcccttgctcagaagaaggatcgggtagctcaaaagaaggcaagcttcctcagagctcaggagcgggctgctgagagctaaacccagcaattttctatgattttttcagatatagataataaacttatgaacagca

SEQ ID NO: 566267 - DNA, 378 bp, Homo sapiens
catggcttggagtggtgtccagatgcgtttcttttcctccccgaattcggcacgaggacttaatggaagaagatgaagatgcttacaagaaacagttctctcaatacataaagaacagcgtaactccagacatgatggaggagatgtataagaaagctcatgctgctatacgagagaatccagtctatgaaaagaagcccaagaaagaagttaaaaagaagaggtggaaccgtcccaaaatgtcccttgctcagaagaaggatcgggtagctcaaaagaaggcaagcttcctcagagctcaggagcgggctgctgagagctaaacccagcaattttctatgattttttcagatatagataataaacttatgaacagca

SEQ ID NO: 566268 - DNA, 110 bp, Homo sapiens
ccatttaaatcgcccgggtgcaacctatgctacgccgcactgaagataaatcagttcaactgttctcgactttctcgtaaggaatcgccaggaggccgcctagcgttatt

SEQ ID NO: 566269 - DNA, 1111 bp, Homo sapiens
  misc_feature (1077)..(1077): n is a, c, g, or t
  misc_feature (1099)..(1099): n is a, c, g, or t
ctgtgttgtgttggtatctagtgtagtgctctgtgcgtagcctgtgtgttgtgtcgggcgtgtagtcttatgttgagagtttgcatcatttgctcgagcttgagtggttagggtgtcacgagttctgggtaatagcaggttcgaaatgagaggtcgattggtgtggcgttgtagtacttcagtgtatgtggctgtggtagcccggttgggtcaggttgttggtagtgtcgatctcctagcgtctctgagcgtctttgtctgtggtccgcttatcgtcggttttgtgtcgtgctttgtacagtttccttttttgctttatatgtcttgctcttttttttgcgctctgggctggtggggtgcctgatgcgcgtttgtccctggggctcttgttgtgtgccgttgtcttgtcggtgggtggagctgtctgcgctttgttgggttggtgctagttgtgcagtggctggtgggttggtggcgggtgtccttgtgttccatgctttgtggttccagccggggttggcttcacgtgggacattggtgtttggagcgtgtctgtggtctctcatggagtgggtcttctcgtaggtggtttgtctttgcgtgcggggtgttcgtgtgtgttgcgtgtcgagggagtgcgacagaagatcgagggcaatgtttatttgtatatgttgtgagggggcatatgacccagcgatgtcatccgcatctggcatgtacatgggtcatcgtagatgtcttttatgtggctcgttggttggtttctgagcgttcgcgttcagcctgataggcaggtggaagcgcctgcctgtctgaccatctaagtgctgcttaacaacagtggtagcgtcatacatccagtgacctccaacgttggcgatgcatattatctagtgcagctcagtatggacactcggccatcatcaggccatccaatattctagcataatgtttcgcacgaccgttcacaccatatttggcacatcggaagcacatcatgggccagaatgttgcagattacatgcgctacttaatggaagaagatgaagatgcttacaagctctcgtatagcancatgagctttcttatacatctnctccatcatgtc

SEQ ID NO: 566270 - DNA, 436 bp, Homo sapiens
tcgtgccgccactctctcccttccttccttctttttacctatccatgtggaatttcactttctctatgcctgtcctagtacttagcagactcaagggaacccctgtgtaaatttctgcagttctttttctgcattgctctttttttggggaactctgccacacaacttcaagctgaatcaactttcctgagctactatcactgattctttaagtcagcaaggctgctgagcttctgtttgattttttctggctgagcccatgacctagaagacaactttaggtagaaaattcctggtccttattaaactcactttgacagttatgctctctacacagataccagcgtctcatgtgccttgtttttcaatgtatgaaaatggctggttcatatttttccccatttttttcttgtttttaaggaaaaatcaatgttgt

SEQ ID NO: 566271 - DNA, 1029 bp, Homo sapiens
agcgggcttttcccaccccctagcgccgctgggcctgcaggtctctgtcgagcagcggacgccggtctctgttccgcaggatggggtttgttaaagttgttaagaataaggcctactttaagagataccaagtgaaatttagaagacgacgagagggtaaaactgattattatgctcggaaacgcttggtgatacaagataaaaataaatacaacacacccaaatacaggatgatagttcgtgtgacaaacagagatatcatttgtcagattgcttatgcccgtatagagggggatatgatagtctgcgcagcgtatgcacacgaactgccaaaatatggtgtgaaggttggcctgacaaattatgctgcagcatattgtactggcctgctgctggcccgcaggcttctcaataggtttggcatggacaagatctatgaaggccaagtggaggtgactggtgatgaatacaatgtggaaagcattgatggtcagccaggtgccttcacctgctatttggatgcaggccttgccagaactaccactggcaataaagtttttggtgccctgaagggagctgtggatggaggcttgtctatccctcacagtaccaaacgattccctggttatgattctgaaagcaaggaatttaatgcagaagtacatcggaagcacatcatgggccagaatgttgcagattacatgcgctacttaatggaagaagatgaagatgcttacaagaaacagttctctcaatacataaagaacagcgtaactccagacatgatggaggagatgtataagaaagctcatgctgctatacgagagaatccagtctatgaaaagaagcccaagaaagaagttaaaaagaagaggtggaaccgtcccaaaatgtcccttgctcagaagaaggatcgggtagctcaaaagaaggcaagcttcctcagagctcaggagcgggctgctgagagctaaacccagcaattttctatgattttttcagatatagataataaacttatgaacagca

SEQ ID NO: 566272 - DNA, 1404 bp, Homo sapiens
  misc_feature (1404)..(1404): n is a, c, g, or t
agcgggcttttcccaccccctagcgccgctgggcctgcaggtctctgtcgagcagcggacgccggtctctgttccgcaggatggggtttgttaaagttgttaagaataaggcctactttaagagataccaagtgaaatttagaagacgacgagagggtaaaactgattattatgctcggaaacgcttggtgatacaagataaaaataaatacaacacacccaaatacaggatgatagttcgtgtgacaaacagagatatcatttgtcagattgcttatgcccgtatagagggggatatgatagtctgcgcagcgtatgcacacgaactgccaaaatatggtgtgaaggttggcctgacaaattatgctgcagcatattgtactggcctgctgctggcccgcaggcttctcaataggtttggcatggacaagatctatgaaggccaagtggaggtgactggtgatgaatacaatgtggaaagcattgatggtcagccaggtgccttcacctgctatttggatgcaggccttgccagaactaccactggcaataaagtttttggtgccctgaagggagctgtggatggaggcttgtctatccctcacagtaccaaacgattccctggttatgattctgaaagcaaggaatttaatgcagaagtacatcggaagcacatcatgggccagaatgttgcagattacatgcgctacttaatggaagaagatgaagatgcttacaagaaacagttctctcaatacataaagaacagcgtaactccagacatgatggaggagatgtataagaaagctcatgctgctatacgagagaatccagtctatgaaaagaagcccaagaaagaagttaaaaagaagaggtggaaccgtcccaaaatgtcccttgctcagaagaaggatcgggtagctcaaaagaaggcaagcttcctcagagctcaggagcgggctgctgagagctaaacccagcaattttctatgattttttcagatatagataataaacttatgaacagcagaaaaaaaaaaaaaaaaaaaaggggggggggacggggaaaggggggggggaggggttttagagggccgggactttggtggacgagcgaaaacccagcggcccccgggcgctcgtgcattgtgaaagggcgcggcacttaaatgtggggaggatccgaggggtttctacaagtggggccccaaaccggctctggtgtctggccaagagatctcgggggacaggcgaagaatggactaagtggaatacctgaaggtttgccatggaagtggaaatgtgcactaaaagtggcgggaacggtgtaggcgtacacaagaagagttgtacgcgggggcacgcacaatagagcatgcctcgctctcgtctgcgtattcccgn

SEQ ID NO: 566273 - DNA, 1146 bp, Homo sapiens
  misc_feature (1112)..(1112): n is a, c, g, or t
  misc_feature (1134)..(1134): n is a, c, g, or t
agcgggcttttcccaccccctagcgccgctgggcctgcaggtctctgtcgagcagcggacgccggtctctgttccgcaggatggggtttgttaaagttgttaagaataaggcctactttaagagataccaagtgaaatttagaagacgacgagagggtaaaactgattattatgctcggaaacgcttggtgatacaagataaaaataaatacaacacacccaaatacaggatgatagttcgtgtgacaaacagagatatcatttgtcagattgcttatgcccgtatagagggggatatgatagtctgcgcagcgtatgcacacgaactgccaaaatatggtgtgaaggttggcctgacaaattatgctgcagcatattgtactggcctgctgctggcccgcaggcttctcaataggtttggcatggacaagatctatgaaggccaagtggaggtgactggtgatgaatacaatgtggaaagcattgatggtcagccaggtgccttcacctgctatttggatgcaggccttgccagaactaccactggcaataaagtttttggtgccctgaagggagctgtggatggaggcttgtctatccctcacagtaccaaacgattccctggttatgattctgaaagcaaggaatttaatgcagaagtacatcggaagcacatcatgggccagaatgttgcagattacatgcgctacttaatggaagaagatgaagatgcttacaagaaacagttctctcaatacataaagaacagcgtaactccagacatgatggaggagatgtataagaaagctcatgctgctatacgagagaatccagtctatgaaaagaagcccaagaaagaagttaaaaagaagaggtggaaccgtcccaaaatgtcccttgctcagaagaaggatcgggtagctcaaaagaaggcaagcttcctcagagctcaggagcgggctgctgagagctaaacccagcaattttctatgattttttcagatatagataataaacttatgaacagcagggacattttgggacggttccacctcttctttcaacttcttccttgggcttctgttgatagactggatactctcgtatagcancatgagctttcttatacatctnctccatcatgtc

SEQ ID NO: 566274 - DNA, 456 bp, Homo sapiens
  misc_feature (395)..(395): n is a, c, g, or t
caccaggggtgtgagtaaggtggtggtgctggtggtgggaggtggtcatgttcatgggataataaacgtaactatcaggacttttcagttactctaaatttggtcttcctggtgtgacttggttattttgcttgaaatagatgttcaaaatgtcaacaagtgatggcttgcagtttggcttgaattcctatgatgtgcagtgagttgtatatatgcagtgttaagcctcacaactatctctgcaaatcagaagaattaaacagtttttcagaaagagtaacacggggtcctaggttgatttatttctttctttaccaaacagtggtcggacagtctcccgagtgccagatactctgctagatattagggatgcctttgggcagcttaagtcttancgtaaccttaggcaggtaaatagtctgtagagaagtatatgtggcaactgtctgtggatgc

SEQ ID NO: 566275 - DNA, 755 bp, Homo sapiens
gtggaaggaatcgaaacccaagatggtgaaaggaacgctaatctcgcgtacaccattcgccccaagtaacccagagagacacagaagaaaatgctggtgacaaccttggccagaaccagaacacccaacatggcccatgacctctttacggtaacggtttcgcaccaaactcaatgaaacaagctgaagtaatcgcaaggatacagtcctgcagaggaacaaccattaggcttaataagagaaacagatccagccaaatggctgatgacacagtggcagaactggacaggcatctggcagtgaagaccaaagaactcctcggatgaaagtccactggggccatgcaatactccagagcccagtgttctgctggatcccatgggtggcacattgggacttctctccctcccccatctacacagaagactgtcaccatgctgacagaagcctgtccatgtaaggcccagccttccaggggaacacatcagacatgttcattctcattcctgcttactagtctctgggccggtgtggtcggtctcgtcagcaaaatagctgtgctgacgtggcaaaaggcctgtactcaggcatttggcttcgacttgatgttgccaagggactgaggccacttggcaggattagtaccacctgctcctcatctgtaggaatctccttctcaaataattaggcctctgttcccatgttaaaactctgatattggccattcacaaaagatttggacagcctattagagg

SEQ ID NO: 566276 - DNA, 180 bp, Homo sapiens
tcagcattagtgtacctggagcgaagcggacaggctagtactgccagaaacttcccacccagccaggatcctccggggacctgtacaccacgagcagccagctgaccctgccggcacacagtgcctagccggcaagtctgtgacaagccacggtcaacccacaagccacggtcaacccac

SEQ ID NO: 566277 - DNA, 125 bp, Homo sapiens
tctgatacacctccaatgtttccggcatggcgtgtctagaccatggacggagaacgacagtattcatgggaccactgaagaaagagctgaagttgcaaatcgaagaaggtagcgttaattccagg

SEQ ID NO: 566278 - DNA, 311 bp, Homo sapiens
gcccgtctctacaaaaaaatacaaaaattagctgggcatggtggtgcatgcctgtagtctcagctactctagaaggctaaggcaggaggattgcttgagcccaggaggtggaggctgcattgagctgtgatcactgccactgcactccagcccgggtgacagagtgagaccctgtctggagtgcagtggcagtgatcacagctcaatgcactccagcccgggtgacagagtgagaccctgtctcaaaatatatatatgaagaactcttaaaatgtaacaataagcagacagttccaattttttaaatggca

SEQ ID NO: 566279 - DNA, 820 bp, Homo sapiens
gagtggcggagggcggagggaacttgcaccgaaggtcatcactcgagaccccaaagcctccagggcctgagtgcccagtccagcgtcccaatggatgacaaaaatgaagaaacggagtcccatatgcccctgtcctgtgcccagccatgcccatggccccaggcacactacggagggtccctgtgcctaccaggccatcagctggctccttggccctaggacttcctcatctgccatcccccaagcagcgggccaatgttcaatgagcagtaggcgaagagaagtgccgtccagtcctggctggaggtgtaagcggctctgctaggcacgcccctgcagcactccttcctgaccgtggtgactgatgtctatgagatggcacggggggactcctgaacctgcgtctctgatttccactctggccggctgcaggccttcgggagaggaatgctcctttgacgcagctggagcacgttcggggtgatgcagggagaagctagcccgtgcctgctacttcagcctggatgtgtgtggcgaggaggaggacgcatgaacgaggaacgaggatggggtcactgacggggctgccaagagtgagcgggtgaacgactgtggctgaccgtaatcctggaccgcgctgcttaagccatcttggacagacctccagtggttctatggtttccttttcccaggaacccgtctatttttgttgtgtcctgcggcgagccaggtccgtcctctcaaggcctccaggggtttccccccaacacttcccccctttgggtctgccatttcccggtgccacccggtgggtttttcc

SEQ ID NO: 566280 - DNA, 185 bp, Homo sapiens
cattctagagcctccggctcagtcccaggctgcatctgatccaaatgacacaggaccctcactcatacatcagatgtcacaaggaatgatgtaaggtaccctatgagtgtggaatccagaaacgcaattccgtgttgaccacagacgacccaggtcatcctgacatgtcctctatgtgccctagg

SEQ ID NO: 566281 - DNA, 1985 bp, Homo sapiens
  misc_feature (1985)..(1985): n is a, c, g, or t
ggtccgcgagccagtccagagagttgcggactgaagtaatgtactctcctgtgaggagtagcgtgctaagattgcttgtacagtgcgacgttagctggcgtgccagaggatcacgtgactccttcacatcggagggcccggacgtggtcatcccagaaatgctttatgtcggattacatcatattacgattggcttgcaagaaaattttccgatgaccgtcttaacactctgtctgtgcaggaggactggtgactggcgtggaggactggtacgtcataatcacgtgtgagaggaggcagtaattcatatggaaggctgtagtacacatctgtgttgcatgcctgtgtcaaggcaaaaactgggcagctgatcctataaggatcattgggaaaggagagggctggtctggcccacgactgctacatatggcgggctgaagcagaaagaatgggtacgacatgcgagaagaggcataactgggctacgacgtgttttgacatctcaaggaggcaattaagagagtgcgatagatggctaccaattcttggacaacgttagaggcaaagcgccattgaatccaaagtgaatcgtgtgatgcgtcgcgaggcttcgggtgggtttcacagggagaaccacaatagggaacttaaagaacggttcaacgggctatgaaacatctggcataaggaacggaccggtaatccacttccaaagatccgcataacgaacggggaaacacaagcagcgaagctacccagtgagacgtccgaacaatcggggttgcaccaacagggtttaagcggaagacacgcggaaaagcctcacgccaaagagcgtgtccccggccttgccaagacgcgcaagacaaaaatcaccaacgcatacagttgactgaccatcactgacatattcttctcggaaaaacgccgaacgcacacagagagatcacaacaacacacatttcgggtgactcccaacatatccaggagatacgagacgagagtaaagggagctttacaccggatgatatggggatccaaccaagcatcgatgatcgccccccgtgatgtgataaatacaaagttaaccaggcgccacgtatacatttttgacacagagccaggaaacggaagagagcatcatcaccctaaggaaagcatctagaaccatgtggactggatttctacaagagcgcaactggaagatggccccaaaatccatcgtggtacgggaaacctaacactgggtgccaacagcaagagcggggcaccgcacgatgtgaaacgtcggacgcacttgagcaaacgagtgcagacacacagagggacgctgcaacagagcacacacacaaggcacgccaaacaacgtgacacacgtcgcgaggacacaaaggcaccacactcaggcggcctgcaaccacaggcaagtgacagaccatgccatcgcgaacctcagggcagccaacacagcagcaccctagcggcggacacagcacagtgcacacagacaacgcagagcggggatcacacggccacggacacaacgcccgacgacacaccggcagaaggcgaacacacactgaagcgaactgcgacagcaacgacacagcacagtcacacatggatacaagaacaccacagcgacagagcaacatcacatgccgcagcagtagaacacgatgagaacgacaacaacgaaccgagaaaagtcagaagaaacacaaacgaggaacagagacgaagacacgggagggaagaccacagaagacacaacacaaagcgagagagcgcagagagacagacagagtcgaacgacagcgctccagtgcaaacatcgtaacgagcacaacaagcgaggagagcgcaaacaacagtagcacaagtgacactagacagacacaccaggcggtatagacagacatgcgagagcagacacacacaagtgcgcaagtgacagtcagacgagcacaacagggagaacacan

SEQ ID NO: 566282 - DNA, 200 bp, Homo sapiens
ggacaaaatcatcaacggggcgcacttctcaccgtgctccgtcaatcctatcagcatcttcattacgcacctttccaactatggtaatgaccgccttggcctgtacaccttcaagcacctcgtgcgcttcctgcactcctggaccaacctccggctgcagacactgccccacggtgcgtaggcccaacacggtgcgttgg

SEQ ID NO: 566283 - DNA, 426 bp, Homo sapiens
ccacgtccattcctatagtgatgtggatagaaccaagggcttcccgcagggggcagagcactccagccaagctacagctcagcttttgttgtttatggttttgtttcctgagacagttttttccgggtacactagactggccctaaccacgtgacagtcctcacttgtgctggaattagaggtgtgtacaccacacccagctcttgtaagatatgattttggttatttgtcttggtctgattaaggtaagatcccataacttgacaagaaatataagatttttcttgtaattttagacaattattaggtgtatctgcatagcatttatgttatatgagaattaagtttaagctttccagagagtagcggcctagggagccctccctactctcttgaataccatcaataaagttcgctgcacccaca

SEQ ID NO: 566284 - DNA, 151 bp, Homo sapiens
gctgtgtccacatgcgcacccttctgacccaccctagcccctggcatccccagagccacaagtgatcccattgagggaccaaatacagcaatagacacacgccagtctgagggcaacctggactgaccggagaccgagggaagcagcgtgc

SEQ ID NO: 566285 - DNA, 711 bp, Homo sapiens
ttcggcactattatatagtatagtatatatatatagtatatatatagttttatatatatatagtctagtgtgttatctttcttctctctctccttctttcttctctcttcttttctttctcctctcccttttctctttttcttttttctctcttttttccctcctccctctctcttcctcctctttcttttctcttttctttccctctccctctttttctcctcttcctctctctttcctcttttcccttttcttcctcccctctccttttcttcttcttcttttcttcttcctctcttcctttctccctcctcccttcttttcttctcttctctcttctctcttcttctttcttttcttttcttcttttttctcttttcttctttcctcctcttccctctctctccttcttcctcctctctccctcttttttccttctttcttcttcttcttcctctctccttttctctttttctttcctctttttctttttccccctctcctcccttcttctccctttttttctttctctctctttttctcttcctcccttttccctctcttttttttctcttttttcttttttcctttttcttctcctttctctttcttcttcttttctctctctttcttctctctttctttcttttctctcccctttctctctccccttctttctctttttccttcttcctcttcttttctctcccg

SEQ ID NO: 566286 - DNA, 291 bp, Homo sapiens
  misc_feature (34)..(34): n is a, c, g, or t
  misc_feature (41)..(41): n is a, c, g, or t
  misc_feature (285)..(285): n is a, c, g, or t
atcgttatggctcattcagggcacactaacgaanttctgtntcaaaaaaaaaaaaaaaataaatagcgtatggtgggaagcaccttgcatggagtttctcatggtaaggggtgggaaaatggtggtaaaacaaaagctggatatccattgtgaagtgttttctaaaaaacatttaaagaagcagtaataaggtatatggggatgtaattgtggcccccataagggcagctatagttttggtcctttaacgaaaccctgtgaatgtgaatagaaagaaccctgtgnagttta

SEQ ID NO: 566287 - DNA, 109 bp, Homo sapiens
aaagcgacgtgagaacttttaacacaacgattttattgaagacggggactgatgaggcaccttcaaggagtaagtatgtcaaaagaaatgtatagccaggttctaaaaa

SEQ ID NO: 566288 - DNA, 204 bp, Homo sapiens
agtagtatactatcgtacgtaagagctgcatagaacaaagccttcctggagagagtaaggccaatcgtcagctagctcaacccgtgcctggcacatagtgagcactcaggaaatgttagctgctctatatatttattatatatattataaacaaatttttcacccctgtgtcaaaattggttttatcataacaatcattgggca

SEQ ID NO: 566289 - DNA, 107 bp, Homo sapiens
tcagtgagtcgggacgagagctcgcccttctactgctggatgaatggtgaccgcatcgactccctgctggagaacggccggcagcagacgcacatgctggagtgtca

SEQ ID NO: 566290 - DNA, 150 bp, Homo sapiens
tctagcggatcctgtggtggttgtgggtaggacggggccctggtgtgggacaggacgggggcaccttctccagatgatgttcctggaggaggcaggaggtacctccctctccctctacctggggcactttgagtctgtggctttggggtg

SEQ ID NO: 566291 - DNA, 156 bp, Homo sapiens
cttggttggcgatgcgtgtgccgtggcgtggtgggttttgtatgttctcactgtcattttatttttacgttgttagatatggggagtagtgtgattgaggtggagtagattagcgcgtggttgacagtacgacggttatggagggtgatggtggct

SEQ ID NO: 566292 - DNA, 295 bp, Homo sapiens
attacgtactgcttactcgtaatgatctagtggggaaacgtgatgcattcactgagagtactgagtaagcgatggcgggtactgactgaagatgcaatccgaccaaagccattacattttttgagttagatggggctgtctggatagttgaacctgttccctttataaaaaaggaaagagagaaaatcactggtgtgtactgaatagctcacagattagatgaggaggtgatggtaggctttgggaattaaaagcaaatacattttagtaaggatgtatttttaaatggtcaaag

SEQ ID NO: 566293 - DNA, 213 bp, Homo sapiens
  misc_feature (15)..(16): n is a, c, g, or t
  misc_feature (21)..(21): n is a, c, g, or t
  misc_feature (82)..(82): n is a, c, g, or t
  misc_feature (127)..(127): n is a, c, g, or t
ttctaataaccaacnntctcntcccttagaaaacctaccctgcagttaggactctacactaactcttaaagagtgtgaaaanggcacctttacgtaaaagtgtcaccaaaagtaagcagcgggatgncatatttattatcctgataacacaaatctttagtaacagcagcgttaatagtcaaggaggaacaccatatagtggtaataggttcc

SEQ ID NO: 566294 - DNA, 95 bp, Homo sapiens
  misc_feature (77)..(77): n is a, c, g, or t
gagagaactgacccagtccctgaggacggagaagatgtttcctgccacgatcagtgcacagagaccctctcggaggnggagcaggaagagctaag

SEQ ID NO: 566295 - DNA, 992 bp, Homo sapiens
  misc_feature (13)..(13): n is a, c, g, or t
ggaatgttcaggnttatgagtgacaaatttcttaaacaccagcagcactgagatgtgcactatgggcattcgtacagttgttgtccaaatgcaaacaactttttcatcttggagaagctgagatacagagttcaatagaactacttggaatattttgagaaggttgaatgtttcatctttggctttgttgtctctggagtggggaagtatggagggcttttttttttttttaaagagagtgtgtatgtactttttctctctataagggccagggtgttggtcaaattcaccatcgattaatttatatcttctgtggtgatttttttcaactatataacaagtgccaactaattgtccatgggacaatctacttttccactcaatttatcgttttgagtagggaaaggttcatttattttcattacctggcattaagttaaagaattcattatttggcatacatttgagtcattctgtgacctataaagtgtttttgtaactatctaattctaatggttgcaaagcaaagcacatgactgtaaaaccaagcaaggtgttttagtaactttttccctgaatacttggtagttcccattgatactattccaaaacaaattctgctgtttaaggtggtatattacttggctttggttctaagaaaaagccaggactaaatcacttgttttggtgtttcagtaatcagtttaaaatctaagatttttttttaaattagacctatttaatgaagtgccatgtaattgtagctggctaggtggtgcacgtggtgtcacatcagccgtgcttctgggtggcgttgtttttaacccctttttaacatctcttcgtgcatctcgctgggagacagggggtcctaactctttactggagccatttttctccgtggaaaattccccaggtggtttatttttctattcttaccggtaaccagttgttcgggttggtctttagcaattggcccttgagatttttcc

SEQ ID NO: 566296 - DNA, 141 bp, Homo sapiens
actcgctattcatcggcaccctgattaggaggcgtgctgagcaggggagaaacacaacttcagagtgtaaggctatggaccatgggggtttttcatctgggaatggctcaggaagcccagagtctccagggcattgctctc

SEQ ID NO: 566297 - DNA, 365 bp, Homo sapiens
ccctgcagcagacacagcatctgggaatttcttagaaatgcaagcttcaggccctaccccagatgtaccaatcagaagctggaagtggggcccagcagtttctaggtaacctgatgtcactatagtttgaaaatcattgctttaataaattgttttctttttttaagagacagagtctcactctgtcactcaggctagggagcagtgttatgatcatagcttactgcatttttgaactcctgggctcaaggtattctcccacctcccaagcagcagtgtctcaccgtagctaggactacaggtgtgtgtcagcatgcttgggtaattttaaaacggttttagtttgtaaattacaggtcttgcta

SEQ ID NO: 566298 - DNA, 838 bp, Homo sapiens
  misc_feature (239)..(239): n is a, c, g, or t
ggtctccaagcaagatggcggaggagccgcagtctgtgtggcagcttcctacttcaatggctgctggaggggaaggacttacggatgtctccccagaaaaaccacccggagccccgtcttcggctgcagtttccccgggaacagaggaacctgtgcgacaccaagaaaaaaattctatttatgtgaatcagtccttgggctcttccccagaccaagaagtggaactctctatgagtgtnggcagtgatggtaaagctgttttacattactgcaagtctcaggcgtggggatgaaccaaaagaaaatcaagtgtgctactacatgaatggactttccaggaagagacagtctgaaaagttggatgctgtgtggcaagagacttaacagatgtgatctattagtacatgtgtctactctatgtttatgcataagaaaaacatccatagcatgactggactcagaaaaatgtgattgtattaatgcacacagtcattcataaaagactggtcatgatagtacacccaatgtgctcctaactgtgttgactattaatgtgctgcagatcttggcttccaagggtttgaaaaagggaggcctaaggacgggttttaccccattcttccatgtgcgaggtctcaccactcggcgtgacattgttcacgtcgaaaagttcatactacttaaggggtcccttgtctccaaagggtcacatcacacgcctcagtccacctttttaggccacattggctgcggcggaatacccaaaattgccagtaacggcgcgcccacgcacaagtgtagggcttggcacacttggcgggcagaaccggcaaggggc

SEQ ID NO: 566299 - DNA, 495 bp, Homo sapiens
cgacggtcccaacagcttcactgatgttcatggcactcacttccaggaagccattctcctgagagcttatgtaccttaaatcccagttctgaggtgtctagggaagagacaatcgtccattaaggatgacagcagggaagtctagtaacttctctcctctccacgatacttagcatgggtgttggacacagcaaggtgcctgacccagtgactgtggacttactcatggtggatgcactactctatttccttgggtccctttcccaatttttcacaccccttggctccacgtttgctttaactctcggtatccagaacccatgcttctttgtgagagggctgccctcatgcttctggagtctcctttacctgtgtgcagagagagtgggggatacctagaaacatgcatccctctgagatggaccttgagcaatggagggaggggctctcagtctccaaatctcctctgtgggaggagccagtggcctgcaagca

SEQ ID NO: 566300 - DNA, 389 bp, Homo sapiens
tgagtctgcgttgtcggcgttgtctgggaggcgaagtaaggggaagagcctggatgtaggaccggagatttatagccggcgactcgcacggatcgtctggtagatattacgattaattgttcctcttaaaggtgttggagtagttcgttcgcggatgatattattaagattactgttaagtgttcagaagttcatcattgagtgcttacttttgcgactgttcatcatgagataaaaatatagtcatataagacaaacgtagagggaatattagaggatgccccctcctaatctcgtatagtcaccgatctcaccacccctcgaaggtaaaaacgtacgcccgccagaacggaaatagaataccagcctaccttccaatatcgcccttg

SEQ ID NO: 566301 - DNA, 688 bp, Homo sapiens
  misc_feature (322)..(322): n is a, c, g, or t
  misc_feature (341)..(341): n is a, c, g, or t
agatacgttggtgaagaccagcctgaacgggacagatctgacgaagtggccgggagcatcgtgcgagtgtggtgtctgtaagtgtacagatccgaagtgtcatagggcaatacgtgttgatatgtgtcagacctgcctatggtgtgtgtgctgaggcataaaagaaatgctgatactagctgcacgagccgattcgagactatcaaggacgaacaagcaaatgacgacgattgctacgacgaggaaatagttgcatatgttataactaattacccacaaggatcagaacagtcggggaccaataattacccctagctcgggntccaatgcttgatccttgntgctcccattgtacacggagacggatgttcgacggactgttgtgattctatagacaggtattctagttgcaatgggagctaaccgaggtcatgggttgcacgtagaggggactccagagtgtcctcactggttctcacgcacatcattccaaattgtagctggtgtggactgcgggaattgttcttggatgggcttgcattattgcatgagtatggaagcttattaaatgatcattcatgacggaacggagtctgctaaatttgacaagggtgaactgattgaaatgggacacgggtgaaaaccttattaataaaggggcggagcacttgtgggacccgaagttagg

SEQ ID NO: 566302 - DNA, 290 bp, Homo sapiens
aggtggtctatcacggtggtctagtccacggttggtctagtcacggttggtactagtcacggttgggtactaatccacggttggctagtatgtcacggttggctgggattacaggtgttgaggcagcacgtccgccctctgccgttctatttacgagagagtatctgctctgttgcccaagagtgaagtgcagtgggacaatctcagctcacgctgagatcccacctcccgggttcaagcgattctcctgcctcagcctcccaagtagctgagattacggcactagccaa

SEQ ID NO: 566303 - DNA, 583 bp, Homo sapiens
  misc_feature (477)..(477): n is a, c, g, or t
ggaacattttgcctgtcctagaagcaacggtcttattttcacaggcgcgatttgctattcagaatgaaatccagtgaggcgatgggagatggctgactatgccgaggaagtcagccacttattcaaaacatagaatgactcccaatggcattcaatgtattgtcaggaattgctgatgattgcgaaaaatgtcttactcattgcgatgtctgtaaaggcagcaatgaactcacgggatttttggatggtcagcaaacaggcgctcagagtaaccatgagccacatatatatgctatactagataaactatgtctcttgcctcctgtcataacaattacccagctatattgaagcatgagctcttgtgccgcacgttatcactgatggagtgactgtagtagacatatgctcctctaacatgttactgcacttccaacccaataaacgtcccactatatttagaacttgcgtgatctncacatcgttacctattttagtagcatccagtagctcacgtttaaaacagatttagtaatagttggggacctgctattccgtctacactctcctactgatgtgtgtc

SEQ ID NO: 566304 - DNA, 234 bp, Homo sapiens
ttcttcccacgtcatccgtaaccctacgtcgcgtaatcacataaccgtataacccccgagcaatctcaagtgagcaatatatacaccagcaaacaatgacaaccagtaactactactaatcaacgcccataatcatacaaagcccccgcaccagttctaagtcggctgctaggcgccggccgaggcgaggcgccgcgcggaaccgcggccccgggggcgagcttggcggaatca

SEQ ID NO: 566305 - DNA, 437 bp, Homo sapiens
  misc_feature (61)..(61): n is a, c, g, or t
  misc_feature (116)..(116): n is a, c, g, or t
  misc_feature (158)..(158): n is a, c, g, or t
  misc_feature (192)..(192): n is a, c, g, or t
  misc_feature (271)..(271): n is a, c, g, or t
  misc_feature (300)..(300): n is a, c, g, or t
  misc_feature (382)..(382): n is a, c, g, or t
  misc_feature (410)..(410): n is a, c, g, or t
  misc_feature (422)..(422): n is a, c, g, or t
ggctgcaggaattcggcacgaggctgcccggcgcctgggaacgatggcagcagggatgctnaaaggaggcgctctataggcggaatctggtagagagtgagctgcagccgcctccncaggtgaggagccatgggcggggcagccaagaaagcgggcanaggcccgataccgggaagagccgacacagccacnaaccagacaagcagacaatcagcggacaatcggttctggactcaccctcatccgggcccccagcccgccaaaagcctcngtggctgcgggtgttgggaaccatgcctngcagccagtatgtgcccctcacccaaggcctggctgggccttggagaatcctgtttgcacagcccaggggttgtccgggctntggccggcccccggagcagggaagggtngcttggggcaancccgaagggcccctt

SEQ ID NO: 566306 - DNA, 669 bp, Homo sapiens
tcgcacctgtggtacaggcagacagccaagtgagccaccgctgcccagcacagagcgtccttccccctgtagactagtccctagggagtacctgttgcccccactgactgtggccccctccgtgatcccaacccatctcccgggagccagacagagaccccaggaatggaaagacggagttcctaacaacggatgaaagttcccccactcacgttccccccgtacctcccagccagtagctttccacactttgtcaccacgaaatcacgaggagagatggtgttgggagccctttggagaacgccacgtctcccacggccccctgcatctatcgagtttgccatgtcaccacctctctgatcttgtgctcacgcactgattctttaatagagagttttattttttcgtgcacctctgctaatcatgtgggtgagccccagtggagacacgcgggagacctgtgctagttttacagattgcctccttatgacgcggctccaaaggagaacccagtggtcacggagttgtttctgaccccctgatctctactaccacacaggagaatagtttaggagaaacccgcttttactgtttttgaaaaattacagcttcaaccctgtccagttaaccagggatgcctgtgcccataaaaggtttctcccaccttga

SEQ ID NO: 566307 - DNA, 436 bp, Homo sapiens
ggaagaggaagagacagagagagaagagaggagagaagggaagagagaggaatatggagagaagtaaaaaaggaggaaagagaggaagatgagaagaacagagaagggaggaagaagatgtcgacagaggggggaaagagacagatatatgggaaagtcaggaagagggggcatgtagaaaggtaaggtaaaagaggaggaagaacaggtagaaagcagaagagaggaaaaagacagtggggaaaggagactcagaataaggagagaggaggaatgcagaggcagtggaaaagagagttcgtgagatgaggggaaaaaaggatgaggtataactaaagcaagcaatctctatctctataacacactctctctatctctatatatctactactctctatatatatatatatatatatatatatactactactatact

SEQ ID NO: 566308 - DNA, 357 bp, Homo sapiens
ccatcccaccagcctcgtgccccctgcctttgtgattttgctgaaatcatttctgggcacggaggaaccattcattgagcacacagtctgagccaggccgtctgggtaaaggcgatcggccctattcttcgggttaggaaaccgaagctccaaaaggttcaggaacttgcctctgtcatgagcgagtggcattagcttggtaccttgtatgtcaagctgggcccccaatgccccattctttccaccgggccgtgctgccctcatccatcctcgccatgtgctcaccacggccattccccagttctgggagtctgtgactctaccctagtctagacactttatgatggaagccacggt

SEQ ID NO: 566309 - DNA, 120 bp, Homo sapiens
atcacgcctggcctatgtttatttttaattccttaatacataagaatacattattctcttataatagtttaaggtatacagatattttcttaaccattactgaaagtatctgtggatata

SEQ ID NO: 566310 - DNA, 273 bp, Homo sapiens
aaaaacaggagcagattgtgacagaccattcccatcggacaagtggctcgaacccgacatccaagacccagcgagcagccaatgctcagagcaacctctgggcttctcggtctgactccaaaagggtgagcacgtcgccctcgcgcacggggccatatacattgcggactgatggatcggatcgtgtcgtccatgacttccacgcgcacttgcgttgcactgtccctgagaaccggtcctgcccagaaccttggtgaccctggccagtttgat

SEQ ID NO: 566311 - DNA, 140 bp, Homo sapiens
ggcaaaccagggtggaggaaggagcccagggcaaaaccaggacaaagcttgctgggcagtgtccctcatggagtgcccctaggttccccccatttgtggccaatattttcaagatttccctttaaaaaaattttctggaa

SEQ ID NO: 566312 - DNA, 287 bp, Homo sapiens
cccgactagcccgacaggagacaggcaggtagggctgtgtgggctgcacctcgtaccctcccaccagaacgcacgcccactgggagatgctggtggtgcagccttcccctcccttgtatcagacactttgccaaggctctcccttctcgccccatccttgctagcccgctcccacagcttcctgaggggtaattctgggctagtcgtgtctgtcgggatattcggggctgtcgggctattcggggacagtcgggctagtcggggactgtcgggctagtcggggagta

SEQ ID NO: 566313 - DNA, 504 bp, Homo sapiens
cgatattataatattgtaaaaggaaggtatcccatataagcagctagactgcgagtggtcccgtctccttcagtaccccaacttctgtactgcttcttctgtagtatcttatcaaatctattacttaaccagtataatagcctcagctgagagcaggtcccagtttatcctacacattgatggcttccagacttgtctccctcctacttatctgatccagtttcttttcctaaaatttcccctattcatctgttgtcacattaatatttctaaagtatactctgattacgtcatttcccagtttaaaaatcttcacttgtctggcatctagggatatccattatttggcctcaaaccaatgttgaacaacttttctcccagaactctctttgataagccaaatcgaagccaaacagaataaccaactttcttacacacaaaccacatttgcatgccactatgccttttctcaggctattccttctgcctaaaaagcctctcaca

SEQ ID NO: 566314 - DNA, 212 bp, Homo sapiens
  misc_feature (148)..(148): n is a, c, g, or t
  misc_feature (153)..(153): n is a, c, g, or t
cccacctggcccttttgggtgacacagccggtaaacggaatcacgtatggttctttctgtgggtctgtggcacaacaagaaaaagccgggtcccccaacccctttgtgaaagccccaccatggttggtcccacaccatgggaccaggntggcntgagggatgcccagttgtaacaatgctgctgtcactgtctcattaaatatacatcctcc

SEQ ID NO: 566315 - DNA, 651 bp, Homo sapiens
  misc_feature (335)..(335): n is a, c, g, or t
  misc_feature (337)..(337): n is a, c, g, or t
  misc_feature (640)..(640): n is a, c, g, or t
agaaagatggcggctaccttactagctgctcggggagccgggccagcaccggcttgggggccgacgtttcactccagactgggaaagccgagaagtttccactgggaccactatcatggccgtgcagtttgacgggggcgtggttctgggggcggactccagaacaaccactgggtcctacatcgccaatcgagtgactgacaagctgacacctattcacgaccgcattttctgctgtcgctcaggctcagctgctgatacccaggcagtatcttatgctgtcacctaccagctcggtttccacagcattgaactgaatgagcctccactggtcnanacagcagccagcctctttaaggatatgtgttaccgataccggtaataccttatttctttaatcatcaactcatatcttttaccctcaagaaggagggcaggtgtactcagtgcctatggggggtatgatggtaaggcagttctttgccattggaggctccgggagctcctacatctatggctatgttgatgctacctaccgggaaggcatgaccaaggaagagtgtctgcaattcactgccaatgctctcgctttggccatggagcgggatggctccagtggaggagtgatccgcctggcagncattgcagagt

SEQ ID NO: 566316 - DNA, 770 bp, Homo sapiens
agaatgtcacatagctgtctcacgtatgtcattttccactttaggaatttccagtattccaaatatgagaagctgagaaaacaaacaacaaactcaaaaccctaaaaaccaggatacgtaagggtagatgtttgttgggtgtggatttaaaatggactttttttgccccaagcaacaaagaggcaccttagaaaatagacaagagacaagaagaagagaagctttaagagatatttggtccaaggaagagactcttcagatggaaggtcacatcagctagaaacattaatatgactggatgggctcaaaccactgacttttcagtcaacatccgacagcactaacccagtgttccagagacactgcttgttaaacagtgaaagctgttgctcaattgtgtcatccgtaattgtcaaatattgccatttagtagcacaaggaagtattctccgttgccaagctagagtacccataactcttctgttttgttgaacattcttccccaccacaaaccctctttagaagactgggggcccctaaagcattgaggccgagagtcccgtccttgtgcatgtttgggcattgacccagggccaagtcagtgggagactcctccacgcctacgccaggtccccaggtgacaactgcagtctctggatctgaagtcatccacttttccattcctagctcacctcacccatcgtgaagcctggttagtattgccagagacccgagtgggcagatgcccacaccaagacagtatcttctcg

SEQ ID NO: 566317 - DNA, 106 bp, Homo sapiens
ccgtgatgtatcccacacatacagtctatatcatgagtagctagtatatgcattctatgcaaattcaatctgatctcagcagatctgctgggaataaaaagggggg

SEQ ID NO: 566318 - DNA, 290 bp, Homo sapiens
  misc_feature (113)..(113): n is a, c, g, or t
  misc_feature (220)..(220): n is a, c, g, or t
ctcaaagtactgttaaaagaaaaaaaaaaaagggataggagagacccttaatgtgcaccaccacacccagctaatttttaaaactttgtatagagatggggtctctccatgtngcccaggctggtcttgaactcctgggctcaagagatcctcccacctcagccttccaaagtgctgggattacaggcattagccactgtgcctggtcatgtactatatngctttgaaggtcttagccagaccaatatagatagatagatagatagatagatagatagatagatagatag

SEQ ID NO: 566319 - DNA, 979 bp, Homo sapiens
cggacgcgtgggtttgactacccgccgccggccactccacactgcacggtcttctggcttctggtggacctgaacagatgtcgagttgtcacggatctcatcagtctcatccgccagcgcttcggcttcagttccggggcgctcctgggcctctatctggaaggggggctgctgccccctgccgagagcgcgcgcctggtgagagacaacgacagcctcagggttaagttagaagaccaaggactccctgagaacctgatagtaagcaatggtggcgactctagtttcccatgcaggaaagcaaagaaacgggcttttaagttgatggaggatgaggaaacagatcagggatacaagtctttgaagaagcactgcaagaggcaggaggacagcggccagaatgagaaggcctcggacctggaaactaaactcctcccagatgagacggggcggacaaagagcaagaaaaagagcaaagtgacaggcagcccagccgaagaggatgaggaagagaccaaaaagaagtcttcaaaaagaaaggagaagtgtgaaccgaagaagcagaccaggggctccaagtcttccaaacaacagacgcctaaagagggggcctcacagaactgcagcttcccagggcctccccagaaagcctcgggtaaagcccgaagggagaagcagcacgggggtaaaaggtagctcaggccacctgtagaaagctgaggtcggccagagacagacaagaaggccacggaccggccagatgcacgaaggcacctttcagagaacggtgcgtcgagccgttgacagaatgagccggtgaccaagaatggcagtgccaaacagaggggcccaaagcagggggtactaaaatcagaaagaggaaggcccaaaacgctggccatacaacaccagaaggaaaaagatcaggggtccgacaaagcacagcacagacgcgacacacacaccaccggagagaaag

SEQ ID NO: 566320 - DNA, 115 bp, Homo sapiens
tgagcacctgctctggacactggatctccacaaggtagattggctccatgagtgcgtggctgggctggtcagcacactggcgtagagggagcgccgtgccgttaggccgatctga

SEQ ID NO: 566321 - DNA, 341 bp, Homo sapiens
cctacagactgctaccttggctgggaggtatggggaacttactcacgacacgacgacggaagacgttaattacagtgaactctcacttctttctaaagattgtgactcttaactaagacctggacctgacggaaaactaaaagggtggacgctttgtcaggattctctgggattgcagactttagagctcagtgagatcatcgctggaaataaccttgaagctgatgtggccttgcttgacttgggacagttggaccacccttcttacgcaggttacagagacttcagatcacggcagcggctggggtcagcatccagagtaaccagcacaaagaaccaca

SEQ ID NO: 566322 - DNA, 994 bp, Homo sapiens
aacagcaatatggcggatgacgccggtgcagcgtggggggcccgggggccctggtggccctgggatggggaaccgcggttggcttccgcggagagagtttctggcagtggcatccggggccggggtcgctgccgtggacggagccggggtcgaggcgggagctcgcgtaggcaaggccgaggataaggagtggatgcccgtcactcaagttgggcgcgcttggtctgaggacatgaagtatcaatgtccctggaggagatcgtatctcttctccctgcccagttaaggaatcagagatcattgatttcttcctgggggcctctctcagggatgaggtttggaagcattgatgccagtgcagacagcagacccgtgccggccagcgcgccaggtgcgaggcattgtgctatcggggactacaagtggccacgtcggtctggggtgttaagtgctccagggaggtggcaacccgacatccgtggggccatcatcctgggcaggtctctccatcgtcccccgtgcgcatgaggctactgtcggggaacaagatcgggaagccgcacactgtcccattgcgaatgtgacaggcgatgcggctctgtgctggtacgcctcatccctggaccaggtgcagtgcattgtcatcgggaactgtgcctaatgaaggtgtcatgatggtggtatcgagtgactggtacactcagtcggtggctggaagtgcatgctgggaaggttggcagggcagcttggaatgccaattttaaagacactaaaggttactgaccccgagtttgggaaggggactggttttcccagtttccctataaggagttgtgagactgtatgacccacaaggtttgggagtagaaaggccaggtgtcacacaggtttacaaaacaatgtgttgtgtgaaagaagaagaaaagaagggggatacaggggagtggttatagggtgataatagggaggagagtagatgttgaacaattagttg

SEQ ID NO: 566323 - DNA, 409 bp, Homo sapiens
  misc_feature (272)..(272): n is a, c, g, or t
  misc_feature (345)..(345): n is a, c, g, or t
  misc_feature (371)..(371): n is a, c, g, or t
  misc_feature (400)..(400): n is a, c, g, or t
atgtcacctagatccacgccgcgccgccagaagaaagatgttcgcctgcgccaactcgcccgcacccccgctctgatccgagctggatccagagttgcatatagaccaatttctgcatcagtgttatctcggccagagactaggactggagagggctctacagtttttaatggggcccagaatggtgtgtgtcagctgatccgaaggaggtttcagaccagtgtaatcagcagagacattgatactgcatgccaaattcattggtgcaggtnctgcaacagtaggagttgctggttctggtgctggtattggaacagtctttggcagtcttatcattggttatgncagaaacccttcacttgaagcagcanttgttctcatatgctatcctgggatttgncttgtctga

SEQ ID NO: 566324 - DNA, 820 bp, Homo sapiens
aaagttatgctacgtaccggccctcggtgtatagtacgagcacgactgctatcctgcactggcgtacatccacaggacaagagcatcaaagaggagacccccgattcctgctgaaccccagcagaggacctgtgctggcctgagggcccctacctatgtccttctactactgcgaactgctggctatactaccgcggtcaaactactagctatgggccatgagcgaatacacatggccttcctgcccctcgtcactaccggccctagcccagtagatgacctgcatcaccaacatcctggacagcattatcgcacaggtggtaggaactggaagatccagtgagaaagccctagttgggccgtgtgggcttatctgagtctgtgccgcgcgcggtactttgctgctaaggggtgccttagttggtggccttagcccccttcttacttacccaggttagccgggctcccccgtgtcttatgctcttacccccgcgaggggtggctatttggctagttagggctatgtgttgcgcatgtcccccctcatggcccattgtccccctctccgggccggtttggccctttcccaccgccttcttttcccaagtggacgtcctactatgtctccgcgtccagtgtgcccctacgtgcccgttggtggattgggggctgcatcccgcgggatgttccctccccgggcactccttttcccgccggccccctaccccttgggccttgcgtcgtgcgttaccctggtacagccctcccctttggggcggggccccccccttgtgtcttctggtgcccctctgtttgtcct

SEQ ID NO: 566325 - DNA, 361 bp, Homo sapiens
  misc_feature (110)..(110): n is a, c, g, or t
caaagggaatttttatattcaattgttccaataatttgcccaagggaacaagttcccctagggataaaagggcaatctttttttagagtccatatcaacaaaagggtttncgccctcaatgttggatcaggaaatcccgatggggcacccgctattaaaggttggtttgttcaacaataaaagtccaacgtgatttgagttcagaccggagtaatccaggggggtttttatttatttaaaattcccccctggagaaaaggacaaaaaaaaaaaggcctttttcccaaaggcccttcccccgtaaataaaattttttcaatttagtattaaacccccccccccccaaaaaaagggtttgtta

SEQ ID NO: 566326 - DNA, 298 bp, Homo sapiens
aacaccagttcagtatatatgtcaggtgcagttgaaatgcttcacagcttgaagtatgctatgcctgctgggaaagagaattctagaatattctgctttttatagtcacgtggcatccagttaaacttccaggagtaatagaggcatggattaattagaggtagtacgatatcatccacaatagggaagcacaagtgagctgtgcaagcaatgcagtcctcagaagtatcctaatgatgtcagtcataatttagataataagtaaattgagaaggagcctacgctctgacacccaggc

SEQ ID NO: 566327 - DNA, 248 bp, Homo sapiens
gccttgctcggtccatgccatgcactttctctcttgccagagttctaagaatgtgtgttctgtcccttagactttctgcagatgagtccccaggaagctccacgtgaagttcagtgacatgcctcaggcctcagagtgccccacatcgcctgtcgactctctcatggcctgtgcccacgaaatggattctctgactttgggcatcggagtgcaaagagatgcccagcatcaaatgtgcttgtagttga

SEQ ID NO: 566328 - DNA, 1142 bp, Homo sapiens
tggggaatgaaaaaataactttattccatggtggggagcgggccgatttccagcctcaaaaccttctgggaactggcttcttgggtggccgggcagccttggtggaccttgagcactgttagaacgccgcactggtctggctcaggaggccgggaattcgcccattggtggacagattgtcaccgatctgggactgtccctgaacgcagggggagacagtgtggtacaagacatgtgtttctgtggggccgctttctctcagaagcgggtgtgtacttgtgcgggattgatagtgcaaaatagctcttcggcgggatagacaatggggctccctctgtgcattcttctcactcttgggctcaccacggccaagagaggattccggcccttcgaaatgtgggacacttttaccagtgtgaagaggggcacattttcgtggtctacaagtgtttaggtgtgcccttcaatatagaccactccttgtgggtgtgttcttgtgaagagcccacagaacgcggagtgttctcgtgtggatagaatacgcggggggaaagctatcaatcactgtttggcacagagtttcttactcacacagaagaggggacacctatctattcgtgtgtgttgtcgagaaacagaatgtggtctcggctgtgacatatgtggggtatagggacacgggctatacaggttctgtgaaatgtgctccagacaaattttatttcccggggggagcggcacagaggtttcaacacatgtgggtatgtagacgtgaatattgcggcgcggaagactaaacgaatgaggatgacgaaacaacagggggcccccgaggagaacatgtgtttggcaagagggcacggagaataacgagcagggggaagaaagagaaagtgtgcccccccccggggggccgggatatgtacaccccactattcacaatacgtgatgggggggcggccccccaagaggggacacaccagaggggcgtggtgtatactgcgagtggagagcaatgtggggcatcaaagaaagggagaaatacccaaaatatgttggggagcaaaaaagaaggggccaccagaaagcacaaggaaggaggagaaattcgacataacaccccgatggaaaaatatagacca

SEQ ID NO: 566329 - DNA, 1015 bp, Homo sapiens
  misc_feature (198)..(198): n is a, c, g, or t
  misc_feature (940)..(940): n is a, c, g, or t
  misc_feature (982)..(982): n is a, c, g, or t
gggtggcaggggccagcccgccgggtccccgccgcgctctttgtcctggccgcgcgcgggcggacgcgtgcacccccagggtgaggggaggtgtggagagcgcgcacgggagcgcgcgggaacagctcgcgcccgccgggcgtcggcggcgcgcgcccctccgccaggcaagcagcgagcacgcgcgtcgccgccggncccggcccctcccccccgcgctcgcctcggaacttgctgactgcgcggccgggaggagccgagccggggcggcggcggcgggaggctacagcgcgcgggggtctcccgcgtcccctccgcctcgccgggagctcgcgccctcgcccagccgagctcccacccccgcttttttccgaaggcgctgggcggcgccaccctccggccggagcccggcactgcacaaccccctccgactttcaatgttccacactccccggccagagcctcctcggcttctttttttccctccccccccttcccccccccacagctgcctccatttccttaaggaagggtttttttctctctccctcccccacaccgtagcggcgcgcgagcgggccgggcgggcggccgagttttccaagagataacttcaccaagatgtccagtgataggcaaaggtccgatgatgagagccccagcaccagcagtggcagttcagatgcggaccagcgagacccagccgctccagagcctgaagaacaagaggaaagaaaaccttctgccacccagcagaagaaaaacaccaaactctctagcaaaaccactgctaagttatccactagtgctaaaagaattcagaaggagctagctgaaataacccttgatcctcctcctaattgcagtgctgggcctaaaggagataacatttatgaatggagatcaactatacttggtccaccgggttctgtatatgaangtggtgtgttttttctggatatcacattttcatcagattatncatttaagccaccaaaggttactttccgcacca

SEQ ID NO: 566330 - DNA, 1014 bp, Homo sapiens
  misc_feature (198)..(198): n is a, c, g, or t
  misc_feature (492)..(492): n is a, c, g, or t
  misc_feature (496)..(498): n is a, c, g, or t
  misc_feature (500)..(504): n is a, c, g, or t
  misc_feature (506)..(506): n is a, c, g, or t
  misc_feature (529)..(529): n is a, c, g, or t
  misc_feature (533)..(533): n is a, c, g, or t
  misc_feature (559)..(559): n is a, c, g, or t
  misc_feature (575)..(576): n is a, c, g, or t
  misc_feature (580)..(580): n is a, c, g, or t
  misc_feature (939)..(939): n is a, c, g, or t
  misc_feature (981)..(981): n is a, c, g, or t
gggtggcaggggccagcccgccgggtccccgccgcgctctttgtcctggccgcgcgcgggcggacgcgtgcacccccagggtgaggggaggtgtggagagcgcgcacgggagcgcgcgggaacagctcgcgcccgccgggcgtcggcggcgcgcgcccctccgccaggcaagcagcgagcacgcgcgtcgccgccggncccggcccctcccccccgcgctcgcctcggaacttgctgactgcgcggccgggaggagccgagccggggcggcggcggcgggaggctacagcgcgcgggggtctcccgcgtcccctccgcctcgccgggagctcgcgccctcgcccagccgagctcccacccccgcttttttccgaaggcgctgggcggcgccaccctccggccggagcccggcactgcacaaccccctccgactttcaatgttccacactccccggccagagcctcctcggcttctttttttttttttttccnaaannncnnnnnanaattattttaatttttttaattnaatntttttttttttttttttttcccacantgtatcggcacgctanngtcngggcggtttgttgaattttccaagagataacttcaccaagatgtccagtgataggcaaaggtccgatgatgagagccccagcaccagcagtggcagttcagatgcggaccagcgagacccagccgctccagagcctgaagaacaagaggaaagaaaaccttctgccacccagcagaagaaaaacaccaaactctctagcaaaaccactgctaagttatccactagtgctaaaagaattcagaaggagctagctgaaataacccttgatcctcctcctaattgcagtgctgggcctaaaggagataacatttatgaatggagatcaactatacttggtccaccgggttctgtatatgaangtggtgtgttttttctggatatcacattttcatcagattatncatttaagccaccaaaggttactttccgcacca

SEQ ID NO: 566331 - DNA, 250 bp, Homo sapiens
  misc_feature (104)..(104): n is a, c, g, or t
  misc_feature (145)..(145): n is a, c, g, or t
  misc_feature (157)..(157): n is a, c, g, or t
  misc_feature (197)..(197): n is a, c, g, or t
  misc_feature (223)..(223): n is a, c, g, or t
cgggctcctgcaggcggggagatgtgcgcgccgcgatccggtacgtgggcctccgggttgtcccctctggggggggagatcctccctccggagcccccctacanccctcccggaagtgaatatttggaggaacagggatgatgtnctgctctcccangagacagacaccgagtcggtctgctgaagccctttctganactctggacgtctggatgctccactntgcttgacaagatgaagtgcgtcttgg

SEQ ID NO: 566332 - DNA, 249 bp, Homo sapiens
  misc_feature (160)..(160): n is a, c, g, or t
agagggtgttcgactgctagagccgagagtaagcgatgcctaaatcaaaggaacttgtttcttcaagctcttctggtagtgattctgacagtggaggttgacaaaaagtataaagaggaaaaagtatgttgctccagaaaagcctccgtaaggaacaaangacaggtgagacttcgagagccccctcatcttcttcttcagagcaggagcaggagagattataacatatttcagattgggaaaatgagg

SEQ ID NO: 566333 - DNA, 162 bp, Homo sapiens
ctagtagccaaggcgtgagctagtagccaggccgtggactagtagccaagccgtggactaggtagccaggccgtggactaggtagccaagccgtggactaggtagccaagccgtggactaggtggccaagccgtggactaggtagccagccgtggactaggt

SEQ ID NO: 566334 - DNA, 697 bp, Homo sapiens
  misc_feature (7)..(8): n is a, c, g, or t
  misc_feature (10)..(10): n is a, c, g, or t
  misc_feature (17)..(17): n is a, c, g, or t
  misc_feature (405)..(405): n is a, c, g, or t
  misc_feature (416)..(416): n is a, c, g, or t
  misc_feature (513)..(514): n is a, c, g, or t
  misc_feature (683)..(683): n is a, c, g, or t
aggaacnncnggggaanaggggaagatgggctgtgacccagaccctctgttcagagtggtcctgtctgtagattagctctttcctcctgaccctgagaggaagtgcgaggagacaggacaagatgggaggaggcattggaatctgattttactggttgaaaggtagcgctgtcacagagctgactgatagagcttattccagggcatccttaccattcatcattgtctcactggctcctttccaaaagcttcctccattaagagggtcagagcctcagcctcctttctttctagtgacaatttcctttgttttaggggattttaaattagggtgctgaaggcctggaagaacatgggtgggaagagaatgtaactctaagtcatgtgtgtcattttcctttgggntgagagagtgnctgtttgtgtaatgagacctttctctgcataacttccttttgtaagacctcaagggcctccaccagcaggtaatatttcagccatgatccagtgtgnngaggcacaggtatcagagggaagagcatgagctgagtgtacctgaccacagtgggccattgtcatgggctatttgctgctatgaggatcaagacttagggcagaagttgcccagttctagggatctccagacattgttcccaagacccaagcctaacttcggtggcatnttcctgggtgtgtt

SEQ ID NO: 566335 - DNA, 109 bp, Homo sapiens
tcgagctcgcgacccatagacaccatctgaatggtagccatcttcggatcgttcactgttccttctttcacgctctctctctggactgccatagtctcggtagtcatca

SEQ ID NO: 566336 - DNA, 343 bp, Homo sapiens
  misc_feature (7)..(8): n is a, c, g, or t
  misc_feature (10)..(10): n is a, c, g, or t
  misc_feature (17)..(17): n is a, c, g, or t
aggaacnncnggggaanaggggaagatgggctgtgacccagaccctctgttcagagtggtcctgtctgtagattagctctttcctcctgaccctgagaggaagtgcgaggagacaggacaagatgggaggaggcattggaatctgattttactggttgaaaggtagcgctgtcacagagctgactgatagagcttattccagggcatccttaccattcatcattgtctcactggctcctttccaaaagcttcctccattaagagggtcagagcctcagcctccttcctacaggcagagccccaagtccatgagtctccggaacctccctcttccccagcccag

SEQ ID NO: 566337 - DNA, 614 bp, Homo sapiens
atttatgagacttcctttaataagtgtgcgctggttcaaggttgggcatgggtggaggagcaaaatttgactacagacatgtgatttcaggttaatgacatccagagagtaagatcagattcgtctcgacaaagagatgggcatatataccaagctggtggtggtagcatccgggatagttgagaatatatctgagaagtagactagatgctctcaaagtgtgtgagtggggcccttaaaactgggattgcaaaatgatgctctaaacataggaatggttgaagaggtcttgcagtcttcagatgaaactatatctctagaagaggcactgagaatggacgttgacagcaatgtcatcgcaagggccatccggaagtgatattagagctttgaacaaaatctgtctgttcaggcagagagctatatttggaggaagcattgacagaagcgaaagagatctgataggaacagtctggggtgggcctgcaaatttagaggctattgctaagaagggaaagatttacgtaaataatcggttgttcgtgtggatgtactccaagtaaagctccagtgagtaatatgtataaattgttaaatgatattaaaatatgaac

SEQ ID NO: 566338 - DNA, 451 bp, Homo sapiens
tttaacaaaccctgttcttgggtgggtgtgggtttaatactaagttgagatgatatcatttacagaaaacggcgctttgggaaggggccggatttatcttgacctttcgaacagggaggaatggggaggggatttaaaccgacctggattacttcggtctgaacttagatcacggggggatttaatcgttgaacaaaccaacctttaatagccgctgccccatccgaatgtcctgatccaacatagaggtcgaaaaccctattgttgatatggactctacaataggattgcgctggtatccctaggggaacctgaacccttgggcaagttattggctcaaaagaggataggcctttgtttccactgggaaatttttagcctggtctggttggaggttaagttctgcttcgaggttcccccaacccgagaaattaatgcacgtttgggggtt

SEQ ID NO: 566339 - DNA, 674 bp, Homo sapiens
  misc_feature (536)..(536): n is a, c, g, or t
  misc_feature (624)..(624): n is a, c, g, or t
  misc_feature (647)..(647): n is a, c, g, or t
  misc_feature (663)..(663): n is a, c, g, or t
  misc_feature (674)..(674): n is a, c, g, or t
acaaagacagttttgacacccctgtgatttcatccctcatccaaccaattatttgtacccatttcctagccccctgcctgccaattacccttaaaaaccttaccctccatattcttgggaagatagatttaagaaatattttccatctcctccctcagctgccctgtgataattagattctttctctactgcaataccttttgtctcagtgtattggctttctctgtgcaatgggcaagaagaatctgcttgagctataacgaatatgttcaatttttatttgtcaataatatctcaataaagcttgaaaaatgggatcttttaaatatatattttatctatctttgtttcatttacctttttcttaataaatcccttttaatggaatttatgtgtgtatttaagaaacatacttactccaaaacagttgataatattttgcactgttaaactatattaattttatttctatagaattataaaccaagagtttacactgtggcattttatttcaacattatatttctcactagttntagaattgaagactaattttgacaggaatcttttcgtttattacttttgaattctgtttcccctcttcatgtctgtttgactttgctnttattgacagttttgttcacttntgctcatgggcacttntcttgctctcn

SEQ ID NO: 566340 - DNA, 360 bp, Homo sapiens
ttcaaaaccagcctgggcaacatggtaaaaatctgcctctacaaaaattagttggacgtggtggcatgcacctgtggtcccagctactccggaggctgaggctggaggattgcttgaatccagaaggcggaggttgcagtgagcaagattgtgatggcaccactgcactcaaggctgggaaatagtgagtccctgtcccaaaaaaaaaaaaaaaaaggggggcctctttaagagggtctccatagcgggggggggggcccaaggcctataatttaagcatttgggggggttaaggcggccagatcgtttgaccccagggcctaagggccagcctaggcaacaggggaaacccccgttttt

SEQ ID NO: 566341 - DNA, 279 bp, Homo sapiens
  misc_feature (45)..(45): n is a, c, g, or t
  misc_feature (143)..(143): n is a, c, g, or t
  misc_feature (207)..(207): n is a, c, g, or t
  misc_feature (247)..(247): n is a, c, g, or t
gcgggcgactttccatccctcgaaccaaggcatgttagcacttgnctccagcatgttgtcaccattccaaccagaaatagcacaaatgctactgcgcgagttgcagccaatcttctcaaagcaaaccgacttcctaacaactntctacatctggctcgctgcaggcgactcaatgaaatccatctttaacaccacaatcattgtttnacacccagtgtgcaagccaggagggcatgttctgagtctntccatctgaagataccagcttcaaatactaat

SEQ ID NO: 566342 - DNA, 120 bp, Homo sapiens
ttagctccttggcacgaatgaaatcccactgtggtccctgcctcgggcgggaggagcctgtttgctgaagcggctggtaatggccacgtggcgatttcattcgtgcccaaggaggtcaca

SEQ ID NO: 566343 - DNA, 1237 bp, Homo sapiens
  misc_feature (242)..(242): n is a, c, g, or t
  misc_feature (401)..(401): n is a, c, g, or t
  misc_feature (782)..(782): n is a, c, g, or t
gaaattcaatggatggaggaagaggagagggcagttagcaagacgggatgtgagaaccattgttgctgtaatgtgccacgtggtgaatgtgttgaactacaccccagggtcttatagagaggaagggctggacagtgagccttggcataatacacggcgtcctccttgtgagcagaaccacatctacggcagtagaactctcgggttgattaagcaaaaccaagagaagttgtcactcgttntcactcacacaaaccacgggtagggacaggcccaaggcacttgggatagtgttaacagccctggtttatactcccagccaacatttggcgcagggtccacacatgggtgagcacatatgcgttgaaggtcccaggccaactgcagaacgcattaaggcntttgaagcacacgcataagttgaggaacaccctggtctctaacgaacagaaaataataaaagtaacaaattatgccaagaatattgggtggcgacattgtacttggaggtcccctgcgtaactccagagagagcttggagaaatggcagtgatcaggcttgtagaccatcaggcaggccacgagtgttatgcaggtagaaacttgtgtgatttgttggcgacctgtgaactacacagaccctgttggtgatctgatacacttgaacctgaagccctaggtctcataactaacacgacaatagtaaacaaacctctgacgggggtgggcacggggtaacgcacatttcggaccatatataatgaggtcgcgtattaccaatntcacctgaggccgtacgttattaacaaccgtcgtgtatttgggtcaaacacctggtagtctaacccaaattttaatctccctttgtaggcaccatttcccctttttgcacagcggagcatataaacgaaatcagggccgtaacgattgtgcccttcccaaaaatggtgcaccccagtaatgtgcattggcacatgtacaggcccatttggtacacaggtcgaatactgtgtcaccgacttctacaccaagccaactggacccttcatccacggaggtgtcttgaacaacaactatagcctacagaacatgaagaaccctttaggtgtacctcacatcatccatttatctagtgccgacgacacgaaccactaccgcacccatagaccaagtacagcagcgctaccaccaacaacacacaacaacacacacgaccgccgtcacacaccactccagc

SEQ ID NO: 566344 - DNA, 877 bp, Homo sapiens
cgccgtggttcaggcctgtaatcccagacgctttgggaggccgaggtgggcagatcagctggggttgggagatctgagacctatccgttggcataactaactggtgaaaacctccatctgctacgtaagcaatatagaaacttagtgtgggcgtggatggcatgcaactgttagtccgcagtttactcgggaggcgtgaagctaggagaatcacgttgaacctcaggaggtcgggagatggcatggtgagctgatgagtcagtgccaaatgactcaagtctgggcgatagagaaagactccgtttcaaaaataatgtagtaggattataattaataaaaagaaataggagcgtaagaaatttaggtaaaagatactatagcattttacatgtgaagtgaagaagatacgaatatggactcatgattttaaaaatacattacgaactgtatttgttaaatgctctggaatgaataagatggcttataacaaatgttacccctgtggcaaatgagcataccgcgttgagtcttgtttctaatatgattctccaaatagaaggagcaggagctcctgtgcgagaaatggttcaataccgaagtcctgggaggggacgatacaggcctgaggtgttcgaaaaacgtttccaacgagtcaagtgatgtcagcaaacatgagactatgaattgcctgcaggggtattccctggtctcaaaaacgggacgctggatcctagaccggctaactttacacacttcggaggtggttcacaacacgaagaaaggggcggacacacggtcatctcttcgcccctcgcccacgtccggttgacaagccagacaacaacaccccgcgacatcaccggcccaagctctaagg

SEQ ID NO: 566345 - DNA, 439 bp, Homo sapiens
tcttgtaacttaccagaattgatctggcaggggccaggcacatgtggatcacgtagaggtcaggagtttgagaccagcctggcaactatggtagaaatcctgtactctaccaaaaatacaaaaaaattagccaggcttggtggcatgccgctgtaatcccagttactcaggaggctgagacaggaaaatctcttgaaccctgtgaggcagaggtttgcggtgagccgagatcacgccactgtatcccagcctgggcgacaggagcgagactccatctccaaaaaaaaaaaaaacaaaaaggtttaaaaaaaagataggccccagggagaagttcccctgtaattgaaaagcgaagtgggtaccctcagagtcttaaactatttggaaaattctcccagtatttgaacacacccacccttattatccccagttcctaata

SEQ ID NO: 566346 - DNA, 202 bp, Homo sapiens
  misc_feature (115)..(115): n is a, c, g, or t
  misc_feature (128)..(128): n is a, c, g, or t
  misc_feature (131)..(131): n is a, c, g, or t
  misc_feature (137)..(137): n is a, c, g, or t
atgaggagaagcatgcagtcaatagcatgtggagcaagatgaatgtggagagcatggaggtgaagcattggcagcatcatagttgtttcccatggccaaagagattttttgacanatttggaacatgnagnatccanatgccatcatgggcaacaacaaggtcaaggcacatggaagaaggtcatgacattcatttggagat

SEQ ID NO: 566347 - DNA, 456 bp, Homo sapiens
  misc_feature (1)..(1): n is a, c, g, or t
  misc_feature (171)..(171): n is a, c, g, or t
  misc_feature (217)..(217): n is a, c, g, or t
  misc_feature (251)..(251): n is a, c, g, or t
  misc_feature (273)..(273): n is a, c, g, or t
  misc_feature (276)..(276): n is a, c, g, or t
  misc_feature (279)..(279): n is a, c, g, or t
  misc_feature (288)..(288): n is a, c, g, or t
  misc_feature (293)..(293): n is a, c, g, or t
  misc_feature (295)..(295): n is a, c, g, or t
  misc_feature (300)..(300): n is a, c, g, or t
  misc_feature (304)..(305): n is a, c, g, or t
  misc_feature (311)..(311): n is a, c, g, or t
  misc_feature (318)..(319): n is a, c, g, or t
  misc_feature (324)..(324): n is a, c, g, or t
  misc_feature (334)..(334): n is a, c, g, or t
  misc_feature (347)..(347): n is a, c, g, or t
  misc_feature (365)..(365): n is a, c, g, or t
  misc_feature (387)..(387): n is a, c, g, or t
  misc_feature (391)..(391): n is a, c, g, or t
  misc_feature (400)..(401): n is a, c, g, or t
  misc_feature (405)..(405): n is a, c, g, or t
  misc_feature (409)..(410): n is a, c, g, or t
  misc_feature (426)..(429): n is a, c, g, or t
  misc_feature (432)..(433): n is a, c, g, or t
  misc_feature (441)..(441): n is a, c, g, or t
  misc_feature (443)..(443): n is a, c, g, or t
  misc_feature (445)..(445): n is a, c, g, or t
  misc_feature (452)..(453): n is a, c, g, or t
  misc_feature (455)..(456): n is a, c, g, or t
natttactaaagccacattattcatacagacaaaacttttatagcaaaaccttggtacatgagcattaataatttgaatactatatggatatagaagatatttaaaaaatggaaacaatgtattccaaaggctgtaagaggcacaatatatatgcttgtactgggcctgcnagcattatactataattcattaaatatgatccaagaagttgcaganttttcagcactatgtactgaaaagataaaaaggnatatcatagctactcttacgcngangangcatctacnatcangnctacnaaannggggcngcgggcnnaaccnaacaggtaangccttagggtttnggggggataatacatgtntggctttttcatgttcatttgngggngggggtagnnaggngggnnggggggaaaggggggnnnnggnnaggggggnangntaaaggnntnn

SEQ ID NO: 566348 - DNA, 937 bp, Homo sapiens
gacgccctgcaggcccacgtgctgggcgggaccctgaccgtggccgtggggggtgtgctggtggctgccttactggtcttcactgtggccttgctggttcggggccggggggccggaaatggccgcctccccctcaagctcagccacgtccagtcccagaccaatggaggccccagcaccctacacaccaaggtcccaccctgcacgcggagccaccctcgacctcgtgcacgcaagcgcagctgcatcttctgagacctgggagcatgccagggtgctacggtttatgccagtgcagcctgaggaggagctatgggacccgacggagccacctctgtgacatgggggagcttgctcgggtggcaagggatgccgggaggggtagagaggcaagaggaccgacagcgtgcttggaagcacgagtgtggagatgtagacatgggcacagaggcaagtctatcactagttgataggtcacacacgtgagattcgagcaactcaagtagcgtgagcaagaccggtgccctgagagtacagtccggcctcatggtgtctataggacgatcgttcaccatcactatgagattacataacatatcatacgaagatacccatccatgaggtttaccacccctagtagtggcttaactcctaaagtgaaacgcgcggttacgaagggcgaaacggaccacccaaattaggacacctatccagtagatatatcgctaggcggcacttcacgaacagaaaaaccaaaagaggggcataacaaggagggaggcacagcgagccacaccaccgtaccccaaaatcgaaggcgggtgagacttccacacgacaggaccccctgccacggacaagaagacaacgggcagaagacatgtgataaacggaacaaaacgcccaaaacattgggacagagacagatcacctaggg

SEQ ID NO: 566349 - DNA, 566 bp, Homo sapiens
taggtagaggcgacaaacctaccgagcctggtgatagctggttgtccaagatagaatcttagtcactttaatttgcccacagaacctctaatccccttgtaattactgtagtccagggacagctcttggacactagaaaaacctgtaagagagtaaaattaacacccatagtagctaaaagcagcaccataagaagcgtcaagctcaaccatactaaaatccaaaattatgaatctcaacccatgacatctatcaccctatagaagaactaatgtagtataagtaacatgaaacatctcctcgataacctggtcgataaacatgaatgacattacaccaattacaacaacaagtcatatacctcatgcaccaacaagatgtctaagaaggtaaacagtaagaatcggaatcttaccgcgttacaaaaatacttacatcacatataagacgcgcccaggacctgttagcgggacctccggcaagtagctatcatgtcttataggacgttgatgtcccaggtcatgctcttattaaacgtgatgacgccgtgaaggggcataacgcaa

SEQ ID NO: 566350 - DNA, 136 bp, Homo sapiens
ccatgtcccggttgtgctgcaccgtatggttacaagcatcacatgcaactgagtcaggacacgtcccgatttgtggaacaggtggctgccagtcgaatctcaggcaatttggatgctccagaaggtggatttgatg

SEQ ID NO: 566351 - DNA, 978 bp, Homo sapiens
gattataacatgaccccagaccgacacttaggagctgcctggatttgacaagtgccgccccaacctgctcatcacagagtccacgtacgccacgaccatccgtgactccaagcgctgccgggagtcgagtacttcctgatgtaaggtccacgagacctgtggatcgtggtgcggacggtgctgatacctgtgttcgcgctgggccgggcccaggagctctgcatcctccatggagaccttctgggagcgcattgaatcctgaaggtgcccatcttactttctccacgagggctgaccgatgaaggccaatccactatctacaatgctgtccgatccctctggaaccatacgcaggaagggatcccgcgaaggagcatttccggtgcagcaggaacagtggttgtgagtttcaacgcaccatcgaatggccttcgaaccggggctttctgctagactacctcaagtgacctgcatgagttcgtgttttgccagcgcctagagaagtgctcgctacgctgtggcatgtcccctgccagatcttcctggcattatggtgctcgtgaaactgagacaagcatacattggtcttcactgcccaggcctgactgcggtgcgagggctaccgtctggccacgaagtatccgtctagcagtgtgcaagctggcatgcatcggacgatgcgacggggtgcggcatggctgctgcgaaggtcatgactgcaggtggagtacgtgtcattcatgcgcacatcgcggactgccatagggcatccatgcagctgagtgggccaggcaggagccgtgacagcgtgctgctggtgcattggcgaggcccacgaagattggcgtaccttgagcagaaagatcgagccggaggtccgggtcaacggctacttgccgggccatggcgacgacggtgacgctggcccaagccctcatccccggaggctctcctgggctgttaacggaatgcggcagc

SEQ ID NO: 566352 - DNA, 452 bp, Homo sapiens
  misc_feature (90)..(90): n is a, c, g, or t
ctgcagattatgaggcttcaacgtgtgcgtggacagttctaatggggatctccagctccttccctgtgggctgccacagacagctacccncagaagggtcaatgttgggagtggttgtggctctgagctgctctacagagcttcagtgtgagaggatcgagccattgaaagctcattaccagtaggacataatttttggctctgcatattcacaaccagtgcacagtttgacacagtggcctcaggttcacagtgcaccatgtcactgtgctatcctacgaaattatttgtttcataagttgtgtttattccgggagatgacatgccacccccgaatggcgtcacttgtgactgaggatgctgtcgctactgaattagctggtgcctacacgcactctggctagagaactaactacaggcacttccttcctgataaacgcctgtaaccaccc

SEQ ID NO: 566353 - DNA, 310 bp, Homo sapiens
gcggaggagccagcagcagcttctgtgaagaggaccaaacgcagggacgggggtttaagcccagggccccggttgagttttgaaaagaaaccaaaacgcgccagagagtttaggggtcccaaccacatatttttttggggttgggtgccaaaaaaatctaaaaccatggggcacaaaattggcccggccagcctgggtttttgggggtgtgtgaaagaattaactggtcggggttctccccacacttccagccaagttgtgctttgtgtccgccctcggcgctttggcaaatgaagctgcgggcccggga

SEQ ID NO: 566354 - DNA, 604 bp, Homo sapiens
cggggtaaggtagaccgctggcggttggggcggctgtttggccaccccccaaggttgcccggcggccacattgtttatattgctccgcggtgaaatcctagaggatgatgcgtcataacctagctcttagttgggtgtaatgaacacgggggatgacgatatccctcctcaaagcaggttccactaggttgtttatccccgtaagatagtgatcttttgaaggatgtttttcaccagagcagtaggtataacggtggaccgtgaaccccccctgtgcaacaacacggggggagaacctgtcgctgtggggacacagggtctccggggcgtcacaagacggcgtccgaactagcaagggcccccaggcactatgttcgcgccccgaaaagcccggtccaaaagggtccacgcaggagccaacggagggtcgccaccgccgcaatccgccactggatgggccgaagcataggccatccgctcaatgtcacgccaggaaggagcacacgccgcgccgaggttgctaacaccactccactcaggccccgtatttttgcctatcctcccaccccaactaactaccggggtgttcccctttgacaaaaca

SEQ ID NO: 566355 - DNA, 402 bp, Homo sapiens
ccgggcttcttttcaagtactgctggaccatactcaccccttgggattatggcttagaagaagggggctgggtaggcaagcactccttggctgtgtcctctgcctttttcacttacttgtaccatcccgcagcagccaatctagggactgtgttgtccctgtgttggttcccatctaaagcagcagcagagaaatgcgctggttcaacagctcgccctgccccaagtactccagacttgaccctggcggggtcctggccttctagagtctagcccgttgacccccaagctccggcttcttccaacggtcccattgggaccacccgtgactgtttatagttttttgttttcagaaatgcgggcagctgctaattccttcacttatctgacaccacctgaaaaa

SEQ ID NO: 566356 - DNA, 112 bp, Homo sapiens
  misc_feature (40)..(40): n is a, c, g, or t
gattcttgaagtctggggatgctgccattgttgacatggnccctggcaagcccatgtgtgttgagagcttctcagactatccacgtgggggtcgcggggctgttcgtgatat

SEQ ID NO: 566357 - DNA, 192 bp, Homo sapiens
tgtaccgaccgtgcacctggacggattcataatcttgcaacacccttacgccagtgatcatctattgccacagccataatcagacagtgatcatctattgtcaacagccaaacagaccagtcatcatctaattgcacacagccaagcacccattgatcatctaatgcataccagccaaacacccagtgatca

SEQ ID NO: 566358 - DNA, 443 bp, Homo sapiens
gcagaaagtagattggtgaatgcggggggtgggctgagggggccatggggaaggggagagcacctaaggggtgcatgatttcttttgggggtgatgagaatgtttggaaatgggtagtgttgatggtagcacaagtctgtgtatgaatacattgaaagccgttgaattatacattataaatggatgtgaattagtgaattgtatctcaatatattcctgctttgaccgcggctaggtgtcttgtttccacagctacgaaagtgccaacatcgagagcttcttcagcgggagctggtccatcttctgggtcaagatggcctcctgctggatatgcgtgctgttgtacctgtgtacgctggtcgctcccctctgctgccccacccgggagttctctgtgtgatgatatcggcggtcccctgggcgacagagtgagactccatctc

SEQ ID NO: 566359 - DNA, 862 bp, Homo sapiens
ggaggggacctgcgcagccaccgtcgccctgggctgcagcctgcacgcggagcccggcggctactcgtgtggcctggatggacattatgccatggacaatattaccagtgcagaaccaattctacgatacccaatgtcatcaaacaagaaaactgagtcatggctacgagatgtgagaccactgtgaaatggagcatgcagcatgtgcctatctgtccatgaaatgaagacagagatgaacgcaatggagcacccaccagcttcctccctgcctgaagcttctcaactcaatgccagacaggcatgcaattccagagtcgaaagaggccttatgaagaaaacctggtggacggggtgtactttgagcaccgagaggataggaggggccgctctcctcagcctcctgctgaagaggatgacgatgactttgatgatacccttgttgctattgacacctattaacttgcgaccttccactatcaaaggttggacccgaggatcgagagtaagtggctatcacgctcaaccaattgagtggctttgcataccttgtggtcaagagaggccgtggccaagctattggggtcagaacggggccgtgtatgcttcgagaatgacacttcactgaaggaaattctcccgttgaagcacctttcctgtctactgaggcctgacccccaagttggtcggaattcggctttgtccctgaactccgtgcagcaccaagctatagcaaagaggccattctaatgatggaaggcctgggagacattcaacattacggttagaagtctgagacacgttgcacacaattattatgttacagcgactcaatggaatagtaaagtttaccagataggtg

SEQ ID NO: 566360 - DNA, 424 bp, Homo sapiens
cgaacatgtcgagtgggcaccaatgccctagaatattcttataattctagcagcttggaggctgacatgggaggattgtttgaggccaggagtttgagaccagcctgggcaacagagtgagactccaactcaaaaaaaaaaaaatgggtctatggagtgcataagccatggttcatttactttgtccccttctgatgggcgtaaaggtggtctccaggctttggctagcacagatggcactcgagggaatcaccttgaactcagatcagttggcatgtgtatgagtgtatccatccgctgaatttctagaatgggaatgggggctccagggttaatgcatttgtcatccagatttttttaaaaaaagccaagttgccctccataaagcttgtccagtagaacacccccagtatcatgtgagggc

SEQ ID NO: 566361 - DNA, 635 bp, Homo sapiens
aaaatcacgttatcccgggcaacagcgaagaacgcgttattaaagcaccctctccgtaaagcgtcaagcgtcacaataagcttaccgggaatgttaaagaaatcttatttggacatagaagtaactaaaatccccgaggaggtaaaagcacccgcagaagcggatcctatgaagaaaccattaaagcgccctctccctaagctagaaaaaggaggagacatagcagctgaacacgcccacttacggccattcttaagacgcaatagtcgcgacagacggggctacccaagcatagaccgcccactaaggaaaaaggtagaaaacagagccgaggcaattaaattagcagaaatcaaggcggtagactcagagttagagataagcaacggctcggaatagagcccgaaagaaaacaaagaagacgggaacaacaacgtagaggagccaaccgagaatctataatattagcttaaggacgtctcgatacggaacatcttcatcaaaataacaaagagcttcagtaaagttaatgaatcgtgccacggagaagggcttactccgcttaatcccccccctcgctccagcgataaaggagaagaagcagaaaaaggagaagcacacgtccgcacaaaggc

SEQ ID NO: 566362 - DNA, 175 bp, Homo sapiens
gcagtgtacgctcgatatcgggatcgggccgcgtctggtggcgtctcgtcggcatggcctggggctggcaggctgcggggctcgcctgccgggagggtcgggcttgcagagtgctcccgcgccgcttgcctgtggtgctgacccccggtcttaccgttctgtgcgtgagtgtccc

SEQ ID NO: 566363 - DNA, 205 bp, Homo sapiens
catctcaaaaaaaaaaaaaaaaaaaaaaaaaaaaaaaaaaaagggtttttttctacccccgaaaactaaaaaagttttccagagccttttttctaaaccctttaaaaaaaggggtttttttttttttgggggaatattcttttccccccccccccttttttttttttttgggaaaaaaaacttggggaaaaaacccggttttccc

SEQ ID NO: 566364 - DNA, 1166 bp, Homo sapiens
atgtgctggcagccattggctgaagtgccctggtgacccaaggggagggggcaactgctggctgagctgcctggccctttgctgtcgctggtgccctgcccctcgcctgccagctccatgccccgcccccgtgagccggctgtcctgctcactcgtgttcaatgtgcatgctgctgactgcgtggtggcgcactgaccaaagggcgcagaccttgtggagctgctgctgtgcccatgtgatgtctgtgaggctagctgcgagcctgtgctgccgggtgagctgaggtcatctgtcctgcattacaactaccacctggcaaggctccgctgggtgcttgctgctaccagcctgggtgcctggcctgcggctgcctgactgccggtgggttgttgccttggcctgtgtagtgctagcccttcagtctgtgctaaggatgaagtctaagcccgtgtattgttgggtgctctgagaacgccaaccctgcagctttccaacaggctccccaattgttcctgcctccttgggacagggctcaaccgttgtccgcgagtctcgccttggccagagacgacatagcacttaacagcccagggcgcaaaaagaattaaccattaactttgtacccgtgggccccagagaacaaacagcataaacagaaccgtttagtcccaccccagacaagaatccatagtggtaaccagacacctgaggagacagaggagaagagagccagttcataaacatgtatgagacaacaatccaacatttacctagttcccaggaaagacattagagacacacatacacattgaagacccaattacaggccggcattgggaaagaaaagcaaaagacaacagtacataacaatatggacagagcaacaaaaggggagagagggcacacaggtacagacacaccagttacatccacaaacgaaaccagagaagaaaggactaaccagaacagaccatagtgagatcaaaataggataccatgcacagagcaatagcaccattggatacgacgattagatcacgagaagttcaatacactatccgaagagaatcaccgtagacaaaggatacaattcagatgacattcgaaaaactagatagacagttaggaaaatataagccactttgagaaacagagactattacaa

SEQ ID NO: 566365 - DNA, 102 bp, Homo sapiens
aggagtctacgctaccatcagcggccttaaaccgggagttgattataccatcacggtgtatgctgtcactggccgtggagacagccccacagagagagcgtc

SEQ ID NO: 566366 - DNA, 454 bp, Homo sapiens
tttacctttttttaagaaaaaagttgcatgaatggaaaaaaaattttgtatacagtttttgtaaaaacttttttatttgtttcaattccttgttcatatcccatataatttagagctaaatatggggtgtggccatatttaaacccctgaaagtcaagcagttgagcctttgatttgaagcccctcatccttttttcaatggggacactatcatatggcattttttatgaggattttgtttaaccatatgttgccatgaattaactttgcccccttttttaaggatcaaaaccagtttgatttgggaattttcccctttcccaaagaaatagagaagcagttcttaactttccttggtgtttgtaaaaattgccctgtgtattccccttaaaaccgtaatttagtttgtaaaaaaaatggtgcggcatgtaaataaagcttcagggcccctcta

SEQ ID NO: 566367 - DNA, 254 bp, Homo sapiens
acataatccataacagacagcacaacctctgccccaacaactagcacaacccctgcttctatacccagcacaatctttgccccaacacccagcacaagctctgctcccacaacgagcacaagttctgcccctacaaccagcacaacctccactccacagcacaccatatcctctgcccctacaagcagcacaagctcggatcctaccaacagcacaatctctgcccctccccccagtacggagcccaagggtac

SEQ ID NO: 566368 - DNA, 191 bp, Homo sapiens
tcaggctcggccttttcttctcctattcctcttcctggtcccgccttatatttaacttaaactttttctcatccacccacactcactgtctcctggttttgcacctgaaagtgcgcacacacagacacaccaagagatttgtgtacatgcaggtcctttttcttctctccccacactcacctccagtctgt

SEQ ID NO: 566369 - DNA, 466 bp, Homo sapiens
aaataattaatatggccatagtaagttcttccctgtcagtaattattttaaatgcaaatagattaaagtccccaattaaaagacagagattagctgaatggactaaaaaccaggatccaactatatgccatctacaagagtcccactttatatcttttcaaataccaaactcttgtggccaggtgccacatgtcacgcctgtaattccagcactttgggagaccaatgtagaaggattgcttgaagtcaggagttcaggaccagcctagacaacatagaaagactcttgtctctaaaaaagttttttacttagtaggcatagtaacacacacctgttgtcccagctactgtggaggttgaggtgggaggatcccgtgagcccaggagttctaggctgcagtaggctatcatagtgccactgcactccagttgggtgacatagcaagaccctgtctctaaaaaaaaa

SEQ ID NO: 566370 - DNA, 178 bp, Homo sapiens
atccccatgttcctccatccccatgtccatccatccccgtgtccatccccatgttcatccatccccatgtccatccccatgttcatccatccccatgtccatccccatgttcatccatccctatgtccatccatcccatgtctccatgcctcccatgcctcccatgtctcgtcgacgc

SEQ ID NO: 566371 - DNA, 139 bp, Homo sapiens
gttgctctagaggatcctccagaggcacaaggagggggcagataggggctcacaaaggcttgcctccaggagatgacggcactgcccccagcttctctgccaggatgcagcggtccttgacctcctcgtagcagtttgc

SEQ ID NO: 566372 - DNA, 1582 bp, Homo sapiens
  misc_feature (1)..(2): n is a, c, g, or t
nnccggatagatagtggagtcgttctcatgctgcgtcgtcctgggggagtggttgtgagtgtgcgcgtggttgtgtttgactaccggttgtgtgtttgtggtcgtgtctcagttcgtttgtgtgtcgctgttgcgcgcggtccgtgtgtcctccgtctgttgttcggctgttgggctgcccctcgcgcctcgttggttggtcgcgctgtggtggttgttggcgctgcgtgtccgccggttggggtccgccctcttctggtgtgccctgtgttttgtgttcctctatggtgggacccgctccggggtgtctcgctccccgagtgtgctctctgttcgtgagggtgctactgggggccgaagtgtctggttcaggtggctcccgggtggtgccgcaggtgttcggcgggatggttgtgtgggggaggcagtcttgggggtgtcaccaccggcgcggggttatcaacgggggttcgtggccgtgtggtggggggggcggggtgtccgctgtcgcgggctgtggggcgtatgtccagccttgcactcctgggcgcgcccgtggaccactggggggttgcctaatttcctcggggaatgggagttttcctcccctgttcggcccagaaaggggggactccgtgttgccgccccgtggcctgtggaccgcgggcccatagtgctgaaggggggcccctggtcggtgtgagggggagccttgcggggcttggggcccccgtgggccccgccctgcgtggatggtgtagcggtgtgggccccccttctgtgggagagggggctggcccgcctggtgtgactgtgttcgggcgtggccccctttgcgttggagtcttggggcgactgccttatcccccacgcttgttgggatcccctttttaggacggtgcccccgctctgtgtctgtgatccatggggatctccccccaccctttgtgttgcgccaagtgggcgccatattacccgatggtgtgcgcccgtggggggtccctcaacaaagagtgccctcgccaggactttcccgaatccctccccgaggagtaatgcctgtggcccctaccttgggttataggatagacactcgtttcttgaaggagagaaccacagtgtggacccgtgtgtgccccgtgggccaccggagaaataacacagccgtgtttcttgtttgtccagacccattcccagggttgctgagagttcttccaccaggtccatatggggaaactggtacaccccgaagagagaacccatccaagagattcccacaccagaatatttggccagagtgaatatgtacccatttccccaggacaggccttttataatcggtgggaccccttgaagaagctgtggccaaagctcgataagactggctgaagagacattcatcgtgaggggtctttgtcctctgtacatgtctctctccttgcccctaacccccaaagacttcctttttctgtgttggctgccccagaccccttgacttgtaagaatatattctttttgaacccgtatttaaggtttccccatcaaaatgtaccccccctcctcaaacaaaaataaaaataaa

SEQ ID NO: 566373 - DNA, 933 bp, Homo sapiens
ggaattgcatggtctgatctcggacataggcatgaaatagcctatatctatctgtgaccgatgcatcggacgaaacaggcaatacttcatgcatctgctcttaagcatttatgcatgacaagtacccacacaagtttatgacatgaaatgactatatagatcacgtaatcagtgctctgtgtggaaacaagagaacttatcatggttccctggccgtcgaactttaagaccatggtacatatggtttaggccattcacatgtgtaatcaataataacaacagacattcatggagggagtttcttgttattgtatcatgcaagaggcaaaatttttatacacatgagagggagctgtatctagttttaatcatggtagaagtaggtaccttctactatccagtgtttgaggattgcttcaaggaggccagtgggatacagacactaaaactttatttcatggtgtaactaagaagaacagaatacactgtctgtaggtcccgatctgattctggcatgccactgcactcatttttgtttggccagtgacctgggtataccaagaagatgagccattgagacatatacaaaccaggtgctggggcccacatgaaatgcatttgtgctttacgatgttaccaacgaccaatgcaataacacaacataaatgtgcctatcaaaatattcgccagtgcgtacaaggggtgacatatatagtgtgtatttcgccccattgttgacccaagatatttaagtactatccatataattttgggccatcacacccatagtgcctctaattaagccaggatgtaattgaagtatattaatgacgactggagaagatagaaattcaccccagaaattagttaggagtagataaaaaacatacaaaagccacacgctaccacatctatgtgtcgagagaactaaac

SEQ ID NO: 566374 - DNA, 541 bp, Homo sapiens
tccattggactcaacaaatcttaatggagtggcaactacattatcaagcaatctagtaggcacggggaacacagtgacgagcaagactaaatattgccagtctactaagcaaaacggtgataatcgttcaaataatcacccatacacagtgctcacattcgagtaattaaaaaccgtgaataccccagagagaaaagtgggcacacaatctattctgtgaaaaaaaacaaaagacaaaaaaaacaaaaaacaaaacacaaaaaaaaacacgccaacgcaccactacaggcgagcgcccataacacagcacgccagcgcgcacagcaccgaaagaggaggacggccacgcgagcgggtagggggccgtgcggaggcgcccgcgtaggcgagacaggaaaataggaagaaataggagggacaggagcgcaccgagaaaagacaggcaaagagagggagcaagcgggcgcggggggcgcgccgcgcatgcgggtggacacagagcgcgcagcgggctggcgtggagcctgcctaagcggcgggc

SEQ ID NO: 566375 - DNA, 386 bp, Homo sapiens
ccagacagtaagtgtgagcgcactctgatatgttggatgatgttgcctgtaaacctcacattgaaatgtaatccccaatgtgggaggtggggatgggtgacgggtgattaaatcatggggacagatttctcataaatggttagcaccatctctttggtgctgttctcatgagagtgagtgatttctcaagagatctggttaagtgtgtggcatgacctcaccccatcttgctcccactcgcaccgcgcgagacacctgctcctcctttgccctccgccacaattgaaagcctcctgaggcctccccggaagccaagcagatgccaacaccgtgcttcctataaagcctacagaaacatgagccaattaaacctctctataaattac

SEQ ID NO: 566376 - DNA, 640 bp, Homo sapiens
  misc_feature (350)..(350): n is a, c, g, or t
gagacggggtctcaccgggtgggccagacggggctcaagctccggaccgcaagtgatccaccggcctcggcctcccaaagggcggggatcacgggcatgagccaccagagcgggtggggtggggtttaagtgggggtatattcctttatgctgagtcccgggccctaattacatcacccctccctgggaccagggtagcaccctcgggactagtggggctctttcagtacacacggtccttggaatgtatttcccccagtagagctaaacatatttctctcttaaaaacttctaatgccttccgttagaagggagacttggggtggcctttagcataccggcctctcggnctcgcccacagggagggccatttagtttctccaactggacatttggtctccggcctagggcttgggcatattcctctggtcccaattggttcttcacatgcattcttcagctctcagctcattcattccttcagaaaagcctttcggaatcccagattagctcaggttcttcggttatacctgcaccccatgtgtttccttcaaggcatatatagtaggtggaatggtacactgtatgactatgcgatcatgactgtcttccctgttatactgtcatggcatgagacccg

SEQ ID NO: 566377 - DNA, 165 bp, Homo sapiens
cataggtgctgggccctccttgctgctcgccgccctcctgctgcttctctccggcgacggcgccgttgcgtggcggacacacctgccaacttgcacctaatctttgaccttgcttgggaacctggggcttccaaggtggggttccaaccggttcccaggcgcgat

SEQ ID NO: 566378 - DNA, 324 bp, Homo sapiens
tcattggggaactgattggggaagggtctattgtctttttaaatggcacaattttaagggtttgagggtacagtcccttaacctgccacgggaggggaccccaaactttcttccccccacacttctggttttctgtgtggagggggagcagggatatatgagcgaatgtgtgaaagggtaggagagatgctggaggtgggggtgctgtgttctagaccccccatattatcccagtgtcccctgccccaaaaaagagagaccccatgcccccaattctgtggcgcatccagattgtgaaaatgtacaataaatgtgtaatgagta

SEQ ID NO: 566379 - DNA, 743 bp, Homo sapiens
tcacattcacataagtattcatttggtttgttccacattatccacaaggtattcttacaaccttataccaaaaagtaacactgttactgaaaataattttttaaaaagggtttgcagctcttttgtctttagagcatcccattactgattgagcagttacgagtatatcatattttttataggaattggtaactttgctcacacctaccaaggatgggcatgtaggctgattttgagcaccatcccaccagtctatttatgcatttttatactccctggttagaggcgcactgtcccttactggttctggtttagcttgctatcttgacctatacacctcttcgggagcatgacaaatgaagtaggacccccactttgacaggtaggagggttgcttgtgaaaagccttcactctctgatcgccctttcgcaatcgaataaacctcacccatggattttaatgatgctatatacgctatgcatacaccttgagacaaatccatcacgtactatcatgttatgaaatctccacgctgtacaaaaaacaattcccctggatttctcaatggacaaaattcgcatggatttcctctttttgtcttactcccatgtcctatcttagtatctttcgtaagaatcctccatttgtgtccatggacgtttaagctcaactttcaagaaaataatcatgttttccaaaaccactaataaatttgcgcccatttgttctcgtctttctcact

SEQ ID NO: 566380 - DNA, 1263 bp, Homo sapiens
  misc_feature (910)..(910): n is a, c, g, or t
gcagtcagccgcatcttcttttgcgtcgccagccgagccacatcgctctagacaccatgcgggcaaggtgaacggtctggaggtcaagcggtagtttaggtcgtatttgggcgcctggttcaccagcggacttgccttttaacctctggttaaagctggatagttgttagccatcaagtgaccccttcattgacctcaactacatggtttacatgttccgaagtatgattccatcctcatggccaaattccactgcgtcaccgttcaaggctgagtaacgggaagcttgtcatcaactggaaatcccatcaccatcttccaggtagactgagatccctccaaagatcaagttggggccgatagctgcgcgctgccgctacgtcgtggagtccactgtgcgtcattcaccaccatggacgaacggctggcgtgctcatttgcatgggggtgagccaaaagggtcatcgatctctgccccctctgtcgtgatgcccccatgttgcgtcatgggtgtgaaccatgagaagtatgacaacagcctcaagatcatcagtcgaatgcctcctgcaccagcagctgcttagcacccctgggcaacgtcctccatgacaactttggtatcgtggaaggactcatgatcacagtccatgccatcactgtcaaccagaagactgtggatggcccctccgggacactgtggcgtgatggcccgcggggctctcccagacctgtcatccctgcctctactggcgtctgccagggctgttggcaaggtcctccctgagctgaacgggaacctcactggcattgccttccgtgtccccgactgccacgttgtcagtggtgggcctgactggccgtgctagtaagaataccttgcgcaaatattgtttagcctacagacaggggnctgaaaccaagacgtcacagggccccctccaggggcccccgcggctcaactgggtaccccagggtggtcactcgtgattaccagggtaagccaccttttcacctgtaaaccgtggggggaatagccatccaacgacaatgtgtggagcatctcgttgaacaacaatgtgttggacacgcaggggtgatattgatccaggccaagtgaggtaagcgacgctctcagagtaaagaaaacaggtgtggctcgtgaaccaaaacacctgcatcataggaggagattcagcgtcataccagtgcctaactatcttcggtctgttcgtcactcgcgctaccagtcctgcctcggcagaa

SEQ ID NO: 566381 - DNA, 872 bp, Homo sapiens
gccgaggtctcgtgtgttcccgcgtgttctcctccggcgagtttgtgcatccccttggtgcgccagtggggcctacctggtgtgggtccccgtgtgtgacgcgttgcatatcttgtcgccggggtgtgcaggtgcaccactctcccccggggcgtgtatccggttggccccccgccgccctgacggtggtctcttcttgtgttggtggtcgtccggcctccccgtgtgtttcttagttttagggtggtgtcccacggctgcctctgtgccccggtttgtgctctgccgagagaggcttgtctattgttgatggggttgccttcctcctgcggggacatctaccggttggttgttcttcccctccctcttcttgcaggggggcccgttgtcactgctgctgtctgccttggagtaggagctcgtctggtgggcacactcctcttgcagtcatgctgctctcgcggcgcggtttagaggccccgcgctggtccgtcgccgctctatgggggctgtatctctacggggcgactatctcgcgccccccccgcgtagtggtctgctcacagggggcggtgagtttcctccttcagcgccctccgtcgtggggctccgcactagctgcttgtccgctggggtggtcaacacgtgctgagcctcctcgtcgctggacgggttactattattggcgccgccgctcccaccgccctccccccctgggaggggggacgcagcgcccccagtccctattgcttggttggtcctatttccgcagtggcgtgtctccaccaggagaaacgacttagcgaggtccccgtcgaagccacggccacagcgtaccctcccaaaaccgccaacccccgacaaacaagaca

SEQ ID NO: 566382 - DNA, 898 bp, Homo sapiens
cgatgtgtgtcttgtggtggttgtgtattcttagtcgggttggctgcttcgtgtgtgggtgcgtgtgattcgtcgtggctctgattgtgtgttttagtgtgtgttcgccccgtgtcgtgtgtgcggttgcggatgtgtgtgttgtatcatttgtgtgggttggaatggtgttggtggtgtcgcgacagtttcccggtaccccgttcggggaacgccgcttcccccgtctggcggtttaccccctgccgcaattgtgtatcgcgctcccaaatgggtcgtctgtttccccccacccgagtgtccggggtgccggaagttctctttgccggaggtaccgctcccccaaattttggtttagcaaacccttattaccaaggttttcactgtccgggtcccagacaaaatctccccggatttcttcccccctttcccgcccggggccaacccccttcttaaccagtcgagcaaatacttaggggaaaaattattatttgtgtaacagcccccctaccccccgccgacgcccctgagtagtaacctgggttttccccaaatagaaattcttatatgtctcacctgtaacaactttcgcccaccgaaccctgctttatacccccttctaaatttactggtagtccacaaagagcaacactgcttttggacacaaaggacaaaacccctgttagaagaagagtgtacatcactttgaacaaccccatcattgggcgcctttagacgccgcccccccgttctagaaatacccgtttcaacgtccacacctcctcctcatctcgcttcaaacacgccctcaaacaagggatctgttatccctccccaccccccgggcccatttttccccccttaaaaaaaataaatttttaaaaaaacacaaaaaaaa

SEQ ID NO: 566383 - DNA, 283 bp, Homo sapiens
gtgacacatgcgaccgtgaccaggaccacccgactcctcaaaagcaaatgagatcccgcctcttcttcttcagaggacacttgcaaaggcgcagtgcttctcttacagacttctccagacccaccacaccgcagaagcgggacgaggacctacaggagaggaaggttccatttcccagtaattccctatttggagttttcaggttggttcgtatcagtattctgtcatagggaggtagtaccctaagtctccagtattctctccggcagataggccaccactt

SEQ ID NO: 566384 - DNA, 922 bp, Homo sapiens
  misc_feature (837)..(837): n is a, c, g, or t
  misc_feature (909)..(909): n is a, c, g, or t
cctcccacccttccgcacccaaactctccacagccctcgggcccaggtgcgtcccttcagctctgagggcgctgctctcccctgccttggcatccagcctcagctaaagagggtcatacacctttgtgagaaacacatgactttcttccctggcagctttcaggcagttctttatgcccagtattctgaagctgctttccactgtgtgttggatcctgcctgtcactaggagtctgtcagtctcctgccctttgagactctttctcttggtctagggcctgcctgggcctctgcccctccacttgaacttagttcagcaattggcttctcccacaccacctgtttcccccagcgcttccacttctgaggcttggaatgcacagactgcttcaagaactgtgcttgctgggtgtcaattattctcgcttttggggtgtggactcctaccctggtggctgctgcctgagcactagtctggtgattcctgctctgggccgctcagtttctgccaccctgggagcttccccagttacatgtgggcctggctgagtgtctccatctttctctggctccaagatgctggtggccctggtgaggtctgccattggtctgccaggtccctctgcactgaggcaggggaggccagcaaggacttcagggctgcagagccttccctgcagtttctaccttacaaacagggatctaatccctaacctggggtacgtgtgagaccacagggagaaggccctcgaggcatgggcacatgcaaggcctgtagggcaccttcctgcagcaggcagaatccccttcccaagtaggaggggaaagtgacaagancaaggcccagggagggagcagcaaggcatgggaaaggcagcagcatcggctggatttggctgctctgggatngggaggagactgt

SEQ ID NO: 566385 - DNA, 263 bp, Homo sapiens
ggcatgatggcagggcaggatagttcagacggtttctatatcctgagcgtctgagatagtatagtattagatagtataagtaagtagagtgttacagaaaagggcatacgcccaggatacgcatgcttccctggagcgtatgagctcaaggcaacttaaaagcacatttctggtcaggtcatcctccattggtcagttaggcaaataattccagcagcagtggcaaatgtgagcagcactgaaagcacttgcaggcaaaaaaa

SEQ ID NO: 566386 - DNA, 272 bp, Homo sapiens
cgccgggagcggatggcggcggccgtagctggctccactcgccgccgggggtgaggaggcggcagccacgatctccgtgcccgggtctccagtgtctgccggggagacgcagtgcagagcgggccctagaggaggccgtggccacctgggaccctgaacctgtctaaccgtgcgcttgaagcacttcgccccgtgggctgcggcctgtagctacgacctgtcagacatcacccaggctgacctgtcccggaaccggtttcccgaggtgccct

SEQ ID NO: 566387 - DNA, 129 bp, Homo sapiens
cacgaggcggcacgaggcccacctccaaatatctcatcaacaaccgaccaattaccacccaacaatgactaatcaaactaacctcaaaacaaatgatatccattctcaacactataggactaacctgat

SEQ ID NO: 566388 - DNA, 137 bp, Homo sapiens
ggctccgcggggctcctacgcgccctatctcctggtcttccaagccatcttctacagcctcttccatctgagcttcgcctgcgcccagctgaccatgatttatatcctgaaccactacctgtatgacctgaaccacg

SEQ ID NO: 566389 - DNA, 105 bp, Homo sapiens
agccaccggaagcattccttctaggaaaggtggagtcggtagtaagaagccggagtgagaagacccctgagcggatggattcattcattttgaattctatgtagg

SEQ ID NO: 566390 - DNA, 921 bp, Homo sapiens
ccccttgtactgaggtgcccgttgtgcggtccctgaatatatccccccggttttcgcgcccctttctctgcccgggggggttgtttatctctccgcctccttgcgtttgtttgtagaaagatagttgtctccccccccgtcattgtgcggcggcctcccgccggcatacgttgccccccccttttgaaagggttctttttacgcgcccctgtcggcattgtttcctctccggaggtgctccccgacattcggcgctctctttttagtccgtctctctctctcacccccctgggtgatggtggtgccctccatcccgctcgatcgtccctcgtacagttcggggtgtcaaatgatcagtccgccgacagttttcgagacgagcgccccccccctcgcgtggtcttattcgtcagttcaatgtggcagtctttcgaggaacatcgctttcgtatgtgggtgtgtggtgctcatcaaacccgcccgtgtgtgtctatttggacccagctagacggcgtatagtggagtcccgctgccgtgtgtgtcttattccccagacagttaggatacgttggcccccccgccctccgattgattggctgtctctcattgaacctttgcgtgccgccttcctatatatgcgaagaaccaaaagagcctctcaacaataaccgctgcacatagattgctgcctccgtgccataatcccacaaaaatgctcgcgggggggctctcctcattgcgccacacttttgcggcggccgtgccacacgaactgtgtgccgcgaggagtctggttggataccgacctcgacgagagtagacggctagctccacttgacagtctcggacgtcgcgccctcgctggcgatgttctttgcgacgacccaatttctgaaacaattcgtatccccccaaaaaaac

SEQ ID NO: 566391 - DNA, 121 bp, Homo sapiens
ctgaaatgggaaggagccgcattatgtattccataatatcatcttgattgtgctaaatgcatgcttatttttcctccaagatgaggaatacatttcaaatcaggaatttctttatattctc

SEQ ID NO: 566392 - DNA, 309 bp, Homo sapiens
  misc_feature (17)..(17): n is a, c, g, or t
  misc_feature (77)..(77): n is a, c, g, or t
ttttttttgagacaggntcttactctgtcacccaggcaggagtgcaatggtgagatctcggctcactgcagccttgnctcccaggctcaagcaattctcgtacctcagcctcccaagtagctgggactacaagggcacaccaccacgcccagctaatttttgtattttaggtaaagacagggttttgccatgttgcccaggctggtctcaaacccctgggctcatgcctcggcctcccaaagtgctaggattacaggcgcaaacttttcttaagtatgaaattatttcaaaatagaaaggtcgtcgacg

SEQ ID NO: 566393 - DNA, 130 bp, Homo sapiens
  misc_feature (12)..(12): n is a, c, g, or t
  misc_feature (68)..(68): n is a, c, g, or t
  misc_feature (103)..(103): n is a, c, g, or t
  misc_feature (107)..(107): n is a, c, g, or t
tatctatatatntatatatgtatatatacatacatatatatatatatatatatatatatatcacacanacatagatatatatatctatcaatactactccacncacnatctctctctctatctctctcta

SEQ ID NO: 566394 - DNA, 782 bp, Homo sapiens
tgtctgaaaattgtttggttatgagttgaagatcaagggaagaaggtaaattgtcatcactgagacgttattttgatgccgattctcgatgactgtgggttctccattcatcagtctgcacacagtctgccatggtcttctggaaatcatgcaagtactgtaagcttttaggttggcagtagaatcaacctagctgcccacactgcccgttctccccatcactggagttagcctgggactggagtgagttctcaattttgttggtagattttaatatttattttcccttcaaattttaagaaagttggccttagtaccataaacactgctggaaataaacacattattaaaaagcatatacccattaatcttttgggggtgttttacatgtaaaatactcttacaaatataatcaatttatatatgcaatataattgagatgtggtcctttaaacagcctggttttctgtatacagtgtacttttgaatttaaatgctcacttaaaaaagtagattataggctgtaagatgctgttatgctttaattaatcaggatgcaagacacatacccttactgttgtgggaaaaattcttcggtctgcacacacaaaaaatgtttctgaatgaagtgaatagatcacactgaatttgtgtgttgtaaagtactcaaggcatcagcacattttattaaatcatcctccaggagattcttagctttaaaaaagccatgataatatgcaccaaaaaagtcttaaatgaattcagattttcagcctttttta

SEQ ID NO: 566395 - DNA, 184 bp, Homo sapiens
ggcacattgtgctggcacaagctctgcccaagcaaagccacaggggagttaacacccgtggggagccctcaagcccgtgcagacagagccccgcctttggcccttcccagtgcacactccttggaggcctcgtggcaggctccatcagagtgtggtgacgtgagcccttgatgtgtacatgcag

SEQ ID NO: 566396 - DNA, 415 bp, Homo sapiens
ggaaagaaactcacattgatagggtacttactataggcatagaagcaacaaagcagcacagccatgggcaaacaaagtgagacccgggtggtttacaaaaaatttaaaaattagccaggtgtggcggtgtgcaccatgtagtcccaactacacaggaggctgaggtgggaggatcacttgggtccaggaggtcgaggctgcagtgagctgtgtatgtgccactgcactaccagccgtgcgtgacaaagcaaaaactctatgtcaaaaaaagaaagaaaagcaaaggaaaggaaaaggaaaaggaaaagacacggcaacgacaagaaaaggcaaagaaaacaaacaacaatagcaaacggaaagaccaggcatctctgggactcagtaatcaagaaagccatttgacactataact

SEQ ID NO: 566397 - DNA, 278 bp, Homo sapiens
tgagtaccctggtcatccacaatttgaggaacagcacagtatgatcctgtactgactctcctgtaagacaacagattctagcagtgggaccgaaacaaaaatcatctaggaacttaccatctttaggggagtcattttaggagaccgccttgggtgacattgtagcatggtggaaattttactggatttgggcgtagactctgcaacctcagggggagctaggaacataatatttctgagtctcagctcttttgtaatctagagctaaaactgcaggg

SEQ ID NO: 566398 - DNA, 129 bp, Homo sapiens
cctcaccaagacctggcagaagcaggaagcagagaaccatatttatatcttggaaaataacattactggtgtgaaggaatgacagatgcaatagtaccttgtgggcagcaagcaggacagcacagggtc

SEQ ID NO: 566399 - DNA, 355 bp, Homo sapiens
gtgactctgaggatccaatcgcagaccaaggagctgtggaaaattgtgggtggcaaaccacccaggtgctgagcgcaagagactgaggacacgagctgttcccagtataataaaatataaaacaagaatagttataccagatatagatcttagatatgattatatatgaatatcattaatcattatttgtagcaattactctttattccaatattataataatcctcactctacaatcataacctaggaaaaaccaggccatacagagataggagctgaggggacgtagcgaggaaggtgaccagaagacaggagtgcgagccttctgttatgcctggacagggccatcagcagg

SEQ ID NO: 566400 - DNA, 137 bp, Homo sapiens
gttttgagacatagtctgactcctgtcgccaggctagagtgcagtggcgtgatcttggctcactgcaacctctgcctctacctgtgtctccaacctcctgacctcatggtgatccacaccaccccgagcctattttt

SEQ ID NO: 566401 - DNA, 321 bp, Homo sapiens
gtcacccacacctatttgcacactccctccccttttgaaaatccctaataaaaacttgctggtttttgtggcttgtggggcatcacagatcctaccaacgtgtgatgtctcccccagatgcccagctttaaaatttctctcttttgtacactgtccctttatttctcaagccagccgacacttaggaaaatagaaaagaacctacgtgattatcggggcaggtccccagtaagagtgagaccttgtctcaaaaacaaacagacaataattatgtttacactatactgtagtctattaagtgtgcaatagcattatgtataa

SEQ ID NO: 566402 - DNA, 304 bp, Homo sapiens
  misc_feature (127)..(127): n is a, c, g, or t
gcgggtgtcaaggatccggaaaatagcgagcatgaccattagcattaatttttctattactacatagatctttctgtgtttttaaaaactgtttttcagactttgagttaggctagtcttactctgnctgaaccctgttttctactcataattctaataaaggttctagctgccatttctgatagtaacctacatcagaaataaaaaccacaaatcttaagataaatgcagtgtcaagtgtctgctctcctcccagcttacttgctcgacaccccgtcgctaatttttaagctccgtagtcact

SEQ ID NO: 566403 - DNA, 1014 bp, Homo sapiens
ggttagaacaaggaggatgacgggcaaggatgttctatgttcgaggccttagctgcgacactacacacacgaaaagatctgaaggactacttctatccgaaatggggtgaagttgtagactgcgctctgaagttgagatcctatcacagggcgatcaaggggtttcggctttggtgctgatttatagaggaaatcgcgcagaagctggtcagagtcagacgtgctcagtgggaatctaagagagatgaactactaacaattttggacactgcgtggataggtgcgattgagtcctacaagacgggctcaatagccatggacacaccaaaaggagcctggttaaaagaagtggtgaagctgcgtggcactttctccagatgcaccatgcatcgagagaaataagggacgtacttatggtgggatcggtgagtgtgggaagtccggtaagaagcctccccaaaggatcgaacaaggaccaatcatagagagcagtggtgtttcgtgcctttatttagcctttaatcggaaggagagaaccagcgatgagaagatacagtgggcccagacgagatagccacaagggtctggttgctctaggtgaaatgtgaagatagaacgatagacctctgtcgaaatgaactagtatctgcaacagcaacagtggggatctaggacgaggatgtgcaggaagagctcggtgtgaagaagaccagcaagagtgggttagtgaggaaggtatccagggcgaggtggtcgtggtaataggctaccaagcgttactgatatgtattcccatttgcaagtgtatgcccaacaggtggtgaaagcagtatttccactctggagatcctgctgaggtggtccctgcagctgctaataagagttccaactaaattttttgatcaagtccctgctggaatttgcgttgggccctctgaagtaatctgagtctcctaaagaaattgttctggtttttcttactggatgtccacacactgggtttgcccccccgtg

SEQ ID NO: 566404 - DNA, 280 bp, Homo sapiens
gacttcgagcttggacccgtcggcgtgtctgaggtttcagcgatcgtccacggatgggttgcggtgcaacacgccagataccgaccttcgttcaggtagtgctcaatcaggcggggttcattgggatcgaggccacagcgaatctggcggctcatccaacgccagctttccagatagggatcctcatgcaggacagaactcatgagccacactcattcggtaatgatatttattattaaatgatactgagaatcaaaacaagagcagcccattaatcctg

SEQ ID NO: 566405 - DNA, 927 bp, Homo sapiens
tacacccaatgaattcatctctttatggcatatggctattttaaaaaaaactatgtccggtctcataacaaatatcttttttttcctcagtactcatctaacaaacggtctgtgcacctaaagactaagtggtccccacttacttaaggctacactaacgatataagactttattaagttgagttgtacaaatttagtgctttttctttttgtgcatttacattttaaaaaaacaaaaaaagtttaaaatacacacccaagagagaaaccggtggcatacttacaccagccccaactctaaaaagtacggcttccttctatgggtcctcttttttttctcttttttcacacaagtggccctgtggaatattcccttgcccacagtcttctctcaggggaagacgaaccccacaaaactgtgcaaaatgtggcaacagaggaggcgccccaccagagtgtgggccatatacctaacacggagacgcaactgatttaacacagggcgccaaagacgaggacacgttacacaaaacttctgcccccctttatgttagagtttccccctcaccccgtgtcatagtcccgttaaactctgtaacaaccaagacgcctttttccacacaattccggtctccaaagtcttgagcccgagacgcaatttttctccgtggtcaccaattttggcaacggtcaatactactttggcgggcccttttagtttcgggacgacgccataacgccttcatgttttttcccactcttccctcatcctccaacgccttttgtgaccccaagttctttttttgctcctttaaacgcgtgcgttattggccaccccgcttaaccgcgcatcgggggagggccccctgctgtgtttcaaccgccctatggcacgcctattcccatgtgcgcgacccccacttctcg

SEQ ID NO: 566406 - DNA, 222 bp, Homo sapiens
ggtggagaacatccggtccaccgctgcgatctgctcgtcagtgccagtaatgcggtgggcagcggccagcgagaatccccggcccattccgaaatacagcgacccgagggcggccacgtcaagggtcacggcgtccgtggagtcgtcgaccttcgtgacggtcgcgggcgctcccggagcctcaacgtccactcgccaggtaccttcggcataacccatcgg

SEQ ID NO: 566407 - DNA, 802 bp, Homo sapiens
  misc_feature (27)..(27): n is a, c, g, or t
  misc_feature (29)..(29): n is a, c, g, or t
  misc_feature (67)..(67): n is a, c, g, or t
  misc_feature (101)..(101): n is a, c, g, or t
  misc_feature (109)..(109): n is a, c, g, or t
  misc_feature (112)..(112): n is a, c, g, or t
  misc_feature (121)..(121): n is a, c, g, or t
  misc_feature (125)..(125): n is a, c, g, or t
  misc_feature (134)..(134): n is a, c, g, or t
  misc_feature (171)..(171): n is a, c, g, or t
  misc_feature (183)..(183): n is a, c, g, or t
  misc_feature (209)..(209): n is a, c, g, or t
  misc_feature (243)..(243): n is a, c, g, or t
  misc_feature (264)..(264): n is a, c, g, or t
  misc_feature (272)..(272): n is a, c, g, or t
  misc_feature (275)..(275): n is a, c, g, or t
  misc_feature (286)..(286): n is a, c, g, or t
  misc_feature (334)..(334): n is a, c, g, or t
  misc_feature (365)..(365): n is a, c, g, or t
  misc_feature (419)..(419): n is a, c, g, or t
  misc_feature (437)..(437): n is a, c, g, or t
  misc_feature (449)..(449): n is a, c, g, or t
  misc_feature (467)..(467): n is a, c, g, or t
  misc_feature (472)..(472): n is a, c, g, or t
  misc_feature (478)..(478): n is a, c, g, or t
  misc_feature (495)..(495): n is a, c, g, or t
  misc_feature (510)..(510): n is a, c, g, or t
  misc_feature (523)..(523): n is a, c, g, or t
  misc_feature (565)..(565): n is a, c, g, or t
  misc_feature (584)..(585): n is a, c, g, or t
  misc_feature (587)..(587): n is a, c, g, or t
  misc_feature (591)..(591): n is a, c, g, or t
  misc_feature (627)..(627): n is a, c, g, or t
  misc_feature (630)..(630): n is a, c, g, or t
  misc_feature (680)..(680): n is a, c, g, or t
  misc_feature (685)..(685): n is a, c, g, or t
  misc_feature (703)..(703): n is a, c, g, or t
  misc_feature (712)..(712): n is a, c, g, or t
  misc_feature (716)..(716): n is a, c, g, or t
  misc_feature (728)..(728): n is a, c, g, or t
  misc_feature (741)..(741): n is a, c, g, or t
tcaaaaaaaactttacttatggacaananatttcacagttttataccattttcacatgtcatcaaanaatcttttgattttccaaccatttaaaaatgtangctggctncantggctcatnactntaatcccancatcttgggaggacgaggtgggcagattgtttgagcngaggagtttganaccagtctgggcaacgtggcaaaacnccactgtttaaatgaggggaagtccaaatgttanattctggacttggctcttccnctacttanctnccaaccatganaaacacgttaaaccttaaaaaaaaaaaacaaaccatttttctatttanagcatgttaaatcttactttttcccataaantcttccttgattcattagttgtcctttactttttttttttttttttttttttcntgaaacggagttcccccntttccccacccnggagtccagtggcaccanccccncccacnccaaccccccccccccnggttcaggccattcncccccctcacccnccccagtacccgggactacaggcacccgccaccacgcccggntaattttttgtatttttannanaganggggtttcactgtgttagccaggatggtctcgatcnccngaccttgtgatccgcccgcctctgcctcccaaagtgctgggattataggngtganaaccacacccggcctgtncttttaaanaaantgaaatttatanaatctatattggnctgctcaggctgccgtaacaaaataccagactaggtggtttaaacaaagaagtttattttc

SEQ ID NO: 566408 - DNA, 331 bp, Homo sapiens
attttgtgtcatttcctttgttttttttctttattgtggaaaattacacataaaatttaccatcttaatcattttgaagtgtacagtgaactcagtggtgtagtagtcccccttgctcttgggggatatgttccaagacccctgatatggatgcctggaaccttggatagtactaaatgctatatatgatatggtttttcctatatgtatatacctatgataaagtttaatttataaattaggcacagtaagattaacaacaataataattcaacataattataacaatatgctgtaataaaagttatgtgaatgtggtctctctcaaaaa

SEQ ID NO: 566409 - DNA, 142 bp, Homo sapiens
cctgaaaggaatttgcacctcggtttctctttaggctccaagattctcaagaactccagggttcccgctttccccattgcggtgggtctccttggggcccaggagagtccgctgagcaaagctggctcttgagaaaaccagg

SEQ ID NO: 566410 - DNA, 1043 bp, Homo sapiens
  misc_feature (195)..(195): n is a, c, g, or t
  misc_feature (528)..(528): n is a, c, g, or t
cctgtgctgtgcaaggacccagtccaggagggctgggctgaggacgtggacctccgggtgaacttcggcatgaatgttggcgaggcccgaggcttcttcaatgaatgggagaatgtggtcacttcgtgctgagcgcgggatggctgacccatggtcatccgtgcttcaccagacacgcagtgcgtgttgttcctngtgccgtgcatggcaccgccatgagcacgccatctctgcgagggcacgaggcgctgacggccacttcttgcctgagtccgtctccaagtgcaggccacaagcatgccgacctcgaccatgtaacatctcagctagtgtgtctctcgtggcgactgtgacaaaggagatggggaaggggaccatggcgagttaagcaatgcgatgcataccgctctacggacgcgaagagggcaccgcgtcatgaatggacaggcaacgttctggacacacacgtgggaggaccacgcaggaccacgcagaatctagtgtctatgctgcgatacgatgtgtggngacacgcttgtggtcgatagccataacgtggatcagtagcgcgacggtggcatttgtcttgcgcactgggccgcggatgcctgagaggagcaccatggtgccctggacgccgaggcacccagccatctctttagcccccgaattatgcggggaaccaacaagtcgccaaacactgggcgcactccatggagggtcagcgagggactgccatcacgcgctagacgccccgtgctcattagtaaggtggcctttaccccatgggagcaacaaaagactatgacacccgaggcctcccctagaaggggagttggggggtcgcgggaaccgatggcgatggagtaggccatatgacaaaaagaacgcgaaagcgggcgggagcccaacgttggtacaggccgacccataggcccaaagggggcaaacccccagaaggaccattacccccatcctacgagggagccccaggggtggccagtcggaggcactcgcggggaattcacccactccaaggggag

SEQ ID NO: 566411 - DNA, 1165 bp, Homo sapiens
  misc_feature (222)..(222): n is a, c, g, or t
  misc_feature (490)..(490): n is a, c, g, or t
  misc_feature (1113)..(1113): n is a, c, g, or t
  misc_feature (1161)..(1161): n is a, c, g, or t
gcccactcttggaccaggccctggcaaagggggatgggtcgactagtgtatcccctggcactgagcacacttgccctttgagctggggttttgttagtagggaggaagctggagtggcagttggatagacaattcatagtagctgctgccatgttcaaaaaatgctgcaatgtaaaatcataaagtattcatctaggcataactttttaaaatattcagtcnccttttattctactaaaatcaattttaacattttagtgtatattattttattttagattcagcaggtacatgagcatgttagttttgttttgttttgttttgttctgttttgttttttgagatggagtctcactctgtcgcccagtggtgtgatcttggcttactgcaactctgtctcccaggttcaggtgatcctcccgcctcagccccccagatagctgggattacaggcacatgccaccacacctggctaatttttgtatttttngtagagacgggagtttcaccatgttggccaggctggtctcaaactcctcacctcaagtgatctacctgcctcagcctcccaagtgctgggattacaggcgtgagccactgcgcccagccacatgtgcgtgtttgtgtatattgcgtactggtggggattgggcttctgtcatacctatcacccaaatagtgaacattgtactcaggtagcatttcaacccttgccccccctcccactcacccccttttggagtgcccagtgtttgctatttccatctttatgtccataggtacccattatttagctcccacttataagtgagaacatgtgctatttgattttctgtttccgaggttaggataattacctcaagctccatccatgtggctgcaaagcacatgatttcattgtattttatgactgctcatgtatattatttcagcctccaaaattttgtatgttatttataatgatataaattatgtggttttatcgtgtactctatctcactcaggaaatacatacaattcttcgttcccaggctactctgggagctgaggtggggagggatcacttgagcccagggagttcaagaccagccgggggcaacagggtggaaaccnttgtctctggaaaaattaaataattacacaccccacatggcacacacntcca

SEQ ID NO: 566412 - DNA, 477 bp, Homo sapiens
  misc_feature (6)..(6): n is a, c, g, or t
  misc_feature (28)..(28): n is a, c, g, or t
  misc_feature (32)..(32): n is a, c, g, or t
aaaggnaacccaacccggtcttctcaanaaanacccccaaaaaattaagttttcctttttcccaaggtgcccaaggccaccccctatgtcacgccctgaagtagttattgagaaagtcgtccccctttccccccttttcctataacccaaatagacaggaatggaagattcctccctcggggccctgaaagcttgcgggatgaataactccctcctcctcaggccccagtccccaaggtacaaacttgcacccagcagcaagatagcagaggcaggaagagagctggctggaagacacgtaccccctgaagatcaagagggaggtcgccctggtactacatagcagtcacgttaggctgggacaattcctgtttacagaggactataaaacccctgccccatcctcacttgggctgatgccattttaggcctcagcctgtctgcatgcaggcgctcattaaaacagcatgttgctcc

SEQ ID NO: 566413 - DNA, 540 bp, Homo sapiens
  misc_feature (222)..(222): n is a, c, g, or t
gcccactcttggaccaggccctggcaaagggggatgggtcgactagtgtatcccctggcactgagcacacttgccctttgagctggggttttgttagtagggaggaagctggagtggcagttggatagacaattcatagtagctgctgccatgttcaaaaaatgctgcaatgtaaaatcataaagtattcatctaggcataactttttaaaatattcagtcnccttttattctactaaaatcaattttaacattttagtgtatattattttattttagattcagcaggtacatgagcatgttagttttgttttgttttgttttgttctgttttgttttttgagatggagtctcactctgtcgcccagtggtgtgatcttggcttactgcaactctgtctcccaggttcaggtgggaggattgcatgggcccaaaagtgggaggttgcagtgagcttaaacgagatcgcccccctgccctttagcctgggtgacagtgagaacttgtctcaaaaaataaataaataaataaaatcccttta

SEQ ID NO: 566414 - DNA, 1735 bp, Homo sapiens
  misc_feature (411)..(411): n is a, c, g, or t
  misc_feature (467)..(467): n is a, c, g, or t
  misc_feature (585)..(585): n is a, c, g, or t
  misc_feature (619)..(619): n is a, c, g, or t
  misc_feature (755)..(755): n is a, c, g, or t
  misc_feature (1406)..(1406): n is a, c, g, or t
gctatgaatgagtgaaggtgcgcctccgtccacactggaggtgtacgaacggaccgagcggcggtgtttggggcggcgcactcttgttggagctctctgagatggcgccgcccaacgggtggtggcacgcaagaaagcgccggggctttgtgtatgaccgtccgcccgtcccgttgtgcttgtatggcccggggcttctgaatattggtgtatcgccgagagcccccctgggggggggcggaaatattttggccaacgcgaaggggggtgcccccccgtttctgccggtgggtggcgtaccacgcgggttttgtggtctcgcccgagaatgtttttctagaggccttctacttgtggtcgttaatgagctgtatgtcgcgcgccggtgcgggttggggtgtgtgcacgcgngtgtcgaaaagtgtgccgccactgtctatatgggatggtgagtggtctgtccgccnggggggacgcggtctagttctagctcccccccgggaatggaggaaagagttggtgttgttcccgcgacaagaatgtttttgaccacaagggatttctccccgcgggagagatttctcntcccgcgaacccgcggggtttttgttgtgccccnctggggagaagcgtgtgtgaacaggggcggataaaaaaagttggcgtccgccaagtaatggggggaccacacagagaaaggggtgaaaaaccaatgtgtgggagtgggagactcttcgcgctcgcaatatgggggntggggagaaaaaaggccgccgtgcccccgcggtggagatagggcgccctcccgaggaggggcacgaaaaaggtgcatccctcggagtaacagcgcccccaccggtgagagatctcaccactcggggtggttcgcgagtagaatgttgtgtggttcactgcggagagccccctcttcacgccttcggcacagggggggagacccacacagtgtgttgtcacacacacaaaggagagagctcttcatccacacagagagagtgacacacttctcacacaagatatttacacactggtgaggaatagtcacatactcacaaaagggggagaaaatctcttgagaagagacacacagagagagtcccacagagtaatagagagtgtatatacacgctctgtgtaatatgacacacagggggggctctgtcacagagacacacacattttcacacagacacacactctctctctggcgtcaaagtgtgttcacacacaatactgtacaccacactgtgtctctttatatttgggggtgagaagacacacatcgagaattccacgcagatgggaacatcggtgtgtgctctctatatgtggagatctatcccgcgcgagaggagatgggtgtggagaccccacataatatatgaganttttctcttataagaagatggttttatagaaaatggagaaaaatggtaaacacaaatgtggcacacattatatgtttggagatctagtcaccccggtcacatcacataaactggctgtcttgggttggtcacatccaccaccacacacacccacggagacttataagaccacaaatgggaactgagatgtcacttcttgagagctctttcacatttaattttgaactgtgaatttatatttggagatgcgaagcgccattgtgtgttaaagaaaaaacacatgtcacatgtaaggttgtcctaaaaaataaaatgccatttaacctcca

SEQ ID NO: 566415 - DNA, 1292 bp, Homo sapiens
aagaatcaaattgattatgatagtagttgacaaaactacactaaagaatttcttaactacaattagaacgtatcagcttggtgcaacacagtacatagcagctatacatgctcatcacatctctaccactacgcaacaacgccaccatatatacctgcttgcaaccaaccataagtacctacacacgacaccacaatactaacttaagccctgacgagacacagcaacatcatcaagcagcacttgcaactacccaaaatactctattgcactaatcacaccatcacattcacactcactccaccaacacccacacagaccctccacacgacacttctacaacacaacactcgacacccagacacctcatcctagcacgcaaaaggcatgacagaataacaacgatcgaaacgcaggacccacaaccccttagtggaacatcaaatacagggacaactacacccctcgcacagcgcagcaagcagcaacgcgaaaaacaaactcattcgggaaccaacaccaactaaacactatcaacgacaaattacttcaacactccaatgactaaaaaatttccaacaccaacacaccttatggcactacgcacacataacttaacaaacaattaccaaaaaataacacaaccgccaaaacttacacagtaatcaacacccaattcccacaaacactacctacattcccaaactactcaacactattccccatcacaacctacaccttacgcctccactcaaccaactctccctacacaccgtcccacacccgctccaccaatatacacaccacatatccacaaccgccagccctaccattacatcacctctcccaaatcctcacccactcctcacaacgacgcatctcgccaacactcaatgacactagaccaaagagaatgcaccattcaatggccaagcaaacaccatcctattaacagacaccaagaaatggaccccttcaagaggaaccccggctgatcgatacgtaaattcctttaactcggcacacaactccaacaagcccaaaaccaaagaacaatacaaacaactatcccaactccacaccctacgcccctccgaacagcgcgaacaggacaacacataaataccaccatacgcacgaacaagcaccaccagcccaacgcgccacaatccactaacacacacacacacagtaccgtaaaacacaaaagtacgtcaaagaacacacaaaaccagcgcaccaacaccaccacactgacccgcccaaacaacccaccataagcaaccaaacac

SEQ ID NO: 566416 - DNA, 513 bp, Homo sapiens
  misc_feature (36)..(36): n is a, c, g, or t
  misc_feature (64)..(64): n is a, c, g, or t
  misc_feature (66)..(66): n is a, c, g, or t
  misc_feature (80)..(80): n is a, c, g, or t
  misc_feature (102)..(102): n is a, c, g, or t
  misc_feature (108)..(108): n is a, c, g, or t
  misc_feature (144)..(144): n is a, c, g, or t
  misc_feature (156)..(156): n is a, c, g, or t
  misc_feature (185)..(185): n is a, c, g, or t
  misc_feature (210)..(210): n is a, c, g, or t
  misc_feature (219)..(219): n is a, c, g, or t
  misc_feature (221)..(221): n is a, c, g, or t
  misc_feature (229)..(229): n is a, c, g, or t
  misc_feature (243)..(243): n is a, c, g, or t
  misc_feature (252)..(252): n is a, c, g, or t
  misc_feature (254)..(254): n is a, c, g, or t
  misc_feature (286)..(286): n is a, c, g, or t
  misc_feature (318)..(318): n is a, c, g, or t
  misc_feature (325)..(325): n is a, c, g, or t
  misc_feature (328)..(328): n is a, c, g, or t
  misc_feature (443)..(443): n is a, c, g, or t
  misc_feature (500)..(500): n is a, c, g, or t
aaagtcgctctcaagtactggagcagctagcaagcncactccccactctcctcacttatctctntnacaatctctatcangctctggagcccgaagatatanccagcntcctggccctcatgcaccacggtgtcctcgccatanagcctgcaggtngtgtgtccaaagtcgatcatgcgcacatntacagaactggcgccgatggatttntaggcatangnaccagcanaatcatcagctgantcctcttanangtcctccaaatcctcagcatctcactccaggnccacttcgggccgctccttgccatcataaatnaccagcnggnagcttgatttgaagctgtttgtcttctgttgctccaacattgctttgagctcagttagcttcttgagcacagggcccaggagttcacggcgcaggtaccgcccattgtggaaganctggaaaagtgccttcttgaagccctgcaccgatagcttccgtccatggtacttgtncatgaacatgagc

SEQ ID NO: 566417 - DNA, 172 bp, Homo sapiens
actgcactccagcctgggtgacagagtgagacttcatctcaaaaaaaaaaaaaaaaaaaaggaaaggggcccccggaaggggggtaaagaagcccccccggggttaaggaaaggggggacccggccccaattgggaaaccggggcaaaaggggccccgggggatgtacccga

SEQ ID NO: 566418 - DNA, 333 bp, Homo sapiens
ggcacgaggtcacccaagttcatactgctgacgatacaggtttagagactaaagagagcgcatggaagaaaacttcaaagaaagagaagaaggatcgcagagttcaaaggaactcttaatttgggcccatcttttgaaaatattgtctctgcaaaagcttcgaacaccattttggatcctctggagaaggcaagacagaatgcagaggaagctaagaaattaccttgttagcttaaggttcctgttcctaagggtagcggtcaccaagcgactttcccaatgtaattatttttgtttgttccgcaagtatctaacaatatgatatattgctag

SEQ ID NO: 566419 - DNA, 295 bp, Homo sapiens
  misc_feature (31)..(31): n is a, c, g, or t
  misc_feature (64)..(64): n is a, c, g, or t
  misc_feature (118)..(118): n is a, c, g, or t
  misc_feature (194)..(194): n is a, c, g, or t
  misc_feature (213)..(214): n is a, c, g, or t
cacttgaggattaaatttttttaggggttgngggaggggatctgttaggaaactgttacctatnaacaaagattgactggattcgatccaaaagataaaacttgaagctattctgganctaacatggaaaaatgaaatggctattgtttaaaaaaatgatagaaatacattgttgatgggatatgagttaagtntattttctacaaactgtanntgatgaggacatggataatatgctcatggtagtgagaagtaacctgtatgtggggggaggggattcttatatttcccccca

SEQ ID NO: 566420 - DNA, 624 bp, Homo sapiens
attttaggtaccatggaataccattgatcaggatggtagggatggccaacgcagtagccttaacaccagtttttcagaccagagtttggaatcggttaattggaccagtgttggaagtgtgcatagttatccaccggaaggtcttgatgaagttaccaggttaatggttattcatttagaacttaaaattaacccaaccttatttgaaaggcaaatttaaaattgaaggaatgtttttctaactaataaattaattaccttagtaggtagatcaaaattagaggagatggtagctggttagggtttaaattgggtaccatattagatttttaaaaaatggttgtgcagggttaccagatttggggctacttaatctggtcctgggtccaagagaagagcatttggaccaggaaaatggacctttagttaagtggagcaatagttgcggatattcggaacttcttagagcttagatgatgcgtgtgtcaacatggtttcaagctgtggatctgataagggaattcttgccccagaggttaggttgggccggaaccactcaatgtgtacatactcatgcattttcaagttggatccacggggggttggtccccttttaccggcccg

SEQ ID NO: 566421 - DNA, 403 bp, Homo sapiens
  misc_feature (6)..(6): n is a, c, g, or t
  misc_feature (44)..(44): n is a, c, g, or t
  misc_feature (88)..(88): n is a, c, g, or t
tcaccngaatttgcccacgacccttcgcctcaaggcttttgcanaatgtctcttattttccttctaactcccctttcctcttcaaacnacacggcaaactgcggagaagaaaaataccactgggatgagatgtcttgaaagaacagagccggctttcccggaggctgtttggagcgtcactgatttaaaaaaaaaaaaaaatcatgggatggaggtggagcttggaagacagaaaattagcccggagactggggaggggatgttacaacaaagttgcactgtacttttaaatatagaagccctgtgtttattacaaagaagcggcccagctgtgtcagcagcctgagcgccgtacacgaaacaaaagcgttatcataaatgcaagttgaaattagaaaattga

SEQ ID NO: 566422 - DNA, 311 bp, Homo sapiens
ccagtgatcgagctcggtaccatctcgttgacggcgattatgttgtagctgagataatgtagggtccacccctaccgggtctgtgggttttctcttcgtgtgtgtgcggagacgagagatcgaagagataaagacagaagacaaagagataggaagaaagacagctgggcccgggggaccactgccaccaaagcgcggagacagacaggtagtggcccggagtgcctggaggcgctgctatttattgtagtcaaggcaagggggcagggtaaggagtgccagtcatctccaataatcgccggtcacgagat

SEQ ID NO: 566423 - DNA, 118 bp, Homo sapiens
tgtatgagcaagcaaaaagcacgtcaagcaacagccaacgcaagggcaacgccacagcaaccagacatgcacagcaagtgccaggcaacaccacagaccgggggcatcctctcagcag

SEQ ID NO: 566424 - DNA, 1124 bp, Homo sapiens
  misc_feature (546)..(546): n is a, c, g, or t
  misc_feature (584)..(584): n is a, c, g, or t
  misc_feature (595)..(595): n is a, c, g, or t
  misc_feature (599)..(599): n is a, c, g, or t
ggcgagagtgatgtttagacgcctgtgaatcccaggctctcgagggaggtctaagaagcggcaaggatagctggagcccgggagatcaacagctggctgggcaatatggcgaaacccagtgtctccactgaacgcggacaaggtgccggacgaaaacgaggtggtggtgctccccctacatgaatatatcgacatatcgcccggttaggaagctagatcccaagattgctgtggctgggcagaactgttacaacagtgacatactggggctttactggggagatcagttcctggcatgataaaagactgcggagccacgtgggtggttcctggggcactcagagagaaggcatgtctttggggagtcagatgagctgattgcggcagaaagtgacccatgctctggcacaggggacctggggggagtaatcgcctgcattggggagaagctagatgaaagggaagctggcatcactgagaaggttgttttcgagcagacaaaggtcatcgcagatacgtgaaggactggagcaggtcgtcctggcntatgagcctgtgtgggccattggtactggcaagactgnaacaccccaanaggnccaggaagtacacgagaagtccgaggatggctgaagtcaacgtctctgatgcggtggctcagagcacccgtatcatttatggaggctctgtgactggggcaacctgcaaggagctggccagccagcctgatgtggatggcttccttgtgggtggtgcttccctcaagcccgaattcgtggacatcatcaatgccaaacaatgagccccatccatcttccctacccttcctgcttagtccctggcttggcaggaagggtagggactaagcagcccagaagcccagtaactgccctttccctgcatatgcttctgatggtgtcatctgctccttcctgtggcctcatccaaactgtatcttcctttactgtttatatcttcaccctgtaatggttgggaccaggccaatcccttctccacttactataatggttggaactaaacgtcaccaaggtggcttctccttggctgagagatggacaggcgtggtgggatctgctcctgggttccctaggccctagtgaggg

SEQ ID NO: 566425 - DNA, 1322 bp, Homo sapiens
ggtaccgtcgttgcccaacctgtgtcgttgtttagtgtgcggctacaaactggggacatggtcaagcgcctggtccagtcgcttctgctctcgttcggacggtggtatggtgatcccgtcgatcctgtcctcctgccgtgcaacgaaatacttacgcacatgacatatggacttgactttgctaaccatcaatttgaaggcacgtaatgactctatacacactcggaacgttggataaggtcgcgcactcgagagctctctgagagacacgtgcagggaggcaacgtggcgaagatgaatgtgggtatgagtaggatactgatatactggtgttgcctaggaacacatggcgctttggtagacgctacaaatagattgggaagccatcgtctgtggtccgacgcgacatattccaaatcggttcaatcttgtagctgaggctcgctcatctctcaaaacgcatctgagagtcaaccttagctgctgctgagtgtagcaattgcgtctgaatacacattacaaactgactgccggatacgcatacgaacgggcgttaccctctatccagtctggaaatatacccggagaattcgtgtgcagtgggttcatataccgtttgggtgcccacccgtaacttagggccaatgtacgagggctggcaaggggcaagaaggataatcgcacccagcgaaatgtcgaaagactgttcttcatcgggaaaaagcttcccggaggtggacctacgattagaattaaccacaacctactttgacagcatcaatacgacacttgctctctcgttccaaagccaccgacatcgattcaccagggtggaatcacagtacgattttgccgcttgtgtgagccaaggcaccgggggcgctcacacgggctactaaatgccccaaaaaaagcgtacggtggcctctccagagaaaccttcaagttcctcatgtggaaccttcgcttttatctccccctgtggaatttgaggatgtttaggcttaggccaaaccaaagagaacataaaccctggtcaacgttggcacggagcctatgtcgcattgcagaatacccatgtggcagcctgggcgtggagtcaaagggagcccagagtccaagaaaattgtgccttgacttgggcgcggactttgaaaccacgtcaatttggcccaaggtgggttggcccattaatcgaaatcgccaattgcattggagttgcgttaccaccgaattgaaacgcgccacgttgttaggaccggcttttggccctaaactcccctgggtggacccaaggacttgcgccccggccaggcagaacc

SEQ ID NO: 566426 - DNA, 799 bp, Homo sapiens
gggaaagagggggtggggggaagactggatttaactccccctcccactcttatgaagtattgttattaaatgtctttttaaaaagagaaatataaacatatatttttactattaaaatattcagttttttaaatgaagtagaacttgagttcatgttttatatgaaatatttaccaaaaaaaaaaaatgaggtaaacggtatttaaaacctttggacttggagtctggctgggtaaagcttctggaatattggagtttggctggagaaataaaaatcaaaacttctttaagctgggtaaagtgaggggcccaccagcagtggatctcctggatgccttactgggaaactttggtttacttggtctggctaccctctggattggttttaaggttaagttttaattggtggagcacacttagtacctagttacatcttaagatcaggtggtttaaaactggtggagtgggagcggtaatggtatcggaatggactgggaatggtaagctggtcagggcagaaaatggtggttacactttggctaagatctgggggtttcttcatattcctgctgtcggaagcagtggaccagaaatggcttgccagtactggcaaagcactgctgtgaaatgtgaagtactggtccttaaatttacaagcgatttcctaagggtgactaattattttctctggtccttcgtaattacttggcagtggttgggggtcagaagtccttacctcttaatatcgttcggcggtttacctcaaaccagtgtggggggccaacaaaaacaacacagg

SEQ ID NO: 566427 - DNA, 123 bp, Homo sapiens
ctgtaatacactcgccaggattgctgactccaggacagttgggtgaaatgggtccctgggtgacatgtcagatctttgtacgtaattaaaaatattagtggcgacgtgaaattacgggccagc

SEQ ID NO: 566428 - DNA, 930 bp, Homo sapiens
aaagaaatgggcaatatcatctctgatggcgatgaaaagagtcggaagaaggggtggtcatcacagtgaaaggatggaaaaacactgaatgaggaattagaaattattgaaggcatgaagtttgatcgaggctatatattctccataagtttatgaatgacatcaaaggggtccagcacaatgtgcaatggccagggatgccctatgttcggggttgcaggtgaaatagcaagcattttctcaggtatcctagtccatggttacctgctctgggaaattgccaagatgcctcgaccgtaggccttggttcataatcgctgcaagcatgtgggatggaacgcaagcgtctaagtgacactcgtcgtggaataggctaagaggtgggtctgcagagttgtgggagtctaaggactccatgggttatggtgacaatagaaagaatcagattagagatatgggtatggatactggatggtgcagtgttggagaagagggatggatcctgattcttgaagacgtacagactgatggctgaggaaaagtggagaggtcatgtgaccaagacgatgccagtgtcttaggagggataaggtgacaaggggctcaactggagatagtattcatgacagccatggggcgtagatgtggcaactagtgatttgagggaaaactggaatgaagggttgcagactttacggggggatggtgtgctgaaggtggtgggacaagggatgtgcgtgatgaaaagaaaacaggtttcgattggcgtaaggtaaaaagggggtgaaaaggcgggtgggggggggaaacaccaaaatagtacgggggggatgagcataataggaaaaggttaaatattaacacaatagaagtgagaggggggtgtagaaaaaatcaggggattggatggattgaaaccacaatataatg

SEQ ID NO: 566429 - DNA, 956 bp, Homo sapiens
  misc_feature (1)..(1): n is a, c, g, or t
ncatgactcggcatagcaaccatcaacgctcatagttttagataatacacccgtcgtaccccctcttacgtcctcggaatcacaaagcgctcttgatcacaacgtgtgtcagagttaaaagcacagccgtggttcaacacagggcactcccctttgtataagaccgccccgtttgttcaagaaccccccggagggtgcccacaaaagaccagctgtattatacccccggtgccccttctttgatccacaacacaagtgtttacctcttaagggaacccgacgctgcctcttacaatgttaggcaccaggcggccccacacaccctggaattttaaatccacctcttttcctcccggaaacttttcctacccgaggattcagggggttgtcgggatacaccacgccacattcaaagctggcgggaaaccaccctctgctcttaaaaaaaatatggagaactgccaacagctattctacggcttcagtccgagctccctaatacaacccgcgtgctttaatagtgtcagcccccgctactccccttcgaatgacgctttctgtacataattaatcggaggtccccacccaggggctccctgtcccccgtgacgaaggcactctctatgcggacttgacgatcagtggaaacagtctattaagtctaccctttccaaagggtacatacatccacatggttgcgtggcttttggaggggaaaatagcaagcaccacaaccattctttccctcctcatggggatctacatctctctcgtaggtcgccggtagcagtcccaccatgttctcccccgatgacacgatatgcggttccccaaataccgccccccttctagtataggacgaacatccatcggggggatctacctacgcccccaggaggacaatttaatgtttttcgtaaggcccgaaaaaaaaaacaatcccgttccacaaaaca

SEQ ID NO: 566430 - DNA, 187 bp, Homo sapiens
  misc_feature (33)..(33): n is a, c, g, or t
tagcccagactcacttttttaacagcccgggtngtgattaacaaaccaacttcccctataacaacatgaatccattcatgagggcagagcctcatggtcctaatcacctattaccgtcacagtggcaattaaatttcaacatgtagccaggcatggtggctcactcctgtaatcccagtactttggg

SEQ ID NO: 566431 - DNA, 862 bp, Homo sapiens
  misc_feature (1)..(1): n is a, c, g, or t
  misc_feature (434)..(434): n is a, c, g, or t
nggtccctctggggggccgacaaattattcggcgcccctttttccagggagggcctccccccccgcgaagatctgttgcgctcttttttgccgcgggacttttctctctatctgggcgatttgcgtgcccatcagtggtgccctgttggcatccagagattttttggagaatgaatccctgcggccctatgtggctttttgcctgtggcgcatcctcggagccaaacgtccctgttgtctgaggcgctccccccccgacttcttgggcgccccaggggccgttttcgctgtgctccccctatatgtgtccccggaccacttctccgaggggcgctcatcccccgcccctcgtgtatatcactacgtgttctccgcgtggttactcttgcgctacacaggtaggcccgttttaccttttggggtgtttgtttttntgttttgaacctttctcctgggtgactccttcttccgggcgttgacacgtctaccctatatggtggcgcgtttattgagtggagaccgggcctgggtctttgggacttgagggccagggtccttctgccccggggtgccccgggtggcgtcttgcctgctctagcacaggcactctctctggggcaccctctgccccagagaaatctagcttggcccacagtggggggctgtggtcccaccccgccccgcccctccctgtgggctgccacgcagcatccacccttgttccctcctcccccgtttgggaaccggaatttttgggccctttttgcctttaagcacccggtccttttttacccgttgcctttcacgtatccccacatcctgtgtccctccttttattaaaaagggacatcaggcaagccca

SEQ ID NO: 566432 - DNA, 604 bp, Homo sapiens
  misc_feature (323)..(323): n is a, c, g, or t
gggggctgttttggaaatttggctcaatccattggccaatttaactatctctacaccaaaaatacactatcttgatcacaataataatttataataagccttaataataacacaagtctccctgcctgatgttccttctttgttaatgaaatagctaaccctgcctctttacttttccaaatacatttcagaatctggcttccaattccaggaaagaccttgttgggatttggtttggaatcacattgaatccataggtgagttttgaaagaaactgacatacttatgccattggggcttcctatccattaatgatatatctntctccatttatgagggctttctttaatgtccttcaatatttttctccatagaggtgctcacttaattttggtccccataatcccttgggaaaaactcaacctacacgaaccttcccaggggccacccattttttttgtggaaaaagagtgtggaacttactgattttatccttttaatgggaccaaaggactgcttttaaatttttaaaatattttttttggcctcgggccccgaatatcttgggctctccggggggcccaaattccccttatagtggggg

SEQ ID NO: 566433 - DNA, 655 bp, Homo sapiens
  misc_feature (207)..(207): n is a, c, g, or t
cttcagaggctgcctgagtctcactaagtttctcctcagaacaatgggggagtggctggctcccatctggtgtcctgttcatctcaggagcccccagctccaggtacagatacgaggaggccaaggccaaggccctcccagccagctccagagtacgaaggggtcatcgtccttggtcacccacctggagggtccgagctccgtttngccagcgacccctggccctcgctgtcatcagcttgcctggtgctttgcgggtgcctgatgactgtggagtgacgttgaatggaaaggccaggaggctccatctgaggatgtatgctggccctgaaggccagcgtggggaacaagagccgaatggccatgccgggtgggagacgtgtgtgctgttcacggcacacctcggctgcctgccttctccctgactgtgtgccatgagccacattcgtgagggtaaatgtgtgtgtgtgagtcccttcctcgcctctgtcaaagactgcaggaaccttggaggtgtttggaagggataggagacccccccagcccccaagtcctgatccctttgtcccctggaaacggttcctctgacagaagctgacaagagccttttccaaagatggattgattcaattggcacaaacttttgcccggattg

SEQ ID NO: 566434 - DNA, 896 bp, Homo sapiens
gctcgagtccataggcatcccacagttatacacagtccagttggcgtcaccacttaagtcaatacaggccacatgtaacatccttctactaatgacaatcttcccctcaaagttcctcatcagaacatacaggaaagcacttctgaaacattctgaactaaaaacactcagcagacatttatctatatgtattcttcatgaaatgtgttcttggtgctttatgtactaatgtactacggtgttgaagtcagtttttaaacttgaaatcagatgcgtgtcacttctaggtaacggaccttttcaatgagtacgttgtaggtgatcaaaaagtccagactttcttttactacatgtgagatagttcatcatttttagctggcaatgtcactttgcacacaaaaaattaagagactagagcaccccataatgcaacgcaggcggagacagccgaacatgcgctaagacaagaacattctctcatagaacattgatctgtttcacaggaaacaaacctttgccttgaaatttaccacagttgagactgtaccattacatggcgttgaagaatagcgtattttcgttcctaagacatttttcgcttcatgagtattttccaacggtttcccataactgtgtacacattttctttaaaacacattgataccagcaagcaaactgcaaattggatgccggaattgtggtcacaccattgtgttactctacctccaaggtaaccaagcagtattgtggacaaaacatatccaaccaaatgtgttcaccacaaatgcactttctatttagaccacacggtaatggtagaaaaggtatctaaaaaaaactcaccactggtaaaaggtcgtggatcattctgatagcgaagggaacacaaccactta

SEQ ID NO: 566435 - DNA, 1107 bp, Homo sapiens
  misc_feature (1)..(1): n is a, c, g, or t
nttctttgttattgtttttgtttgtttttgtgtgtttttgtgtttgttgtgtttgttttagttattgtatttattttgtgtgaaacggagaaggaagcgaaagaaggagaggccaagcaatgagttgatggagtcgttttatccttgggttcgagcgtatggtctttagccatctttgtggtgctagcaaccactcctgccgcgcgggatcacccctgtttttcgacacacgtgggcctttttttggtccgcgcaagacagtttgtgacgtggtgggtcacgaccgacctcctgtttgggcccccgggaacatggtggcctcttgaaatgtgcgaggggcccacttacggggggtgtgtctcctttagtcgggtgccttggttgtggtgagtggcaatccctgggcaccagttcgtttggcgggaaccccgttcggcaaaccccggggttgggacttccgcatgggtgtcggcaaaaactcttcacggttccacactggccacgccacctcgtggccacgatgcctgccgcagtgggagagagactgtgggtattgctaataatatggtggagcatcacggaatttggggcctcgaatcaccggggagccctcattcactatggatctttaaagggacttgaagggtcaccccagggcgccctgtcaccctgtggttgtgcttggcccacaccccgagttggcacagcttggattcctaaacttggcttcttttgggaccgccacacggcccacacttgtgctcagtggcccgccaccccgccatgtggtgggtttgttttagacctcctcctctgttttttcttcgtttagagacccccccccgggccctctcccaccctctgcccccgacctcggtgggccccttctagagaggaggaggtggacctcttttttgcttttcacttttcattttcttggtggtgagcccctcggggtggtggtatattgtatatatggggaatagaagtgtttgaggttccccttttttcccctccccaattttctgggggtggaaaccgagagaaaaaataacttagatttaaaaattttaaaaaagtaaataaaaaataacttcccccaaaaaa

SEQ ID NO: 566436 - DNA, 114 bp, Homo sapiens
gacaagttcgagtttgagggagaagctgaaacgccagagcatatgacatcatgaatgtccgggccagagtgcagatgctggccaagttcagcaagaaggctgggaccccagcca

SEQ ID NO: 566437 - DNA, 339 bp, Homo sapiens
  misc_feature (44)..(44): n is a, c, g, or t
ttaaccggatgcttgaaggcaacagtgctcgttaagagtcatcnccactccttaatttcaaggacccagggacccaaaccctgcgaaaggccgcagggtcctttgcctaggaaaaccagagacctttgttcacttgtttatttgctgaccttccctccactattgtcctatggccctgccaaatccccctctgcgagaaacacccaagaatgatcaataaaataaacaaacaaaaaacaaaaacaaacaaacaaacaaaaagagtagagttgtcaggtcaaacataggaccctcagtcaaatgtgaatttcagataaacagtgaataatttttttggca

SEQ ID NO: 566438 - DNA, 143 bp, Homo sapiens
tggctgccgggccgatctccgagcggaatcaggatgccactccattcccctttttaatgtaactttttccccaggaggtattttttttttatgttggtcctgagtattttgcaaatgcccaaagaaaataaaactaaacccct

SEQ ID NO: 566439 - DNA, 322 bp, Homo sapiens
tcgcggccgcgtcgacgcttaaacctgtgaggtgaaagttgcagtgagccgagatcatgccactgcactcctgcctggacaacaagagcgaaactcaatctcaaacaaacaaacataaatgaaaaggctgggtgcagtggctcacacccgtaatcccaatgctttgggaggccaaggaaggaggatcacttgagctcaggagtttgaggctatggtgaactatgattgtgccattgcactccaacctgggcaacaagagtgagatcaagagtgagacctcttaaaaaaaaaagtcgacgcggccgcgaatttagtagtagta

SEQ ID NO: 566440 - DNA, 365 bp, Homo sapiens
ggatacccgtgcgatcccccttcgtgatcaagacacggaatcggctgccgatgtttggatcgcaatgcgccccttttctagaggcgtccccgttcatctacaggcaggatgcgcctgggaaaaagacaactggaatttctcgaaggttgatggtccgcacggttgaggattctacgtggttctcttggttcccctggtgtgtgtgtgtgtgtggaggaggccgcggcccttagatcaccttcttgagctcgtcgtacaggaccagcacgaaggcgccccccatgccccgcaggatgttggaccacgcacccttgaagaaggccttgcccccctcatctctgaagatcttcctccaacagtcgacg

SEQ ID NO: 566441 - DNA, 927 bp, Homo sapiens
gcaggatcgcgtctccgtgcgccgtaaggatgagcgcagaaaggagaagagggaagagtactcgcggagcgaaagaagaggtgagaaagcaacacgaagcaggacacagctcaagcagctgatgaacctgatcaggatggagattctggtccaacgtctggagaagtctgcggaaagtatacatgtgcggacgagatgctggtgcctcgatgagcgggtgaccttggaaaaacgacttctgtacccctgcccaggtacgacctatggctcatgctaggaagttgctttggaggggacgagtactaacaggggccgttggcatggatggagaagccaccctatgtttgatggaacgacgacaggggcgttgatagacggacttgggagactgggactaagttgtttcacggggacctggagcaaggacgcaggactcgagagccgtgcatctgagcatggcttagtagaggatcacgcaagattcaactagtgggacgaccgatctacgaagtccctcaggagcaggcgcgaagggaatgaatagaatgcgcgagggcccctttagcggggcaagaagaagcgcaaggtcgcccttcgccgcggacgtggggcaggagaagcccgtgtatgaacccggggacaagacgttgcgaggagtacctggactgagtattacccgggtggactacgaggacatcatcgacgagctgcctgtcgcgttcaaagtaaccggacaggtggtgaccctgtgactttggcctcagcactgagtgagatcctcgcttgctgaacgataggagatgaaccggtgggtgtccctaaagaagaccctgagtgtcaggtcagagcaggaggagctgggacaagcgggcgtcagccagaaggccaaactcctggaacacgcggcgttttcagtactctgcaaaa

SEQ ID NO: 566442 - DNA, 1790 bp, Homo sapiens
  misc_feature (1101)..(1101): n is a, c, g, or t
  misc_feature (1790)..(1790): n is a, c, g, or t
cgtccgattcataacaatattttacaccattcgtatcaatgtaattatagaaccaccaatcataacgcatccaaggcatccagtcaattgtgtggttcatctgcccatttcaacacagtcatcccagtcatttgcatccacattcattcatcacacatcacatgcacaaaaatgcatttcaatcgtgtcaataaactaggtttcattcgtgcagtgcacatgtaatcatcactcagcagttcatcacatcacacattgtattcactcgtgacctccacccaaaccaccatgctcaggcatcataaccacccaaaaatcaagtcatttaactatatgcattcagagtcatcacaaggcagacactggagtagcctcatccacattcagcattccattatatagcaggccagcaccagcagcagctagtaacatccatcacactagcattttaagatcatagtaactagatcacatctgcagcacaaattggttccacccaaaaaatatcataacgtttataagtccagatgcattttcacgaattgttcaccaattatttcatcaagaggggcaccaatgattcatagtagatcatcagcagcacaatcaacattacacatatataccaatcaagatcatccaagaaaaaaaaacaaaagaaaaaaacacaagaggggaggagaacgaggatatcaaaaagagaagatataatacacacaattacagaaaggaaggagcaccacaacaaagaatatataacaagcgatgtataaacaccacagaagaattatatactttgtggaatcacaacaacacagaggaagcaacacacaatataatacagttagaatagctcaagcaatattaaacatacgacagcactaacgagacaaatagagagcaccagaacgagaaaataataacaaacaacaaggtacagaataagcaaatgagagagaaaaacaaaatgagaaacaacacacaatgaggacagaaacaaacataaaggaacagacagacaggaagaacaacacgaataaaacaacatacatgaggatgacggaggacatcaatcatcaccaaacacaatagggcgcaccnacagcaaaacaatcataacaacaaaaacacagagaatgagacacatatcaaaacacgaagcacaccaacaaagagaaacacgatgagtcaaacacagaagaaacaaccagagagcgatacacaacacgacgctctaacacacaccatcaccgcagagacacaacatacaaccagcaccagcaaagtaacaacacaaaataagagagcaaacaaggaacaaaaaggctaaaataaacaagacacacaatatatcaaacaccagagagcgaaggaaaaaagagcacaacatacacaaaaacacaagaacaagagcacacaaaaagcacaggaaaacaaacgcaacatacaccgaaaacaagcgagagaacggagaacaacgaatagacaacacgacagaagaaaagaaaacaacgaagaggacgagacgaaggcaagagagccaaacaaacaagaaacaaggagcaagcagacagagaacgaaagacgacgacgaagaagagaagacaagcagagacacagacgagagcgagggagcgcacaacaggacgcgaaaagaacagacaacgcaaaaacagacagaaagacaaacaacgacaaaagcacgatcacaacagaaacagaagaacagagaacagagagaagagacgaaaaagacagacaaagacaaaaggaagcaaagaaaagacaan

SEQ ID NO: 566443 - DNA, 460 bp, Homo sapiens
  misc_feature (23)..(23): n is a, c, g, or t
  misc_feature (201)..(201): n is a, c, g, or t
  misc_feature (244)..(244): n is a, c, g, or t
atacaaatttatttcaaagaagntatacaaatggcccaaaaagcacatgaaaaggtgctcaaccatccattagcccactggggaaatgcaaattcaaaacccacattgaaaatacccacttcgtaccccaacaggatgactaaaataaaagagtcacaaatgctcataaagatgtggaaacagccaagtgtggtggctcanacctgtaatcccagcattttgggaggccgaggtgagcagatcncctaaggtcaggagttcaagaccagcatggccaacacagcaaaaccccatctctactaaaaatacaaaaattagccgggcatggtggcgggcacctataatcccagctactccagaggctgaggcaggagaatcgcttgaatccagaaggcggagattgcagtgaaccgagatcgcgccattgaactccagcctgggtgacagagcgagattccaa

SEQ ID NO: 566444 - DNA, 683 bp, Homo sapiens
agcggttgttctcttgaggtcagggatttgagaccagcctggccaacatgatgaaaccctgtctctagtaaaaataaaaaatagccgggtgtggtggtgcgcgcctgtaatcccggccacttgggaggttaaggcaggagaatcgcttgaacccaggaggcggaggttgcagtgagccgagatcccaccactgcactccagcctgggtgacaaaagcgagactctgtttcaaaaaaaaaaatttttttgggtttaataaaaatatatttttaaagtaattgagatatctgggcatggtggctcatgcctgtaatcccagcacttcaggaggccaaggcaggtggaccacctgaggtcaggagtttgagacaccagcctggtcaacatggtgaaaccctgtctctaccaaaaatacaaaaacttagctggccatggtggtgcacgcctgtagtcccagctacttggagggctgaggcaggagcaatcacttgaacctgtggaaggcggaggttgcagctgagctgagattgcgaccacagacgactccagcctgggttgacagacgtaaagactccacctcaaaataatggggtagctacagaagaaagcttagcgggcactctagtcaagaggtggtagatgacctgggtcccccaacctctgatggatctcaaattgagccc

SEQ ID NO: 566445 - DNA, 529 bp, Homo sapiens
  misc_feature (298)..(298): n is a, c, g, or t
  misc_feature (432)..(432): n is a, c, g, or t
  misc_feature (449)..(449): n is a, c, g, or t
  misc_feature (473)..(473): n is a, c, g, or t
aatatcagtaagggatacaaaggtaatattctatggtctgtaaaagacaaaatttatgaatttatgaagtgtgaattcagctcatgttgaaagtttatgtcacacactataatgaattttaaaattatcaactatcaaatgttaaaaacaaacgcagccacctataactagacagatatggatcagaataatttatacaatcatttaacaataattagcagccgtgaattacattaatcatcttcctgaaaaattattctagagtggacagtttaatttgctttaatttcaaataganacacgtattcctgacctccttagctattttacaattctttataagaaaacatacagtattctttaaagtaagtctttatcatgagctctcacaaatgtatacttctataagcctacctcctcaaaaagaataanagatgttgcattttttntgctgggattacaagtatgagccnccatgcccagcaactcaatgttaattttaaaaacttttttttttttagaagaatga

SEQ ID NO: 566446 - DNA, 274 bp, Homo sapiens
agcaaaacgtggaaacaaaaatctgactttatgggtccgtcacacatccctatttagagctatccacgttgacgtcactacagctctctctgcttttacaaactagttgtatagtcagcatgagtgtgacaacaattagacgtcccctgtcatagccccatgcctttactccttcacagtcattcaatgacaagcgtaaaaagagcttcatcttttcacgaaaattcccattctacaagaacaaggagcagagtgaaacaaaatgaaccaagtg

SEQ ID NO: 566447 - DNA, 150 bp, Homo sapiens
ttctgctggtcgtctctagcagtatccccctgggtcagctctcgatggttgggcttggtgtgtattcctgcgtcagtctcagatctggactacagtcctggactctaacgggtccccgcatcatgtctacctgggcgctcctgtcttact

SEQ ID NO: 566448 - DNA, 1303 bp, Homo sapiens
  misc_feature (738)..(738): n is a, c, g, or t
ggagagaactagtctcgagttttttttttggtttttttggggggtaacatctgtgattaaatttacaattaaaaagccaaaaccctcattgcaaaggaaaacgtgcagtttacactttatttcctgggaagactcaatttataacccacagaaaatggtgtgccccgttgtggcatgtgtttttaacatgtggcaaggtgctattgattgtgcccaagacatctccattaaccgtgctgtgatatggacgtaaagaaatttcataaagtgaagaacgattgtggtttctcgtggtctgtggtttcctccttaggtctcagcgaaacgggaattatttctcccaacaaagtgtgttttgtgaccgtgaagaggagagttattgatcccagtatacgtctcgtgggtctataacctcttcgtgaatttacaccgtgcaaaagcgtgaaattctggggataaacttctcagcccccacatttttttcttttatatgtccaccccaatttttctcccatgtgtgtagttgtggggcttataaaagagcccccttctgtgtgcgttgtttcgcctctcagttctccctcgcgtggttccctccgtggtgctcgggactcattttctctgtctccctcgagagcccgcgacgcgaaagatgtcctccctctttctcgagtggtccatatgaggtgtggatattgtgagccatctcgcggttttgtggccacacctcttggggantccccgtgaaagttttcttctccccaaaggcgtttcgtgaggttctcctttcttgagaaagcggcccctcaaatatgagaaactcgttgggccctttcctattataagcgcatcttaacacgtggggggtgtgtcacaagtgcccctataaggctggtgggctttctccccattttctgcgtggcccctcccaaggtgtatcttcgttcctgtggggggctttccctccgtggaagtggtttttcctatcttccaacccgcttgtggtttccaccgccgttgtgcgtgcccttatttctccccatcttttctccagttccaagaggaagagcgcccttttccacatctgccgagaagagaagtgtgggccatttatcttttcaaagagtttttcccaagatgttgttccccccccggtgtctgtgtgcgcgccccaaaaccagcggggtggctggtggggggatgtggatgtcccactccttttctgcccccttatatatggacattacctttgggcgtcgggaaggcttcttgcgcgtggcgcactctaccaagcattttgcct

SEQ ID NO: 566449 - DNA, 402 bp, Homo sapiens
tgccttggccgatgggtcgtacagccctctgcgtgcaatatacaactacgaggagttcagtacacggtgagtcagtgaattccacttatatccgagtgtgaatagttagaagctttggctgttcatgaaattgaaagctctattgtggatattccattattaaagctagttctgctactctagaatggcacttttacatgatggcttttccaatatttgcaactgtggtaatcttaacttttctcttctccagatgaaattttgtctgttccattcagagcttcctctcgtgttttaattccaggcttcttccacattctggtcacctccttgtggaaacattctgattcagtttatccttccagaactgaaaacacactactaattctgtgcccatttcaa

SEQ ID NO: 566450 - DNA, 304 bp, Homo sapiens
tgttgtctagagatcccataggcgaagagtgtagggtgagtctgcactgtgagagctctgatagttgtggcttccatgtgtctggtgagagtgggcaaatgccaggcataaagaaggtggagagggtgggaatgggtgatcatgtgtgattgccaacttgtggaggtcagcattgagctggcagtggaaaggggtggtggtggtgacaccagtcatggtggctgagacgtgtgtggttcagatccccgtaggtttggtgtggtcagcttcagagtgcggaagcagatatcatagattggcctcg

SEQ ID NO: 566451 - DNA, 423 bp, Homo sapiens
tcgaggtggctcaaaatataaaactatacgacatttatttctggaataaaccatttaatattttcagaccatagttgaccttgggtacctggaaatgtggaaagtgaaaccatggatggggagggggactactatattctcatccagcaattgagctcctttgtattcaaatgaattgaaaatctatgtccacataaaatactgcacacagatatttataatagctttatttatcattacgacaacttggaagcaaccaagatatttttttagtaggtgaatgaataaactgtggtacatccaatggagtattaagcactaaaaagaaataagctattaaaccatgaaaaagacatggaggaagcttacatgaacgttactaggtgaaagaaaccaatatgaaaaagccgcatactttataat

SEQ ID NO: 566452 - DNA, 336 bp, Homo sapiens
ctggcctccttccctgtagtcctgccgcctcacctgggcctccaacactttcttcttcctcctcttcatcttcctcctcctcttcgttttcttcttcatcttcctcctcttctccttctccacctcctctctccagcaatatcatctgttgttacctctgagtgataatcttggaggcttctctcccccatgatatcttacaaaccagtgcaggcaattcacagcacatgaatgtcttgaaaccccagggcacagcagcccccagtctgcttgctgcacaccaggcatgttgtttgttccagggcacagtgcaggcggggcatcctctcacagtct

SEQ ID NO: 566453 - DNA, 346 bp, Homo sapiens
  misc_feature (119)..(119): n is a, c, g, or t
  misc_feature (139)..(139): n is a, c, g, or t
  misc_feature (150)..(150): n is a, c, g, or t
  misc_feature (152)..(152): n is a, c, g, or t
  misc_feature (178)..(178): n is a, c, g, or t
  misc_feature (220)..(220): n is a, c, g, or t
ggtggtgtgttcacatacagtgacccttggccaccaagaccacagaggatggagcctgggaagcagcgaggaaatcacagccccctcgcccctgcctcccttgcccctaccccggcganatgttccccccgaccgctcncttgggccaantntagatgaagcacgttctgccggagangcctcaccttccagagaggacagacacagatttcctgctggnggagggaggagtccacgcatcctgatgctgcctggaagcttattttccccgtggccaaggatgcatttctctgaagtggaaacaggttcttgcatgtggaatgtgtgtttccccaggcaagacggg

SEQ ID NO: 566454 - DNA, 203 bp, Homo sapiens
atgtgggagtccgaagtcgcccaggacaaacattgccagccagatgccagtcacaggagctgaaaactcactatcttcatcctgtgcaacttctactgaccatgccatacccagctggccctgcccatcaacagactctaacttacagacatagggccagctgctcttgctcatgaaaggggcatgaatccgaggattgctca

SEQ ID NO: 566455 - DNA, 711 bp, Homo sapiens
  misc_feature (513)..(513): n is a, c, g, or t
  misc_feature (534)..(534): n is a, c, g, or t
cccgatgggcttccatttgcgcattgtccacgggtcacccaatcttgaggctgttgcactgctcatcagtaagcgtccgaagggtcacaccaatgggggcaattttccccgctttttcatccgggcaccccggtagtgactagattcacagcctcctcctaaaggtgaacccgcacttctatcgcacttcggcaccgctaatacccgggtcatcacaactactgtttgccccgatagtccctgttaggaagacttcgttcacccccccggtaaagaagcctcagcagttttcttctatgtcatgttccctctcgctccattcaagggcaattcacagttatttcctgagcatgctgactaaacatacttcaaacacagcagaaggtaaagagtctgtgtttcgtaagtaaatgccgatttcttgccaacagcagaatgcgatggtaccatgaagagtaccttgagcatcatcttcaactgagctccagctctggcaaacagctgctgggtggncctggccttctggcctggatngggcctccaaggaactacttgttctcatacttgtgcttgatgtgtttccacagcttcccctcgttgatgtggtcgtagatagcgtccgcgccttgatcgaaggcgcgctcgaagaacatgacgccacacgatgatggtgagggcgaaggtggaggtcctgcggaacaggcagggagt

SEQ ID NO: 566456 - DNA, 1646 bp, Homo sapiens
  misc_feature (572)..(572): n is a, c, g, or t
cggacgcgtgggttggagaacgacgtgcagaaatgggcacctcgaaaggggaaggaagaagaaggaatgaaaagagtcatcgagaccatcggacctcaggatgagctgaaggagacgaatggtaattcggatggtctgctcaatatcattgtgctagtcctatcaactgatcatcttgtaggtccgattgtcatggtgactcgttacttggacaaggaaagccgatctgccgcagtgacatggctagggatggactggctaagaggcagagccgacgactcgaagtcctgcaccatgagtgcctgctaatgtcggactcgaccgcaggaatgtgcgccgcagcgaggctgacgatggtacgcatggggatatgcaccggaccgtatcaacatcaaatctctctgggaccgaacagcgtacggacagatatggcacgcacaatatccctcgtggatactctgaggaggcccctagattcgcgctcgctacacggaggcctctttggccccgtctctgaggtcaatgacagaatcagggccgggaagttgacgggaatgtcgagccctctgcantaccccgctcgtgttaaccagccaacgtcggcagaggaagcggggcgtgtcgagcacagctgagagtcggcccgttccctgcgagaagcgaggcaattgcctccaagaatctatataccttgttgccaaataagattggaccgtttccatgttagagacctaggtaaggccaggatccatagggagatacacacgcaaggggggtgcgcgagagctgaattgacaaaagagagaaaaagaacacccacgccggaggggggtggcaccccgaaaggagcaagagccgcgggcaaaacgccacaagggcatttgcctgtgtgccccaagaaccggggtgcgcccccgacaagatgggggaagctcggggacccgataaaggtgaaaaaaggccaggagagtggccacgcaagttgatccacagacaacggctctggggaacagcggggcgtaaccaacgggggtaaacacgtggggcgaaccacctatggggagaaaagggcaaaccaccttatacatgtccgtcgcggcggggggcaacccacaacacactgggggatgtcagacacactccccctagcagcgagcagattttacaagagccccgactaggcggacgtataacttgaaaaagcttctaagaaaggcgggagcacacacaggcggctgctgaaacaagtcaagaggcgacaaacaataattctagcccacacgcgaagaaaattgtgggtcttcaccacgcaaactacaactacaatcgggccaaactctaactaaacagagcagacgcgacgagaaagccacaacaacacgcgacgcaccaacgagctagcaaaaaggaggcaaacacagagaaggaataaaacaagcggacgcggacgcaaccacacgaaagacagcgacaaggccaaacgaagacgagccggagaagagagacacacgaccaaacagacacaagatcaacacaacagaacgagagagaagctagaaacaagacaacaagaaacagcacacgacggacagaagagaggccacgaacacaactcaccaagagacgcacaagcaaagcgcgaacgg

SEQ ID NO: 566457 - DNA, 720 bp, Homo sapiens
atcaataggacatagtggaagctggtatacgaggctcatgcactgattaccactattctgaggctacacccttaaaccaaactacgcaaaatccatttaactatcatatcatcggcgtaaatctagactttcttcccacaacacgtttactacggcctatccggaatgccgccgagcgtgtactcggacttacgcccgatgcatacaccgagcatgaaaccatccgtagtcatgctgtaggctcattcattatctctaaacagcagtaatattaagtaactttgcatgatttgacgaagccttcgcgttcgaagcgaaaagtcctaagtagtacgaagaaccctcacatagaacctggagtgacctagtatggatggaccgccaacgaaacctaccagacattacgaagaagcccgtattaccataacacacgtcgttagaaactaagaagagccgggcaagggaacttccgaaaacgcccgcccaagatgcctgggtatatccaaaggcaggaaacgacgccacaatggagcaccttcaccaatggagcagtttatggtccaagagcaaatacggataccataacgacaccgcggccgagccacgggcctcagtagaaagtgatatgccccataccgaaggggtcccccacatggtcgtaggatacgcatgaataccgcacgacttattgtttgggttaccccaaaggggggtactacc

SEQ ID NO: 566458 - DNA, 102 bp, Homo sapiens
tctagaggatccctcggtcgcgaatcaggtagagggaacagcaattgcaaaggccctgagggaggagatcatctgtagaaatcacccagtaaagtggcttgc

SEQ ID NO: 566459 - DNA, 754 bp, Homo sapiens
gaaagaagtcggctctgggctccagtgagggaatcagcacacatacctcagaatcgtcggagtctaagtccgtagatttcatcaaaacaaattgcctgaggtggaagatgtagtgatgatgaatgtcagatccagttgctgaaatgggggcttatgtagagcttgctggaatacgaatcaatagttgacggcatgattacttcttagtgaattattcagaaggcgtatccgtctatcaacaaagctcatccgtagattggcaggaatgagtgtgtgagattgtcgattaggggtggatacagacaaaggatatatggatgctggcaaaaagaagagttgctcacagtaggaagcccaaatcaaatgtgaagaccaaaattcaaaatcatgccacataagctgtgtaatggcatgcttcgtcatgttgctgaggtgttagacatacactcaaggatgagcagctggacgagcgctattccaaagagagaactcgtcgtggggtcttgtgattgacaagtaacacgagagcctgagtataatgttggcctattgatggataaaagccatgaagtcctcgagaacgcatctatcttgcattcgatttagattgtgccttgacaggattgaccggggaagtgtctcattctataatactaagagggggttgaaccccacaaggctgggcacgattcgaggcagatttgaaggggtgctgttgtatgaggcttcgtgtgaacgcgctacgagtttgatg

SEQ ID NO: 566460 - DNA, 237 bp, Homo sapiens
cgtggcctagtcggatgtggaaggaaggaaggaagcagcagtccctcagggcctccagagaagggaggacagagaaagtctgtgtggtgtggcttcgtaaccctcactccgacggggccttcctggtccccatgtaggatgcggtggcagggccccactcaccatagaccaccaggcctcgcagggtcctcagctcttcagcatgagcatggtgctccacattccgtctgagccctg

SEQ ID NO: 566461 - DNA, 112 bp, Homo sapiens
ggttcctcccaccctagcatactggtagccacgcctctttcctgaacaccccgcccccctttttttcaagcattggccaagtaaagggaccagcagcatgtttagtagacgc

SEQ ID NO: 566462 - DNA, 305 bp, Homo sapiens
acatcatggccgagatttgcaatgccaatgtcccccaaattcgccaaagggttccccagatcctaaacatgcgaggaagccccctcaaaattgtcaggcatatcctcaaggagtatgcaaaaaacatcggggccggccggagcccggagttccgggagaacgaccaaaagcccatcctgggcttgctggagaacttctaaaggccccttggccctgcgcctcatggcctctctcagcttcccccccaggatcagtttttccccacctctgtgtggcttttggccaaattaaagctagttttggta

SEQ ID NO: 566463 - DNA, 229 bp, Homo sapiens
  misc_feature (6)..(6): n is a, c, g, or t
  misc_feature (153)..(153): n is a, c, g, or t
  misc_feature (181)..(181): n is a, c, g, or t
aacctnatgactctccatccccttgaaccaaacatctagcactcagctccagcatatttcaccattcaacccgaaattcacaaacgctacttgtcgacttgtaaccaatttactcagcaagtgctgactccttaacggatcatccccatcctncgctgcaaggtgactcactaaaatcatntgttaacaccaacattatttttacacccagtgtgtaagccagaagggc

SEQ ID NO: 566464 - DNA, 183 bp, Homo sapiens
aattaaaaaaaaaaaaaaattagccacatgtggtggcacgtgcttgtggtcccagctgcttgggagactgaggcaggaggattgcttgaccccaggagtttgagaccagtctgggcaacatggcaagaccccgtctctaccacaaaagaaaagaaaaagatggaaggggaaaagagaagagtt

SEQ ID NO: 566465 - DNA, 483 bp, Homo sapiens
  misc_feature (368)..(368): n is a, c, g, or t
ggagagaactagtctcgagtttttttggtttttttttgaaactttaaaatccctcaaaaactgttttttatacaagtgagtttggagtcacgagtgggcttatcggtaggattctctggtagcgagcgcgggccaccagggccctccaaaatttttgggacctcgcagcgacgagggctcagctaccagcagggtctccggtcatacgtggagtgaggagtgctcttgagatcctcccttctgggaagccctcattccacatatatttctcgtggataaatagcgccaccagggcgcttgtggaagcatgtgtgaccgtgacgcggatatagccatataaatctcgtggggcccaccgtgtagaccancacaacccctttttaacagcgcgacccaccgggatttgttcttaacacccaggcaaaaatgtccggctctcccttttgtcccgaaaaaaaagccagaaaagcgtgggcgtctcac

SEQ ID NO: 566466 - DNA, 414 bp, Homo sapiens
aagaggggcagagggggggctaaaaaggaaagggggggtgaaaagaaaaggggggggacagttcagagggaggaagggagggcgagaagttcaagaaaaaagcgaaaaaagaagagaagagcgggcacagcaaaaagaaaaaggggtgagaggggatccggaggcatgtgaaagaaagaggggaacgcggcagaaagaaagggggtagagagggaagaagaaaaggtccttgcaatagagagagaaggtggggaagacgagagaagccaggctgggaaaagaaggctggagtgactgtctgggaatcaaagtcgctcgaagtctctatatgtctatcagtatctctctctctctctctctctctctctctctctctctctctctctctctctctctctctctctctgcgcgtgg

SEQ ID NO: 566467 - DNA, 383 bp, Homo sapiens
  misc_feature (336)..(336): n is a, c, g, or t
gaactggaatagcaggtttgtccccttccctgtcctactatcatacactcttaaaggatctctcagacagcctacaagacatagcaaaatccacccttactctccaatcccaaatagactccttagcagcagtaactctgcagaaccaccgtggcttagacctcctaaccgtcgaaaaaggtgggctatgcacctttttaggggaagattgtttttccaccaaccagtctggactagtacgagatgctgcctcgcgtttaaatgaaaagggttcttaaaattcaggacaatgtcttttcaggactttttaacaccaatctttgggagctggggctntgtgggtttttccctataggtggggcccctcattttccatcattttt

SEQ ID NO: 566468 - DNA, 801 bp, Homo sapiens
gagccaaataaaagctaaccaatcattgagccaaagcttgccttggactcatagactggtatttctttaaggaaaattgtttgttatatattgtgagctatacagagcaaaggctcttgaacgaatatcctagattatggagacactttttcccttcccttttctctggaaaaattaaagttcttttttactgtccactgagactggagttgctagatggctaagatcaatagcatcaacttagcagcgctccaacgtcctggggtcaagcgatcgtcctgcttcagcctcccaagcagctaggactacaggtgtgcaccacctttcctggctaattttctgtttattttgtgtcacgagatggaggagtctcacttatgtgtgccctaggctgagccttgtacttgtggtttcaaagtgatcctcctgtcttacctcccaaagtggttgagattacaggcatgagccactgtgcctggcaaaaaacattttaaatcccttgtctgggggtcaggcctctaaacatccctcagatttcagatagtactttcaagcctgtcgtaacatagcaggtttgcagtaatcttttagaatatagcttgtcaaattagagaatggtttgacccccacatgttctcagtaggagacagttattattttagaaacctaaggtagagatgtttcaaagtcaagggcctaagaaacagaacttggaaaaatggcggaactgttttaaaagctggaaattggacaaaatgtatagtaattaatgatgctaaccggtggaacaagttatttaga

SEQ ID NO: 566469 - DNA, 349 bp, Homo sapiens
  misc_feature (26)..(26): n is a, c, g, or t
  misc_feature (99)..(99): n is a, c, g, or t
  misc_feature (109)..(109): n is a, c, g, or t
  misc_feature (111)..(111): n is a, c, g, or t
  misc_feature (120)..(120): n is a, c, g, or t
  misc_feature (152)..(152): n is a, c, g, or t
  misc_feature (165)..(165): n is a, c, g, or t
  misc_feature (176)..(176): n is a, c, g, or t
  misc_feature (183)..(183): n is a, c, g, or t
  misc_feature (186)..(186): n is a, c, g, or t
  misc_feature (208)..(208): n is a, c, g, or t
  misc_feature (216)..(216): n is a, c, g, or t
  misc_feature (237)..(237): n is a, c, g, or t
  misc_feature (265)..(265): n is a, c, g, or t
  misc_feature (274)..(275): n is a, c, g, or t
  misc_feature (285)..(285): n is a, c, g, or t
  misc_feature (319)..(319): n is a, c, g, or t
agaggccatgcagagggggcgaaaanaaaagcgaagaagcgaagaggcggggagggccggcaggaaaccaggagaggaggagggggaaggggcgcaaanaaaaagcaananacggcaaanaaggaatacagcgcgctactgcagccattgcncgagcagccaaancaatgcccganagctggngangcaaccagggcacagggcaacncgcacaanaggacggcgaccccagaacancagcaagcggaagctagctggctcacanggcgggcgnnaatggcgcgngggggcaagcgcaaacaaagaacagggcgccagngcgcgtgcagctcaaaaacaaaacatgctc

SEQ ID NO: 566470 - DNA, 203 bp, Homo sapiens
cggcatgcggactgaagctgcctgccctctgaacgtggatgattctttgtaacagggggaaaaattatgattttcttatttcgctaggacctgtgaatgacaccctgatctctgctgcctggcgagcgctctctgcagagctgccaggcacatgctgtgtgcttcagcggtaggtgcttggcaccttcagtcttttcctgacg

SEQ ID NO: 566471 - DNA, 437 bp, Homo sapiens
  misc_feature (219)..(219): n is a, c, g, or t
gcgctcgggtagatggggcccacctcacacccactcttcacccccaaaatcacgctggggctgggactcaggactagggacgcatgtgtgtgttgaataggagccctaactgtcgttcttgctttcacacgcagcggataggacagagggatcgcggcaccatgtggagacggatgaggttgatggtgaggtggggtatctcgcctgcctctgaccttnagatcgagtcctccacagatagcatcaaagctggactggtcacatcatgggctcctcttcacacggccacaatcgatgtgtcctctcctctcggtgctggtccgtgtatgcacatgtttgggtacctaggagccgtcttgtcagagcggcagtctgtgaatgtgcatgctgagaattgctcttgtagcagttgccctgcccgttcttgcaggtgacct

SEQ ID NO: 566472 - DNA, 115 bp, Homo sapiens
gagagtctgcagctgtgggtgggcctggggcagggctggactctcagaacttgagtctctgaggggggtctctttttcaagagttttatgatcccacgaagcaaaagcacagatt

SEQ ID NO: 566473 - DNA, 575 bp, Homo sapiens
ggaggggcaaagttcccagtcgcagcgctgcagcaagcggatccagctgcacagcaagcaagctgccgcacctccccaacaaagcccttacacaagcatctccaaagtttggcattctgcccataggtcagtcagcacggaccaaagcaacagctcatcacagccctatcatcctatcaaacactgtggatcaaagtcaagctctaacgcaaactggttccaaacctctgtgctcccaccaacacttctttcagtaaggcaagcaagctcttctacatgcacagcatgcacagcatagttgaaccaagaagcgaaattgccgtcctaagacagcaaacagcatgcagggattgcaaagaatcattcgggccaagggcatacaacaaacaattctagcttggaaccaaaaacttcctttttcagatttcacccggcgcaaaccaggccatgggcggtcacccgtggattcacacccgagccacagccttggttggcgcagccgcaaaccccttcaacccatcctgttttctttccaatcctgctcctggggcacaactgtccctatgcaccacagg

SEQ ID NO: 566474 - DNA, 374 bp, Homo sapiens
  misc_feature (195)..(195): n is a, c, g, or t
  misc_feature (243)..(243): n is a, c, g, or t
  misc_feature (245)..(245): n is a, c, g, or t
  misc_feature (249)..(249): n is a, c, g, or t
  misc_feature (272)..(272): n is a, c, g, or t
  misc_feature (309)..(309): n is a, c, g, or t
  misc_feature (334)..(334): n is a, c, g, or t
aaccaggattctggattgctagagctgcagaaattcacccacttgggtactcttagagctctacagcaagaatatgatagaatgtctgatctttgtgctgcagaaagcaaacttttgaagaattctaagcaacagaaaatgggttatgtgactcatctgctatttggcagccactattccttttttagactgcanaacggtctgcccctgtacctctagaatagcctgagctgaggagtgcanangatntatccggagaatcccttctcttnataactcttaatctttcaagtaagtagcattattcanatgctatatgcttattttaactaancatcctatcttaacttcactattaacagtaatcttccttg

SEQ ID NO: 566475 - DNA, 893 bp, Homo sapiens
caccgtctaccagagattcaccaactcagcattggaactcctcccccaggttttaagtctgagttcacgaggaccagcagaatactggccatggtgcatcttctggttatgtctgtggcttttacaggacaacaaggatatgaacatgcatgagcagggtttctggacaggcttggaaactggatggaactactaggatatctgttaggctgtcgatagagcggcaacatcctcttctcagagtcgtggtattacccgttcactatcctcactctccgtaccctggcacgtggtaatagggcttactcagcctcctttcatggtagtgctctggtgctagctagttcgtgatatggttcaatagttcaggacaggataaaccagatacatgtaatcaggatgatggttgggtaccaggagatgataaagtacgagagtgggagtcaactactggtatgcagtaaattttggatgtatttcattgattttgtctcttgtagaaatagaagtattaccatgtaaacaatggggaaagggggatgttcaacaagttctgtggtgttatgtccagtgtatcttatggtattctattatttgaggctaaaagttgatgtgtgacaaaatacttatgtgttgtatgtcaggtaacatgcagatgtatatagccagtttgggaaaagtgatcatttacgtgtgggaatgttaaaaatacgtttaatttctaaacacctgtgaatggccctaagaagccttaagaatgaagggtgttgtactaatagaaaataagtacaagaaaattccagttcaaagtggtagtagtgatgaagttataactatagaagaatataatatcaattgggataaatatggaggggggggctcaacatttatcg

SEQ ID NO: 566476 - DNA, 842 bp, Homo sapiens
gtgggggcccctctgtccacttggccatttccccagcaacccagttgaacaggtcccaagttcagaggcgcactgtgacccccagttcggcctggtcctccaacaccaagcacagcagcctgggctgcctcccccatgaccaatgaggatgatacattcccagcagacagctccaacctggccgagtccaagctgggagatttcacagggacgccctgaattggggtctggcagcctccccatcccagggcgccccatactcgatgcccctggctgggacagtggctccaacccagccaatttgtcccaactgagcgccccaggatggaccacgcccacccatccaaagaggctcgaggctgtgccaccagagaccataccggtgagcccagcaacacaccaaggccacattgaagggaaggccctttcaaccttgtgcccaatgccccctggaccaagagctggctccaagaagcagggccaatcattggctgtctcctaggagaaccccatatcctgtaccctccttgggactgaaggggaaccccggggtgccccacacggccgccctgcgggtgaaccaaaccagcccacgaggtgccaaccaggtccttctgtccagtcaccagccaacccctgagatcccggccaaccatccaacccccagagtccattcgttttttggagggacacaatggactcagggcagcgcccggctgaccacagcacaacccacacgcacctgcctcaggactgcgacgaaaccggtggggctggttctgtaattgtgtgtgatgtgaaacccattcagaccggccaattaaagtgaccttttaccctga

SEQ ID NO: 566477 - DNA, 1234 bp, Homo sapiens
  misc_feature (71)..(71): n is a, c, g, or t
  misc_feature (79)..(79): n is a, c, g, or t
  misc_feature (87)..(87): n is a, c, g, or t
  misc_feature (92)..(92): n is a, c, g, or t
  misc_feature (116)..(116): n is a, c, g, or t
  misc_feature (136)..(137): n is a, c, g, or t
  misc_feature (172)..(172): n is a, c, g, or t
  misc_feature (177)..(177): n is a, c, g, or t
  misc_feature (678)..(678): n is a, c, g, or t
tcctacattaaactttttaaagggggtctcaaaattctggggacaaattttggggccaagtggttcccatnaaaaagtnctgatttnaaaantctaataatcttaaaagtgccacncgcaaaaaagaaaaccaagnngtggctccacaaaacattctccttttcctctcggnagggntttacgagtgcattgtgttatcatttaaccagctcttttactactaaccttaaatgtggccaattgtgaaacaaacagttcgtgagaccggttctttcccaccagtgtggtttaaaatggggggggcaggtataagggataatatccattatagccttctggaagcttcggggcagaacttggggtgaaccttgggccagctctccgagcaagccttctttgctccacgtgctttgtgatgaaaccccacacgcggaaactgtgggtcgtgtttctcaatattcccaaacaggcaaagggacccaaggggtggatacgctcgtgaaaacgttcttcaaacacacatggggcttgtgccaggacccattattcaccaatgggcacgcattcaccaagatttcaaaaatatatagggggccattctacccacagctatttaaaccaagaaccgggcagacaacaactccttttccctatacagtatcacacgaacaacctttngcttgcgcaatggtgagacgcctgtggtggggcaaaatcccaataaacagggggcgcataacgccggggccgctataatatgagcgcctggagaagggtactcagggggagtaaattcccccctgtagtagacaatttagaaaccgcccacggcttgcttacactcatgatgggacggacgatccattaatatcgggcgtgtgtcccaccaagccaaactcgtttgggcccacacaacagaaaaaatattctctttggacagaggaacacatttctttttgacacaattttggaagcgaccccaaaattggtggttccccccaggagaagaagaacgtcttcaacgactacaagaagccttcaaggggggcgacaaattcacagcacacgaatattacccttcccgcggtggttacaccggatttgactggtggacgcacaagggtgtgtaacacaccaaatcccggggtttttggtaacaacccacaggttcttcaactatcggcgcacaagggaaccatgttccaataaccccacaaattttggtaaacactcg

SEQ ID NO: 566478 - DNA, 366 bp, Homo sapiens
agctgccccttctgctattttgacatattttaagccaaccttctttctaaaattatcaaaccatcctttgccgacattaacttatccagctttagatccttcaccttcctttcgctttaagttgtcatgtaatgattttgctttttcttgaatcctattagaagctgtaggtaggcctttctaataacaaccctgtacccacataaaagctgtgttttcaatatgaagataaaaaggtattgtgcaaagcatgcagggttttcatgcctcctggcataggtgcagtgatagcttcatgaatttcctttttttttttttttttacagtgttccttaggctggatttagttatttttatataagcctt

SEQ ID NO: 566479 - DNA, 927 bp, Homo sapiens
gcgctgtggggatcctcctatcagaggtctaatggatttcacctatcatccgctctctgattcttttcagattcgaaaactctgacctagattcacccgcgtgaatgtgttaactttgtctcgcccgaacgctctattagctgggcgcaccccctcctcatagaagaactgcatgcccttatactatatggagatctcacgggtgatcatccgtacgcgccacaacagagtacctgttgcaatacaagagggcacgactataatcctatggtgacatgatatcctcctcattccatggacatatagggcatgcgtctaatggtcttcagttctgcgatatgaatctccttgcatgtgaaattttctttacccatttctatcatttttccatcccgttaaacataacattgggattgttttacaagtgaatcccccttcattgcttacataccgcgaaaaccttgtgagtctttactccttgtgagcgtcatttaattccccaccaggacagactgagtcatgcgaggttcagatggcaggcccgtagcactcggcccgtggaccctatccatgccatatatggtttggatacacctgtgagtcttagtggcgtacccttattccacccatatattgggtccgcatctttgatttgctacgaacttctttcgcaattgacttccatacgtcgacatcctgatgacaaaaacatatcttagctacaatacataatgcattcgaacgtggcgcaacagacagagagcttatttccaattacccatcactatgaattccccaagaaaatgtatcaatttagtttgacctaggacgtataagttacacacaatacagcgggtacattgatgttccaagaagattccgcctctttaaccctgattcgactggttgctagaagtgccctataaa

SEQ ID NO: 566480 - DNA, 244 bp, Homo sapiens
ggacactttaggtgatcgtctctctcttcctcgctcgaccctcaccctcatgccagctatgtttattaggtccttgcttgtatctaagttgcctgggcggaggaagtgggcaagctttatgaacctgacatcagtgggcacagggagatcgggagcctctcaaaaaacagaactcgctctccaagagctgcttcctgatgcttgagcctccccagctgttggagagtctccgtcgcacggggtc

SEQ ID NO: 566481 - DNA, 327 bp, Homo sapiens
tggtttgaaggaagatggttataaacgtccctggttctgccaggcttagaggggctttgaagcatgtgagaaggtgctcttttgttctgtcacggtgctatagacttggcagtcttggcccctgaaggctggatatcactgttcctccctagaagaccttagcctcttcagctgacctcaggccagcgcctctctggtgagaaggggggctgtaactagtcattggcctggtagagctttgcttggcatgtggaagtgaaaccatcagaagccactttcttgttgccttcttcttttgaacaggtcacgtctgggtggaagcgatgt

SEQ ID NO: 566482 - DNA, 395 bp, Homo sapiens
  misc_feature (52)..(52): n is a, c, g, or t
  misc_feature (54)..(54): n is a, c, g, or t
  misc_feature (80)..(80): n is a, c, g, or t
  misc_feature (145)..(145): n is a, c, g, or t
  misc_feature (193)..(193): n is a, c, g, or t
gggctgggcgcggtggctcatgcctgtaatcccagcactttgtggggggggngngggaaaaaaaaagggggggggggggncccccccccccccaaaaaaaaaaaaggggggggggttttttgggggaaaaaaagggccccccggnaaaaaaaaattttctcccaaaccccccccctttggaaaaaggagggtncaggaggtttcgaagaccagcctggccaacatggtgaaatcctgtctctactaaaaatacaaaaattagcctgggtgcctgtaatcccagctactcaggaggctgaggcaggagaatcgcttgaacctgggaggcggaggttgcagtgagccaagatcacgccactgcactccagcctgggcgacacagcaagactctctta

SEQ ID NO: 566483 - DNA, 395 bp, Homo sapiens
ctatataaagtatttttagtacagatggggtttcaccatgttggccaggcaggtttagaactcctgagcacaagtgatcgacccacctcacccttccaaagtgctgggattacaggcgtgagtcaccatgcccagcccaatggttgctttaaaaaaattaaagaagttaaaaggatattaaatggaaactttcgacttgaggtatcaagatgcgatagcagtgaaatcccaatgtgacgtggtaaccagcaatataaatcttcaaaaagagtgtaaattactttatgagatttaaaaacccttctttacgaggatgagagtcaaagactgagaatacattttgagaaaagaaggattttcggggtgagaactgctagacaatgagcctagtaccc

SEQ ID NO: 566484 - DNA, 1253 bp, Homo sapiens
atgcatcgatgttctcgatctgtcctccttcctttccctacctgattccttttgatggctcgctgtgtcggcattacgtgtggtgtgattgctgtctctctctctctccattgtttgatatctatctgtcagcgttttatccatcagtcctaaggcaagatgttcagatctgaggcacttgctgtatccctatactattgtgagttggtcttactctgtgtactgctttattgttcctgtgcatttctactagaatgcatattactatatatttttagtttacttctagttgtacttctagctagtggacgatgtactgacggctactcggcgtgttgtgatcccagcaacgttgttgctgcgaaaactcgcgtggcgccaccaaagtcgggttgcctccccttttccttgcgagacctcctcgcaaagacaacataggttagctaagtgagagttctgcgatgcgctgtgtgaacgcccgaagaatactactgctaaaattcagacttcgttagccccgtcaatatcgatccattgtcttagtagactttaaaattagagtctctattcgtcatgttatttgcgatcgaaggtattatactaccattttgagtctcgagcattacccctaaagtagggttcatgtacccttcaatgtgcctcttgtgtgcatccgttttccttaacgtagtaaatggttgtttgcacacgggactcaggaccaattgactccctccttgtgagggccacactttcgagttggttattacattccttgcgcaattcaaaagaccaaagtgccttaagtgtctctccataattgtgtcgttccatagacgctcggcaattttacggttttgggacaggggggtttttaaagtggaacaggggacaattgagttgttcccacaagtcctagaataccattggtttttttagcgcaaacaaggaattggaatttcctttggggacattgatttagcttcctttaaggcaggaaaattagcactttgggagcagcgggccagcggcacccacgcagttctggcaatttgcgaattttggctgcctctttggtaaagttaattaagcgtgcaatggcaataaactttgaaacagaaactcggcattcccatgcacccgcgactttgggaaggaatttaccaccagtctttggggctccttccgagtatactgtggcgtgacacttttcaacgccgaaacacacaaagagtttcttttcccaaaacaga

SEQ ID NO: 566485 - DNA, 862 bp, Homo sapiens
gctgaaaaccaaataagaagattctggctcaaactctcaggttaacagtcttccggcagaatggtgtgaagctcattcacagtgtttacacgcagagaccagtgatgacttatcattcaagcaggggacgaccggatccagattctgcgaacgtctggacttctgactgtgctgcagagggcagactgcaggacacgggagtgggatcttcccagcagtgtgtgtgagcgccctgcccagctgaggcaaaaagtactgttggccatagtaccgaacggggacggaaggccaaagccttatatgatttccgaggggacgactgaagatgaactttccttcaatggctggagactataattaacagagctggaatctgtagcatgagtgactggcctgacgtggagaactatagtggcgaaagctcgtggaactatgtgcccacaaatggctacaatacaggttcctacatgactcagtgacagcgagaacgcttgtcctgcgtagcactttggtcaacagcgaatctcacctttgaacctaatcaacctcatgactatcacgatacggctgaagtggcacctagttactgacatctacgattgagaaacaggaaactcatcataaaggctcgtccaacttagggtatgcaactagaaggaaacgtgttggccttggaatacctggcacggattaagactcagttgcccacgcaattattactcggtgagaggtatccgaatatgaggggccatatctacacgcaccatccatgggaaacaaacattggccagccctttggtgaaaaaatcacccatttggtatagcttacattggacttgtacttgcgacggtagaggaacaa

SEQ ID NO: 566486 - DNA, 337 bp, Homo sapiens
tgctgggtgactctagcaggatcttgcagctatcggttcaatgtagaacctttaacttcagcaaggtgtactacctgttactaaaagtaagaagtaagtaaagactgaagaacctcagcaggtggcggtggctcacgcttgtaatcccagcactttgggaggccgaggcgggcggatcacgaggtcaggagatcaagaccatcctggctaacatggtgaaaccccgtctctactaaaaatacaaaaaattagccggggcggtggtggtgggtgcctattgtcccagctactcgggaggcagaggcaggagaatggcatgaacccggggaggcagagg

SEQ ID NO: 566487 - DNA, 630 bp, Homo sapiens
tgtctgccaaagatgataatctacatctattaatcttcattactatttaaaaattgacattctactgtaaagaagagctgtctcttacctcccatttataaattattcgacttcacgataaactaaaaaatatttattctatgggtttctaatctattactgtcaatattataatgttgctcaaattgtcacagatttagctatttaaagatctttgggatttatgtccttgagacatgctagctacccattaatgagtacttccttaccttctggcaccacaagataatcttatagttgccctttcctagctctgaattcagccatttatccaaaaagatctagtttctttaagttaacaaatggcatacagaaactaagatttgggaacctaggtttgcattttatcattggttgtcactgcttctatgttttctcaggagacagggctaattgatataagtatgtatgctaattgtgcatactaacacatgtatatgtaattgtttatagcatctttctatgtgtgtacacataacaataaattcacattgatatttcattccaatcaatcaccacaggattcattctagagttcctctccttataagtaactctttctcaaaagaa

SEQ ID NO: 566488 - DNA, 793 bp, Homo sapiens
cattaaatattatactagtcatttagccatctcacttctaggaatacatagtatatcgctcacacctcatatcctctccatactatgtcctagaaggaataatactatcgttggttcataatagctactctcataatccctgcaacatccactccctcttagccaatattgtgcctattgccatactagtctttgccgcctgcgatacacatacggtgggcctaaccctacatatgtctcaatctccaactatcagtatggacctatgacttacagattaactataagcgtaaaactactccaatgctataacaatcgtaagtaccgtcgccgaatccaaattagtaattactatccacatgagcatgacatttccaaaaaaaagacactaactattgagagtcaagctacaaatcgacccagcagatcgtaattatgttattcattgccatacaatccctctacttattttttgtcacacctagatatcaagcaactaaactctatattacgcttgtgtccccaaacctttattaccttgcccaggaatcgccccgtaaactaacacccaacacgtggctaaatatctaactaccattgattccatactctccttcagaatcatggactaatgccaaagtccactgtgtatgcagagaaacagaatcaggaaaaaaaaactctacctcgtctgatagctaagtctcgctacaagatctccttaattagtaacatatacagacgactgaaaaatattcatatatcatatcttctgcgtaaactccctttgccc

SEQ ID NO: 566489 - DNA, 146 bp, Homo sapiens
gaggcagctacgggtgaggtacagctacgggtgaggtacagctacgggtgaggtcagtatgttagtggagggagtgcgcgaaaggagatgccagcgggtgttaagaaggatattgtcagaagagctctttgtctccatccacgggg

SEQ ID NO: 566490 - DNA, 415 bp, Homo sapiens
  misc_feature (107)..(108): n is a, c, g, or t
ctctatagaatcccctgtatgcgaacacccctctttttacagatatgtaaaacaccacaattttcctatacattttttttccattaattttagagaaaaaaagccgnnttttttttttttttttttttttttttttttttttttttttttttcttttttttcttttttatttatttttttttttttttttgcggggccaaaaaaaaaactttttaaattaaaaaactttgaagaattttttttattcccccaaaaaaaaaagcttaaaaaaaaaaacccctaatttccctttttcccctttttttttttttttaaaagggaaccggaaaaaaaaatttccaaaacctttaaaaaaaaaattcaaagggtttttttgtttaccaccaaaaattttttttttacccacccccaaatt

SEQ ID NO: 566491 - DNA, 200 bp, Homo sapiens
cccttgagactgatagaatagaatagaatagaatagagcagaatggaactgacagaatagaatagaaaagaatagaatagaatagaatagaatacaatagaatagaatagaatagaatagaatagaatagagcagaatagcacagaatagaatagaatagaacacaacacaacagaacagaatagaatagaacagaacag

SEQ ID NO: 566492 - DNA, 577 bp, Homo sapiens
aaacggcaagatttgattattggcatgtcatgcattgagatcaatcctttgattgcaccacccatttaatggaactttcacaaaaatagcgtcggggaatcccacaacttatgtttccggcaatttgttaggggatttgacacccagaatcttctttattgggggggcagggaaacaaagatgctagtgaactggatgcgtttaaggacaaaaaacctgcctttacaatgaacaccgcaggtcccaggctagagagggtcggattaaaaacaaccggtctgcatacttcagacggaagataggagtatctttccgcattagttggccaatcagtgctatagagcaccgagggcaatgcacactacttagaatctacgatcttgtgaggagatagacttgttaccgaccgcagatgcgctacaagaagcttacatacacgaccctaaaaggttaccaggcctgatgaatgacctttagagctggcagttccaatgtgacgcacaaagaggccatagaggtcactactcgcactgtagaaggcaacatgagtgttcagccgaaactcttttgtaaaggg

SEQ ID NO: 566493 - DNA, 597 bp, Homo sapiens
attctatttaatatatttttttttcttttgtttttaaattaacacataaataaaccaaaaaaaccaaaaccaagacaaagaaccaaccaaacaaacaaaaacaaacccaggccggacaaaaaagccaacgcgcaacacaagcgcaagcacaggcccatccactacacaacctatagacacaagcatgccctcccacaattagaaccaagaacccccccgaacataagggcccaatttccccccaaccaacccaccgcccccccctcccgagaaaaaaaacacaaggccaaaaaaaagccggcccctgaccaaaacaaaggcataggccccccccgaaagaaaatccccgccacaaacaaaaagccaaaacactaaacaattgtccgcgccctgctaccaaccaaaacccccgccctaatatttccacggaaaacccccatcaaatacccccccgaggcaatacgccaaaaaaccctaacgaaatacttgcctcaaccccccccccctccaaaccacagcataactaacttgggaatcctctccctatataaaaatgcctcccccaatccagcgctaatccttcccctaacaacaccc

SEQ ID NO: 566494 - DNA, 666 bp, Homo sapiens
tgaatgctgctgggctcggctttgtcctggcacagccgctgagcagcgccaggaggccaaggctgaaaataaatgtcgaggtgcgaccgcccatgcaggctccttttgcgtgatgccgacgttcaagtgtgtatgcgactgtgagcttagatcagggttccttatctgcatggaggatcccatactccaatggttcccatgctgactaaatacacatgcttaaaaccctcgcggtggccaattaccgctcgatcaacaaattggtggtgcccctggaccggctgaacctggtgacagggcccaatggcagcggcaagtccaacctgtatcgcgccctgcgcctgctggccgaaactgcccagggtggggtgatcaatgcgctggcccgcgaaggcgggctggattccacattctgggccgggccggaaaacatcagccggcgcatgcgcaatggcgaagtaccggtggaggccgtggtcgcccaaggcgtcaaacgcttgcgcctgggctttgccggggaggacttcagctacgccatctccctgggcatgcccatcccggttcccggcagcgagttcaaactggacccggagattaaaaaggaatgtatctgggccggccctctctatcgcccggccagcctgctggttcagcgctcgggaacga

SEQ ID NO: 566495 - DNA, 1014 bp, Homo sapiens
  misc_feature (1014)..(1014): n is a, c, g, or t
cgtgtatttgggtccttgttatgggcgctggtttgtattgggctgaaccgatctgttttggggctcgtggtttttggtatcctcttttgtatgcatgtgcctggtgtatccctggtttctcggggacttttcccccggggaagtgttttcgcgtccgatccccagtcgtcgttccccgggtcttgtctccgggctgtaggatgtcgctcaggtcgatgggccgggaacggtgattaggccttgtcgtcgaactggatatgtgcgttggaggtccgctgttgttctttggccctgtcgccgttgagtgccttgccggtggggctccgtgtgatgggtgcttgtcctgctgagtatagccctgtgaggatgtaggactgttaagcaaagtagaataattagtaagccactgtgttctgataggaccctgggattgacgaggtttactgtcgtcacgtttgtttagatcatgagttccgaggactaatctatcctagttttcggtttcttgttaagatgccctggaattcgtgtgcactctagcttgggcgagtggcgtcaggatccctgttcttgagatcatggtggaatggtatatataagtccaggtcactaatagttttcttctagcatactaatgagatgtggcgatcaaggggatagtgaagtttaccaactgggtgatgctcagtcaacatagactatcatggcacaggatatcacgtatatccggtccaggcgctcagatgagctgtggcatatccactatgtgatagaaatggggtctcgaatttatttggaagggatcaatagactactggtgagatacatggataaagaatagatgtgaggcgacagatgcaacgaaccatcatagctgataatattatatttctgagtgaccagacgaaagagaacggagtagtaaggatgattcttctttggccatcatttggtacagtctcagttccaagtcatgtatatgtttaccctcctgacagataactctcgtggggn

SEQ ID NO: 566496 - DNA, 646 bp, Homo sapiens
aggcctgtaccgcccggagtacgggatctgtcaccagcctgcgattcgctgctctccgacctcaggccgctgttcatccggcctggatgaggggtgcgctggatgacgtgttagggcctgttcgattgtgatcactatattatcaacatcatgggaaacgcctcttcatcctcaactgtccagtgccgcctgaaggaaaagtggctgtgatcctgaccccggaggaggtccagcatgcgtgtcgataggagaaactgcagccagttactatggcacgttgcgaagatattcaggagaccgtcgttgccttgtatatccagagaacagttgatagatggtatggaaaaaggtacagaattgtcacgcatgatcctttgggattgggacttaaaacaatggtatgagcctcattatcaagaattctggaggtggaaatggagttgatcttttcagtgctaaatgaggctcgcaatatggtgtcagatcttctgactgatccaagccttccaccacgagtcatttcctctctacggagtattagtagcttaatgggtgctttctcaggttcctgtaggcccaagattaatcctctcacagcatttcctggatattacccctgttctgaaatagaggaccagctgagaca

SEQ ID NO: 566497 - DNA, 421 bp, Homo sapiens
ctaaaaatgcactgttacttacagtttgtttcctgcagtaaagaaaaattcttcatttgtgcagtttgaacaaaggggaaatcatcttcatagtaatgagacgttgtgaagtgttcctgcatctgtcattgttagggggactacttttctccagggatgctttgcacccttttgactaatttctataatttatgattcagaatttgtaactgtttgcagacactataggaaggtgggtattagactgtgatagacaacagttcctcctctgaccactcctgggtactggcagtttataagtgcaagtagcattttatcacctgtcacatcattgcggttcatttgggactgaagcgtaagtgaccgattctgagccttgagtagagatgtagtgggacctctgttgaactctccgccaggc

SEQ ID NO: 566498 - DNA, 230 bp, Homo sapiens
agggaaaatggcaaaaaccccttcccaaggttttgtattgaaaaacaattaggaatcattgcaaatttttttttattttggtccccccccccccccggggaaaattgggggggactttttttttttttttttttaaaaaggggaagattttaggttgtcctaaattttgctgtccccccttccaggaaagggacattgtaaatgaataaaacattttcaactccttttga

SEQ ID NO: 566499 - DNA, 1022 bp, Homo sapiens
  misc_feature (300)..(300): n is a, c, g, or t
ggcctacctgcggtggttgttgctacctgcggatgcctagtagactacggtagaactggccacttcccctctgaataggataattccgcatgatactattgaactcagcagcacatggaaatactatgttgctatctgtaaagaatgaaagaatgatataatgtgggatcaagttggtgtctattatatcacagacgctccttttgacactacgaaatcacaagtctaattttggacttactatgatcacgcttccacggcgcaatcggcgggtattgggtagttgctacctacacatgngtttacttgtacatccagattatcctctatgtgacgaaaaatgtgcacccagtactaggttgactcgaaccactactcggatgaagctcccttaacctactaacgaactgagagaggataggaccatctactgctccaattataaacagctcttacccgccagttatcgtgagatagtagtctaggcgcttataacattatgagcacatgtccagagttatatgttatcactctccctgcgatcttaaatcccatagtcagcaatcacgcatatacccagggacaagcgtattcgagattgcctatgcctgactgagatgttgcaaaactagtatagccagttaagcggaagtttttttatacggaccatccacgtgttttttgacaagaaatgttccggaatccgaaatctcctgacctgtactctgtttttacctcttgtttcttcctgttaaggggtgtcttcgttcaatatagacgttccctggcctattgattgaacttctttctggccattcttggtgaagggtccaggacacaatgttttcggtgcacccgaactgtgtcttacaactccgttttgaatgtaaaaacctcggagtgtatcccttataaacaacggttacagggagggacatacagataaaaggggcacaattctgatagaatggagcccactacaaaaaaagatgccacataaacgacacgcactacattacgca

SEQ ID NO: 566500 - DNA, 911 bp, Homo sapiens
  misc_feature (738)..(738): n is a, c, g, or t
  misc_feature (817)..(817): n is a, c, g, or t
  misc_feature (904)..(904): n is a, c, g, or t
aaaaaaaaaaaaaaaacaataatgagctctgaaattaaatcagtaataaataacctaccaactaaaaaagcacaggaccaaatgaattcacagccaaattctaccagatgtacaaagaagagctggtagcatccttactgaaactatcccaaaaagctgagaaggagggactcctccccaactcattctatgaggcaagcaacatatttataccaaaacctggcagagctcacaaaaaaagaaaacatcagactaatattcttgatgaacattgatgccaaatttctaaactaaatagtgagaaaccaaattcagcagcacataaaaaagctaatccaccgtgatcaaataggctttctccctgggatgcaagtttggttctacatatgcaaatcaataaatgtgattcatcatacaaacagaaataaagataaaaatcacctgattatctcaatagatgcaggaaagtcttttgataaaactcaacatcgcttcatgttaaaaatgctcaataaactaagtattgaagcaacgtacctcaaaataataagagccatctgtgaaaaatccagagccgatatcatactgaatgggcaaaagctggaagcatatcccttgaaaaccagcagatggcaaggatgccctctctcaacactcctatttagcatagtagtggaagtcctggacagagcaatcaggcaagagaaagaaataaagggcatccaaataggatgaganggagtcaaactatccctggttgcagacagcatgattttatatctaggaaaacccccatacacgtcccaaagcttcttgngctgataaaaaaaaacttttacgaagttcagaatccaaatcaccttaaaaaatctttacattctatttcccaacaccggtcaactgngagtcaa

SEQ ID NO: 566501 - DNA, 125 bp, Homo sapiens
aaaataaccgtggatgcctgcaccattcccgtaagcacacaggggttaaagctgtgtgtccctcccagtgggtgtggctgtgacagtgacagcgacacgcacagtaaagaggcgattgaatgcga

SEQ ID NO: 566502 - DNA, 308 bp, Homo sapiens
acctgatctaaatgttaaaggggtggttctctaccttttttttccacatcatgacatccatagaaatagtatttgtacagcacactgggataaattaaaggggatttggaggcagctaattacatggggcttggtgaaaaaaattgtttctttatattacttacttttaatgagaaaaataaacatattaaggatgacactaaatattgaatttgtatacatttccaaacaaagatgtctaaaaatttaatgaaaaacctgagattgcttctgtaaacataacattttttatacagggttttatgatt

SEQ ID NO: 566503 - DNA, 371 bp, Homo sapiens
  misc_feature (162)..(162): n is a, c, g, or t
tttgagacatagtctcactctatcacccaggctgaaatgcagtggcgtgatcaggctgaaatgcagtggcgtgatctcggctgactgcaacctccacctcccaggttcaagcaattctcgtgcctcagcctcccaagtagctgggattacaggcgccacagncatgcccagctaattttagtacttttggtagagatcgggtttcgccatgttggctaggctggtctccaactcctgggcgtcaagtgatccacctgcctctacctcccaaattgctgggattatagatgggagccccaagcctgggtcttatgtaccttttgacaagaaagtaattttaaaagcagtcggacacagtgggtaaatatttc

SEQ ID NO: 566504 - DNA, 214 bp, Homo sapiens
  misc_feature (39)..(39): n is a, c, g, or t
  misc_feature (57)..(57): n is a, c, g, or t
  misc_feature (64)..(64): n is a, c, g, or t
  misc_feature (72)..(73): n is a, c, g, or t
  misc_feature (75)..(76): n is a, c, g, or t
  misc_feature (160)..(160): n is a, c, g, or t
  misc_feature (198)..(198): n is a, c, g, or t
  misc_feature (208)..(208): n is a, c, g, or t
cttgaacttgccagatgcaaataccacagactccaaganaacccgagttggggtttnccttgtnttgatttnntnnttttaaagcgggtaaaagagaaaacactgaaaattgaattcttatcttccagagggtacaattattataatggacaatactttnacctttgcctctaaagatcagattagttttatttgttnacttacgggntttgat

SEQ ID NO: 566505 - DNA, 217 bp, Homo sapiens
cacgcgtccgccatggggctctccttccgctctcaagatccccccagcctgacgggccgtttaccatcccctctgccctgcagagtcagccgacaaggttggacctcagcttcggagccacctctggatgaacgccccagccctcgccccattaaagacccggaagcctgaaaaaaaaaacaacacaagggcggggtaaatttccctgaggggccaa

SEQ ID NO: 566506 - DNA, 576 bp, Homo sapiens
ctgctggttgactctatgagcatccccctttgtcttggaatggtgacggtttgctatcagacaactgctgcagtcgtcctagacactggttgagtgctcgcgtggtgccagtgctgcggtggttcgtggagccggatatattcacaggatctgtgtcatgttctgaccgagtatccagcagttttgctgaggcttgcgcctgtgttgttctggagctggagggatagtttgcatcagttggtggtgtgccatagcctgttacactcacagctgccatagctgctgatgttctggcccctgctaggttcacagctggggctgtgtgagtgcgagggtcggacaggttcacaggcgaaggtgccagcgctgtcctgggtctggccaagtgcatggccgttgctgcaggtggcgttcgagagtcacccatgttcactgctgttggaatggcaggtgtcctggcgctgtctacgttcatggctgccgcagaggcttgtggaatcctggtgtctaggttggctgctgttgcggttctgaaactcatgagaggcaccggtgcttgaacctggtacattcttg

SEQ ID NO: 566507 - DNA, 396 bp, Homo sapiens
ccggttagttccaaccctgcccaggaaaaagggcccgtgggggtttgcctgggcccgtcccacaaagggtgttaagtgttttggaatcagcagcccttcccattccaatcccaggcaggttgggtggaccatcaggttttttagccactttggattcgttgggttcaaaagaatattttgcctccacatatgtacccattctcctttttttaaagatggatttaaaccaagatgcctccaggaaagaggacgaaatgagtatattcacagaggaatccaaaaaatacagtttgggggaaaatgcaataatttttgatgagatgggtgaaggacaagaagtgagttgtgtcaattattgtagatacaattttctgattaaatctggaaaaataaaaa

SEQ ID NO: 566508 - DNA, 502 bp, Homo sapiens
cacgaggacaccgccacaccgagttcatcaaattcctcaacacaatcgaccgcgaagttccccaggggttacaggtccacctgatcttggacaattacgcaacccacaagcacgtcgaggtcacgaactggatgaagcggcacaagcggtttcatttccatttcaccccgacctcatcgtcatggctcaaccaggtcgaacggtggttccgcgacctgaccgacaagaacctacgccgcggtatcttcggcagtgtgcccgagttgatcgccagcatcgagtcatacctcaacgcccacaacgccgatcccaagccctacgtgtggacggccaccgccgaatccatcctcgccaaagttcgccgcgcacgcaccaaactccaacaagtagtcaaccaaaactgagacacaccactagcgctaagggaacgagcggactgccagcgctcgcgtcagacgggcggccctcggttggtgccgggcttcaggatcaacagatcgtc

SEQ ID NO: 566509 - DNA, 444 bp, Homo sapiens
  misc_feature (444)..(444): n is a, c, g, or t
agtgattataaatttgattttcatgaagtcaatgcaggtataaggacaagaccaaataacatcaagatttaactagataacaagccacaaacaattgttaaaggccaactcttgacttaattttatatcctatattattgtgtccagttttcttttgtgtgcaataaaatgcaaatttctctcagcacatttatccaacatgactttataatactgaaatatggggataaaaggatctttcttttttatgcacagacactttgcttttcaagttttgaagatactagtgttgctttccctttcattgaaatggaataggacatttgcaagtcaaaaatgatcacctgggagatgttggtcggtacgtttcagttaggaagaatatgttttcaagatttattgcacagcatggtgaccatagttgataattctattgcacatttn

SEQ ID NO: 566510 - DNA, 212 bp, Homo sapiens
aatctgagggtagcgggctgccacctaccttgcagcactggaggacaagcccatcgcccagtttcatgatgtcggccttgtgcacggccgtcactttcttgcgcacgttctcctgcgccagtttgaaggcatactcggcaatgcgcagggacttggccttggggctgatcttcaggctctccaacataccggcaaagtctcatgctcaaggc

SEQ ID NO: 566511 - DNA, 105 bp, Homo sapiens
ggccagcatcgaggacactgatagttgggaagagaagatgggttattttgccatatcatttagctggaagtgacactttcagagcaccctgcatcactagtttat

SEQ ID NO: 566512 - DNA, 154 bp, Homo sapiens
  misc_feature (7)..(7): n is a, c, g, or t
  misc_feature (41)..(41): n is a, c, g, or t
  misc_feature (62)..(62): n is a, c, g, or t
  misc_feature (82)..(82): n is a, c, g, or t
  misc_feature (128)..(128): n is a, c, g, or t
tgttcanctcatcacttgcacttttgttttaatgtatggantcagattagactgagaaaaanggatggtattttcttaaaantgtgccaccttagagccccccccctttttttttcttccttcactgncttaataaaatatgtgaaaaagtgga

SEQ ID NO: 566513 - DNA, 428 bp, Homo sapiens
gtgatactctgttacccgggcgacggaagttgcagtgaggcgagattgcaccattgcactccagcctgggcaataagagtgaaactctgtctcaaaaaaagaaaaaatgatataaagtatttatttgtgtttatattttatggatacgtgtctatgtttatagattgcctgtatggtaccaacttgacataaataaattagtactcataaattaagtaaataagcccaaacgcttttcaagttcacagggcattagtaatctgtggtaaatgaagatagtttaaaatttggggtaaaataaaatagaaacattttctgaatttaatttagatatttttctgggtctatttgttagacaggtttacactatctctgctatttttttaaggacctaaaactgattggacatagaaattgaggaaagaata

SEQ ID NO: 566514 - DNA, 178 bp, Homo sapiens
gctgacactccaggtggtagaagacggctacgagttctttgccatgttgcagctggtgacacttttctcagctcccaactgctgtggtgagtttgacaatgctggcgccctgatgagtgtggacgagaccctcatgtgctctttccagatcctcaagcccgccgacaagaacaagggg

SEQ ID NO: 566515 - DNA, 581 bp, Homo sapiens
ttcggcacgaggagagagagagagagagagagagagagagagagagagagagagagagagagagagagagagagagagagagagagagagagagagagagagagagagagagagagagagagagagagagagagagagagaagagtggaccgatgtgttgaaacagatatcgtaacgatgaaagggaaacgaacgaacagaagagagagagtacgggcgcagaacttacacacagtgatgcaagaattagccaacaaaaatagcgctccgttcgggaatggacaaaagatttaaacacaaggagggtaagagccaaggaactagggagtaatgagagtgaggcgggaaaggtggacataggccgagtaggaaacatgactagggaaggaagaaccctatgtaggaagcgggaattttggaaaacgagaattccaaaagtgggctatacaaagaaggctctgtagggagacacagggaagctgaaccatgctgggccactgctgaggggcagtgacatagaagggggttgggacgtatgcgaaggcagctggtaccactctctgggacaggggatcggacgc

SEQ ID NO: 566516 - DNA, 233 bp, Homo sapiens
atgaccatgacaactaattatttggacgtgcttacacaaggataatgagctgttacacgagcctccagaggggccatgggtgagacacacctgctgcaccgtctgctgctgctgctgctcacgctctgtggtcaagacactggtgcctggaccacatcatacgtgccctgtgcacagggccctgagctctggtgccaaagcctggagcaagcgttgcagtgcagagctctagg

SEQ ID NO: 566517 - DNA, 170 bp, Homo sapiens
gggggggggggggtttttttttttaaaaaaaaaaaacccctttttgggggggggaaacccccccccccccccccaaaagggggaaaaaatttgggttttttttgcccaaccccctttcccaggggaaggggggattttttttttcccccccaaaaaccccctggggttta

SEQ ID NO: 566518 - DNA, 175 bp, Homo sapiens
cacggcttcaaggaaaaggggaatgatgaatccgaaagaaattaggattccgatctgtgcaccatcaagcatcatctaaataggagtgtcttgagtaaagatgggggtatcaccatgaggcctgggctggtctcaaagtcctggattgtacgcaatctgcctgacttagcctctt

SEQ ID NO: 566519 - DNA, 362 bp, Homo sapiens
  misc_feature (362)..(362): n is a, c, g, or t
ggaagctggagttcaggacaaggaaagtgaaatgtgaaggagggatagataatttaaggatctgatagcgcctaggcagcaggtgttcaattccactagaacctttttaggaacctatggaatggaatgctctcagaactgtgtgcttaagtaccatatgcataactgcagaataacgttcaagagatatactaatgcaggatgtgtattgagcattagcaatgaggcagtgtatgtctgcactgatgcaccagcatgaagacactgtgagcctgcttgagactagtacatgcggcagtgtaggtagtgagcactgctatctcatgggatggaagaaggtttgtagagacatacaacgtgtn

SEQ ID NO: 566520 - DNA, 1694 bp, Homo sapiens
tggatgtaaatcttttttttatttattatatctatttttcactattatttgtgggaacctccactataattttggcataatatacacttcttacacaaaacattctatgcgcaaaaatgtcacaaaaatatggtctgggtaaacaccaacacaagtctggttattcttacacaaaaagagattttataaaacaacctatggcaattctcttaacagggcacgctatactctctctgtaaacacaggagacaaggtggaattctcttatttttatccacagagaatatctcttcctggctggccaacaaatatggcgctcaaagaagagcctggtggatctatctctatccccatttataagcgccctcttgtgtgagctcctatatccctcgtgggtctcgtagagtatatatatcgcggtatctctcatcttttatcacatcttattatgtgtgagaagactatctctcttgagcgccctgagtatcgcgaaatatatatctctctctcgtgagtatattatagagcaaccctctctaatacgcgtcgagtcgcgagaaaacgccggggaccatattatctctcatatatcacatcatgtgtgaaggagtaccatctattatagtgagtaaatttctcatctaaactctaatatactacaaacacagctcctttatggtgagaagagataatattgggtgacatcatctctctatgtcctctacacggtggttgcctcctcgagacgagtcgtatatctcccctcttatttctctcttttaccgcgagatttccccagcgagtctctctcttatttcgtcgcgtggcgcctctctcctcttatactcatcctctctgctatctactaatggtggttccccccaggtgaggcgcctcctcttagtaattttcgccgcgcagatgctcttcgtcttataccctcttctctacacactactataacttattatctattaccctattcacaagtagttggcctaatcaaccaggtcgaccctactacagccacataaaactctcttacttgttggcaccgtggtccgttgctcttactgccccacccacaacgtttttgatataaccactgatgggcgacaagcctctctggctcactaacttgtgggtacaccaccataatacacactgtaggcaccagaacacagttggtccacaccgcaacaatgatattccccacaatcatgcggcttgttggacacacactctaataaccattctctccccactacagtggtgcagtactcacacaaacccactcgtgggaccaaattaagaaaaaaaccagtggtgcgccttaccatccactacacaaacaagcttcctgagctcaaacacaccctgcccggtcacaccaaaggcttgctaactactcagcaaccacacttctcaactaaacacccactttagacctccagcgcatgcacagctacacaaattgtctcctctagaagcgcctcagacgaccagccttcattaagctaatcaaagaacacctcaacaaaaaattacaagaggcgaaaattgcggccccttatgaagctactctccacgaagacagcatcacactcgtccacacaacacaagtgtgcggcaccctaccaccgtgcgaaccccccccttagcagcagggtagtaaaccaaaaacacttatcaag

SEQ ID NO: 566521 - DNA, 975 bp, Homo sapiens
acttaacgcacagctggtaactccgcgacatgcacaggggtcaccccgggtcccagggagcacccacgtttgcgccctcatcttggccacaacctcctttttcggcatcaaggcccgtgtggtcccccccccacagtggtccccccgggggacagcttcctccccggggggccacctggtgaagcgccgccctctgtgtgtggggcgcctcccggagccgaccacaagggcgcaacgtggtgtttcctagcccgcaaggaggaccccttccttttttctctgtgcgccgaacatatggttgttgttgccccccaacagccgggcgtctggttttcggaggccgcaacacccctgctgccccccgccgggggctggaccgcctccacgccccgcagtgctgctcccccttttgggtgtggccgacaacccgcctggccgagcttctctccctcgccgccccccctcttttctttgttccccagcagcgggggggcaccccgcagacgggggagaggatgctagatggagggctccggtccccctcctcgggtgctgcgtcactcggcaggggtggccgacagacacacgaagggaggctctccctgcgtggagggaggtgtcccccactgggcgataatacgagaagaagatatgcactgtggtaaaaaatatatacccgcgtgggagacccctttcttccacctggtcccccccagaggcgcagagagagaatttttcgtgggcccggcgccccccgccgacggcaatgggtggccaacccaacgatatacaagcatgcaaccaccaagcaggccttttcgtgtgcacgaggacgcaccccccaccacgctccccccccgggggcccgcgcaaatttctccccgggagagcagcgcggggggcccaaaggtttttccccccccccccgggccggcgtggaaaaaaaaaggtttcccccccccggggggggtgtga

SEQ ID NO: 566522 - DNA, 160 bp, Homo sapiens
ggggtatgggacacatgggggtcattgtactctctacatttagtacatttggaaatttgcaaaattgagtttaaaaagactttaaacctaataaatactgaactaaaaagaaaaggttgataataaatgtagggtttccagtttttgcaagggtagaaag

SEQ ID NO: 566523 - DNA, 249 bp, Homo sapiens
ggtgacagggaaagactctgtctcaaaaaaaaaaaaaaaaaaaggtagggttaaatggactccggaattgtgggcggctttttgaacccagaaaggttaagggttaaaaaaaattttgcggcattaggataaggcctttaagcccttgttaaggtggggcggtttttcttggtggaaaggatgaaattttcccagcacttggtttagggaaaacccccagggccccttgtgataagcccccaaggcttc

SEQ ID NO: 566524 - DNA, 771 bp, Homo sapiens
taactgattaaataagatagatgaataatcaaaacatctggtgaggcatattccaaggaattctatttaaaaaaaacattttttgagagagaagttcgctctctgtggcccaggctcgagtaccgtgggatgatccatagcccatgggagtcggtcgatctctggggccttcaagctgaccctcctatggagtcgctgggccttaagaggagtgtagcacagaacacgaaaattttattataaagtggagggtagagaaattgggtcaagtaaagtggagggggaagtgagttaagaggaattttgaacttgatgtgtgtgatgggtttcaaaaggaggggggtcttgcgtctgtagcccaggcatgctggaagtagccagaaggctgcattcatgaatcacttacagccttggatctccctggagctcgaagtctatcctcaccagctcctgcactcccaaagtactgggattactagtgtgagcccactgactaatgatatggagcaacaatgtttcagcatgtcctgtggggttgagtacggacaaggatgaagagatgggcgaagggttgaggtctggacatagaatgatcaatgggctaggaggcaatgtacctaaggagtaggtaagaagggagtggttgggggctgtggtcggcaaaccgttagcgggacgttgggtgacaggatattatagtaaaacaacatctatgatacgtgaatgggccgatagggatggcaagggatttagacaggttgcctggatcgg

SEQ ID NO: 566525 - DNA, 222 bp, Homo sapiens
aatacggttttttcaaatttgagccatgatcaccttttcctattaagagcactggcatcgctctgttggtcacaatgacctctccaacttttcctatctcgtgacggagaacccctctcgcgattcagggtcaatccctcttctccaaacactgcaccaccagtagcaatagccatatctttaagctggttctttctattgtcaccaaaccctggagccttg

SEQ ID NO: 566526 - DNA, 706 bp, Homo sapiens
actcacaaacttcccgaaagtgggaaattctttccaaggggcctctttccaaaaagagcacaaaaaacagggggacaatcgagagcacccccagagagcaatagcagagaatgccacgaacggttaatcacctcagattacaaccttggggaaccacggaagaccaggtgaacacaactacgatgaacctaacgagacacacacacgaactcggactgggtctttgtgtaaccctgaattcttggaacatattgcattcattgactgttgggcacgttgtttgaaaacctagcacagaagctatgaaaaaaccttgacaacgactggtccgtctgctttaccggaaggccgctgaaacaggactaacgggatggtcgattttatttaaacgcgatccgccacaagtttcctgggttcacttgggtcgtgggttcaacggcttcattttccaaattcctggtggccacttcaaaaaatttcccacggaatagtgaacagacaattaaccattacggacagcctttttgtgtcccctttataattcaaggttccccctttgcgggcaacaagggcacggggttcccgtggaaagcgaactctcttggctttcattaaacaaactgtgttcgggcaagtccaaacggacgctttccacaaaccaaaggcaaacacacgttccaccaccattatttaaacggaacgggac

SEQ ID NO: 566527 - DNA, 122 bp, Homo sapiens
  misc_feature (29)..(29): n is a, c, g, or t
  misc_feature (85)..(86): n is a, c, g, or t
  misc_feature (89)..(89): n is a, c, g, or t
acaaaccattcttatttctaacttcaggngttgatgtttttcccagtccatcttaaaatattactgctttaatcacaggtccgannacnaggccaacatgcacaacctccacctagaatcct

SEQ ID NO: 566528 - DNA, 1250 bp, Homo sapiens
  misc_feature (1007)..(1007): n is a, c, g, or t
  misc_feature (1116)..(1116): n is a, c, g, or t
  misc_feature (1123)..(1123): n is a, c, g, or t
tccctcccatcccccaccttcgctggaacagcttcctctcactgaacggagacgcccccttggacgaactgcctaatcgtttggttctgaggcctggtttgctcttaattaatatatgaactcctcagaccttaaaccttttcctaagctttctttactgcactggagttctgactccctttgagttgtgtgttactgggggtggggtggggtcatgggttttgttgtttttgggggctaattggtgcatattcaggtaccacctttgacgtgtggctctttctcctgaccatcatgggaagtgtctgctggattccattttctaagagtttctgagggtgaggctcttatttttttttttaagggatcctgtctatttcctgcacttcgagaagaatcaaaatgttcctgaatttcaaatacctcatgcaaaatgtctcctgaaataagggaaaaaaaaaaaaccacaactttgaaaatcttaatgttgaagttagcaatgccgaaaggtttctgtcttaaaaaaaaaaatccttgtacttatcaattttgccccttaggcagtcagttttgttgagaactgtgtcctgcatcctggcgcagaacctacctgatgcggttcctctccacgcatctcgaggcggcgttacctccagattccgtagagttagagtcacatttttctttgcagcgaaactccatcttggtgagagatgaatttggatatttatttccttctctgtttttgggaaacgagaggctacaaccaagacagctgaaggagaatgaaacacacacatccacagaaacagagaggcgtaggtggccctgccgttgaccgcagcctctctggacaggcaaggggagttggcgcaggtgaggactcagacgacgtccaccgtcccaaggctgtcactagtatttctctgaagtgcctgaaggtaggaatgggccggcgattgggaccagctgggccccaccacggccacgccaggcaaagcgccagnagccctgcactccacgctggccaagaaggcttccacgcagaatgacaagactgcaaaaatccgatgtgcttccttccctggcgcagtcgctccttcgagccgctgcccncaaaaangctgaagccaatgccctgcccccacaaaagacgctggaacttgtatcttagacccaggggcagtgggatccctagaaatggctaccgtgacataagtgttcgggggctaaatggtttcagggaaacc

SEQ ID NO: 566529 - DNA, 111 bp, Homo sapiens
aggggttcccaacaacagctgatacggccaacgttcaggatccaacggtaacatcaacgtgcgggacgtggacatctgagtctacgactgttgtgcgtctacgaatggttg

SEQ ID NO: 566530 - DNA, 673 bp, Homo sapiens
  misc_feature (415)..(415): n is a, c, g, or t
  misc_feature (419)..(419): n is a, c, g, or t
ggggagaaagaacagaggttgtttgataagcaaagcataactgtatgccctgcgatgcaccgagaacaaactgccttttggctccaacagtttcatacagaaccaaggtctcagggcggtaccggaagcccaaacaaacgaaggaaatccttgggctggaacccggggggggttaacagggccaaccagagaaaaagtggttagtctctgtggaatccctgatctgtgcttcgtggttgccaccttgtccccaaggccacctttaaacttcactccttggactcatcctccagaaagtgtcccaaagacctgcagtggggagagctagaaccaggagagctgggctggctctggttgaaacctcgggaaatcacttaatttctgtgagcgtgtattctccgtcaaaaaaaaaatntttnaaaaaaaaaaaatgtgtggcccgttggcccaatcaactatagactagaaaagttaatccatgcgcccgaatttagagctcattggcaaaattcccctatatgggagtcgtatcacatccaggggcccgttttacaaagttttgacttgggaaaaccctggggttaccaacttaaaggccttgaggaacataccctttttccaattgggtaataacaaaagggccccaaccgatggcttttcaagttggcctggg

SEQ ID NO: 566531 - DNA, 114 bp, Homo sapiens
tccagctggagtgcgctgcagtgctgctgcaggaacttagtatgtcgcaggccaggcagtgagcagactcgatcttcttgaagaagagctcctgtgccagtcccttatgaaagg

SEQ ID NO: 566532 - DNA, 558 bp, Homo sapiens
gactaaaaataaaaaaaattggccaggcatggtggtttatgcctgtggtcccagctacatgagaggctgaggcgagaggatggcttgcacctgggaggtgaaggtcaaggctgtagtgagccatgatcatgtcactgcactccagcctgggcggcagagcaaaaaaaaaaaaaaaaaaaaaaaaaaaaacctgtgtgcgcggcgcgcgcgcccgcggcgcccccgaaaagagttttctaaacaacacaactccggtgtgggcgcgcgcgcgcgggcgcccagaggagggaaaagggagacaatgggggccaaaacggtgtggtcccatgaggaaaaccggggggccagagagaaaagagcgggaggggcatctctccacaccaatataaacaaacagcccggggggggacaaacccagagagcgggttcctagagaaaaacatccccaaagggagaggtccagagagggccataacggggggggctcatacaacaggggggagcgtcaaaggcgaaccccaaaaaactaaaattaacgcccccgccccgggggggagc

SEQ ID NO: 566533 - DNA, 441 bp, Homo sapiens
gatacacagagaattttgttttaaagaaaaaaattacagtcagcaacttaatgtaatagaagggctagggagtgtcacttagagataatatacatattccgtatttgtgacgccctgggttcatgcctaggacacaaagacaattggctgtctccatgggtatgaatcccctcctggtttagaatcagcagaggccaaaggctttatattccacctgcctgagataagcagctccttcctacaattaggaacccagatgccaccttctgaaagagtctttatttgtacatcgctgaattgcaaaccatcagtaactttttaatatggacaatcaaatttttacccacagaatgtctacaagaattatatttttaaaaaatacaaccagtttttatattttaaaaatatctgaactcaaataaattaatatcttaaaaagta

SEQ ID NO: 566534 - DNA, 541 bp, Homo sapiens
  misc_feature (460)..(460): n is a, c, g, or t
  misc_feature (469)..(469): n is a, c, g, or t
aaagagacacagagagaaagacagagacgaacagagagaaacagacagagagaaggccctagccagtagcaatacagtgccttttctttcattttctctttcttttcttttctttttttctttcttgtatatctgtatgcatggatgtatgtatgtatgtatgtatgtatgtatgtatgtatgtatgtgtgtatttatttatgtaccgtatttatctggagaccgggtctcactctgtcgcccaggctgtagtgcagtggtgcgatcttgggtcactgcagcctccgcctgccaggttcaagcaattcttccaccccagcctcccgagtagctggggttacaggtgcctgccccacggcgcctgactccatttcgtattttcagtagagacgggggtttcacacgttggccgggctggtctcgaactcctgacctcgggatgacagacgtgagccactgngttcagtgnacagtgccattcctagaatcactcctcacgggaacacacacttagaggtgacgtgtagagatttatttattt

SEQ ID NO: 566535 - DNA, 731 bp, Homo sapiens
  misc_feature (6)..(6): n is a, c, g, or t
  misc_feature (62)..(63): n is a, c, g, or t
  misc_feature (67)..(67): n is a, c, g, or t
  misc_feature (83)..(83): n is a, c, g, or t
  misc_feature (89)..(89): n is a, c, g, or t
  misc_feature (92)..(92): n is a, c, g, or t
  misc_feature (100)..(100): n is a, c, g, or t
  misc_feature (126)..(126): n is a, c, g, or t
  misc_feature (133)..(133): n is a, c, g, or t
  misc_feature (144)..(144): n is a, c, g, or t
  misc_feature (156)..(156): n is a, c, g, or t
  misc_feature (173)..(173): n is a, c, g, or t
  misc_feature (189)..(189): n is a, c, g, or t
  misc_feature (193)..(193): n is a, c, g, or t
  misc_feature (195)..(195): n is a, c, g, or t
  misc_feature (203)..(204): n is a, c, g, or t
  misc_feature (211)..(211): n is a, c, g, or t
  misc_feature (258)..(258): n is a, c, g, or t
  misc_feature (260)..(260): n is a, c, g, or t
  misc_feature (269)..(269): n is a, c, g, or t
  misc_feature (299)..(299): n is a, c, g, or t
  misc_feature (317)..(317): n is a, c, g, or t
  misc_feature (338)..(338): n is a, c, g, or t
  misc_feature (347)..(347): n is a, c, g, or t
  misc_feature (349)..(350): n is a, c, g, or t
  misc_feature (354)..(354): n is a, c, g, or t
  misc_feature (356)..(357): n is a, c, g, or t
  misc_feature (359)..(361): n is a, c, g, or t
  misc_feature (373)..(374): n is a, c, g, or t
  misc_feature (377)..(377): n is a, c, g, or t
  misc_feature (418)..(418): n is a, c, g, or t
  misc_feature (455)..(455): n is a, c, g, or t
  misc_feature (489)..(489): n is a, c, g, or t
  misc_feature (494)..(494): n is a, c, g, or t
  misc_feature (521)..(521): n is a, c, g, or t
  misc_feature (526)..(526): n is a, c, g, or t
  misc_feature (547)..(547): n is a, c, g, or t
  misc_feature (591)..(591): n is a, c, g, or t
  misc_feature (593)..(593): n is a, c, g, or t
  misc_feature (598)..(598): n is a, c, g, or t
  misc_feature (604)..(604): n is a, c, g, or t
  misc_feature (606)..(608): n is a, c, g, or t
  misc_feature (610)..(611): n is a, c, g, or t
  misc_feature (618)..(618): n is a, c, g, or t
  misc_feature (644)..(644): n is a, c, g, or t
  misc_feature (656)..(656): n is a, c, g, or t
  misc_feature (722)..(722): n is a, c, g, or t
taaaanagtaagaaaaaaaaatcatatttaagtccccgttaacactaagccatattaatcannatgngaaacaaaaaactcanccaganaancaaatctnagtcactaccttagtataaatattcnctaaganaatagtcaagnaacagaaatccnttgtgagacaccatctngagagaacagctgcantgcnanatataatnnattaacntagtagtttagtttctcaatatttagcaagtataaaaattaccattncnattggtttntagtgccattaatataaatccataatttcnaagtcatcattcctttcnctgtgaactaagacttcttanaagttagtngnngggngnngnnntgtaatgactgnngcngatgggcagtgttcaaagccaaaaagactggcaagcttggnaaggcatacactatacatacacacactctcagtatantactgttccccttatttttgctgtccattcttgnctganaagatggtataaattattcccttaganttgtnaatacaattaagatgaatacnttttcatcttcaaaattatccttctaaatagaaaagttcctcangnttgtnaaatcngnnnannagtgggntttaaatactttcttcacaacatgtncaatgttttcanccttactgcctcattacaatcagtttggcaataagacctccagtgctttatcaaaaatggcattcnatagattat

SEQ ID NO: 566536 - DNA, 427 bp, Homo sapiens
  misc_feature (31)..(31): n is a, c, g, or t
  misc_feature (39)..(39): n is a, c, g, or t
  misc_feature (42)..(42): n is a, c, g, or t
gtggcagagacacaaattaaacggaaccgcngctgtcanccngggcaatttccctaaagaggtgcctatctgtcctaaacagcaagaaacatttattgtaactcatggctatggtgccttcccagattttcgggaagtaaaaggcccatgattggtgtcccccaaggcacagaaatccttatttcggaggaaaagctacacacccagccagggtggctgagaaccctgccctgaagaacaaatccaactttccctcagccacacctcaaagaatatgaacataaacagagcctcactccctacatcccccagcgaaggccacagctcaaacctgcacagtcctgaggccctgcatgttctgcctgaccctgtgtttatgtattggccacgtgcagaaatcctgcaatcaatgagagatacatttgag

SEQ ID NO: 566537 - DNA, 1034 bp, Homo sapiens
atgacccaccaatcacatgcctatcatatagtaaaacccagtggacatgatccccctaatcaggggcccgtctcagacctcctaatgatgctccgggctagaccagtgtgatttcgagttctcactccataacgctcctcatactagtgcctactaatgcaacacactaactcatataccagtgatggcgcgagtgtacacatcgagagaagcacatactcgaaggtccaccagaacaccaccttgtgcaaaaaggccttcgtatacgggataagtcctattttattacctcagaaatttgtttgtcttcgcaggatgtcatctgagcctgtattacgcaacgtgccagacgcatagacaccccgtaatcgcactgcaaattgcagcgaccggggggagcttgggctcctccgcaaagtaaggactatgcaattctgcgactgtagaatacgacgcgtaccaaaggttcccaagactttcgcttgacaacagcagtccgcgatagtaaaactaccggcagtgcaacagcagataattcggaactcccacgccgttcgaagtccttgcgactgcaatatagacttcggtaatcgttacgcaagaaaaaacccaagtcctgggacataaagcccacacaggtaaaactctcccaaaatcgcaacgatgggcgtttgaatattagcaaataatgtgcaaaacccagggaggttcggtccttattaatgtaatgacacccggtgcccataggaaatgttccccttggaataaggctaaaacctagacagaatggctgcattcaccccttggcatacaccaactatgcgcggaaatcggggcgagaatacttgagccgagggttgcaattacacgtgtcttaacactgaattagcaccccatgcgagggggcgtatcccaaccgcggaaaccttttacaccggtatgcagcttaaacttcgggtccctccacggagttttggacgcggttcgaagcgtaaatcctgggcgttttcacgtaccacgttgcaaaacgcaac

SEQ ID NO: 566538 - DNA, 180 bp, Homo sapiens
tgacaagggtccgccatgaaaagtacatcaggttaaaagggtcgccccgaaacacacacgcaggtaaaatggtcccccgacacacacgcaggataaaaggctcccccgaaacacacgcaggtaaaaaggctcccccgaaacacacgcaggtgacaaggttcccccatgaaacaacacgca

SEQ ID NO: 566539 - DNA, 492 bp, Homo sapiens
cctaccggatgagtgcgacacctgcacttcactggctcttcctagggttttatcccctgtcgacttgagggcatttaacgcgcttttgtcatcttggaggaccttggcatccaacattattgagggggacggaagtctctccattggtagctatttctgaatttaggattattccatgtttctcgagcatttcctctctttgcttcagggcctccttgacttcagcaaactgaaattgcagtatactgtgggcgagcttttccctttcaaattctttgtttttctcttcgtactgccgcctagattcagccagctgttcttcaagctccagcagcatatcttctagggtatcaacctggtacatgaagtttgtcttttcattgtctagctgagcattggaaaccatagccttcttatatttctcttcaacttctgctagagagtccttgacttccctgatggatgccctcgtgtcgatggagatggaggcgt

SEQ ID NO: 566540 - DNA, 205 bp, Homo sapiens
cttatgacaggtgcaatgaagcacagtggctcaggcctcttatcccagcactttggcacggcaaggcaggaggcctgtttgaggccaggagttcgagactagcctagcctgggaaacatagtgagaccccatctgtacaacagaatttttttttactagccaggcatggtggtgtatgcctgtaatcccataacaccacacaatt

SEQ ID NO: 566541 - DNA, 411 bp, Homo sapiens
  misc_feature (64)..(64): n is a, c, g, or t
  misc_feature (79)..(79): n is a, c, g, or t
  misc_feature (122)..(122): n is a, c, g, or t
  misc_feature (159)..(159): n is a, c, g, or t
  misc_feature (173)..(173): n is a, c, g, or t
  misc_feature (214)..(214): n is a, c, g, or t
  misc_feature (218)..(218): n is a, c, g, or t
  misc_feature (257)..(257): n is a, c, g, or t
  misc_feature (308)..(308): n is a, c, g, or t
  misc_feature (312)..(312): n is a, c, g, or t
  misc_feature (389)..(389): n is a, c, g, or t
  misc_feature (395)..(395): n is a, c, g, or t
catttctaaatagacaaaaactaccctaaaatgtggagatttactccttttgaaaagctgtttnaaaaagtgtggcctnagctctggaggccacccccaggaaggagtttgaggttcattgncattatggccacagtttggtgcttgtgcacgggactnaaagggcagcgtcnaagctggggttaggtgtagggttgtgagcaaagctccctgnttgnggcccacctttcctttcaaaaaggctattaaatctactnacccactaattggggggaatgtaaaatttggccacagactttgcacccaanttangggctggggtcaatgcaccggactggatggtcaattaggacacccattcggaatgggccaagccttgcaatggtggnccgggngactgggctcccgagg

SEQ ID NO: 566542 - DNA, 352 bp, Homo sapiens
tcagtatgacatgaggtatgatacatttgtgttttctatttttcttgcgatggatcgctgttgtgcccagggtggagtgcaatggcgcaatcttggctcactgcaacctccgcctcccgggtcaagcaactctcctgggttcagcctcccaagtagctgggactacaggtgcgtgccaccgtgcccagctaatttttgtattttttgtagagacggggtttcacaatgattggccaggatgatctcgatctcttgacctcgtgatccgcctgcttcggcctcccaaagtgctgggattacaggtgtgagccactggtgcctggccttgaacactattctcatgtcaaacatt

SEQ ID NO: 566543 - DNA, 342 bp, Homo sapiens
  misc_feature (1)..(1): n is a, c, g, or t
  misc_feature (103)..(103): n is a, c, g, or t
  misc_feature (114)..(114): n is a, c, g, or t
ngactgtgcttgtcatttctttttcttctttacaggtttatactctaatcccttctactttcatatcatattggcatatgaagcctgtgttgctagtatcatnatatttttctngagctatttccttaggttctgttattttccctgtttatttgcctttatctgccttcagtacaacttctttgatttcttcttctatttgaggggtttggtctcccattccttatttaggagcagtgtattaaggcttgccgctagatgttgttagtttcaggtaccactacacactccaatctctttttacttcacttgtaggtactttgtcaatatacattgtccagt

SEQ ID NO: 566544 - DNA, 413 bp, Homo sapiens
  misc_feature (147)..(147): n is a, c, g, or t
  misc_feature (183)..(183): n is a, c, g, or t
  misc_feature (190)..(190): n is a, c, g, or t
  misc_feature (338)..(338): n is a, c, g, or t
  misc_feature (345)..(345): n is a, c, g, or t
accagctccccactgccctgagcggcgccggcctgctcggacgggaaaaaggaagaggagaaggaaattgtcccgaatccctgcagtctttctgtaggttgcagctcaacgccaggcaaaagaagaggaaggaatttaatccaagcnaggctaggtcgatttgagggtctgctgtagcaggtnggctccncttgaagcgagggaggaagtttcctccgatcagtagagattggaaagattgttgggagtggcacaccactaagggaaaagaagaaggggcgaactgcttgtcttgaaggaggtcaacccccaagaatcaagctcttgtggccttgaangttgctnaaagacggattcaccccttccacaaggctttgaagcccaagtccccaaaagcctttccttcccccaag

SEQ ID NO: 566545 - DNA, 235 bp, Homo sapiens
  misc_feature (176)..(176): n is a, c, g, or t
tcactcatcactgggaactggtcaggagcagttggtcagtacctggcctgctggccactatgtgacctcaggcaggggggtgtctgtggagcctccttgcctccatctgcagggaaagtgagttggggcaccctgtgagggtgcgctggaaagacgaaggtgagaacgcatgtgtngaatccagatacgtgcttggcaggacctacaagctttacaaagtgaccgtgtgttccac

SEQ ID NO: 566546 - DNA, 650 bp, Homo sapiens
ggaagcgtgtggtatcagatggagtaatggtcacaaggtccagtatccactcccaaagttcagacttgccaggctctctttctcttcttccccaggtccttccttctaggtctggtagtctgcaccatctgcttggttcggctcggctacgttagagagcccttgtgtgggagagcgaagggggtcaagaggaagacttgaagcacagagggctaaggaggtggggtcaacatttctctgagccagtctagggctgggacatgacaaattgaattgcaacgagtggactagacatgtgcgctaataggagaagaacccacagtgctaggggatagaggggctttcctaggggtcctgttaccctaaccccattttgtggtctacagccatgaagctcacccggcgtatgaacctatccttcccaagttgcgttctcatccctgtagctctgtctccctctccatatctccttgccctaaaactcccttcctccagacctccttactacccctgggcatcttctggccttgacttggatcgcgaaggagaacttaggaatgctacacacgcttggcatgtatgtcttgtgcttctttatctctgatttttaacacaaacagatactataatcaaatatccactacaaaagg

SEQ ID NO: 566547 - DNA, 954 bp, Homo sapiens
  misc_feature (719)..(719): n is a, c, g, or t
ggccggcaaatcgcgctgtgcgacaccaggctacgcctctgatgaggcgaatccgatgggtatcacacccattgaatacaccgccaccgatgacgggtgcggctaagagctctgatgatgctgcaccattattgacttacacccatgaggctgcgtcctgccgatggtacggcacgtagtgttctattgagacgccctcgttcaatggactttgttgactaatgcgactagtgcatagttttagatccttcatgctgcagcgtgtgtagtgagtttcacgacatggatcaagctctacagagcaacgtgcccaacctatatgcaatgaccagtggtacatgaagaacgctgacgatgcctcgcgtgctgcgctgcgtgccttgctagggggagaactcgtgagtctccacatagactatgccacgaagtgcaacgcgtcgcttcacctaagaagcaatactcggtactatgctccgacgttcacacattgcttcggatgcttgccggagcgtgcgacccgcatgccgatctggctagggtcctagactagtacacgagtgtgaattctaccaagactagaggagtttccccaagttgcacctcaaggcttttcgttgacaaggacttttgcttgggaccagtcccagtaggaggttaggctgggcctatcccgcaaccaaggtagattgatcccccacgagagggcaagagcgctacantgttgcttgcctgcatgcagagctgcttgtccgacaagccattgtatttgccctggtggtctccataccccatgttaaccccagcctggtgccttgtggtgtgtgttcctcacccacaagcttattggggccggatggaagcacaccccccctttcaacaagggacattgaattgggggccccacccttcccttgtggtattgaagaccctcccttatttgtggttcccccgcag

SEQ ID NO: 566548 - DNA, 244 bp, Homo sapiens
ggtcacacaaattagactaatcttgacactttgtaaatgtaaaacttcaaggaagaagtagccacggacagttatgtttataatcagtaggtggcactctttcctcaggtagccccccattttcacatgatgtttttaagggtaaatgccacccaaaggtcctaggtaaccatataacctagtgccctaattccatgtgccccttaaatatgtaatcattcaagagtgtaaaaaaaattagcac

SEQ ID NO: 566549 - DNA, 335 bp, Homo sapiens
cagacatcattaataacttgagggctgcagaaaaggttaacattcagcttctggaaagtaatactaaaattccttctgaatactaaatatgctcaagtccactgttgaactatctaccaagatgaagcctgctggagtttcaaaatgtccccagtgctctcaacctctgtgcgtctctctccacatcaagagtgaagtcagaggttatgtgaataacccaccccaccccccaacaaaagtggaccagggccagacgcggtggctcacacctgtaatcccagcactttgggtggctgaggcaggtggatcacatgaggtgaggtcaggagttcaag

SEQ ID NO: 566550 - DNA, 186 bp, Homo sapiens
  misc_feature (31)..(31): n is a, c, g, or t
  misc_feature (182)..(182): n is a, c, g, or t
cgcttccattccagcaggccacaccctgcancttggcaccaccagcattctcttgactgcggctgtggtgcaggttcctcgtgtcctcgtggtggctgaactgcatttcctggtgggctggtggtgtcaagcctctttcctgtgcccaacagtttatgctgtgtcattgctggtgcctgtcngatc

SEQ ID NO: 566551 - DNA, 528 bp, Homo sapiens
  misc_feature (82)..(82): n is a, c, g, or t
  misc_feature (208)..(208): n is a, c, g, or t
ccgtccgatgatatgcacagctcgtgcgacagtcctccagagacatggccccgatgggatggagcccgaaggcgttccaaantttcccgggaaaaagaaagtactggaatgaatgtgaccttgatactactccggatccttctcgggcatctacgcctatggtttgaggaaaaggcccctcgttgccatccaagcaggcgagccattnctaccttgtatcaagggttatgatgtgattgctcaagcccaatctgggactgggaaaacggccacagtttggccccccaaaaatttaatcaagattcttgcaagcacgattgacattacgatctacaaaagccgaccgcagtgcccctttttttgagatccctatgcacccaaaaaaaccccttcgaagaacttgcgctccagggcccaaggataccagaagtgtgggtcactggcacgtaggagacttaccattggcggccgccccttccttgttccaaaacccccgggggcccctgggtattcgcgcgtgtgcccaac

SEQ ID NO: 566552 - DNA, 597 bp, Homo sapiens
  misc_feature (597)..(597): n is a, c, g, or t
tttcgaagcggcggtgaaggtcctggttgaggtagggttggatggtgctggcggggaataatggttgcctccggaaaactcagcactggccgtttccttccgttgcccacgattcgggaaatcattaagtggttaagactgcaggcagcgaagcagttatcacagaatttcctcctggacttgaggttgccagataagattgtagggaaagctggcattctgccaaaggctaatgttaacgaaggggcccttggcccagggggaatcacaggatctattcttaaggccgacgtcgttgaacttctgggggttgaaagggccactcgattaattcctggattacagatgctttctgatgcagcacctgggaaactgagaatggttcatggagatgtcttgccattaaaggtagaaagggctttttcagaaggtcttaaaggaccttgggaagatgatcctccaaaggtatatataatgggaaaactgcctttaagggtttcacttccactgataatcaggtgccttgaatttcctggggagttgcagagagacttgagccattaccgaaggccggggtatcgcttttctgtttgctcn

SEQ ID NO: 566553 - DNA, 194 bp, Homo sapiens
gcggccgcctactactactactactgctcgaattcaagcttctaacgatgtacggggacatgcctttaatcccagctactggggaggctgaaacgggagaatcgcttgaacccagtaggggaaggttgtggtgagccaagattgcaccattgcactccagcctgggcaagaagagtgaaactctatccaaaaaa

SEQ ID NO: 566554 - DNA, 142 bp, Homo sapiens
aagccccattccctctctactcttgacagcaggattggatgtggtgctattgtggtttacttcttagttttccttccattctgttctgcaaattaagagtatgcgaacaatacaagaatcatgcccgtttttatacaaacaa

SEQ ID NO: 566555 - DNA, 400 bp, Homo sapiens
  misc_feature (11)..(11): n is a, c, g, or t
  misc_feature (17)..(17): n is a, c, g, or t
  misc_feature (20)..(20): n is a, c, g, or t
  misc_feature (35)..(35): n is a, c, g, or t
  misc_feature (46)..(46): n is a, c, g, or t
  misc_feature (253)..(253): n is a, c, g, or t
  misc_feature (279)..(279): n is a, c, g, or t
  misc_feature (312)..(312): n is a, c, g, or t
  misc_feature (325)..(325): n is a, c, g, or t
  misc_feature (371)..(371): n is a, c, g, or t
  misc_feature (377)..(377): n is a, c, g, or t
atactcgctgnatcctnganctcctgagctcaggngatcctcctgnctcagcctcccaagtagctaggaccataggcatgtgcacaatgcctggctaattttgaatttttttttttcataagcagggtcttgctatgttggccatgctggtttcaaactcctgggcctcaagctatatttcctcctcagccgaccaaagtgttggggattacaggtgtgagccaccatgccctgccacttgagggagttgttnctatttttatcttcgattcgattggnttttctttggggaaaagtattaactggataatntatgttgggtgantcatattttcaatatttgctgaaatactccatatttcccagtaggnaagttntttttaacccgaagtgttaaggg

SEQ ID NO: 566556 - DNA, 612 bp, Homo sapiens
ggggtccttggactttccctgcacatccagcacgctcatcaatctatgacatgccagtaggacgcattgtagtaacctatgtacaccggatgtggccgctaccgggcgtctcgggaaacacatggcatcgcgcaatctaccctctcattcttatcaatagtcgtgttggcgattgagtcacgtgtctgactggactctcaaagcgctgctgctcagaagccaagcagaaggtgccgcccgtggctgcaggtgctgcattggcggggatgagtccatgctggacattggaggagagcgcgccgctgtgccttctgcgggggcctggtcgtcatcggatcactcgactgccccgagactcgacggctatcgctagcaccaatgcatggtcagcaacagtcgggtcgccaagagacgtagctctgcgcactcacaggctccagtggacttccgacgccgacacgtcttcccttctctgccaagaggcctcagtccccaagactgccaccagtctacacatacagcagccacctggacagaatcagcatttcagctcagctggcctggaatgggccaggctggtcctggctgcctgttcaatgcctcttcagatac

SEQ ID NO: 566557 - DNA, 157 bp, Homo sapiens
tccacgcccgcgagactgggactccgccagttttggagtcgggattcgaacacatgtcccagggcggagcgggggaagagggagaccgagggcaggtccgttgagatcacgggtctccaaacacaggggacaataacgagaggagagcttgcggccg

SEQ ID NO: 566558 - DNA, 566 bp, Homo sapiens
cgagatctcggagactccggcgcaccatgcagaacctggagattgagcgtgcagtcccagctacagcactgaaagcatccctggagaacagcctggaggagaccaaaggtcgctacctgcatagcagctggcccagactccaggacgatgacttggcagcgctggaggacgcagactggcccagactccgcgtgcgagcatggagctagcacgaacccacggagtacgaagactccgtgctaggacgtcgaagaacgcgcgctggagctaggagactcgccagcctagccgacgcgcctgtctggaggggcgaggaccgcccacctgctcctcactccgcagttctacctctggatcgcagtcatcacagagactgtgacctcactccagccgccaaatccgcacgcaaggtacatggatgtgcacgatggcaaggtggtgtccacaccagcgagcaggtccttcgcacacaagaactgaggctgcccagccccgctcaggcgtaggaggcacgccccgtgtgacacagatcccactggaagatcccctctcctgcccaagcacta

SEQ ID NO: 566559 - DNA, 386 bp, Homo sapiens
ctggtcgaatatgtgcggatcttgcgctctgcgctgaggttgcggctgtgggcctgctggtcgacgcgcggtgctattgcttcagtttgggtacctcctgaacccgcgacatcatcagtaatggtccccacaatcacggccgtcttgtcttccctgggcgaggaaagcttgcatcttcctggatcatccggtaaagggacgagaggaggactggttgttgcgactcataaacgaactcttcaagacaatcctggttgaatgtggagttggatcttctggactgaaacctgtatcatttgagcaagagcctcaggtacatatcctggctcttgggctccttgcgcagaacctttcggtccttgttatggcggatgtccacgtccata

SEQ ID NO: 566560 - DNA, 113 bp, Homo sapiens
  misc_feature (92)..(92): n is a, c, g, or t
ggcagagcatgccgggagccgccggccgccggtgtccggaccgctcgcccccgtttggacccgacttcggatctacaggttttttttatgcncctgaggcccgagagcacgag

SEQ ID NO: 566561 - DNA, 309 bp, Homo sapiens
aattctcgacatatcgccggcaagccccagtcacgctgggcatcgatattgcccagacgcagttccttctgcttgccgagcttgatgcgcgcgacggcgtcggtcaccttgcgggtgacgaactcgatgccgcgcagcggcgactcatggttgaacagaatgccgctggacgcatgcaggccgaagctttcgcggtagttgaccgtgatccagtgtccatacagcttggcaacgccgtacgggctgcgaggatagaacggcgtgctctcgtcttgccgttcggcctggatcagaccgaacatctcgctg

SEQ ID NO: 566562 - DNA, 468 bp, Homo sapiens
cgaccagacttggttgaggcgagattctggagcctgctgcacctgacctgataccgtttcccggtgagtcaacggtctcagaggggaagtaccgatgtgggtggactcgagcctgctcatctttgtgcgggtgctgagtgagccacgtgatggtgcgatgctgaggtgtgtggctggtgacacgctggagcattacctggacaagcactgaccctggtgcgcggcgtgctcctccactgctcatctgaccaccccagccgagggtctgcaccttattactccacagagtggtagtcgcccaccactcagtaccccgcacactgcttagccacagttccactggggaagtgagacgaccggggaatcacaggaacatgaggatgacttccacggttagactatactgacagcccaaaagggagggagcaccgagcacacacataacaggaggacaaaagaaaaagggtc

SEQ ID NO: 566563 - DNA, 185 bp, Homo sapiens
gaggctacttacgcggctttcatagagaaattccgcagccgaggcaggaaatccctaagtcagaccaacccctccttccatgtcaatccttcttcacagatctgtaagcaaaaaaacccacggatcaaaccagactctctgtccgctcgcagcaggtgtggctcttagcactcgagcggcacagg

SEQ ID NO: 566564 - DNA, 217 bp, Homo sapiens
ggaatcatcctaaatgttcatcaggagacgaatggataaaatgtggtagatatgcacagtggaatattatttgggcttaagaaggaggaattctgtcattcgtgacatcgataaatctggaggacgtttcactaaatgaaataagccagggacagaaagacaaataacggatgatctcacttaccggggaatcttaaaaagttgaactcagagattc

SEQ ID NO: 566565 - DNA, 552 bp, Homo sapiens
aatactgtaacccgatcccctgtgtgctggccccagctatctaagcaggtgttgagatgatctgtatggactctgccagatccctccgtgcgaggatggaatcagtccattgttcaactgtgccctttggcgctgtggttcatttggctctgatttttcctatatgttctctcctccaacccccatagctccatcttgtctacaagattttgttagaagccgtcaaaatcctgctgactcgagatgcgctgtgctgcatgttctccctgggcacagcaggctactaatcctgttacaaagagaaatgccgtacattgcgagcagtgctggcccctgggactcaccgtgcccttttctaagtgcttacagactctctgtttaataatccattccagaaattttccagggctcattgttgagcttggtgtacgcaactttgagtgatcagcccttctcctttgtgggagcaccaggacagagcagcctttgtccctccccagtctcggttccctcccactggccctgtggacctcgaatgccgagcttatgcac

SEQ ID NO: 566566 - DNA, 293 bp, Homo sapiens
aaattcgcggcggtgcattcaatgaacgcggtaacgggagtaactatgacttctaagagccaaatgcctgcatctaatagtgacgccataatggatgaacaatccactgccctacctctatcacaaccacaccaggaacggctggcggaatacggcgacgcggcgcattatagtgagtagcaccggatccgaccgactgcagcgtaccacttcctatggagtctataagctgcgtatatggcatagctgttctgggaaatgtatcctccatcccaacatacgaccgagctaag

SEQ ID NO: 566567 - DNA, 1076 bp, Homo sapiens
  misc_feature (498)..(498): n is a, c, g, or t
  misc_feature (532)..(532): n is a, c, g, or t
  misc_feature (537)..(537): n is a, c, g, or t
  misc_feature (549)..(549): n is a, c, g, or t
  misc_feature (571)..(571): n is a, c, g, or t
  misc_feature (573)..(573): n is a, c, g, or t
  misc_feature (583)..(583): n is a, c, g, or t
  misc_feature (585)..(585): n is a, c, g, or t
  misc_feature (587)..(587): n is a, c, g, or t
  misc_feature (592)..(592): n is a, c, g, or t
  misc_feature (595)..(595): n is a, c, g, or t
  misc_feature (599)..(599): n is a, c, g, or t
  misc_feature (607)..(607): n is a, c, g, or t
  misc_feature (611)..(611): n is a, c, g, or t
  misc_feature (641)..(641): n is a, c, g, or t
  misc_feature (653)..(653): n is a, c, g, or t
  misc_feature (775)..(775): n is a, c, g, or t
ggctaaaaacatgttgccgcatgctttgggcgctttgattatcacagttattttgtccaggacatgttggtagtgccacatacttccacaccaagactctttggtttctccccaagtaattgtgaaggctgtgctgttcgtttagtgctattttatacttacggcaaagttcgcttcattctgtaaacatggaagtttgtcacttatctcaatagtcgcattgaattatatggtctaatgcaactagtctgtactggcattctcagattatacttgcggtctgaataactttacttaattgtcagccttattcgaaatgtctataatgtattctttggtttgcattttttcacattagacatccacagttaaggtatgggccagctacctttggggctgaccccctcgagttgccataacatcctgctccattgccctctatagactgtaggaagaattcggatccgttaccattggaatcttccatcgaacatactntatacacttttggaccaggatttgagtctctgcntggcntatacttgattnaaaggttattactaacctgttnanaatcagcagntntntgttnttnaganacaccctnaaantcttttcttctacatagttgaagacagcancatattcactgnatgtctgaatagaaaccgtcgtacctaaattagataacaactagacacttgtagtgttctcacagctatggatactttgtctgaaaagttatttgccaaaactgaaagccttcagatgtttnccatggtcccactaattataatgactttctgtctggatcttataggaaaagatactttcttttttcttccatctttcctttttatattttttactttgtatgtataacatacatgcctatatattttatacactgagggtagcccatttataaattaagagcacattatattcagaaggttctaacagggctggtcttaagtgaaccactgtgtatataaatatgttggaaaacagctgtatacatttattgggcaacggtaatgcataatatttaataacgagatgtgtttcttaacaag

SEQ ID NO: 566568 - DNA, 1066 bp, Homo sapiens
  misc_feature (498)..(498): n is a, c, g, or t
  misc_feature (532)..(532): n is a, c, g, or t
  misc_feature (537)..(537): n is a, c, g, or t
  misc_feature (549)..(549): n is a, c, g, or t
  misc_feature (571)..(571): n is a, c, g, or t
  misc_feature (573)..(573): n is a, c, g, or t
  misc_feature (583)..(583): n is a, c, g, or t
  misc_feature (585)..(585): n is a, c, g, or t
  misc_feature (587)..(587): n is a, c, g, or t
  misc_feature (592)..(592): n is a, c, g, or t
  misc_feature (595)..(595): n is a, c, g, or t
  misc_feature (599)..(599): n is a, c, g, or t
  misc_feature (607)..(607): n is a, c, g, or t
  misc_feature (611)..(611): n is a, c, g, or t
  misc_feature (641)..(641): n is a, c, g, or t
  misc_feature (653)..(653): n is a, c, g, or t
  misc_feature (677)..(678): n is a, c, g, or t
  misc_feature (709)..(709): n is a, c, g, or t
  misc_feature (711)..(711): n is a, c, g, or t
  misc_feature (765)..(765): n is a, c, g, or t
ggctaaaaacatgttgccgcatgctttgggcgctttgattatcacagttattttgtccaggacatgttggtagtgccacatacttccacaccaagactctttggtttctccccaagtaattgtgaaggctgtgctgttcgtttagtgctattttatacttacggcaaagttcgcttcattctgtaaacatggaagtttgtcacttatctcaatagtcgcattgaattatatggtctaatgcaactagtctgtactggcattctcagattatacttgcggtctgaataactttacttaattgtcagccttattcgaaatgtctataatgtattctttggtttgcattttttcacattagacatccacagttaaggtatgggccagctacctttggggctgaccccctcgagttgccataacatcctgctccattgccctctatagactgtaggaagaattcggatccgttaccattggaatcttccatcgaacatactntatacacttttggaccaggatttgagtctctgcntggcntatacttgattnaaaggttattactaacctgttnanaatcagcagntntntgttnttnaganacaccctnaaantcttttcttctacatagttgaagacagcancatattcactgnatgtctgaatagaaacctcttttnnttttttttttttttttttttttttttttttntnttttttatttgtctgaaaagttatttgccaaaactgaaagccttcagatgtttnccatggtcccactaattataatgactttctgtctggatcttataggaaaagatactttcttttttcttccatctttcctttttatattttttactttgtatgtataacatacatgcctatatattttatacactgagggtagcccatttataaattaagagcacattatattcagaaggttctaacagggctggtcttaagtgaaccactgtgtatataaatatgttggaaaacagctgtatacatttattgggcaacggtaatgcataatatttaataacgagatgtgtttcttaacaag

SEQ ID NO: 566569 - DNA, 606 bp, Homo sapiens
cccactggagtacagtggtgcaatgtcagttcactgcaacctaaacctcatcaggctcaagtgatcctcccactttagccttccaagtcgctggaactacgggcatatgccaccatgcccaaataaccttttaattcttttgcgaacacagtgcttcactatgttgtccaactccaatctcaaacttctggggtccaggaaatccttctggctgggcgcttcccaaagggctgggattacaggcatgagccccccggcccaggtggtatccatttttctaaaccacattttaaaaagttccagtgtagaggtggcccaattggatttaacaactgcggttttaaaagagaaactgcggtttcttttattaacaaatcaaccacggtgcggggcaagttcctggtaaccattgggcctgaaccatcggggaccaccaccccaatgtaacccggctaccccggagggttgggaccactcccaacggactttgcgccccccctctcgataaagaactatgtgcctttgacacgaaaggctcccctctcagacaaacacggcgtccgctccacagctgtgtcccctcgttgcgatcagatcatttccgct

SEQ ID NO: 566570 - DNA, 664 bp, Homo sapiens
gtagaagcaggtatatcttccatgcagtttcagtagtaagcactacttatacctacataagagttaaaatccagatgtgggaccttttgataccatcagtgatatatatttttttaaactggtacagagaagtgaaaagattaaattctacttctatttttttttttttttggagacggagtctcgctctgtgtcaccagggccggagttgcaggggtgcgactcctcggctcacttgcaagctccgccttcccaggttcaccgtcattctccgtgcctgagcctcccgattagctgggactacgggcgcccaccaccacgcccgggctaatttttgggtgattttaggtaaaagacgggtgtttcaccatgttacgccaggatgggtctcaatctcctgacctcatgatccgcccgtctgggcctcccaaagtgctggggattacggcgcttgacgcaattggcgcgcccagccaatttctatcttcttaaaatctcacaaaaactatgttcaacatcggagtgactggtccgtattgtccaaagtgtgttccaccaaaaaagagctaacaccagtcattttatttttacctttttttttcaacttcaaaactggttaagtgcttcgaaccttcctatgaaggtgccttattcgtgcttagac

SEQ ID NO: 566571 - DNA, 344 bp, Homo sapiens
  misc_feature (156)..(156): n is a, c, g, or t
ttaatttttgtgtacccatagaaaccataaaaaggagagcaatgtgagtcctggattttattgatggcagagatatatagttttgaccaggatcaattttcgttaacgataaaaaatatttaaagaataaccccatggaaatacgtgttgactgantcatttttccgaatgattgttttctggaactaaattatgtaaaggttatgctgtcatatttaaagcgattgtaagctaatgtatgtaataaatgagataatttacagtaagctaaaaatcagccaggcgataaatgacctgggctgatagtttttagccttttagctgttgcattttggttttatgaa

SEQ ID NO: 566572 - DNA, 625 bp, Homo sapiens
gaggcaggcgcgccccggacccaggatttataagaggcgaggccgggacgcgggcgcgctctcgtcgcccccgctgtcccggtggagccaacctgaaggtgccccgcttgatccgtgtccgacatgctgcgccgcgctctgctgtgcctgggctggggacgtcgctggtgcgcggcctgaggcgcgcccgaggaggaggaccacgtcctggatgctggctggacaaagcacgttcgcggagtgcgcatggggcccacaaggtacctgctggtggcgtgctatgccccttgtgggtggcactgaaaggttctggtccctgagtatgccaaaagccagctgggaagctgagagggccgaaggtgccggagatcagtgttggccaaggtgtggacgccagggagggagtctgagcgtggcccaaggagtacggcgtgtgcggatatccatcatcaagttcttcaggactgggggaccacgaggtaacgccccaagtggaagtattacatgcgtgccagaagacggctgatgacgttcgtgaacgcggtggacgaggcggcaagggccgggttgcgaccaccggcttgacggggcagtgtgcagaggccttggggaagtccagcgaggg

SEQ ID NO: 566573 - DNA, 598 bp, Homo sapiens
tcttccacctttgtggttgtcggtcgctactttaggctcggcctcctctcctccttatgatctgccctcccactatagcccctttttggttcgattgtccccgagtttggactgcacggctacctaacgtccatgctgatctgcacacgcggtgtggcttttctacgtatgtggtacatttcgctctatctcttcagccatagagaggaaatattgcaaatggacatgtgaagctcattgttatacactttactgaaataacagagcacacgtacctcttagtggcaaagttggcctctcgtggaacactgatattcttcgatggctgtatacacagttccgcggtgtgcctgagagtcgcctgccacaccctctgacagctctagcttacttgggacacgacatacaactgctggactacgttcgatgcggataggcaagcagtgcacgtggagactggtgtggatctagagagaccgagagaataccctattgtcaacctggtcctttcatcttagtatcgcataaaatcaaccacttggtttgggactgatatattagcagtaggtggcaaagtaattactcccatggtgttata

SEQ ID NO: 566574 - DNA, 454 bp, Homo sapiens
acaacgtcgtggctgcaaagaacctgaaggagtgtgttgttagttctacaaattgtgaatctcctgttatcctccatgttaatttctaactttatcgctgtacagttggagaagatactttgtatgatatctgtattttaaaatctattgagacttaatatgtggtttaacatatgatctatcttgtagatggtcctgtgtgcagttgagaagaatgtgtaagctattggcgtcgggtatagcatcttgaatatgtctgtgagcactagttggctcatggtgtcgatcaagtcctctatttccttacctacttttggtctggttatttaatacatcattgagagtagggtattgcctccatagattcgttgaacagtctgtttctcccttcaattccgtacattttttcgattggctcttgatggtctaattatttgccacgatttcctcatcg

SEQ ID NO: 566575 - DNA, 872 bp, Homo sapiens
ttcgccagagatttttttccccttcaaaaattcttggaaacgaccatctctgaagggttttcgtcaagagttatccctcgtggagaaggaaaaatgtcctttaaggtcctcaacaggatcccctcggcacgctactccctcacagattggtcttgggagacttttatttgagccccacacaccttgggagtgaaaatttatagagtaccttacatgattttggagacagaaatatcttgatatacacagatgtccccacttagggggaagacggaacaaatggaaatctcttctggccccactttttcacggggttctcccccaccctcggattactccgccgtaacaatttttgcagcacgtctctgtttaaacaacagcggcgatatagcccttcttcgcacgagggaactctaattgagaataatctgctattctataaagagggctatttcagagcaccaaaacgctcgtgcttgtcacaaatgggaaagtcaaaaggatatgagaaacttgtgtctgcccctacggggcatcttagacaccgggagaacaccacatctttcggggacgagactcgcatttattccgcgtgccccacaagaaaaactcggaaatgggccgcattcacttcgagtggcaacaaccctcgtggctgattgctggctgcttctgggtcttgagggctggtcgggcgctccaccctggaatttggaatttctcaggttctctgcccgtctacaccaccccctttctgggggcaccgcaagcagtgccccaggcccgagttggggcccggtttttatgggggaagctttgctgtttaattaactgtgaatttgtgataaaaaaaaattttttaatttttcgga

SEQ ID NO: 566576 - DNA, 759 bp, Homo sapiens
  misc_feature (30)..(30): n is a, c, g, or t
  misc_feature (63)..(63): n is a, c, g, or t
  misc_feature (133)..(133): n is a, c, g, or t
  misc_feature (166)..(166): n is a, c, g, or t
  misc_feature (215)..(215): n is a, c, g, or t
  misc_feature (271)..(271): n is a, c, g, or t
  misc_feature (322)..(322): n is a, c, g, or t
  misc_feature (348)..(348): n is a, c, g, or t
  misc_feature (368)..(368): n is a, c, g, or t
  misc_feature (378)..(378): n is a, c, g, or t
  misc_feature (393)..(393): n is a, c, g, or t
  misc_feature (421)..(421): n is a, c, g, or t
  misc_feature (429)..(429): n is a, c, g, or t
  misc_feature (436)..(436): n is a, c, g, or t
  misc_feature (441)..(441): n is a, c, g, or t
  misc_feature (452)..(452): n is a, c, g, or t
  misc_feature (455)..(455): n is a, c, g, or t
  misc_feature (476)..(476): n is a, c, g, or t
  misc_feature (524)..(524): n is a, c, g, or t
  misc_feature (539)..(539): n is a, c, g, or t
  misc_feature (593)..(593): n is a, c, g, or t
  misc_feature (621)..(621): n is a, c, g, or t
  misc_feature (623)..(623): n is a, c, g, or t
  misc_feature (682)..(682): n is a, c, g, or t
  misc_feature (684)..(684): n is a, c, g, or t
  misc_feature (686)..(687): n is a, c, g, or t
  misc_feature (689)..(689): n is a, c, g, or t
  misc_feature (698)..(698): n is a, c, g, or t
  misc_feature (752)..(752): n is a, c, g, or t
agttatttattccaaccacccctattgganggcccccattttgggggaacggccaggcatttnattacccacccttcccatcccttaaaggctcccacgggttccggtaaatccccattacccccgggacggngtccgggagtggccccaggggggtcagaagatncaccatcaacccaccccaccagggcttggaaccttcctacaaggcggangccaacagcacacggcaactggggcaaacagatagggcaaaggtttagagggcgcnggccagctcctcccaaggggtgggagccttgcatgaggcatgcaagccacnggcagggccgcagcccaaataggggnccgaccccaggggttaaagncttacgggancgaagtagtaaaacnctagtcattccgggaatataatagtggncgaaaatngaatagncactngaagaggtttnctngagcttctccactttgccttnaaagggcaggcaaaaaaaaccacggccataccgggcaaagcggaatanccccacaccatcggncaaagaggcctgtccaaagacaaaattccacgagcccctggggtaaagatcaancattgttattcccacaacacagaaggcntnttcaggtttcttctttttcaagaacttcaggatgtcccctgcatgaatttgtaggttgngngnntnctcattgantctaaaggaacatcttgttacagaaacaggaactggttctaggagttttactcncaagcca

SEQ ID NO: 566577 - DNA, 887 bp, Homo sapiens
gaccctgtgctgcgctggctggggaggaagcggttctaggggatggcgtgctgggcgccggggtccggcggacgtaggaggccacacttctggccttgtgatgaatcctcgagtttccgccttctcagatggggttgtcgtgagggtacaacagtcggcattcatgacattccaggtggacgcccgatacgcggttgtgtgcggattcgaggccggagactcatggaacgctggcgcctggaggcgtcgacccctcgttactgatgcagggacgcggtgcggaccagtcaggcccagagctcgtccttagatgtgggttcgaatctctgccccgcacaacttgtgatcgtatcgactcggcccagacgcaattttcttctctgcaaaatcgtcataagaataatcacttgttcagggtagctgcgggcatcccattcgttcctttcatcagcgccgggcatatggggcgtcacgaggctgagaaacggttgccgtgaaagaggcttacaagcaagacccggagttggcgaccttacaagaggacggacctgaagcaaaccgcgcgcgcaattgagctccagaacgcgggacgttcctcattcctacgaaggttacagtgtaaggagatgtctagccgtgacccgtggacttttgggagaagttcaaaacctttcagaaagagttgggagacagacggaaaatttgggcagagaccttgaacatgttaggaaggaaattgggaaaagaaaccaaaatttacgtcgtggaagaaggctgacgctctttacccaagtgcggcagttcattcactggcattatgaaggaaggcggacgggaagtatggaaaagcaggcctcctggacttgcctcgcttggtggtggaatgc

SEQ ID NO: 566578 - DNA, 150 bp, Homo sapiens
acaagtagacatttctattcagatgttcatgtgtatatgtggtgttatacacacacgcctatataccatgtcggtttggacacactcgacgtcaaagcagttcacatgggagtgtctgggagttcaagagaggctagcacatagtgcagc

SEQ ID NO: 566579 - DNA, 486 bp, Homo sapiens
  misc_feature (81)..(81): n is a, c, g, or t
  misc_feature (85)..(86): n is a, c, g, or t
  misc_feature (112)..(112): n is a, c, g, or t
  misc_feature (128)..(128): n is a, c, g, or t
  misc_feature (131)..(131): n is a, c, g, or t
  misc_feature (246)..(246): n is a, c, g, or t
  misc_feature (261)..(261): n is a, c, g, or t
  misc_feature (273)..(273): n is a, c, g, or t
  misc_feature (314)..(314): n is a, c, g, or t
  misc_feature (317)..(317): n is a, c, g, or t
  misc_feature (326)..(326): n is a, c, g, or t
  misc_feature (332)..(332): n is a, c, g, or t
  misc_feature (349)..(349): n is a, c, g, or t
  misc_feature (353)..(353): n is a, c, g, or t
  misc_feature (362)..(362): n is a, c, g, or t
  misc_feature (371)..(371): n is a, c, g, or t
  misc_feature (379)..(379): n is a, c, g, or t
  misc_feature (385)..(386): n is a, c, g, or t
  misc_feature (388)..(388): n is a, c, g, or t
  misc_feature (390)..(390): n is a, c, g, or t
  misc_feature (401)..(401): n is a, c, g, or t
gattttctctaatgtaacttcctcttggatggtttcaccaaggaaatattgagagaaagtcggccggtagatgaaccagcnatgnntgcgcaagtggattaaagccaaaganagaagagtccaggaanggncggggagaagcctgggtggctcagcatcctccaacggtgcgccgtctgctcggggctgagctggcgggagcagtttgcgtgtttgggttttttaattgagatgaaattcaaatancctaaaaatcaatcncttgaaagtgancaatcagcggcatttagtacatccagaaagttgtgtaggcnccncctctgtcncgttcnggaacattctgtcatcncccngtgaagcantcatttccnctcccgtnttcctnntncnctggcaactgntgatcgacatagaatctctgtagtctcaaaagggtattccctgatctggaaaatacaactaaatgagatcaaacacaaaacaccc

SEQ ID NO: 566580 - DNA, 1199 bp, Homo sapiens
ggggaaagtggaaaactatcggcggtggcctcaggctctgtggctcactcctggaatcctcagcactttgcgtgaggccaaggtggggggatcacgagggtcaggggatcgagaccatccgtggctaacaggtgaaatccatgtctctactactaaatacaaaagaattagccaggcttggtggagtgcgcctgtagtcgcagcttactcgggaggctgaggcatgtgagaactggcggtgaacccagtgaggctggatcctgcaagtgagccgagattgctgcactgtactccagcctgggcgacagaggacacgactccgtcctcattaatatctataaccttacgcaacaggctacaatttgactggtcgtggtacactggactccaactaattgcactaccagattgtgtgttgaaccttcttagaaccagtagccctgtgattctgcctatacaacttgttcccgtggaagccagagttctggcacaacttgaggaccatgacgctatcgttgtaaagatccctagggcctgtgatgaattgcaagctctaggcccgaggaatacgacaccttgggtgggcttcgtcccaaggcgttgttgccaaggagcatatagaaggacctcttgtcgttctcaacatattctcacacacacactcttatatacagcgctcgttgtattcttcgaaccgcgatatacaacattagaggggacgtgacatagcactgatttctggcccccacacaactcttggtttgctcgcaattggacgtttaagattacgaacttagaagcttacccaatatggcccagttagagatatggaaggggcaaagacgtcccgcaagagaatcacacgcggggcacgtttggttaacatcgtattccctcatgcctactagttggcgtcctcagaatgactgagggaccattgagcgcctagccacgagctgtgcgggccccaacagatccatcgtattgcctacttggatgattatatcaacaatccgccagaggacgggcgggtatcacaccacgttgatgtgtgatcacttgaacgagaagaaagatacccccccagctgtaagtcttgtagctcatttcccaccaaccgatagccctcatagagtgagagagcccacatcttcacaacggtgtggaggagtccccccgcaatagggtgctacagactt

SEQ ID NO: 566581 - DNA, 319 bp, Homo sapiens
tacagataaggaagtgtacaagcataaagaagacagcagtgagagctgatctgtgtgtactatttggttccttcagaaggctgggtcgtggaagtgcaggacatatttcacggctgcttctcctgataatgatcttcttctcggcccaccttgagaacataatccctgagctccgaagccctttttgactgaagctcctgtagaacaagatttctcaccgtttcttacccctgatccaccttctgccgccgccgacgcctctccagagcccggctccttgtccgactcccttgatgtacaaatttttccagctccagaa

SEQ ID NO: 566582 - DNA, 237 bp, Homo sapiens
accgcattatagctcgtaaggatcaagtagttgtctcaaatacggcaacagctttgagtgcctcgtattatttaagttttattttttttaatttaataacaggtaagttgctgtacatcctttgcagatttccttatttttttttttttttttgggaaagggatcccccccctgtggcccaaaagggatgtccagggacaccaccactgtacctcccgctccccaggtccaatgtgt

SEQ ID NO: 566583 - DNA, 476 bp, Homo sapiens
  misc_feature (81)..(81): n is a, c, g, or t
  misc_feature (85)..(86): n is a, c, g, or t
  misc_feature (112)..(112): n is a, c, g, or t
  misc_feature (128)..(128): n is a, c, g, or t
  misc_feature (131)..(131): n is a, c, g, or t
  misc_feature (246)..(246): n is a, c, g, or t
  misc_feature (261)..(261): n is a, c, g, or t
  misc_feature (273)..(273): n is a, c, g, or t
  misc_feature (314)..(314): n is a, c, g, or t
  misc_feature (317)..(317): n is a, c, g, or t
  misc_feature (326)..(326): n is a, c, g, or t
  misc_feature (332)..(332): n is a, c, g, or t
  misc_feature (349)..(349): n is a, c, g, or t
  misc_feature (353)..(353): n is a, c, g, or t
  misc_feature (362)..(362): n is a, c, g, or t
  misc_feature (371)..(371): n is a, c, g, or t
  misc_feature (379)..(379): n is a, c, g, or t
  misc_feature (385)..(386): n is a, c, g, or t
  misc_feature (388)..(388): n is a, c, g, or t
  misc_feature (390)..(390): n is a, c, g, or t
  misc_feature (401)..(401): n is a, c, g, or t
gattttctctaatgtaacttcctcttggatggtttcaccaaggaaatattgagagaaagtcggccggtagatgaaccagcnatgnntgcgcaagtggattaaagccaaaganagaagagtccaggaanggncggggagaagcctgggtggctcagcatcctccaacggtgcgccgtctgctcggggctgagctggcgggagcagtttgcgtgtttgggttttttaattgagatgaaattcaaatancctaaaaatcaatcncttgaaagtgancaatcagcggcatttagtacatccagaaagttgtgtaggcnccncctctgtcncgttcnggaacattctgtcatcncccngtgaagcantcatttccnctcccgtnttcctnntncnctggcaactgntgatcgactttgggtttttgttgtttaaaataggttttccctgttttggccatttcatataaatggaatccccca

SEQ ID NO: 566584 - DNA, 266 bp, Homo sapiens
ctgccccgggtgtccctaccatctgagacacattgcctgcccccgcctccacgatgggccagcagtgccaggcttttgaggccaaaggaaaggccgtgctggtgggcaccacgtggccaggcaccagcaagggcccaggagtgcgctacacacagagctggggcctaaatgccagatagcccttcctaaacatcggctaaaaccatcttcgcagaggggtgttgtaggtgatcttctttatctggccagtttttctctatttttcc

SEQ ID NO: 566585 - DNA, 584 bp, Homo sapiens
acgcaggccacagggagggattgcagaacaaaaggtgtggggaacacaaggatgtgagtgtgcctattcaatacccaaacagggcttgacacaccacccccccctaaagggaaaacttgtgttggagaaaagacaggagcccaaccccaaggccttcttaaaaaccacgatccaaaatttcctgggtcattgagtgctctggagtgggagccacatgaagcccccaccagactccaagccatcaaggcaaaattaactgcagtgtgaaagacacttccctggaccaagcagaggttaggtatcaggtagggaacactagggaacactacactccgaataaaggcaggactcccgccttggccagcaggccaccagaaaaacagggcctcactgtgccagcacgagccacccccgggttggatggggagtacattctgctacaccgggctttccagggtaatgggtatgtttccctgaacacttgcaggagcctgaggaaaagaggtctatttcaaatagtgtaagaaatgaaacatgccctgagctttctccctttactaaacacttaaggcccaagaaactgt

SEQ ID NO: 566586 - DNA, 1002 bp, Homo sapiens
tcaagtgacaactacttgggcaaaggggaaaatgacaccaatcattggattacagaaaagggtttaataaatcctcctcttgaaataatgttcaggcccagcagggtagcttatgcctgaaatcccagcacttcgggaggccaaggcagaaggatcgcttgagcccaggagtacgacaaccagccggggcaacatagtagagaccgccatcctcaaataacaaaaagaacacacacaacccacaacaaaagaacacaacatcgccggaggcccatttctacgcggcgggcgggcgcaacagccggcacacaaaaacgcgcccccaggggacaacagcccgcccccaggacccacccgctgcggccacccacgcgggtgaaaaacaacttgccgggcggcaccaacccaaataaaagggagggcggcaataatcacaacgcgacacaaacagagcccggactatacaccaccgcgcgtctacagagcaataccgggcacaaaagacaagacaagcaccacgcaacacacacgccgagcaccaatctacaataacagccaccagaacgacaacaagaccagcaaggagcgcgcccacacgagacgagagagagagaagaggaggagaagagaggagcagcacacggcgacgcagcggagacgcggggtggaccgggggagaggggccgacacagagagaagaggaaggaggaccagaggaagaggagaaggagaggagaagacagggcggcacaaagacagcgagggcgacgcgggcgcacaggcgaggcgcacaggagcagggagggggcaaaacgcaaaagacagtaaccaggaacgagccaggcacccagcggagaatgaacgaaaagcacgaagctgaaaaaacagtagagacctcaaaagaaagaaaaaggacaggaagaaacagaaccaaaacacaaagcaacacaccaaacagacgacagcgcaacgacaaacaacacaacaacacaaaaccaaaaa

SEQ ID NO: 566587 - DNA, 303 bp, Homo sapiens
gcagaaacaggagatgatggtggcgtgtgtacctcgtctcggctcatggccgttgtgcgtcgcgcactgaatttccggtgctccgttgccggacccaggtgcgaggttcgtctgagcgaaccatgtggagttggactgtgttgcttatgggcaaccgccgtcataagttctgacgcgagaatacctctgtggaagcgactgtggtgtgcaatagccttacccgttggagcagaatagactagagcacggacatgcgccttggatgcgttgatcagcttggagagttgaggcgaaggccgtcga

SEQ ID NO: 566588 - DNA, 207 bp, Homo sapiens
cctactgtatctattctcccagtcctagctgctggcatcactatactactcacagatcgtaacctcaacaccacctcctaccggtggggtcgaagaaggtggtgttgaggttgcggtcacagacatttaggtaacagccatttaggtagtacagacaaattaggtcgggtacctgatgctcgacattcgtaactcacttggtcacta

SEQ ID NO: 566589 - DNA, 298 bp, Homo sapiens
ttgcctagaggttccctccgctcggacaatccatctctctttacactctcacaatcaacgaatcccaaatatcactgtataaactaagaagtaataggaaacttgagaacagagtgtttttttcttttttcttttcctttttttagagacagggtctcactattacccaggctggtaagtggagcaacacaatcacagctcactgcagcctcaaactctcaggctcaactcatcctcttgtctcaacctctcaaagtgttgggattacaggcataaaccatggcacctggtccgagcg

SEQ ID NO: 566590 - DNA, 169 bp, Homo sapiens
ggagttaccgatggctatacatccagagacccctcacctcacgagatccttctgcctcagcctcctgagtagctggaactacaggcatgtgacacagtgccctgcttgcctttttaaaatattgggtggtttgggctgggcacagtggctcacacctgtggtcccagca

SEQ ID NO: 566591 - DNA, 753 bp, Homo sapiens
gcattactgagtacatatttttaaagaaaaatgaacatatatattgtaaagatgatatagtatagataattgaaatgccttttagaaatataggatctaagtaatatctttattgagcataaactctggagccaaactgtatgggtttaaattacagctctctagcttattagcttgtggccctgggcagttacttagcttcttgtgtctcagtgtattcatctgtaaaatggggatcataagagtactaatctcttaggatttcatgaggattaaatcagctagttaatgtaacttgcttggaatagtgattagcacacagtaagcattcattaagtgcttgttttttcatgacttgaatgggaatggttagctcatctaaacttgggaccattgctaagataaatggcatataaaagttatacaaccagtgttcccataacagtttctgtgaaacatgttgcttttattattgcttaatccactaaaaaaaagaaacaaaatacagcaacaaaaacaaagtgtgacagagactaggcccccgagaaaaaattttaagaacacacttgttgaggccgacgccccacaacggttaggaaaagtggcacatccgtgttcccaaagaaccaccggccacggaaacggttgtggctctccaccgtaaaaaacccgggggaacagggtctgagaaaacaagagagtatgggagcaggggcactacaagagaccggaagcgaataatacgcggttgta

SEQ ID NO: 566592 - DNA, 197 bp, Homo sapiens
  misc_feature (7)..(7): n is a, c, g, or t
  misc_feature (12)..(12): n is a, c, g, or t
ttagtcnggacnacatggtgaaacccctctttttctacaaaaaataccaaagctagctgagtgtgggtggcatgtgcctgtaattccggctacttgggaggttgaaacaggaggatgcttcagcccaggaggcagagtttgcagtgaggtgagatcatgccactgcactccaatctgggcaatagaaccaaatcctg

SEQ ID NO: 566593 - DNA, 754 bp, Homo sapiens
  misc_feature (749)..(749): n is a, c, g, or t
catagataactgctttttatgacatattgaagctgtgtggcgactgtgtcaaggaagcctattggctccattttttttaacagcgttgtgcatcaatgtccttgactctatcacattttggtgattctcacactatttcagaccttttcattattattatatgtttcatggcgagctgtgatcggtgattcttagtgatactattgcaacagctttgagacgccatgaaccatgctcatatattataggacacttaattggtgtatatagtgttttgactactctaccaactgaatgctgttttatctctctctctctaaatgtgtgtacctgttgcctgagacacagcagtattgtaactaggccacttaataacctaattaattggcttgattcaattaggcctctaactaatgatgatgggctctaactatgtaagtgacaggaagagtctcgcatctctcactttaactcaacagccagaaagaattaagcttaatgtgtatggcatgttgaaagtcaagatatgctgctatgcctcttgctccaaacagagaagttgtgaatataagggataagttactcgcggaaattaaacgtgctactctagtgaacacatgactaataagaacgcagtacagccttcttactgatatggagaaagtttgagtagcctagatggaagattaaccagctgcacattgccttaagcgcctctacacaggatggccctattctcttcatattancgctg

SEQ ID NO: 566594 - DNA, 930 bp, Homo sapiens
agcggagaggctgttgggaggttgggcctcaggcggtggaccagaaggagcttactcgggccctgacgttgtcaggaggccctgggggatcctgctgaagctgcgatttggcgcagagctgagatgtctgagctctagacacagggacctcagtgtcaaaagatttgggaagatgaattgggtcggggggtcccggtccaggttctgatcaagcaggaaagaagaaagcaaaaggaatattttgaaaaacacaggttaaaatcaaaaatgaaatcactgggagttttatctcctgtcaaaaattctgctgtcagcttagacattcttaacctatatatggtaaatcagatatcttgcaagaagaaaattcctgaaactgtgagaaaaccaacccatgtgaacatgaatagagacataaaaatgcccctaagaaagcataatttagaacttacaatgtcgcctcactgtgtaccttctaaactctgccttgatgatacagaaaccaatgtaaactgtcaaagactaagtagcaaggaagatcttggcccagtccagtcacaaggcatggactcatatagtatgcttcaccctcagttcagcaaaatagagaactgcagtttcactccatcatctttttcagtggagttaccttctaacagacatatttcaaaactaaatttcacatctggaataagcacctactcctcagaaacttgcatatgaaaaaaaagcagaatgaccagcgcagtactggttaactgttctgatttccttgctttccaaattaaattacaaggtcagatgttttcagtccatcagataaacgtagacgaattggggacattctttgaaggattaaacagtcaggacataggattttattaataaaaggcctggtgtaattatggtgaagatggtaaagccgggtta

SEQ ID NO: 566595 - DNA, 169 bp, Homo sapiens
ttggcgtgaggccaacgggtccgaggggtgaaagaggcccccggggcatcactgggaagcctggccccaaggtatgtttttggcctcctgggcggtgggcggcgtgaacccaagttgcaaggctacagagacgtggagcgtctgagggtgtctgtgcaccttttttatt

SEQ ID NO: 566596 - DNA, 100 bp, Homo sapiens
tagctcggaccgtcgtgtcatgtgattgctgcataaaattaggcctattctacgcccaaattgttgcggtccaactgtttcatatctttggacatcataa

SEQ ID NO: 566597 - DNA, 1055 bp, Homo sapiens
agcggagaggctgttgggaggttgggcctcaggcggtggaccagaaggagcttactcgggccctgacgttgtcaggaggccctgggggatcctgctgaagctgcgatttggcgcagagctgagatgtctgagctctagacacagggacctcagtgtcaaaagatttgggaagatgaattgggtcggggggtcccggagcttggaaggttcttccatttgtttgtgtcctcttttatttcgttgagcagtggtttgtagttctccttgaagaggtccttcacatcccttgtcgacctgctttagttttgtggaaagccaatgtccaggttctgatcaagcaggaaagaagaaagcaaaaggaatattttgaaaaacacaggttaaaatcaaaaatgaaatcactgggagttttatctcctgtcaaaaattctgctgtcagcttagacattcttaacctatatatggtaaatcagatatcttgcaagaagaaaattcctgaaactgtgagaaaaccaacccatgtgaacatgaatagagacataaaaatgcccctaagaaagcataatttagaacttacaatgtcgcctcactgtgtaccttctaaactctgccttgatgatacagaaaccaatgtaaactgtcaaagactaagtagcaaggaagatcttggcccagtccagtcacaaggcatggactcatatagtatgcttcaccctcagttcagcaaaatagagaactgcagtttcactccatcatctttttcagtggagttaccttctaacagacatatttcaaaactaaatttcacatctggaataagcacctactcctcagaaacttgcatatgaaaaaaaagcagaatgaccagcgcagtactggttaactgttctgatttccttgctttccaaattaaattacaaggtcagatgttttcagtccatcagataaacgtagacgaattggggacattctttgaaggattaaacagtcaggacataggattttattaataaaaggcctggtgtaattatggtgaagatggtaaagccgggtta

SEQ ID NO: 566598 - DNA, 536 bp, Homo sapiens
agcggagaggctgttgggaggttgggcctcaggcggtggaccagaaggagcttactcgggccctgacgttgtcaggaggccctgggggatcctgctgaagctgcgatttggcgcagagctgagatgtctgagctctagacacagggacctcagtgtcaaaagatttgggaagatgaattgggtcggggggtcccggtccaggttctgatcaagcaggaaagaagaaagcaaaaggaatattttgaaaaacacaggttaaaatcaaaaatgaaatcactgggagttttatctcctgtcaaaaattctgctgtcagcttagacattcttaacctatatatggtaaatcagatatcttgcaagaagaaaattcctgggtatgtctgaaaggaagatctgcaaagatttttgcttcaatgactagtttcctatgtcatcacttgaattatttattacactttcctgggatgttaatcatagaagtctaatactgcaaaataaagtccattttgtcatataaaaaaatttacagtgaaaaa

SEQ ID NO: 566599 - DNA, 383 bp, Homo sapiens
  misc_feature (45)..(45): n is a, c, g, or t
gcggccgcgactactactactactacacaagttcgcaggacgctncgaccccagacaagatgcatattcctcagaactgcgggaggaggcttgtttcccttccctcccggcgacaagctccagggcaaagcagtcacctccggcggcccagcacttccatcagaacaacttcttcactgactgctccagtcgtggggatcatcacttaaccacccaccaagttcaagaccgaatattccagctgcacccttcgtgtttccctatgtttgctgatagatgggcatgtctccaggaaccaaaaagccctcagcctgagtgtaatctccctgacccttgttaattccttaagtctaaagatgatgaacttcaaaaaaaaagtcgac

SEQ ID NO: 566600 - DNA, 117 bp, Homo sapiens
tccgacgcccaggtctaccgtctggttaccggtgaaccccaacgcattccatcacgaacattcgccgccctgtgcgacatcttcgactgcacgcccaacgacctatttgagccgtac

SEQ ID NO: 566601 - DNA, 285 bp, Homo sapiens
gtgacctagtatataatgataatttaccatgatacttgataaaatagttttgtgtgttcagaataatttcttttttctttacctttgaaaacaatgcatcgatagttaattttctcctaaattgtctgtttttatttccataaaaggtatttattgaatatctccttttaatataactaggcattgtgtgatcaaagtaaaataaatatgttcttgtttctggaattactaaagctttgaaaatggacttatcgacctcaaaccaatgggacatattcccatgtg

SEQ ID NO: 566602 - DNA, 326 bp, Homo sapiens
tacttgggttacacaacagtcaattattctgaatttttgatccaggactctgggttgtagcatggagacagagggaacattccaatctctgggtttaaaaacaaagacaggccgggagcagtgacccacacctgtaatcccagcaatttgggaggctgaggcaggtggatcacctgaggtcaggagttcaagaccagcctggccaacatggcgaaacccttctctactaaaaatacaaaaattagctgggtgtggcggcaggtgcctgtaatcccagctatttgggaggctgaggcaggagaatctcttgaacccggagggagagg

SEQ ID NO: 566603 - DNA, 432 bp, Homo sapiens
  misc_feature (173)..(173): n is a, c, g, or t
  misc_feature (180)..(180): n is a, c, g, or t
  misc_feature (217)..(217): n is a, c, g, or t
  misc_feature (230)..(230): n is a, c, g, or t
  misc_feature (313)..(313): n is a, c, g, or t
  misc_feature (322)..(322): n is a, c, g, or t
  misc_feature (324)..(324): n is a, c, g, or t
  misc_feature (335)..(335): n is a, c, g, or t
  misc_feature (373)..(373): n is a, c, g, or t
  misc_feature (380)..(380): n is a, c, g, or t
gggtgcggcctttgtctctcgctgcagtcagagctccaggtctggttcttacttctcctaaaggcccaggctgtgtggccccgtgtcctgcaggtattgggagatccacagctaagacaccgggacctcctggaagccaaaaatggtgagatgagggtccgacatcccgacanaggagangggactggttggaaccggtgatggctgtggcgggatncaggcctccccgncagtcagctccacatctgctcccccattctccttgctacagctcgcctcatcctgtttcagccattggcagctgcgctgacanccggcaacngncgtcttgtcgntacaatgcgcggtgactaccctggcctggagccctctntgggcanctctgcaaccgcagcgtggcgtctctcccagattgtgcaggaccagggggtg

SEQ ID NO: 566604 - DNA, 513 bp, Homo sapiens
aaaaagtatgcttatcttataaaaatatgtcactcgatcttctggaatgcttagcaagaagtcatttctacacaaaatcaaggcaaacagatactctataatagagtctagctataatttcaacaacaaagtgaaagctaatgtacttacgaagtatatacaaaggcccactgataatgctgcactcgcaatgctaaacccaatgttaactaaagtcaacatatccgctctacgcttactggcaccaattcatgcctacatcatgggaacgtacctcttttacagaatgcagatcactgctaacaatccacatgactaagtcttcagtttcccttgcttaacatttgttagcatatatttcagcaaagattaacagtataatgaatgttgagtagtaaaatcctatttaattcgcttcaatttaaaaatgagatatgctgctatggggaacaaatgacctcttgagatttacaaccccctttataaaagtgggaaagctgcctccctaaaaaa

SEQ ID NO: 566605 - DNA, 476 bp, Homo sapiens
cgagtgccgattctgatgtctggtaatatgaatgcctcggcttagttgctgtctgtcaagatggtcttcgctggtctggcccctgtgcctttccatatgtatcttaatatccgcttgtcaatttactgtatatgtgagtgtgtctctttctggaatttctactgtgatttgctgaccttgcatcaacactgttttaattgctataggctgataaacgtagtcttgatgtctggtaatatgaatgcctcggcttaattgctgtctgtcaagatggtcttcgttggtctggaccctgtgcctttccatatgtatcttaatatccgcttgtcgagttgactgtatatgtgagtgtgtctctttctggaatttctactgtgatttgctgaccttgcatcaacactgttttaattgctataggctgataaacgtagtcttgatgtctggtaatatgaatgcctcggcttagttgctgtctg

SEQ ID NO: 566606 - DNA, 328 bp, Homo sapiens
  misc_feature (293)..(293): n is a, c, g, or t
  misc_feature (299)..(299): n is a, c, g, or t
atcactacttcctagtttcagagctttttcaacacctcaattggaagcctcatacccgattcagcagtcactctgcataccccctcctgcagcccctggaaacctctcatctactttctgtctctgttgattggcttagtctgagcattgcatataaatgaaattgtacaatatatgacctttcatgtctgcttcgttcagtgagcaggtatttaacgttcatatcacaccatggataagttttattttctttttagaccctaactaaaaagaaaaaaaattgtaaaaaacanaaacanggaacagaaaaagaatataggatggagat

SEQ ID NO: 566607 - DNA, 135 bp, Homo sapiens
acctgtaccgtgttatcgatgcactcaggaagaggaggcaggaaatcacctgaatctggtaggtggaggttacagtgagccgagatcatgccattgcactccatcctgggcaaaaagagtgaaaccttgtctcac

SEQ ID NO: 566608 - DNA, 146 bp, Homo sapiens
cacgctctctctgtggggccgaggctggagtgcagtggcgcgatctcagctcactacaacctccgcctcccaggttcaatgcaatcctcctgcctcccccctgagcgagcctcaccccacgagagcgtcccccacagagagagcgt

SEQ ID NO: 566609 - DNA, 244 bp, Homo sapiens
gttttaaaaaaaaaaaaaaggtagctgttattcaaacccccgggcccccccccccccaaaaagccaaaaaatagttcctgtgacattccgccttccttccatgtagtcccttttggtaatctacccccaagcttgtggacttcccccccacaaaattgtaagcgttgttaggtttttgtgtaaaattcttgctgtagcgtggaaaactgtgattggtgagtcaaccgtctgtggctaccagtta

SEQ ID NO: 566610 - DNA, 313 bp, Homo sapiens
  misc_feature (37)..(37): n is a, c, g, or t
cactcagtcgtgacgggacgtgtgaggaagtataagnaaaataatgttatcggtagtatatgaattcagagtcatgaatgatggtaatgccaaacaaccacaagttgtccacgtaagtggctcagatagtgacacttttgatttctgatggttcaatgtataataactttgtttcatgcataaaattatttaaaatattgatatcattatcttcaggttatgtgtataaggtatatatgaaacataaaagcagttcttgtttagacttggatcccatctatctctattgtgtatatgcaaatattccaaaatc

SEQ ID NO: 566611 - DNA, 392 bp, Homo sapiens
taattcgggggttttttttttggcccctggggttttttttttttttttggcccaaaaaaatttggggtttttttaaaaaaccccgctttaagaaaaaaagaaaatttggtcatttaaaaaacccggggggaaaaaatttttttttaaggccccaaagggggtttttatttttttaaaaaattttttttaaaaaaaaaaaaattttaaaaaaaaagggaaaaaaggggcccaaaaattttttttttccccccccaaaagaaaattttccccccatttttttttttaaatggggaaaaaagacccaaggcccggttttccccaaaaaaaaaaaccttgggggggggaacttttttaaaaaaaaattttttaaaaaaaaacccccttaaaatttt

SEQ ID NO: 566612 - DNA, 673 bp, Homo sapiens
  misc_feature (190)..(190): n is a, c, g, or t
agtaaggataatggtgggtaaaatagatttaaaacaggaaaattggtggtaataaatttaaatgggagtattatatttattaaacttttatcaatggttagaaagtagggtattaaagattttaggaatgtaataatgatgtatgaaaaattatgtaataaaatgtttttatgtatttaagattattgcnttaggatagtctgtaagtgataagttgttaaaaaatgtatattttggttatcttcatgctctcttgatgcattagggggtagtaagatgaaatataaagtaaacatgcatataaataaaaagcataaagctaaaataagtaacctgatggtaataggtgaaagtggtaacctgttttaactttgaattcttgccgggtgaggtggctcacgcctgtaatcccagcactttgggaggctgaggcgggtggatcatgaggtcaggagttcaaaaccagcctggccaagatggtgaaatcccgtctctactaaaaatacaaaaattagccgggcgtggtggcgggcgcctgtaatcccagctacttgggaggctgaggcagagaattgcttgaacccaggaggcggaggttgcagtgagccaagatcgcgccactgcactccagcctgggtgacagagcgagactccgtctcaaataaaaagcaac

SEQ ID NO: 566613 - DNA, 426 bp, Homo sapiens
tgtaacgctggcagtcccttctacgctgcgtcagtgtgcatgcccggattatcctgaattacattttccaggtagtacatgatatttatgattaagtaatataaattggtagtgatcacatcagtatgtaaaatgttcatgaaattagtgataacatgaaatttaactatgacctaagatatccagcttatgcatgacagtgattcatcataatccaagcataggatttaagtattaagtctgcaagtgaactgatcaataacacctacaccatgtacgagttttaacacagtaacctgaaaccagagacaaaaaataacctgatatactcttaacgatatcgagctctattacaccttaaaataatcaagcacaaaagaaaaacatctatagccccaaaaatgctttaaaaggtaatgcccaagt

SEQ ID NO: 566614 - DNA, 113 bp, Homo sapiens
caggagctaaccgatagccgacaggtctttgtgttgtatgatgatcctattgaggattgtccgcaactccttcacgctgatctccatgtcctcccctgtcgggctagtcgggg

SEQ ID NO: 566615 - DNA, 196 bp, Homo sapiens
ggagtagaaggtagtgcttgggaggctgagttaaaaatcccttagcccaggagtttgaagttgccgtaaggctatgagcactccactatactccagcctgcgcgacagtgagaccctgtagctaaaacctttttttgaatttttaaagggccaggcgcagtggctcactcctgtaatcccagcacttcgtgggcag

SEQ ID NO: 566616 - DNA, 192 bp, Homo sapiens
ctcaggccgtgcggccgatccctactatgcacataccgacagacgacgtgaacgaaacccctcaagcggcatttcggacacggcggaagcggggcaagccaggctggtttgcgcagtccccctgaattcactttgcctgcatcccctgaaacgattccctgaaagagagacccgccatgtccgccaacaaat

SEQ ID NO: 566617 - DNA, 116 bp, Homo sapiens
gaagaagaaatgatggagtggacctcctacaccgtcgcagttaagtccagcgacatcctgggagcaggcactgatgccagcgtgttcatcatcatcttcggggagtgatgctttga

SEQ ID NO: 566618 - DNA, 105 bp, Homo sapiens
gggcaaagcttaaacataagatctctcagttaagcatacacaatcatgctacaagctgagggcagttactacctctctcacaatgacaactagtgactcggctaa

SEQ ID NO: 566619 - DNA, 795 bp, Homo sapiens
taatggtcttcagctgcatccatggtgctgcaaaggacatgatttcattcttttttctggctgcatagtattccatcatgtatgtgtaccacattttctttattcagtccatactattgatggacacctgggttgactctatgtcttgctatgtgaatagtgctacaataaacatatgagtgcaggtatcttttggtagaatgatttatttttcttggttgtatacacagtaatgggattgctggttgagtgctaagtccatttttagttctttcagaaatcaacaaactgctttccacaggggctaactaacttacattcccaccaacaatgtataagtgttctctttcctctgcagcctcaccaacatcttttattttctaacttttgaataacagccatttgaatatgtgagaaggtatctcatagtggcttgattgcatctctctggtgattagtgattgagcatttttttcatgttgttggctgcttgtatatctcttttgagaactgttcaaacgtggactttggccactttgatgaggttattgttttgggtgttcaatagttagcatcttacgatctagatatatcctgggcagatggtagttaataattctttgtcaatgatggcgttatcgtggagtcctggataaactgggttaatagtccgggaatggttggggtgctggggtggtattgtggctggagattcagtctagtgggggtagaactaaaagggggagccgggggaaggggggcaagttgtgggcgggaggtgatgaagacggcttg

SEQ ID NO: 566620 - DNA, 104 bp, Homo sapiens
acggccgtgtattactgtgcaacaaactccctgctgtatagtgggagctactttgcttttgatatctggggccaagggacaatggtcaccgtctcttcagggag

SEQ ID NO: 566621 - DNA, 981 bp, Homo sapiens
  misc_feature (107)..(107): n is a, c, g, or t
  misc_feature (114)..(114): n is a, c, g, or t
  misc_feature (118)..(118): n is a, c, g, or t
  misc_feature (122)..(122): n is a, c, g, or t
  misc_feature (165)..(165): n is a, c, g, or t
  misc_feature (176)..(176): n is a, c, g, or t
  misc_feature (229)..(229): n is a, c, g, or t
  misc_feature (256)..(256): n is a, c, g, or t
  misc_feature (271)..(271): n is a, c, g, or t
  misc_feature (278)..(278): n is a, c, g, or t
  misc_feature (286)..(286): n is a, c, g, or t
  misc_feature (363)..(363): n is a, c, g, or t
  misc_feature (403)..(403): n is a, c, g, or t
  misc_feature (456)..(456): n is a, c, g, or t
  misc_feature (461)..(461): n is a, c, g, or t
  misc_feature (469)..(469): n is a, c, g, or t
  misc_feature (871)..(871): n is a, c, g, or t
  misc_feature (881)..(881): n is a, c, g, or t
  misc_feature (887)..(887): n is a, c, g, or t
  misc_feature (898)..(898): n is a, c, g, or t
  misc_feature (944)..(944): n is a, c, g, or t
  misc_feature (971)..(971): n is a, c, g, or t
gggacccaggtgtgtttcgcttgaaccttatcttgggtttctagccagtgaagggctggctcataagtaggcgctcaagaaattccgggagtcagttggtatctgtntaggggnaggncgtngctgttgagatgctcatattcagattgggactgtggaaggctnggggaggacangcaagtctgactgtaattgggcacatgagcttttctcacggcagccccattcngtttggggctccccatgtttcctaaangttctgttccccatngatggtngctgccgntcaccccaggttcccaaaggtgggggcctacccatgaccactgaagttctcaagagcttagcagctcctccagcccnggagaagaagccacaggtggcctacaagacggagatcatnggaggggtggtggtccacacacccatcagccagaacggtggggatgggcaggnagggngtgagccngggtcccacaccatccttcgaaggtctcagagttacatccccacgtcaggctgccgtgcttccactgggcctcccctcattaagagtggttactgcgtgaagcaagggaatgtgcggaagagctggaaacgtcgcttctttgcacttgatgactttaccatctgctacttcaagtgtgagcaggaccgagaaccactgcgcaccatatttcttaaggatgttctgaagacccatgaatgtctggtcaagtctggtgatctcttaatgagggacaacctgtttgaaataataacaagctccaggaccttctacgtacaggcagacagtccagaagacatgcacagctggattaaggagattggcgcagctgtccaggccctcaagtgccaccccagagaaacntcctttctgntccatntcaactcaganatgaattcctctcaagcaggcatgttttatttggtgatgtagcaancagcctggtcccgagatgcagctgaancccaggctgt

SEQ ID NO: 566622 - DNA, 570 bp, Homo sapiens
  misc_feature (29)..(29): n is a, c, g, or t
ctgaaaatgaatgcatcaaagagctaganaataagtcaagaatcacgtggtactaggcagcgtgaattttgaatctcttggttataaaacttctggttaggctgggagctgtggctcacacctgtaatcccagcactttaggaggtggaagtggatggatcacctgagatcaggagttcgagaccagcctggtcaacatggcaaaaccccatctctactaaaaatgcaaacattagccgggcatagtggtgcatgcctgtagtgccagctactcaggaggctgaggcgggagaatcacttgggaggcagaggctaccgtgagctgagatcgcgccactccactccaacctgggcgacagaaggagactctgtctcaaacaacaacaacaacaatttctggctaataattgcatattgtatatatgcgtgtgtgtgtgtgtgtgtgtactttctgtaacaaatgagctttgtataaatgtttgcaaatcttagtcgtgacttcagcatgaaagcttagtttattaagaaataatttccataaagaatcctttccaaataatcaaaaaaaaa

SEQ ID NO: 566623 - DNA, 867 bp, Homo sapiens
  misc_feature (107)..(107): n is a, c, g, or t
  misc_feature (114)..(114): n is a, c, g, or t
  misc_feature (118)..(118): n is a, c, g, or t
  misc_feature (122)..(122): n is a, c, g, or t
  misc_feature (165)..(165): n is a, c, g, or t
  misc_feature (176)..(176): n is a, c, g, or t
  misc_feature (229)..(229): n is a, c, g, or t
  misc_feature (256)..(256): n is a, c, g, or t
  misc_feature (271)..(271): n is a, c, g, or t
  misc_feature (278)..(278): n is a, c, g, or t
  misc_feature (286)..(286): n is a, c, g, or t
  misc_feature (363)..(363): n is a, c, g, or t
  misc_feature (403)..(403): n is a, c, g, or t
  misc_feature (456)..(456): n is a, c, g, or t
  misc_feature (461)..(461): n is a, c, g, or t
  misc_feature (469)..(469): n is a, c, g, or t
gggacccaggtgtgtttcgcttgaaccttatcttgggtttctagccagtgaagggctggctcataagtaggcgctcaagaaattccgggagtcagttggtatctgtntaggggnaggncgtngctgttgagatgctcatattcagattgggactgtggaaggctnggggaggacangcaagtctgactgtaattgggcacatgagcttttctcacggcagccccattcngtttggggctccccatgtttcctaaangttctgttccccatngatggtngctgccgntcaccccaggttcccaaaggtgggggcctacccatgaccactgaagttctcaagagcttagcagctcctccagcccnggagaagaagccacaggtggcctacaagacggagatcatnggaggggtggtggtccacacacccatcagccagaacggtggggatgggcaggnagggngtgagccngggtcccacaccatccttcgaaggtctcagagttacatccccacgtcaggctgccgtgcttccactgggcctcccctcattaagagtggttactgcgtgaagcaagggaatgtgcggaagagctggaaacgtcgcttctttgcacttgatgactttaccatctgctacttcaagtgtgagcaggaccgagaaccactgcgcaccatatttcttaaggatgttctgaagacccatgaatgtctggtcaagtctggtgatctcttaatgagggacaacctgtttgaaataataacaagctccaggaccttctacgtacaggtacaatgtacaatctgaagccatatcaagaaatttttatactcttacattaaaatccattggtcaattttgcactttga

SEQ ID NO: 566624 - DNA, 645 bp, Homo sapiens
ccggtgctcttcattcctgcattaccttgcttgcatctgggatattttttattcttgaagaattctgtttagtatttattttagtgcaggtatatttttaaaaacctttcttggtttttatttaactgaaaatatctttattttaacttttctttcaggcattttatcttcttatgcaagtctatgttggcacttcttttccttaagcacttggcagatgacattccattatcttctggttttcatcatttctattaaagttagggttgagagagaattctccatgggctcttgtgggtctgcacatcttttaagcaaaggaattgcctgcatttgttctggactgttttttaagaatgttgtggctgagcacagttgctcacacctgtaatcccagcactttggggggctgaggcaggcagatcacgaggtcaggagatcgagactatcctggctaacacggtgaaacgccatcctactaaaaatacaaaaacaaaattagccaggcgtggtggcgggcacctgtagacccagctactcgggggctgaggtgggaggattgcttgaacccaggaggcggaggttgcagtgagccgagatcgcaccactgcaatccagcctgggcaacagagcaggatctatctc

SEQ ID NO: 566625 - DNA, 335 bp, Homo sapiens
  misc_feature (225)..(225): n is a, c, g, or t
  misc_feature (235)..(235): n is a, c, g, or t
  misc_feature (241)..(241): n is a, c, g, or t
  misc_feature (252)..(252): n is a, c, g, or t
  misc_feature (298)..(298): n is a, c, g, or t
  misc_feature (325)..(325): n is a, c, g, or t
aaagctactggactagatgatttctgggatgctttctacccctaatggtgtaattttataaacttaatattgagtcagagacttggaagctgaaatcatagtgcctaaaaaatcttggtaagagccatggatgttttgcaggcagacagtccagaagacatgcacagctggattaaggagattggcgcagctgtccaggccctcaagtgccaccccagagaaacntcctttctgntccatntcaactcaganatgaattcctctcaagcaggcatgttttatttggtgatgtagcaancagcctggtcccgagatgcagctgaancccaggctgt

SEQ ID NO: 566626 - DNA, 907 bp, Homo sapiens
gtgcccccagacccctgttcctttggactctacttctgtgtgcagccaccatttggcctgctggggagagaacgagccgcgcaggtgtctctggagtgtcatccctaactggtctgggccccctgcagaacctgtcttcatatacgggcagtgtggcaccaattccacactgcagctatgttgtgtgacgcagcctggggcctctggcaggtggtaagtggtggccgacgcaagcaccaccctcgacagaaccctgagctgtcaactggagcctccctgctatcccctgtagcccagatgggggcctcgatcgtggtgctccctataggcaccagcattcagtattcgttcgttgcgccttgttctttacccaggctggcttgagtttgactagcacgcaacgtgtccggagtacggcagcgcaaagaccctttgtggcaagaccgatatcctccataactccttgagccggagtatctcttggcacacacacatccactcgattcgattgggatcctgcctacctctgagatgccaactagtttcaaggtccacgccgcatggaacgacacgctacgcaggacgtttgtgccaagtggctatgcactggcgcttcacgggtccaggcctttgtcctaggtcccagccggatcagcccgaaccacccttctgccgtcctgtcacgacgagactagactacctgttcagcgtagaggtgcgcccgtggtctggacgcctctcctccggggcaaaccggttccctggttagcggctggagcgtagccacattgtggccagggccctgacgtgccccttcaatgcaaggagcagtcacgtccatcgagcgatgcaatatgcaccgaggcgctcttccagctttggaccagctactgtggcggcatccctc

SEQ ID NO: 566627 - DNA, 299 bp, Homo sapiens
gcccctgggttttaagggaccccctgggtgggtttttgtcccttttaccccccccaccccagggagggggtgttatagtcccaaaggataagcaaaacctatttttggttgggtttcccagcccagacccagggacccttggccccaaggttagttttaagaaccgccccaccccctccggttccaaatttgggcctcccccccatagattgaaattcccctggccccagccctttcctgcctgggctggcttgggacccctcctttttgccagggggcaataaaagccggggccggga

SEQ ID NO: 566628 - DNA, 193 bp, Homo sapiens
atatataaccagttagctgccttcgcctattggtgttcttcctaatatctacgcattccaccgcttcactaggaattccgctaacctctttataattctattttgccaggatccaaagcggactgaagttgagcttcaacatttaactccagacttagcaaaaaacctacggacgctttacgcacaataattc

SEQ ID NO: 566629 - DNA, 165 bp, Homo sapiens
caaaaaaaaaattaaaattaaaattagtcaggggtagttgcacacatctgtagtcctagttgccttggaggtttaggtgggaggattgcttgagcccagcagtttgaggctgcagtgagttatgatcgtgctgctgtgacagaatgagtccctgtctctgaaatt

SEQ ID NO: 566630 - DNA, 155 bp, Homo sapiens
tcccgaagtatctgacaatttggaaatacgtcttgtcagaaaaactcacacttgggaacagaggtctcaaggacatatcttgtatttcaacatcaggtgaaaatcactgtatctgatcagcgtgcgtgtgtggtctgtgtaatctgtggtagaag

SEQ ID NO: 566631 - DNA, 724 bp, Homo sapiens
ttctaaccaaaaaaataaaccctcgtccacagaagctgccatcaagtatttcctcacgcaagcaacgatccataatccttctaatagctatcctcttcaacaatatactctcgggacaatgaaccatgaccaatactaccaatcaatactcatcattaataatcataatggctatagcaataaaataggaatagccccctttcacttctgagtcccagaggttacccaaggcacccctctgacatcggcctgttcttctcacatgacaaaaatagcccccatctcaatcatataccaaatctctccctcataaagtaagccttctcctcactctctcaatcttatccatcatagcaggcagttgaggtgattaaaccaaacccagtacgcaaaatcttagcatactcctcaattacccacataggatgaataatagcagttctaccgtacaacctaaataaccattcttaatttaactatttatattatcctagatataccgcattcctatatcaattaactccagcacagacctatatatatcgcactgaaaaaggtaaatgataacacccttaattcaatccacctctctacctaggaggctggcccgtaacggttttgccaaaatgggcattatcgaagaatcaaaaaaatagctataatcaataatagcaataactctttactttatttactaggtaattatcaatataatatcccattt

SEQ ID NO: 566632 - DNA, 408 bp, Homo sapiens
tattgatatcttttggacatgccgaaagtgaaggggtcgtaacatctacaactgcgtcagtgagctgcggtcacggagggtgaacattgtgcaaacagaggagcagtatgtgtttatccacgatgcgatccttgaagcctgtctttgtggggacacctctgtgcctgcttcccaagtaaggtctctgtattatgacatgaactaactggatccacatgacaaactcaagccagacttaagaggaattccggacgctaaacatggtgacaccaacgctgcgagatgaggactgcaggatcgcactgttgccgcggaaccataagaaaaaccggtgcacggacatcctgcacccagaatcgctgcctgcccttcctcatcaccatcgatgggaagagcagtatctacatt

SEQ ID NO: 566633 - DNA, 1028 bp, Homo sapiens
ataaatatggtgatgacaaagaaatcgacccttttcgtttttgtacttgttctggcttatttatgtgtgtaaaatttggtctcccgtttttactgcgttagtagtttgataatcatcgttccggggatctatcccttattcatgtgccgccattggcaaggccaagtttctacaccactgatcttacgccttccgcattcgcttcctaccggtaatgaggcttccaatttttccaagaataaggatccgggattttcaataccggtacgcttatcttggtaatacccaactgatggaccgactagctggcaatcctcttatgtcactatgttccgtgaatggaatcactctccatgaagaacctgtcgactggcgcgcagcacccgattcatggtagtctttaatttgggcttgtggatggatatcatcaaaatcattgttgagccgcatagttattgtggcaccctaagtacccattaagagcttgcactcgatttcagagccccgaatcctcatctataatacctgaaacttcctatcactaaacggatttcctgtgcttgttacattaccaaactgtcaagtgaacccgccgttatgtaaacgattgatttagtgtcgttacaacaataagtcacgggtgaagttcacagacagaaaaaagccctaagtttttcgacctgaaggccagaatgcagttggtagagctacagacacaaagaccaatacgctcttgagctatatggaagactgtgaaagagctggggaggttcatgctacgtatacggtggcttctacaatagctgctggctgttgtcactgagataaaagaactgatgggtcagaatcttctaccacgtttctggatacagtgaaatagctaacctctgtttcaagaatgcacgttattaagtcaaaggaacaatgtgcaattgatatgtttttagatgagagagacaaaattcaaagctaacaattaagcttgcaaagaagtattaataatcaccttctgcaacaattctaagttg

SEQ ID NO: 566634 - DNA, 1083 bp, Homo sapiens
  misc_feature (1028)..(1028): n is a, c, g, or t
tccgggcgtcgacctgtgggtcctggtcgtatgtgagtcgtcgttcctcgtatattggtgtgtaggtctgccccttgtgcttgtgctgggacccctctccgcgggtgtttggctctcgctgttgcctgcatgtagacgtcgctcccctggtggcgcgttggtgccccctgtgttgttctcgatcagcgggcctgtctctttgcacgttgtggccctgcgcccccttttttctcttgggcccgcggcccgggccttctggggatttggccccagaactcggactttgggcccccccacagccgggtggccccctgccatgggatgggccccccctgggtcatgacctttcgggccttggcagcccatgtctggttttttctttggttaaagctgggcctgcctccctgggaagatggggttctgagacccgtgtatccggtccgggacttggaccggagtccatgtctgctttttcctctgagccccgctgcctggagagggtctcgctgtccctggctggctcctaggggaaccagacccgtgacccccagaaagccttacccccatcccagggctggctctgccctaagagaaaattgccctaaatgaatctcgttccccaagaactacccccttttcagctgagccctggggactgttcccaagcccgtgaaatgtgaaggaaagtggggtccttcggggcgatgctccctcagcctcacgaggagctctaccctgctccctgctttggctgaggggcttgggaaaaaaacttggcaccttttttcgctgtggagtcttgccaccactttctgatcccgaggtgtacccctaaccacttttcccccgaggctcttggcctttgcactttattttatacccgtgcccttgctcggcgcccacccacccccctcaagccccacgcacgccctcaccacggccccgggagggaagtgtgagcgcccttggtatgacttaaaattggaaatgtcactctaacccacttaagtcatcatgtgtgaaccacnactaggacgtgtgtaaatatgtacctttgtctttttctccaaagtaaattgttta

SEQ ID NO: 566635 - DNA, 251 bp, Homo sapiens
  misc_feature (4)..(4): n is a, c, g, or t
  misc_feature (15)..(15): n is a, c, g, or t
  misc_feature (27)..(27): n is a, c, g, or t
  misc_feature (40)..(40): n is a, c, g, or t
  misc_feature (44)..(44): n is a, c, g, or t
  misc_feature (63)..(63): n is a, c, g, or t
  misc_feature (65)..(65): n is a, c, g, or t
  misc_feature (74)..(74): n is a, c, g, or t
  misc_feature (81)..(82): n is a, c, g, or t
  misc_feature (102)..(102): n is a, c, g, or t
  misc_feature (105)..(105): n is a, c, g, or t
  misc_feature (122)..(122): n is a, c, g, or t
  misc_feature (147)..(147): n is a, c, g, or t
  misc_feature (154)..(154): n is a, c, g, or t
  misc_feature (159)..(159): n is a, c, g, or t
  misc_feature (179)..(179): n is a, c, g, or t
  misc_feature (202)..(202): n is a, c, g, or t
  misc_feature (207)..(207): n is a, c, g, or t
  misc_feature (224)..(224): n is a, c, g, or t
  misc_feature (234)..(234): n is a, c, g, or t
cttngcaaaccccgnctttactcaatnccctacattctcntctntggtctctccccgggcttncntcatggccnctgaacnnatcacgttgtatgctatgcnccnactgtgatggaaaacgnaatgagtataacgtattttatatcngtattcngacgntatagagaatattctatgcntctatgacgtgcttactactgcngtgcntttgtcattagtcgtcntgttaatacngtacgtttatccgttgg

SEQ ID NO: 566636 - DNA, 807 bp, Homo sapiens
ggatttggctcagctccctctggccccggtcctgctgctggctgctcgtgtgctgcgcggcctccagtgcgggggtggtgatgtggctggctgccccccggcccattccccggtcccggacccgcctctgaggtacggtgcccccacgagagccgcagggcacccggaacccagggcttaccaggagcgacatattcagcagtctagctgatctggaccaacttcaagcatatcgcgcgcttcagcagcaacaatcgacctatcccatcaaccagacttacctgagatgtacgcagaccagagtctcatggccgtcctggtgggacgaacaggggccagcactaccttaaccatactagcagccttggcagagacccgaagagagcgagcgcttgcttggaggcccttcagccccaaccagaacccatcaggcccgtttcagctcagccgagacgcctcggcagagccaggataccgggctcgtgagccatctaacctagagctacatacagacgagacgccaccccgcataaccaatacctgggagaaaaacgaatccgcaatgacaccgcatagacagggaaatgtcagacctactatacgcagaagatcagagactaactgcgagacaaaccaaccccatgcaagcacttcggagatgacaaccgtggcatgataaacgataaaaggtatacaccatggcaatccaggacccattactacgccaagataatgccattaccaaacaccagaaggcccgaacataaaccgaaagacgcgaaacccattacacgatgacccaccaca

SEQ ID NO: 566637 - DNA, 413 bp, Homo sapiens
  misc_feature (60)..(61): n is a, c, g, or t
  misc_feature (78)..(78): n is a, c, g, or t
  misc_feature (84)..(85): n is a, c, g, or t
  misc_feature (90)..(90): n is a, c, g, or t
  misc_feature (116)..(117): n is a, c, g, or t
  misc_feature (135)..(135): n is a, c, g, or t
  misc_feature (137)..(137): n is a, c, g, or t
  misc_feature (143)..(143): n is a, c, g, or t
  misc_feature (151)..(151): n is a, c, g, or t
  misc_feature (315)..(315): n is a, c, g, or t
  misc_feature (413)..(413): n is a, c, g, or t
cccagcagccctcccgattggcgggcggggcggctataaagggagggcgcagggggcaanntactctaccgccgccantttaannccagntccatacaacgctccgccgccgctgnngccgcgacccggactgcncnccaganccccctgncgacagctccgtcactatggaggatatgaacgagtacagcaatatagaggaattcgcagagggatccaagatcaacgcgagcaagaatcagcaggatgacggtaaaatgtttattggaggcttgagctgggatacaagcaaaaaagatctgacagagtacttgnctcgatttggggaagttgtagactgcacaagtgatgctgctagtgctgatgttttggaactgagagaacacagactggatggccaattgagagtcccn

SEQ ID NO: 566638 - DNA, 415 bp, Homo sapiens
atggtattttctactgtttgtagcattgtagaagtgggcgaccatctcatgattaggccctccgcttgcctgtagatggtgtataggaatgctagtgatttttgcacattgattttgtatcttgggacttggatgaagttgcttatgagcttaagaagctcttgagctgaaatgatggggttttctggatatagaatactgtcatctgcaaacaaagataatttgacttcctctcttcctgtttgaatacgctttatttttttctcttacctgattgccctgaccagaccttccaaaactatgttgaataggagtggtgggagagagcatcgtggtcttgtgctgcttttcaaagggaatgtttcaagcttttgcccattcagtatgatattggctgtgggtttgtcgtatgtgt

SEQ ID NO: 566639 - DNA, 707 bp, Homo sapiens
  misc_feature (496)..(496): n is a, c, g, or t
cttcctcgctgcggtcgtccctccgaccacagacttacagactggctcctcccctcccattacaacacatggggggttatttgcctaaatgtactatgctctctgccttgcaagtactaggggaaagcagtccccatgatgtacctcattcacgatgtatttgctgatgaactcgttgaccgtcatgagggtctgggaccattcctcatctgtgtacctcgaaccaacttccactgggacagttcggcagccagcgatctcctggatatactccaaactagcaggacacacattggcatcgtcactgctaatatctgttgggcatagtactaagtgtgctttgcatgtggtcccctttcatcctcggccggcatggagaggtggggctccctgctcaaggctgtgtggctcatacacagtgctgtgcagctttgcagacagggccggtaagtctggttggctgggctgctctagttccctgcttgccaacagcctnctcacttctttctttgctcattttgtcactaagctgagaacctttgaacaaatagcggacagcgtggcaggtggcagtctcctggactctgccctctagcctgggactgattccaggcctcatcagttacaggccaggggatctgaggcaggttactgaacccgagtccttgatccccatttacagaatgggggtgatgacaacacctgtc

SEQ ID NO: 566640 - DNA, 354 bp, Homo sapiens
gagcctgccgccgtcccggtccatgcgcccgcccgcccatccggtgcctcctgcagaccgactgctgggacagggccggcgcggcccggccatggagtcctacgacatcatcgccaaccagcctgtgtgtcatcgacaactgtgttcgggggtgattaaagctggctttgcaggagaccatgattcccaaatacttgtttcccaagactaatgtcgtgtgctggcctgaagtcacatgctgggtgatggctgtgagcccatggagtgggtgacctcttcatctggaccaaaagcagatggagcaccgggttgctgctgaccatccgctaccccatggagcacggcgtggtgcga

SEQ ID NO: 566641 - DNA, 304 bp, Homo sapiens
  misc_feature (15)..(15): n is a, c, g, or t
  misc_feature (18)..(18): n is a, c, g, or t
  misc_feature (26)..(26): n is a, c, g, or t
  misc_feature (31)..(31): n is a, c, g, or t
  misc_feature (36)..(36): n is a, c, g, or t
  misc_feature (45)..(46): n is a, c, g, or t
  misc_feature (80)..(81): n is a, c, g, or t
  misc_feature (109)..(109): n is a, c, g, or t
  misc_feature (115)..(115): n is a, c, g, or t
  misc_feature (118)..(118): n is a, c, g, or t
  misc_feature (134)..(135): n is a, c, g, or t
  misc_feature (271)..(271): n is a, c, g, or t
  misc_feature (278)..(278): n is a, c, g, or t
  misc_feature (288)..(290): n is a, c, g, or t
gttgtgccggcgcantanatatagtnccgcnggggngagatgagnngaattataaccaagcatcatatagcaaggactannccctataccttctgcatcatgaatgaantagaantanctttgcaaggatagcnnaagctaatacccccgtaatccagacgagctacctaagaacagcttagagagcacatcccgtctatgttccaccaatagctgggaagattctataggtagaggcgacgaaacctaccgtagcctggttcatagtctngttgctntgtataatannntagttcaactttaa

SEQ ID NO: 566642 - DNA, 114 bp, Homo sapiens
tcgagctcagcccacatttacatctgcttagagaccaagcctggcaacaattatgacatcctgtctactgcatagagtatgacaaatagtgtctactatcctcaaaccttccaa

SEQ ID NO: 566643 - DNA, 401 bp, Homo sapiens
atattcagaacctacaaagaactcaaacaaaatttcaagagaaaaacaaacaacccagtcgaaaagtgggtgaagttccccttcctgtgtccatgtgttttcattgttcaattcccgcctatgagcgagaacatgcagtgtttggttttttgtccttgcgatagtttgctgagaatgatggtttccagcttcatccctgtccctacaaaggacatgaactcatcatgtggggtggggggaggggggagggatagcattaggagatatacctaatgttaaatgatgagttgatgggtgcagcaccccaacatgtcatatgtatacatatgtaacaaacctgcacgttgtgcacatgtaccctaaaatttaaagtataataaaaaaagtgggtgaagatatga

SEQ ID NO: 566644 - DNA, 1106 bp, Homo sapiens
agtgagcagcagagattgagagattgagagagagagagagagatagacggagatctctggaggcagacctcaaggatgacttctatttctatctggtatctcgatcatgggggggccctggccgggcagaccccccaacacttctcctgccctgaaacactggcctctagccaacctgctccgctgcttcacctgcgagcgatctctgcgggggctgcacggcgccagaccccatccagcaccaccagggcattgatccatccagcccagtcgatagccacagtctgtcggacccccgagtacacgggaccctgacactaggacatacccacaacccaaagacctttacctggaaggctaattctagcaccacgagtaggtcacctgcaacttaaccagactagtggtaccaacctagcccactggacaccgaccctagggacgcaaaagaccgaaccggcattgcaggcctataatttattacccaaaggatcccatttacccaaaggggcgcaaggacccagtgggaacaccggaagggcccttaacaccgtggatatagaaaacagcttaactcgggatggaggtttcccaaagcagattggagagaattatgccaagaggaagaaccaccaaaggaccttgcgaaaaaccaaaggaagtgggatcacatgacgattatggaacctattacaaactgcggcgacgtgaaacctataacccaacacattaacaccggcgagaactaaccgaccgcactcgggcaagcacaccacttggtggctgacgccagaaggacattgggaaacggcacaaggccacatcgagtcccaacgacagaaaacacccgccacccacaacacccataggcaggcggaacccacaagggggcgacacaagaaacctcaaaattaggcaaacaggggcccacaatcgggagccagagaattgaacgggggaaacgagccaacaaccggacaaagcgccacgcccacaagggcaacaaagacgaggttaagcagcacaaaacggtggggccaaacaaccgggcgcggacaaacacaaaacggagtacacacggaccaagttaacaacacagctagtgg

SEQ ID NO: 566645 - DNA, 868 bp, Homo sapiens
ggagacggcagatactgtgtctgtggtatctacccgtcagtagcacttggggtagccggtaagaaataaagatcgagggaacagtgactagtgcaggataatgcacgaaatgaagggaccaggtccctggatctagcgtagccctgtatagaggattcaaccataggtgatcgagttgaatcggcgaatagattattatatatgggtagcataggttatggagggaattgagagtgctacagcacccaggagtgatgaggtcttaacaaaaccctacctgtggcgatagtgaaatggcagtcacttaaaaagaccttggtcaccgaaaaagctcggtgaccgtaacaatacgtgctgcttcttaaatggaacgctggtaaggagggtcaaggggcatgtgctgtggtcgaattcaacgatgtgacgggaggaggcatgacaactaaagctgggggtagttcctaaaacaagcagttgtctgggaccggatagaccactgatacgtcggaagaagatcctgatggtgaacatgccacgagagcaattgcaaaaggtgatggcttacgcaccgatcgcggatgggggagggagcatgtgacccaagtattgagttcctatccgcaccacaagtatccttatataaatcgcggggtgcgggaaagagattattcacgcatgacctgcctgcggacgtgggacgacagcacttgttgtggcaatcggtctgatcagctgccggtggttaaaacagcgcccctcaggacactgtgaacacaccggcctatagggcgacaaacgatatgtgcccagaccattgagaggcagcgccaaaaaccaacaaaacacgtgggcgcgcgcaacaataacg

SEQ ID NO: 566646 - DNA, 301 bp, Homo sapiens
ggtcagaagtgaccagtgctttactcacaaagggaaggacagacttgggtaaggagagctggaggggaaggaagaagacccaactccagtggttagtgagagctctgctagcgtcgtgttgaagtttggtcctctttgaagtggacacagtcttccagggcagatcttcttaggctctggttgtggtgagctcgtctcttacattgtgcttacttagatcaatgccttttcagtgtttgtttaaatcaacaagtgttttcctggatgcctacagagctggaacctaaggtcccctaaacat

SEQ ID NO: 566647 - DNA, 169 bp, Homo sapiens
atgaattagaggatccgggcggccctcacgctggtgctcccaggagctgaggttccatgaacagagccaggtatcccaagaggcctccagaaacctgcaggtgccctgagaggggaggccttgccatagcaccagtgagtgtatgaggtcagctggagggggccgcgcg

SEQ ID NO: 566648 - DNA, 789 bp, Homo sapiens
  misc_feature (332)..(332): n is a, c, g, or t
  misc_feature (436)..(436): n is a, c, g, or t
  misc_feature (758)..(758): n is a, c, g, or t
  misc_feature (765)..(765): n is a, c, g, or t
  misc_feature (784)..(784): n is a, c, g, or t
gggggaactgaagccccagcaggtggcgggcggacatcttgggatccggagagtggccgggccggcagagcagggggccgaggacaccaggtctgttctcagagcgatgggccgcggagactgatctgccgccatgattggaggcttattcatctataatcacaagggggaggtgctcatctcccgagtctaccgagatgacatcgggaggaacgcagtggatgcctttcgggtcaatgttatccatgcccggcagcaggtgcgcagccccgtcaccaacattgctcgcaccagcttcttccacgttaaagcggtccaacatttggctggcnagcagtcaccaagcagaatgtcaacgctgccatggtcttccgaattcctctatacagatgtgtgacgtgatggctgcctactttggcaagatcagcgcaggaanaactatccgagaacaattttgtgctcaatatatgagctgctggatgagattctagactttggctacccacagaattccgagacaggcgcgctgaaaaccttcatcacgcagcaggggcatcaagagtcagcatcagaaaaagaagagcagtcacagatcaccagccaggtaactgggcagattggctggcggcgagagggtatcaagtatcgtcggaatgagctcttcctggatgtgctggagagtgtgaacctggtcatgtccccacaagggcaggtgctgagtggccatgtgtcgggccgggtggtgatgaagagctacngagtggntgctgaatgcaagttgggntgaat

SEQ ID NO: 566649 - DNA, 296 bp, Homo sapiens
  misc_feature (240)..(240): n is a, c, g, or t
  misc_feature (257)..(257): n is a, c, g, or t
  misc_feature (284)..(284): n is a, c, g, or t
  misc_feature (291)..(291): n is a, c, g, or t
tgtgtttttagcagaaacggggtttcaccgtgttagccaggatggtctcgatcgcctgacctcgtgatccgcccgcctcggcctcccaaagtgctggaattacaggcgtgacacttgcgcccggccgagaaacctatttttgatgtttatatttgggatacttgctcttgggagccccacctgccctgctggggagggtgctggggaacacctggggagaagccatgttgcagctgtgtnggccaagcaatcccagntttgtttcccaagccagctgccagacntgggganttaag

SEQ ID NO: 566650 - DNA, 164 bp, Homo sapiens
  misc_feature (1)..(1): n is a, c, g, or t
ngaagtgatcgcgtcgcgcatcctaagaaatagactggtccagtgtagtaatgccgcagagcggcggaccttgtcctggccgcccacatcccatacgttgaacttgacatttttgtaagtcaccgtctccacgttgaaacccacagtgtgaatggtgctcaccg

SEQ ID NO: 566651 - DNA, 536 bp, Homo sapiens
gcacgcttcggggtctccgtggaagtcgcggagccttcggatgtggcggatgctgccgtgagccggcgggggtagttcgtccagatccagctggtgcgcctcgcctgacgtttgaagcgagcgaggctggctctagactcctcccgttttgtcgcgtcgattacttcgaggacttgcaacagggcgcgcatcggatgctgggtgcgtgacgtccacgtgtaactcagatcgccagagtagcacaggagtggtccatcgctcacagcgaggtcagtagcaagcggtgtgaactcagtcctgttgtcagagcctcgcagcaccgatgaacctccaaggaagcgtggtgaagctctggtggctgtgctcgtgctgagtgacgcgtcttgactggccgtgggtggactgcaatgccgcaagcgctgtcagctccgtgcacggggcgagccggcgtgggcccttcgcgttctagagccttggagcaggcctcataggggcccgggttggcactggcgttgtctggtgtggcgtggctcttg

SEQ ID NO: 566652 - DNA, 410 bp, Homo sapiens
caataccgaaaatgaaggttctgggctgacaaacatcaagacggaagagatctcggaagtgaagatggatgcagaattcggacatgattcaggatttgaagtccgccatcaaaaactggtgttctttgctgaagatgtgggttcgaacaaaggcgccatcatcggactcatggtgggcggcgttgtcatagcaaccgtgattgtcatcaccctggtgatgttgaagaagaaacagtacacatccatccatcatggcgtggtggaggtcgacgccgccgtgaccccagaggagcgccatctctccaagatgcagcagaacggatatgagaatccaactttacaagttctttgaagccaaatgcagaactaagcccccacccgcgccacagcagcggcctctgaacttggac

SEQ ID NO: 566653 - DNA, 162 bp, Homo sapiens
  misc_feature (30)..(30): n is a, c, g, or t
  misc_feature (88)..(88): n is a, c, g, or t
  misc_feature (108)..(108): n is a, c, g, or t
  misc_feature (148)..(148): n is a, c, g, or t
  misc_feature (156)..(156): n is a, c, g, or t
ccagtctgggctctgtgctgtgcggtaacnccggtggagatcccggcagaagaaactctgtggaaataagattaaacccgaggagtantaagacggccaagggataantaactcgacttcggagcgtctgcaggaattagagccagcntgccaccntccccc

SEQ ID NO: 566654 - DNA, 148 bp, Homo sapiens
atcatctcaacacgatccctacagagaagagacgagatgaggaggacgaatactattatacttataatcccttttctgatgacaacattctggaacacagatctaaaataatccatgctgttcttcgtattcaacatttctatctccc

SEQ ID NO: 566655 - DNA, 329 bp, Homo sapiens
ccggtaaatgtagatactgtgaaagaaggcctggagccaggcttgttcttatggtccactgttcttttgtgttaagccctgaagatgctattgttgggagggaagcgccaggatcaaagggttccgctgagaaggttgagtaggcagaggatggtgcaacaggagaaatcctgctagcctgtgcatatcactccctccacgaatataagacaggaattccttgcacccctcggtccatgcaaaacaaggcttatcctgtagggcaatctcagggcacctggtgagggtcaaacaggaccactccaggggtaaactggttagcaggtaag

SEQ ID NO: 566656 - DNA, 1034 bp, Homo sapiens
  misc_feature (1033)..(1034): n is a, c, g, or t
gcggagactcgctgcagcagcggagggggagctgtgcagagccgtgcggcctcacagtcctggagcccggcgtgccgtgtcgtatggaacatgcactttgtccattcccgaaaacgagtcccgcagtggggacagtggggctccgctacgtggcctataacattcacgtgaatggagtcctgcactgtctgggtgagctacagccagttcctggggctgtacgagcaggtgggactagcatctctgaccttgagacagcttcaagtcccttccctagcacgtgtgacatcagtgtctccctttaccctgctctatcttgtacccgtaggctgtagttcccctttaatcactgcacgaggttcggcaagacccatagcttgggagcaggagactttcaacagtattcctgcgtctggcacaaacatggagacacagcaggtccccacagagggaacgtgtccttggaaagtgtgctcagcaaagggcagaaagttctggtcaaagtgctaacttcagatcagactgaggatgtctggaggctgtaagctgcaaagctggatcttccatcatgacttgattggatactttagtctattcttagttcgagaaaaaggaggatggggctttctttgtgtactggaattgagagtttgaggtgcttatgtgtctgtcaccaggcttggagtcaagagtataaggatgtggctaagggagagttattgggactctgcttatgatgacggatgtcaatggaaaaccggggttggcttgaaccatggtatatgacaaaggactacatatggacgaggtggattgggagcatggcaagatcggagcagcttgtgaccagaattcagagtatctgagtggcaatcatgagaagagaaagtgatagagttgtgttccaaaagtgttgtagggacagagaaacgacacgtaactgtagagaacaatgttatagtaagaaatggaaatttaatgaaaagagggatagtatatatagatatcctattttgtgtttctgcttttttgnn

SEQ ID NO: 566657 - DNA, 768 bp, Homo sapiens
agcggagtgcggctctgggctggacgaatggttggcgctgcgatcccgcaggtcagagacgcgactctggtgcgggtcgtcttcttccccccgatctgggcgtgcgctgacccgcattgacctgtgaggctgactgcttgtgtcgtgcttggtgcttgtgcgcgctgatcctgctcttcggtgcacgcctgcgtgcagcttcctgacgggctgactggcgagcctgacgctactatgggccgagtgtcagcggactacgcccacactgtgatgctgactgcatagtggtgcgctgtgagcgtgagcatggacgcctccagtggacacttggtgaggagctggacttaccacgttgtctaaactaggagttttctcttgtgctgtctgccagactgattgcatgagctgcacaggcgtgaactcgaagatgcctagacgaatggcacagtttagcatagaacataggatactagctttgtttatgcacccgttgactctgatcgacactggttccccttgaacgcggttaccaacatctgttctccagggagctctggcatgaatcgacattactggtcaacaaatgggtggaactgtcccagccgttctctgtgccatggcattacccagcttggcatgtctacatgaaagctaatagaggcttaattactttgcggacgcgtgtcctttgacagaatgtgttctgcctcacatgatcgaacaggaatcaaggcacagatggtcctgtgaatcacatcctgcgtatca

SEQ ID NO: 566658 - DNA, 136 bp, Homo sapiens
agaggatcccatcaggtgaagtattgtggatggtcagaagatcatggagctttcaatgctctcgggggagcatacagactcacctccaatcccctggcctcccatgactacatccttgaggattgtgcccaaagtc

SEQ ID NO: 566659 - DNA, 259 bp, Homo sapiens
ctgtggctagctggcattttaatccatttctggtaatggctgaatgaacaatatgagcccttaataaaggaatggaccaggtgcaggggcttcatgcctgtcatcctagcactttggggaggatgaggcggtaggatcactcaagcccaggagttggagaccagccggggcaacatagtgagaccccatctctacaaaaaactaggccaggagcaggggctaacacccgtaatcccaactactctcagggccaaggtgg

SEQ ID NO: 566660 - DNA, 153 bp, Homo sapiens
gcctggttctaggaataatggggtgcagtatgtaggagttgaagattagtccgccggagtcgtggtgtactcgtaggttcagtaccagttggtggccaactcgatcttgatggtaagcggagaggatcggttgcacctctggtctgtgattgt

SEQ ID NO: 566661 - DNA, 963 bp, Homo sapiens
tgcgcagccccaaggacgaggcgcgcgtggtgacacaaagagccaccgccagaaggtggggttacaaacgcccgacgactcgcgacacatagtacaactgtcggtgttgtgaaaagcgctcccaccaggtgcggcattgccaaaaaaacaagtggtcccaacaagagtggtgcctcccaccagccagccggtgtgccgcgccaaggacgcagggcggtaggcacgacggcagtgacgaaagttgtgtcccgccgcgcggaaatacatgccatagcccgccgcatgggctccgctgcgtcaaaacgggggggtgaaccgctccaaagattgatggggacgcacctcgtctgtgccataacgcaaaagctgtcttgggagatttttcttgggctagatgaacccaaacaagggggcgctcaggcttattacccaagaattagtttgaaacgagcggtccttacaatagttcggccgaggaattaactgcgcgcggcgcgcgtctaaagagaggagtggcgtgtggcaacacgtcttcttaaaacagagccctccatcttcaatgaaaatactgtatagaaacgactccactacctatataaggttttcgcccgaatcctcgctctccgaacctgggagccccggactaattaacagcggagagccgctcattgggcggggctccacacacacgaaccacctttatgtgcaaagatcggacgcacacatttttctcagaacaatactattaggaaagagaatgtgttgtacaatactgacacgcaagcacggtaggatggaggtcgactcggtgtcactgccggaataatacccccacaactctcctatggggagcgggcgcacaagtgggataccccgtggtaggcaataggggcgtatcgacgacacaccgtgccaaccattgtggcaccccccttttgtcagaaaaaaacccaacaagacaga

SEQ ID NO: 566662 - DNA, 1043 bp, Homo sapiens
ggtgggaccagtcgaaagcccactgcgggtcggacttcggctacagcggtagacagggatgatatccaggaccatatcctctgggctctgaaggggatgactttgaggtacaagaagaaggatgacgtggtcctagagtgaagcagtcaaagtggcaggaatagtcaagccgaggcttgctcgttagatcgaacccatgggatggcaattgaatcaaccaacatggcctcttgtggacaagggggaggacgcgcacctgttcgtaagaacacactgccaattctatgatggcgaggagtctttgctacatcattgatgcctagcttgaaggtcaacctgggacgcgctagactcaagccagcagttgcagccctcgaaactgttatgtccagaatgtacttgcgtggatacccagtgatcttcgcttcccctgggtggtcttctttgccagcgaaatgaatccgggctgggacagaacttacttgggactacaactacgaggtgggcagatgtggaaggcaaggagctactctgttgctgtggggccattgaatgcagaggacgtcttctttaagaggacagaccttcttcccaacccttcttgaatctgtcgtttcctcaggaactgggtcttcctgattgttgaagcctgacccgaagtctctgggctagctactccccccagatcctagttgatagaacatggggggttctggaccagatgatcccttccaagtgttggtgctagcaggcaggatctcttctcctactccaaaggccttacagggtggggagagatcacaatctaagctcggactgagatcctaccagtccatattggccctaagcggtccctggcgctcttagcagaactttgggctcttagacagagaccctgggtatctactatctcccagatgggattatgtctggacagcctttcaccaattcggactggagtcacaaagaacaggacacactcggacaaggctccacatctcaacccagcggcaaacgggcaaaggacccctataaagacccag

SEQ ID NO: 566663 - DNA, 779 bp, Homo sapiens
ggaagtttggcctttaaaaatcaaactgccatggacactgctttacccaaaattttggttcacattcttcactggattaactattggggcaaacaacgtataaccatgtaaaaccagtacgcttgtattggcatttcatggctagagttctaaggtaaaattattggattttcgtttgtgtgtgtgtctacttgtatgtgtctatttgtatgtacacttattgttacatgttgtgtctaccaaactggcttataagtaaaagagcactcatacgttaggtgaaaaagtccaagcaattttcaagttcacgtgacttatgtaaatctttactaaacaaaccggctttaaaattattggtagaatgaaattgtcagcatacatttttgtttgggttttatatatgtctctgctagatattttgaggtttcagtgtttggcatagaaggttataaagctgttaatctagccaaaacaaaatgattttggtatgccttctttgacagatgagactaatttaatgttgttaggtgaatcttctgagttattggaaaaatatctatgtatttaactttgagcctcttattaggtgagcacctgatgttccactgggtattaagaaaatggttgggccaggcgcagtggtcacacctgttaatccccacactttggggaggccgagtgggcggattggtgaacctcaagagttcgagacagtctgggcaaaaacggtgaaaccccattctacttaaaaaaaaaccccacacaatttcccgcgctgg

SEQ ID NO: 566664 - DNA, 626 bp, Homo sapiens
  misc_feature (553)..(553): n is a, c, g, or t
gaggtgtatgttggcaaggatatacagtgcgagatgttctcttcagagggcatgtataactgggtgtcttgaaatccgagcagttcctaagaaggcattaagggagcccttgtggactataccagtgacagtgctgaaaagcgcagggtacaggagctgtgcagtacatgagggggagacgataatagccgattagtacgagatgcctgtgccggctggttggatctcctcctcgcattcccttcttgccaggcaccaatcagtctccggctcgaacatcttcctaaaattcaaaccagaccatattcgtgtgcaagctcatgtggatgttcacccaggaaagctccattttgtcttcacgatggggggatttctgtctactgccacaacagaggttctgcggaagggagtatgtacaggcgggctgggcttgtgggttgcttcagttcgtcagccaaacatacatgcttcccatgaagacagcgggaaagccctgggtcctaagatatccatctctcctcgaacgacaaattctttccacttaccagatganccctcaatccccatcataagggtgggtccaggacacggtatagccccgtttaatgggttcctacaacatagag

SEQ ID NO: 566665 - DNA, 283 bp, Homo sapiens
ctcgtataaggaacgcagtaggctatgtgttcctgtagcgagtctctcgtatatgagatatagatagtgatcttgtaccatatgccgtctacaaacagagtactgcggcgagtactgtttaccgcagctctgattcgcttctccttgtccttggtttgaaacaaaagtggagtccgaaaagagatatctttactataaaagctagtgtgtaagctagtcatattaagttgttggctcaggagtctgataagttcttgggcagacaggtgcagcgtagaatatt

SEQ ID NO: 566666 - DNA, 151 bp, Homo sapiens
gctcgacaagacaactcatggcctcctttggccccgcatgacctgggtacattttgcaaaccacaggtttgcaatgttacacaagggccaaaggagggcatgagttgctttggttgtggggacagagggtaactgttcatgaaaatagtga

SEQ ID NO: 566667 - DNA, 452 bp, Homo sapiens
tgagacatagtctcgctctgtagcccagcttgaagtccagtgtggcacaatataagctcactgcaaccttcacctcccaggttcaacgatttctctgcctcaagcctctcaagtagctgcgactacaggtgcccccccccacacctggctaatttttgtattttaagtagagatggggtttcaccttgttggccaggctggtctcaaacccctgcccccaagtgatccccctgcccaaccctcccaaggtgttggaattcaagcctgccctaacagggtagggtttttaggttcatgttaatgccggaagtttcagtaattcccccccattcgttgttaagaagccctgcaacacatgaaggaagctatttggggatcttttcccctgttaatgggtgtctgacctgttcccagttttgggttgttacaaataaagcctttgtaacccccgt

SEQ ID NO: 566668 - DNA, 268 bp, Homo sapiens
ctaggccggagtcaattaggaggactgagaggacccctgttagggttcatgggctggtttttactatataataggcatgtaattggtggtcattatgttttgtcgtgcaggtagaggcttactagaggtgtgaaaacgtaggcttggattaaggcgacagtattttctaggatagtcagtagatttagattcgtgaagatgataagtctagagggaaggtcaatggtcgatattgctaggctcgcgctcccaatcaggtcataagagg

SEQ ID NO: 566669 - DNA, 299 bp, Homo sapiens
agggaaaaaacggttttttggggggcagtccccccaagaaaaaaaattttgccccccaaaaaaaacccgggttttttataaaattccgggcccataaagggctgaataaacctgacccaaccaatgggggggaaaactaaacccccccctgcttttgggaaaaaaaacccccccccccctaattttgggcatttgctgtccccccaactgaaaaaataaggggggctttttacgggggggcttcacctccccccccctttaaatccaggggaatttcatcaccccccggaaacagtttt

SEQ ID NO: 566670 - DNA, 351 bp, Homo sapiens
  misc_feature (340)..(340): n is a, c, g, or t
gaagattagccccaagcggtgggccgggagcggtgtggtcaccacacaggggttaaacaagcacgggttttgggggctgcacaggccgggctggcaacccgggatctgccaacggggggattttggtctggtgaatggtcctgattctcagcctcagtttccatatctgtagagagggaataacaataaaactcacctcacagaatttttttttttttttaagacagagttccactctggtctcccaggctgggagtgcaggggggtgatctgggctcactggaaatttccacctccgggatccaggcaattctccgtgctcagcctccccagtagtggngactaccaggc

SEQ ID NO: 566671 - DNA, 139 bp, Homo sapiens
cgaccctaaagccaaacaccccgacatacatttcacctccatttattctgtatctttacatttcccatctgctatagaccagacccctctagcctctcacgcgcaggcaactgcagcagtctcctaaaggagcaactcg

SEQ ID NO: 566672 - DNA, 124 bp, Homo sapiens
acaactgctcaagcgatgagacctctgtgtctttcttcttcgtaggcctcctaagatgggtgagagctctgccaagtgacggttgcgggccggcgcaagctaaatctcctccctgtgcggcccg

SEQ ID NO: 566673 - DNA, 907 bp, Homo sapiens
tgagaaagagggggtgggggttgttggggggccgccccctttggggaaaaggtgggtgtctttgggggttcggccgggaatcgggacctgtgggttcggcacagggggggggtaactcgcgtgggttaagtgtgcggcgccccacggaccggagagggggcccttgtctcgcgcccgcgagtgtttagttgtggaaacacaagtgggtggccgagggcgcgccgccgaggttggagcgaacccgggagaccccacgcggtcccgattccacgagccatggggggaataaggattatggagcctattgggggagctttcggatgcctttgatggcgccggatcatgagagatgtttggtgctggaggccaggtatggtcggcccaatctgtgcgtgatccatcgagtttggagtcccacgggagactttccttgaacgcccgctgcagaaaagtggcgtgattcttaagagagctggagtcttaaattgggccacccaacccggggaatttgcctgtaagatttttgatggcgcgccatgcaccagatagttggcttattgtataaaatacaagttcaagaaaataatgtatggattggtaatgatgtccattctacaagtatatggatacaaaaatatgagtgaccctccataagcaattagtgcagctccacttttaagatcaccacgaagaaatttggatgtttgttaaagtgcgccatttacttcgcacccaagttcacccaagggaaagtggttgaagcttctctatatttctgcgtgagccttttgttaaatattaaaatggtttagatagtggtataagaaagccttttttatgacttattttgatcatttttttcctcatttaaaaaattgaattaaatctgtttgattccgttttccta

SEQ ID NO: 566674 - DNA, 616 bp, Homo sapiens
agcggtgtgacagtagttgaacaactttaagtggctctaagaagtttcctatttgaggctgggtgccatggctcacgacttataatcccagcacatttggggagtacccgtacgatgggcgtactcactttgaggatcgggagttcgacgaccagacctggtccaaacgaaacgcccatctctacctaagatagcataagcattagccgggcgtggttgcgaacatgactgtgatcccgagcctaatcagaagcgctgatggaacggagcaagttgacttgagacacaacacgggtgcgtagagtaagaggagtagaggccacgagatcagccgcatccgtggctctcgcaggcctgggctgaccgtgaggcgagcactcgcatctgcgtccgcacagcaaaactcattcgcctgcatcactctcaccttgcattggtgggatgggctagagtacggtgtctcatagtatccctggaacgcactgaactgctggataggttgtgtctgaataggccttgatcgaccggcaacgcgagtgggactaatggggcaaatactggatctcccaagtggacgtactgtggccggcatcggctagaatgctgttagacaggt

SEQ ID NO: 566675 - DNA, 271 bp, Homo sapiens
  misc_feature (190)..(190): n is a, c, g, or t
gtgatctagaggatctttgagtgcatggttgatttgcgttacgtatagctcaacctcccaagtagctgggattagaggtccccaccaccatgcctgtttaattttttgtactttcagtagaaacggggttttgccatgttggccaggctgttctcgaactcctgagctcaggtgatccaactgtctcggnctcccaaagtgctgggattacaggcgtgagccactgtgcctagcatgagccactgtgcctagcatgagccatgcactccgg

SEQ ID NO: 566676 - DNA, 357 bp, Homo sapiens
gttcaacagatcccccagttcctgcagtgctgtaagggatttctttccctatactgatacagtattttctctgctgtttatacagacagtatcaaaaggctaaagagaaatcctgcctttctggtcctgctattcactcctctcgacctaatctatcctccctgtttcttatacctgagccaacattaattagagaagaggaacgactaaaccgtcagtgctccttttatcatctcttgttggctccattatactttccacgagcccgagtgtctctgatccttgtatgtcatccttcaggcctcaaccggctacttgccctctacctgctgaagtttctgcatcattttcatggga

SEQ ID NO: 566677 - DNA, 504 bp, Homo sapiens
agcgggctgggctcgtgtggacgtgagcatgggccactcgagcttcatctcccggcgccacctcgagatcttcacgcccccgggcggcggcggccatggcggggccgctccggagctgccgtccgcgcagcccaggcccgacgccggcggcgacttctacctgcgctgcttgtggcaagaacggggtatacgtggacggcgtgttccagaggcgcggggcgccgccgctgcagctgccgcgcgtgtgcacacttcacggttcccgcagcacaaagcatcaacgatacacgttcactgccctgtccagcgagaagagagagaagcaggaggcgtctgacgtctccagtgcaagggacagtacagaccacacaatcatcgaccacctgaacccactcaacacttcacaacacacacatacggaccacaatcatacaccacatgaacccaaccacacaccccgcaacaaaccagagactacacactcataaccctcacccacccacg

SEQ ID NO: 566678 - DNA, 682 bp, Homo sapiens
tcattcgttttatggggacatttattacaggaacttccgggtcaattttcctttcgcacagacaccaaggtgcccaccccttgtccacgcccccttcctcccagggtggggtggccgtggtggggggcgctcaataattaccttctgtggaaacgagttccggtgcagtggcttgagacttcccagccaatgtgaccgtggcccggccatttttctttatgcgtggttatttttttccgtgcatagggtttggccgtgcacagcttgataggactctgtgtcatgggagtgcgtgccacgtgaaaaacgtgattcaaaagccatatgcgtgctcagtggtttcctaagtactctcacacctttaaagtgggggatagggaggggaaggtctcacaaaaggcagtgggcttctgcgtggttccgggccaaggcgagcaagggaggatccagaaaaactgggccccaaggggctctgaattctcggaggagctaggtgggagccacaggcccggaccaccaggtttcgggatttcttcaggatgacgtgggaggctgtcactcgaagtagaggacggagatggcattgagctgcgttgggcgcacagcagggctggggccaccggttccgggtggatgaagtggaccagcgtctgcacaatggcgtggatagggggcgtcatgg

SEQ ID NO: 566679 - DNA, 300 bp, Homo sapiens
attgaaaaaccctccgacatatcaaacctatgggatacagcaaaagcagtaccaagagggaaattcgtagcttaagtgcctacatcaaaaaagaagaaagacctcaaataaacaacttaatgatgcctcttaaagaactagaaaagcaagagcaaaccaaacccaaaatagttagaagaaagaagaattaatgagattcatagcgaaaataagatgtatacacgacccagaaagagctcagaaggacagaaggtacggggataatagcacaaaaacaaccccgaaaatgaggtctcaccg

SEQ ID NO: 566680 - DNA, 242 bp, Homo sapiens
ctcaatcagtcactgaccagtagctggcaatgtactgaagtattcacaatctggcagacaggaaggtacccgtcaaacattaggcccagtaaactcttgtctgaatttcaaaggtacaagcgcttgaatgttaacctcgggagcagacatgttattgcgactgcatactgagtcggacctgtttctcctgcgggataaagagtctaagtccacaaggggcctgggaggttaggtctacctgg

SEQ ID NO: 566681 - DNA, 164 bp, Homo sapiens
actgcatccaagcgccgccgtggctacggcgtaagctgaggatcactttgcctgcatccgaaccgccgtcccatggttcagccgtcagatccaggagcatgagcaggagtctgcgctgcgggagcaggtgagcggggttggatggtcgcggcgttggatgcagt

SEQ ID NO: 566682 - DNA, 213 bp, Homo sapiens
gtcagtctacggcacttgaattgacgggtcgctcgatctgacgggccgcgacaagttaacttgatatataattgatagctaggtccattgtgtcattacggacccgttatattcaagtctgccgttaatcaagctgtattaccctactctcagagcggtcagcacagtgctagctacatgatgggcccctaatcgcccactatagagtgacag

SEQ ID NO: 566683 - DNA, 245 bp, Homo sapiens
ttacatgatgatactatttgagcccatccaatgattcccttcgattccattcgatgaggattccattcgattcaattcattggtgattctattcaattcaattctttgattccattccattccattcgacaatgattccattcgatttctttcgatgattccactcgattccacttgacattgattccattcgattccattcaatgattccatttgattccagtggatgatgattgccatcgatt

SEQ ID NO: 566684 - DNA, 556 bp, Homo sapiens
  misc_feature (551)..(551): n is a, c, g, or t
  misc_feature (553)..(553): n is a, c, g, or t
tgagatggagtttcgctctttttgcccaggctggagtgcagtggcatgatcttggctcaccgcagcctctgcctcctgggttcaagcggttctcctgcctcggcctcctgagtagctgggattacaggcatgcaccaccaccccggctaattttgtgtttttggtggagacagggtttctccatgttggtcgggctggtcttgaactcccgacctcaggtgatccacccgcctcagcctcccagggtgctgggattgcaggcgtgagccaccgcacccagcttttttttttttttttaaagcttccacatatgagtgggaatgtgcatgtttatgttcctggcttatttcacttaaataatgtcctccatttccatccatgttgcctcaggtgataggatttcattctgttctttgaatagtattcctttgtgtgtataaaccacattttctttatccatttatctgttgttggacatctaggttgattccatattttggctattgtgaatagtgctccagtctgggacagaacgagactttgtcccaaangntgg

SEQ ID NO: 566685 - DNA, 282 bp, Homo sapiens
acccggttgggggggggggggggatttttgggttcccaaaacccccaaaagccttggggttttgaatggggaaaatttcccgaggggggaaaaatccttatcccaccgggcccgttcccgtcccctaaaattgggggtggggccccccccccgggttttaaagaatttgtccacctttaaaccgctgggggttgggaaagcctttgttttttggtggggtttttccatttcccttaaggccccccctacctttttaaaaaaaaggggtttttttaaacccca

SEQ ID NO: 566686 - DNA, 360 bp, Homo sapiens
cctttcactcctcaaaagttaacctatagttaccgtatacccagccattcctcccccaggtctatagcctagataaatgaaaacacttgtccacacaaaatgtcacctcagttttcacagcaatcatcattcattatagccaaaaagtgaaagtaacccaggtgtccctctgtggattaatgggttaacaaaacattgtctgtccgtacaccagaacgttattctgccatgggaaggagtgaagtgtggatacttactacgacatggatcaaccttgataatcatgctatgttcaagaagctgattgcagtctaccacattctgtttgattcctttttatgtaacatacctactataggc

SEQ ID NO: 566687 - DNA, 117 bp, Homo sapiens
  misc_feature (3)..(3): n is a, c, g, or t
  misc_feature (5)..(5): n is a, c, g, or t
cgntngatcttgagatggagtgagtttggagtctacccagtagaggcggcactgaggagatctagggtgatgccattgggccactgagtgttttcatgtcaccagcgagtagatgtc

SEQ ID NO: 566688 - DNA, 566 bp, Homo sapiens
cgcttatggaaggtcccgctgctttcctctaattgaatagcttcttgaacctagcccatgtttctgatcccaaaataggtgttgatgggtttgatggggagagaaacattcaggctgttgtcccttcctgcttactttcatgcctggtgcaggtttgtatgtatttaaatagacacttagctgataggtcggaagagagggaaagacccttcagcaggcttcctgtgcagacagcttcagcctgttccaggacgggcaatcgccatacattgtgcactcagtctgtttcctccaaccccatcctagaaactctgtcttgcactcagagcagaagcaactatgctatccattgtggtatcaacctgccgggttggtcagttcaatgaatttatatggtgtatttatcaaaacagcataatacaaggcaggaacttacattgtacataatttatttctactgtgaaaaagagattgatgtacttagcactttgtttgctaagagaaataaatattttttcttgttatctggttttcttaatatatattaaactatttctggagcagca

SEQ ID NO: 566689 - DNA, 121 bp, Homo sapiens
tgacactctcatctccatgatgacttacttaggaattcaactttcccctggggcccaggctatgactccagccaggcagcattaatagaaaatctacccccaccatcctccatggtgctga

SEQ ID NO: 566690 - DNA, 386 bp, Homo sapiens
gcttggtatatgcattaagatcatgctcgaaattcattctcgtgctgcagctcacagttctgtcatgactacccgccacatctttgttgctcagagacagatttgtggctacgtacaatcacttttttgctgtcaatcttgtggtgccctataattgtgtactgcagtgcatcaatgacagacgatagatgtagtaaggcgatgagcagcgatatatgtctggttaaaaagttcagcattgggattcagtgtaatagcacatgatgtaaagtagacttcacaggtaacactgcccatggcaggtatagtaatatggcatatggtacataattccctaaaatctgaaagacatagcacgagatgtctaagcacacataggactggca

SEQ ID NO: 566691 - DNA, 306 bp, Homo sapiens
tgccacaacagaatattcaccatgacaactggcccacaccccagagactgattctgatctcccatgaattatgaaagaccatatatctgtgacaccaattatttgcatacaggttgcaacgccggtattctcaggaaatatgattgtccacacccaagcaagaatgccctcaaataacattccaagattgtaggtactttgcctaccatctgtctgaagtgaagaagtggttgagaattttgattggggaccaggaaatcacttgtatactgttcgccaataaattcctacccagtgttgtctgta

SEQ ID NO: 566692 - DNA, 1422 bp, Homo sapiens
gcttatttatttatttaatttatttgagacagggtgtatgtagctctgtcacccaggttggagtgcagtggcgggatattctctcactgcagcctctgcctcccaagatcaagcgatcctcttgcctcagcctcctgggtagctgggaccacaggcaaataccatcacgcctggctttttcttcttcttcttcttttatttttgtttatttgtccaattatttagtagagaggatggggatttcacacaaatttggcccaggcgctgggtcctcaaaatctcctggaggctcaatgtggatccgatcgcggccttcacaaccgtggcgcaaaagtggctggggattaacagggctataaacaccgcagtttatttcctttaacaagggccctgtttgtgggtgtatattttagacagactgtgtagtaataaattaagtagcatttgtatttatattgtgaaaatgatagagagaattagtatattgtatatatagtattttatcttatgagtgttgaggagagaatctcgcgggtcttacaaagaagtagatgtaatttagtattataataacgcgcaaagagaaagtcgtgtaaaaagagattagagggaagcgccactatcaaagaagagtaatcacgaggtaagatgcgaacagggggcgctactaccagagaacaggagcgccacacaaaaattttgaggcaacaaggggggaaccactaatagggggagtgaccactacaaacacactgtgtgtgctaatacgacagcagcaacttaagagggtaaaagcagacagagagacatcagaacaaaaaatacatagtcccccacaaatataataattcagccagaatatacacagcaacattttgtgtagcagacccgtgtgactataattatcaaccataaggagggggaagcatccggtatattcaaagggggaacaaaacaaataataagtggtgagaaatctctcttcagacagaagggcaactacaccgtgttgcaattaactccataaacatggagggggggtgcaagcggggcattaagtacgagacacacaactgcagtggaatttaaaaaccagttgtatcaaattaggcgcgagacgagggaataatcaacaaaaactaggggggagcacaatcagcgaaagcaccactgaggggggagaaaatcgacagtgaacaagtgcagtgagggggaaacagctagtcacaaacaacgattagcgaggggcttatcgacgagcagaggtgcgccaccgatttgtgtgatgacaacacaagacgatagtgtgccaaacccatagcatcgatcaacaaatgactgatgccacaggacggcaacctcacaacacgctcccggggctgacagagagaaacatagtatcaagtggggaagacaacgggt

SEQ ID NO: 566693 - DNA, 260 bp, Homo sapiens
tttgggaggccgaagcgggaggatcgcttgaacctacaagttcgagaccaggctgggcaacatagtggaaccccctctgtacaaaaaaaaaataacaaaaattagctggtgtagtggcatgtgcctatagtcccaactactcgggaggctgaagcagcggaagggttgcttgagcctggggagatcaaggctacagtgagccatggtcataccactggcactccatccagagttgacacagttgagatcctcttttcagg

SEQ ID NO: 566694 - DNA, 180 bp, Homo sapiens
catagtaactgtcattatctgtggtaatatctagcaaggggctgtatctattatgaattggcatgtggattactggttttggaacactcatgaatgctagggagacctgttttacccgcctgcaatactgtacgttccctatctgtaatagttcacatcagtcagatccagcagtactca

SEQ ID NO: 566695 - DNA, 103 bp, Homo sapiens
aggaccgtttagtggttgtgggtagagaagtttggcagaaggtaaggtaggataggaggtagcaccaaaaaaggaagggagagacagaataagtgatatgatt

SEQ ID NO: 566696 - DNA, 241 bp, Homo sapiens
ctaatctaccccatcgattcacggtatcgtcaccagctgggacgacttggcagacaacagtctgggcaccacagccttctacaatgcgctgcgtgttgctccctatgatcaccccgtgctgctatctgatggcccctctgaacccctaggccaaccgctagaatattacccggatcatgtgtgagaccttcaacagccgccatccatgctccgttgctatccagtgcctgtgctatcccat

SEQ ID NO: 566697 - DNA, 1690 bp, Homo sapiens
ggaattccggtgctgtggatgccggctgggtcgctgcggggcacattcctgcagaagatttggaaaaaatccgtcaaaacgccacttttgacgttgaccgcattgcagagattgagttatcaacgcgccatgatgttgtggcatttacccgtaacgtgtcagaatcacttggcgaagaacgtaagtggattcactatggcttaacgtcaaccgatgttgttgatacagcgcaagcattacgtttgcgtcaagccaacgatattattaaacaagatttgcaagaatggcgcgacgccattaaagatttggccttgaagtataaagacactgtcatgatgggacgcacacacggtgtacatgccgaaccaaccacttttggcttgaagatggcacgcttccatgcgtcagcaacacgcgcgattgaacgttttgatcgggtggctgctgaagtcgaaaccggtaagttatctggtgccgtaggcacgtttgccaatgtgccaccttatgtcgaagccgtggccatgaaggaattgggcttgacgccacaaccaattgggtcacaagtgttaccacgtgatttgcatgctgattacgtgcaaacgattgcgttgattgggacacaaatggaagaattggcaacggaaattcgctcattgcaacgctcagaaattcatgaagttgaagaaggctttgctaaaggacaaaagggttcttcagcaatgccacacaagcgtaacccaattggtaatgaaaatattactggtttggcacgtgtcttgcgtggctatgccgtaacagcacttgaagatgtgacattgtggcatgaacgcgatatttcacattcttcagccgaacgcattattttgcctgatgcaacgacaacattggattacatgttgaatcgtcaaacaggtattttgaagaatttgggtgtcttccctgaaaaaatgcgtcacaatatggatcgcacttacggtttgatttattcacaacgtttgttgttgagcttaattgatgccggcttgtcacgtgaacaagcctatgatacggtgcaaccattgacagcacgttcatgggatgaacaattgatgttccgtgacttggttgatgcggatccaacaatcactgcccatttgactaaagcacaaattgatgacgcgtttgattatcactatcacttgcgtcatgttgatgaaatttttaagagagtaggtttggcatgacatcactaattaaccatccagcaattaagacagttttagcaacggaaacagatattcaagcacaagtgcaacgtgtggcgaatgaacttaccagtaaatttgcgcataatgacaagcggccagtttttattgcagtcctcaagggtggggtgatttttgccacagatttactccggaaaatgccattggatgttgactttgactttgtcgatgtcaaaagttattcaggtgctgcttcaactggccaagttaaagtggtccatgacgtgagcatggatttaacaggacgtgatgtcgtgatcgtcgatgaaattattgattctggtcggacgatgcaatggttgcaaaactattttgaactcaaaggggccgcaagtgtgacgacggtagccttagctgataaaaaggccgctcgggtggttgactttgacgttgattactttggtcttgatgtgcccgatgaattc

SEQ ID NO: 566698 - DNA, 415 bp, Homo sapiens
  misc_feature (15)..(15): n is a, c, g, or t
  misc_feature (42)..(42): n is a, c, g, or t
  misc_feature (94)..(94): n is a, c, g, or t
  misc_feature (136)..(136): n is a, c, g, or t
cgccgccgacacggntgcgagaagacacagaagggactgaantacagtgcaacgtgaggtatctcaattttcgcattctgtctgcatgcagaanttaagaatattattctactgtttaaaaagtaggatatggcgnccgggtgcggtactcacgcctgtaatcccagcatttgggaggctgaggcgggcggatcacgaggtcagaaagatcgagaccatcctggccaacatggtgaaaccccgttcctactaaaaatacaaaaattagctgggtgtggtggcgcatgcctgtagtcccagttaatcgggaggctgaggcaggagaatcacttgaaccccggggggcagaggttgcagtgagtcaagatcgcaccactgcactccagcccagcgactgagccaggactcttgtctc

SEQ ID NO: 566699 - DNA, 254 bp, Homo sapiens
tgtgaagtaaagcctgagtcatccacaggaacagagaacatttactagccttgatggcagggggggccaaacccaactggaaacagatccctgtggtgggcgacccgctgctgttcccccagctccaaccccaaaccccttcacacaaatcttggaaaagagcgggcatgacaggcagctcattggcaggcctggacctttgactcccatattggtatcccatttttctagaagccaccctgtgagagacacgc

SEQ ID NO: 566700 - DNA, 103 bp, Homo sapiens
gttaacttctgctctcagtggtctggggacattcaacatgcagcaaactcagaacttcagggcaacagactgggtgctcattcttggctctgcaccaggggag

SEQ ID NO: 566701 - DNA, 1389 bp, Homo sapiens
tgggtgtcttcagcacaaagctgctgcttttacttcagcccacttctgacatttttacataccgagcctgagactgtgtgattatctcaacatcacaactcacctctcgacctggacgactaaactacatcaaacacgtgcttcttactacgctccatcgactctctggctgacgacaccagcctaacttggcaacaactggctgctctgacacggaccttcctcacttctcttgggaggccttctccgttccagacagctccgtgggcctgactgtggcctgctaccgccatggtctcactcttgtagaccccccaaaacagacactataatttaactggactaccctggggcaaacaacagcttcaacacagcgccagcacctggcacatgggaatgtggctcctatctcaacgtaaccgggccactatctacaccggcggtaacaaaccgtacactgtgtgtgctttcttcagctggcatcacgagttaccaactctggttcctcctctacggccccccgttccacaggttaccactacctaacgccaccaacgagctttaatggaaagtggaccaacagtgtcccccaccttaaaaccattttcccgtcgtgtcaatattcgttgacacttcatatctcgtcgcgtgttacccaattcggctacaccttacgttcgcgaacaacccttgggctccacttacagaggtgaccaccctccctgcgggcacaaggaaattagtttggggggggcacctggaccaaaccttcctgtcaaaaggccctatccttcaaacccctgtgtgccctgggcacggcaacggggaccaacggggcccaaacaccttggaacccgaccacaaacaaacaagcacaaaagtctccttcgcaacctaacaccgcaatggcaccactgggggcaaacccactgggaacctccctatacgggccccccggacggcgctcaacaggggctgggagctccccaagaagtccaagccaccgccaccagccactttacacaccaaaacgcccactacaaaggccgaggccacctaagggatcaacacaaggccccgggccaacataaatgagcctatgcgagagaccaaagcgtggtcaccactcccatgggcaccctgggggccaacgggcacgtcgcacaacaacagcccctcctatttcgcaaagatcgacacgggggcacgttccgaagacaaccaccaatcaagggacctgctggtaacctcaccacacgtgggattacacacacagatacgcgcccctcaaatgccgtcacatgcgcacactggaacaccgcaccacagcagccacggcgccacctcatcaccccacggccaactccgcgggtctgacaccacatacat

SEQ ID NO: 566702 - DNA, 461 bp, Homo sapiens
atacaatgcaaccataaaaaggaattagatcgtgacatggatggagctggaggccattatccttagcaatactaacgcaggaacagaaaaccaaatactgcatgttctcacttataagtgggagcaaaatgatgagaatcaatgagcacaaagaggggaacaacagacactggagcctacttgagggtggagggtgggaggaaggggagaatcagaaaaaataactattggcttagtacctgggtgatgaaataatctgtacatcaaacctctgtgacacgagtttacctatattacaaacctgcacatgtatacctgagcctaagataaaagttttaaaaacaacgagtcccttaataaaatctctaattttctagatccgaagatgcactttcttcctttttcacgtattaatagtaaatgcaaggtggggtcttgaagtgaataaaaacaagtcctct

SEQ ID NO: 566703 - DNA, 1265 bp, Homo sapiens
  misc_feature (1265)..(1265): n is a, c, g, or t
gactcgtggagttgtgatacgccgacggactccggagaccgcactaataccacgggactcgacctatgaaggccatggattctaggtccccgttggggcgtgtgctattgtgcgtgccgagggggctttggttgaccgtggtggtcagtggatggccgtaggcggagcttctgagcgcgggtgaccgcagtgttcgacggtcgggagggcttttagtaggtcgttggacgacgaggaggtggaggcgtgagtgaggcgcgtggagcgaggaggaagaggtggtggaggcttccattactggtggcaacctgggtgtccgtggtcaggggagagaaataatgaggagaaccagtcgagggaagatatgtgatgcgtggagccagcatcggcgatgcagggattgtcttccatttgtccgaggtaaaggatagatgccactggtcacctaataacctggttccctgggtgaatcaggtttatgcgcagagaaggagagtctcgattgtcggacaggagatgacaacatttgagtaccgatcctggaacccctatccgttccaaggctagcagcgagaaatcctgggtggagtggaccagatccacatcaaaaccggggtctaaggttctctacctctggggcgtgcttcgtgacacaaggtctcccatgtctctgacatcgttggtccggatggtctagtctatgcagtcgagttctcccaccgctcttggccgtgaccctcattaagcttgggccaagaatgaggacccaacatcattccttgtgaatcgacgattgctcgagtacccatacaaattccgggatgctcaatcgcaggctggctgtgagccaaggtagaagtgagcaaggagaacaaaccggatagtggcccttgaaagtgccacacaagcttacggggataatggaacggaacactttgggggactcccagtcacgtgccaacgtgctataacgtcccgggcacaacagacggggccaagaatagaccacccaagcgaataccagatgaccaggaaaaaaatatagcgagagagagatgaacagcacgacagataacgagacaccacatcgggcgcggggagtagaacatcccccgaggagaaagaaaaagacgtcacgaacaaacataccatcactagaaggaagtaaataataagcgaacaacaggcgaacaactacaaaacgacataggatgcagaatgtaaaagacaacaatcgtagtcaccataatacactttatatatan

SEQ ID NO: 566704 - DNA, 176 bp, Homo sapiens
ccacatgagaccacctgcccccagctcagttattgttaagcatgtctagccgctcccatttccaagccctccctagcatcccagagtgtcccttggaccaggacccaacattttctagggatgcaggatccccgccactggggtctggatcctcgccaaattccgcagcgggacga

SEQ ID NO: 566705 - DNA, 472 bp, Homo sapiens
tagttgatgacctaataatacgagattagccacgggccgtaccgcggctcacttatgccttgcctaaaacgctacgaatatgctttatccatggggcggatacaattgcggaatttttaaattttattcggcggcggccgataaatttaccgccgggaatgcggcgggaagcggctactgcggcgggcgtctggcatttgacggctacgccataacggctgctacctacgcgggtcgcgctgtcgcgggcggcactaatgcggcctggagcggcgccgtggtggtaatgcaggggacctgcggcgcgggtacgtttgtggggaccggctaggagggcgcggttcgcgcctgtgggacctacttgggtaccggtcaaactcgcgcggccgaggctgtgaacggcggcactccggcggtgggcggattgggcgtttactacgtcgcgtacggctacgtaggaaacaatacgcgg

SEQ ID NO: 566706 - DNA, 402 bp, Homo sapiens
cgtcataacatgcccaaaagagtaactatggggatatccatactatggagacactcatgagtcaggaaatagagtttcactgggcacaggtgctcaggcctgtaatctcagcacttggggaggccgaggcggggggatcacatgaggtcaggagtacacgaccagccgggccaacatggcgaaaccctgtctccaccaaaaatacaaaaattagtcggtgtggtggtgaatgtctgtagtctcagctgcttgggaggctgaggcatgagaatggcgtgaacttccttgagcctgggaggtggaggctgcagtgagctgatattgcaccactgcactcaagcctgggcgacagagcgagactccatttcaaaagaacgtttattaaatgactatatgaaacat

SEQ ID NO: 566707 - DNA, 1501 bp, Homo sapiens
aacctgcacgcgcccacgcgcccccacaccgcctctgcgcctgcacgccccctgcgccactctcccccacccctgcgcctgccacgccgcctgcgcgcccctctcccctgcccctccctctccagcccccctccctgcacccacacgccctgcccgctcgcacgcctctgcactacaccgcctcccacacgcctctccctctctgcacgcgcaccaacgccctgcacgcgcactgcacgcctccacgcacctgcacgccgcccgcgcacgcgcacacgcacacgcacgcgcacacgcaaccacgcctgcacgcgcacacctggccaccgccccgcacgcgcacacgccacgcgcactgcgcccctaccacgcccagccctgcacgcgcacgcgcccacgacacgcacacctgcacgcgcacacgcactgcacgcgcactgcacccaccccgcacgcgacacgcgccctcgcacaccgcacgcgcaccgcactgcaaaacgcacacgcacaacgcacacgcacacgcagcatctagcacctagcgacttgaccccaccgcgcgcactgcgcacacgcgccacaacacgcacgcgcacgccccctgcggccactccttgcaaccaagctgcgctatccacaaccacgcccgcgactgcgtctggcgcccccctggaactacccgcaacgcgcgcaaacggcaacgcctctgcatctctggctagcccccaaaaccgcccacgcgaaagcaccctccctccgccccctgcttagctgcgtctaacttcctgaacgccgcccctgtggccacacacggccctctttagcaaccactgcgttccccttactgcaactccaaccaaacaccccacgcacgcgcactgcaaaacggctacgcaaaccctaccccaccgcccaactcaacaacgcaaactggcctgggcctggcccaaaagggctcaacccccatcttggcaacttgcgcgcccagagctcaaaccgcgcggcgcccctcacacacctccctcacaagcaggcccacttgcgcggaaccaaccctttcctaactacacgcagcaaaaccaaagcaaacccgtgtccccaccctggaagcgcaaaccagcaactgcactctctccaggccccccctcttccccctgtaaccacttttcaacgcggctcggcctgaaaccttccttccaaccttgtgaaccgaaccccactgctagactttccacctgggcttcactttcgtccccctgccgtgcactggggcccccttcttggggcacacctgcccgtggccctcgtagccacgccccccggccagcacgcgctccggcctgcgcatccctccccctctccccaccccccaccgcttctcgcccccccccgccccgactgccaccacctgcggcggacacccccccccgcgcactcggctccatccccctcgctctgccacaaccacccacgcgccactccccccccccctcgccccccc

SEQ ID NO: 566708 - DNA, 177 bp, Homo sapiens
cctggtgcggcggcacctgctgcgcactgagctgtgcgccctgcttggcgcctgtgaccgcagggaccgccgtgtccaacgactcggacatcttggcgcagatgacatccaccaggcgctcaaaggtctgcttgacgttggccattcaacgcctccgagccattcaacgcctccggg

SEQ ID NO: 566709 - DNA, 555 bp, Homo sapiens
agaggtggaattggggcccggcacttccctcctcgtccctgggctggcccttgcaccccaccctagcaactacctgtgtatgagcactgggctcatgccaacgatgctgtcccatcgtcacaccatgctgctgtgcctcctggcctggcacccaacaactgccatacttgtgcctctgcagctgtgctgtgcacccccctgcttccaccttaagctgccttggccataccctagctgacaactacccactacccagtgctaggaacgatgctactaccacaatgccatgtgccctacacatgcatgtggtgaactgcaacttgtgatgtgtgtacttaacacatagccccatgtgacctcacgaatacccctggctactaccctaactactatagcgtaatatttgccaccatgtgacccaccgcggtaacttgaaaactggaaacccaaatgacaaaaggatcgggcaccggaaacgccacacacgcccaaaactggccaccccaaaccctttgcgcccttgccacaacaaacaatggcccttcgcacggcctg

SEQ ID NO: 566710 - DNA, 334 bp, Homo sapiens
tgttccctcaacccatttgggtaaaattacggttctaattagaaactgttttaaggaggggttgggctcggtggctcacgcctgtaatcccagactttgagaggccaaggcggtcccgaagtcagtagttttataccagccaagccaacatggtgaaaccccgtctttacaagaaatacaaaaattagccgggtgggacacgcctgtaatcccagctactcaagaggttgaggcaggagaatagcttgaacccgggaggcagaggttgcagtgaactgagatcactccgctgcactccagcctgggtgacagagcgaggctccgtctcaaaaaa

SEQ ID NO: 566711 - DNA, 1144 bp, Homo sapiens
  misc_feature (320)..(320): n is a, c, g, or t
ggcgtcgagcgggagcagaggaggcgagggaggagggccagagaggcagttggaagatggcggacgaggccggcccatcgcccttcatgacccggcggtctcccctcgtcggtcggcgggggctcggatcaatggtgaggctcggtcgtcagtctcctccgccggggagctcgcttccgcaaggagcgccgcgggagagatgtgtccctggtgcatcggatgctggagccctgggtcgtagtcccggtgtggagctggtcgcctagatgcggtgaggtgcctggacggtctggccctatgtgggactagacccgagagtngtcgagtctgagctggacaggactgccttgtagggcgtgagaagagcgtgagggtccagatgagcggtcggactgggcagtgcgggtgcagcacacgcaggcccagagctggatcgtgcgcgcggctgggggaaaggaggacaaatggtgcctgggaccttgtcagcggtccgcaattctcgaggagtccacgcagtcgtggtcacgatcggaatcttgtatcgaaccgagtgatcgagcgatcgaactgaaggggcgacggacggagggacacgaagtgcgggaggagagcgctccgtctgattgtcgtgcagtaccccggcaaggaactaagagggtcctcttgcgtcgatatactgcgctggcaatagggaaacagtattagtactaggttaaaaattgggtgtgtatcccactgtacgccatgggttggaccaaggggtcgcacttgtagggaggaatgtggactacaaggaagacgcttgcgatccattgtcaaaaagtcctgccttatctcgaagcattctgcgcgcctttccggagagggggcccgaacgaggtatgttaaggaatcgccgccgttaggttaccataatttctggaaatccaaaagtcaacatcccattccttatcggtagcatgtgtggggcccccatgaagttccctccgggataaccaaaagtttggttttaaacagggacttgtccactaaaggggctgggggaacaaattagagtgaccacatccccatcctttgaagggcctggcacttggagtagtgaagcgaccttggtagggcacagaagtgggtacaggttcaactg

SEQ ID NO: 566712 - DNA, 463 bp, Homo sapiens
  misc_feature (354)..(354): n is a, c, g, or t
  misc_feature (370)..(371): n is a, c, g, or t
  misc_feature (421)..(421): n is a, c, g, or t
tttgggtccagggtgggctcttccccttcccacatcagggacccggggatggatgtcggaagggtcaccagcctccagcctttggaggatggagcttgggtctgcagggctttgcagccacacagcgaggtcagtccggggccagccgcgccattcatggtaatggtggcctcgccccattccatgtcatccatgtcacatgaggacgtgcagtctttccttgttccttttccttagtgggaattttgcctggggagaacctccacttgaataattgaaatttttttgcattgcctgttgggatttcctttacggacaatggggggaacgcggtgttttccccacctttttgtngggtaagaaagcagtnntgtttttgaggaaggcgagaaggcaaagccagggggcaggggctttgttnttggggaagctttccgttgaaaagccgttttcgacgttttag

SEQ ID NO: 566713 - DNA, 260 bp, Homo sapiens
tccagtacccgagcatgcttgaatggctgtcagggtcgacgtgtattcagctacatgggtctgcaatgtcctccctggtgacaagtatccggtcgagacgttgagcaaccagtgctgagctaccaaatatctgttaagctgggagcctgggtcgacgctgtattcaactactgcggctgcatgcctctcctgtacagagttctcgtcgacgacgtgagcaccagtgctgacctccagaatatcgttgagctaggagccgt

SEQ ID NO: 566714 - DNA, 156 bp, Homo sapiens
atgcggagggtctattgcagcaggcaggcatcaagaagacaaaagccagagtaggacgtggtgtgcggccgggtagagcaatatacactatgtacagactctgcgaatcagtcctgctcgtgcggtgcagctgtcctcagccagcgtccagtgcgc

SEQ ID NO: 566715 - DNA, 126 bp, Homo sapiens
ccttcatctactctaccatctttgcaggcacactcatcacagcgctaggctcgcacttgatttttttacctgaggtagggccttggaaattaaacatgctagcttttatttcagttcttaccaaaa

SEQ ID NO: 566716 - DNA, 136 bp, Homo sapiens
gtggaaagacctgcctcctacatcgtctacagcaaggatcagttcccggagctctacgtccctaactgtctttagagaactatatatgcggacattgacggtggacggcaagcagggtggagctaggctctgtggg

SEQ ID NO: 566717 - DNA, 669 bp, Homo sapiens
ccgtctgtcgacgggcatagtgcagatgacatcttcgctgtccactctcaatcagctagtggttcacaaccctagcgtaggacagctccatcatgcgcaagctcacgtggtaatcaactatatcgtttcaagaagagaggtcagctccttagcacaataggctcgacgtgcagataccatgttaacttacttccaagtgcactgcattcaacatcacgcacgtgacacatggacgcgaagacgccgacaggcgctatcgccatctgattgcaatattccactgtaagcagaaacacgtgtactcgttcacaacttctccacacagcgccctcttgccttgcgatcgtccccggctaatctatcacactgaggggacacgcatcaacactctcattttactcgaggcgcagcactagatcatgttgcctaattctaaagttaaggataacacttacaacgtaaaagagcctgcatttttgcgaatttcttgattacccgaggtacgcttaagcatcagaatgtcattaaaagcacgacgttgactacccaaaagctgataaccggaaaacggcggttaccacaagcacaaaaccaggagatctagtcgcaacgtacgtcgagggagtacaccctaagataaacaccaccaagttggttggggccattacc

SEQ ID NO: 566718 - DNA, 555 bp, Homo sapiens
cataagcttttaaattgcctttgatggaactgaagcaggatgtttccctgacccctttgtgggacttgtgacgggtgcctcgtttattcagcctgccactctcaactccttgcaggagcgagcatgcaagcaaatgaggcaggaactggagtgcactgtgctggaatcggcactgcagcacggtaggatcaaacttcactcactgggacctgctgcagtcccctgcttgtgggaggaagcatgcaggtgaatcagtgcaggagccaaagtgagtgcttttggccaccggcaggagcaaactctgtgtgggccccacagcagcatctaggtgggggagcctgcgacccccatagccccagagggcatgttacagtgttcttttaactctgccttccatggatggcttaagtgtcaacagctcagtgaggcctctgcctttttgtgtgaggcagctgccctccaccagcaagggcagagggccagtgtgacagtcttttgtatctgctcttctggcttccaagctcttgtctttgttcaggaaaagtgaggtcacat

SEQ ID NO: 566719 - DNA, 135 bp, Homo sapiens
  misc_feature (19)..(20): n is a, c, g, or t
cctgatttctagatggtgnnaaggggattgttgctgactggaggtgtgcacgcttgcggttctgcttttctatcatgccctgggccagttccaactgtgctgcgcgctgacgttcaaaggcagaataatttccgg

SEQ ID NO: 566720 - DNA, 1014 bp, Homo sapiens
  misc_feature (759)..(759): n is a, c, g, or t
cctggtcttcaacgagggctgatggcgttcccgaccgattcccttatccaggcttttagataacgcttatgctccgtgctccatacgtactgcagtcagctaggtcctttagacactctacctaagatgtttagaacgaagccttataattccaacaggaagcagtaaggtattcgattcactagcgaggatactcgctacagaattctctccctgcgtgattgtcctcagcagttctaattcctgacagcgctcctaacagggtagagaaggcacacacagaacaatccgaaagctagaagtctgcttccgttattactccactgactgtctgcatcacagttctgtggcatggtagcctcagtgcagttctcatcaagggtagctgtctttcggccaaatcagccttggttgtacaggacgcctcttgactggctaatcagtcatacttaccttccttaaatggtagccctagaaggacaggccatcctagaactgccttattgagggcaggctatggaacgacttggtagctctccacaggatctggtgctagactctgtcaagtctatgactctagcaggcaaaagttacgaacgattaacccgtcgaacacgaaaaagactaaactgctacatagcgtcaaagggaaacttatctgagggcgtgacttcatagcttggcattccaagggcaagggacctgtgtgagccaatggttccgaagaccagttcccttggcgccctcgatgccaaggtnctcgggctctgctggccaaggacatgtgttggggaatttaggcttgcccggggatgggagttccctgttgagccccttctccaagtgggcccttaattgtgccgtgtaaagttttcgcccctcgggatggctgaaaagcgttgttctactcagcggtatgtagcatcaagttaacttcctgacttcatggtgcctatggttcctacacattttaggcgaaggcagggggggcgtgacaaggcacaagagtctctc

SEQ ID NO: 566721 - DNA, 931 bp, Homo sapiens
  misc_feature (75)..(75): n is a, c, g, or t
ttcgtcgcgccatattagagtgtttgtttggtctgtcttccccgcgcggtagaacactactcctgggtgggggtntttttaataaggcggactcctcctccttttgtactaccactagacgccacggagtgtgtttgtcctggttccgcgctgggcctcccccccgcacagggtggtgttggtaacgttcgtgtggagcacgcccgtcgttctttttagacaagattgcggcggtatacataacatagacgaggacataatgtagcacccgccccctcgttgtggttgtcctccgctcgccgcccgaccccgtgtgggtcgcactcctcctgccgcgcgcacaaaatatacattgtgtggtgtagcataggagtgttgttgtatctccttctaataacaagtaaccaccctactcgtgcgctccgccgcctcctctaatcaacatccacaatgtgttttctcccacacctcctctcttcttcttctaataatctcctctcgcatccacaccccagcccgcgcgccacacaatagaaggtgcgtaagattagattgctcttctccaccaccacacaacctcttgtttttctgtcttaagaaccaataacaagaacttttgatgaggagccacccctctatttaatacgaaccacactcctcctcctcttggggaacatcaccacactccctgttgttgtgacaccccactcctcttttttttcttttttttcaggaagaacaagggaagtaaccacccgcaagaatcatgttgtgtttcttttttttgtcttccctactgttatcaccccccctatcttctttgatcttaccccccccccctatcttttttttttttaccccccccccccccccgttttttccttttctccaacaattttttttttcgggcgggggaaaaaaatctttttta

SEQ ID NO: 566722 - DNA, 104 bp, Homo sapiens
attacacccttatgtctgggcatctatctgcttggtccatagtgtgtcattatgtttcttttttcgcatggtttggcgtgctcatttcgttgagaagcttgggt

SEQ ID NO: 566723 - DNA, 1243 bp, Homo sapiens
  misc_feature (575)..(575): n is a, c, g, or t
ctcgagaaagtgaagttgcctggatggatatcggttcgagtaccgttcagggcgatatggcaggcggtcaatgtggttcatgtaactcgtgtccttgttcacgtacgaccctcgaggacgagggcgcggatcactgacgtgtatcatcgtcatctaatcgggaaaacattgaacacgatccgagcgtatgatcggtcctgctctgcgaagtagtatgcactcacgggctctcaagtactggtggaatggtctctagccgcgttgagtggacaccgagtaatacaatgactggacgcggagcccaggtacgtaactctgacctagaagtgagacatcatccagtcttatttccgataacgagtcgaggaacgtgaatcttcatactgagcacattgatcttgcaaagatcgcaaggcataagcggtcattcatgaacaaagtgcaccaacggggtcctcaatggagataccgttaaaggctttaacctagattttcaatttggggcgccgttcacatgaatagtcctagtgctaattaagggttctgcgctactcgggaccttggcgtagttgatnttggcaacgcaaggtgggaggattcaataggggagtttgcctctagggcaaatgcaaccgtgcccaattttcttgactaaagtttctagacttttggaacggatcgtataactaggcgaggacactagatgacagcgtctcgggtattctactggcatcatggagcattcttcctccttgaatggaccgtaaaatagtgtataggtcgaccatgacacacctttaaaggggaaacctatgaccaagatattgctccttgagccgagagctccatggggattatagccatggtgccatcacaatcagagctttggaaaatggagtatcgctacaaattgaagggtgtgacacgggtattatagcgcatacaggcaatccatggaaaaatgcatcagggcagggaagttcagatcgcgcttacctaacgtagtacattccatcatttccaaatatatgttacctcccccattaccgacgagtggtatccatgaacaaacaatagggagtgcattactatcgacccgattaagggcaaagtcgctttaagtggaacatccctgtcaggcaaaccttactgcatatagatagccaggaactccggaggaacaaccggtgggcgtatacactataacgaatcatgggcaccaagcgtgtgtaatgggtaaaaa

SEQ ID NO: 566724 - DNA, 1101 bp, Homo sapiens
gtgcgccccagtcgacgctgagctcctctgctactcagagttgcaacctcagcctctgctatggctcccagcagcacccctgtgccctgcgctgcccgcactcctgtgatccatgctctgtgtggctctgtatcccagtgacctgtgcaattgcccagacatctgtgtccccactcaaaagtcatccatgcccctggaggatgtgctccgtgctggtgacatgcacgcacctcctgatgaccatgcccaagttgtaggggcatagagaccccgtatgcctaaaaatggagtttgctcctgcctgggaacaaccggaaggtgtattgcaactgagcaatgtgcaagaagatagccaaccactgtgctattcaaactgccctgatgggcagtcaacagctaaaaccttacctcaccgtgtactggactccagaacgggtggaactggcaccacctcccctcttggcagcacaatgggcaagaaccttaccctacgctgccacggtggagggaggggcaccccgggccaaactcaacgtggtgctgctccgtggggagaaggagcatgcacacgggagccagctgtagcgggagccagcgcatgagagtcacaacgcacggcgcagcatcacgaccagatcaccatgggagccaagtaacccgctgccgcacgagcaccggaaccatgcaaggcaccaaaggagcaggcacgtgcacaagcagcacgacgggcccaccctacccggccgcgaaaccactgcacaagcaggagagtaccacaagagcaatgacaaggcacggggagcaagaggcagacacaccaaggagcccgagggacgcgacactggaccgagcggtcccaaagaaagggaagcaccagggcccagcacacggagccccaaggagaacacaacgagcaagaaggaacacaaccccaggccagcccaagacaggtacgaagcccaagaccaacgagacaagcccgacacagagccagacccgccacggccccgacccaggagcaccgcgacgcaaagcagacagccgcgcgaccgcaccagaggaggaggcggaagcacgccggccacaacggcgagcggcgag

SEQ ID NO: 566725 - DNA, 278 bp, Homo sapiens
tgtgaggggcggcagaggttctcaatacagaattatcttatgagctaatttgaatgggtaaacctcagaggtctaggttccatgcctcttgctttatgactgctcagccagccctgcttttatcgatctttacatggacattctatctgatcgtttcttttgtaaggggagttctgcttagtgttttacatataccacaacacgtacttgtacacttctacttttagagaaatgaattcctgtttgcctgatttcatacctcaatttcatcgcctatt

SEQ ID NO: 566726 - DNA, 319 bp, Homo sapiens
  misc_feature (264)..(264): n is a, c, g, or t
  misc_feature (275)..(275): n is a, c, g, or t
tttcttaaaatgcgatcattttatacacattacccttcaacctgtctttttcacttagaaaaacatcatggacagctcctgtgggtcagtagataagcatattctttttaatagctgctgagacttttacttctgaagtgtaaattcgcactgggtataaagcagggcctaaaacaaaaagttccctgcccttttagagcctccccattctgatgggaggggaggccgacaacacgcaggacaggtgtagggacatgtcagagngtgatccagtnctcttgaaggggaaaccatggggcagtcccaggggtaggaaagc

SEQ ID NO: 566727 - DNA, 298 bp, Homo sapiens
  misc_feature (103)..(103): n is a, c, g, or t
cgaggttgcagtgaaccgagatcgtgccattgcactctatcctaggcgacaagagcgaaactccatctcaaaaaaaaccaaaaaactgtatgttcttaatctntaccacagatgtatgcaggtggggctcaataatttttttttttttttagatggagtcttggctctgttgcccaggctggagtacagtggcacgatctcagctcactgcactctccacctcctgggttcaagcagttctcttatctcagcctcccgagtagctgggattacaggcacaggccaccacaactggcta

SEQ ID NO: 566728 - DNA, 120 bp, Homo sapiens
tttccccctgcccccattttattgggtagcttaaaggggaacagtgccatgttccccacaaatgttcctgtttccttgcatgggcataggggcccctcctttatgactgattaaaccatg

SEQ ID NO: 566729 - DNA, 377 bp, Homo sapiens
gtaggctggtgcctgatgctctgcgtgccatgatccactgcctcctcccaggctgctgcagatgagctggaatctctccctctcctgtgggagcagctctaccccttactgtctgctaccaggtctggcctcgctatatggacatcttagcccttcaattcgccgagatggggaccattcctgctgcagccaatatggccactgtgggctggcccccagctgggatatggatggccctcaacgcaagccatggccatgggtccctccccagaggcgaaattgtaaaaaagatccatttggctagcaccaaggccacctcttcctatttggcacggtgaggtcactgggtgggtcttgcagtctggatacgcctgccc

SEQ ID NO: 566730 - DNA, 1131 bp, Homo sapiens
  misc_feature (423)..(423): n is a, c, g, or t
  misc_feature (796)..(796): n is a, c, g, or t
gaagcggcggaccgtgactcctggccgtgaccatggacccgtctggagacccctatcaaggatggcatttctctaccagacagcatgtcacagtatggcaagaagtgctggcgagaaggtgtggtgctctgcatgtagtgcaggaggcccagtcagtgcgtggctcggcatggagagctgtcgaggtccgcgtgatggtgggctgggagcatgcgggtgacatggtcgtgtcgggcctggtcggcgaggggagcgacgggtcatccgcactggctgactgtgtgtccgtgcgtgccggctgacggcgagagctgccctccgggacgccggttgccattcctgctcaccaccaccgagcgcaagccattatattggcctgtctcaggcaccgccaggcctggatgggggcccaatctgcgcacnttggcccttcccggggtacacggcggtgggacctccctcacgggatcgcgacgagagtggtgcacacgtcgtccccataggaagggagtctgggttcgcccgattggagtgaagaagctacgaatctagctcgctgcctggacaggatggtgcagcagaagtttctcccgatggcgtgagttgcacgaagcgatatggaggaccagacgaaccgggtagcttgccctggatgggggcgccactgggcaccatgacttgcggttgtcatgagtgcgcgcgagaatccgtcctacttcccgaggcgtgcaaggggtaggcgtcccaaagaggaaccagtgcgcaagggacaccgtacgttaacacattgcttggnctcccttaccacgactttacgcgtgtgcagaccgaggatctccgggttttccgaaccctaggggtggcgagtaggataccgtctcggattctggagggccccgggcccggttctcacttggccacagcttccgtagggctgggggggcggccgtgactttgatggccgtttcctaggggaaccccttgcgattgtattgcacccgtatgccacctatggttgcacgggggcctttggttgagagcgcagcgggggccccattcagggcctggtccgagcgtggtatagcggtcgctcgccatattatatcttagatcgaccaagggtgggcgccg

SEQ ID NO: 566731 - DNA, 232 bp, Homo sapiens
ggtcttgctgtgttgcctaggctggtcttgaactcctaccctcagtggatcctcctgcctcggcctcccgaagtgctgggattactggcatgaatcactgtgcctggccaataattcattttaaaactttttttttttttttggaaataggattgggttttgttcccaaacctggagggcaggggtgtaatctcggttaactgacccctaaatagccggggccccgacctca

SEQ ID NO: 566732 - DNA, 499 bp, Homo sapiens
  misc_feature (2)..(2): n is a, c, g, or t
  misc_feature (5)..(5): n is a, c, g, or t
  misc_feature (164)..(164): n is a, c, g, or t
  misc_feature (202)..(202): n is a, c, g, or t
  misc_feature (208)..(208): n is a, c, g, or t
  misc_feature (266)..(266): n is a, c, g, or t
  misc_feature (293)..(293): n is a, c, g, or t
  misc_feature (393)..(393): n is a, c, g, or t
  misc_feature (439)..(439): n is a, c, g, or t
  misc_feature (451)..(451): n is a, c, g, or t
gnttncgctcaagctgtaccagcggcagcagcacagacagggccttcgcccggtccccaggcctgttcctccggttgagggctctgtggcgcccgatctgtactgcatgtgtggccgtatctacaaggacatgttcttcagctcgggtttccaggatgctgggnaccgggagcaggcctatcactggtatcgcaaggctttngacgtngagcccagccttcactcaggcatcaatgcagctgtgctcctcattgctgccgggaagnactttgaggattccaaagagctccggntaataggcatgaagctgggctgcctgctggcccgcaaaggctgcgtggaggaagatgcagtattacttgggattgtggggtttctaccctggggagcccnaggatcctcgccaaatgaccccaccccagggtgggtgcttggctgnaaggagcaaggnttgttattaagctcaaatgccccccaatattgggtaccctgggtggtt

SEQ ID NO: 566733 - DNA, 947 bp, Homo sapiens
gctcgcatctgctatagtggaggccggagcagggaacaaggttgaacagtctaccctcccttgagacagtggaacgtactcccaaccatggagcctccgataggaccatataccgagtcttcttgccgtatacatctcggtagcaggtgtctcctctatgctaaggggccagttacagagtttcatcacagacaagtgatcaggatcttaatagcccgctgctcgataggcgccaataccaaagaaggccctcgtcttgcagtacttgatcctgtacgcataatcaccaggcgagcccttgacattgccgtcctattctctcacgctagtcacttaggctagcgtgggcacatctcacattgtaacgtaacgtaagcaagtacgcggcaagccttccaacaacctacgcattcgttcagacctctcagcgcggagaacgcgagggacgacaccctagtgtcattattaactccaatcgacgcttatttctggatttgtctcacgggtcaactcacgtgaagagttaccattattgcttgtgatcactctaccaaagagcgtctcggaagtaatcgtcctcgttacttgtaaccattaactagcgtcccggagacgcaacagaccaaggagagccagtttgggggattgaaccatttagggctcatgggtcctcgagcatcatgaatcactcgagcttctggggctatacccttacgaggtacagtcgaatgctgaaagccaacctagccgacttagtaagtattgaccacggttcagcgaatattacggaacggtttaggaaacacccatccgaacgcgatagttgtcgcagcctctgcgactaaaccattaactcactccgttgtactgcccgcaaacggtggcggcacacaagtatgttttcagggtgaacctcggaacaactcgtcccaacggcagagccacag

SEQ ID NO: 566734 - DNA, 419 bp, Homo sapiens
tgaagagttcttctgttgcactgtaggagaggttgccttaaaaccagagtatttgattcaccactccacgtgcttatctttccaccttctatagtcttgtttgtgacctgtctctccagtatagtacagggaaatagatcgcccatcgatctctggtccctgcttttcttcaaaggttttctctgcatcagcttctgtcttaaattcaatataagcaatccctttacttttcccatccttgctgactaatctgatctccgcagcatcttcaaacacttctttcaattcatcctgagagaactttgtaagggagatttttagccaaaagtgttctcgcatctcgctctttcttactgtcttttccttttggtttctctagtttaatttcattgccaaagactttcaaaccagtgagttcc

SEQ ID NO: 566735 - DNA, 653 bp, Homo sapiens
ctttgcgatgaaattgccctccaaaggtttaccacctgtccctgagaagatgaacccatccgggtgctgtctctctttgatggaatatctacaggcctcctggtgctgaaggacttggggattcaggtggaccgctacattgcctcggaagtgtgtgaggactccattacggtgggcatggtgcggcaccaaggggaagatcatgtacgtcaggaacatacgcagcgtcacacagaatcatatccaggagtggggaccattcgatctggtgattgggggcaatccctgcgaatacctctccatcgtaaaccctgctcgcaagggtctctaagagggcactggccggctcttctaagagttctaccgcctcctgaatgatgcgcggcccaaggagggagatgatcgccccttcttctggctctttgagaatgtggtggccatgggcgttagtgacaagagggacatctcgcgatttctcgagtccaaccctgtgatgattgatgccaaagaagtgtcagctgcacacagggcccgctaattctggggtaaccttcccggtatgaacaggccgttggcatccactgtgaatgataagctggagctgaagagtgtctggagcatgcaagataccaatttagcaaatgaggacatta

SEQ ID NO: 566736 - DNA, 461 bp, Homo sapiens
  misc_feature (17)..(17): n is a, c, g, or t
  misc_feature (61)..(61): n is a, c, g, or t
  misc_feature (77)..(77): n is a, c, g, or t
  misc_feature (168)..(168): n is a, c, g, or t
  misc_feature (386)..(386): n is a, c, g, or t
  misc_feature (461)..(461): n is a, c, g, or t
ggccgcggtgcgcctgngcggccgttgaaaaatggcgactgtggcagagttgaaggctgtnttaaaggacaccttgnaaaaaaagggggtattagggcatttaaaagcaaggatccgagctgaagttttcaatgccctagatgatgaccgtgaaccccgaccatcatngtctcatgccttctaattaatgaattaattcgagagtatttagaattcaacaaatataagtatacagcatctgtcctcatagcagaatctggtcaaccctattccttggacagacatttctcatccatgaactaatgctttgaagaatcaaaggataatacatacctctttatagggatttagcccattctgcgtggaactaaggatggcatccagangcatttctgaaaggcctcactcagcctcagacccagtctggcagacaacctagtagggccatggaccgagtttcn

SEQ ID NO: 566737 - DNA, 733 bp, Homo sapiens
agtgtgagcagtgacatggtccaagacaaggaaggcagttgggctgtgggaatggggagcccagtgaaagtgcctccagagctggcctggagagtcacctgccgaggtgatgagtgacgcgccagcccggggtgaacgcgccagctgctttctgctgtgccccaagctgctgcatgtgcccacgcagcctgctgcctgatgcctgacactgctgtcctctcccctcgctgcacatgggctctgctgatgtgaccctggctgtggctgatgctcctgtgcttgcatggaactggcttgcatgaagcaaccacttacctccccccgtgtgagctgtgagcccctcccgatgattccagtgtgcctggctctccctccagcatctgtggccaagattggacaatcagtgtgcttgggctacaaggacctggctgccatccccaaggacaatggccatcctggacatcgagcggccctgacctcatgatctacgagcctcacttcacttattccctcctggaacacgtggagctgcctcgcagcctgcgagctgctcgctgtcacccaaatccacatcaccagcccaacatcccagaggtgtggcggacagcggtcgcctggactcatctctcaggcctcaggccacaaagcattggaaccacggacagactgacacatacaacacctgaactaccgcagatcagctctcaaaagctccatatagagaaatcagagg

SEQ ID NO: 566738 - DNA, 552 bp, Homo sapiens
  misc_feature (194)..(195): n is a, c, g, or t
aaagctctccaaaaagtttgtttctttccgcaaagggaataggcccgggccctttttaagaacttgaaccgcgccaacagtcccccccttttctttgccaaaagtcaaggcttatataaaaggccgatttccattgtaaagccggccctcggttgtaaggagccagatccctctcccggggccttgggacaagnnactttttaattggccccggcccggttggttttttataaattccttaaaaacccccccgggggtgaaggggtaaaaaggaggccccccgttccttttccggtattttttgggggggccaccccctatttccccccggttttaatggtcctttttttatgaaatccaaaaccggagcccaagggtggggccaacccaaaattgtggggccttttttttaaaaaaaaggtaaaaggccatttttccccgggccggttttccttttacccggaaaaaaaaacccgtttgtttttttttggggggggaacaaaaagggtcgccccaacaagggttccgggaaaaaaatttttttttttttta

SEQ ID NO: 566739 - DNA, 127 bp, Homo sapiens
tgtgggtgaaggggtgttcctcttattcaagccatgcaccctactcgtggctggtaaaatcacgggcatgtgttggagatggataattcagaacttcttcatatgctcgagtctccagagcgacact

SEQ ID NO: 566740 - DNA, 843 bp, Homo sapiens
gctcgcactctgttcttccgtcgctccgcgcgtcgcgtttctctgccggtgagcgccccgtcccggggcctgagctggacgtcgcaggcctgtgccccccgagccctggctggccccgtttcaagctgcctgatggcctcgtcgctgccttccccggtgatcgagaaggcgtgggtcgcaatgggaagaagagatcgacgcgctgtgtcattgacaatggctccggcatgtgcaaagctggtttggctggggacgacgctccccgatccgctgtttccttccagtcgtcgggcgccccagacgacctatgggcgtcatgtgtgtggcagtgggccagaaggactcctacagtggtgcgacgattgcctcagcatgcaatgcgtggccatcgtgacccgtgaagtaccccattgagctatggcatcgtcgaccaactgtggactgacatggacgaagatctggcgaccacaccttctacaacgagctgccgcgtggccccggaggagcacccagtgctgctgaccgaggacccacctgtaaccccaaggccaacagagcagaagatgactcagacttatgttctgagaccttcaattatccacgtggcatgtacgtggccatccagggcgctgctgtccctctacgcctcttgggcgcaccactggcattgtcatggactctggagacggggtcagcaacactggtgcccatctacgagggctacgcctcgccaggccatactgcgtctgggacctggctggccgggacctgaccgattacctcatgacgattcgtcactgaacagaggctacaggttcaccaactacgtgcgcagcgggcaaa

SEQ ID NO: 566741 - DNA, 128 bp, Homo sapiens
tgtagctgttctagaggtccctgatagcctcgggagggggtatgagcaacatggcatgtataacaagcagtgcaagtatgaacaacagtgcaggtatgaacaacagtgcaggtatgaacaacagtgca

SEQ ID NO: 566742 - DNA, 913 bp, Homo sapiens
  misc_feature (334)..(335): n is a, c, g, or t
  misc_feature (512)..(512): n is a, c, g, or t
  misc_feature (515)..(515): n is a, c, g, or t
  misc_feature (564)..(564): n is a, c, g, or t
ctctctctgtctctctctctctctctctctctctctctctctctcactctatctctgtctctctctctctctctcacactcagtcagggtgctacatcggactaaagactctgacacgaagacaatctctaaagaccatgacaaagaaagcgccttaggcgcataagggccacccagtgagagtactgaggagcggcggacagcaagctgaataaccatagccgagagcagcaaaaacatgttggggtcacaacacgtcacacccaaaattcgtacaaaaatatactaacatactcaatatagagcagtacataagtatagcgcaatggtgcgnnctcattcactgcaacacctacaggacggaaatgagcatgtggtggctgaagccacaacaacagaacgctaccaggcacaagaggaacgcgtatcacgaccacatcgacacacgacgcacgcgaaaactgccgcggatcagggtgtgacccacaggtatagcagacgatgcgcgacangcncaacgcacggcgacacacagagcacaacacaggcacaacagaccgcacngggacacacgaccacaaggacagcgcgcaactacaatgcacacggacagtcacacagcctgagacaaaacggcacaaaagccgccgcgcacaagaaagacacaccacggcgcacgaatggaggatatactgcatagaggcaccgcactcacaggcacttcagaaaagaaagggaggcggcggaatggccaatcacaaacttaaagggggccaaatttccaaaaaatgggagagaggaagtttaaaagaacggggatggatttagaaagaggacaaacacttctaaagcggggttggaagaacaaccacagggcacagggttccaagtggacacagggcgagggcatttt

SEQ ID NO: 566743 - DNA, 1730 bp, Homo sapiens
  misc_feature (1044)..(1044): n is a, c, g, or t
taaagggtctttacagtgaatataggatgatgttttccttagcagtgcctggcataataggcgatcagaagtggaactcatcagacccttgatgaacggtagatctctgaatcgttcatgacgggtaatgaggccccgtaatgtaaggaaggatgtgcgacgtactgcgagctgtaggagagtgagtccgaggataggtaggtcgtggtccacagtatattcaagaggtctgtcgtgactgatcgaatactcagtgtttcacctcgtacttaagagcctaagcgaatcgagcgtatgttctacgagttgggcacgggtgtgctcggcacttggtttgtctcgtattttatagtgcgtggattctctgatgatattacaagagaccagataagataatatacttagaggaatagagagactaggggagaaacacacatccatgctaagctgttcgcggtggagagctttcaggtcagagattttagaggccacacttgcgtgtaacagctgacaaaccattccgccaaccatagggcggttaatataattctacccttccgcaactaagccctcgggcgaactggcggcttaaatgtgaaattactttacttgcggtgggtaaacgattcggattatcctaagagacccttaggggtatacacaggcgtatgcttcaaacacgacttcaagggttcatcttgtgggggcacaacagcactttcaatagagaacaacgcccaccacaccacagtggccactcacacactcgtccgtccataacgcttaactcgaggattaaaccatatgacctacatttttctttggaacacacccccaattatttgaaactttggcacctaaggggtcgcctagaggcaccattcggcttttaatattaaggccctcagggatatgcgattcggctacatcaactttaccttaccaatcactatataaccacctattaaggagaccattacccgcgagtcttaacaacaaccgatttaggagcacccctatacttatggcgacaaattaataganatccgaccgagaaaacccaacataattcggcatagtatttcccacaaccgcaagggcgttgcgcataaggcgtgtccaacaacagtatttccccccatatggggagagtggaatatccccccaaggtggcatggggttcacattaatacaaaaatcatttccgccgacaaagaggatcattcgctcaattatggtagttgcactttcgcgttgtgggccaacgtataaaagcagttcataacgtttagcctaccaacacacatgggggagaactaccagtttcatacatttacttatggagggtctggaaaacagggccttaaggtttaactttacaaaacggttaatcatcgggctgtcataaccacacgtttttacagctcccggattatatattatagcatgggtatacctctgtaccatgtgacactccggttaccacacttgttggctgcagaatcaacgcaaagtgttgggcaagatagtcacaatacaggaatatatatggcccacaaagggcgtggtgtttaatcggtctaccgcaaatcgttattatgacgagatatcgccccgtgccgaacatagtaatcaactccccgtattggtgcaatcacacatgcggactgtagtcatacggtaatatatacatcatgtagtctacatgagagaatcaacactacatacgg

SEQ ID NO: 566744 - DNA, 223 bp, Homo sapiens
ccccccccccccttggggcttttcccggccctcccaaacctggggccccgggggtgttttccacccccgggagggggcaaaggaaattttttgggcgggttggggtgttggggggttttttttttgggggggggggcccccccccaggtatgggggggtttttaagggggggggcccctcccccaaattttttccctttattaagggggcttgatttcttcca

SEQ ID NO: 566745 - DNA, 154 bp, Homo sapiens
gacggcgggagcgggctcctcaggaacctcctacatcgtagtctagctcatgctcatccagctccctggtagcactgaggagagctcaatccctaaagtcgcttgtccaggtcttcctaccccttactgtccccctacctcctcgcaaggcgga

SEQ ID NO: 566746 - DNA, 424 bp, Homo sapiens
aatgttatttttgtccaagcttcaagtgatttggaggaaaatgttctcttcctgattggagaaaagaaactggacatttgacacctattcaaattatactgtaaaattttattttatttttgccttgagtatctgaagacactcaaagcagctctttttcaacccactgaacaagatgttttagctacaccgatacaaaaattacataagataagcatgttgtctacccttgttccgtaagtgttctttgaaagtttgtaatggttttctcctaaataaggcatggtgacacatgcctgtaagcctagccctttggaaatagtccggaatttctatgccaactcaggctacaggagaccccaggtcgaaagaataatttgttgtggatgtatttgaaattatccagccaactccctgttaaaca

SEQ ID NO: 566747 - DNA, 508 bp, Homo sapiens
  misc_feature (109)..(110): n is a, c, g, or t
  misc_feature (114)..(114): n is a, c, g, or t
  misc_feature (116)..(116): n is a, c, g, or t
  misc_feature (150)..(150): n is a, c, g, or t
  misc_feature (159)..(159): n is a, c, g, or t
  misc_feature (164)..(164): n is a, c, g, or t
  misc_feature (204)..(204): n is a, c, g, or t
  misc_feature (495)..(495): n is a, c, g, or t
ttacttctttgtgtggaaagagcatgggtttggattagttagattaaaattcaaattttagcttttctcccttggtagcaaaatgactgaccttgggaaggtgtgcacnncctntntgagcctaaatttctcactccccgaagaaaatantgatgtctnccttncaaacaccaggacatgctgttgaattcaaaagtcagatancaaaatgcataagaagtaagatgccactatgtaaacttatatatgcgtgagtgtagaggaagagatgggtatgcaagaatcgtcaacaaaatgctgatggtggctggttttgggagacatttgctttttcccttttttctttctgtaatgtttgaattttgggctaattactgtattaacagggaatgagaaacatgtttcagtattaaataacaaagttgttgtaactttaaaaaagaaaagaaaagaaacacgcattacctgatataaataagtaaaatgtattaaatntctgctaaacata

SEQ ID NO: 566748 - DNA, 281 bp, Homo sapiens
agcaacgccccccccaggttcaggccccatggaaaaaccccccctagttccattggtggatttggcccctcggcctggccaatcaaagctcccttgtcctggggttcctagtgtttggtttgagatggacccgtgacccaatgagcccccttttttgggggttttccccggagcatcaggaaggtttagctgggtgtttgggaccccggccggggcggggggttccggggggcccttaaacccttttttggagccctggttccccctgtcccttcccctta

SEQ ID NO: 566749 - DNA, 237 bp, Homo sapiens
tatacagtcatgtcataatcttggctcactgcaacgctctgtatccatggcattcgagtgattctcatgcctccgcctccccagtagctgggattacaggtgtgtgccccgtgtctggctaatttttttttttttttttttttttttaggcaccggtttttggctttgtggcccagtgtgaggtgcgcgttttataactctacggctcgcaacacatttgtgaaccccaaactctcc

SEQ ID NO: 566750 - DNA, 449 bp, Homo sapiens
gtccagaagagtctgcagcgtaattctgtgaggagatcctctggagtctagctggagatatgatagcttctgtctgttcgttggttcagaaatatccggtattgatgatattctttcgtcctatccatgagcatggaatgtttttccatttgtttgtgtcttttatttccttgagcagtggtttgtagttctccttgaagaggtccttcacatctcttgtcagttgtattcctaggtattttattctctttgtagcatttgtgaatgggagttcactcatgatttggatattattggtatataagaatgcttgtgattttcgcacattgattttgtatcctgagactttgctgaagttgtttatcagcttaaggagattttgggctgaggtgatggggttttctaagtatacagtcatgccatctgcaaacagagacaatttgacttct

SEQ ID NO: 566751 - DNA, 289 bp, Homo sapiens
ttttgttttcccccccacaaaactggactttgatttttgataggcgacctactgccttggagatcccagcctgagctccccaggtccctccaaggacccgagaggaacatcttactgcttctcttcataaattgagaggaaggaggcacaaaaacaaaaaaagaaacaaacaaacaaaaacacagaacaatatggaccagcccccttttaatttcattatattgatcagcctccctgtgataaaaacacaggacttgtatttagtttgtatacatttgtgaagtgcagc

SEQ ID NO: 566752 - DNA, 207 bp, Homo sapiens
ggtcgcccaggcggccggccggccggccggcccagcttcttctttcctcgcacagccaggcggccccatgctcgagtcccgcgtcgccatggccgccggttcccgagttgtcttcagcagcaggaggagagaccccagcaagcgtcaggtctctatcttttggcctgaatctttgatccctcgcttaaaagtttacatacctcatat

SEQ ID NO: 566753 - DNA, 101 bp, Homo sapiens
  misc_feature (14)..(14): n is a, c, g, or t
agtattatttactnggtcatctgggaaccttaatgtgatttattttgacaattactgtggcacatgtttaatctgcagctcctggcgactactgtgcttat

SEQ ID NO: 566754 - DNA, 893 bp, Homo sapiens
  misc_feature (122)..(122): n is a, c, g, or t
  misc_feature (207)..(207): n is a, c, g, or t
  misc_feature (243)..(243): n is a, c, g, or t
  misc_feature (451)..(451): n is a, c, g, or t
  misc_feature (499)..(499): n is a, c, g, or t
  misc_feature (668)..(668): n is a, c, g, or t
  misc_feature (690)..(690): n is a, c, g, or t
  misc_feature (760)..(760): n is a, c, g, or t
  misc_feature (870)..(870): n is a, c, g, or t
tcttggtggcctggatcttgtggctgcaatcggttccaaacagcagttaggtcagcagtccgctcagccgaggcagctctgttcatggcgttctcgaagctcttggagcaagccggagcagnggcctcttccagaccctgcaggtgctcaccttcatcctcccctgcctcatgataccttcccagatgctcctggagaaattctcanccgccatcccaggccaccgatgctggacacacatgntggacaatggctctgcggtttccacaaacatgaccccaaagcccttctgacatctccatccgccacgccccaacagggcccaccagtgcgcgcttccgcagcacagtggcagctctggacccatgcacggcacagctgagcgagtgacacggagcgtgtgtggacggctgggtctatgacgcagcgtcttcacctccaccatcgtggncaagtgggactggtgtgcagctccaagggcttgaagccctaagcagtncatctcatgtcggatctgtggctcttatctgggctctctctacgtttggagaacgatgctgagtgtgtgctgcagtggcgtgcgggacagaccatctcgccacatcgtcatctactgcggctgcggtcgtgcgctttggatgcagcatcttctgagtcactgacactgntgatggagtggacaaagacaanaaggagggcggtcacaatgacggtggtgggatgtgccttcagcgcaggccacgcagcgctgggcggcctngcttgctgcgatgagatctcactgacatatgctcttgcatctcctatatctgtgctgcagatcgcagtgctgatataaagcaacagacaacactcagactagaagtgcanataatgcacaagagcaaactaca

SEQ ID NO: 566755 - DNA, 175 bp, Homo sapiens
gaaacacctgtggttcttcctccggctggtggcaggttccagatgcgttctgttccgggggcaggtttagggggttgggccaagacttgttaagggtttggagaaccttttccttaacctcagtgttttttctgtgtgctctcctcacatgtgcgatctctgtgtgggactctga

SEQ ID NO: 566756 - DNA, 118 bp, Homo sapiens
cttcttgtaccactctatcagcgttcattatacatgtccacaggagagacctatcgactggtgtttctggaagatcattcctcttcgagtttcttctttgacataaacctccacctcc

SEQ ID NO: 566757 - DNA, 1355 bp, Homo sapiens
  misc_feature (439)..(439): n is a, c, g, or t
ggacgcgtcattgcagccggcgagagctcagctccgaccccgccgcgccccgcgcttcccaggaggttcatctgctccttccctgactgcagcgccaattacagcaaaagcctggaaggctttgacgcgcacctgtgcaagcacacgggggaagagaccattgtgtttgtgacctatgaagggtgtggcaagggccttcatcagggactaccatctgagccgccacattctgactcacacagggagaaaagccgtttgttggtgcagccaatggctgtgatcaaaatttcacacaaaatcaaacttgaagaaccttttggacccgcaacttgaaattcacaaaaccatatatatgcagtttggacagagtgtaagaagaccttaagaaacatcagcagctgaaaatccatcagtgccagcataccaatgatcctctatncagtgtacccaggagggatgtgggaaccacttggcatcacccagcaagctgaaacgaatgcaaggccccacgaggctatgtatgtcacaagggattgtccgttgggtggcacaaactggcggacttctgaactgttgtgagaacccataaggggacttcctatgtgaagtatgcgggaaaattaacgcaagattactagaccatgagaacttgcccaagggttgtgctgtcacagggggtgggacctcaccggtgttccacatctcctccgaagccctgtgtacggggacactaaacagtgtgtgataacaccaccctttggtctgatgttaatgagtggagttcgttgtgtttacactctgagtgtgacagaatgctagtagagtatacgaggacagtggtgagtgcatgagtactaccagtcgaacgtacagtgaagcatgcgagctcacagatgtgtggcgacgcgcggcggcgtgggcgtgtgtagcacatgacgagagccacgagtacgatgaaggagtgagtatactgcacacgaaaggagagagcgcgcgcaaggtgcgccagcgcaacgatgagcgaggagcatccggacgagatgacgaccgacagaggaccaacggtgggcgcaaggagaacaggagtgcgtctagccgtagccgacgacgagtagcgcagatcggggaccgagtgcaggagcgcgtcgcaggcgaggctggggggcgcctgagtgagcgctgcgcgtggggagaggagtaaggtgacgtgtgagcggcggctgcggcggtggtgagaagacacccgaagcgcacaaacaaacacgaacagaggcaacgctacacacaaaagagaaaagacgagcaagacaaaacaaacgacactgagaaggcagcataggaaagacacagcaaga

SEQ ID NO: 566758 - DNA, 216 bp, Homo sapiens
cccattgatcgatggagtcgcccctgttgcccttgggaccagctggtcctgggtagccagggtctcccttctgtccaactatccctggaggtcccgaatttccccttcagcctctgatgcctttgggtcctgttggtccatttagcccaaggtcacctggggtaccctttggtcctgggtatccagggaatcctctttctcctttttggctctgcg

SEQ ID NO: 566759 - DNA, 1308 bp, Homo sapiens
  misc_feature (137)..(137): n is a, c, g, or t
  misc_feature (588)..(588): n is a, c, g, or t
gccctccctctcaatttttctccagacaccaggagttgttcaccacaagggcttctttgtttgcaaccatgttgtgtgacgccttgtgaacccccgtcaaagggggaataatctttgtgcccacagaaaaagggganttcccccccttttgttgtgaaaagaaaaatcctcccccccctgttaggtggggcaaaactctccctacgggaagccttcccacggcctcccacaaaatttttcaacgggaaccacgcaccaatttgctccccacaaagccggagtggttgggaatgttttttcccccaaagcccctggatccctttcaaccgggcttggccccatgtgcgggtggaagcgcttatctttctatggcccaaatattgtaagagagtgttgtgccttgtccccacacggatccctctgccacaggagtgcgcactgaaaggaaattggtgctccacgagtcccccaagaggttcgcctggacccctctctctctgaaggcgtgcccccaccctcgtgggacacaatgtacccgcccccttgcgcgccacaagcgccaaacagccacagggagagtctcccacnctgagggtatccccgcgagggacccacgggtcgccacagtcccctccaaccctcgtgtgagaagttggagatggcccgtctatagaagaggacaccccacatgagaggtccccctcgggagaacgcgccacagagatggcgctgagaaaatgtgagagagagagagaactctttgtcccgctctgagaagagctgtgctataatctatccacacgagcacactatattggcccgcctcccgccacgcgatatgtagagagatctcactgagaatatatgagaagagagaggagaatattgtggcctctggtcaccacctttctgggtgagaatatccacacagagacacttgtctctcacacatgtgtttaagagtgggccctctgaccactctgagagagtttgccacccctcaccacggagaagctctgcctcggagaaggccgagaggaggaagccacggagttttcttctggcctctcttccacaaactcttttcctctccctcgagaacctcgagagggagaactatattctggagttcacctcccttctggttgagtacccacactccacaaaggacacactttctgagttataagaccggttgaaaactaagaagatggaccacggttattcacaccgaaaacttttcacgcactcaccgatgaccttgaataaaaattgcacaccctccgtgcccccatatattacccgcca

SEQ ID NO: 566760 - DNA, 220 bp, Homo sapiens
aggagaggatacggatacggagctgtaactgctcctggtgatccaggcaacgggcactttcgtctggtctgggctgtctgcacaccaaattttcctccaaacccttgcacatagtctttctgggactcgtgcttctccgttctgccttgatactcaaagccaacggcgctcttatccacttggtccttgtcgataccgtatgggcgcgtaagggccagca

SEQ ID NO: 566761 - DNA, 137 bp, Homo sapiens
tatcggcatcaggtcactttgctggggagcttacaaaccctccacacggagtaccccattttcgagtgaagatcaacctccggaagtgaaagaaacggcaggctacagtagaatcccgaatcaagtggcatcaatta

SEQ ID NO: 566762 - DNA, 716 bp, Homo sapiens
gggaatgccccaactatatctaggggatggacccccataattacccccatactccttacactattcctcatcacccaactaaaaatattaaacacaaactaccacctacctccctcgccaaagcccataaaaataaaaaattataacaaaccctgagaaccaaaatgaacgaaaatttgttcggtggattcattgcccccacaatcctaggcctacccgccgcagtactgatcattctatttccccctttattgatccccacctccaaatatctcatcaacaaccgactaatcaccacccaacaatgactaatcaaactaacctcaaaacaaatgatagccatacacaacactaaaggacgaacctgacctctaatactagtatccttaatcattgttattgccacagctaaccttcttggactcctggctcactcatttacaccaaccactcaactatctataaacctagccatggccactgcctttatgagcgggcgcaataattataggcttgcgctctaggactaaaaatgccctatcccactgttaccacatggttcacctacaccctttattcccttactaggtattattgataacatcagcccactcattcaccatatgccctgggccttccgcctatccggtaacatctcgtgtgagcccctactattgcaccttattggaactcccacactatacgtcatactaaat

SEQ ID NO: 566763 - DNA, 392 bp, Homo sapiens
  misc_feature (11)..(11): n is a, c, g, or t
  misc_feature (42)..(43): n is a, c, g, or t
  misc_feature (45)..(45): n is a, c, g, or t
accatcctccncacgcagttctctagcagctcaagcattctnncngtccagcatccttactcccatgaggtttgcaccggactcctgcacctattccagtcaggccgtcatcctgtgtctctctggccagcggggaagcccagtggcgttgcgtgggtgttggcccttgagattttttttcacatctttcgtctttctgttgatgagtcttgttctcatcaacttgttggaattccctgcaccctttgctgtgtccaccacagtggctgtccttccagctcaattcatactattttgattaacagaaattctgaacttcactgaacttcagtggtcctttaccatcctcccctcctctcccctcccgtcccctctccccttcccccgtagag

SEQ ID NO: 566764 - DNA, 392 bp, Homo sapiens
agggtacagacgatttacatgcgtagctgactagtcacatacacgtatgatgagattggggacaattattaatttacttttagtgtttactactctgactttcttaacgcatgtaagctatgatgaacataactttacgatcatggcaaaaagatttttaaaaacaaatccatttcctgagctctgagagagaaggtactccaacactcttgctgtaacaaaagctaaaaatgctgtaccaactatagaaaacgtttctaaatcagctgctcagctggtaaacacgaaaagaaattaggcacccaaggagatcagtaagccaagcactaaagtaagcttctgcctacagggcctttgccgaatatgtctgagccacacagactcctcctgac

SEQ ID NO: 566765 - DNA, 958 bp, Homo sapiens
  misc_feature (135)..(135): n is a, c, g, or t
ctgagtcagcgtctctaagaatggtgttctggtcctgacgggaccgggaggatgattgagtgctgagttgacctgactagcattgcgtgaagtgactgagcgcaggaactcggcgagtgggtgacagcctgactngctagaaacagtgtggacgtggtgacactcagtgtgtgccttgccgacgtcacacgtcaaccacacgttcattgcgacttgtgttcacgatctgcaggacctattgaagtcagtaggatggcgtagctgtgcgagtgagagtgacaactctaggtgaagccctgagcacttatgtgtaccactcgcgacgagtcacctgtctcccgaatggcgagtattctcactacatctacacgaagcaagtctctcaatgttcctcatctaacgctatgtagtagtctcgtgaactttgtgaacaacacaatgattaattcaacgcaattgcgtggcctcacatggaagtgagcgaggcggcaagagatcaaatcacgacagagaacatatcgcggggacgggcgtggactgatcaaagctgcttgggtgtcatcgttgccgcccctccagtatgtggatccatcgaactggtgccatctgtgaggccttgcgtctcattttgatccatacggtggatgtgacaaaaacctagagacttgtggcctccaatggttagcatgtgtggtcatccacatggggcaaagtagtctgaccaaaagctatcacaaggacgaatgtggcgtggacctgggtccagttcgttccacatggttggcgtgggtggtgggcccatcggcctgatacgcggcccggcctttcgtggcttcggtgggtggctcgtgtggagttgttgggcgttttcacataccaaggccggtgggcttgctggggcagagggaaatccccgcgagaatcagggtgggttcatcaaaggggggtgaacaatccc

SEQ ID NO: 566766 - DNA, 139 bp, Homo sapiens
gatttccgactagagctgtacctgccagacagtcgcccatagtcatttcgaccgatcgtaatacgggctcttgtgtctgaaaaccccccgcggaagctcccgcggtactacaagaacatcggtctgggcttcaagacac

SEQ ID NO: 566767 - DNA, 1275 bp, Homo sapiens
tgtggggtttttattttttttttgtggtctctcccactctatgtgtgtggagtagagggctctctagaaaagaaaaaaaaaaaaaaaaaaaaaacaaaaaaagaaaacaaagagagggggagacgcaaagagatgcgtacgcggaggggcgccgcaccctcgaggcaacacccaagaggcggaccgaagaggggcgccaccaagagaagagagagccaataataaacaagcagcacgagcggcgagcggacgagacgagagatacaaaacaggagagggaggacggggaacaaacgaggggaaagcggaggagaaaaagagaagaaggaggaccaccacaagcagagggagaggagtggaaacaacaacgtggagaggacaacaaacaaccacgaagaaaagatacaagagcgaacaggagagggaaaaacaaacaccccgaaaaaaaggagagaacagaaggggcgaaaaacaaaaagaggtagaagaagacgggaggccggaaaggagagaagaggagacaaaagggagagacatagcacacacctaagccaaagaaaaaaatgcacacacccagcggagacagaaaagaagacaaaaaaaaagagaaaaagaagacgacggagaaaggacaaaaagcgtaagagaaacggcggaaaaaacagagggggaaagagagggagaggggagagagaagagaagcagaggaagaagaagaagaaaggaggcagaggaagaggggggaaaagagagagggaggagagagaagaaaaaggaagagaaaaaagaacgcagcgaacaaaaaaaaagagaagatagaaggaaaaagaaacgacagaaggaggaaaaaaagaaaaaagagagacaagaaaaaaaagaagaagagaaagaggagacgaagaagaaagcaaacaaagagaaaagaaaaggaacaagagaaggagggagaacaacagaagaaaacagacaagaagaggaggaaagagagaaggaaaagagaagaggaggagaagcgcgagcgcagagggaagaggaagagagaagaggaaagaggaggaaaaaggaggaaggagaaggagggggaaggaagaggggggtaagaggggagagaggagagggaggaagagagaaaggacaaacaagcaagaggagagacaacaggaaaggggcgggaggggagggagaggagggagcaggggaagcgagaggagaggaggagggggggggacagaggggaaggaagaggagaagaaggaaaagggagagaagaggaag

SEQ ID NO: 566768 - DNA, 555 bp, Homo sapiens
  misc_feature (14)..(14): n is a, c, g, or t
  misc_feature (251)..(251): n is a, c, g, or t
  misc_feature (291)..(291): n is a, c, g, or t
  misc_feature (317)..(317): n is a, c, g, or t
  misc_feature (336)..(336): n is a, c, g, or t
acctcccgtttaancaacctcagcagctactcccagcctctgcgtcctcgggagggccgggctgcgtcgggaccgggactcgtacccgacgaccacatcactactccacacgcgccgccttcgcggtggcacccggcagctgcattgggcgcgcgctccaccttaaggagaacgcaaccgtccgagccagccggacgcacgcgcggtgtcccatcaaatggaagaccaagacgcataaagtggaccacgcntgcggaacggctggcgcaccaagtgcggaacggaactgancgcatccgcctggaggacaaggtganacgctcaaggcgagaaccngggctgtcgagtaccgccggcttctccgggagcaggtggcccactcaaacagaaggtcatgacccacgtatcaacggctgttcacgtgctgcttggggtcaagggacacgcgttctgaacgtcccatgccctttacggacacacctcgcttggacggctggcacacgcttcccactgggtctaggagcaagcgtgggcagcaccctggaactagggcgc

SEQ ID NO: 566769 - DNA, 192 bp, Homo sapiens
tacaaaatgggagagaaacccaggcgccctgcctcctgtcttttaaggttctggagctaacacatttcagggggcccggaaactgaggaggcgggggtggttaacctatggaaaaaaggatgccctagttgggggatgaggcccaggtctgaaaatctgctcttgggtttatggcccaggcctggcctttag

SEQ ID NO: 566770 - DNA, 167 bp, Homo sapiens
taccggggctgggacgacgactacggacgaccgtacggacctgtctgtgattacggaccggactcacgaccgacaacgacggtggcgtcttggtacttgtggttactgtgcacgggaggtctttactactctgactacactttgtctggtgactgacacactttgac

SEQ ID NO: 566771 - DNA, 313 bp, Homo sapiens
caggtgtctgtcagggttggggacttaaagccttttctggctgctgggtgaaaagctgctgagaaggggatagcgttcacctaggagctaggatgtcgcgctaaaccagattggccttaatcagccctcctccttcctcaagatgccctacaggggagacatatgatacaacggaaaacatgaaatgacatacgaaggagtccaacctcttgtgattgtcctgctagaatctcacccccggaaaccccacagatactttcttggcaactgtgaatgacgtctatagaggactgccgactccccatgtccagct

SEQ ID NO: 566772 - DNA, 230 bp, Homo sapiens
  misc_feature (76)..(76): n is a, c, g, or t
ttttccccgggaacccctttgccccttgggcccttttgggggccccttttgacccagtttggccaaaaaacccggntgggccggggccggaatttccggggttttgtggccccccggggcccccccgggggcccttttttttggggttcccccttggcccaacctgggcccaaatcccttttttttttttttttttgggggggatttttcttttttttccccccccctta

SEQ ID NO: 566773 - DNA, 292 bp, Homo sapiens
atgaagggctcgtatgacatgatgctactgagaccaccatcatcattagctggagaaccatgactgagacgatcactggattccaagttgatagccgatccagacaaatgccagactccaatccagagaaccatcaagccagatgtacagaagctaacaccatacacaggtttacaaccaggcaatgactacatgatctacctgtacaacattgaatgacaagtgctcggagaacccctgtgttcatcgacgcctaccaatgccaatttgatgcaacatccaacctgagtat

SEQ ID NO: 566774 - DNA, 259 bp, Homo sapiens
ccccccttttgggcccccggggggggccccctttttttttttccccccccccccccccccggttttggggggggtttttttaaaaaaaaaaaatttaaaccccccccaatttgtcccttttggggcccggggtttaagggggggtttttttcccccccctttttttttttcccctgggcggtttccccccccccccggtttgggccccgaaatttgggaaaaaacccccccccttttttttattttcccccggtgggga

SEQ ID NO: 566775 - DNA, 109 bp, Homo sapiens
gcctccccccccccccatccccggtttttgtgttgggtttgccagggtcaggaaaaggggcctgtccctggtttttttttgaccgggaaaaaaaagcccctgaaggaga

SEQ ID NO: 566776 - DNA, 841 bp, Homo sapiens
ctagttctagatcgcgagcggcgccctttttttttatttttccacttgttttctttttattgggtgtgggatccaggacaagggcaggggggaactcgaagcgggggctttcccttagtcttctcgattattcccccgaggccccttggcgccttctgtggaatgtgttcccaacaaggggcaggggtttcggggggctctcagccttctttctgtggggcaggccttcagccctgtgggttatgtgtaacaagtctctgtggcctttgaaattgtcgcctttgtggccttgtgaacctttccgaacaagggtgctaggaaattgggtctccgactttcaaagaggggcagaaggcaaacaagggcccactttccaagcgtgggggcccctcgggagggccacgaggaagaaccgaggcacccctcgggtgttgaaaaaggcaggggaagaaagaagggaagaagtgaactcagaaaagctcgtgggcgacaagaagaggggcgccctcacgtgagaggggtaagaaaccaaaggcttctatctccctttgtgggggtgtgccccaaagcccaaacccctgtgtgggacagccgtgcccacttttgtgccccgtgggtgccccatcccgagcccctgtggaacccccgcggggtgactctccaagccgactgtgtctccccaacggaggggcgtgctgagagtcttccacaaagggactacaagaggcaccccaacactatatatcccctagggagatctacatcaggcagaaagtagaccgtggcgtgtcgcccaacccttttacaacatcccacaggggttctcagggctaggaaacgg

SEQ ID NO: 566777 - DNA, 475 bp, Homo sapiens
aattcttttccccagcaatggaagaaccctggggaaggaatgcaattcctgggggtaggtctatagatggccgctctgggaagtgttggtcttatgccggttgagataaggattgaaatacgccctggtgtcctgcaagtaccctcaggcttacttaggattgggaaattccagccgggtaaattctagtcagagtggttctctgttctcaaaccctgtttcctgtgaagatgtttatcaagacaatgtgtgcacagcaggacatagaccctcatcagtaattctaattttgcctttgccttgtgatctttactgccctttgaagcatgtgatccttgtgacctactccctgttcgtacaccctctcctcttttaaaatccctaataaaaacttgctggttttgctgctcggggtcaccatcatagtcctaccactatgtgatgacagccccagaggcccagctgtaaaatttca

SEQ ID NO: 566778 - DNA, 751 bp, Homo sapiens
  misc_feature (289)..(289): n is a, c, g, or t
  misc_feature (376)..(376): n is a, c, g, or t
  misc_feature (408)..(408): n is a, c, g, or t
  misc_feature (422)..(422): n is a, c, g, or t
  misc_feature (447)..(447): n is a, c, g, or t
  misc_feature (452)..(453): n is a, c, g, or t
  misc_feature (532)..(532): n is a, c, g, or t
  misc_feature (570)..(570): n is a, c, g, or t
  misc_feature (574)..(575): n is a, c, g, or t
  misc_feature (587)..(587): n is a, c, g, or t
  misc_feature (601)..(601): n is a, c, g, or t
  misc_feature (610)..(611): n is a, c, g, or t
tggcatttgttttcactttttaaaacatccctaactgatcgaatatatcagtaatttcagaatcagatgcatcctttcataagaagtgagaggactctgacagccataacaggagtgccacttcatggtgcgaagtgaacactgtagtcttgtcgttttcccaaagagaactccgtatgttctcttaggttgagtaacccactctgaattctggttacatgtgtttttctctccctccttaaataaagagaggggttaaacatgccctctaaaagtagggtggggtttntttggcaacaaaaaacgggggaaaaacagacataaattcatcagataacctcaagtcacatgagaatcttagtccatttacattgcnttggctagtaaaagccatctatgtatatgtcntacctcatctcctnaaaggcagagtacaaagtaagccangtatnncaggaaggtaacttcattttgtctatttgctgttgattgtaccaagggatggaagaagtaaatatagctcaggtagcantttatactcaggcagatctcagccctctactgagtccnttanncaagcagtttcnttcaaagaagccancaggcgaanngcagggactgccactgcatgtcatatcacactgttataagttgtattatgaatatttatgtttacgttgcacataatagggcgcaagagcacattatctttagaggaagagatgatgtggaaaatcaagtacgtgtagaa

SEQ ID NO: 566779 - DNA, 137 bp, Homo sapiens
ttatcagtactccagcggctaatcagagcatgcctgagcaagtacacaactgagaatgtcatcagagaaatatgggaaagatgcacatgtgggatgaagcggttgtccaatctgaaataagaagctgagctgctgaa

SEQ ID NO: 566780 - DNA, 394 bp, Homo sapiens
agcccgtacggctagcggcattagtgaacggaaccagataacagtgtttttgaaatggccctcaatcacaccttagagctcggcttccaattctgttcatttacgatgagttctcaattacctgacaatcacacaaaacctgtttatatcaacgactaccctagtgaatggaacactgtctataaacaaggacgcttcttcgaaatagaccccgttgtcgcccactgcaaacgcagcgtattgccaatagtgtgggagaagaaggcatttggcgccgcgccgaacctgtgggaattggcccaagcgcatggtgtgcacctgggctggacgcagtcagtgcatgatttccagggggtcttcagcatgctgacccgttcacttaatgccgctagcg

SEQ ID NO: 566781 - DNA, 598 bp, Homo sapiens
  misc_feature (476)..(477): n is a, c, g, or t
cataaagcaaagtgagactttatgctcgactttattaaagtctcaataaattcggcagggtgtggtggcttacgccgataatcccagcactttgggaagccaaggcgggtggatcacgaggtcaggagatcgagaccatcctggctaacacagtgaaaccccgtctctactaaaaatacaaaaaattagccgggtgtgtggtggcagttgcctgtagtctcagctactcgggaggctgaggcaggagaatggcgtgaacctgggaggcggagcttgcagtgagccgagatcgcgccactgcactccagcctgggcaacagagcgagactctctcaaaaaaaaaaaaaaaaaaaaaagactcaataaattcaaaaaagtcgagatcataccaagcattttcttgggtcacagtggaataaaagtagaaatcagtaccaggaagaactctcaaaaccacacaattggccaggcacagnngctcatgcctgtaaccgcagcactttgggaggccaaagtgggaggatcatttgaactcaggagttcaagaccattctgggcaacatagcgagacctcatcgctaaataaaagaaaaaaaaa

SEQ ID NO: 566782 - DNA, 1081 bp, Homo sapiens
ggggctgctgcgtgtgtgctgtcgccggctccgagctgcggccgagcccccgatggaggccgaggccgcggacgctcccccggtgcggggttgagtcggctgctcagctgcttctctttcacccaggactgacacatccctagcaactcggaactaaacgccgggtataacgctgtaatctctgagttctgtggagcagctggatcaaagtccacggcaacgcaaatgcacatccctgagacgtcatacaatctgtgcgcacccgcctcattctccagcagacctggatggctgggtagatctcagctccaccacacacaacccacaggccacacatgcacaccgctgctcctcaccactcccacaggcacccaggccaccagcagacactccgcacaacacacacagccatcacctcccagccaacacccactccacgccccaatcacacggcctgaacaccaccgcaacccagcgcccgcacgcgccacgcccatcagaaagcgcaagtcccaacgcacatactaccggcccacaccacctcaacaacaggaccacgtgccacacgccctggtcccgcccaccgcaaccaccctcccctggagaacgcaatacccccgtgccgacaacgcccacaaccacagggccctaaacgccggcacacgcgcctccagaatcacacacgccaactacgaccacagcacctccatacaaccacctggcgcccccaaacgccaccaggtgacaaagcaccctggcaacatatcccggcggcggaaaggagtgcggtgacctacaactggacgaggcgccaacagcactgcaccatgaaaaccacaagacgccacagccacccacacaacggacgcggaccccccaaccgccccgggaaacctgcaccaacgccagcacccaacgacacccccatcacagtcgcccctacagcggccacccaaacaccaacacccagccgtcacgcttccgtcaacacccaggggcacacggcacagacccggccggaaccctcctcgaccccccggcacggggccaacacaacgacccacggcagcccccccaaaac

SEQ ID NO: 566783 - DNA, 1487 bp, Homo sapiens
tatatggtttggttataatttttttttgtacatctccaaaaaattagacatttaaaattatttacctccgggtgtacacaagaaaaagattatttaagggtttccttatttatttctacattataacaacaacgacaaagcccctttaaaaaaaacaacaaacaaaaaaaacgcctatactctcttctctctattctttgtagaacatatacttgtgtggcacagaaggggagatataccggggtatccttttctcacaaaatagcaccaaaatgtgctctctgtgaagggggcgtgtgtcgccctgtggtaaaaaaaatattcttgggtatttgtgagagaaacattcagctcttttgggcaaagaggggtgggggcaaagacacagaacaatatataaggggcgtttatacagaaattgtagaacgagaggagagaggtactcaaagcctctctaatattgtgggccgcgggataataccctataaaaaacaccactgtgatatagagggctatctcaaccaacacctgtgtgtgaggcgcacaagaggatataagaggcatgaagagagtgtggtgatgggtgatgggaggatgtgtctccccacactgtgcccccaacactacccccggggagtatccagaaaagtaaaagagagaatatatgaggacaacaagggcgaacatatcgcaaacactacacacgtatgccggggcaaataactctcccgagtgtgtgtgagagggagctatgacgccactcaacacagaaaaagaggccattagttataaaacccatctctttcagagtgggagaacttatggagagttagcaaactctggaggacacaagaggggaattttaccccacgtgcccaaagagtattaaaaaaacccccaagcccatctttttgtcaaaacatatcctcacccggggagaacacccttgatggagacgcaccaatagtgagccccaaattgagagaggccacctagacggacaacatcttattaaaaaaccctccaaaagggtaaaaaaaaggagatcacccaaaaaaaaaacttatgtatgagcaagagggacaacaacccacccatcataaaaaaaagaagagcaggagcaaccacgaggagccacacatagagagagagcgaccccaaaaacacgaaaacgagacgctgcggacgaaaggggccaccaccaaaacccccctatatgacacagttgatcagctagaacctccgtaacaagagcagacctacatgcggggaaaaagacagcgatctaaccacacaagaacaacgggatctcgcccaacacacaaacacaacatggagtggcaaaacacgcattgtgtgccgaacaaaacaaaaagaggagctcaataagacgaggcgtactatgatgaccgacaaatcataaaagacaactactgtaatcactatctctttcttcctctccacctgtctcgtgcgtccgcagcacc

SEQ ID NO: 566784 - DNA, 398 bp, Homo sapiens
agctatcgcgtcacgtgtacaccacaccaccgcacaggggacacatggggcatatataccacctacgagtacacacactgtctctgtgactccattgagcacatcactcactcactctgcgccaagggattccaggcccgacgctctttctacttctggctttgcaatgcactggacgtctattggcctgtgcagtgggagtatgggcgccttaacctggactatagctggggctctaagaggaagagactccagattggagcaactcgggccgtgccggactcggaagacccacgggtctttacacttacgggcctgcgacagcggagctttccacctgagggcattaacaactcttgtgcccgcgggggagtgactgtggcacccactggagccac

SEQ ID NO: 566785 - DNA, 275 bp, Homo sapiens
ccggcctcttctatactaggcggtacctagtggctgctgtctagttttgctccatttttttcagctacttatccagtttctcaccctataactatattgctgctaccatcttctctccaggaggatcgtaaggtttgggacgggcagacccggcagagaacacctcgagcatgggaggctcctatttggagagcccctggtacaggggctgtgctgaggagaccccagataggactctgggctcatacagatgccactatcattatctgaagggg

SEQ ID NO: 566786 - DNA, 423 bp, Homo sapiens
  misc_feature (96)..(96): n is a, c, g, or t
aagagtgagttttatgctaatgaggcctgtaacgcttccggggcccattggaggaaaaagcccagatcatttggtacccagagacagggccctatnttgacctccttattccccctgggtgtcggggttccctgcatgccttggtgggcagtcctattatttggggaggggagcccagggctcattccatggctcaggtggatgcttggaaacaatccaaaacttttttccccaaacacttgggtgggccccgagggggcaatcccatcaaaagtgtaaattttatttgatcatggggcctctttgttggtaatctttcctggaaacatttgccacatttaggggggggatggggattcatttttttgtttttaaaaaataaagttttttcccctcattattaaaatggattttccagtaaga

SEQ ID NO: 566787 - DNA, 1612 bp, Homo sapiens
ggcctgatgtctgcactgaccagacgcctcctaggtgggccagcgagggcggggtcccaggtgcagtggtgatgcgatcaggagagaggccgcgggcggcggcgcgggggatggtgcagatcccgggcccgagggacatcagagcggacggtggattagctcccggtatggcatcagccggagccgggggatgagctccgggttggcatcacccggaccgagggagacttaagctcacggttatcagctactacgactccggagaccggtggggaccgcggccggacgacagccgaagaactgcggcgagtcggggagaggatggcatgggcggttccccggctggctgacgtcacggctggctaagaggacaccggaggccagggcatgtgagcgtggggactgtggatccacggatgcgtcggcgaggcatgacgcaagctgcggcctgggcacaatcgtgcatggtgcgcactggaggcgtctgaggcgcccggaggggcagcccggggctcagcagcggaacgaacggggtgcagaggatggacggagccacacgcgccttctggggctggactcctgggcggggatatccgcgtgatctcagggcacagaatgcggtccgtgaggtctgggaatggcaggaatcgtctgatgagtagcccggaagggcgttcaccggattccaagtaacagggaagcctcccgatggggtgggggtccgccacgagggcgcagcaagtgggcccacgccaatgttcctggttggcccactgaagtgcacgacgcgtaccctggctcccgacggactcagtgccaacgttggcctcgttggggcacaacttgatactaccccggtcatctgcgagtcccacctaatgcttgctcctgtggagaagcgcctccgaacgcgcacggggccggcgcgcagcgccgcccctaaaaaccgagcgggcaccgttgagcaaccaggcgagcatctaagggcaaggggcacaccggtgacgcttaatgagcccattcggcacggggggtacgcgccacggtgagcagggggcaaccgacccctcgtggctacgtcgacttaggagaggcccactaacagacgaagcggactaggaacccacgggagaaaaaacatagacggagtccaggcaccaaatcgagggaccccctcggctcgggacccccaggggcgtataaacgggcactatatccaagtatgcagaaaccccattggggaccctgcgaaacgaggccggggcgcacaggccgcgccagaggatatcccgttgaccacagagcatgtgccccgggcactcatcaccaggaatagggcaacaggcacgagaggagcagtgacacacaactgcgagatcgcctcctgccgaagcacacaccgaacgagcgcaagatcacgagcgcggcaacgacaagacgctcagaagaaccagcacaacgtcgacacgtccgagccaaagcactacagcgagacgcgcatcccagagcagtaataacaccactacaaacatccagcggagtgagctgtcagcacagcagcatagcgccaagtcgacgcagccgcaccagctggacgacgcctcagccagac

SEQ ID NO: 566788 - DNA, 394 bp, Homo sapiens
  misc_feature (81)..(81): n is a, c, g, or t
  misc_feature (313)..(313): n is a, c, g, or t
  misc_feature (345)..(345): n is a, c, g, or t
  misc_feature (378)..(378): n is a, c, g, or t
ggtaaagcctgggctcagtacagcctttcagtaaagaagagaaaccagtggcgaccttaagagatgggtgaatctgggtgnaccatgcacttttccctgctaagactctgggcctagttcaagctgacccaatggcagaggactgcctgaagagtaaaacctgtgtgaaccaatgacctgactgcccagtgttttcccatgtattgcatagggttctaaccagcagggtttgggaacctgtctctaagtaatgcattacttctgtcagaagtgtcttaggggtggttatctagttcagtactccaaattattngggaccttgaggctttaagtaagtatttttcntgaatataatgcttaaggtaagttgcatttccntttaaacttaatagga

SEQ ID NO: 566789 - DNA, 241 bp, Homo sapiens
cctagttttagaagtttcaatagcacgagccactggacccgatgatgctgatcacatcaccggccgcggcggccagggacacacctttgagcacttcatgactgccactagcgtttatgcaggtcttggacttcaagtttgtacatgcggtcggttctcacaaaaacagttggtcagtcgttgagcaagcgcccgtgccgcagcgcttcgcgcccctgctattgaaacttctaaaactagg

SEQ ID NO: 566790 - DNA, 831 bp, Homo sapiens
ggcgaggcgccgcggtcggttctgggactcgtctggcgtccctcagaggcagacgaggcctggagcttgggcacacagacccaggaacagatgagcagggatgtcttgcatccagcaccctggctcgtgcaccctactaccctgtgaggcccaagaaggcgagtgggattacctggacagcgtgtcccttagagtcgctagtcgcgtcaaggttcaatgactgacagcatctggagagattctgtgtcagtttcccccgtctccagcatatgttgcagatcaacgaaggaggccttcactattttactcttcagactcgatcaccatccatggagaagctgccatgccaaaagcacgtgttcagctccgctgcggccaagtcgaatatgtggtcttcagcatcaatcgagcatttctggagggagctgttgcctgttctcagcctgtgatgccgtggcagatctgcatctgtcccattggaccctggggcgaaggacgctgacgggactcattggctggatcccagaaacgcctggaggacacaggctgagggtcctgcacctaccagggcctagcaagctgtacgcgtcttgataggccgtggccacgcactggagtcagacctggaggctggtggacagatttgcttgtgagacactggaatctccgtgcttgggttggcctttttgctcccaagctttggaggaccccacctgggaacaagcccggcaggattctccatgaccagttgtgaacctttgtgaaccgcccggctctgggatacaatcctggggtgaattcccgagaaagggtctccggtaaccgggggtc

SEQ ID NO: 566791 - DNA, 337 bp, Homo sapiens
tgatgctctggtgactgcactcctgactgcgacgtttacgaactgtgtttaggagtgggcttctcggggatttcgcggggtgctgcctgttgggggcccgtgccctcctaattggggggttgtgtggctaggctggagtggtcaacggctcagaccaatcctgcgacgccccacccttctgcggtcctaaataggattatcccgtatcgaaggcctttttggacaggtggtgtgtggtgaccttggtatgtgctttctcgtgttacatcgcgccatcattggtatatggttagtgtgtaggtaagtaagcctagtatgaggagcgttatggagtgca

SEQ ID NO: 566792 - DNA, 204 bp, Homo sapiens
cgctttttcttgccctggctcactctgagagccttgcggtctccccagtcagaccagggctacagtctccagggccgggtcttgcccctcttctccggtggtccacgctggcagctcttggtttcggggctagcttctgcctccctttaggatctgtgtctcccagggatcagctgcttggcttctgctggaggtgcctccctg

SEQ ID NO: 566793 - DNA, 83 bp, Homo sapiens
attgactttggggcaacagggttgatcatttttttgttgggcatttttgccaataaaggttttggatagccggaaaaaaaaaa

SEQ ID NO: 566794 - DNA, 364 bp, Homo sapiens
ctacgaggccacggaataacgagcttaagatggggtggagccttactccactgcgccctaggctacagcgtggttaccttatgggtgttggaggccacacaaagaagtctctgttatcaacacagtgacagtggggagtgggtcatgtcccacgatgatttggaacacaggccagggtcctatgaccctgctggcatgatgggtgcggtccataaggaaatgggcagagggtcaacttgtctcttctttcaccgaaaagactgcgaggtctatagttcacggtcaccctagggctgctgacatctttcatgcccagagtcacatcctgcatttctgtaatgcatattccctatcctgccgagtc

SEQ ID NO: 566795 - DNA, 171 bp, Homo sapiens
tgtgctgctagatgtgcacacacacagagacctcacacacagacctcacacacacagacctcacacaccacacacacatgacctcacatcacacaccatcacagatgaccacacacacatgcgacctcacccacaaaccccctctgatgtgcctcgtagctgtgcaccctg

SEQ ID NO: 566796 - DNA, 331 bp, Homo sapiens
  misc_feature (56)..(56): n is a, c, g, or t
  misc_feature (62)..(62): n is a, c, g, or t
  misc_feature (74)..(74): n is a, c, g, or t
  misc_feature (87)..(87): n is a, c, g, or t
  misc_feature (187)..(187): n is a, c, g, or t
  misc_feature (193)..(193): n is a, c, g, or t
  misc_feature (202)..(202): n is a, c, g, or t
  misc_feature (294)..(294): n is a, c, g, or t
cacccacagaggcggcccctgctggcaggctatgcctgggtgtgggactcttcctncttctnctccagcccctnacggaccccaagntctacggcagccttcccctttgtgtgcttttggagcgggcaggggactcagaggctcccctgtgctcctgacctatgttcctgggatacgctatgaactntgaccngctccccanccctccccaccaaggggttactgcaggggaagggctaggtgggggtccccgagatcttagggaatttttttagggggattttaagccagagntagtttgcgttcccagggaccaaggagaaagaagcat

SEQ ID NO: 566797 - DNA, 154 bp, Homo sapiens
atcccaagcagactgtgctcatacccttctcacctctcccatatctgacacctaattattactcctggatgggtgccctcccacctccctaaccattaccccacaggaatgctgcaccccataggttgctgaagactcccatacttgcgcatgc

SEQ ID NO: 566798 - DNA, 538 bp, Homo sapiens
gcggcgcccttaaaataccctgaaagtaagggaatagactctatccagaaatctatagagcagatagcagaaagtagaaatggttcagaactagggaaaaaaacaagagactcaatggagacagaagaaaatcccaaggttctaataactagcatactgaaaaaataatactaccccataaggtagaagtgaaaaacagaaaaataagaccctgtggagaaatatcgttgtacccactgaaataggactagactagtaaacgatagacaccaaaatgaacctagctatacaagaaatgctcgtcatacagtaaactactggataatacttccagataatgtccttgctttacaaaccaatcataatctagagagtctccttactcattaatacaatgaaatggataggtacgatgtctttgaaaccatgttagtcaaggactggtaaaaatacatataaagattaacactcataaccaatcataacaaatactaattccaactacaaatacatcctttgtataacgcacaaaaaaaaa

SEQ ID NO: 566799 - DNA, 242 bp, Homo sapiens
tcccttggaagatgtgcatggaagaatgtgcccctcagacagtctcagttacagagttgtatgcccagaaccatttactttgttctttgtgagggatttaagagattttttaaggataatttttactgtatttgatttttgccctataagctcactttagaatcctaaggtgggacttcactgtatcacacttggccctcataaatgactacgtgaggtagtatacaacgcacattcttcca

SEQ ID NO: 566800 - DNA, 228 bp, Homo sapiens
cggtaatcacaactaactaataactgcattaagtaaaccgaacaagcatatacccaccacaacgcgcaagtacaactagcagttgcttccttgccttcaagtgagtaatgccatagccagctacgccaacagtgtaacaaccgccataggagtcatatgctagaagccttacagatgcaatcgctacacccccggttataaaggccatcctttccaaatcacaccgac

SEQ ID NO: 566801 - DNA, 135 bp, Homo sapiens
ggtggcggagtgatggtcaggacaggtgagaggtacggcaggaggattgttgagaccaggagttcaaggttgtagtgagctatcattgtgtcactgcactccagcctgtgttcagagtacagatccgtctcgggg

SEQ ID NO: 566802 - DNA, 334 bp, Homo sapiens
gaccctccctctgaaaagtggggctatacaccccctgcctacctgctcacaagtgagaattgaaaccaagtgctgggcctggcacggtggctcacacctgtaatcccagcactttgggaggctaagcaggaggatcacttgaggtcaggagttcgaggccagcctggcaaacatggtgaaatcccatctctaccaaaaatacaaaaatcagccaggtgtggtggcggatgctgtaatcccagttacttgggaggctgaggcaggagaattgcttgaactgggaggcggacattgcagtgagccgagactgtaccatggcactccagccgtcgac

SEQ ID NO: 566803 - DNA, 121 bp, Homo sapiens
acttccctgccttattaaacctggccgggattcgggaatctgcttgacagagactctggccaaaaacgctcatacttcttgccagcttcttgaccgttttttattcttgttgagttttttc

SEQ ID NO: 566804 - DNA, 394 bp, Homo sapiens
  misc_feature (183)..(185): n is a, c, g, or t
  misc_feature (187)..(187): n is a, c, g, or t
  misc_feature (192)..(192): n is a, c, g, or t
  misc_feature (263)..(266): n is a, c, g, or t
  misc_feature (313)..(313): n is a, c, g, or t
  misc_feature (353)..(353): n is a, c, g, or t
ccaggatggtctcaatctcctgacctcgtgatccgcccgcctcagcctcccaaagtgctgggattacaggtgtgagccacctcgcccagccctaacttttttgaagtatttaacttacagaaatgtagctattagaagaataggggtatttctgtcattttttttttttaagatggagtcttnnncngtcancaggctggagtgcagtggcacgatctcggctcactgcaacctccgcctcctgggttaaagcgtttctcctnnnncggcctcccagctactggggaggctgaggtgggaggataacttgagncgggaggcggagattgcagtgagccgaggtcgagccactntaccccagcctgggtgacaaaaatcctgtctctatttttac

SEQ ID NO: 566805 - DNA, 184 bp, Homo sapiens
gatctagagaccccagaggagaagagaacccctttggtaaatttattcctaagagttttattctttttgatgctattttgaatgcagttctactggcacatgctgctgcacgtggctaatattttttgttaattttttggtagagatggagtctcgctgtgttgcccaggctggtctcaaattc

SEQ ID NO: 566806 - DNA, 118 bp, Homo sapiens
ttgcggccgcttgccctgatgccataagttggagggtcctctgctcaaaacatatggtactagggagggagggaaggacgtgggaatgttttcttattggatctgagagatgatacat

SEQ ID NO: 566807 - DNA, 490 bp, Homo sapiens
  misc_feature (164)..(164): n is a, c, g, or t
  misc_feature (175)..(175): n is a, c, g, or t
tggagacgggggtctcaccattgtccaggctcagattttttgggtttggtttggggggtttccaggtccacggtcatctcagcggcaaaacaccaaagtcagaaggaaggttaatctcccaagtttttgggtggttttggtttggtttggtttttggagacagntcttcactctntcacccaggcgggagtgcaggggcacaattttcaactcatggcaacctctgcctccagagtagctgggattacaggcgcatgccaccagtgcccagctaagtgtggtattttaagcagagagggggtctcaccaggtgggccaggctgggtctggaactcgtgacctcatgatccggtcacctcggcctcccaaagggcggggattacgggcatgagccacggaggccgggccagcctatgcattttaaagaaattattcggtatgaggggcggtgctagacatggggcactacagtgaccaaaacagacggaat

SEQ ID NO: 566808 - DNA, 1020 bp, Homo sapiens
tcggcacgaggatttgacgaagaagtaaggtgagttagaggaagaagaagaagaggaggatgaggagtgaggaagaatgaactggaagagtgtggaagacctgtgagtttgtgcacagcaggaggggacggtagaagaagtgtgcacctccagccccaaccctgcctccagctctgcctcccccatgagtctcccccaaaggtgcatgccatgaacccaggaaaaccctgaagccccggtgcttgctttttgtgaatgtttgtggatgtgacgccatgtggactgtgatggatgtgagctgtaggtggcttgacacaagctccacacacatggcccctgaatgctgctcccctcccatgaggacgatggtggaagaagtggaattgtgtgtgaaaagccctgcggaggcaatggaacacccacttcccccaggagcattgtaatgaaagaaagaagcccgtacatgcatccacacaaaaacactgatagaggaaagatggaagacgtgaggatggggaagtgacaaaggtgcaagccacacaacagaagagaaccatgacaggaagaaagagataggagacaagaaggacaagaggacggaaagctctccaggacaaaaggagacaggatgaacaacaggctggacatgacatgtaccagactagcaatcagataggtccccctgtattgaatagaggaagccagcaaccaacgcaaaagagcccatggaaatccctaggccaaatcattctggaaccccagactccattgatatcccagttagaaggttaatgatcctttacaccacaaaagaaaagcaaacacacacaaacaaaaagcaaacatagaaacaaacacaaataaaagcgacaggcgtacaattaacagagtggcataggcaagaagaagaaaacaaagtacatagtcacatactagtaataacaaacaaatctatttcaaaagtaggaagcatagcgcgaccaagacatgaagaaacaaactaaccgctcacaaaaacat

SEQ ID NO: 566809 - DNA, 633 bp, Homo sapiens
  misc_feature (545)..(545): n is a, c, g, or t
  misc_feature (612)..(614): n is a, c, g, or t
  misc_feature (618)..(618): n is a, c, g, or t
cgtcaagcaaatgtggccgtagtgatttgtacttctaagttcaaagagggtcgtttgtcaccgagtgaagccactgatatggctgattcggcgcgctccttcaacgactacctgatagattctcatggtggcagattcgatcgcagtcatgtgaaattgttggaaaatgccggcgctactcgtcaaggaattatgagtgcgctggggcaaaatttcctcggaaacgcagtcggcaaggatgatctcgtagtagtttacctggcgaccagtgcgtttcccacaacggacggaaacacttatctgtgtacttacgattgtgctctcgataatatctacggtacctgcatttctatgcaatcgcttatgagtacgctcaagaaaaatgtccattccgaccgcatcctgcttgttcttcaggcggcgtacagtggtgctgctgaactcgaatctggtgctaaatcattggagcatcgcgccgcccaaagctataatctggacccaaacaaagtgataatgggcaacggttttatcattctctcatcganccaggctaatgaaatcacgtggagcactgcgttttcgaagaatctgacgactgcgttgcggcagaannngcgnacgttttagcgcttg

SEQ ID NO: 566810 - DNA, 335 bp, Homo sapiens
  misc_feature (33)..(33): n is a, c, g, or t
tgcgtcacctgcaccagcatattgaaaagcatncttttgaaagatattaagcaagccgttaggaaacctgagcttaaatttcacgaaaaatcgaaggaagagacatttgataaaatcacctggcattacggtgaggaaactgaataccatggtagacctttcaagatagacgttcaagtagtttgcacacatgaagatgctatggtatttgtcgattacaaaacacatcctgtaggcgcaaattaaaggttgtgtcatagagaatgtgttagtactgaatcctaacctcccaaattcataagtagttttatgtacctttaatgatttacgattag

SEQ ID NO: 566811 - DNA, 225 bp, Homo sapiens
  misc_feature (87)..(87): n is a, c, g, or t
  misc_feature (106)..(106): n is a, c, g, or t
  misc_feature (167)..(167): n is a, c, g, or t
  misc_feature (189)..(189): n is a, c, g, or t
  misc_feature (218)..(218): n is a, c, g, or t
acaactcttatccccagtccaccccaaccctacccagcccagcgtcccccagggcccgctaccccccatacactactcccccacgantgagcacggcagcgttctncccctgacctcaaggagagttgggcagctgtgtgagtcccacatcctgggcagagggcctngtggggccccttgctaggagangggaagaggccccagagctgttcccagangttctgg

SEQ ID NO: 566812 - DNA, 665 bp, Homo sapiens
  misc_feature (86)..(86): n is a, c, g, or t
  misc_feature (132)..(132): n is a, c, g, or t
attcggcacgatgggaagatggcggaggtgggggagataatcgagggctgcgctacccgtgctgcggcggaaccaggacaacgaanatgagtggcccctggcgagatcctgagcgtgaaggacatcagtggncggaagcttttctacgtccattacattgacttcaacaaagcgtctggatgaatgggtgacgcatgagcggctggagctaaagaagatccagttccccagagaaagaggccaagacccccactaagaacggacttagctgggtcccgtcctggctctccagagagagaggtgaaacggaaggtggaggtggtttcaccgagcgatactccagtgcccatgctgagacgagccccggcgtcggttttgtccccagaatgttgagccgcccgtagggcagtggcaacgcccagccgggacggatgcgaaaagtcgaattgtatgggcactgatgaggactcccaggacagggtctgatggaataccgtcagtaccacgcatgactggcagcctggtgtcgtgatcggaagccacgacgacgtcgtcacccggatgaagaacagttgagtgctattgagcgtggggcggcaccgactcaagccgtggtacattctccccagtacccacgaggaactcaccacattgcctgtgctcta

SEQ ID NO: 566813 - DNA, 831 bp, Homo sapiens
  misc_feature (456)..(456): n is a, c, g, or t
gggcatacatgagcaattggagtctcattcagccattcttgaccagaaattaaatggtctcaatgaggaaatgctagagtagaactagaatgtgaaacaataaaacaggagaacactcgactacagaatatcattgacaaccagaagtactcagttgcagacattgagcgaataaatcatgaaagaaatgaatgcagcagactattaataaattaaccaaggacctggaagctgaacaacagaagtggtggaatgaggagttaaaatatgccagaggaaaagaagcgattgaaacacaattaggagagtatatacaaaattggtagagaaaatttaaatcttatcctataagagggtgctgagattcccaggggttgatgacttgtggaaaatgagtttaatcccgaggtggtgccaactgcctgtgtcaaaatacagggctcaagttgtatgtancctcttaaggaactcctgaatgaaatgaagaagaaattaataaagcctaaataaaaaaatgggttgggaggatacttcagaaacacttcgaatgcatgataacagaaaagccagaggacgtggtgcagaacttctggaaagaagaaggttccaaaagcgtgcatgatctttaccaaaaaaacaaaacacaaccgacacaaacaaaaccggtgggcgcgcgcggggcccggaaaacttccacacacctacggtggggggggccccggaggatgaggaagagggccaggcggcacagagaaccgggcagacaggggggtccccaaaaaagcgggggagggagtgcgaacaaccggggggccgggccggctaagggcg

SEQ ID NO: 566814 - DNA, 465 bp, Homo sapiens
tgaacaaaggggagaggagcctggcattgaacaaacctgggaggggtgtgcaatgttaacattccttgtttaaagttaaatccatgctcagttcccattcttaccaggtatgtcataaggaggtagcttaagaacacagattcccccaaaagcacatggtaaggcaaacagggcctccccatcactgctgaaccaggctggaaaggcggcggaattaggaagatattccatgctctgctggaattaactgctacttgacggggtctgggaaaaacacatttttcaatgtcagctgaaatatgtacggcactcgaatggcaactaacctacactccccctctcgccaaaatctttagctctccgagcgaccacatcacccttctaatcgggtggcccttacaactcccccctccaatctaataacctgcctccttagccctatatattctattccttcttcctctt

SEQ ID NO: 566815 - DNA, 714 bp, Homo sapiens
ctggttttgatcgttccctgcgctcgacgctcgttacggtgggggtttatctcgtgtggcagcgctccggactgtcgtccctctgtcgggctgcactcagtctcgtacttcgggcgttgcttggcttctgtgcgttatatctttgctaatttctggtcggcgacgtcgctgtgtattaagtgtctattggtatggacgacggcgttccatcggtttgagttgcggtgtatggatgccctgctctgggtggctgcggggcgttgtgtagtggatctaaatggtggctgtgttgactttagttatgtagtgtatgcttgtgctttgctcagccctttggttctctttggtggtatgctgacttgctcacgcgtcgacgcttcgctcttctgcggcgcgcatacgctgttaggtctgacctacggctcgtcacgcgcctctcacggtgtggactccgggcccacgcccgcgccccgccgccgcgctcgctcccctcgctctcctccactcttagccgcgcccctcgctcttgcggcccgacgggctcgcactcgcatcggcatcgcgtggctatgctctgtggccgccctcgccgcctcctccccccgccccggcttcactacgactgactctactcactctccacgctcttctacgtcttctactgtacacaatacacacgcaccacacatacactaagatacataaaaataacca

SEQ ID NO: 566816 - DNA, 85 bp, Homo sapiens
cattggataagcggatgagggtatatcatggaaaagcgttcctctacccatcagtatttcagtccggaatcgcctcagttgatag

SEQ ID NO: 566817 - DNA, 354 bp, Homo sapiens
acgagctgcatactgactcagatccaagataaaattgactggttttaaagaaaaatacatacacacacacacatacacacacacacggcacacacacgagcctaagtccctttggacactgatatgtgggtcgccacataagtgcaatgtgtttagactcaatactcattctaagatgacttatgccccctataatatagtcctcttgtatactatatacaagaaatggtcccgctgcacagagtatctctaaatgttctcttcctagagttctatgatcacattattttgattatccttggtggtggaaaaaccaacaatacagctcagtgtgtctgtataaactgcttgggg

SEQ ID NO: 566818 - DNA, 457 bp, Homo sapiens
aaaatcttctctctccctcctgtgcctctcacctgttctcccacagggccatcgggaaccaaatgcactggctgttcgttctccaagttccgagtacttgggtctgctcccttcctcatcaacaggcggacagcatctaattgtgtcaaccgatactgcaggctggcagcaacatggagggcagtgttgccattgtaagcctgaagacaaagaaatgaattatcagacatcaggaagggggaaatttcatgaaaggagctcaaaaactttgagagggtgtacagaaggccattccaactctggtgtggttattaaagctttctaaaagtacctttgcattcacaaaagacaggcaactgggcagctccaaaaagaggcgaatgagttccagatttgcttcttcagctgccaaatgcagggctgtgcggccacttttgcgatccttgtcaaaggcaag

SEQ ID NO: 566819 - DNA, 104 bp, Homo sapiens
aatgaatgcactgactccagcctgggagacatgagcacgactctcttacaaaaaaaaagttaattcaccacgaacaagtaagcacacactgggttacgtaagca

SEQ ID NO: 566820 - DNA, 623 bp, Homo sapiens
gatgcttgaggtcactctagacggatccccctcaacgctttatacttctaaacagatctactgttaattgtggaggtgagggactataggcttgatggaaagacattcgtactttctgggtataagctatcgtcatttctgattgaaggagtcagagtgcgtttggcctatacaaatgattaactgctagtctacgtttctatatactacttaggtatagtaaatgatctccgatactaagtacagtaacgtcaggtctcaacatcaattggaggttgagctgtattgcaagctttacagtctctaagaacctgtacgacatatatgggtcaggttcttattatgctcttaagctagaatatacagatcactaaaattaatttcgaagactttcacgataactagtactaaaatattaggacactactataacttactgtatatttatcagtagcattagaaaggtagtcctttgttataccaaatacacctagatctaccataatacaatgtactggcaatgagtaatcccaagagttgagaccgttctggggtcaacctgtaaaaacaaaactttcaacttccacctattttgctgggtggaggtttaaggcgtccgaggg

SEQ ID NO: 566821 - DNA, 449 bp, Homo sapiens
  misc_feature (404)..(404): n is a, c, g, or t
  misc_feature (446)..(446): n is a, c, g, or t
gtgatctgcaagttctgccgctgccctgtctgtgtctgtgaagcaaagtgtccagaaggggcccgcgtggtagcttctgagagcggttaggggaacggggccccacgtcctcccggagggctggagacagaggcaggccgtgcccccagcccagagtagggaggaggctggcaggcggcagctgtggaaaggaggcggagcccccagactcctgagccagcagaggaaggagtgggacagagcccaccccagagggagacaagaccccggggaagagacccctcagggtggccccccagcccctcccaggctcagctttcagcctgcacccccgtctggtccctcagaatgactgaggtttccactctttttctgccaaatctctagactccacgtccccgctntgccacctactctctgtgggatctgaataaagagacttaacntta

SEQ ID NO: 566822 - DNA, 293 bp, Homo sapiens
  misc_feature (208)..(208): n is a, c, g, or t
  misc_feature (277)..(277): n is a, c, g, or t
actctgtcacccaggctggagtgcagtggtgcaatctcagctcactgcaacctccacctccagggttcaagcaattctcctgcctcagcctcccgagtagctgggattacaggcatgtgccaccatgcctggctaatttttgtatttttagtagagacagggtttcaccatgttggccaggatggtctcaacctcctcacctcaagcnatccaccccccttggcctcccaaagtgctgggattacaggtgtttacaagtgtgagccatcacaccggngccagggaagtttctg

SEQ ID NO: 566823 - DNA, 1685 bp, Homo sapiens
actacctttgcctgctgtctctccatagtttagtgatgtgttaacccccatactggcaagattgcgatagcgagagtagacgatcgtttctatcactctgagtgacgcacataagctgcattcgttgatcactcctgtggtccaacttcacgatcgactaacatgaacctattcatggaatctaaatacgactgtcgagtgagttgaatcagtacgaatgatgcaactcagttgcaatcgtctgagtacactagagtcgagactagcatgtggcatgtgtgtacacagacgagtcttccttagtctagaggtaactagtccgtcgcgagattcttcagaaaatgacatatcctcgaaatacgaactcatatgcggatgaatcacgaatgtaatcattcgaatctcgacatttggcgtgtactttcgtactcgtatgaatggagtggaattatgcgcatggaatctccagacgagtttcatcgtgcattactgggaactttgttacctattggaggagttggctcaccacagcaagaccaagcttagtgagtacatctttgagatgccatagagaagatctgtaaggattttccctgagtgggcaacattccgtgctaatccaaagaaagttaggtaggcttgctttgcgattggctctagttagtgccataaccagagccgacgtagtttcgaggtatattcctttcatgcacgaatcgccatggtaggctcatccggaggagaacatttgttcggaacgatcggtcactctcagactcagtacattttgtcgcacctcacgttggggctctttagccgccacctggtagaacggaggtttgggattaggccaacaacggggaggactcaggttacgccgaatggactaaaatgtaagaaaagctctgtgactttgcacaatgctttgcgtgtcacaattgcacttgaagatgaggcaaagatagcagtacgtacttacttgggcgctgagaatcgctttgtaacacgatgtgtagatgctcccggtccacgtttctccacgtgcacacgggcatgagcctttctggggtatatcttgggaacctcctttacccacgccacggagaaggccctcaaggggaattgcccccaaatggtcgtaggtcttgtggccaccagggtcgaatacgaaaatttgcctgggaacaattgcccgatggtttactccaaactgtttgcctcgtgtgaggacatccaactgtgcgggtctgtttctcaacaggcgcgcgccgggtcccggcatgtcgccaatggtggccctggtggaggccccaccctgtctcttgaaacggtctctagaagacggcaaacttctaaccctggcgaattagtttataggagtgtaaacaaacctctttggcccagacccttatctgggcggattttcctacactaaagcgcaacgtataataagttctcttccagtccacaagatatcctgccttattttcttcacaaccaaaccatattataccccccattaactaccgcaggacacacacaacacctctctcatactatctcgacccactcaccatattattacaacaacgcttctatatacaactacaactactacaatcatatataaaacatcccttacacctccctaccttcaccacaagaccacccaattcaataccaaa

SEQ ID NO: 566824 - DNA, 243 bp, Homo sapiens
gggatgaaatcagagatgatgaggagggttactggagcccaggagttccaggctgccatgtgctgtgatcgcaccactgtggtccatcctgggtgacagaacaagaacctgtctcaaacaaacaaacaaacaaacaaaaatagtggagaccctccagtgtgagcctcctcatcatctctgattttcatcccccatgacatcgccagctacgccccctccttcccctcctccctcccctaccct

SEQ ID NO: 566825 - DNA, 274 bp, Homo sapiens
  misc_feature (8)..(8): n is a, c, g, or t
  misc_feature (25)..(25): n is a, c, g, or t
  misc_feature (29)..(32): n is a, c, g, or t
  misc_feature (36)..(36): n is a, c, g, or t
  misc_feature (42)..(42): n is a, c, g, or t
  misc_feature (80)..(80): n is a, c, g, or t
  misc_feature (105)..(105): n is a, c, g, or t
  misc_feature (130)..(130): n is a, c, g, or t
  misc_feature (205)..(205): n is a, c, g, or t
  misc_feature (216)..(216): n is a, c, g, or t
  misc_feature (221)..(221): n is a, c, g, or t
  misc_feature (225)..(225): n is a, c, g, or t
ctttaccnacgcatccgttttgggntatnnnnccgncgagantaatctaccgtttaccgaatagggggatacgtacgtgnttggcacgttaagaaaaattaatanacaaatatcaggtcattcagctttncgtgcacagggtacaatagcaaatcgtcattaaaagttacatgtattggcatatatagttaattagcggttaggntaggtagtagncggtnctanaatacaatcgtccggagtattagtgctcaagaccacgtaagtatcggcc

SEQ ID NO: 566826 - DNA, 219 bp, Homo sapiens
agccgtacccttcgctactgtgtggcataaaaagaaaaacgggaaggattcattgtcctgagaagtttgccaactgcctcattctggggcacgtgtccaacatacaaaaaaaaagaacaccctgaaaaaacccctcaaatggcttccaaaaggcccctcagggtttcttttgggtggacagttaaccaaacagacccttggaaaggtttaaaaacctgc

SEQ ID NO: 566827 - DNA, 177 bp, Homo sapiens
tagcgaaattccttgtcaactaattattgacctgcacgaaaggcgcaatgatctccctactgtctcaacattggactcggtgaaattatggtaccagtgaaaacgctggttacccgcatcaagacgaaaagaccccgtggagctttactataacttcgtattgaaaattggtttagc

SEQ ID NO: 566828 - DNA, 1050 bp, Homo sapiens
  misc_feature (557)..(557): n is a, c, g, or t
  misc_feature (577)..(577): n is a, c, g, or t
  misc_feature (611)..(611): n is a, c, g, or t
tggtcttggtccaaaattttattaagggtcttatagaagagcaacttccaaactccaaaatacagctgccagggagaacccggttatatgcgtggtggggacgtggctgtggggcatgtggcagggcggcctcgtggctttcccaccctttcgtgtccgtgaaagtggggggtgggtgggcagatactcctcatcttggggttcccacaagtgcctcacgtgtggctcaggcgaggggctctctagagggccaatctttaccagtgtggggtctcccaggtgcagcagtgatcttcacctttgatgcccagaaaacccgtgtcgtgagcaacagggtggcgcacagcagtggctcacaggtagttagtataacgagggctcctcccggtgtggtgggcatcaactcagagcgccaatccaacaaaatttttcgagtggaatttatagcccttctgtgctccctcgggagagttttccccagagaagagaccaaaaaaacctctctgcagagcctttttgtggcccccaatctctctccaaagtgatatgaaaccggnagagaaacaaaccatatagnaggagggccctctcgcggaaacgagaaagaggcncccctccctatagagagaagtttggttaagcgccagaagaactctccgtggcgctgtgggggccaaatgtgcggccaccaaagagaacccttcttagtgtgggccacccttttttcccaggccatataaagaggtttcatacagtgtggcccctctctgggtaaaaaggcccaaaacctctctttcgtgaaattaccagcaaagatcaagttcccccgaaaatccggcgcggcccttttcttcaccagagaaaccattcccgggtgctccgggggggctaaaagataatggatttccgggccccgggtgggggtgtaacttcggagaccttgaattcccaagagtagccatttttcagccaaggtcccggagtaaggaaactcattccaggtacagtttagaaaatcgcattcagggaaaaatttcccctctgggagta

SEQ ID NO: 566829 - DNA, 795 bp, Homo sapiens
  misc_feature (20)..(20): n is a, c, g, or t
  misc_feature (27)..(27): n is a, c, g, or t
  misc_feature (29)..(29): n is a, c, g, or t
  misc_feature (36)..(36): n is a, c, g, or t
  misc_feature (75)..(76): n is a, c, g, or t
  misc_feature (79)..(79): n is a, c, g, or t
  misc_feature (94)..(94): n is a, c, g, or t
  misc_feature (106)..(106): n is a, c, g, or t
  misc_feature (122)..(122): n is a, c, g, or t
  misc_feature (126)..(126): n is a, c, g, or t
  misc_feature (138)..(138): n is a, c, g, or t
  misc_feature (141)..(141): n is a, c, g, or t
  misc_feature (144)..(144): n is a, c, g, or t
  misc_feature (158)..(158): n is a, c, g, or t
  misc_feature (196)..(196): n is a, c, g, or t
  misc_feature (198)..(198): n is a, c, g, or t
  misc_feature (207)..(207): n is a, c, g, or t
  misc_feature (213)..(213): n is a, c, g, or t
  misc_feature (220)..(220): n is a, c, g, or t
  misc_feature (228)..(228): n is a, c, g, or t
  misc_feature (235)..(235): n is a, c, g, or t
  misc_feature (243)..(244): n is a, c, g, or t
  misc_feature (249)..(249): n is a, c, g, or t
  misc_feature (270)..(270): n is a, c, g, or t
  misc_feature (277)..(277): n is a, c, g, or t
  misc_feature (281)..(281): n is a, c, g, or t
  misc_feature (289)..(289): n is a, c, g, or t
  misc_feature (294)..(294): n is a, c, g, or t
  misc_feature (336)..(336): n is a, c, g, or t
  misc_feature (345)..(345): n is a, c, g, or t
  misc_feature (349)..(349): n is a, c, g, or t
  misc_feature (366)..(366): n is a, c, g, or t
  misc_feature (391)..(391): n is a, c, g, or t
  misc_feature (415)..(415): n is a, c, g, or t
  misc_feature (421)..(421): n is a, c, g, or t
  misc_feature (483)..(483): n is a, c, g, or t
  misc_feature (581)..(581): n is a, c, g, or t
  misc_feature (619)..(619): n is a, c, g, or t
  misc_feature (640)..(640): n is a, c, g, or t
  misc_feature (714)..(714): n is a, c, g, or t
  misc_feature (722)..(722): n is a, c, g, or t
tgaaaaaagtccattttatnaaaaaancnaaaaagncagaccagtgcattgggcttgtaaggggaaaccattccnnccnactgtcacaaagccnggcagaataaancaggggccaaaacatncccntttattcaattnatnaangagagtgtggaatnaaagtagacccttgcatgtcaggaaagccgcaacacancnggtttaagnggagcncaaaggnaagtaatnccacatncaccaacnnccccncttgaccccccaccagtcccngtctgcntttnccaccaancaacnctaagaggccccaaacccaaacagtccccattcaactgtgcncaaaggtanaganatggaagacatcccacnccaacccccacctttggaataaaanaaacctggaacaggaaggggaacnatggcngaaaccaagtgaagatttttaagaagctttgacagaaacattaagaataacacccgaatgcnaatccagaaaaaagcgctactgggggaaaatagtcttagccaatgttctaaaaatgcccaaaaggaagggttggggaattaccctttagacacaagcnctaagaactctggatacaacgggaacttggatggatanagtctgggcctgctgggccanaagttccgagggcggcccggcaagcagcctgttttgcacattgcaactgactggcttaatctacggcaagagtncttcagcnccgtcacagagtactctccaatgtgttatagttatccttaaagctcttcaattcaaggaagtgcttggcacgt

SEQ ID NO: 566830 - DNA, 343 bp, Homo sapiens
ttccatctgttggaggccgaggtggtgaatatttgaggccagtggctttgagatcagctctggccagcatggtgaaaccccttctctgctaaaaattcaaaaaaattggtcatgcgtggtggctggcacctgtagtcccagctactgggaggctgaggcaggagaaatcacttgaacccatgaggtacaggttgcagtgagctgagatcacgccactgcactccagcctgggcgactgagcgatacttaaacaaatatcatacacacagctagataaatactggaacttacgccattgtgcccagcctcatttttttaaggttgtgacccattgttactgtca

SEQ ID NO: 566831 - DNA, 530 bp, Homo sapiens
  misc_feature (23)..(23): n is a, c, g, or t
  misc_feature (27)..(27): n is a, c, g, or t
  misc_feature (53)..(53): n is a, c, g, or t
  misc_feature (76)..(76): n is a, c, g, or t
  misc_feature (88)..(88): n is a, c, g, or t
  misc_feature (93)..(93): n is a, c, g, or t
  misc_feature (485)..(485): n is a, c, g, or t
  misc_feature (510)..(510): n is a, c, g, or t
agaccccgacagaagggtcggantttngacggtatcgataattttttttgggntttttttttgagacggggtttcnctatcttggccnggccntgaactcctggccttgtcatccacctgccttggcctcccaaggtgctgggattataggtgtgagccaccgcgcctggccaatctcattcttttttatggctgcatagtattccatggtgtgtgtatatcacattttctttatccagtctaacactgatgggcatttgggttggttccatgtctttgctattgtaaatagtgctgctcctgtgcacgtgtctttacagtagaatgatttatattcctttgggtatatacccagtaatgggattgctgggtcaaatggtatttctggttctagatccttgaggaatcaccacactgtcttccacaatggctgaactaatttgcattcccaccaacagtgtaaaagcgttcctatttcttcatanccctctccagcatctgttggttccngacttttttaaaacagccat

SEQ ID NO: 566832 - DNA, 1508 bp, Homo sapiens
ggtccgactgggcgctggggcgccgcgccgcacgagcaccagtctagagtccaggtactgatagcttcaaggatggctgaccaggaccctgcggggatcagccccctctcgagcgatagagtggtggcctcatgtgcgacctgggggcgtgtggttaccatcgtctcgttcgatgagctagcaccctgggacggtggtgaatcggttcggctgcagtcgtcatgctggcctctctcagtggccgagcgatgctgagtgcccttcgctctcatgtacgtgttggcagcctcgtcgcttattactcaatattgcccttcctctcttccgaattctcatcatggtggaatgtgtccttccgtgtgattgcgagagtgcgtgtccttgcgagcctcgtggtgccctgtggcccaagatggtgccgcggctgtgaccaactgggtatatcaagtaccgctaacgccgtattcattggataccgagtgggatgcctgtcgagtgaagcactcggtgaggcacgagggccacccagggactccctcttggtagacgcgtctcccccgaacaaacgctgaggtgcattgacattgtggccatgcattactccgtgcactcttatcattctagcgtgccatatgtactcaatcttgagaggccgtcttcctgttgttggtactgagtgccctgaccgtcttgaacgtcttaggtcacccaataggctgggtcttgggtcgtacgccttgggccccggacttggggtgacccggttgacctggttgagtcaggaccccccttgggagccttaattgccgcgaccacccgtcttggctggcgtcactcgctggtgttcggtacccggggacagcctgggttggccctgtggttgctgaacctggcggggtcgcgttgcagggctgtcgcttggcagctcacaactgaatgggcctgttgcatgggggcgcccactgtggcgcttcggagaggatgatagccgtcctttaagggccctggtactcggttcaggtaattaacataggttgagaccaagggatgagacccaacacgagcgcatcagtgcgccagaaggagcaccaaatatccttcttggcgcatggagtcttggacgctagcgggcgacacaatggacagcgaggttggacaacagactgaacataaccccttggcccggtgggtacaaacaacacaaacgcaggggcagtccactgtgagacacattggtgtcttgatagagaataacacccgcctagtttggaccacccaccagtatcgcgattacaaggcttcgacagtatgcgcacaagcaatacataggagtgcccacgaatcaagaagccgcagcctacactaattagcacagcaccacgtcactcagaaagcaacagccacgaaggagcgccccaggacgtcaagcacaccactattgtcattaatacaactagccacacgcttctttctgccgatcgaacacaccagcaggacgcgacgagagt

SEQ ID NO: 566833 - DNA, 225 bp, Homo sapiens
tggtcgacttctgctcttcaagggcttctcctctgagttgtgtttcctcttctggtaaacttcctgggtcatatcctgtgcccatcttgatagaaggggttgggaccttcgtttccgtgctgatttggcggaaattccttggggtggttaaagataccgggttgcttggtcggggtttaggatatttggaaactattcttcgttacacggcagttcacccttgtt

SEQ ID NO: 566834 - DNA, 629 bp, Homo sapiens
  misc_feature (629)..(629): n is a, c, g, or t
gaaaatctgttcaaagagatagtaacagcttcccaaacctagagaactatatcaatattcaaatgcaagaagattgtagaacaccaagtagatttaaaccaaaggtatttaataatcaaactcccaaaagtcaaggatgaagaaaaaattctgaaggcagaaggagaaaagaaacaaataacatataaggagctcccgtatatcttggagcagacttttcagtggaaacattataagccaggagagaggggcatggcatatttaaagaactgaaggttcagaccagcctggccaacatggtgaaaacccatcactagtaaaaatacacaaattagtcgggtgtggtggcacccatctgtgatcccaggtactcaagaaggctgaggatggagatcacttgaacacaaagtggaggttgcagtgagctgagatacgccacttgactcaagcttggtggcagagtgagactttgtctcaaaacatattaatatgattattaaaggaaagtgccaaaattcaacaactaacagaaacttgtgaaaagagctgaaggccccttccaagagaagggtgaggaaacgcttatgaaaccatgagagggggctaacctaacggggagattcggtttn

SEQ ID NO: 566835 - DNA, 459 bp, Homo sapiens
  misc_feature (9)..(9): n is a, c, g, or t
tgagggaanttagtagagtgagaggaatatctttgttttagttggtggtgttatatttgttaaagtatagggaattatttatttaaaatgggtgtatttaaaaaataatttaattgtggtaaaaatatatataatgtgaaatgtaccatcttaattacttttaagtgtataactcagtagggttgagcagctttacagtgctgtgtaaacaatctccagaactttttcttcttgcaaaacaaaccctgtgcccatcaaacgctaactccccagtcgctgacaccactattctttctgtctctgtgatcttgactcctctaggcacctcctatgaatggaatcacgcagtatttgtccttttgtgaccagcttatttcacttggcataatgtcttcgagttcacccctgtgtagcaggtgcgtcgacgcggccgcgaatttagtagtagtaggcggacga

SEQ ID NO: 566836 - DNA, 88 bp, Homo sapiens
ggatttgctggtgcagtacaactaggcttaatagggactcgaattcgagcctcgaattcgaggaattcaagcttctaacgttagaagc

SEQ ID NO: 566837 - DNA, 187 bp, Homo sapiens
tttctgctttataatgttacccagcttagggtattttcttatagtagcctaaacggactaatacaggcagtgatgcatgctatcattatttctctttggagctggctaattcatgatttaatgattttccagttgtgttctgtggtagaacgggtcatttatacaatttaatctgatcacggctcta

SEQ ID NO: 566838 - DNA, 1054 bp, Homo sapiens
gtttccttttgccgccggagttatacaacactaatctttatataggaatccattcgttactgtaaatctttctaaatctctgcaaatggctctaaatgagggtaaatgaaaaagccgaaatgaagagagggttatggggcagcatgcaggtggggccagtcgatcagggctggaccacccagactcctccccagagacctctgttccttccttggtagccagcccccaaccactctgcaggcttctagggcataaacggcccagaacaagaagtgggcacgtgcagagggccaggaggagctggagggtcagggggtgaggggatagcgaaggtaagctagaagctggtgctggcatgtgccacagttcacaccccacccttccctcctaggggaaggagctggcagaagcaagacactgaggctggtcaggaacaagacaactgcacccctatggggggataatggacagtctccatcgagattcatgatgcacacttgggtggacagaccgagaccatggagctggcagaaggccgcagaaagggcagaagcataaacaacatattgagggatacccacaggatgaaagagggactgagatcgctgattcccctagactctgacgagcacagacaagtggccaagacaagcagagtaagccagggagaagctcgttagggcacagagcacactaggttgccgaggcggaaagagaggaagcgcccgggagaaaagaccaaggcagctcatagatgaacatccttcaacagcctgctggtaagaggggaaccgggtagcaggagcagggtagccctagagacgagatggcccacccaagagctcaaaggaaacgcaacctagcgagatcgacggcaagacgcaaacaaacaagggccagagataccccatagtgacaaggtcaagcacacgaccgagaacaacccaagggccaacaagtgcaacagaaaggatcaacaacacaacacgcataccaccacgcaccgtacaccagggccagaaggagaatagaaacaccggagcggccctaccag

SEQ ID NO: 566839 - DNA, 366 bp, Homo sapiens
gtatatacaactctctcagttagactgaacctcacttgacctcagtgacgcaggctgtctatcccaagagaggctgaggctttcttgctcactttgacaaggacagactagctttattcattcgttcactcaacaaacattgattatatgcctattttgtgccaggcacaagtggggcactctggacctacaaagaaaaccaagctattgtccctgccctgaaggatgcttacgtcttatgacagaccagatccatgatgttcgcagggtgtgtccctagagaactctgtgcaaactatcaaacagtaaatgccatttgtgggacacactgcccctgtagcatgcacgtcaagtagaatctaacac

SEQ ID NO: 566840 - DNA, 256 bp, Homo sapiens
gtttccttttgccgccggagttatacaacactaatctttatataggaatccattcgttactgtaaatctttctaaatctctgcaaatggctctaaatgagggtaaatgaaaaagccatttgcagagatttagaaagatttacagtaacgaagtggatcctatatacgattattttatacttttgcagcacaaggaaacttgtaatcgtttgtacagcgttcaagtgaagtaaaaaccatgcctaaggctacaaaaa

SEQ ID NO: 566841 - DNA, 1000 bp, Homo sapiens
  misc_feature (970)..(970): n is a, c, g, or t
gcttagcctcccacgtggctgggactgggggcatgcaccaccgcgcctggctagtttttgtatttttggtggagatggggtttctccatgttggccacggttttctcgggctcctggcctcgggtgatcccccatgcctcagacctcccaaagtgctcccaagagttgcaggcgtgagccactctcacccggcatgatttagataagactttgaagcttagacttattaagggtgatgctgaagacaaacttaagagcttcttggggcttattacgcgactggcaatgacagactatttctggactctgagcaaagcatatggcttacggggacgctaggggacgaatgcctatggctttgacatgtgtaaatactcctttctcccaaagaacagtaacatagttcgaacagtggtaatcacaccaattaacaaactaagttaataagcggaaggctaggaggcacaaaaataggcgcaccgtccactgagagagctccgtagaccattcagttcaaaatgcgtcagttgaaaaatacacaccgttgctcgattaaacaagaggggacactcataacctaggacacaaatgattgcacactggaaaacacagacaacacaattaaacaagtcacaccatatctggctgaaacccgataactgagacacctcgtatatgaccacaatgagtagaaaggagatttcccaaggggacgaaaaagcggaaagcagactgggcaccccaagtaatagaattatgaacgaaagccacaagagaaagatgacgactagggggcgaccaagacgcccgtttattcactgtggaccacatttagtggagaaaccaactattgatcacacgagaggaaagtgcgattcacactagtgaaaacaacaaattgtgatatggtcaggggacaaagagcattacgaccgaaactgtagtgcagattgaataaaacccatccccntaagactgaagaacaggattaaaccgccag

SEQ ID NO: 566842 - DNA, 338 bp, Homo sapiens
aggatgatggggcgagggtcccggcttgacttcacgaagtctcccttccggaccttcagaccgccgcggatggggtcgatggtgttgaacacggaatccgcgggagggagcccagcggcgagagggatgggctcattcagatgagaaatgtccgtgtcatcggactccatctgacggaacggggaggtgtcattgtccattgacggtctcctgccaggcgtgcagatgcccctggatgggcgagggatcggcgttgccgcagttcgcagcgagcagatggaggttgttggcgtaattccgataccgaggatcctcggcggccgcctgatccggaatcg

SEQ ID NO: 566843 - DNA, 434 bp, Homo sapiens
  misc_feature (3)..(3): n is a, c, g, or t
  misc_feature (20)..(20): n is a, c, g, or t
  misc_feature (24)..(24): n is a, c, g, or t
  misc_feature (31)..(31): n is a, c, g, or t
  misc_feature (33)..(33): n is a, c, g, or t
  misc_feature (47)..(47): n is a, c, g, or t
  misc_feature (57)..(58): n is a, c, g, or t
  misc_feature (68)..(68): n is a, c, g, or t
  misc_feature (71)..(71): n is a, c, g, or t
  misc_feature (74)..(74): n is a, c, g, or t
  misc_feature (94)..(94): n is a, c, g, or t
cangacacgcattgtaaaanaagncctgtgntntcggggaggcgagnaggtggcccnngtcctgctgnagncgncgtagtttcaggagaggacnaaagtggaaagtcacctttatagtaggaatggagcgcagatgtaagtggcggcaagctaacgccaaggggaggaagtccatcaggctcagcaatttccctgccgcgagtgggcaaacatctcacacgtgtacacaaatatatttggacacgggtgcttactgcagcattggcggtaaagtggaaggtataacccaaatgcctataaataaataactaaggccgggcatggtggctcacgcctgtaatcccagcactttgggaggcagaagcaaggtggatatctgagtcacggagtttcgtgaccagcctggccacatggtgagaccctctcacagcttg

SEQ ID NO: 566844 - DNA, 1090 bp, Homo sapiens
ttttttgtatttttaatagagacgaggtttcgccatgttagccagggtggtctcgatctcctgaccttgtgatctgcccgcctcggcctcccaaagtgctgggattacaggcgtgacaccgtgcccagcctatactgcagttttaaaaaagttaatggaagggttaaacaatacattagagaatttgcgagctacagagagatctggagaaataatcatgatagcatgagactagcaaacaagacaaagaagacaggctggctgcagtgctcaggcctgtaaccccagcactttgggaggccagtgtgggtggattgtttgagccaagcagttcaagaccagtctgagcaacagagcgaggccccgtctctgcaaaaaaaataagaaaagaagagggaggggtgagaagatctcacattcaactgagttccagaagagaatgaaaaaagaaaatattcaaagagtggatggctagagaattttccagaatgggtttaatttaccagtctaaagactgaagaaatacaacaagtccctagcaggatacagacaaagatacctgtgcctgacacatctgggcaaactgtggcactcaaagcagatgagaaaaccatgaaagaatccaggaggaaaacagatttctcacgaaggaaaggcgattccatggacagctcccttcttagtaggaactgtggaaaccagaagtagctttaaagtgctgggataaaactgtctttcaaggataagagtgaaaacaaagacatactcagacaaaaactgaaaacatttaccacaaacaaactcaccttaagcaggcaaatggccctcgatgtggaaagcaaagctcaggggacagagggtgtactgaagagttggcggtgatgatccctggagggtccccccagggccaagaagggggctgggagccatgcatggtgagactggagtgtgagcttgaggacagcaagaatcagacgaccaccccaggctgccagggtgtggctcagcctatctgcccctcacgctgagctgcacagatgcaaacaccttccaaacacagtcacgaggccttaggaacgtctcagagctt

SEQ ID NO: 566845 - DNA, 959 bp, Homo sapiens
ggctgacaccaagcgattgaagctgctggaagaggagcggcggcttcagggtacagctggaacaaggggatgacgacagctgctgagaggctagcagaaggtgtatgaggaacttgcgtgcgtccactggggtcgtgcagcatgactagtaggaccaaagtcgacgtgcggatccgttggtctggcctggggctttgaccctgaacagtgcagaatcgaaccaaagcagaagttctcagggggctggcgcatgcgtgtctccctggccagggcactgtgcatggagccacactactgctgatgctggatgagccgcaccaaacacatcgtggacctcgaacgctgtctatctggcttaataagtacctccagggctggcgggaagaccttgcttgatcgtctcccatgagcagggcttcttggatgatgtctgcactgatatcatccacctcgatgcccagcggctccatctacttatagggaggcaattatacgattgacgcttcaaagaaggatgtacgcagcgagaacgcggaaagaactgctgaaacaggtatgagaacgcaagagaaaaagctgaaggagctgaaggcaggcgggaagtccagccaagctaggcggaaaaacaaacgaaggaagccctgactcggaagcagcagaaatgccgacggagaaatcaagatgaggaagtcccaggaggcccctgagctcctgaagcgccctaaggagtacactgtgcgcttcactttgccagaacccccatcgaatcagcctccaagtgctgggtctgcatggtggtgaacattcgtgctaccacggacagaaaaccacttctttaagaactgggagtgtggatcgacatggattcaggacttgcgctgcgggcccaatggggggggacaaagtacccagcccggtgagactgtccacacggacacgaccatggcggaatgtgaagc

SEQ ID NO: 566846 - DNA, 110 bp, Homo sapiens
gcagggctttccccatatcttctctcccccacctctatcgagggggtgctgcttttttctccctcctcctcaagttcctttttgggaacggcaacaaccaacaaccttcc

SEQ ID NO: 566847 - DNA, 124 bp, Homo sapiens
ttaccacgcttacagaggaatacgattgatacatcagacattatctgccagttaagattattcttaaaactctggatgccatggcttttaataagtttaatgttcttcacgtggcacatagttg

SEQ ID NO: 566848 - DNA, 112 bp, Homo sapiens
ctgagtactgggccgctcccgctctggtcacaatataccaccacagtgggggcaaatcaccttcctttagggcagggggccagggtggggagccaggacctcaggtgggcag

SEQ ID NO: 566849 - DNA, 695 bp, Homo sapiens
cgcggtggctcacacctgtaatctcagcacttgggaggccgaggcgggcggatcacaaggtcaggagtttgagaccagcctgaccaacatggtgaaaccctgtctctactaaaaatacaaaagttagccgggcatagtagcatgagcctgtaatcccagctactcaagaggctgaggcaggaaaatcgcttgaacccaggaggcagagattgcagtgagccaagattgcaccagtgcactccagctgggcgacagagcgagactccatctcggaaaaaaaaaaaaaaaaaattttggcgggcggtcttccagatgggaattggcgggaaaagaatatttttaatacctggttttcaaaagggggtttgaagatgtggactcatcaatagtggcgggaaaaaatctaacgctcttggaaagtactttaagtggcggggggccatactcttaggtgccaacgtggcggggaaatttttcatcaggtgaatgtggaaggatggtgttgggctgggaaatgtggcatcacggtatcttgcagagaagattatttctggtttatctcagacagtggggaggggtcaagaaagacgtagtttgccaggtcgggggtcatgctgtaatccaaagtgcggggttaaggttgagaatggggcaagtttgggtgactttatgtgaggaaatcggcaaacaggatg

SEQ ID NO: 566850 - DNA, 397 bp, Homo sapiens
  misc_feature (389)..(389): n is a, c, g, or t
aattccctctgggatgctatgagctaatgagtttcttcatgcttatcccatgtgatgttgggaatccagactacagggcaaagtagatactttaactccattttacagataagagtgaggttcagagagatgattgagttagtgaggactgagcctggcctcaaactcgagttgactacaagcacctcttctctgcacagtgttactcatgaaagagacttccctgcaagacctggggccttttacttcaaagggcaaagagacttatttttcctttcatgcctttccatggcccactctttcattctggtttcaggttgccagtctggctggcagtcctctgttcattgggtcggtaacacccggggtcatatttccacacttaaagntggggagg

SEQ ID NO: 566851 - DNA, 990 bp, Homo sapiens
  misc_feature (205)..(205): n is a, c, g, or t
  misc_feature (241)..(241): n is a, c, g, or t
  misc_feature (247)..(247): n is a, c, g, or t
  misc_feature (260)..(260): n is a, c, g, or t
  misc_feature (263)..(263): n is a, c, g, or t
  misc_feature (796)..(796): n is a, c, g, or t
ttccacttgcatagtcatttcggttctgatctgtcaacccagcctgaccgcttctgacgccgggatggcctcggttactagacttttctttttaaggaagtgctgtttttttttgagggttttcaaaacatttgaaaagcatttacttttttgaccacgagccatgagtttcaaaaaaatcgggggtgtgtgggttttggttttngttttagtttttggttgcgtgccttttttttttagnggggtnggccccatgaagnggntgccccactcacttctctgagatcgaacggacggggaatccgctcttggtcggaagctgagcaagcgggggctttttccaactccggtggtgacgttctgagtgtagtggggtaggaccccggcgggtggtggcagcaacggcccgggagccccagccccgtggtccatctgtgcgtgtgcgccccacagtagacgtgcaagacgtccctgaaaggttctggaagatgtttattacatatggtgccttttttacgggaagacgtaagcatactccatcgatgtgtattggcaggggctgaggaatctctggtacgcagatccttgggattacgaagccgatttaaaagaccgtgtgaattgacacaaaaaaaaaaaaaagcgggggacattatgacgggggggggaaaaggaggtattgaatggggcctggcaagttttgcgggacccggtttcttgtgccaaggggggaattcggggggccccatgggggcggataattgccgaaggggtcaccgtagaagtggcgaaacgngaaacgcacgaagacgagcacacaaggcggtaccccttggcacaaagtggcaggcacgatgaccgtagctaacatattaccggagaagacaacagtatctgacgaagacagagaaacgaaacgcaaagcagatcgaagagacaggacaccagagcagaacaacgatcagagaaaacatcggacacaggccgcga

SEQ ID NO: 566852 - DNA, 152 bp, Homo sapiens
gtaagctgttaactgtttttttaaagttgtgtagaggcgggtgcagtggctcatgcctgtaatcccaacgctttgggagaccgaggtgggtggatcacctgaggctggaaaggtcccctatgtatttgcatccgaataaaagccagttttcc

SEQ ID NO: 566853 - DNA, 368 bp, Homo sapiens
  misc_feature (116)..(116): n is a, c, g, or t
  misc_feature (367)..(367): n is a, c, g, or t
ctccccagtccccatcctctctcctctggttttaatctgtgggtggatctttatatgttcctctctctccctctgcacacacacactgattgcatttccctgttgttcctattccntctctatcttcccaaaaaaagtgattgcattcattatctattgctgcgtaacaaattaccccaacatttagcagcttaaaacaaaaacattggtcatttcaacactggttctgagggtggggaatctaggagtagcttagatagttggctctagctcagaatctctcattagagagcagttaacctgtcagcaggggccagagccatctgaaagcttgaccagggctggaggatctgctcccagttgtgtnc

SEQ ID NO: 566854 - DNA, 317 bp, Homo sapiens
ctccttcagcggggcatctgctaattaggtggataaaacagccagcgcacatcaagtgaccattagtacactggtacacggaggccttgggcaggtccaggcacacggtgcagcacagcaccgagtagagccgctcctccagtttcccgctgccggccgccgccgccgccgccgccgcctcggccgcctcggctgcccgcagccgcttcttgggcggcgcgtcggggtcgccggccgcctcctgcagctgtagctgccgggcgcccgccaagcccgcctcgtccgggagcccaggccccgccgcctcgcccagagcc

SEQ ID NO: 566855 - DNA, 171 bp, Homo sapiens
  misc_feature (126)..(126): n is a, c, g, or t
gcgagtagaggaaggctcattgctgctgttgccttggggcgggcagtgacagttggggaaggagtcagctcgggtaggtgaagagaaggaagagtgtagcagtgagtgggagtacaggtgacacgnagtgacaggggtcagctctgtggcatgagcccatccccaggagca

SEQ ID NO: 566856 - DNA, 641 bp, Homo sapiens
ccccatccttccctttttcacggggaaatctaactcttccgtaaaggcagtagtgccgcctacatttgcaatactttcatcaatcccaaactgaataaattggtggcttttttttgaccccctacagaagtttaaatgtgccttttcactgaaacttttttgacaactccactcatggggtcaaaggagcacaagggttctcctgggaagcactgcatcctgactatcagttaatggtgccataacttaacagttttataattacatctttcttaggggccattatcctgcctttaacaccttccctaaactaaaaacgccataaagaaagggatccaagaaattcctcttacagttaaagatcttatgacttgccctccacatagtaagcatgcaaaacctatttgatgaataataataacactgaatggacactctttaggagaaatagtaaaatgaattacagctgcagctttggaaaaagatatagatgctaaggaacctaagtcattaagtcttagtacatcagagtacaattacacaaagttaatgtctcctgctgcctctctttaaggcctgattcccaccctctctgcccctaggaaccactaaagtttctatgtctacaggtgggcacactg

SEQ ID NO: 566857 - DNA, 259 bp, Homo sapiens
tggacgggggtcagggtctcagggtcaagatctaacatgtggacccttgagatctagctatagatacagaaagagataaaatcaatatacaagaatcgatctctatgagtggtctcaataagctcagtgtaacagtgctcaccacgcgtctgtaggtgttataagtggtaacaactgtattttccagcccatccgtccaaattggggtgtctgtttttttttaggctaaaagtggtcagcatgcagaaaagtgcgtgca

SEQ ID NO: 566858 - DNA, 213 bp, Homo sapiens
ccagcccaggaagccccatttgtgcctgccctaaggtggtccaccattttccccctttggttcccttccagttttttccccctttttatcccaatccccaataaaaatgttaacatccctgcttggtagccaaattagcccattaaagttcccctgtaaatgggggctccattatttttgctgccgagactaataaaaatttggttggtttta

SEQ ID NO: 566859 - DNA, 390 bp, Homo sapiens
atctccttatctgtacagtataatctatcttgtaagctcaaagcagattcctcagaccctacctagtgattcacatttgcgacatacagacaatttagtagctgaacatctggggacctgggtgaaatttttttgcgaaaaaacctccacaagtaaaaggaagacagctacaaatagaaaagccatttttgatatttccaaagccagtccttttgctgcatttcttatgagagatgaacatttaaagttctctttttttctcaaagcctaataagggttctggagaagagaaaatacctgactcagcgtaggataagggattacacataaaagccaagattcagacacaagtcttctagatctcaggaaataggccattctggtcctgcg

SEQ ID NO: 566860 - DNA, 166 bp, Homo sapiens
ctggtcacgtaggacagaaggtaacattgcatgactcgctcatggggaggcaatgcctccgctgacaggccccgcgggcgaaggtaccgaaagcacacgtacatcactggatgtcgatattgtcatgaaccatcaactgcaggaaccaagtttcacaaaagcagcc

SEQ ID NO: 566861 - DNA, 456 bp, Homo sapiens
ctatatcaccacaatcaattgtagaacatttttattatcctaaagaaacccagcaccatggagtggccactccccattcccttctcccacccaggccctgacaaccacaaatccacttcctgtctatatggatttgcctgttctggacatttcagataaatggactcacacactatgtagtctttagtgaccactttttcacttagcatcatgttttcaaggctcatgcatgttgtggcatgtactggaactccattcctttatatgaccaaataatataacattgcattggctggatgcggtggctcatgcctgtaatcccagcactttggggggccaaagcaggcagatcgcctgaacccagaagttggagaccagcttgggcaacacaacaagacccgttctacaaataaaataagctgggtggggtggtgggcacctgtggacccaactact

SEQ ID NO: 566862 - DNA, 266 bp, Homo sapiens
tgaacttttacagtgactccaggttcaatgattacatccagcaattccattctttatttactgaacaatactgctggctgataaaaccgaagtgttaagtcactgacacaaataaccatgtttgaggactgtaaatctaccagacagtcactgagaatcaaacacagctgatcacatcacacaactctagagaaactttgtggatgcggacacttcctatcagggttcagaagggtttcattaatatcttaagacaagtatatcat

SEQ ID NO: 566863 - DNA, 167 bp, Homo sapiens
ccatctaaaggatccccggccgctaccgacgcccagtactacggggagattggcatccggacccccccccagtgctttacaatcgtcttcgacacgggctcctccaagctgtgggttcccttcattcactggaaactgctggacatcgcttgctggatccaccacaa

SEQ ID NO: 566864 - DNA, 117 bp, Homo sapiens
taaacagtattccattgtatggatataccatatttcggttatccattcatttgttgatgggcattttggttccttcccccgttggttgggacaaatgatgttgttatgaacactagt

SEQ ID NO: 566865 - DNA, 975 bp, Homo sapiens
gactctcaggaacttacattacttcaacgtggtattatggtgattggccattgctagggcagtctggcaccatcctgtcagcctgtcagtattgcgtttagcatcttgattgcactcatcgcaggcaagtctctcaggcaacaactcaggcacatcctcatcgcactgctgcatgcgtgcagtaggcagcatatcttgcatggtggtgcatcgcatagccgcaacaggtttcacatcccagggcacgtatcacacagacagcagcatcgtcaccttcgcagcagtcccagcgaagatccccgccccagcaaagcaaggctgcagcccaacaaccacttgcagccccagcaggcagccatggtgtccatagtcggcatgtgccgcagaaaccccctcaggcaatcattcggcacacgcatatgcacagccacacacaggcaaaccacacattcccagtgccccatatactacaccgatgggcaaacatggggtacacacagcgaggaaacaccatgctctgcagcgcgcagccaaagcaaccttgacgaaacccaaggcaagccatcgggaacccccaccagggacaggcacacgccaccacacaaagcagggcatgccatgcagctcttcccttcattgggcgcaactggactgtacagaattggatcaggcatttttaggacgacacccctgggccaaaccctggcacagttcttcctcccatgcacagcacaaaaccggagccaataagttttacccacgggtcgggcacagcaggacgagttctctccacacaggcacttggtaaatccaagggattattggaacagcaggaatggatggttatagcaggccaagggaacaaatcgcagcattaccaagttggaaacccaagtaagttaggaaagcatgcaaaagaattgggaccaatgattacaagattggatgttaaacataccgaaggtattatggagg

SEQ ID NO: 566866 - DNA, 675 bp, Homo sapiens
tgcatgctgcaggtcgatctgggatcccccagttcttttcccctcaataaataaaaataataaaaatatgtgtaggggaagctctcaaaccacgttcttcctctactctcacaccaccacaacaatcatcaacacagaacacatctgtgaccaaaagtgtgggggtttttcacctctgcaccaagcagtggacaccagctcggtgttctccaattcaggttgggggctcagtcttcaagactgcctgcacacccctggacaccagttgcatgtctggggccctggatctcatgacccactgtcttcatgttggtgttcccacgatcccctctttgggtttggttaatttgctggagcatctcacagaactcagggaaacactgaaatttattggtttattctgaagaatcttacaaaggatatagatgaagggatgcatagagcaaggtatgggggaagaggtgtggagcttctatacccttcttggggcaccaccatccaggaacctccaggtgttcagctatccagaagttctctgaacccagtcctcttgggcttttgtggaagcttcatgatgtcaggatgccttctctcagggtatagggcagtcccctctctggggagggtgttaagaaccgcaatcagaaaggtggggacagattttagtcctttctt

SEQ ID NO: 566867 - DNA, 186 bp, Homo sapiens
tacctgaagtgaagggtaaagaatcgtggtggtgtgggatacaggagaagggcaagggagctcataaatagggcccagcctggctctgggttcaaaggtggaggctccaggatggcacagtgctgtgagtagctagtgcagctgagtgatgtagtactctgtattggctctggcccttgatcgagt

SEQ ID NO: 566868 - DNA, 121 bp, Homo sapiens
tttcatttcattgtggagcagcaactctttacagtgactactcttggataccagtgccatggaaggactgggaggaacttactaataactcgcttcacgaactgaaataacggcgtgacag

SEQ ID NO: 566869 - DNA, 455 bp, Homo sapiens
gcaaggtggttgtgggtaggtgatagggaaaaggtaaacagatgtattagccactggctttgtgtgggcagctgtgttgaatcagcctgctgctgagtcacagggagtaactgcagctggctaagggtgggttctaagcatggagaggagaggaaaaggggtcctgcaatgtcccccagcagcctgtcattgtgtgtgaaactcctagcctgagagccccacctctggtcagcactagtgttgggagacttctgggagggattgtgactttcagctgggtaactggtgtctggctgaggccatcttgagcgcagtgaggaaggatctccagcctgagtgtgccgtgggccccccgaatacataggggagccctgcaaagcagttttgaaatgagtagtacatctcacgaagaaagtctgcaagaggtcgaggtgcatgagaaagatctggccctg

SEQ ID NO: 566870 - DNA, 315 bp, Homo sapiens
tgagagtcagtcagggaagggagacatggtggagatggccacacggtttgggtccaccctgcagctagacctggaaaaggggaaggagagtctgttggagaagaggctggtggcataggaggaagaggacgaataggaggtggaagaggatggccccatcatctgctctgaggactattacagtgagctgtagatagatatcacagaacacctgactaagaaggaaattcatatatgagaaaatccatttggactcgtcctccttataggaggagctgcctggagagaaggacctatgcccacgtggtataagat

SEQ ID NO: 566871 - DNA, 218 bp, Homo sapiens
tgacgctggcagaagcttcactgggcagtcagtgaaaaaggcaagaacaagaattcaggttcttatcaggatctttaggcctcactgacagttttgttttatgagacaggctctcactctagtcacccagcactgagagtgtggtaggcgcacatctcgcgctgacgtgcatacctctagcctccagtgctcaacgctagcctccacaacgctctaca

SEQ ID NO: 566872 - DNA, 1007 bp, Homo sapiens
  misc_feature (314)..(314): n is a, c, g, or t
  misc_feature (356)..(357): n is a, c, g, or t
  misc_feature (476)..(476): n is a, c, g, or t
aacgtaatataagcgcgagaaactgaaggagaagaagctgacacccatcacctatccgccaggttctacccatgccaaaggagattggtgcttgtaaaatacctggagtgctcggcgctcacacagcgaggcctcaagacagtgtttgacgaagcgatccgagcagtcctctgcccgcctcccgtgaagaagaggaagagaaaatgcctgctgttgtaaatgtctcagcccctcgttcttggtcctgtcccttggaacctttgtacgctttgctcaaaaaaaaacaaaaaaaaaaaacaaaaaaaaaaaacaanggggggagcctttcgcactctcaagtgccaacttttggggtnncagatttaatttttcccattaaaaccatttttggacccaattcagttaattttaagggtttgggtggggtcctaaagtgtaagagttcagactcacatttctattaaaattttagcccntaaaagtgacaagccttccttaaagccttatttttcaaaagcgccccccccatttctgggttcagattaagagttggccaaaataccttcgtgaactacacggcattggtgggttgccgagaaacaccgagcacggaacttgggcaaagaccttcgtcttggaaaagacggtaagctcctggcagttaaggaggtggcagacactggctctccttatgtagttctcagaatgcgtaaagcagaacagcctcccgaatgaagcgtggccatggaactcaccagtgagtttagcagcacgtgtccccgacataactatggtcctggtaagggagtggagcgtacgcagctcagctctctgggatcacgctgggggattcatagcggagtttcctggaccagcttaggcgggagattgggacagaactgctattccctcaactgaagaatcggtaacctgtggctgtccggggggcgtgtgtgtgacccacggccagaccgtttgcgccaaatcccagggcattacccactggc

SEQ ID NO: 566873 - DNA, 897 bp, Homo sapiens
  misc_feature (897)..(897): n is a, c, g, or t
tgcacctgccaccatgcccagctaattttttttttgcagtagagacagggtctcaccatgtagccaggatgttcttgatctgacctcgtgatccgccgacctcggctcccaaagtgctggaattacaggcgtgagcattggcttggccaaaaatgagcttttttaaaaaaacttcagtatttcctaccactgtgatgaggtataatgctcgggaattatcagaaggcttatggcagaattccgaataggggaacctaaatcatgtgccatataaagtttacttaacaaaaagttatatccctattcctcaaattgaagtgtctttcaataaaataagattttatcatttattgtcggcaactttttgatgtctcattctttaaactttaaaaaagcccttaatattttaacaaaaaatttctggatcagaggcccagttgaaaaagaggtcaaaaaaacaaggttctactttccatcagtgctataaaggtggcagcaaatgtaatctgggtgaatggtcttaattactcattaaccacggtcagaaagacatataggtgctatttgggaaaacttttatacctagggtggggttcctcaatgggctattacaacccccagtgggtcatgtttggcactttttctactgaacatacaaccgcacgtggccacgttgtgcggaaaggcaaagattgagtttggttccaaagcgcttgctatgttatttatactctctcctccattatcttcattttaagggagggtggtccagaggatcaaaaaggttattcccgccgctttaacttttcaaaaacagtggctttgttaaccacagacccccacaacgttgtgcaccgctccacgggacaaccccaggggttaccacaaagcgcacgn

SEQ ID NO: 566874 - DNA, 279 bp, Homo sapiens
  misc_feature (188)..(188): n is a, c, g, or t
  misc_feature (214)..(214): n is a, c, g, or t
tgaacatcgggaacacaatgacatatcacctcacactcaggatagctattatcaaaaaaaaacaaaacacagcaaatgtgtcaaggtggtggagaaatcaatacccttccatactgcttatgcgaatgcaaaatagttgcagcgtgctcgggttaaacagttagtggaatgttctcacaaaaaactanaaattagaactacaatataatccagncatcccattggtacgatatttatctagaaagaatggaaatcaaaatatcaaaaacatattaggat

SEQ ID NO: 566875 - DNA, 668 bp, Homo sapiens
  misc_feature (71)..(71): n is a, c, g, or t
  misc_feature (107)..(107): n is a, c, g, or t
acctgatggggtgagcttctactacgaatgaaactctgtcctcccgcaagtacaggcatcgctgtgtgagnacggcacggcaagcgcctgctgtgagtgggtctccnaagactaggcctcaggacgtggggggagccatccccgccgccctcacagtacccaccaggcagcggagacatgtgcaattagagtattgtgaggtgtcctttctttacaaaataatggggtcttgggcatttcacatcactccatctttactgagactttcagaatcacacaggccctttccgtggatttcatttggggcaaagaaacaacgtagttttgtttttgttttcagcctatggaatgatttccttttgtctgtcttgttcaagttcagacgtagctactctggcatctgcacatttccgtgtcacagcagccgcataatgaattttatccacctccatttcagcatgtggctcgcgtggacaggtgactggagcgctgtggcggcatggatcctttagaacccagggacatacgctcagtgccgaggaaggaatgcacgggactcaccgagctgcagttaactgttctctttctggctattttgtgttgcttgtttctaggtgttgactttgtccgtgccaaaattttccactctgagtaaatcaaggctcagt

SEQ ID NO: 566876 - DNA, 1076 bp, Homo sapiens
  misc_feature (383)..(383): n is a, c, g, or t
  misc_feature (425)..(426): n is a, c, g, or t
  misc_feature (545)..(545): n is a, c, g, or t
cacgtagtgcgggggcaccggtttttccctctgagccactgtgtgtgttacctgcccgctgtgctcctcgcgctctatatggaggacgaccccctattatgtgggggcccgcttctgtctggccaacagaaacgggggggggcgctcgctgattgttgtttgtcgccccagcggggaggattattattatgcgggcccccccccttttttttttttttttttttttttttttttttttttttttttttttttttttttttttttttttttttttttttgctgttgtaaatgtctcagcccctcgttcttggtcctgtcccttggaacctttgtacgctttgctcaaaaaaaaacaaaaaaaaaaaacaaaaaaaaaaaacaanggggggagcctttcgcactctcaagtgccaacttttggggtnncagatttaatttttcccattaaaaccatttttggacccaattcagttaattttaagggtttgggtggggtcctaaagtgtaagagttcagactcacatttctattaaaattttagcccntaaaagtgacaagccttccttaaagccttatttttcaaaagcgccccccccatttctgggttcagattaagagttggccaaaataccttcgtgaactacacggcattggtgggttgccgagaaacaccgagcacggaacttgggcaaagaccttcgtcttggaaaagacggtaagctcctggcagttaaggaggtggcagacactggctctccttatgtagttctcagaatgcgtaaagcagaacagcctcccgaatgaagcgtggccatggaactcaccagtgagtttagcagcacgtgtccccgacataactatggtcctggtaagggagtggagcgtacgcagctcagctctctgggatcacgctgggggattcatagcggagtttcctggaccagcttaggcgggagattgggacagaactgctattccctcaactgaagaatcggtaacctgtggctgtccggggggcgtgtgtgtgacccacggccagaccgtttgcgccaaatcccagggcattacccactggc

SEQ ID NO: 566877 - DNA, 340 bp, Homo sapiens
  misc_feature (30)..(30): n is a, c, g, or t
  misc_feature (38)..(38): n is a, c, g, or t
  misc_feature (59)..(59): n is a, c, g, or t
  misc_feature (139)..(139): n is a, c, g, or t
  misc_feature (148)..(148): n is a, c, g, or t
  misc_feature (262)..(262): n is a, c, g, or t
atcaggcgaagacgtggggcccggcatgtnggaggggngcactaccttccaggaagtgntatccagaagctctctgaacccagtccttttgggttttgatggagacctcattctataggcatgatgggttaaaccatangctattggngatcaactccacctggggctctccaccctccctggaaattggggttgaggctttgccattctcagtctgactaaaagaatttacccaaacggaactttaaaacagatgagcatnactggaatcttaattagatgattggattatttggagccacaccttgatattcctaacccgagcaacctggtccaagga

SEQ ID NO: 566878 - DNA, 169 bp, Homo sapiens
tctaggcaataatactcacatagctggggcgcgccagactttggaacctattggaaaagaaacacaacacaacaatgttacgaaggggaagaattatagtttataatctagaagtctatggttgtgctagagcatgagccatggccgtgagccatgggcatgttccatg

SEQ ID NO: 566879 - DNA, 250 bp, Homo sapiens
acatgatacaaccgagcgcggacccgcaacattcgtgtcatatatatgcgcatttttgtgcttatgcacccccaggagtgtatcgtgtgtgccagtgtgagtgccgttgtttaaatttgtatcccgaaactcaggtgtatccacatgttcatggtatacctcggccggtcctagacctagtatcagactctgctgctcctcactggcataaaggcagaccctgaactgggcatggggacacgaatgttca

SEQ ID NO: 566880 - DNA, 514 bp, Homo sapiens
  misc_feature (24)..(24): n is a, c, g, or t
  misc_feature (345)..(345): n is a, c, g, or t
  misc_feature (418)..(418): n is a, c, g, or t
  misc_feature (481)..(481): n is a, c, g, or t
  misc_feature (495)..(495): n is a, c, g, or t
  misc_feature (506)..(506): n is a, c, g, or t
aggatttgaaggcctcagaacacntgaatgagaaatcagtgagagaggtagcaggtaagcaaggaagcagattgaagaccctagatgtttatgatactgctgtgctaatgccttgatgagtgagaccagcagaaataagtgaaagcaggagaagccatgagataatatatctgaagtctgatttaattgatgtgaaatatatcactgacaaagtaactaaaggtcctccccctggaaccaacctgggatccattccttgagatgcaactggtcttccgcattaacagtgaagatgatcacactgagcagagactagtttgagaatggatatctgagtttcatatnagtgtaggaaggcaagaactttgagaatggtataaaggagagaacaggcatcacaaaccatgaagtagaaggnagcaagggaatattttctggcttaaaaggatttgaaggcctcagaacactgaatgagaaatcngtgagagacggtancaggtaagccnggaagcgg

SEQ ID NO: 566881 - DNA, 325 bp, Homo sapiens
  misc_feature (52)..(53): n is a, c, g, or t
  misc_feature (56)..(56): n is a, c, g, or t
  misc_feature (60)..(60): n is a, c, g, or t
  misc_feature (62)..(62): n is a, c, g, or t
  misc_feature (64)..(64): n is a, c, g, or t
  misc_feature (71)..(71): n is a, c, g, or t
  misc_feature (75)..(76): n is a, c, g, or t
  misc_feature (78)..(78): n is a, c, g, or t
  misc_feature (88)..(88): n is a, c, g, or t
  misc_feature (91)..(92): n is a, c, g, or t
  misc_feature (96)..(96): n is a, c, g, or t
  misc_feature (195)..(196): n is a, c, g, or t
  misc_feature (243)..(243): n is a, c, g, or t
cagcagtgaatgctgaagtggggatctgggaagcacatcacaacatacattnncanaacnangntaggagnagcnnangtgaacaagnttnntttnttctatggttggtggcttcaacgaagtcagaattatggcctggatgagtacggtgagaattccttttctttacttccagcccactacacaaagttccannacactctgatgctgcagtctagcttgagggattctagcagggaaatngctaaagggtcccttctaggatctggttatcttcctgccttcaatgagcctgtcttctttgtacactccattctatggttgt

SEQ ID NO: 566882 - DNA, 1263 bp, Homo sapiens
gtgttgtacgagcgtgagtgaggagagcgacgggagggatctgacgtactatcttcgttttgtgatcctgagttctcgcgttcttgtgccgtgttcatagtaccatgtgtctgctcttccttgtgtttctcgtgtcgcttactgtctgtgcctcactcttttgtgttcgctttgtctgcctattgactcttatttttctcggttctttggatggtcttgtctgtctttctgatttcctagagttgtggacttattcctgtgtgtttcttctttattgtcccctacgtactatctggttgatccctccccgcaggcaacacgggcattggctgccacagagtctgtggtgaacgccggtggagaatttctggaatgccgtgcgggaccacttttcgtgcgtccaagtccaagtcacaagctaatctgtccccggtttaccactttggttctaatagtagatggtgagctacgtgttagtctcgattggctattgccctgggcctgggggaaacctcacccaacgcccagcttccagataggcctccagctgagcagacgggccccgatcccgccagaacggccattgcgttccagccaaaagtacaccgccgacacgcacacctccaacctgggacatcccatcgctgggcctcgcaacggaggaacctgcagaatttggattctgaggctagtcgggaggcctcggtagccaggcagaacaggatatctgccaaagggtgtctgatgtggggtggggctggcatcctcccaggaaggttctaggtgggaccccgtcttcatgggggcgcggggtgtcgttttcatcttccctggtttcctagaactcacttcctttgacggcgtgtgttggtcccatctctcagaccaggctcactgaggcagacggagttgactcagaggctcacatgggcacccccacttggcttcgtgtgagcagctgcccagccccaggcctgcacgctcggcgcgtggtccagcatgaaggcgtttgccatctgcgaaggatagcacggtaccctgccacacgagagcaggcctggtgccgcctacaccaactgggaataaactggaagctgggtctccatctgttgcgtatgtgttctattgtttgaagttcccaggaatatttagaggcgttcacgctgatgtgtttagggatcttctctgtgggggaaaaggaagaggagggtcttgttctcccatctgtttattctttgggctctgggatacaggcgactactt

SEQ ID NO: 566883 - DNA, 147 bp, Homo sapiens
tacggacccaccaacatactcgtggatgattcgctgcaaaaatagaatacgagtgtagcttttccatgtaagttctggctgggtaacatgagtgaatcattcgtaaacaagttccatgcactggatttatatggagatgttaacagg

SEQ ID NO: 566884 - DNA, 114 bp, Homo sapiens
gtgattgctgagggctgactcctagaggatccctgtccttgattgtacgtgctagtcagaaacagtgccagtttttccacaaagagcggatggaggtgtagtgagaatcaccag

SEQ ID NO: 566885 - DNA, 3708 bp, Homo sapiens
gcggtgcgggccgggcgggtgcattcaggccaaggcggggccgccgggatgctcagggttccggagccgcggcccggggaggcgaaagcggagggggccgcgccgccgaccccgtccaagccgctcacgtccttcctcatccaggacatcctgcgggacggcgcgcagcggcaaggcggccgcacgagcagccagagacagcgcgacccggagccggagccagagccagagccagagggaggacgcagccgcgccggggcgcagaacgaccagctgagcaccgggccccgcgccgcgccggaggaggccgagacgctggcagagaccgagccagaaaggcacttggggtcttatctgttggactctgaaaacacttcaggcgcccttccaaggcttccccaaacccctaagcagccgcagaagcgctcccgagctgccttctcccacactcaggtgatcgagttggagaggaagttcagccatcagaagtacctgtcagcccctgaacgggcccacctggccaagaacctcaagctcacggagacccaagtgaagatatggttccagaacagacgctataagactaagcgaaagcagctctcctcggagctgggagacttggagaagcactcctctttgccggccctgaaagaggaggccttctcccgggcctccctggtctccgtgtataacagctatccttactacccatacctgtactgcgtgggcagctggagcccagctttttggtaatgccagctcaggtgacaaccattatgatcaaaaactgccttccccagggtgtctcatatgaaaagcacaaggggccaaggtcagggagcaagaggtgtgcacaccaaaactattggagaattgcgtggaaatcttcagattcttcactggtgagacaatgaaacaacagagacagtgaaagttttaatacctaagtcattcccccagtgcatactgtagcgtcaagtttttgcttctggctacctgtttgaaggggagagagggaaaatcaagtggtattttccagcactttgtatgattttggatgagctgtacacccaaggattctgttctgcaactccatcctcctgtgtcactgaatatcaactctgaaagagcaaacctaacaggagaaaggacaaccaggatgaggatgtcaccaactgaattaaacttaagtccagaagcctcctgttggccttggaatatggccaaggctctctctgtccctgtaaaagagaggggcaaatagtctccaaagagaacgccctcatgctcagcacatatttgcatggaagggggagatgggtgggaggagatgaaaatatcagcttttcttattcctttttattccttttaaaatggtatgccaacttaagtatttacagggtggcccaaatagaacaagatgcactcgctgtgattttaagacaagctgtataaacagaactccactgcaagagggagggccgggccaggagaatctccgcttgtccaagacaggggcctaaggagggtctccacactgctgctaggggctgttgcatttttttattagtagaaagtggaaaggcctcttctcaacttttttcccttgggctggagaatttagaatcagaagtttcctggagttttcaggctatcatatatactgtatcctgaaaggcaacataattcttccttccctccttttaaaattttgtgttcctttttgcagcaattactcactaaagggcttcattttagtccagatttttagtctggctgcacctaacttatgcctcgcttatttagcccgagatccggtctttttttttttttttttttccgtctccccaaagctttatctgtcttgactttttaaaaaagtttgggggcagattctgaattggctaaaagacatgcatttttaaaactagcaactcttatttctttcctttaaaaatacatagcattaaatcccaaatcctatttaaagacctgacagcttgagaagggtcactactgcatttataggaccttctggtggttctgctgttacgtttgaagtctgacaatccttgagaatctttgcatgcagaggaggtaagaggtattggattttcacagagggaagaacacagcgcagaatgaaggcgcaggcttactgagctgtccagtggagggctcatgggtgggacatggaaaagaaggcagcctaggccctggggagcccagtccactgagcaagcaagggactgagtgagccttttgcaggaaaaggctaagaaaaaggaaaaccattctaaaacacaacaagaaactgtccaaatgctttgggaactgtgtttattgcctataatggggtccccaaaatgggtaacctagacttcagagagaatgagcagagagcaaaggagaaatctgggctgtccttccattttcattctgttatctcaggtgagctggtagaggggagacattagaaaaaaatgaaacaacaaaacaattactaatgaggtacgctgaggcctgggagtctcttgagctccacgacttcaaaattaaaatgagccatgagtcaaaccactgcaatccagcctgggcaacgagcaagacccagtctctactgttggtggcaaaattgccaacataagttaatagaaagttggccaatttcaccccattttctgtggtttgggctccacattgcaatgttcaatgccacgtgctgctgacaccgaccggagtactagccagcacaaaaggcagggtagcctgaattgctttctgctctttacatttcttttaaaataagcatttagtgctcagtccctactgagtactctttctctcccctcctctgaatttaattctttcaacttgcaatttgcaagggttacacatttcactgtgatgtatattgtgttgcaaaaaaaaaaaagtgtctttgtttaaaattacttggtttgtgaatccatcttgctttccccattggaactagtcattaacccatctctgaactggtagaaaaacatctgaagagctagtctatcagcatctgacaggtgaattggatggttctcagaaccatttcacccagacagcctgtttctatcctgtttaataaattagtttgggttctctacatgcataacaaaccctgctccaatctgtcacataaaagtctgtgacttgaagtttagtcagcacccccaccaaactttatttttctatgtgttttttgcaacatatgagtgttttgaaaataaagtacccatgtctttactaaaaaaaacaggacaaaaacacacaaaaattgggggggcgcctgggccagagaaaaggtttttctaacaccctttggtgggggtcgcggcgggccccaagaagttaaacgcgtcgaccacttgtccatacaggcgtggctcccacaggagaagctctggtgtactaggagacacagggggctggggttctcaccacaaaaaaaaaaccggccggggcgggacaacgcggagcgtttcggaacaaaccaccaagaagggagtaccagggaaggacacacaaaccggggcgaccataccacacggggacgcccaaggcgagcgacgaaaataccaacttacgcccgccggccggcgtggcaggacagcagcagcagcgacagaacacagcagacgacaacgacagtgaagacaacgaacaagagagagg

SEQ ID NO: 566886 - DNA, 202 bp, Homo sapiens
gttctcaacaagggcagatatggtgctaggagctgaagatattgtgtgtgttgtgctgctgtggaaggttgtatattgttgagcaatgggatgaagctgtggtactgccaggggacagatgctgtgtcagtatgaacctgggctgcgtgtggaagtgttgtatgattgttgagcaagtggatgaggctgtgtgtacgtgcca

SEQ ID NO: 566887 - DNA, 1500 bp, Homo sapiens
cttcatatgtaatacccatcataatcgtgaggctttggcaacctgactagcttccccataataatcggctgcccccgactatggcgtttcccctgcataaacaagcatacagcttctgactcttaccccacctcgtctcctactcctgctcgcactctgctatagtggaggccggagcaggaacaggcacgaacccgctctacccatccctatagacagggaaacctactcaccaccgctggaagcctcacgtacgcaccctaacccaatcatatcatccatcaacaccctagcccaggctactcctccactctactcatatcagaggcgacgcagctcaacacccttccactcaaccacaacaacttactcacactactaaaacaccaccacatgaccccaccacagcccaacaaaaccacccaagcgccccccctcgttccagcaacctgcactcgcggaccgtaagtccaccacgccgccgcaccccatacccttatccatccactaactaccatccatccaccccagacaccccatcaggccgctcgccatagcgacccaatacgaacataaacatcacctcacacgtaacacccagccacccccgggcaacacgcacctgccaagaccgagcccccacgcctactcgtctacgaaatcaccacgacccgggaccgggcacaggcaacgaaccccccccaccttaccctacctacgccaacacccaccaccacaactccacctaggcactccccctcacccgagcacccagcccacaatggcacaccgcaccacatcactcgccttcacactccccctaccccaaagagaaccccgcgcgcaaccctaccaacaccttcccacacaatcaaacaggcccacgccctcacactcaccatccccggcgcacacccactaacaagaaaccacccaaccctggggcccataccatactagcgcaaacatgggccaccatcgcacgccccacacagacactactccacaccacctgcgcaccctccaccacacacgaagcataccacaacacaacgcagacacccacacaccacagacacatctacaaccaagcacacacgcgcacaccaccacaccatctccacacaacacccaaacacaattacacttctcacacctaccatacacactccccaccttacctacatctccgcgcacaactccccaacaccagggcacgacaccaaccacacacccaacccacagacaccacgcactcaacccacatccgacccccgcacaccccgcccaccccacacccacccctcacaccctcccccgccacagccaactccgaacccccaccaccgcaacatacaaaccccaccacccacgcatcgccccccaccacgcgccgcccctcgccctgcccaaccacgacacacacagccagcaacagcctcaacgcccaaacaccaccccgctcctcacacccacccactgccagacaccgcccacaga

SEQ ID NO: 566888 - DNA, 281 bp, Homo sapiens
aaacagtgatcacacaggagagcggcctcaccagtgtggtgagtgtgggaagggcttcagatgagagctcgaaccttcacattcaccggtgcatccacaccaggagagcaagcttaccaatgctatgagtgtgggcagggtttcagccagagctcggattttcgcatccatctcagagtcccacctggcagagcaagccctctcactgtggcaagtgtgggaagggatttcagcccacagtccaaactcctcatcccaccagagagtacacacttgggttc

SEQ ID NO: 566889 - DNA, 526 bp, Homo sapiens
ggcccaagcctggccattgttccgccgagggaggacagctggggcctggcgctggcgccgagacgccagctatagcggccgacgaatggagacactccctcccgactcccgggtctcctggacggcggaggaagatgaggctgacagcggggaaccatgggagaaccccatatccgacacatcaccacgaggattgacagagagacgaattcccacgagaaatcctggcacgtaggagacgggaacgacaaaaatgacgacaacagagaacaaatgaacgagataaaccagagaaccgagaacacatatcccaattcggcaataatacaccatacgcacattattttcgccacatatcggatcattccagagagacaccacggggcagaatcaataccattggaaaagtatcaccattcattgaaggggtaaacgggaaacagaaatggcattgcaaaggggaagacttggaggcagatggtaacaggagagacatagaggacccaaggaaaaagaccccgcaaga

SEQ ID NO: 566890 - DNA, 251 bp, Homo sapiens
gatgtatccccctttaacgtgctagatagtacccgatcgagccgctcttcgttggtgatcatgaatcacacgtgttcaaattttcctcactcctatcaatatgagtcctagcctccccgaccattagatgctcaaggaggagcatcgatggatgtctgtgctcgcgtggcgccccacaaccctgctccccgacgtccaccgtgatccacatccgcagcgagacctccgtgccccaccatgtcgtcaggtcc

SEQ ID NO: 566891 - DNA, 137 bp, Homo sapiens
ctctacaggatcccctcgaagatggctggttggcggaagaatcaagcaacgagatgaacacactgcagcagaaggctgaatgagcagcagagtgtgcttcagcggtattgccgcccccaagatgaatggccagtgga

SEQ ID NO: 566892 - DNA, 1043 bp, Homo sapiens
gcactcattagtgccgcaggtgcgcagacatgtcgggactcaagagagtctccggcctcgagccgtccgtggaggtagacgtaggggacctacgagcagttccgtcatcaggcagagggcagactgattctcgaagttccacaggacgaggcaaaggaccgtgggacaagaggtttatggaacatgtgtttcagcgcgacgtcaaggaccgtggtccagagggtgactatgtccatggcatacggacgtttgggtgagagacagactatggcagctcgattcagtcagtcttcgtccgaaggggtttcagactgggtgcaacttagcagagcaagagacatcccagaggttacgacatgaagcgagaagaaggcactggcaggacagcatgcctgcagatcgggaggtccatgtgtgtggagatttcacttaagacattcgtgagggagattccatggagctggaacatatggtgtctggaacatgaatgaaaagtgtgataaagaaatcaaggtttcctacacggtgtacaagagactgtcatggctgctgaagtcccgcattacgtagctaataaactaggagtggaacgaggctataggctcgtccaggaaaaaagggcatgaatatgtaatatcatacaggatatatgcggagaagtacagtgagatggacataagaagacaggattccagaccaggacggcactaggcaccactggggcacccctgatggggcaccaaacaagcctatactggtgccttaacagaataaactagagacaatccatgtataacagggcaaatggaaaggaccccccaacgtaacacgggagaatacataataggagacagatgaagggacgcgacccaaaaccaggcaccacagcccaaggaacccaggacaaaaacaacacagagaaagacagacaagcaagaaaaaaaacacatgggaaaaagcgacaaaagataacacacgaaacacacaacacaaaacaaaagacagcacaaaacaagagaatccaaacaaacacaggcaagaac

SEQ ID NO: 566893 - DNA, 468 bp, Homo sapiens
ccttcttccacttccaacacttggcaaattctgagggcctctgacagaggttaggtgtataggcactgttatcgccaatgtaactggctcctcttggtgattacagttttcttatgttgaattttggataactttatttttttgtctgcagaggaaaaaaaaaaaacactaagtgattgcagccaggcacagtggctcatgcctgtaatcccagcactttgggaggccaaagcaggtggatcatctgaggtcaggagttcgagaccaacctgacaaacacggggaaacccagtctctactaacaatacaaaaattagcttggggtggtaccacgcgcctgtaattccagctactcaggagggtgagacaggagaatcgcttgaacctgggaggcggaggttgcagtgagccgagattatgccactgcactccagcctgggcgacagtgagactcccgtctcaggaaaa

SEQ ID NO: 566894 - DNA, 190 bp, Homo sapiens
  misc_feature (37)..(37): n is a, c, g, or t
  misc_feature (39)..(39): n is a, c, g, or t
aaagggcagggcaagggtggcaaagggacagggcggngncgggccgtcatacgcgagcctcatgaaagaaagatccttggcactgctgggatgctctgagtacgggtgcataggtcagaagatgaaggaagggccaaggagcagcggcacctgcacaataaagagcacttcagagccaagcagaaggagg

SEQ ID NO: 566895 - DNA, 530 bp, Homo sapiens
tgaccaggtggggttgcaccggtatgtcccctactgttcattacctcgctcgcagggtgcctgcccctatggaccttcaatcagccaacatctcaccttcacagtcaccagaatgtccttcaatcatgtcgcttactggtataaacaagatcctaggatttaaaaatctgatgtgtgcccagaactgagccaagcaagattataagacaagtcatgaccacaggaaggaactttccatctggcaactgtgtgaccttgacggtcagccttcgcttcctcctttttcttctggtccctacaaagcacccaatggcaccacatacaggcaatttctgttgggcaaccctaggagaagcagcttcccttgtgtaatgcagatgatacttcctaatttcttcttccctactcagaaatcacaatggaaggcaagtgggcacacggggtatcagaatcctcatctgagcagagtctcaccaaagtgcatatgtaggtgctctggggaaagttagtccttggctagatatgtcaga

SEQ ID NO: 566896 - DNA, 415 bp, Homo sapiens
  misc_feature (146)..(146): n is a, c, g, or t
gacgctcggtttccccagccccgttaggggggtttttgttcgtttttcggggcaaacccccgggtgatggggcctcttgggggcccgggggggtggcccttaacctacttttttttttggttccccccggggcaaaggttgggccngggggccccccccccccccccccaaaaaaaaaaaggggccccaaaaggcccccgcgggggttttccccccccctttcccaaaaaaaggggtcccgggttctccctttttgggggggaaggaaaaaccctttcctccccggggggggccctgggcccccccccccggccccggttttcttttttaaggggttttggggcccccccccggggggggttttttttggggggccaaaggtttgccccccaaaattaaattccggggggcccca

SEQ ID NO: 566897 - DNA, 163 bp, Homo sapiens
catagagcctctcctgtgtggtctgcctctgatctgcagactgctcttagcccctgtgctttgtgccaggctggaggagggcagtccccctattgtgtgccaagccaacgcctcaggaatcaggaggccagcctggtaccaaaatggagtacccagtgacctg

SEQ ID NO: 566898 - DNA, 410 bp, Homo sapiens
  misc_feature (12)..(12): n is a, c, g, or t
  misc_feature (46)..(46): n is a, c, g, or t
  misc_feature (131)..(131): n is a, c, g, or t
  misc_feature (143)..(143): n is a, c, g, or t
  misc_feature (153)..(153): n is a, c, g, or t
  misc_feature (172)..(172): n is a, c, g, or t
  misc_feature (187)..(188): n is a, c, g, or t
  misc_feature (230)..(230): n is a, c, g, or t
  misc_feature (274)..(274): n is a, c, g, or t
  misc_feature (371)..(371): n is a, c, g, or t
  misc_feature (400)..(400): n is a, c, g, or t
cgagagttgaantggttagaacccagatgcattatgaaatggcctntgaaatgaattgttctgcaaaatccctagaaaagtgatgctgaggaggacagcagatatggccatctgtttaaagtatgttgtantcagttataaantgattgttantctacacataattatgaantcagaatttaaaaannggggaaaagccatttatttagcaagtttttagcttataagtncctgcagctgagctgtcttaactgatcctggttttgtgattganaatatttcatgctctgtagtgagagagattccgaaactctgttgctagttatctgcagcaaataattattatgctgatgttgctattgcagtttaanattctcttgttgcatcttagtagaaatgnaaataaccac

SEQ ID NO: 566899 - DNA, 344 bp, Homo sapiens
gggaccgaggatcccgcagttcgtcccatcagctggatactttcattctgccaaaaggctcaaagatcccacgaagcatatcttcagttatgtggaagtgtaatgagcccacataaagcctcataggtccagcacttcccttatgtaaagtgtttgccatgtgctgcagctctagtttttttctgcctcgtgatgccttgtactatgatgtggcacgcctcaaaactcgtgggccagttaatccgtatagctacgaggcacgtgagctaacatcgacgcaactccacataatgcaattccgttgggaacgtcttgaatttctgtccggatgggagcaagatgcg

SEQ ID NO: 566900 - DNA, 908 bp, Homo sapiens
gcattcgtatctctccacatcctctctgtacttacagtccccaatggcccccataaagccagagcccaagaaggatgatagccaaggtagcccactaaggtcagactccagttcccgcaactccccctgagcctgagcgccctaaggaggtcgagtttgattgcttccacagagtcaaaattggagttcactacactgaacacgacttgaatgagcttcgaagggtaagccattcaatgctgtacgagcctgcaacgatcccagagatgtgagtatgataggatcatccgtactgggcacgtgtggtgcgatgtcctgacgggtcgatgtggcctaggaacccgcacacagggcaagaatagtgcgtccagatgtcctgcgcggaaagcctaatgacatgagaagaagctcagagtaccacaggaatgattggacgttatgaacacttttccatgccgtatgcatcctaggtcgacatttcacaagaaacagagggacgagcaggctagcgctatgaaggacctatcgtggtaggggagcttgcgggctctatcgacaagagaggaggaattggccactggtcgatggagttggctcgtagcgtgtcgcacacctggttgctgggcccgacagctagggctgcagaggagctttgacatgatagcacggaatgcttggaagcaaagtttagagtaggcatgcgagccacagaagggaagctctcaattggactagcgatgtcaagcttaattgcacaggcagtttttgggtgaaaggcaccattcagtgttaccagagcttaaaaccctcggatgggccccatggaaggacactagtgtgacagggcttgtgtgcaaggtggactgtcgtcatcttgcgcaatgatgtgcatgcgttgaacaacccag

SEQ ID NO: 566901 - DNA, 290 bp, Homo sapiens
  misc_feature (108)..(108): n is a, c, g, or t
  misc_feature (146)..(146): n is a, c, g, or t
  misc_feature (238)..(238): n is a, c, g, or t
  misc_feature (260)..(260): n is a, c, g, or t
ggtggctgcttttgaaaggaggtgggggaggatggcggtgatggcctcctggtgtgtggtggtctctgcatgaggaccagtcatcgttggttaccaactatcaccagngggtctaggtacggagtccttcagagaggaggtctctnggggtcccgtgctctggtctctgacgttgagtcctcgtacatcgtggtagtggtgaagagtaacagtcttcataggttcacagtcattatcntgtgctctgaggcggagctcangagccagaaggacccctgtagagcaggacc

SEQ ID NO: 566902 - DNA, 315 bp, Homo sapiens
  misc_feature (12)..(12): n is a, c, g, or t
  misc_feature (20)..(20): n is a, c, g, or t
  misc_feature (30)..(30): n is a, c, g, or t
  misc_feature (36)..(36): n is a, c, g, or t
tcattgcacgcncgaattcncggccgctcntacacnacgagggagcacatggcttacactgtaatcccaacacgggaggccaaggcaggtagatcacctgatgtcaggagttcaagaccagcttggccaacttggcaaagccccgtctctactaaaagtacaaaaattatctgggcctggtggcgggcacctgtagttccagctactcaggaggctgaggcaggagaattgcttgaacccaggaggcagaggttgcagtgagtcgagatcacctcgctgcactccaggctgggtaacagagtgagactctgtcgc

SEQ ID NO: 566903 - DNA, 278 bp, Homo sapiens
tgtgcctctgggcgtatctccgtcttgacgcttcgtcgccgtagtcggtgtactcgtaggttcagtaccacttggtggccacttgctttgatggtccgggcgggctcgttgacctcgtctgttatgtaaaggatgcgtcaggatgggagggcgatgaggactaggctgctggcgggcaggctagttcagacggtttctctttcctgagcgtctgagatgttagtattagttcgtttggttgtgagtgtcaggcaccgggcatacgccccaggttagca

SEQ ID NO: 566904 - DNA, 180 bp, Homo sapiens
acgtcatttagaaaatgctcacagaccggcggctacagaccttaatgagagccgccgtgcagacgtgcttgccttcctaagctctggcttcactgacttggcatagattgtgtcccggattgagccccccacgagctatgtctcttttggctgtctgacggaaggagtcagattgtctga

SEQ ID NO: 566905 - DNA, 285 bp, Homo sapiens
atgcaggcgtaggctctatctggtccaccaaactgagcttgcggaataataatcagcgatcacccttataacgttctatgccaggcactattctaagacctgaatccaaaccttaccctttgaacagaactgtcctggccgggcgcggtaggtgtatcattagaggtcaggcgtccgagaccagcctggccaacatggtgaccgctagtctctactcaacatacacaaactacgccaggcatgatcgcggaaacctagtggtcacagctggttaagggctgctgt

SEQ ID NO: 566906 - DNA, 168 bp, Homo sapiens
gaaaaccataatcccaaaattaatggccatcattggtaatcataatggcaagctccccaaaagctctaaggcctctcacgccaaagccttcatagtactccattccacagcccagcacagagtttctgaagagttgcctctgcaaagctcaacaaggggccagggctg

SEQ ID NO: 566907 - DNA, 374 bp, Homo sapiens
agtagttattgagaaagtcgtccctttccccttttctataaccaaatagacaggaatggaagattctcctcggggcctgaaagcttgcgggatgaataactcctcctcctcaggcccagtcccaaggtacaaacttgcaccagcagcaagatagcagaggcaggaagagagctggctggaagacacgtaccccctgaagatcaagagggaggtcgccctggtactacatagcagtcacgttaggctgggacaattcctgtttacagaggactataaaacccctgccccatcctcacttggggctgatgccattttaggcctcagcctgtctgcatgcaggcgctcattaaaacagcatgttgctccaaaaaaaa

SEQ ID NO: 566908 - DNA, 111 bp, Homo sapiens
gtggaatgcagatcttcgtgaagaccctgactggtagagcatcaccctcgaagtggagccgaggtgacaccattgagaatgtcaaggcaaagatccaagacaatggagggc

SEQ ID NO: 566909 - DNA, 159 bp, Homo sapiens
  misc_feature (12)..(12): n is a, c, g, or t
ccaggtccaggngtctggtcctatttcctcctgtggcccggagttgatgtgtagggcgggatacccagctcctgcacctcgggcacatcgggcagcacatagcagcatatggtgaggattcatctcggtctgcctttaccttcatcccaccagtcacac

SEQ ID NO: 566910 - DNA, 140 bp, Homo sapiens
cagtactacgtgtgataaggtaaaacagatcgctaaacagacagtcaaacaccacacgtcctgcctcattaccaggagctgcccaacaggcaatgtgggctcagaaagtggaacgcggatgtgggggactcactgtctgg

SEQ ID NO: 566911 - DNA, 547 bp, Homo sapiens
taaattaataacggaaagtttggtgtgaagctacagatatctaaccaaaaaatttctgatcccttatacggggatatataatatggaggctttggtagtgcagtgaaaactggaatttatgcctttgggtaaacatgataggtataaatggtcttataaacatccgggagtatgtatacgcttaatggactgaaatttatggggacctgattacaatgaggggattcaaatcgtggtcaaccgtcaagttcagtcaaataatttcacctacgggaatatacggcccaagccagtaagggttaatattggcattccgggctttaatttcctcctcccatccataagtatatactggaaagtcacttctggtagcctatgatgggagtctctggaagtccctaggaagaggcaactacaaactactagtatccggattcagatgtagtcatcccagaaccttctctttatgagtccccggtagtacaatctccaaactggatgggcttgggtgtccggaaattccggcaaaagcttcacaagttgtctc

SEQ ID NO: 566912 - DNA, 173 bp, Homo sapiens
  misc_feature (36)..(36): n is a, c, g, or t
  misc_feature (125)..(125): n is a, c, g, or t
  misc_feature (145)..(145): n is a, c, g, or t
tataattatcgctgtgaggatacgatgcgaatgcgnccctggatacactgacgctcatgccgaagcgtgggagcaacggatagatacctgtagtcacgcctaacgatttactagtgtcgggactnatttcttggtacgcactaancgtgagtagaccgctgggagtcggtcgc

SEQ ID NO: 566913 - DNA, 116 bp, Homo sapiens
gtagattctggggcactcaattagtacctggtggagttgaatagtgagaaaatctgctcatcacagaagaaggaacggggatgatttcctaagttcccattttccacaaagcagaa

SEQ ID NO: 566914 - DNA, 913 bp, Homo sapiens
gccggctctgtggtgcggagttgcgccggacttcccagcttggccagtggctccgcaggctgccggcgtccacccctcagagttcattttggattcaaggttggctctcaacaggtgccagctggcactggtcatcctaaaggtacttctgtggaagagatacatggtggtgtccactgtggtaccagtgatgacacaagaaatcccaggatctacctggacgggcctgcgagggttgaagtatggtgcaacgcgaatagccttacagggactggctggcttcgagctagggcatcgcgagacctaggcctcctggcactggcctgggtagagaccaggggcgagacaccggtgtgatccgccgcagttggaacccgtgtgagcaggtgcctgaccagggcccaggccatcgccaaccgagcttccatctcatggaaccctccaggggagaagccgggagaggctggcggactgtcagatcacaccccaggctgcatgaagtcacgcacaggcgagttctccctggatgtcgcatccatgcttactgataagcgtgccgtggctgtgggactggctgaactgggctgcctggggagagtgcctgggcctggagtggctggacctatcaggcaacgctgctcgacactcacctgggcccgcatggcctccttgcgccagcatagtcgcgtgcatcaaatgtctcgaacgaatcggctggacgggtctggagccacttggcacaccagttgagaactgtgcagcagtctcaatgccgacaggcgacctagtgggacaccccgggccagctgcagagtctgagctgggctaccgaggcctgggagttactgcggctcggagaccgctttggacccggatcagacagccgctctgtgccagaacctacctaatgggc

SEQ ID NO: 566915 - DNA, 1616 bp, Homo sapiens
gctcgagtttttttttattatttattttagttgagaccaaccggggcaacatggttgaaaccctgtctctactaaaccataaaaaaaatcagccaggtgtgtgggcatggagaggctctggtagggcttgagctttgcaaagaggatctcaacatgtgccttgtggcataaagattttacataccattccgctccttggaaagaggaaaaagaaaaaaaaaaaaaaaaaacccaaggcgcaactctatatgtgtgtcgggagtgtgcgacggaacaaagagaggtataaggaacaggcgcacaagtgtggcccatctacacagtgtatactcctgatcgcaccccaaatattatctgtgtgtctaacaaaggtggaacaacatctctgtcgcacggagataccccctataatgaggaggggagaagagcacagacgctctacacgcatgtctccccagaacaaaagagacccgcgagtataacaccccggtgcgctcatatgccaaggacacagcgcgcgacacaaaacacaagagccaaagaaagcacgagacaaggcacagacaagaacgacacaacacaaacgaggcagcagacaaggaaacacacccccagcacagcaagacccacacacacaagagaaaacaaaaaacgaacgaaaaaagaaacaccacacacccacagacaaaaagaaaaaagaccacaacaagcacagacgaaacacacggacacagaaaacagaaagaaacagcccaacaacaaaaaaacacaaagaaaaacgaacgaaaaaacacaaaagaaagaaagaacaaagaacaaaaccacgcagagaagaaaaagaacacagaggagaagaagagagaaggaacagaggaaacgacgacgaataaagaaagagagggcagagggaaggggcagcgggcagacagcgaaggggggagagaacgggagcgcgagagcggggagaagaggcagagagaaggaggagacggagaccgaggaacccagaggagaagaaacgagagagagaagaggagagaacgaagaaaaaaaaagcagaggagaggaagagaacggaagagaaggaacgaaagaagaggcgaggaaagaagagagagagagggagagaagggaaacaaagagaaaaggcacaataagaaggagacggagcgacacgaaccgacacgaaggagaaaagcagaggagcacagacacgaccaacagcgacgcaagaacagagggacgagagggaggaagtgagagaagaggagagcaaccgacaacaacaaggagaagagagaggaagtagaggacgggaaggaggcagcaaacaagcaaggagaaagaggagagaaagaggcgcaagagcacaagaagagaaacacagagaacggagcacggaggaagagaaacgcaagaacacggacgaaacgcaccgaaaggagggaagagcgagaggaagggagaggacagggagaagacagagagaaatacggagaaaagggaagagggagaaaagacagagaagaaccaggaagagaagagggaggacgacgagaggcagaagagagcaaaaacgaaacagaacggaaggaaggagagacggcacgaccaag

SEQ ID NO: 566916 - DNA, 207 bp, Homo sapiens
cccccccccccccctttttggggggggtttttcccccccctttttttggggggggggggggggagaacttttggttttaacccggggccccccaaaaccggggggggccccccttttttcccccggggcccccccccttttttttttttttcccccgggggggggggccgggggccccccgggggtttttttcccccccccccccca

SEQ ID NO: 566917 - DNA, 1382 bp, Homo sapiens
ctcccgtctctcagtttgcggccggtccatttatgccgttcccccttgtgttcctgtgcccccttccggttttaggtgacccccctattttgtagcctcctgaggaggtccccacccggtgtttgtcccccacatatgtccagggcgtgttttatatccgctgcgccccgggtgccttttataccgggtcctctaaagggtacccgagtgcccctttggttgtgcccgaattttcgggtcccctggtgtgctaagccccggagatgttgtttcccccgctgggccgtggtgcccaactcgtgatgtgtaaaggggccttttttggcttgttttaatggggatatccaagcgttttacgcagcccgccgatgcgtattcccgccccccagggtgcaagaaggtgccccacaggtacccggggtgtagtgttttcctaccacagagaccgcggccccaaatggggcccaacctcgtgtggggcccacaaaaatcgcccccatgcagtatatgggggataggaaatgtgttttcgcgtgattatgtatgtgataaacacttttgtttagtcccccttctcaaagcccaattaccgtgggcgcccccaggggttcttttacgctgtaatacccccatgggcccccacacattttgttgcgcccccccccacacccacccccgtatttgggctttctctcacggtgtgtcttgtcctctccgacaccactattgtggaccacaacagaccacagaagcttggggtctctgagattggcgcccaaggcacaatttgggtgtgtttttgggatagagaggtgcccccccgaatagcgccctcttagatattgtcttgctccgcgggcacaattttggaaggccccccagggggcaccccacaaaaggacccggggagtaactccccacaccacagaaaggttgtatttccttccccccgatctcgtgtggtgaagtacacgctgtgtggataggcgccacctgtcttctcttgcttgtccccctcccctcttttgaaccctgcacattcccggaaggataactgcccgcctcccgaaggaaggcaagccccgaagggtgcctgtttgaagcccaacacgccactttgggaataatgtgcccttcctccacaggcgtctgcttggaacacagctcctctgcacaggcaccacaccctggactatttcccacggcacacacagctgtgggccccaggagagccacagctcacaggtgctcccctccaccccatggcccaggctgtcccaaaaagcccctggcttttttcacgcctttgctgctgggcctctcctgggactacccctgtggcgtcttacgtgttttctttgctataaataaaccctagttct

SEQ ID NO: 566918 - DNA, 649 bp, Homo sapiens
cctctgtgatcagctgcactccttagcaaaagtatatatggagaatcaactgagaccaatcattatctaggtgtaaagaaagaccagatcccaggaaaatattatcggtgacttcccaagtatgcctggccacaatactcttatcctatagtgacaccccacttaatcagcctctacttcatagagcttattggcgggctggagggtgtcatttccattcttttcctcccggtcagtgaccaccatggcggtcattaacttgatggtggtccacagcgttattctgctgacagtgcccatttcgcttgacctacccttttgggctgcccttctgcaaatatgtgagtaccatgctcaacattcacatgtacctgacgatcctaattctatggcgtgatcctcgcgcccggatcaagacaaagcggactttacagagtgctggcccccgaggttgccagagctggcatgtggaccctgttgattgtactcgcggcccccccgcgtgtttccgggtcgaggaggctgcattaaactcgacagagaggtggttcacccatgggagggagtcacgttgggataagtgggcctgccataggacgcgtgaatatccctggcgttcaagcctacatccgactttaatttgccaccg

SEQ ID NO: 566919 - DNA, 878 bp, Homo sapiens
gcgtacgaagatatcggtctacctctcttaaacttggacaatccggggcgccaacctcacaggaaacaatctgggtccccgaggaccttctccccagttgctgtccccccccgcggcaaccacccaattttgcggctcgactgttcagacaagcctttgccacgtattgttgtggtttacccgcccctctctcctcgccaagtttccgtcgttatcaccccccggcccctcctctgaaaaaattctgaacatggccgcccccttgtggtgccagggcccaccgggggaaacgcccgccccccagtttgtttttcctcttcaacggccccctccctttgacacaaaccctcggggttcttctcgcacatcattaccacgtccttcaccccacatgaaaggagcttgtggggaaacttattctcacaaatccccggcaagacacaaccggagcttctgtcttaaaaagccgaatcattcccccatcccccggagaggggcacgcggtcgacttcccccccctacttcaattttgtgaagaacgagactccccccggtaccaaagttgttcttaaagatataccgcggccccacaattattacttccaagaactatataaatcctgttagaacacaaacatttggccttgcatgaacctcagataatcaccccaaaactccatcaggaaagtgttcatattccccgtcattaatataaagacaacatctggcggtgacctttcgcatatctccctttagaacccttcttttctatgttcttacaccactaccccacccacctgccgaaaaaacttttatcacccctctgtttgttcaccacccccgcccgcagattaagcggaaccccccccaacaaaaca

SEQ ID NO: 566920 - DNA, 375 bp, Homo sapiens
atacctggttgccaccaggaccgtgtggagcagattggcggcatcgcacaggagctcaatgagctggctattatgactcacccagtgtctacgcccgttgacaaaagatctgtgaccagtgggacaaactgggggccctaactcagaaacgaagggaagctctggagcggaccgaggaactgctggagaccattgaacagctgtacttggagtatgccaagcgggatagaaccttcaaaaaatggatggagggggccataggaggaactgcagaaaaccttcattgtgcacaacatagaaagagatccagggactgagcacaggccatgagcagttcaagggcaccctccctgatagccaacaagagagcctggg

SEQ ID NO: 566921 - DNA, 305 bp, Homo sapiens
caatttgacttgaccaaccagattcaatttgacttgaccaaccagattcaatttgacatggccaaccagattcaatttgacttgaccaaccagattcaatttgacttgaccaaccagattcaatttgacttgaccaaccagattcaatttgacttgaccaaccagattcaatttgtcttgaccaaccagattcaatttgacatggccaaccagattcaatttgacttggcctacaaaaacaataacaatgtctaacacaagcagccttcctttggttgtttgatcttgtaattaggacatatggt

SEQ ID NO: 566922 - DNA, 321 bp, Homo sapiens
caggattactacctaaatggctgtcttgctgtattaatacgtgggtaaatctctgtttggggctctcagctctgaaggctgtgagacccctgatttcccacttcacacctctatatttgtgtgtgtgtctttaattcctctggcaccactaggttagggtctctctgaccaagctggtctcagcaacaggcatgcaccaccatgcctagctactgtttttgttttttaggagatgtgatcttgatatgttgcccaggctggtcttgaactcctggcctcaagcgatcctccctcatcactgggattacagccatttaggta

SEQ ID NO: 566923 - DNA, 164 bp, Homo sapiens
cggtctactggtatcccaccctgaactacagtgtacctattctggctgaccacatggcagtacctgtacttgcttgcccccccacaagctgagagagggactgcacccttttctgggctaatgtagcctccaccacatagggattaagagctagactaccaggg

SEQ ID NO: 566924 - DNA, 828 bp, Homo sapiens
  misc_feature (52)..(52): n is a, c, g, or t
  misc_feature (55)..(55): n is a, c, g, or t
  misc_feature (76)..(76): n is a, c, g, or t
  misc_feature (562)..(562): n is a, c, g, or t
  misc_feature (568)..(568): n is a, c, g, or t
  misc_feature (578)..(578): n is a, c, g, or t
  misc_feature (590)..(590): n is a, c, g, or t
  misc_feature (617)..(617): n is a, c, g, or t
acaccccctcatcccacaacacaacacattataaaaaccacacacccacccnctntactggcaggtttctatcaanatatctttaagcccactgattctttccttggccatgtctgatttacaggtgatagggaatgaagatcttcaccggaattggcctcttgatcttggactttccagcctccagaactgcaagccaaataaacatattgtgtataaatcatccaatctgtggtattctgttataacagcaaaaagtgaactgagacagtttattctttaggtaggacttttgttttctaattgcctaatgtcactcaatctccaaagttttaaatccaaacttttagatttataacttatggacttaaaaatccattcctattagactagtcactttctagtcctttgagataaagtgatgaacaatatgaatatggcttttgctcttatcatatgtatagtctaatgcaacaagaagttattgagaaacgttaacactgaagagtaatatgaaaggaagattgcaggatgctaagtcaacctatacgagagaggtatntatganacaaaaaganatcctttctganaaatattattatatgaaaccttctgtnggccagaataaatagaaatcgggtgggactattctaagcaaagtgagaaaatgagaacattcccagggaagtgtggagcacaggatgttcaagggactgcaaaaaggatgatctcttggtcatcccaataccaactcaattattgatgaaatggcccggaaagagatatacggcaccatatgaaacagtttgttcttatcaaaacaaaata

SEQ ID NO: 566925 - DNA, 222 bp, Homo sapiens
  misc_feature (52)..(52): n is a, c, g, or t
  misc_feature (55)..(55): n is a, c, g, or t
  misc_feature (76)..(76): n is a, c, g, or t
acaccccctcatcccacaacacaacacattataaaaaccacacacccacccnctntactggcaggtttctatcaanatatctttaagcccactgattctttccttggccatgtctgatttacaggtgatagggaatgaagatcttcaccggaattggcctcttgatcttggactttccagcctccagaactgcaagccaaataaacatattgtgtataaatc

SEQ ID NO: 566926 - DNA, 254 bp, Homo sapiens
ggatttttaaagcactcggagtattccctgataaaagtagttgttgttattttcttcctcttttatgagacagggtcttgttctgtcaaccaggctagaatgaaatggcttgatcatgactcgctgaagcctcaacctcccgggcacaactgatcctaccatctcagcctcccttttgactgggactagaggtgcacaacaccacagctggctaattttgaaattctttatagaggcaggttttggccatattg

SEQ ID NO: 566927 - DNA, 541 bp, Homo sapiens
  misc_feature (309)..(309): n is a, c, g, or t
agtaaaggcatccaagatagaatgggatacggaccaatggaagactgagaactacattaatgagagcacagaagcccagagtgaacagaaagagaagtcgcttgagttcacaaaagaacttccaggatatggctataccaaaaaaactcatcttggcgttaattgtgactggaatactaacgattttgattatacttctctgcctcattgagatctgttgtcaccgaaggtcattacaagaagatgaagaaggattctcaagggacagcgaagccccaacggaggaggagagtgaagccctgccatagnaggagaacccagcccacctcaggcctcctgcaaaaatacatagcgtaaacaacggccatcaaaaaagcaggactgaagccagcggcccacacatccacagaggcagcgggcagagcaagcacagggccatcgttcctgcccttgtttcccagtctaattagtcacccagacctgaaaacatatgctcagggggtggagattttacaattaaataacattgtttttggtgcaa

SEQ ID NO: 566928 - DNA, 229 bp, Homo sapiens
  misc_feature (15)..(16): n is a, c, g, or t
  misc_feature (22)..(22): n is a, c, g, or t
  misc_feature (30)..(30): n is a, c, g, or t
  misc_feature (83)..(83): n is a, c, g, or t
aaaaaaaaaaaagannaaaggnagagaganaaagggaaaggttaaagaagataaaaatctataactggcaggtttctatcaanatatctttaagcccactgattctttccttggccatgtctgatttacaggtgatagggaatgaagatcttcaccggaattggcctcttgatcttggactttccagcctccagaactgcaagccaaataaacatattgtgtataaatc

SEQ ID NO: 566929 - DNA, 1001 bp, Homo sapiens
tgcaggtgagagcctccggaagggaggcggctcttgccccgaccctgctcctgcgatcgcccactcgggctgcccgtgcctgtggcctggcagggaagggccgcctgcctgccgcctgcgcgtttgcgagtgcctggctgtgggccgccggttgcccaggaatggcgtagtgggccccccctagactccgagacgtgcctgatgcgggtcgccggcatgtgggacgtgcggctgtgcccttcctttcctccctcccagggttcgcgcccgagctctgcatagccacaccgtccgacaaacttccggactcccagtggacagcccttgccatcaaggaagacagcacaggactgggacccaaccatgaacccttctcagtgacaagcccaaaaaagcaccagtggggattgtactccttaagccctgcataagggcctggtgcacggcacatcctgtcctccaagtaagagccatggttgttaaattgcaggatcaatggagcaaggctctcaagacaagatgagccttggtactaggaggaggcgaaggaatgagtggcacaagagatcccctttaagacattgcttccagaagactgccactgacatgctcaatcattacctgccatgggtatgagcccaattggaacacagacaagactacccagaccatctaagcacagactataagaagaatttataaaaataccaagtttaggctccaaccctgaaccatagtatagtgatcccggtaccaaaagcctaatgaaagtcaagattattagaacaacaatttgcgcatcacttcgaattaacatggaggaagcactcatctggtagcaatactcgcttttatagatatatcaaagactgaaagtgtagatacatcgaactcggtataagaatctaccattacaaaggacgccatcgagtaacaccacagggggtacataggggcccaaactccatgcggcactgatttctaacccattaggcacccat

SEQ ID NO: 566930 - DNA, 119 bp, Homo sapiens
acacagctaggataccacattacgtggcaccatcatcaaagatcactcatttatcagatgccacatacacacagcacacacacagcacacacacagcacacacccacacaccacacaca

SEQ ID NO: 566931 - DNA, 195 bp, Homo sapiens
agttggagctgatactgatcgctccactactccagcctgggcaacaagcagcaaagtccatctcacaaaaaaaaaataaaaacagccattaagggttggtccaccttcttggccaggggaaatacgggaaacaaaattaataaaacggacaatgggggcccaccttttttgaaccccctgggccttttattcggc

SEQ ID NO: 566932 - DNA, 995 bp, Homo sapiens
  misc_feature (14)..(14): n is a, c, g, or t
  misc_feature (51)..(51): n is a, c, g, or t
  misc_feature (75)..(75): n is a, c, g, or t
  misc_feature (302)..(302): n is a, c, g, or t
  misc_feature (873)..(873): n is a, c, g, or t
  misc_feature (898)..(898): n is a, c, g, or t
aaaaagaaaaaagnaaaaaagagaaaaaaaaaaatttgacaaaacaacccncctgtcctgcaggtttctatcaanatatctttaagcccactgattctttccttggccatgtctgatttacaggtgatagggaatgaagatcttcaccggaattggcctcttgatcttggactttccagcctccagaactgcaagccaaataaacatattgtgtataaatcatccaatctgtggtattctgttataacagcaaaaagtgaactgagacagtttattctttaggagtggcctgtaagtggttncataagaggagaaagatacctgaattcactgtataagtcctctcaccatgtgatgcactgtaccacctgaggactctgcaaaaagttcccacaacccagaagaatcttaccaaatgtggtctatcaacttcacagttctcaccctatataactgtttacagatggagactctgaactttaacttttgacttgtgactgaaacgcgttaagattttagggcaatgaaaattagatgaatatgaaaagcacattagttttgagggactattgtgcaaattgtattgctttaaatattagagcattccaaaatgcatgtttaaaattaattcctccattatggcacgttttgaaaggtgaagtattaaataaattagccgacgccttcgttttctcaagatgtagagctatgcggtcagtctcttttattggaggttaattgaacattcttcgataacttactaggtggtctaggtcagaccgactaagtaacgagtaatagttcactcatgagtgcaatacgctatacactgtaattgcggaacacctggagaaaacttggatcaatatttcntattagttcataactatgtatattnatattgtgggaatttaacaagtacaaccacttataaaatccataattacccaagttaaagtgtcgaacactaaacattgtaacgagagtctccctcg

SEQ ID NO: 566933 - DNA, 1038 bp, Homo sapiens
  misc_feature (52)..(52): n is a, c, g, or t
  misc_feature (55)..(55): n is a, c, g, or t
  misc_feature (76)..(76): n is a, c, g, or t
  misc_feature (772)..(772): n is a, c, g, or t
  misc_feature (778)..(778): n is a, c, g, or t
  misc_feature (788)..(788): n is a, c, g, or t
  misc_feature (800)..(800): n is a, c, g, or t
  misc_feature (827)..(827): n is a, c, g, or t
acaccccctcatcccacaacacaacacattataaaaaccacacacccacccnctntactggcaggtttctatcaanatatctttaagcccactgattctttccttggccatgtctgatttacagcttgttcaattgtggttcacctttattatcctggagctctgttgttgtagtgctgtataatttgacatgccttcagctggggaagaggagccaccttattataactaggtgacgatagcaactcagactctccaatgggtttccattgagaccaaaggggatgatgccttgttaccttagacagtgatgggagttcctgttccccaccaggtgatagggaatgaagatcttcaccggaattggcctcttgatcttggactttccagcctccagaactgcaagccaaataaacatattgtgtataaatcatccaatctgtggtattctgttataacagcaaaaagtgaactgagacagtttattctttaggtaggacttttgttttctaattgcctaatgtcactcaatctccaaagttttaaatccaaacttttagatttataacttatggacttaaaaatccattcctattagactagtcactttctagtcctttgagataaagtgatgaacaatatgaatatggcttttgctcttatcatatgtatagtctaatgcaacaagaagttattgagaaacgttaacactgaagagtaatatgaaaggaagattgcaggatgctaagtcaacctatacgagagaggtatntatganacaaaaaganatcctttctganaaatattattatatgaaaccttctgtnggccagaataaatagaaatcgggtgggactattctaagcaaagtgagaaaatgagaacattcccagggaagtgtggagcacaggatgttcaagggactgcaaaaaggatgatctcttggtcatcccaataccaactcaattattgatgaaatggcccggaaagagatatacggcaccatatgaaacagtttgttcttatcaaaacaaaata

SEQ ID NO: 566934 - DNA, 331 bp, Homo sapiens
tagcggatctgcaggtgattgagctcgagaactacgatcagcacgactacctggtgttggctacccgcggcggtttggtcaagaagactcgtctcgacctgtacgacacgaaccgtcaggcgggcattatcgcgatcaagctgcgtgaaggtgacgagctggtatcggccatggcggtcagcgagggcgatcacatcttcctgttctcgcacgccgatcaatcgctgcggttcgttgccgatgacgagcagctgcgaccgatgggtcgcggtacctcgggtgtgaagggtatgtccttccgcgacggcgactacctgattaatgcggcggc

SEQ ID NO: 566935 - DNA, 683 bp, Homo sapiens
gggggggcattgctgaagctggcaggatgccggcccagaagtttacatccgtgggcttaggtgggctcgctctacggtctttttttggcctggacgctattcagtgtactgccaagatgcaagtttacttacgtcaaacagtcaagaatggtaaggtaaatcagctgaaaaggtaagggtctgggttccaaacatccgacattgaaggtgacatactgacgaaagtggagaggactgactgaatggtgcattcagacttgtctttgagcaaggactggactttctatttattgtgctacgctgaatttatccccagtgctaaagatgagtctgcctgactggtgaaccatgggacttttgcacagtccaccatgggacagtgggatcgagccatgtaagcaacttgaatgcagtaatgagatgccgcatttggattggatgaatatccaaatttggatgggtggaattcatattgatgtggtttgacacttacacttgatgcgcataatgaatggctcttaatgcgcaacatgggcgttatcttcattgttatattgccatgaatgctgttatcatgttagatggattggagccggtaggtcacaaggagcttttaggagggctggcaacttagatgtagggagcatggaattctttagtcgaccacattgtcttgcaccttt

SEQ ID NO: 566936 - DNA, 1645 bp, Homo sapiens
  misc_feature (1247)..(1247): n is a, c, g, or t
gatccaattcttaacagcaaggatacaagaggtagaatccacaagtcactgaggagttggacagccattcgatgtcgctgggatgagggacacgagaaaactagggtggggtcgaattacagcggatggtcgccatggaaggcttggcaggcacaactacgcagcagggattctcggagacggctccaattgcgcacacgtacgtcgcgtcattatgccgagcacacgccgcatcgcgtcacactaagagccatgtgagcttccgtcttctggcgcgagggaagccttgtgtccgtagggccttcacgggtgggcgtaggaacgatcgtcgcgaggtgcacgtgacgcctcgatttcacgcatcgcggcacgtgctaccaccgcgaacggtgaaaccccttcacgtgcgacgtcatcgcattttgcaccgcattcatccatagaattcgcggagataagggacgtgctctcacgaatatggtcccaagggtactagcgtggagaaagacatggggtggacgcacccctgtggctcggagtagcaaaggttccacgttggttcccgtgccacaagcggaaggctcccgttgttcagagagcactccaaaggcggtggacggagggggcaaggaacggaacacggggtccacggaagggcctgggcggcctagtggaaaggacctttgtggcgggggggtgaccttgttcgcctggccaggtgaggcggactctgtcggaaattgcgccaattggggatcacgggcctttgttaggaaaggccgcatgggcatttaagccggggttaagggaaaccggtgtactttaagaaacgagcaccaaccgaaggaaaaagtcctagacggaaggaaggggcgcctttttcgtgcgttccttcgaccaaagaaggtaggcgcgtcggaatttctggtggtaagatacacgaggtctggacccccaggtccacggaaggggattcggttgccggtatgtaagcaacccatcagcctggcaagaggcgtgttcctttcgcgttagactggttggagacgataaggggtcccggtggtagaggcgcggagcagggaatgggtgtaagggctctgtggagaaaggccgtggcggctctgacaaggagaaaaccggccatcttcccacggaaaggagagcgcacggacacgtatggttcgcggtggcccacgaggatagtgcatggtgtcacaacgaccgtgtgtggaacccgcctttangttagacccgcgtggacaacgcgtcatactaataatggaaagccggacaactgccaactcactcgggagcgggcaagggctccacgaagtgatccgaaagcgctgcaacacatgtctggagcagccaaggggtgtctccacacgtagtcgcctcatgggggtgcggccgcaactgccaagtgtcctgcgggcgactttaacggccccccgggattggaaggaagtcggcacgaaagtctcgcgaaggggcattgtgaacccagctgagaggcccaagcaggaccaaaattgcacgtgggcgacagagggaatcccacaggggggccgagataagagggaaaaccacgccggtgagagagaacgagctaacggagagcttcgggaggggggggaccacc

SEQ ID NO: 566937 - DNA, 771 bp, Homo sapiens
ggtggtaatacgaggaaatagtatcatcatgtgagaagccttggaagcgagctatagaataagtggctgtgcaggagagaaaccccatgtcctctctccatagggcctgtactagtatgatgtaaaaattgaggtcatgtacattgtcatattgagactgtatgtctaaataaactttgtaatagtcaaaaatgctttctcagatgtgctgaatatagaatatcagctctcattccagtttttttctaacgatgaattttcctggttgacattgatttcaaagggttttatgcattaaagtgaaagaatcttattaaatgtgaaaaaaaaaaaaaaaaagaaaaaagaaaaaataaaaaagaagaaatgaagaaaagaaaaggaaaaaaacaaagaggcaacacaacacgaaagatccacaggagataagcacctcgcaacgacgaaacagagaaaacgagcagggggcgaactgaggaagtcaagaatgcatcatgcgggaaacaacaggggattcaagacacccctgacaccgcaatgtagtagaaagcatggtgacaagcaaatcaagaaatgagaactaaaaagaagaggcgacacggaaggcacacaaacaggataacgacaaagccgagaacaaacaaagcacaacgcgaagggacatgaagagacaggagaccaacatagaacgtgagggggagcaaaggaaggaacaaaacaccgaagatgacaaacacagaagcaaacgaacaagcaagagaaacaaaaaag

SEQ ID NO: 566938 - DNA, 920 bp, Homo sapiens
  misc_feature (539)..(539): n is a, c, g, or t
acggtgtcctgtgatataagtgtgtgtttcacataagagcaggccagaactcatctaggctaaattacagcttcctaggtcataattcacatctgtattcagcagttgcatggttgtacatatacacgtgcattcgctggttttgagtcgcgaactttgtctacaagggactgcaggaaatctataacacttttttcttacctggtctttctctatcgtaacaggtaagagaagcgaagagcaaattgatcgtgccaccagttttatgcagtacttgattcttcatgcttgcactcagaattacacacattgctaactctcttaacttttacattgtccgtaaatatacttttaatgaacgaaagacaattttgctctcgtgatcagcgttttcctcctattaatgttaagctacagggacatctcactttttcttcctgcaattctattgtgtcgtcctcgagtgaagcctatgattgcatcctaggaagagtacataaccttggtaattcatggtgatgctttctaaggatgcgagnaatatctagtaaagacgtaataagttctccaggagcacctctggtacattgtgctgaacacttttgctataagcgctactagacacaggcctgtttctactgagacaagtgcacagctatggcctgtcggtattcaacatccagtgctgctgcgctgcttttcagtgggccttgtgagctaaggacatcgtgtgtataaacttccaacctgtcattggcactactaggaccttcttacctgaataacttggatccctttgacgtcgacttgttagcagcgctcctctcatagaagttttggctgaaaacactaccaataatacacagaagtagagccaacaaaaccattgtcatggggcccgcttccgccaaatgtggaga

SEQ ID NO: 566939 - DNA, 297 bp, Homo sapiens
gagtaggagcaagagagagagtggggaggtgctatacatttaaacaaccagatctcacaagaactcactaccataagaacagcatccagggggaaatccccaggactcaatcacctcccaccaggccccacttccaacattggggattttcattcgacatgagatttgggaagggacacaaatccatatcacagactgtataaagaacccctccagtccaggcgtggtgctcatgcctgtaatcccagggctctgtgaggccaaggtgggaagagtgcttgaggccaggagtttgag

SEQ ID NO: 566940 - DNA, 322 bp, Homo sapiens
tctcacgatcccggcacgatctttgccaaaatttcacaccccagttatagcaggctgggtgtgaagactagagggcagtcaggagcggcggcatactcggcatgtggcagcccatccctgtcactaccacacttctgctgcagaacttatgttctacgaattctacattaaacctggccttccaggttgttcgatggttgcgagattgcgtgtcgcttattaccaatgtgttagcctttgtttctattttccagcatttagatatatagggtaagctctcttcgtctacacttgtcctcccagccttgctacgaatcgtgcc

SEQ ID NO: 566941 - DNA, 397 bp, Homo sapiens
cacacacctgggagaagagcttggggcagtgaatggctgaggcttcttggggagctgggccatcttcttcggttttacttccaattatgtgatcgactttagagtaagtgctacatggcaccaagaaaaatgtatattctgttgtttttggatggagtgctctgtagatatgtgtcaggtccacttggtccagagctgaattcaagtcctgaatatccttgttagttttctgtcttgacaatctgtctaatattgacagtggggtgttaaagtcttccactattattgtgtgggggtctaagtctctttgtagatctctaagaacttctttttatgaatctgagtgctcctgtattcggtgcatatatatttagggtagttagatctcctcgttgaa

SEQ ID NO: 566942 - DNA, 944 bp, Homo sapiens
  misc_feature (702)..(702): n is a, c, g, or t
gggagtagaaggaccgccgctccggcctcccgcgacttctcgaaggtgggcaggtcccaccttgtggaggatggaggtgaccggggacgccggggtaccagaatctggcgagatccggagctctaaagccgtgtctgctgcgccgcgacttacagccgcgaacgagcacggcgtggcctcgcctcctgcctcgtaagacctgaggagcaaggcctgtgacattctggccattgataagtccctgacaccagtcaccctggtcctggcagaggatggcaccatagtgggatgatgacgattactttctgtgtctaccttccaatactaagttggtggcattggctagtaaatgagaaatgggcatacaacaattcagatggaggtacagctgggggatttcccaagagtccttgatgtggatggaagacggacgtgcggggcagggtttgcaggtggaagactgtggcgcaggcagttgaaagaagatctgtccaggatcatcctcctatcagaggaggaacctccagatgcttgtagacgctccctggctcagacctggctcagggaagctacgtcagagttgggccaccgtccagcgggtgcgcaaacctccagaggtgctgacaaggagaggaagtgcggtcggcccagcagtcctgcaacgggacctccagtgttgggagaaacgatgggcgcctacgntaacgccggatagtcaagtgccctggcgagagggggatacgaaaaccggatcacacagagaccaggacatgcaggaacgcatcatacggaggggggacagggcccacgcaatactatacgatgagaaggacaaaaccacacagggcggaacacataaaagaagggaggagcggcaccacgcaaacaagagtagaaaaaaacacaaaacaacacaatgagagaggacacaaccacgacaacga

SEQ ID NO: 566943 - DNA, 2687 bp, Homo sapiens
ttgtgtgacaactgagggcaaagaagggaaaacagaagcaaagaaaactgtttcaaaagccttggaattgctactgttaaaaggctgcggttcatttctgatttcctcatcttttgctacaaaggaaaaagaaatccaatgatgtgtctacctttggtgagaagaaaacacgagcaacagcagtgtagtttcgaaagtcattgtgcagagagggcaggagtgaattaaggccccggggaccgcggacgcctggccaggagaccgcctgaaatatgagccgaacctgttttgcagaaactgcaggctgttcagaatccaattctctggatattggcatgctacattcaatgtccagctacattaagtgtccatctatcaaaatactagatttcatggctggagcaggaaaagttatgagcttggaatatcttcagtgcctgaaagtgaggaagtgctcccaaaaatatgaaggcctgtcaaaagggagagaacaagaaggaggaggagctagaaaaagaaaaagcagtgggaactgtcatgggtgaatcccagaatgggcatcccagatgacatctgtctccattcctgccatctcttcctggctgccagccacttagcctccaggtgtttgtgtctaaggccaactctctttccagactagaagaaagtgaggcagctcaccttttcatttaggtttactttggaaagttctgtggttgaatatcaacatagtgactgatttgtggctgtaaagctgtagcagctcaggtagcacatgtaagagtgagactggatggagagactggatgaattatgccatcttaccaaggcattgattagttgattaaggcttgtttgagcaaaaaagtgagttatatcagatatagttatatcagatacactgatactcaaatcccaccagagaactcagcaggccaccgataacccattcacttttcttctcccgtgactttactcatcttattattaaacaaggaatgtcttggtccaccactgaaccaagtttaagagtcaactcaaatgccacttacttcttgaagcccctcatgatactgtcaaggataatggaaatatatgatttctccctttcatctatataaattacttccccatatatacattaacatgtcgtcaggaaacttaacagaaatatggtaactcttattaagtttcctttaagcatttttttctatacttgtgccttagaaaaattggaagaactagaaatggaaatattgcagagtgagaaacttatgggatgttcgttagagagagtatcatgaaggaaaacatgagattaaagacactgcaactatctgagaggcctgtgtaaaattgtgtaagcaaaataaggagtctaatattgaaatatgcaaataattttacttttaggaacttagactcctttgtagagcattaaattttatgctatattaagtagaggtaatgctgttttgtacataaaaactatctttggattatttacctttccttttctttccgaaattgttgtcttttcaactccgtctttagggacagacaaatgatcagctgagtggtataattaatagaagcaccagttttagaagctctacttctggaagtagaataaaaaggaggtgtaacccagagtttaagatatccactgataatgagagtatttgagtgatggtaaatggcaaggagaaagacttaaagatctatctagagacaaacccttatactctaggcatgctgccagataaagactaaaaacagcgtgtaagatggcaagggaaatgtgctgtttggtttcttcattgccataaaagccactgagaagggcttaaagagatatgccattcctaaatggtaacattagacttcttgttctatgacttgagtgaaaaattttgccattaggaaatggggacaaggaatgtcatcttcaacacagggtagctttttggtctatctactcgtggtcaacaaaaggtacagtaagtaaggtcacagaatggtcaccccactttggttcaatcctgttcttggacagatcagtaactcaacgacgctttgtttttcttttgtgaagcctcttcagccttgatcataatgatttcattagcagtgtgtgcttgatttttgcacacccacacaatgttttgtattacccaacaaacttacagaatgtagccacagcttcttgctccaggaaatgtctatcaatttaattattaaaactagtttaatgtttggtgccctgtgagcaggatctttaagatgaaatgagccaatccacattccattatttcactgacatttaacataatccttgcagctatcaagctatgcctcccaaatctaagacaatgagtaaatgttattagttgaatcagtgactaaatcagctaaaatggttgcttgactaaatgaacgagttacttgatacatcgtgaacacattgaaggaaattggaagaaatggaattctggctcctgggtccctaaaaattgctgagtgtgtttccttttttgtaaaataggtatattaatattttgcctagatgtgttacagtaaagattaaaaataagtcaagtaaaatatctagcatatagcagagaataaatggttgctgtaacttattatgattatttattaaaagttcaagttgctttgaagaaatt

SEQ ID NO: 566944 - DNA, 786 bp, Homo sapiens
gaggcattgaggtagccagcgcacgtgctactggtgatgggtcgcaggcggagcttgaggaaaccgcacataagtcttttctctttgaaagatagacggattaatacaactacttaaatatacatatagtcatagtaggttactaagatatagctctagcgtcaagttttgaaggtagataataaatagcttaagattgtaagagaaccactatgaagacttagaagagtagcatgagggacaggaaaatgataaagggtttctaaaacatgacggaggttgagatgaagctgctccaatggaggtacaaaaagtgtccttgtaggaacgaaaattgacgagaagggagtacagagccccggaattaagtaccaatagcatgggcaagtgcttttagattcacaagtgacaggtagacttagacagcttaaagtttagtttcacacgtgtgtatggtgctccaagtaattcgaaggcgatcgttttaaaaagagattaaaccgaaggtgattaaacaagaccttgaaatccatgacgcagggagaattcgcgtcattaaatagcctaggtaagcatgtactaattcgcagacggaaaatggaaagattaattgggagtgaaggatgaagcaagttgcagaagatagaagtatgaacgtggaaaagtggaaaaccggacgtaccggaagggacaagggatccgagagatggggaatagaagataaagccatcttgtgaagaaaaagataattaactgaaagtagagcgaataaaagacagtgtgaac

SEQ ID NO: 566945 - DNA, 502 bp, Homo sapiens
tccttttgagaagagagagatgacctatggagttgaatttattagtgcaagacagtacctaacaaacccacaggtcctaaactaccaaagccgtgcgttaaaaatttcggctggggcgacctcggagctagaacccaacctccgagcagtacatgctaagacttcaccgagtcaaagcgaactactatactcaattgatccagtaactggaccaacggaacaagttaccctagggataacagcgcaatcctattctagagtccatatcaacaatagggtttacgacctcgatgtaggatcaggacatcccgatggtgcagccgctattaaaggttcgtttgttcaacgattaaagtcctacgtgatctgagttcagaccggagtaatccaggtcggtttctatctacttcaaattcctccctgtacgaaaggacaagagaaataaggcctacttcacaaagcgccttcccccgtaaatgatatcatctcgtctcttctcttg

SEQ ID NO: 566946 - DNA, 509 bp, Homo sapiens
taaggacgtcttgggagatcttttcaacccctttttttttttgaaaagaggggtcctgcaggggaagcagagttagcacccgccttttggggctaaccctcaaatgacatagtttttttcagctgcctggggccccccacaagtaaactctgtgcgggcggaaagaggtgccccgtgggctcaaaagcctaagtgggtggttttcaagaataaggaaccctatccctcatgcccgttttgggggtcctcaccaacaagggtggtggggggcccctggtttgtccctgagcctttttcacagggaaaaaacagttttttttgtttttgttttgttttgttttgtttttaaaacaatcatgttacactaataaaaacttggccctcttgggccctttgcctgggcaagcaaataacaaatttaattgttttaaggaaggggggggccgggaacaatggggccttcagctggagctgggggtttttggacataccctaaaattttgaagtta

SEQ ID NO: 566947 - DNA, 164 bp, Homo sapiens
  misc_feature (1)..(1): n is a, c, g, or t
ncgatgcttaactgggttcgagttccacacgacgagatcattatggcagttagtacagatacacgggtgcagacacctcctggtggatcgtcctctgtcagcgcaaacacagtcagcatgtcagccaagttggccaagcgcagagccattatccttccccagag

SEQ ID NO: 566948 - DNA, 421 bp, Homo sapiens
tgggatgatgctctgtcagctaactgtctttggatctgtgccagataccccagagcagagcatacggagcacctatggttggaaccccattctgtgatgcaccagtaggctgtgacacgaagaggcctactggcccaaggtttgacatccggtccctgggcatcatggccatcgaaatgattgaaggggagcctccatacctcaatgaaaaccctctgagagccttgtacctcattgccaccaatgggaccccagaacttcagtaacccagagaagctgtcagtctatcttccgggactttctgaaccgctgtctcgagatggatgtggagaagagaggttcagctaaagagctgctacagcatcaattcctgaagattgccaagcccctctccagcctcactccactgattgctgcagct

SEQ ID NO: 566949 - DNA, 395 bp, Homo sapiens
  misc_feature (138)..(138): n is a, c, g, or t
gaattcggcacgaggagtccacgccggatgagctgccgtcggacgcagaggagcagctgcgcagcggcgaccagcagctggagctgagcgggcggcggttgcggcggctgcccagcgcagtgtgcgcgctgagccgcntgcagaagctgtatgtgagcggcacggggctgcgcgagctgccggaggagatcgaggagctgcgcgagctgcgcatcctggcgctggacttcaacaagctcgagcgactgcctgacggcctgtgccgcctgccgcgcctcacgcgcctctatctgggcggcaaccggctgctggcgctgcccgccgacttcgcgcagttgcagagcctgcgctgcctctggatcgagggcaacttcttgcggcgcttcccgcggccg

SEQ ID NO: 566950 - DNA, 1028 bp, Homo sapiens
gacgccggtgcagcgggggggcccgggggccctggtggcccgtgggatggggaaccgcggtggcttccgcggagggtttcggcaggtggcattccggggcctggggtcgcggccgtggacggggccggggccgaggccgcggagctcgcgggcaggcaaggccgaggatacggagtgtatgcccgtctagcaagttgggccgctttggtcacagggattattgaagatcaagtccctggaggagatctatcgtcttctcgcctggcccaattagaggaaatcgagagactcatttgattttccttcctgggggggcctctctcaaggatgaggtctggaagattatgccagtgcagaagcagacccgtgccggccagcgcaccaggttcaaggcatgtgtagctaatcggggactacaatgggccacgtcgggtctgggtgtaaagtgctccaaggagtgttggccaccggcatccgttggggccatcatcctggccaagctctcccatcgtccccgtgcgcaaaggctactgggggaaccaagatcggcaaagccccagagtggttcccttgcaagggtgacagggccgttgagggatctgtgcttggtacgcctcatccctgtacccaggggcacttggaattcgtcatcgcaccttgtggctaagaagctgttcaatgatgggtggtatcgaatgagtgtacactcagccggggctgaatggccaacctgggaattcgccaagggccactttgatgccttctaaaactaaggtactggacccgacttctggcaggacatggttcccaattcctataggagtactgaacacctgtaaaacccacaaattcggaaggaccagcccagttggtaacaagggtttaacgaaaacagatacggggaaaaaagaaaaaaaaaaaggggggaaacacggggaagaacctttaaaggcaggatacacagtatggaagcaattagctgtgacatattgtttttttttttttttttcttttcttttagaaaaaca

SEQ ID NO: 566951 - DNA, 149 bp, Homo sapiens
tgaaacggatctcgtctgtcgcccatgctggatgcatggtgctatcttggttcatgaactccttctcccaggttcaaccattctcctgcctcacctcccaagcatggactaggtgcccgccaccatgcccggtaattttttcctttcaa

SEQ ID NO: 566952 - DNA, 345 bp, Homo sapiens
taaaagtaaaaaaaaatagctgtgcgtggcggtgcacacctgtaatcccaggctacttgggaggctgaggcaggagaatcacttgaacctaggaggcggaggttgcagtgagccgagatcatgccattgcactccagcctgggcgacagagcgagactccatctcaaaaaaaaaaaaaaaaaacttccgttttttttttccgggttatcacattttcctttatgggaaaccccgggaggggaaccaggggtattgggtattgtgtttcctctctctgggtggggtcccacacattaggggggggcccaaactataaacactgaccaaacagggggggtcccaaaa

SEQ ID NO: 566953 - DNA, 128 bp, Homo sapiens
ttgtatcatagctcagaccatacctatttatccaattgttctttttttccggagtagtaagttacaattatgggagattattccgaagcctggtaggataagaatataaactggtccgagcgggagat

SEQ ID NO: 566954 - DNA, 718 bp, Homo sapiens
tggccattcatcgagcatttattggtggagtaccaaacccgggacaggagtttgaactaggaggggctctcagttaatcttcatcacaagtttacagaagtccaaacgcccatttcacagggtgatggaaatgatgcatagaagaaagaagacagaaaacacagggaatagggggatgggggacatgtgggaatatgtaacagcttagtctgggcaatgtgtgttagtggggtgtagccctgggatctggggaacatgcctccctccttttggtgccttggacttttctacattctgagatgttatagaagacagatgctggagatctataatgagaccttctggatgtatctatatcccaggttctcttctttacatcttctacaaaatgtaaatggcatgagataccccatggagaatgtccccctccacatctgtggaggagaggtgatgtggtccaaaaaactatttcctggtgtggggacccaacaaagtattctatctactggggggagaaagcaaaactcgttgggggactttccaacatatctccccctgtgtggtgctttgtccacagagatctattcaccacaacacaaacatttgtggctaatgcacccaagaattttttaaaagaacaggggggctccctgtggggagacttgtgcaacaaaaaaggcacccaaatttgaccgaaaatatctcacgccttgcattt

SEQ ID NO: 566955 - DNA, 193 bp, Homo sapiens
tttcccggggtttttttcccccccgggcccccccccggggcccccccggggggggggttttttcccccaaaaccttttttttggggggaaacgggggccaagggggggggcccccggccccccttttttttttttggggggaaaaatttatttttttttttggggttaagggggtaaaaatttccctttttta

SEQ ID NO: 566956 - DNA, 111 bp, Homo sapiens
tgtaagaggaagaacgaggtggcacggtgctgagacagagctggagatgaggcagaccatggacactacacccagcaatagagacggtgactgcggaggaagtgagtgacc

SEQ ID NO: 566957 - DNA, 2121 bp, Homo sapiens
  misc_feature (334)..(334): n is a, c, g, or t
gtgttgtgtgcgttcgtgttgttgctgtctcttcctttgcttgttgtttggttttggtgctttgttcttgctgtttgtcctttggctgtctgcggattgtctgcgtgcttccttatactctgtacttgtgcgtgtgagcctgcgtgttcgtctcttgttggtgatccttggcgtgtttctacgtgcgctgttcttattctacttactctttctcgatctgtcctcgtggtgtcttatggctggtctcgctgtgcttgtactggtctgcgtctttgcatggtcgatgtggtgttgactctgtggatgtctgcttctctactgcgtgtctgtatgntgcttgcttgctcttaggatcctgtagttctcttgtggagtgcgtcgttgttgttgtgtcttctgtgggttctttggtgttgtgtttttggtgttgtatttgtgctttatgtgtgtgttgttcgttctgttgtgttcgatcttcgtgatgtctctgtgttcttgttctggtgctctgtgtcctagtttgttgtttttgttgtgtttggttgtgcgttggttcttgtgttgtgtttgtgtctctgtttcatcgcattgtgtgtgtcggttctttgtgactgtttcttctgcgtgttgttagtgtagtttggttgcgtgttgtgtgtgtattattagttgtgttgttgttaggtgggtttgtgtgttgttggtgattgtttgttgttgttaggtattttgtgtattgttgtgttggtggatggtgtgtcgtgtctgttgtgttgttgttgtggtgtgtatttgtgtttttgttgtttgatgttgttgtaatagcaagtcaagtaggaggccgagggagagcgagcacgggagagagacggagctgtgggtaagtatctcactagaaggataattaagttgttgtggtctaccacgtatgatagagtggggctacatctacctctcgtcgctactgtgtgtagaatcaagctgctctctgtgttgacgcttctactagctgttgtgtgaagaacacatgagggcgcccccgccccctgtggggcacgacgaccccggtggggtgtcgcacacccaaggggggggggtccacacccctccctgtgcgttttaccacggcccagtcttcaatgtgtggtccctgcggaagctctgggtcgtgggaacccatggggtcacggttttcccccggctgtgccacatttgttgtctagccccgcgcttttgcccccccgctggacccacgccggggccagccccaccaggttgccgggcggccttgtgcgacgtggcctcggggttccaccccccgccggaatggttgttggaagccccacagggaccaattgatggcctggcccttgcgagccccccccctcattgggccccggttacccgtggaccggtgtgcccgcccgctggttcagggggccgccaatgtccactgaaaggaaggtggaattgaagcccaaatgctttataatggtccccccaaccacatataaccacggcacgctatatcttttgttggaagtgggagtcccgccaccacaatgtgagaaatcggctgtttctgtgaacactacccacacctcgcgggggcttaaaaatggtctccgccaccccttcacattggcgaaacaagcaccggccacttccacagagagctgtttcacaagcgcacatcttctcgaggcaccgattcaccggccacatgttctccggccgcacaaggccttctcatgcacactggtatcacccggcgcgaagggcacatggagccgaagagtggaagttcaaccgaaggcccgagaggccaacactgaatgagcctcggtggtcgcgaggtatccacagcacgtatccacaggagtgcccaccacagccgaaggaaggagggcgaggtttcgaaggaaggaaggctcgaaggaaggaaggtggcctaagagccctcacagtcacctgggggaaagcccgggaagccagtgtggactctttattcactccccgacctgtcctgtggcctgtccccctgtgtgcacttgctgttttccccgtccacatccctgctgtaccagaccaccccccattaagccttttcatagtggaaga

SEQ ID NO: 566958 - DNA, 1884 bp, Homo sapiens
atgtagcgtccaaccggttctctgtcaagacgaccccaagggaatccgaataatagggtcgggtccgtttgtcagggtgtagttcgatctgtgccactagtgcgtagtaagttcctggcactattcaatgatacatgagtgactatgtcagatgctaagaaaatgtaccattataacaaaaattgctcgacgtatgatcacataaagaacttgtctaagaactatgatttcgactaggcatagacgtcttgtcgcggtactggtcgcgtgggtcctggattcctaacgcaatagggccattgcgtggtatcaccaccggttcgttgagtacaccaaatgatcgatctatgcgcagatgctaggttgcaagcccggtttgtcgacgctccacttcgaaatgcaagtaacctgctccctaccatagatatgcacaagctgtggttgagacgtcgacgcagtacagcacattgcagcttcatgacattcagctgaaacttcacaatccttttagcccatcagttccaataatgggaccattggtggtcatcggcctactgtgttagcttcaaggaaccctttggtttctaacaacgccggtaaaattcgacaggcccctttcttgggccgaagagcaaaataggagtctccggcggcgacaactgacatgaccgcagatttttaacgttcaaaatgcccagtgcaaatactaacacctctatgcgtcatcctccaatgctcctctgggagcgctcgatcctgtgaaaatcttttcaccctcacgaatggccccccaattcgtcacgccaatgacccaaagggtccctggaatgttggcaactggcaatcctcctagtccaaaagttcgactcgctgatatagcactgattgcgacagacacataattggcccaagccgcttgtacaacgacgacaagctcaacgcaacgattcaggtatgcacggccacactcgaatgacgtcactcctgctaacccttcacgcgcacactgtgaaggacttccccttcactttcggggcacagcggcattacaagtaaattaccccgcagagcaacgtttaagtaggtacatctccccgtttgttctgaagcacttgtcggagacggcaagacccgcaagtgtatcacactcttaggacaacagtgggggcggtctctactgaccagtgttccataacagatccagcctcctgcacagggcaactaatgggtgccaatttccccctatggtgtgtgcctagagcggctgcaattacccaacgcgcgaaaactcaaaaggacgaggattcaggtataggccgttactgcgggagacgctcccaacaagccgccatttcggcggcttctgcatatgggccgcattcgccaccatcagacaggtggggcgcctccctataacgagcgccaccacagcaacgggtatctttctgggacaaattggtgtcaaccccctctatgaattcaccgaggtcggcattcgagttagagactgatgtgagaaccaaagaggacggcgcctcctctcaacattcggctcttggggacaccaaccgcgaactacctggctcgacccacctacattctactaaccacgccactacaatctctgcccatacggaccaaacacaagtttggtcagacctgtgagcaaccccatcctagaacaccagcctatcagccagaccaaatcatactagtgagcagccatcttggaccataccacaagctcgccacccagcagctcacgtatgccacccatccacctaacaaagcacaagcgtcagacatcaccaaactccacacgacactgccccaaggcctcccagagcaccggcgactcccagccgtcctacagtcaccgagcaa

SEQ ID NO: 566959 - DNA, 321 bp, Homo sapiens
tgtagttgatagaagtgtttaatgtgtacagttgaccctgtatctttttttattgacggagttttgctcttgttgcccaggttggagagcagtggtgtgatctgggctcactgcaacctttgcctctcggattcaagcgattcttctgcctcagcctctggagtagcttggattacaagcgtgcaccaccatgcccagcaaattgttttgtattattagtagagatggggttttaccatgttggccaggctggtctcaagcttctgacctcaggtgatccacccgccttggcctcccaaagtgctgggattacaggcgtga

SEQ ID NO: 566960 - DNA, 172 bp, Homo sapiens
  misc_feature (67)..(67): n is a, c, g, or t
  misc_feature (121)..(121): n is a, c, g, or t
cacagccacgcctaagaggtagtgagttacactgcccctccttaagcatgggatatctatgtaaatnatttggaattctcctggatgggacatttgtctcttttggatttactaattattncaatcatgtttggccatatggagtcatgaatacttattttatacttggtgt

SEQ ID NO: 566961 - DNA, 702 bp, Homo sapiens
gcgttgacatgccggagatcccgcctccgggatgtcgtgtcctgctgcagccaggactcgactcactgtgcagaaaatcttctcaatggcagacacttaccgaaagatggcgggcagccgcatggcgaggctgacgaatgaccattcgtctgtggtccatacacgtttggacgacatggacggatcatgatacacagtagttggacattgcgtgaatagatgcgctcaagttttcgtggacggtgctgcgtgggcagttcatgctggatggctgctggtgtgagcaaagaccttagtgcagtgtcctttctggtgtcagctcatttgcttattcatggtcgccctaatccttgaggacgtcgcggcaagattggttctcaagacaccacaagaccagtcgtttacgacagttggttcttggtggacctttgaaccaaaggcttggattccctggcgtcagacccgtcccgaaaggaaacgtcgactagggtgatcccggggttcaaagacagttggtttttgggcaagcactaagatcacgtacctaggactaaaggtggagcatcgcgcacgcattttggcggcttctgaacgttgtaatcgtaaccgtgcttttcaaggtaggcaccgcccaaggacaagagcattgacgggccaggatgtggcccctggttccccagaagggttgaacagttgaaccac

SEQ ID NO: 566962 - DNA, 251 bp, Homo sapiens
ttttgggggggggggggttttccccttttttccgggggggggggggcaaaaaccctcccccctgaagggggtttcccaaatagggggggggtttttttcccaggatttttgttggttccaacccccccccattttcccccccattttaaccccggggggggggccaaccccccccccggtttcccctttttttccggggatttgggggtttttcaatggttttttttttttaacccgcaaatttcccccca

SEQ ID NO: 566963 - DNA, 338 bp, Homo sapiens
tccggcggggctttaaatccaatcttggcggggttcaaacattttcctgcctcagcctcctgagtacctgggattacaggcacctgccaccatacccagctaattttgtattttgagacagggttttcatcacgttggccaggctggtctcaaactcctgacctcaaataagctgcccgcctcggcctcccaaagtgctgggattacaggcatgagccaccgtgtcaggccagcatgcagcctttttttttttttttttggaaacaaagctctctttctgtttccccaggcggtaggttgcagtgttgtgattctcgctctcactgcaccctctccac

SEQ ID NO: 566964 - DNA, 119 bp, Homo sapiens
  misc_feature (66)..(66): n is a, c, g, or t
gcggctcccggtcggggcatccctttccttcgtgtgtggatccggcgttcttcagacgacgctggngctctctttcctcgggtccgcggtcgccttcagtccatcctggtcctcgctgt

SEQ ID NO: 566965 - DNA, 117 bp, Homo sapiens
tccgggaacgcgccattgtgttgtacccggaatcccgcgcgtcaacgctgtgctgcacatgtctctattgatcctgaaaatccaccattttttgcaatttcccccccctccaatggg

SEQ ID NO: 566966 - DNA, 190 bp, Homo sapiens
acgctgcaccgcggtgtcaaacacattctccttgcctcaaccttcccaatgtagctgggacctacaggcgtgtcgcacattgcctgtgtaatttcaggtatagtaggaagagacgggtttcaccatgctggcaaggctggtctgtaactcctgacctcgtgatctgccaaagtgctgggcattacaggcg

SEQ ID NO: 566967 - DNA, 208 bp, Homo sapiens
  misc_feature (62)..(62): n is a, c, g, or t
gtggcgtagagctatgcagcttgaaatccaagtagcactaaattttattatttcgtatttgntacaataaggcttcacacgagaaggtgttcaacatttttgggtgaaggaacttgaaaggacttctttaaggaaggagatatgaaggggcaactggtatctcgaaaggcgataaaaagggatgggggtttaggatgaatacaaatag

SEQ ID NO: 566968 - DNA, 137 bp, Homo sapiens
  misc_feature (133)..(133): n is a, c, g, or t
cccccgctggccttctccaccacaaactcctgctcatgtggctgcagccacaccggcggctgccggctctgactggctctgcctcagggccttggcactggcaatcccctctgttcaaacgtcagtgtgtcancgag

SEQ ID NO: 566969 - DNA, 237 bp, Homo sapiens
  misc_feature (5)..(6): n is a, c, g, or t
  misc_feature (36)..(36): n is a, c, g, or t
tattnncgggtgaacccacgcgtccggtcaatcagnatctcctataagggcaggcaactgaatctcaatccaagataccctgagatcctacgcatgtgatctgcaaggactggatcaatctggctgagaaaaactacatcattctgaacatgacagagaacatagactgtgatgtgttccggcagcaccgggggccacagctcctggccctggtggaagaggtgctgccccgccatg

SEQ ID NO: 566970 - DNA, 905 bp, Homo sapiens
ggaggtccagcggctcaatagggccctgggagagaaacactgtagcattcaaacgctcgtgcatcattctcacaccaatgagcatttagggagccccagaacggagcacgcggtgccctcctaacggaacacacaggatgctggtgcatgcacgcagatgagttgttgacatatgcatgccaggctgtaacgatacttcgtaggtagggaccttccatgaggtgatgcgacatgtgactcgatgacgcggcactgtatatgcaggacgaaggagagagcatgaagaaagcgaagtggacgacaccgtgacgaggccgcaagagtctaccacttggtgctcatgccccaagcctaaacaaggcgatccgaggacgcatgacggtaggacagagcgagagaacaacgcccgtccagtaccagcttagaaggtagtgaagatgcatataggccgcgtcgagaggagaaggcggttaaccaatgctaggagacgccgcacacacaggagagcacttgtcgtggcggtggacactgtacccactagcgtccgtaagccggcccgattgccaggcctactggtgcctacattcgagtagaggctatcgagggcacttggttcacacagggatccgcagtttagccctcgagatatcacccttgacagacatcagttggggcaccaaaaatgaatcgccaaatatgatcaagtgttacaaagaccataaacaaaaccaaaacccagtataggactaataacttggggacaggcggggtggcaacacgcagggaagaccaaggatgaatgggggcatcgatcaaaggccagggcttacaccacaaagctgacaaccccgccatacatacccattctggatgtaatggagagctcgggaaggaagcgcatagaa

SEQ ID NO: 566971 - DNA, 782 bp, Homo sapiens
aatacttcggtgccttggtatgagtgacgcattactacagtattctatctataccaccgatgacagtcgaaactgctctgtactcagtcctgactcactccatggtcattcatcaacctacgcatatagcagaagaggtcacgtcaatatggctagggttcacccacgagtaatcgctgcacgtatatgccaggaagtgaatatgccctcgattgacggacttaagatgctctgtctgataccgagtatgtctcagagtctattacctctgtacattgctcagagattcatgagttggatcctagagatctgatgctgtcattgtagataattctgatatttgaaatatactgggtctgataatgcgaacactgaccagtagtgattagaaagagactcaccactcgtattgatgtacgctcgaacatggagactattcgcgtgactagatggagtaagcgtaaattgaatctttgttaagtagacagtttgtcttccatgactgttctgatcgattagagtaagcatgtttattcgcagagaagcgtgtgactgttgaagcctgaacgaattaggcctggaggtggagattgaggcattgcaaactaaatatttaaatatggagcataatcccgaatttgagtctagacacaatttcatttccagcatttttataaagtaccaaattagtgaaccaaaaatagaaattagattttgtgcaaacatggagaaatctactgaattggttccagatttaattttatgtcatagaaatattgact

SEQ ID NO: 566972 - DNA, 246 bp, Homo sapiens
gtgcagggatccttgcagggaagaagtatgtgcaagggatcgccaccactgctgcctgaaatgctttgacaagttctgtgccacacctgtgtggaatgccgcaagcccatcggtgcggacttgcaggaggtgcactataagaaccgcttctagcatgacacctgcttccgctgtgccaagtgacttcacctttggccaatgagactttgtggccaagacaacagtactgtgcacagtgcacatcgg

SEQ ID NO: 566973 - DNA, 950 bp, Homo sapiens
  misc_feature (39)..(39): n is a, c, g, or t
  misc_feature (67)..(68): n is a, c, g, or t
  misc_feature (93)..(93): n is a, c, g, or t
  misc_feature (103)..(103): n is a, c, g, or t
  misc_feature (108)..(108): n is a, c, g, or t
  misc_feature (112)..(112): n is a, c, g, or t
  misc_feature (114)..(115): n is a, c, g, or t
  misc_feature (120)..(120): n is a, c, g, or t
  misc_feature (136)..(136): n is a, c, g, or t
  misc_feature (139)..(139): n is a, c, g, or t
  misc_feature (148)..(148): n is a, c, g, or t
  misc_feature (161)..(161): n is a, c, g, or t
  misc_feature (173)..(173): n is a, c, g, or t
  misc_feature (202)..(202): n is a, c, g, or t
  misc_feature (212)..(212): n is a, c, g, or t
  misc_feature (277)..(277): n is a, c, g, or t
  misc_feature (289)..(289): n is a, c, g, or t
  misc_feature (299)..(299): n is a, c, g, or t
  misc_feature (308)..(308): n is a, c, g, or t
  misc_feature (334)..(334): n is a, c, g, or t
  misc_feature (353)..(353): n is a, c, g, or t
  misc_feature (399)..(400): n is a, c, g, or t
  misc_feature (497)..(497): n is a, c, g, or t
  misc_feature (531)..(531): n is a, c, g, or t
  misc_feature (644)..(644): n is a, c, g, or t
  misc_feature (653)..(653): n is a, c, g, or t
  misc_feature (655)..(655): n is a, c, g, or t
  misc_feature (658)..(658): n is a, c, g, or t
  misc_feature (663)..(663): n is a, c, g, or t
  misc_feature (700)..(700): n is a, c, g, or t
  misc_feature (725)..(725): n is a, c, g, or t
  misc_feature (756)..(756): n is a, c, g, or t
  misc_feature (824)..(824): n is a, c, g, or t
  misc_feature (833)..(833): n is a, c, g, or t
  misc_feature (842)..(842): n is a, c, g, or t
  misc_feature (865)..(865): n is a, c, g, or t
  misc_feature (874)..(874): n is a, c, g, or t
  misc_feature (878)..(878): n is a, c, g, or t
  misc_feature (882)..(882): n is a, c, g, or t
ggggggggggtgggggcgggggggggtgggggcgggggngggggggggggggggggggcgggggggnngggggggggcgcgcgtggggcgtgnggtgggcggngcgcngtgngnnagtgnggagtgcgcgccgttnccngggggatgngcagggggggagngggggggcgtgngcgcgaagggggggggggggggcgtgggngccctgtgcnctgggcgcaggacttcagggggatgaccggccagtgctggggctgctttcggtcacagtgcttgngaaagctcagcngcgccgcggnctccatggnttggatctgggcagcgctgtgcccgngcaaacgcttgagctgggnctggggccgctgagcagggctctgagtgggggcttctgccgggcgnngggggtggcagtgcaggtcgtggtcagcgttcacatagctgtacaggcgctctgcatccagctgctgctgccgccgtcgttcttctctatgcctctnggtctctgccaagtactggcggactctctcagtnatttccatattgctcaggtcacattctacctctgcatctgacttagtctccatctcttcctctttggacaaagcttggtcttcttttgtggatgcctggatcctactgctgtnacgtggatncngcncagancttctgaaatgtgaagaactgcaggggtagttctgcnagggcacatgatggtcatagaaggnctgaggatacgcagcctcattatcgttaganctttggggaagaagcgcagaaggtaagttccatgggagattgacacaggatttcacggcctttctgtnggcattgtnatggctttncatccaagccatttcttgaaganaatgttgcnagtntctngcatataccggatgagaattccaaggcctgggagctttcgatgttgacgcctttcccgctgccatctc

SEQ ID NO: 566974 - DNA, 120 bp, Homo sapiens
ggcaggcaccctgatgtagcacaccttgaggaggtctgagaccaaggctgacgcccaaatggacagaccccaggtcaggcaccccgagtagccacacctggaggggtctggcccaaccat

SEQ ID NO: 566975 - DNA, 221 bp, Homo sapiens
  misc_feature (9)..(9): n is a, c, g, or t
taataatcncagacatgtttaaaaaaaaaaaaggagttaattgggaggctgaggcaggaggattgcttgagcccaggagttggagacctgcgtggacaacgtagtgagactccatgtctccaaaaaagacaaagattagccgagcattgtgatacatggctgtggccctatctagggatctgcactctagcctgggcgacagagcaagacccggtctcaaa

SEQ ID NO: 566976 - DNA, 112 bp, Homo sapiens
  misc_feature (26)..(26): n is a, c, g, or t
  misc_feature (29)..(29): n is a, c, g, or t
  misc_feature (32)..(32): n is a, c, g, or t
gcgtcccatcatgtacggggcttggntanatnaaatttatgcatgtaaaatgcaatactatgcagtcattacaagggatgaagaagtatatttactgatgggagaagatgcg

SEQ ID NO: 566977 - DNA, 212 bp, Homo sapiens
gacggagaggctcacttattgtctttgtactatggctttgttttgaatttggcatgagggagagagagagagagagagagagagagagagagagagagagagagagagagagagagagagagagatagagagagatgagatgatgagatagatagatagagatagggaggaggggggagggttattttatgtgtgatgtgttacgtgtatgg

SEQ ID NO: 566978 - DNA, 814 bp, Homo sapiens
gatggagacacaacaatactttcgagcttgcatctattcattctatcatcagggaccagctatgaggctgaagaaaaggcaagatccgcatcagatcaatctggcttgagcgtcacctggtcgtccgtcccgaaggagaacctgccccgtacggaatactcggacagtgtttggagtagctcgtatggattaggagggatggtggaggagtggagagtgcgtgaggtccatgagatcaaatgtgggccagtatcctagtggcatatgggaggaaggaaaaaaagtgtagaattgcagatggcctattgcggggatggcatgcgtgcacagcgatgacacctaaacactactggagttgccaaatgcgctccggacccactgggaacgaagatcgacagagatgagcacgagggctcacgtttagagtacgcaaacagaataacagctggcacacatgggatttcccaaagatgggaggggaatactcgcatggaccagactggaatccaatgaaacgtgcttaaagggccccccacactggacaaagcaaaccgccgagacgttaagaacaggaggtaaatttaacccgacggtaaagaaacggtgacgaaaacggaggttctagagcccatttttaggagaaaaaacacatcctcggggagttacaaacaagggcagccacagattcagaggcctgggggaccgccgcatattggcgcccagagcataaactagcatgtgcacatagagatggacccccacacattttcgagacataccgaatgacctccgcgggggaactaaaatccccgga

SEQ ID NO: 566979 - DNA, 318 bp, Homo sapiens
atacaggaaagctatactatgcaaagtatatgagtaagatacacaatctaaataggcactgaagaaataaagagctggtataattgcatcctcagactattattgactgtgtgtgtgtgtgagaacagacattccagtgccacccaaatatatatctgtaacgtgcccaagaaatcctagctgcgctcttgagagtgcatgccatggagactggtttagacaccgcgtggagcctagttgcctgttgtcacggcatcttgcactttaggagactaagaccgtcctggttcgtctgtgtgtggtgtgaccaatggtgtg

SEQ ID NO: 566980 - DNA, 374 bp, Homo sapiens
gttaccactctgccttgctttcgctctcttctctcgcctcccctccacttcataaaggtatgatacctttaaaggtatcttcatgaacagcagttatttattttaatgtagctcaattgtcgagttctcgacgattttcgccaaaaagggaattttcttctgttcttgccttgtcacagaacaaaggggcggggcgggggggtgagggggtgtgtgggggggggtgtggggggggccgctgggggtgaagaatgtgtgtctgtgtgtgtatgtgagtgtgtgtgtgtgtgtatgtatgtacgtacgtgtatgtgtatgtgtatgtgtttttgtttaagaaatcttaacccatccctaggtcaaatgaaatagtt

SEQ ID NO: 566981 - DNA, 311 bp, Homo sapiens
  misc_feature (1)..(1): n is a, c, g, or t
ntttttctgcagggcctggtgtccggatcgcatatgccgggctctgctacgctgtttggacttggctgagcagggggaaaccatgccgctacccaaaagaaggggggggccggaacctgtttggcccgggggcccgggaaaatggtgccccccggggcggccaagggggggggctccctgaagggtcaaaaagaaaaaatcccccgggggggccccttgaaccccttttaaaaaaccggggggcccccgccggggaaaaagaaattgggggtattggggggggaaacaaaaaaaacccccgcgggtggggg

SEQ ID NO: 566982 - DNA, 479 bp, Homo sapiens
  misc_feature (46)..(46): n is a, c, g, or t
  misc_feature (107)..(107): n is a, c, g, or t
  misc_feature (322)..(322): n is a, c, g, or t
ctcatggaacaagggtgtgaaatgaaaatattttaggatttattcnaaaacagactattctgttttcagcttcagaattgttcttgatcctaaggaacctctgtcancagttgaggttgctgttgaaaagaaagaagaaggaggcggaaatctctcagggagaattatttcctttcttttctatttcagatacctggaggggtggggagaagtaagaattgtaagggaggttcagtagtggggaattctgtgacagctgattaaaaagaagaaggaaaaactctgccttttagttaacctttggttcccttccactcttgtnaaaattgggttggccaacaagaacatgtccaggtttatgtccccaattaccatcctgtggtagatcttaatgtttttgatcgttgggttaaagtggaagtgccacccacagtgaaaccagatcccattaataaataagcttaaaagaaaaaaaaaaa

SEQ ID NO: 566983 - DNA, 259 bp, Homo sapiens
cgacggatcccttcggcagtatgtagatctagtgtagttgagcagttcacatctatatgcacactttaaggaggcgcttgatgtcaggctcaatgttgatgtgttgggaaggtgcggctgtacagcgtcggaaggggctctccctccggccctatgaggaacttctcaaagttcccaggcccacatcttcagcaggcgacaccagggcatccccacacatacatagagctatgacgacatcggtacatgagggcacaca

SEQ ID NO: 566984 - DNA, 395 bp, Homo sapiens
acaagcctaatatgtttattatctgaacctctatagaaatgtttgccaattcctggtctaaataatttctgaatgtatattctttagtttatcactatcatcatcattttataataaaatccatcataaaattatagttttgtatatagcaaggaggggtatatgtcttaggttttggattgtgttgttgctaatttttgcaaaaatcacttatcttctgtattttccatacctaataatgactagtatatatcagacactcaataacaaacgagcagaactgactcggagtccagttatggcttatgaatggcataatcctggtttcctgggcttagcaatatgaaataatcccctcttttggccaactccagaataaagaagtgtgttgcatt

SEQ ID NO: 566985 - DNA, 274 bp, Homo sapiens
cttggcgagcacggcgaccccgttccacgccttttgcccatgccagaccgcgccatagcccgccgcctcgatcgcttgcgccgggaaggtatcgtcagccgccttcagttcctgcaggcagacgatgtcggggccgtcctcggtcagatactcgaccagccggtcgagccgggccttgatgccgttgacgttgtaggtgacgatcttcacggccaccgctgtagagcaaagaggccgtacgggaataccgttcgtgctgagcgaagtccaggga

SEQ ID NO: 566986 - DNA, 823 bp, Homo sapiens
gccggaaccgtcatctgccgttccttcgatggaatgaagaacacaaagggaaggaggagaggcgaccgatgatgtgttctctcacgagcctattcttacgagacgtggcagtaggtcacgcattctgtgtctcctatatcctaagtctataaagaccggctgtatgggacatatgaaggctaatgtctccgtccttccaaaggaaatgcctctcaatataccatgctcatccaagggaaaaccctgaacgagtctagcaatgggttcaactcatatactgactgtatagcagtaagtagtaagagcagcccgagagttaaggtctccagagttcggtggttgcagaagacgtttgattgatgcagtaattgaagcaccatgagggccatcatatatagcacggtgatatgctgtgcatgaccctggtgtgagcgtgcattgttgcatcaagtcaaaacagacacgaacgccagagagcatggttttccggttgccaggtacaggggctggccgtgctcgaaccatgagaaagagacctgtgttgctgacagccaacaggagagagcgatcgtgaaactggatggaaattctattgtgcctatcagtccatgctcatataatctgtgttaacttatctaatccttgagccgcatcaggcagagtttgatgctgactagaagaccttacgaaagacaactgtctaggggcagcaagggcctctaagagaaaacgaagttgctattacagagccagaggggtcctaatgggcgatattgcaggaagcatttagtatgagaggaccacagaggcggcaggagaccat

SEQ ID NO: 566987 - DNA, 199 bp, Homo sapiens
  misc_feature (29)..(29): n is a, c, g, or t
  misc_feature (90)..(90): n is a, c, g, or t
tgtatagtgacgatcttgaagtgcgggcntttcgattacatcgctggagatcccaaggagcttcatgaactcatcataattcttctcacnctccatctcgaacttgccggtgaaagccatgctgctgggaggctttcctttatgtgtctgtttcattctctgcaggtctcctttccggctcacccatcgcacttagaca

SEQ ID NO: 566988 - DNA, 1007 bp, Homo sapiens
gaccgcggcctcagatgaatgcggctgttaaagacctgcaataatccagaatggctactctgatctatgttgataaggaaaatggagaaccaggtcacccgtgatggttgctataggatggcgctgaagctggggtctggaccttcattctatcagccttacgatggagagatctcaatgtttcaacaccacgttttggctacaacgttcgatgccccaccagccttacctaaaagctactagaaaggctttgggaactgtcaactagagctacagtaataatgtctgtaaagaccaagggagcccctcaaacaaaaacagccaagcttttctctgccagaaagatgactgagaagactgttgaaagcaaataagctctgttcctgcctcagatgatgcctatccaggaagtagaacaattctgtcccttcaatcctctagactttgagagatgtcgacattgcctgaacgagcaccagcattgcgtcaccgttcccttgaaggtggcagtgcctctcagtgatccttgacgaggagagagagcttgacaaagctgttcaagcctggtacccccacctatcagctggtgaaacgtatggcctctaccaccatgggaatcgcaatgcagttagcacggtctcccttgcaaggcagttcatgtcgagccttggagtgttagaatttggccacactggtactgctcgtgacgcttcgaattagttacaatagacttacgtgctttcaggaagttgagagcagtaatcacgtactccattaagagacattcggttgagacaggacaagaggaaaaaaaacgagcatagacaacagataagacgacgcctcacgtgctagcgtcacatgcaacagccaaacagcagcaacagacgaacaccaacatgagcagagtctagtcggagagattgatgagaggcaaccagagatagccgaaaacaggaagcagacaggagacagagtcacaagtattcggccacgccatgaatgaa

SEQ ID NO: 566989 - DNA, 821 bp, Homo sapiens
gtgcccaggacgcgcgacgtctggaggccgggacaagtgggggctgagcagctgctcagtacgtgatggcactatacatggctcacgtcgctcacataaggtgtcaggtgatcgacggtatgcccagtatttcttctggggttatgaactcgcgaaaataggcctgccaagtttgggacccgaaatggttcaggtttggctcactcgtgaacagagtggctcagtacttgttgcggtacccttggtagcggacagtcactcttcacgctatgaggcaccgagattggtgtagatcagcacgggagaatgcaacgtacaaaactctcgctcttggctgcattcgcgtaacctcgattcatgccttcactacgaatgaggttaccatgggagagatgcgctctggtaagaattgggcctacagacggtcgcttcgccgttggctctgtgactgttactgagcgaggtgctcgatctggagtcgaaggacgagctctgcagggacaggtagagctgagccgcgtctctcgcgagagtgaagcccagtggtagcactgtgtcctcgccctgtgattcgaacgtcctcatctcttccccgcggagacgtgtgggcagaatccaggacctcagcaggaggaggccatgtgtgcaacaaaggctgtcaagttcgttcacttgtgaaaaggaccccgagtgcaaagtggacacaagaaggggctcaggagaagtgaaaaaccagatgcccggtggtcctcccagttggagtggtgccagaatagagtgggtccagaatccacaaaattggactcttggagtagagggcg

SEQ ID NO: 566990 - DNA, 335 bp, Homo sapiens
  misc_feature (320)..(320): n is a, c, g, or t
ttccccccccttttaacccctgaaactttttccctctgggcccaaaaacctgttggcttttgtaagggcccgggccccccctttgcagattcggggccccaaaagcaaagatgtttcctaagccgccttttcccccccgtttggcctcggggcccctttgccttgggcccccggcccccccccggggcccctcctttttcctccccagggtttgggggggacgaaagccctttttttttccctattttttgctttcccattttaaggttttggtgaagaagggggccttttctcccaaccttggttaaccttttaaaaanaaattttgaaagcca

SEQ ID NO: 566991 - DNA, 105 bp, Homo sapiens
tggaccagcactcttttcttcacaggtacatgtattaaggaactgtcagctcagagatagtaagcagcctgaatttctttttatttcttgcatattgtgcaggag

SEQ ID NO: 566992 - DNA, 122 bp, Homo sapiens
gctgaaaatgcaggcttttgtaacagtgtgatctttccccacgcactcatgacaagtacccaaggttttttagctattttagtagtgtttgttccattaatatgctagctgtaaggtaaaaa

SEQ ID NO: 566993 - DNA, 144 bp, Homo sapiens
  misc_feature (113)..(113): n is a, c, g, or t
acaccatccaccagttcatctcactgagctcgcaggcagccccagccaccagcgaaatggccgcgtcggcgctgcaccagacgaccagcttcctcggcaccgccccgcggcgngatgacctcgtccgcagcgtcggcgacttcg

SEQ ID NO: 566994 - DNA, 101 bp, Homo sapiens
tttcccccaggtaaacctgtgtcttttatggctaggaaaacttaccacagaacaaattcatatatcacttactggatacctcaatagccatcacaaaggat

SEQ ID NO: 566995 - DNA, 170 bp, Homo sapiens
ggggccccccccggggggggggggtccccccttttggccctgggggggcccccccccccccccccacaaaaaccaaattgggttcccgggggccccccagggggggccccccccttgggtggggcccccccccccgggggtttttttccataaaatccccggggtttgga

SEQ ID NO: 566996 - DNA, 339 bp, Homo sapiens
aaatataccccagcagtgggactggtgggtccatatggcagcctttatttttagccttgcctgaggaaactcccagactgttcctcctacagtggcctatactaattttcactccccacccaacagtatgtgagggttcccctttctccacatcctcgccagcatttgttactgcctgtcttttggataaaagccattgtcactggggtgagatgatgtttcactgcagttttgagttttatttctctgacgattagtgatgttaagcatttttcatatacctgttggccatttgtacctcatttcaatatttgagaaaataaattatgattattcttt

SEQ ID NO: 566997 - DNA, 245 bp, Homo sapiens
caagaacctatgccagtgtgtttatgagagtttgcactgtcccacactgttgccaccagccacgtgggactgtttaaatttaaattttacaaattagccagtcatggtggtgtgcacttgtagtcccagctacttaggaggctgaggcaagaggattgcttgagcccagaagttcaatactgcagcaagctatgatcgtgccactgtactccagcctgagtgacagaatgagacctcatctcttc

SEQ ID NO: 566998 - DNA, 162 bp, Homo sapiens
agtagatttgggggcagtgtatcaagggagttgtaaatcctggcaacgtcttatgagaagactctggcactggcacgcggattgttgtagttttccaaagcgtagactgccagattcttcagaaacatcgcggatcaaccatcacaacaaagtcttataaag

SEQ ID NO: 566999 - DNA, 132 bp, Homo sapiens
cctacttttcacagtggtggtgatgtgctggtgagtaaactggctgttgtaccggaatccaactccaaaccaaaggcccctagggagaaacaggagacggcccctgcgagccctggctgctccccagcaggt

SEQ ID NO: 567000 - DNA, 256 bp, Homo sapiens
cagtaggcaccctgcactcggctctttctgcctacctaccccgcagactgcggcaggcctctcaccggaacttccagccagaagtgctgcagacccaggtccacggtgccccgtgcccacggtgcccaggtggagccctgctgggggcctgagccaccgctcccggccatggccctccactattcgacccaacccaggctgggctcatctctgccaggtgttcctaacccgacagactctggccacttgctttgcg

SEQ ID NO: 567001 - DNA, 137 bp, Homo sapiens
cggcccccttgttatttgctacagaaccctctaaatccccttgtacatttaactgtatagtccaaagaggaacagctctattggactaacagttaatatacaaagggataacgagggtacatagtaggcacaataaa

SEQ ID NO: 567002 - DNA, 285 bp, Homo sapiens
agacgagtgatctaccttactcttggtgatgtgcccgatcgtcacttcatcccacgtaggtcagcgtgcctgttgggtttgctcgatagatgtacgtcttcaggcgggtcatggtgtcttcacgcctgtattcccaggactttgggagtccgagatgggaagagtgcttgaggccaggaattcaagaccagcctgatcaaacatagtgaatccccatgtctaaattttttataaccattttttcaaaagtacatctcactcagaacagagtgaaagctgaaagtg

SEQ ID NO: 567003 - DNA, 633 bp, Homo sapiens
  misc_feature (201)..(201): n is a, c, g, or t
  misc_feature (203)..(203): n is a, c, g, or t
  misc_feature (210)..(210): n is a, c, g, or t
atagctggctgtgagcggagaagcgggggctatcaaagaagaacatgtgatcatccaggccgagttctatctgaatcctgaccaatcaggcgagtttatgtttgactttgatggtgatgagattttccatgtggatatggcaaagaaggagacggtctggcggcttgttgggttgtggcgatttgcagctttgaggctcangngcattgnccaacatagctgtggacaaagccaacctggaaatcatgacaaagcgctccaactatactccgatcaccaatgtacctccagaggtaactgtgctcacgaacagccctgtggaactgtgagagcccaacgtcctcatctggttcatggacacgttcaccccaccaggggtcaatgtcacgtggcttcgaaatgcgaaacctgtcaccacaggagtgccagagacagccttcccgcccagagaagaccacctttttcggaagttccactatctccccttcctgcccttaactgaggccgcttaacactggagggtgaagcactgggcctttggtgaccctttttctagccctcgcagtttggcgctccaaacctcgttcagttcatcaaagaaccttttatttacactggactaatgaagaaatg

SEQ ID NO: 567004 - DNA, 138 bp, Homo sapiens
acaacgtcgttactgggaaaacacaacgtcgttactgggaaaacacaacgtcgttactgggaaaacacaacgtcgttactgggaaaacacaacgtcgttactgtgaaaacacaacgtcgttactgggaaaacacaacg

SEQ ID NO: 567005 - DNA, 1509 bp, Homo sapiens
caagaagaattgggcgcgcttttaattgtgatagattagttgccccctagccgcccccccacgatgtgggggccgcccgacagcacggaggaagaagagcggtgtttgttgggacaaaggagtgtgacaaaagcccaatactttctggcgaagggagagtgttatttagatcctgtgtgcagcccaccaagggaaggagttggggtggcccgcccctgatatatcctgtggggggccctacttataagaaagaagaagtttcctctgggggtaaaaaccggaggagttgttttttgtgtgtggaaagaggaagcgcagtgtgtgtgcccccccccgcctgtcttggtgctggttttgtttttggttgggcggccgccaccaccacgcacagaagagtgggggaatttatatttttttataggggccaccaccaggcggggtcataagagtgggtaataacgacgccgcggtgaaaactccccgcactgtgggtgctttgtccccccccctcccgtctgttatgagatgagaggagatattctctctctcaagggttaacttttatcgcgcacaccaattttctcctgcctccccaaagagttttacactcacacacacacttttgtaatagacacgccccctgtctctctctctggcctttgtctctatgaggaaggactctctcacttgggagacccctctcttacactctgtggggaatttttgtgtttcgccacattgcgctctgctcttctctctcgccccacgcccacagagagaggtgtgtctcactgtggagccacacaggccttgtggcgcacacgcaccacaggtttgtgagcgcccggcacactcttagagagagggttgtgtctctcacagacacacacacgctgtctgtctctctccggcgagtagtgagagagagagtgagagtggacactccctgctgtgagagagatattgagagagcgctgctggagagccacacagcgcgctctcacagagagagttgttcgtgtatgagttgctatatatatgcgccacgacgtgtgtgtctccgtgtgtgaggatgtgtctcacacgcggggcgccacgacgcggtgtgtgtgtgccccacccttctcatattatgatgtatatctctatgcgtctatacaccggacacacacatgtgtgcgcgtgtctcagatctctgtgtggggatagctctgtatagagagagaatgagagatgggccttctgggagatgacatagagtgggccagagttttaacaaataaacattctcattgttttggcgacacctgccataatttagcctgttttgtgggaacacccagagttggattccttgagatttcataatataagactgctcgccagtcacatccaccataattcagtggtgaaatctctgtcttgttactgtcattccccttccttttccgtttagaatccagaataaagttgtatttccaaaaaatcttaaacaaaagaaaaaaaaaa

SEQ ID NO: 567006 - DNA, 897 bp, Homo sapiens
  misc_feature (6)..(6): n is a, c, g, or t
  misc_feature (67)..(67): n is a, c, g, or t
  misc_feature (70)..(70): n is a, c, g, or t
  misc_feature (86)..(86): n is a, c, g, or t
  misc_feature (96)..(96): n is a, c, g, or t
  misc_feature (103)..(103): n is a, c, g, or t
  misc_feature (105)..(105): n is a, c, g, or t
  misc_feature (112)..(112): n is a, c, g, or t
  misc_feature (119)..(119): n is a, c, g, or t
  misc_feature (127)..(128): n is a, c, g, or t
  misc_feature (132)..(132): n is a, c, g, or t
  misc_feature (135)..(135): n is a, c, g, or t
  misc_feature (138)..(138): n is a, c, g, or t
  misc_feature (141)..(141): n is a, c, g, or t
  misc_feature (147)..(147): n is a, c, g, or t
  misc_feature (151)..(151): n is a, c, g, or t
  misc_feature (182)..(182): n is a, c, g, or t
  misc_feature (185)..(185): n is a, c, g, or t
  misc_feature (192)..(192): n is a, c, g, or t
  misc_feature (206)..(206): n is a, c, g, or t
  misc_feature (214)..(216): n is a, c, g, or t
  misc_feature (220)..(220): n is a, c, g, or t
  misc_feature (224)..(224): n is a, c, g, or t
  misc_feature (228)..(228): n is a, c, g, or t
  misc_feature (231)..(231): n is a, c, g, or t
  misc_feature (245)..(245): n is a, c, g, or t
  misc_feature (247)..(248): n is a, c, g, or t
  misc_feature (254)..(254): n is a, c, g, or t
  misc_feature (262)..(262): n is a, c, g, or t
  misc_feature (274)..(274): n is a, c, g, or t
  misc_feature (280)..(281): n is a, c, g, or t
  misc_feature (284)..(284): n is a, c, g, or t
  misc_feature (294)..(294): n is a, c, g, or t
  misc_feature (325)..(327): n is a, c, g, or t
  misc_feature (331)..(332): n is a, c, g, or t
  misc_feature (337)..(338): n is a, c, g, or t
  misc_feature (346)..(346): n is a, c, g, or t
  misc_feature (352)..(352): n is a, c, g, or t
  misc_feature (363)..(366): n is a, c, g, or t
  misc_feature (369)..(370): n is a, c, g, or t
  misc_feature (375)..(376): n is a, c, g, or t
  misc_feature (382)..(382): n is a, c, g, or t
  misc_feature (389)..(389): n is a, c, g, or t
  misc_feature (393)..(394): n is a, c, g, or t
  misc_feature (397)..(398): n is a, c, g, or t
  misc_feature (401)..(401): n is a, c, g, or t
  misc_feature (405)..(405): n is a, c, g, or t
  misc_feature (407)..(407): n is a, c, g, or t
  misc_feature (417)..(417): n is a, c, g, or t
  misc_feature (422)..(422): n is a, c, g, or t
  misc_feature (427)..(427): n is a, c, g, or t
  misc_feature (435)..(435): n is a, c, g, or t
  misc_feature (439)..(439): n is a, c, g, or t
  misc_feature (444)..(445): n is a, c, g, or t
  misc_feature (447)..(447): n is a, c, g, or t
  misc_feature (450)..(451): n is a, c, g, or t
  misc_feature (453)..(453): n is a, c, g, or t
  misc_feature (458)..(458): n is a, c, g, or t
  misc_feature (461)..(461): n is a, c, g, or t
  misc_feature (468)..(469): n is a, c, g, or t
  misc_feature (474)..(474): n is a, c, g, or t
  misc_feature (479)..(479): n is a, c, g, or t
  misc_feature (481)..(482): n is a, c, g, or t
  misc_feature (500)..(500): n is a, c, g, or t
  misc_feature (506)..(506): n is a, c, g, or t
  misc_feature (508)..(508): n is a, c, g, or t
  misc_feature (531)..(531): n is a, c, g, or t
  misc_feature (538)..(540): n is a, c, g, or t
  misc_feature (545)..(545): n is a, c, g, or t
  misc_feature (547)..(548): n is a, c, g, or t
  misc_feature (553)..(553): n is a, c, g, or t
  misc_feature (556)..(556): n is a, c, g, or t
  misc_feature (561)..(561): n is a, c, g, or t
  misc_feature (563)..(563): n is a, c, g, or t
  misc_feature (581)..(581): n is a, c, g, or t
  misc_feature (585)..(586): n is a, c, g, or t
  misc_feature (592)..(592): n is a, c, g, or t
  misc_feature (598)..(598): n is a, c, g, or t
  misc_feature (602)..(603): n is a, c, g, or t
  misc_feature (614)..(614): n is a, c, g, or t
  misc_feature (623)..(623): n is a, c, g, or t
  misc_feature (625)..(625): n is a, c, g, or t
  misc_feature (632)..(632): n is a, c, g, or t
  misc_feature (716)..(716): n is a, c, g, or t
  misc_feature (739)..(739): n is a, c, g, or t
  misc_feature (781)..(781): n is a, c, g, or t
  misc_feature (785)..(785): n is a, c, g, or t
  misc_feature (812)..(813): n is a, c, g, or t
  misc_feature (816)..(817): n is a, c, g, or t
  misc_feature (830)..(830): n is a, c, g, or t
  misc_feature (893)..(893): n is a, c, g, or t
aaattnattttgctttggataccatacttatttttcacaaacattctacttatattaacctataatnggnttattcatgcgatttnaatataaatnaataaangnggtaaangtatgtntgtgatgnnaatnaangtnggnaagggnatanattaaaacatttcttagtttcaatctcaaangcnataaatnccagcaaatattancccaaatnnncggngacncttnggnatccgccatcattngnngggggnctcagggnatcatgagaccngggggnntgnggccactggngtccccactgaacttgaatacgggggggggnnngggnnattgnnccgggggncggccngggcctcgaannnnggnngcacnngggggnggggggngggnnccnngcnaacngngggggcgccngggcnaaacngcatccgngggngtccnngngcnncnttcanctncctcccnngcccnggccngnnggtgtgcgcgcggggganccgggngnggggggggaatgggccatcatcncccgggnnnccttngnnggganggnggggntnggccacccttacaacctngggnncgcccngcgcgngggnnccacggcctcnatgtgtgancngcgtatntggttgcgctctcctctcttgtggtcctgtggattcctctctcctcttacatcctggtgaaccctgtaggcctcattccaagtncatatcttctggtgccaactggnatactgggcttaatgtggtcacctgatgttaaacagcagggntgcngcccatcaacttctcacactttcttcnnggnngggggctgtgtanaactagttccctatgcctggatccatcccatagttacagcaaaggactactaaaaacacagcntagt

SEQ ID NO: 567007 - DNA, 86 bp, Homo sapiens
gcggccgcctactactactactgctcgaattcaagcttctaacgatgtacggggacatgaaaataaacatttcctttttaacatcc

SEQ ID NO: 567008 - DNA, 112 bp, Homo sapiens
cgatgttcatcgccaggaaaaatgactggtcaagtaggatctgggcattcagggcacctgggacataatggtaccctaatattcatttgaatactgtgaaactggcaatacc

SEQ ID NO: 567009 - DNA, 296 bp, Homo sapiens
agactaacccacacactgatgtgttccatgttatcttcagttacaatgcaactaaatggaaacacacaactgagtcagatataccaaaagaatcaagtttggccttatatctgagaaactgcaacagcactgaattctgcctgacaaattacagctctaaccccacatccacacagttttgatgtacagctagctttaccatacaagtgttaggtgctgaactgtaatatcattgacagaaatgtgatgccagaatgaccacggaatcaaatgtacatacaagtcaccaagttagc

SEQ ID NO: 567010 - DNA, 468 bp, Homo sapiens
ggcctgctcagaagaggcacacactataaacatgtttaatagtctcataacatgagaaaattacatgaatttcaaatacaaatacagtatatctttatagtatcgtatgttatagagatggagtcctatgctctgtagcccaggctggagtgcagtggcacgatcttgggtcactgcaagctccacctcccgggttcacgccattctcccaccatgtccactgtgagagcgaccctcagaagtactgagaacagcccaatcagttcctttagcacaagtattgttgttacacctgaaaacccaacaacacagggccctcctgtactgatgtctgccactgggacccaaacattccctgtacctactactgtcacctttggcagtatggattcctctacgtccactcttcatactcttactccatcaacaggcttgagccagatcatgtcaacatcacagtttcctatt

SEQ ID NO: 567011 - DNA, 1573 bp, Homo sapiens
gaactggttctaggtgttcacctccctgcctcatggcaacgtctcctcaccctctgcacttactgcgcaccgcaacgctcccaacgcctggcagccttcctccactctctaccccagccaccctcaggctcttccacacgccctgctagcctctgacgccccctacacacctccactccctcacctacctcacacccaccccctgcgcagccaccctccctgcacctctgctcgcccctctcactgcgctacgcaccacacctgcacgcgcccactccctactgcaccactcctgctcgcctacgcacacatccctcgccactactccgccacgccgtcgcccaacctcctaccaccctacaccccctctaacgcgcggcccctctactctacgcccccacgcacctctgcctgctccccttcccacctccaccctgcccctttcccaccctgcacacccacctctctcgcacctcgccgcaaccgcccccctctgccacacctgctcctcgcacccccctgcacccagccacactctccccacgcaccccacacgctctgcgccttgcccccttaccctcccctgccccacttcgctacccttctcccccctccctgcgcccccaccacttcactgccctctccttgccctcccactccctcccctgcccctcgccacgccaacacacgcccccctaccccacctgcacaacccacgctcctctctcctgcctcacgcccacgccagccactccaccccacacctggccctcctgccctctcctgcacgcccccacgccccacaccccaccgcactgccgctgcaccccccctgcctgacccctccttccgcccccctgcgcctcccccctaccccctgcgcccctctgccgctggcccctgctcgcgcctagcccccgcctgcggctgcacccgcgctgcgcctctctccccacgccacgcacctggcttccacccctgccccctcgcccccctcctcctgcctccctgaccccaccctcccaccccacaccccccacacgcctcggtccaccctcccctcccccacccctcccctgctcgcggccctccccgcgctgcccccccccccccttggcccccctcccccacggcccctccccccctccccccccctctcccccagtctcgttcccccactccttgcccggccgctggccccctgcgcgcttgcgccaccgcaccccctcgtgcgtctcctccctgcggctctcctctcctctccactccctcgggctgcctgcccccttgctcctcgtcccgcttccagccccccccgccgcccgccccgcctctgcgctctcgccctgcccctggcgcgcccctccgcccccctctggaccccccccgccctctctcgcgccccctcccctccttcctcgttcgcccgctccgtgcgccccgtccgcgccctcccgcgctcccatccctgtcccccccgcgcctcccccgcccccccgcgcgcgcccgtccctcctcgccgccctccccttgccccccactcatcgccgcccggccccccgctccacaccgc

SEQ ID NO: 567012 - DNA, 133 bp, Homo sapiens
  misc_feature (15)..(15): n is a, c, g, or t
  misc_feature (103)..(104): n is a, c, g, or t
aattttgtgattacnctggtgaaaaagggtagacgattaggccagccggtccggaagaattaggtaagggtgggaatgtgtgaagggtatttccagggctgcnnaaactcagttggattggattgcttggttt

SEQ ID NO: 567013 - DNA, 147 bp, Homo sapiens
  misc_feature (146)..(146): n is a, c, g, or t
cggtggctgcgttttggaaggggacccagagagaaaatcctggctgatgacacactcggtctatgtagagctgggccacggcggtggccgagttctggaagaggtgccacagattctgctgcttgtgctcgggatgggaggcggcng

SEQ ID NO: 567014 - DNA, 1162 bp, Homo sapiens
cacggtggctcacgcctgtaatcccagcactttgggaggccgaggcgggtggatcacgaggtcaggagattgagaccatcctggctaacacggtgaaaccccgtctctactaaaaatacaaaaaattagccgggcgcggtggcaggcgcctgtagtcccagctactcgggaggctgaggcaggagaatggcgtgaacccaggaggcggagcttgcagtgagccgagataccgcctgggtgaaacgagcgagactccgtctcaaaaaaaaaaaaaaaaaggtttttggggaccccttatagcaggttaaaagcttaaagaacttcatggggtctctctcagctaaactttatttgcccatttcaccccagtgggccaaagggaagaaacgcgggtatcataacactccattaggtgaggatatcctcgaaaaggcaactgggtcgtagtgagttctaaacaaaacacaacaactattctcttccgaagaaatgcgcactgccttacaacagtgcctccccatactcaggttacactattaacgcccgctttaacacagtgcgtgtcgacacaacagtacagcctgtcaactcccctaaaagttcgctcgaggaagacacaacaaattttttgagagaccctgtagacaccacactaatggggacccgtgcgggataactaaccctttgttgaaaaaacaagggggggcttaggggaaacactcagcgaaggcactccatgggccccggtataattcccaaaggacaccttttacaggagaatgtgcccccaaaaggtgtgggcaaagggaatctggcgtgtgtacgcccagcggagtttggttgatagaaccaccccctgtgggtagccaaccacatcgtagaaagcaccccttgggttgtcgctatacagcaaaaaaatgtgtttgtttacacctctttcgcccgggggcattgtcccctcgggacaacaaccactggccggtgaaataccccccagcattaccttgggggagagaacccttgagagctgtaactgaacgggcatctgacttgtaacgccccccgagagaagagcttgagagcgactatgccagtacaacgcccggtgtattaccccacatgtgcacccccaacacctggtggtgtgcatcacatgttgtac

SEQ ID NO: 567015 - DNA, 231 bp, Homo sapiens
tgatggtaagtgatatctcacaggatctgatagtttaaaagtgtttaggggctgggagcagtggctcatgcctgtaatcccagcattttgggaggcagaggagggcagatcacctgaggtcaggagttcgagaccagcctggtcaacgtggcaaaaccccatctctactaaaagtacaaaaatcagctgggtgtggtggcacacaactgtaatcccagctacttggaagac

SEQ ID NO: 567016 - DNA, 397 bp, Homo sapiens
gcatagtgcaagtgttgcaggtaatggtatccactagacattacatctggtcagacgtatggcccagtgcaccatgactccagttaggtagaggatctcataggttgcgtcgcacaatgcatgctctggatgatgaaactgcccccagagtccagatattaggcaagtgtcggaaggctcttgtatgagtattcctcaatgctgctatgcaggccgtgtagataggtaccactatagcatatgcagcccgtatcacctaggccttggcatcaatattgtatgcgctttagtcgagtcccgttgtgcgatctagggtatggtctggaattcggttcactcttgtagcagatagtgcgcaattgataaagcacctcacatgtcagatcaggtgtgtgtc

SEQ ID NO: 567017 - DNA, 183 bp, Homo sapiens
taatctgtattcattgcgcactcctgggagctccttcagctttgtctctgatttcctggtctcatttagggcatcctctttcttcttcttggttcttctaggttgctgagcagtgtcttgcgctcttcgttggttttttctatgagagtctttatcgtgtttcacctaaggcgccggtgtacc

SEQ ID NO: 567018 - DNA, 678 bp, Homo sapiens
cgtttgtcttggccattacattcagctccttattacttatgcaaatttctgcagctggcttggatttctcagaaaatgggattttcttttctattgcattgccgggctgcatattttccaaacttttatgctttacttcccttataaactgaatgcctttaacagcacccaagtcacctcttgaatgctttgctgcttagaaatttcttccaccatatactctaaatattctctctcaagttcacagttccacaaatctctatggcaggggcaaaatgccaccagtctctttgctaaaacataacaagagtcatctttgctccagctcccaataagttcctcatctccatctgagaccacctcagcctggatttcactgttcatatcattatcagcattttggtcaaagccattcaacaagtctctatggagtttccaactttcccacattttcctgtcttcttctgagcccttcaaactgttccaacctctgcctgttacctggttccaaagttgcttccacatttttgggtatcttttcagcagcaccccacttgtgctaccaatttactgtattagtttgttttcatgctgctgatgaagacatacctgagactgggcaatttacaagagaaaggttatcggacttacgttccatgtggctggggaggctcatat

SEQ ID NO: 567019 - DNA, 140 bp, Homo sapiens
aacggatcacccgcaacgtcactttttcaggatacaagacatggtgggcctctcagcgacctgggaaagcaagtttagttcatttgagggctctggtcatcaccattttcaatttcatttttcacggtggtttgctgcct

SEQ ID NO: 567020 - DNA, 199 bp, Homo sapiens
gatatccatcagaagcagcggacttaccgccatatgtaccttctctggttggctatatattatggcgtgtgctggtgtgcatcatgtaactggcctgtgtttaaaacctttcctggaacacattggcccaggagccagaatcatcttctttgggtctacaaccatcttaatgaacttcctgtacctgatgggagcaaga

SEQ ID NO: 567021 - DNA, 699 bp, Homo sapiens
  misc_feature (126)..(126): n is a, c, g, or t
  misc_feature (342)..(342): n is a, c, g, or t
  misc_feature (497)..(497): n is a, c, g, or t
cctctgagaacaggtgtatcgaggtaattatctattccacagtgtatcctcctaccatgacctactatccgtggcgcattgaatgcttcgcctatctcttctcaattatctatctcttccccatgnggggatctagttcgtgcatatgaaccccaggaaaagaactttgactatgaagcatacagacagatacttgacgagaatgtacctgtcgtgcgaacagggtgtcgtatatgcgcacgcatgaatgccagaggcaatgtgtacatgccatgcctgtgcctgtgtcccccagaatacctcgtttaccaaaaaacaggcgccctccttttctacaaggtntgtgaccttagtgccgcaagcaagagctgaagaaagggagaatctgaccaagtcggcttttttctgctaacttgtaacaccattggaaaccccacaattggctgtaatttcctattcttgtggcccaatttgtgcaatgcggaacatactaaaanccaaggtttccccaacattaattctgtcctttaattcctttttcccatgtcccctctattcacattggggaaattcaaacaagagctttttaataagaacttgggataagggtagaccttttggggattttttttcggttatggaaccaccttatttgtgaaactaacaaccttgggaattacaattgtccttgggctggta

SEQ ID NO: 567022 - DNA, 122 bp, Homo sapiens
ctcccctgaggacatgacatgccctgttgatgaggaatggaagtggtccttttctaacggcaagtgatccactgcgttttacatttgtcattctctctgtggcaaaaagacatacaagttag

SEQ ID NO: 567023 - DNA, 286 bp, Homo sapiens
ggcacgaggctgcggcgaacatcttctcctcctcctcctcacaggtcagccggctccacctccgcgtcgtcctggatgatccaggaggggagctcgtcctcctccatggaggcgcggcttccgctgggggtggcgggcctcctcgcgccggcggtccaggtccaggcgcatgaacagatcaaactcctcctcgtggccggggcgatcatctgggtggacgggtctctgtcgtcggggcaccgtcgtcttcctccttcatcctggctcctcgtggccggggtaccgg

SEQ ID NO: 567024 - DNA, 216 bp, Homo sapiens
agaggacaaggaggagttactgggaaagttacaagaaaaaaaatacaagtggacagaaataagatgcacataaaggggatgacagcaactatttgaaaagggcaggctggcctgcagagagggagttcagcaaggcaagacttaatggaaagggttggcagtctggattggatttcaagcaagtccaagaaagcaagggacaggaggaactaggga

SEQ ID NO: 567025 - DNA, 885 bp, Homo sapiens
ggctctcgtctatgcccgcttccacacggatcaatgccaagcacgcccgacccaagctggggtgtccttgacaaaggtcctatcgatccatttccaaaggcgtcgctgccagaaatgacaccctaccattaaggctgtcaagcactcctactcactcacccaacctactatttcccattggcatacttacttgacgcttaattctcatcatcgctctcctcccggccttggggactcccctcacccgtggggacctcagtccagtcaaatgctcaacaaccaattgcattgtgcacacatgtcaggcgactacatcagctccgtgacgatggtcttccacgatctcctgacattctcagtcctcctcccggtgttctaaaagcagcaaaaacaagccatcgcaggatgccagggccgaattcctctcccaaagttcttttttaaaaagccccggagccagctccaaaatcaagcattaatttgcacaatctacgacaggcaatgcagactgtaatgcaaggccaagtggagccaaatccgcccgggaaggaggcagagaggagagagagaactgggtcgaatgcgtaagcctgccacgaagcggaaacaagagctctttttcgcgacaggacagccacattcccgagtggggcgcgcgccgactcgagctgcgggcaagaacgaacacgaagtacagggtcccgaacgctcgggcgggcccaagggcagcgtccccggggcttcggtggagctgggggcgggggcgaaagcggccgggcaccgaggcgccgaggagttagacggaccgcggggggacaccgggggcgcgggcggacggctgggccgggcgctcacctcccggtgtggtggacacagaacgtcccc

SEQ ID NO: 567026 - DNA, 686 bp, Homo sapiens
ggtgctatttcaagatagtctaggtttaggcccttgtacattatgcccataacatttctgtacagagtatttctttatattgcacgattcagagaatgttgatatatagtgtcttgtgtgcgtgtgcttaaacttccaatcttactttgtctctgggagattgtgaacgcagcattgatctaggaacggggatgggactagattctaatacatgtatttgggaccagtgggaatgatagttgggaagaaatctagtttgcacaacgacggattgctagatacttttcgctgtcgtagttttatgtcatatttcattgaacattttgacaaatattgatttatcgtaagcctaaaagtggattctttgaaagttgtaaagaactcttggaccaaaagatcgagtgactgtaacatgggccacttggaatgtagaactgttaccgtatgcgttgaaattatgtattacggggtagtgtgagcttttagtggtagaagtcatattaaactcttaagtcaaattaagcagaaccggggttggccagggtagccatagactttctgagtgtcagtagaaatcaaagattggcggacttgaaattagatcaggccaaggtttcgatacacttgtcttaggatattcaggatgcacttcaaaacactgatgtgaagtgtccagattctcagat

SEQ ID NO: 567027 - DNA, 1001 bp, Homo sapiens
  misc_feature (17)..(17): n is a, c, g, or t
  misc_feature (883)..(883): n is a, c, g, or t
  misc_feature (917)..(917): n is a, c, g, or t
  misc_feature (929)..(929): n is a, c, g, or t
  misc_feature (942)..(942): n is a, c, g, or t
  misc_feature (987)..(987): n is a, c, g, or t
gtaccggaactgctatncttgggaagatggcggctgtgtcggtgtatgctccaccagttggaggcttctcttttgataactgccgcaggaatgccgtcttggaagccgattttgcaaagaggggatacaagcttccaaaggtccggaaaactggcacgaccatcgctggggtggtctataaggatggcatagttcttggagcagatacaaagagcaactgaagggatggttgttgctgacaagaactgttcaataaatacacttcatatctcctaatatttattgttgtggtgctgggacagctgcagacgcacagacatgacaacccagctcatttcttccaacctgggagctccactccctctccactggccgtcttcccagagttgtgacagccaatcggatgctgaaggcagatgcttttcaggtatcaaggttacattggtgcagccctagttttagggggagtagatgttactggacctcacctctacagcatctatcctcatggatcaactgataagttgccttatgtcaccatgggttctggctccttggcagcaatggctgtatttgaagataagtttaggccagacatggaggaggaggaagccaagaatctggtgagcgaagccatcgcagctggcatcttcaacgacctgggctccggaagcaacattgacctctgcgtcatcagcaagaacaagctggattttctccgccatacacagtgcccaacaagaaggggaccaggcttggccggtacaggtgtgagaaagggactactgcagtcctcactggagaaaatcactcctctggagattgagggggctggaaagaaacagtccaaacaatggacacttcctgaatggcatcagtgggnggctggccccggttttggaaggtggtgagcattnaggcccagtaanacactcatgtggntagtgtttgccgaatgaaactcaactcaataaaaaacaaaaaccnaattgggcaggtga

SEQ ID NO: 567028 - DNA, 429 bp, Homo sapiens
  misc_feature (33)..(33): n is a, c, g, or t
aacccagtttcccatgtttaccagtttaaggtnccttggctaacttgatagaccaaaatggtatctccattgtttttaggtggcatttctttgattactggtaaagataagcgattttaaaatacattgtattgttatttgtatttattttgtgttaattgtctatttgtgtattttgcccattgtcttttgagatatgagtgttttccttattagaatgtaacattacttcatatattaaggatgttgaccttttgtttgctatatccatcgatattttttttgggtttgacatttatcttttagttttgtttatgattttgctgacttccaaatgtttgcattttaatgcagaaatatctatcaatcttctcctttggaatataatctattgctttttttgtgcatagtaaagccttcaccactctg

SEQ ID NO: 567029 - DNA, 821 bp, Homo sapiens
gaactgcttccttgggaagatggcggctgtgtcggtgtatgctccaccagttggaggcttctcttttgataactgccgcaggaatgccgtcttggaagccgattttgcaaagaggggatacaagcttccaaaggtccggaaaactggcacgaccatcgctggggtggtctataaggatggcatagttcttggagcagatacaaagagcaactgaagggatggttgttgctgacaagaactgttcaataaatacacttcatatctcctaatatttattgttgtggtgctgggacagctgcagacgcacagacatgacaacccagctcatttcttccaacctgggagctccactccctctccactggccgtcttcccagagttgtgacagccaatcggatgctgaaggcagatgcttttcaggtatcaaggttacattggtgcagccctagttttagggggagtagatgttactggacctcacctctacagcatctatcctcatggatcaactgataagttgccttatgtcaccatggtccattgtgaagaggagctctttacagagaatcttttctttattaggcaagctgaagtagtgtcagaagaaggttggggaccatctttgggtattagtggggagtgtccttgtagcagatggggaggttctgggtcttggcagcatgggtggtttgacgataagttaggccgactggggggggggagcagaatttggggggagctgggatgggtttcaagacggggcggagaattgcctggttacaaaaagggttttcgcaaaaggcaaaaaggagtggggggga

SEQ ID NO: 567030 - DNA, 1220 bp, Homo sapiens
ggacatgagtatgttcaggcttcagacgaggctcgcactctagttgtcctccgctgtgcgaagaagaaggtctggttagaccccaattgagaccagatgacaatctgcgcaatagccaactcccgtcagcagatccgagaagcgtcatcacaatgatgggtctcgatcatccgcaaggccttgtgagggtccattcccagtggctcgactgcctggtaataagacactcttgcgtcccagccgcgtaagggctatggcgacatggtgctataggtaacgcggaagtggtacatgccaaagtgctaccgagatgaaccacgaggcaacgtgtccacgacctgcgaagttgacgcgacgtacactggacgtgacgttatggcagacgcagagaattggcatcatgacacgcaatatccctgtgcacactcgtaaccgaaacgaaatgcggaattcagtcccatcgacttgcttatcgacaacgcctaggatacccgtgaaacaagggcttgacaccgggcggaaaaccatggtggctcaccacagcaacacgcgaacacagcacggggcactatacgcgtccaacctatgtgaaacaaacgaaccagcttcccaagcaaacgtgcgtaggaacaggcggcgaaaggaacccaaaaggggagcccccggcgacagacggaacagagcgctcccagttggtggacagtggaaagcctccgcaagtagggccttggcaaggggccaccacggccacaagagaggaattcatataaaagggaaagccccaaagtaggtgaaagacggagcaccaggccaactaacgtgcccggcaccacgggatggtaacacaagaaacggcacagggcgcgcaatgcaccgcacagcgggaccaccagaaacaggacaaaggaggaacaacgagcaagggaaagcttcccaggttgcccaagacgggaaacgccagccatgggcacgtacccccccacacagcgggcacaaagggcgccaacaaagcgcaatgggcaacaccgccaacgagcgagacacacagcacttaaacacagaccagcgcccggcttaccaccgccgcacaaggcagttgacataagggcacacaacagtatgggggagtagaaccaacagatataacgccaactgggcgaaccacacaatcaccattgagtagagtaacaattcaacaggccgaacgactcagtaacagt

SEQ ID NO: 567031 - DNA, 427 bp, Homo sapiens
aagagtatgtctcgatgtcttttcagatctcatgtttcctcctggattgctctctggaaaggtttagttgtttaatacttttgccatgtgcttaaagagacaaccaaattgctgcaacaaagatatgtattcaaggatgttcattgcagtattgcttatgataacaactgaaaatatcctaaataaccatcaatggaagattgagtaaatacattacagaagatgccataagataataccaaactgtccattaaaaagatgagtaggatttgtatatattgagtaggagaattattcataatatatacggtaaaaaatgtaaagaagtgaattagagaaacacatgtataatattacattgtttgtgtaaaaaaatttgagttaatacactctatgcatacaaagtatgctagaatgtattccaaac

SEQ ID NO: 567032 - DNA, 994 bp, Homo sapiens
  misc_feature (876)..(876): n is a, c, g, or t
  misc_feature (910)..(910): n is a, c, g, or t
  misc_feature (922)..(922): n is a, c, g, or t
  misc_feature (935)..(935): n is a, c, g, or t
  misc_feature (980)..(980): n is a, c, g, or t
gaactgcttccttgggaagatggcggctgtgtcggtgtatgctccaccagttggaggcttctcttttgataactgccgcaggaatgccgtcttggaagccgattttgcaaagaggggatacaagcttccaaaggtccggaaaactggcacgaccatcgctggggtggtctataaggatggcatagttcttggagcagatacaaagagcaactgaagggatggttgttgctgacaagaactgttcaataaatacacttcatatctcctaatatttattgttgtggtgctgggacagctgcagacgcacagacatgacaacccagctcatttcttccaacctgggagctccactccctctccactggccgtcttcccagagttgtgacagccaatcggatgctgaaggcagatgcttttcaggtatcaaggttacattggtgcagccctagttttagggggagtagatgttactggacctcacctctacagcatctatcctcatggatcaactgataagttgccttatgtcaccatgggttctggctccttggcagcaatggctgtatttgaagataagtttaggccagacatggaggaggaggaagccaagaatctggtgagcgaagccatcgcagctggcatcttcaacgacctgggctccggaagcaacattgacctctgcgtcatcagcaagaacaagctggattttctccgccatacacagtgcccaacaagaaggggaccaggcttggccggtacaggtgtgagaaagggactactgcagtcctcactggagaaaatcactcctctggagattgagggggctggaaagaaacagtccaaacaatggacacttcctgaatggcatcagtgggnggctggccccggttttggaaggtggtgagcattnaggcccagtaanacactcatgtggntagtgtttgccgaatgaaactcaactcaataaaaaacaaaaaccnaattgggcaggtga

SEQ ID NO: 567033 - DNA, 647 bp, Homo sapiens
gggttgtcgacatgtctccagctttcagctgtccagggtcccatgtcagatttccaggaatttgcgccctaatctttgcttgctaatcgtggttaagagctatcccactagaaactatcttaatcctaatgtcttagtccttgcctgtgagatatgaggtcttacaggagactctcagagctcccagcccgttctcctcactgctaacccttctcacaccctcaagtaggagttagataacgaggtccttgtcattctcacctcttaatggaaaatggaataagaaataatcatatcctttcttcccacccttctcctgttatttaggatttctgacaaagctggcttgagattggtcacttagagcacgactgtctcctctgccttttggttttcagcttacagagacagatcctaatatagtcccagggacatgggtctctgggagaggaaggcaagagggagggagcaaagagattggggtacgtcccctgtagtacactcgttactctctaacttcgctagactttgagttctcctggcagccaagatgttcagttctcttggcccctctctgaccccatatatgggatctggttgtcaagtgtccaggtccaatttggcaaaacacagatacagagagtgta

SEQ ID NO: 567034 - DNA, 426 bp, Homo sapiens
  misc_feature (13)..(13): n is a, c, g, or t
  misc_feature (97)..(97): n is a, c, g, or t
catgagggagctntgtgggttgatggtaatttatgtaccctgacaggggtttggtttacatagctgtattcatttgtcaaaacttatattaaatggntgcaattaatattgatgcatttcattgtatgtaaattttaccctaaaataattttagacaaattgtaaaacctagttaaagacatatatgctgatattttcagggttacctctcttgatgtctgcaacttactttgaaatgcttcaaaaggaaaataggataatggatggaaatagggagagagaaatggatcgatgtgtaaataaaacaaatctatctaaatgttaaagcttaattgtagatgatgaatgtaggagtgttgaatgttaaattctttcaacttttatgttgaaaaatcgtcataataaaatatttgaaaaatgtataaa

SEQ ID NO: 567035 - DNA, 995 bp, Homo sapiens
  misc_feature (10)..(10): n is a, c, g, or t
  misc_feature (16)..(16): n is a, c, g, or t
  misc_feature (877)..(877): n is a, c, g, or t
  misc_feature (911)..(911): n is a, c, g, or t
  misc_feature (923)..(923): n is a, c, g, or t
  misc_feature (936)..(936): n is a, c, g, or t
  misc_feature (981)..(981): n is a, c, g, or t
gaaactgctntcttgngaagatggcggctgtgtcggtgtatgctccaccagttggaggcttctcttttgataactgccgcaggaatgccgtcttggaagccgattttgcaaagaggggatacaagcttccaaaggtccggaaaactggcacgaccatcgctggggtggtctataaggatggcatagttcttggagcagatacaaagagcaactgaagggatggttgttgctgacaagaactgttcaataaatacacttcatatctcctaatatttattgttgtggtgctgggacagctgcagacgcacagacatgacaacccagctcatttcttccaacctgggagctccactccctctccactggccgtcttcccagagttgtgacagccaatcggatgctgaaggcagatgcttttcaggtatcaaggttacattggtgcagccctagttttagggggagtagatgttactggacctcacctctacagcatctatcctcatggatcaactgataagttgccttatgtcaccatgggttctggctccttggcagcaatggctgtatttgaagataagtttaggccagacatggaggaggaggaagccaagaatctggtgagcgaagccatcgcagctggcatcttcaacgacctgggctccggaagcaacattgacctctgcgtcatcagcaagaacaagctggattttctccgccatacacagtgcccaacaagaaggggaccaggcttggccggtacaggtgtgagaaagggactactgcagtcctcactggagaaaatcactcctctggagattgagggggctggaaagaaacagtccaaacaatggacacttcctgaatggcatcagtgggnggctggccccggttttggaaggtggtgagcattnaggcccagtaanacactcatgtggntagtgtttgccgaatgaaactcaactcaataaaaaacaaaaaccnaattgggcaggtga

SEQ ID NO: 567036 - DNA, 852 bp, Homo sapiens
  misc_feature (852)..(852): n is a, c, g, or t
acgtgatctacattcaaaaacagtaaccccataatgcctggaacgttgaagtctctatgaccactttaaagacttttgtacatgtgagtcaaatattagatagcgacacttcgcgaaaacaacacttcatctgtgatcataataactaagtctacattgctccctattgtttgtggaatagactgtactagatggcctagtatagactagagaataacatgcatgccagattttacatcattaatacgagatgacttcgactgggagtaactcagatctatattatatatcattatcatagagcaagtagagcattcatataaaccaatagtcggcaagacttaatccaatcgatcttgctctaaacgtaatacaaaagttatagataatcccaaatcaatcgtggagtcgacgagcatgaattgttgagacttttcaatattggttcgtaattctctatatattttccgcacatacgactattaacgggacaagagtgatctagtcttataagacaacagaccaaagccaaaggctcattggtgggttgcagtggcactagtacacctcagcttgtacgttttggcgcatgcggctagcacggcacatttgcatgaaatacgtacttttgacaacccgtggggaagggcagacgggattgcaatggggaggtctcaatagtactctaggtgactctagtttgacgacattctccaaccattgttggcccaaggtatagggaaccatagaggaatcttgtgcagtcatttgattcaacacaataactaacttacaaaaaaaccaaatccaaaaatatgcacaatgtggttggcccaggaacttctaagtagn

SEQ ID NO: 567037 - DNA, 1011 bp, Homo sapiens
  misc_feature (10)..(10): n is a, c, g, or t
  misc_feature (16)..(16): n is a, c, g, or t
  misc_feature (893)..(893): n is a, c, g, or t
  misc_feature (927)..(927): n is a, c, g, or t
  misc_feature (939)..(939): n is a, c, g, or t
  misc_feature (952)..(952): n is a, c, g, or t
  misc_feature (997)..(997): n is a, c, g, or t
gaaactgctntcttgngaagatggcggctgtgtcggtgtatgctccaccagttggaggcttctcttttgataactgccgcaggaatgccgtcttggaagccgattttgcaaagaggggatacaagcttccaaaggtccggaaaactggcacgaccatcgctggggtggtctataaggatggcatagttcttggagcagatacaaagagcaactgaagggatggttgttgctgacaagaactgttcaataaatacacttcatatctcctaatatttattgttgtggtgctgggacagctgcagacgcacagacatgacaacccagctcatttcttccaacctgggagctccactccctctccactggccgtcttcccagagttgtgacagccaatcggatgctgaaggcagatgcttttcaggtatctagatggtctacaatatgcgtgctagtcgctctagagttacatagaggggagtagatgttactggacctcacctctacagcatctatcctcatggatcaactgataagttgccttatgtcaccatgggttctggctccttggcagcaatggctgtatttgaagataagtttaggccagacatggaggaggaggaagccaagaatctggtgagcgaagccatcgcagctggcatcttcaacgacctgggctccggaagcaacattgacctctgcgtcatcagcaagaacaagctggattttctccgccatacacagtgcccaacaagaaggggaccaggcttggccggtacaggtgtgagaaagggactactgcagtcctcactggagaaaatcactcctctggagattgagggggctggaaagaaacagtccaaacaatggacacttcctgaatggcatcagtgggnggctggccccggttttggaaggtggtgagcattnaggcccagtaanacactcatgtggntagtgtttgccgaatgaaactcaactcaataaaaaacaaaaaccnaattgggcaggtga

SEQ ID NO: 567038 - DNA, 487 bp, Homo sapiens
  misc_feature (487)..(487): n is a, c, g, or t
tggggggggatagtgggtataaggataaggatggttgtgaagtatagtacggatgctactgtgtccaatgatggtaaaagggtagcttacgggtggtcctcgcgattcaggttaaaatgaggaggtctgcgcctaggaggtcaataaagtgatgggcttagggggcgaaatattatgcttggtggttgggactatatggaggagtggggattatggctaggatgaggatgcatagtaatagggcaaggacggcctcctagtttgtcagggacggatccggaaaacttggtgctaccgccgaatacggacacatcatcatcccgggcgcttgactcgtggcggcgacgcgcggcgtccccaacggcgcgtcggcgctacgcgcgtccataaactccgtcccgcgggctccgccctcagcgaaggccccgcggtgcaccaaccacgccggtcccaccgtccctctcaaccgcgaaccacgcgaaccacn

SEQ ID NO: 567039 - DNA, 884 bp, Homo sapiens
  misc_feature (10)..(10): n is a, c, g, or t
  misc_feature (16)..(16): n is a, c, g, or t
  misc_feature (766)..(766): n is a, c, g, or t
  misc_feature (800)..(800): n is a, c, g, or t
  misc_feature (812)..(812): n is a, c, g, or t
  misc_feature (825)..(825): n is a, c, g, or t
  misc_feature (870)..(870): n is a, c, g, or t
gaaactgctntcttgngaagatggcggctgtgtcggtgtatgctccaccagttggaggcttctcttttgataactgccgcaggaatgccgtcttggaagccgattttgcaaagaggggatacaagcttccaaaggtccggaaaactggcacgaccatcgctggggtggtctataaggatggcatagttcttggagcagatacaaagagcaactgaagggatggttgttgctgacaagaactgttcaataaatacacttcatatctcctaatatttattgttgtggtgctgggacagctgcagacgcacagacatgacaacccagctcatttcttccaacctgggagctccactccctctccactggccgtcttcccagagttgtgacagccaatcggatgctgaaggcagatgcttttcaggtatcgttctggctccttggcagcaatggctgtatttgaagataagtttaggccagacatggaggaggaggaagccaagaatctggtgagcgaagccatcgcagctggcatcttcaacgacctgggctccggaagcaacattgacctctgcgtcatcagcaagaacaagctggattttctccgccatacacagtgcccaacaagaaggggaccaggcttggccggtacaggtgtgagaaagggactactgcagtcctcactggagaaaatcactcctctggagattgagggggctggaaagaaacagtccaaacaatggacacttcctgaatggcatcagtgggnggctggccccggttttggaaggtggtgagcattnaggcccagtaanacactcatgtggntagtgtttgccgaatgaaactcaactcaataaaaaacaaaaaccnaattgggcaggtga

SEQ ID NO: 567040 - DNA, 108 bp, Homo sapiens
tcaaagctactccccggtggcaacccaaagttctttgtggttccgtgggggtagtatggttgccccgctcatacttaacatgtgaattgacgcgaacgccaccaccag

SEQ ID NO: 567041 - DNA, 846 bp, Homo sapiens
ccccaagaaaaagtgtacagacagctggcagtggagcctgctgttatttagtcagggcgcctggaagtgtaaacagccactggggtacaggcaccgaagaccaacatccacaggctaacacgccccttcagtgccagcacaaagaagcttcatattttctatttataagcatagaagataaacacacccaagccaagtatttgtgactgttgctctgctacctgctggtagtttatgtatatggaagcatcgtaagtactgtcaggatggggtcttcctcatagtagggcgttaggatgtctgcttgtctttttccattagttaaacattttgtttctcctttggaggaagggaatgaaacatttatggcctcaagatacgtagtacatttaaagcaccccaaatgtctctctttttttttttttttacttcccttgtcttcttccttatataacagttgaagaacagtggttttaatctgattttaaaagatcttttggctatgtaacgtgtaaagggctggttgggtatcccactgaaattgtctctgtgtggcagaccaaagtctgtttatgtcagggggatggggccatgtgcatccttagccatgtgtcacaagaatatgttggcgtagtaacttaagtcatgtaaagttgtaacgataacatacctttaaaatgggaatgcgaaagcctgtgaaaagttcgggggtcttaatgtctctgtatttatgccgtgattggtctgtctgtaactgaagtgtgggtccaagaactccctaactacttggcttctgtatccccaaagattcggcgcgtcggcactcaatctctctccggttaccaa

SEQ ID NO: 567042 - DNA, 330 bp, Homo sapiens
ggatgatgtgctgggtagagagcattgaagcccaatgccacttcccgacatgattttgcccgtaggtatttcttcatcgaaacacctttgtaatatcctttttattgcatatgaaggatgcaatatcctttttattactctgttacaccgggtcctcttttggactcctctggctggaaggaaagcgtttctctcataatttttgctccctgaacctatcacacagctctgagacttccttccttccaaagccagaagattaagggggaatataccccatctatacctgtggtcatcacgtccattcttcacgtttttatctcccttcac

SEQ ID NO: 567043 - DNA, 787 bp, Homo sapiens
ggtgaaaccccgtctctactaaaaatacaaaagttagccgggtgtggtggcacgcgcctgtggtcccagctactcaggaggctgaggcaggagaactgcttgaacctgggaggcggaggttgcagtgagccgagattgcaccactgcactccagcctgggcgacagagcaggactctctctcaaaaaaagcgacaaaaaaacaaaaacaaaaaagcatacacacacacacacacacaaatcagcatcataagggaatgtagccttccaagcagagatgatgctgttcgtatgttaatctcagagacagtatttcaagagagtggcaggtcatgtcctggtaaaattttcacaccattaggattgcagcatcaatgtggaattctgctcatctctcaatcaatccaggacagaattggcagtgtgagggcttggggtatagtggttaatccatatacaaattaggtattgaaatagtctacaggctatataaaagaacatggcttaagaagtgataaaagtgattacagatgtaggatcaagatcagggacaccatcatatacctaacaagagtacatgatactaagggtaatgtcacaacatttggtatttaccaatcttaagcttattaaccatttgtgagtaagacaaaatgttatttacagatgcttgatagtaggacaagtcgatgagggataacaatagtcacgtgttataatattcagtggggagcttaaaagatatataagaagtatgttggtaaatatataatacgtgtaatggtaacg

SEQ ID NO: 567044 - DNA, 242 bp, Homo sapiens
gatgtcccatcaatcagccaagaatactgtgcagggtgggttaaaggcctgcatgggcaggagaggctgaggttacccctggacggtaatatgtgtatgagggggaaatggtggggtcgtctgggccatagaggacattcaaggatgactgagtcgctgtgctcagcacttaatgcgttctggattcccacattcatagggtcctacgtcattccttgtggacattgagtagagtgagggtc

SEQ ID NO: 567045 - DNA, 140 bp, Homo sapiens
ttacattaacggagcgtgagttcacgtttcgcattatctgagatgttagcattagctgacgtggtgtggggactatggtacagctcatgactctgcggtatgtcgacaggactgaaactttgtcctagccccttcactat

SEQ ID NO: 567046 - DNA, 196 bp, Homo sapiens
ataaaccaagccctgtttgggttaaagcccccccttatgcccaagcttttatttgggggttgaataacgggaactattggaatcaccctcccccaatttggggggcccccggccccccggttcttatcccatttttgttttcaaatggccccccccattttcaactggtttataaataaagggaggcagaattgca

SEQ ID NO: 567047 - DNA, 561 bp, Homo sapiens
ggagccggtacccctcacggattactcaacaataagaaaacaaagaacctgatcttaagaacaggacaatgaccttaacggacacctcactaaagaagatataaagatggcgagtatgcatatgaaaaaaagtcacataatcaggaaaatgcaaattataacaataccactacacacctattagaatggccaaaacccattaacagtgacaatatcaaatgctggtgagaatgtgaacagaaactcccattcattactggtgggaatataaaatggtaccatcactttgaaagacagtttagaggtttcttgcaaaactaaaggtattcttaccatatgatccagcaactgtgttccttgctatttacccaaacgaactgaaaacttatgtccacacaaaagacacgcacacagatgtttgatgtttatagcagctttattcacgattgccaaaactagggagcaaccaagatgtccttcagtaagtaaatggacaaataaacccgggtatatccagataatagaatagtcaagtgcaaaagaaaaaaaaaagctgtcaaa

SEQ ID NO: 567048 - DNA, 653 bp, Homo sapiens
cctgggtaggcatgagcaatgcaatataggggggctcactccccaaatgaccgctcacttggccatactctgtactctaagttgaacccgacaggagccgtgagctgggtgctcaggaagtctcatgtacaaactatgcttggaatgtctgtataggaacatgcatttatattgtaggcaagaaagttgtctcctaaggctaaccctgatggccccaggatcaggccagtatttaggcgaagaactgctatagtgcattgtctatataacagaggccctacaagacctttctccaagctctaaggtcagctgcatagagagagactcggtgcgctggtgcagtcgttatatttttcatggtccaaagtgtgcttcgcggtgaatctcgtgaggtgtttgtacgaaggctactaggagtcaagtgtcaccccttgactgtccacagcttcaagccacaatctattaaccaatcatccctcatttggctcacagctctcaatggattcaattctatcctatggcttgtgcctcatcagtgttaatgacagttacaaaaggggctgggtgcggtggctcatacctgtaatcccagcacttggggtggattacctgagctcaggtgtccgagaccagcctgagcaagcaggtgaaac

SEQ ID NO: 567049 - DNA, 156 bp, Homo sapiens
atgggactcattagcaggcaggactctagcgtggtcgctttgcgcttcagtttccttgtggttgccctgggcaaagtcctcagatacagcttaagttgcaaccgtgcaaaaacacatccatatagacaaccatctaagccaccaaccaatgtcatg

SEQ ID NO: 567050 - DNA, 316 bp, Homo sapiens
tgtgctcattcccacatctcgattcctccttccaacatctcatgactcttccaacatctcatcgcctatccaccatctcatgtctccttccaacatctcatctgctccttccaacatctcatccccccttccaacatctcatcactccattccaacatctacatcgacaaccaccatctcatgtctccattccaccctctcattgccccctctccaacatctcatggacaacattccaacatcacatcaaaccttccaacatctcatacacacctaccaccatctcatgccccataccaaacatatcattgaacca

SEQ ID NO: 567051 - DNA, 921 bp, Homo sapiens
ctatacgggctaccggacacctcccatgaggcgagggtactagatatgatctggccgtcctggaactccggacctcgtacaggagaagcatctgagagcacgtaccgtgtagtgtctatgccggaccgtggctgcagcccgagtcgagatgtatcttagagtagagggacgcatagtgctgacccagcgattgctcccgggagtgggccggtgtcctttggtacctagactcgttacgtctccagtgagggtagagtagcacgctagtacatacgtcggatggcgtttgtgcccatgactggtctgccctagtgtttggggcccccgagtattggcgggtttggctgccataaacgtgttcaacgcgtgttgtgaccgtcgtctactgtctgctcgtctctctaggtctttgcaatccggtcaagttcttgttaataacgtaggagggcgtctcgcgcacgtaggcgacaccaagtgtcttgcacactaggtcgtaacctcgtcacacgtgtaggctagaggcgatagggtacgtcggcaccactttgcgtttgcctctcccggtagggagcacatcacactctattccttgctccctgtagaagccttaagccacgcgtagtcgtgtcgtctagcctttaatggggagcgcctactctagttgcgatcaacctaggtagatttctttccaattagtttcttttacccccgcgggaaccaataattcacgatatgagctaataggtgctctcaccatcttttggcgtccttggactcacctgtcccttaaatccaataagccttgtctcattatctttcataccgtattcttcgtctccaagtcccttaggctgatttggcattcatttattacgtacttagtaaggatcggaaaacttaaatcattcatctttctttcga

SEQ ID NO: 567052 - DNA, 236 bp, Homo sapiens
taacgggaagagcgaagaccgggcggagggccagagcgggagtcagtggatgtgctgcggggctcactgcacccggcagcctccccggacaggtgatcttctagcctcagtctcccgagtagccgggacgcaggcacatgccatcacacccagctaatcggtgtattgttagtagagacagggtttcactgcatgggccaggctagtcttgaactcctgacctcatgatccacctg

SEQ ID NO: 567053 - DNA, 486 bp, Homo sapiens
aaacaaacaaacaaaaaaaaaaacttaggaatatacctaaccagggagtcaaaaacctccacaaggaaaactacaaaacactgctgaaagaaatcatagacgacatgaacaaatggaaacacatcccatgctcatgatgggtacaatcaatattgtgaaaatgaccatactgccaaaagcaatctacaaattcaatgcaatccccatcaaaataccactatcattcttcacagaattagaaaaaacacttctaaaattcatatggaaccaaaaaagagcccgcatagcctaagcaagactaagcaaaaagaacaaatctggaggcatcacactacctgatttcaaactatgctataaggccatagtcaccaaaacagcatggtactggtacaaatataggcacatagaccaatggaatagaatagagaacccagaaatgaacccaaatacagccaactgatcttcgaccaaacaaacaaaaaaaaa

SEQ ID NO: 567054 - DNA, 341 bp, Homo sapiens
tggtggtgctgggcagtatgtctttttcattttcttcaaaaaacagtgtcttttgaagaacaaaaatattaaatttgatgaaattcatcagttcatcacatttttaaaaaatggttcgttttttatgtcctatctaagaaatctttgcctaatccaagatcccaaagattttctatgatttcttctatagttttacagttaagttttaagttttatagttttagttcttatatttatgtctattatccgttttgcattaatatgtgtatatggcatgaagagtcacaatttatttaattggtttgggcactggcgaggctaggacactggcgaggctagga

SEQ ID NO: 567055 - DNA, 118 bp, Homo sapiens
aggttttaaatcatttacgcgttaaggacaatccatctatagcactggttattagaaaaagacaaaaagaaagctaccaggcagtgactcatgcctgtaactccaggtacatttggga

SEQ ID NO: 567056 - DNA, 123 bp, Homo sapiens
  misc_feature (60)..(60): n is a, c, g, or t
ctttaaacatatattcacattccaagtcagtcagtgtgcccaggcaagcaggtccagctngttgtggggcaatctctcagcagtctgcacgtgccaggccatgccaagcttggccactggcct

SEQ ID NO: 567057 - DNA, 178 bp, Homo sapiens
gcggagctagcttagacacgaagtggagtttacagcttaaacctataaagcaaggatgatagtagccctacccaaaagctagaccacctttgtatttacatctgtttgtttttgtttgtttaatctcagtcagagtctcactctgtcacccaggctggactgcagtggcacgatctca

SEQ ID NO: 567058 - DNA, 5801 bp, Homo sapiens
caggcaaggcttatctggtgaaaacttttttgctatgctcagagggtaccgagtagaaaattatgacccaaaagggaccattgctttgtggtcataattttctactcggtaccctctgagcatagcaaattatgaccacaaagcaatggtcccttttgggttccctgaatttttccgctgtgaccctgcaatctctccgagccttcatgcagcagcacagatttctaggggagaatttgtccgcatctcaggattagattatgtggacagtgccctcctgatggggagagacagggacaagcctttcaaacggaggttgaaatcagagtcggtggaaacatctctcttccgaaagcttcgaactgttaaaagtgagcacgaaactttcaagttcacgtctgagctggaggagagccgactggagaggggcattcgcccttggaattgtcagcgatgttttgcacattatgatgtccagagcattttgtttaatatcaacgaagccatggctacgagggctaatgtggggaaaaggaaaaacataaccactggggcatctgcagcatcccagactcagatgcctacgggccagacaggcaactgtgagtcccctttagggagcaaggaggacctcaactccaaagagaacctggatgccgatgagggtgatgggaaaagtaacgacctcgtccttagttgtccttactttagaaatgagactggaggggaaggcgacaggcggattgcgctctctcgagccaactcatcctctttcagttctggggaaagctgctctttcgaatcgtcactcagctctcactgcacaaatgcaggtgtctccgtcttggaagtgcccagagaaaaccagcctattcacagggagaaagtgaagcgctacatcatagaacacattgaccttggggcctattattaccgcaaattcttctatgggaaagagcaccaaaactactttggaatagatgaaaaccttggtccagtagcagtcagcatccggagagagaaggtggaagatgccaaggagaaagaaggatcccagttcaactacagggtggctttcaggacaagtgagcttacaacactgagaggagcaattttagaagatgctataccctctactgctaggcatggtaccgcacgaggactacctctcaaagaagttttggaatacgtcattccagagctgagcattcagtgtttgcgacaggcttccaactcacccaaggtctcagagcagctgctcaagcttgatgaacaagggctgagctttcagcacaagatcgggatcctttattgcaaagcaggccagagcacagaggaagagatgtataacaatgagacggcgggaccagcttttgaagaattccttgatcttctgggccagagagtccgactgaaaggatttagtaaatatcgagctcagctagacaataagactgattccacgggcacgcactctctctataccacatacaaagactacgaactcatgttccacgtgtcaaccctgcttccctacatgcccaacaacagacaacagctactgaggaaaaggcacataggaaatgacatcgtcaccatcgtcttccaggagcctggggcacttccttttactccaaaaagcatccggtctcactttcagcatgtctttgtcatagtcaaagtgcataatccatgtaccgaaaatgtgtgttatagtgttggagtttccagatcaaaagatgtgccaccatttggcccaccgattcccaaaggtgtaacttttccaaagtcagccgtgttccgggacttccttttagccaaagtaatcaatgcagaaaatgcagcccataaatcagaaaagtttcgagcaatggccactcgaacgaggcaggagtacttgaaagatctggcggagaactttgtcacaaccgccaccgtggatacctctgtgaagttcagcttcattacgctgggtgcgaagaaaaaggagaaggtaaagccaaggaaggatgcccacttgtttagcattggggccatcatgtggcacgtgatagcccgggacttcggccagtctgctgacattgaatgtcttctcgggatctccaatgagttcatcatgttgattgaaaaggattccaagaatgttgtattcaactgttcctgcagggatgtgattgggtggacatctggattagtgagtatcaaagtgttttacgaaagaggagaatgtgtcctcctgtcctcggtagacaactgtgctgaagacatcagggaaattgttcagcgattagtaatagtgacgagaggctgcgagactgtggaaatgaccctgaggaggaacgggctgggccagcttggcttccatgtgaattttgaaggaattgtcgcagatgtggaaccttttggctttgcctggaaggctggccttcgccaagggagccgcctcgtggagatctgcaaagtagccgtggccactctgacccacgagcagatgatcgacctgctccgtacttctgtgactgtgaaggtggtcatcatccagccccatgatgacggctcgccccgaagagggtgttcagagctctgccggatccctatggtggaatataaactcgacagcgagggcaccccctgcgagtataaaacccccttcaggaggaacactacgtggcaccgggtgcccactcctgccctgcagcccctctctagagcttcccccatccccggcacgcccgaccggctgccgtgccaacagctgctccagcaggcccaggctgccattcctcgaagcacctccttcgaccggaagctgcccgatggcacgagaagctcacccagcaaccagtcatcctccagcgaccctggacccggcgggagcggaccctggagaccacaagtgggctacgacgggtgccagtcccctctactgctcgaacaccagggctcaggccctttggaatgtgacggagccagggagagggaagacaccatggaagcaagcaggcacccggaaaccaaatggcatggcccaccttccaaagtcctgggttcctataaagaaagagctctgcagaaagatggaagttgcaaagattcccccaataagctttctcacattggggataaaagttgctccagtcactccagcagcaacacgctctccagcaacacctccagcaacagtgacgacaagcactttgggtctggcgacctgatggaccccgaattactggggctgacctacatcaaaggggcctccaccgacagtggcatcgacacggccccctgcatgcctgccaccatcctcggccctgtgcacctggcaggcagcaggtccctgatccacagccgggccgagcagtgggctgatgctgccgacgtctctgggcctgacgacgagccagccaagttatattctgtgcatggctacgcgtccgccatctccgccggcagtgctgcggaaggcagcatgggcgatctcagtgagatatcctctcattccagtggttctcaccattcaggaagcccttcagctcactgttcaaaaagtagtgggtctctggattcatccaaagtctacatcgtgtctcacagcagcggacaacaggttcccgggtccatgtccaagccctaccacagacaaggggcagtgaacaaatatgtcatcggctggaagaaatcggagggcagcccaccgcccgaggagcctgaagtgactgaatgtcccgggatgtatagtgagatggatgtcatgtccacagcaactcagcatcagacagtggtgggagatgctgttgcagagactcaacatgttctgtctaaagaagattttctgaaattgatgcttcctgacagccccttagtggaggaggggcgaagaaagttttcgttctatgggaacctgtctccaaggaggtcgctttaccgcacgctgtctgacgagagcatctgcagcaacaggagggggtcctcctttggcagttcccggagttccgtgcttgaccaggccctgcccaacgacattctgttcagcaccaccccaccctaccacagcacgctgcctccgcgggcccaccccgcacccagcatggggagcctgagaaatgagttctggttctccgatgggtccttatcagataagtccaagtgcgcagatcctggcctgatgcccctcccggacacagccacagggttagattggacccacctcgtggatgctgcacgggcatttgaaggtcttgactcagatgaagaactggggctgctctgtcaccacacgtcctatctagaccagagggtggcatccttctgcaccctgacagatatgcagcatgggcaggacctggaaggggcccaagagctgcccttatgtgtagatccaggcagtggcaaagagttcatggacacaactggggagcgttctccatcaccactgaccgggaaagtcaatcagctggaattaattcttcgacaactccagaccgaccttcggaaggaaaaacaagacaaggccgttctccaagcagaagtgcagcacctgagacaggacaacatgagactgcaggaggagtcccagaccgcgacagctcagctgcggaaattcacagaatggtttttcaccaccatcgacaaaaaatcttagccaatccgcacctcatcaagggaccactgggaaatgccccttgtccctttgaagtcacaaacatgtggtttttctgtgtgctttcaaccaatcgtagatgtttttgctgttccattctgtgtagcaccattcaccacagcaggatagggagcctcgactctttctcggtaaccacggcagagagcagcgccgatgtgaagatgaatgaatgtaactcctggtgtgaagatgaatgtaaaccctggcgacagttgagacctttttcttttagactctgctaaaacagtgctctggcttgggcttacctcaagagggaagatagttgagttttatttcctgtatatcaggtgacctggtagagatgtaaagcaatttaccatagtttgggctttagtattgtaaaataaacatgagaacaaataatcagacatatactttaatgttaaaggtgctctatttttttggatgtacagtagttttatttccacagccacattaccatagcaataagaaaggaggcatagtacatagttggaaaagctttgtggggggattaaaaaaaaaaaaaagcactgttgtgtttaacactagttcagatgcagttaccttagagacttatttatttgcaggaacaaatggtgcctgaatattaacagtgttctgattaaaaacaaaaaaaagatacatatgccttgtaaatggctcaccgagtggtcagtagtcacttcaactcttagttcacttttgtatagttgctctgctggaaagaaatgagagtgaatctgcttactcactagaacttccctgtgtgctgtgagccagcggaaccacttgtacaatgccagatttgtttatctttgtacagaagctttgatgaagtgtcttgtatttaacacccttatttaagcttatttaaccttaaattgttaattttataaaatttggtttggcctgcactacgatgagggatggaggtagctgcaggctcagaagagactgagcttgcacagatcagaccgagaagcagggtgagagattctaacgactggatgctgctagtaacacattgtttgtattgctttaccatttttaactgttagatttgagatgaacatacattttgcttttttaataaatgtttaaaagaagtccacataag

SEQ ID NO: 567059 - DNA, 531 bp, Homo sapiens
tcggacctgcttactgggcgtatggtggagtggctgtgcctctgtggctgccagtggagtggtctgtgcctccgtggccgtcagtcgagttgtctgtgcctgtcgctatatctgaatgtccatgtgtgtgtgcccatctgtgcatgtctgcgtctgtgtgtgcctgttggtgtatcactgtgtgtccgtgcgtgagtgtgccatctgtgcatgtctgtctctgtgcgcgtgctgtcactgtatctgtgtccgtgtgtgtgtgtgtgcctgtcttggtgtatctgtgtgtccatgtgtgtacctgtcagtgtatctgtgtcctgcatgtgtccgtgtgtgcatgtcttgtggcgtgtgcttgcatgtgtgcctttgtgtctgcatttctgtgcatctggatgggtatatgtgtgtgtgcctgtgtctgtgtctgtgcgtccgtgggtctgcctgtgcgtgtctctctgcgggtccacacagacacgagggcatctccaaacaggtggacaaggctgggcacacattatggag

SEQ ID NO: 567060 - DNA, 182 bp, Homo sapiens
tagcaactgggcgatgccattctgcatgtattcgccggtacggaacacaccgaagtagttctgcatgcagctttgcagctcgcgacgcagggttgctacatcttcgccatcagtgcgctcgttcagagcgttcagacgcgccagggcagcttcgatgttggcgtcggagaacgacccaccga

SEQ ID NO: 567061 - DNA, 713 bp, Homo sapiens
  misc_feature (38)..(38): n is a, c, g, or t
  misc_feature (70)..(70): n is a, c, g, or t
  misc_feature (78)..(79): n is a, c, g, or t
  misc_feature (84)..(84): n is a, c, g, or t
  misc_feature (174)..(174): n is a, c, g, or t
  misc_feature (182)..(182): n is a, c, g, or t
  misc_feature (191)..(191): n is a, c, g, or t
  misc_feature (204)..(204): n is a, c, g, or t
  misc_feature (213)..(213): n is a, c, g, or t
  misc_feature (219)..(219): n is a, c, g, or t
  misc_feature (233)..(233): n is a, c, g, or t
  misc_feature (240)..(240): n is a, c, g, or t
  misc_feature (244)..(244): n is a, c, g, or t
  misc_feature (254)..(254): n is a, c, g, or t
  misc_feature (272)..(272): n is a, c, g, or t
  misc_feature (284)..(284): n is a, c, g, or t
  misc_feature (375)..(375): n is a, c, g, or t
  misc_feature (386)..(386): n is a, c, g, or t
  misc_feature (500)..(500): n is a, c, g, or t
  misc_feature (579)..(579): n is a, c, g, or t
  misc_feature (600)..(600): n is a, c, g, or t
  misc_feature (645)..(645): n is a, c, g, or t
  misc_feature (674)..(674): n is a, c, g, or t
tgttgtttaggttttgttgttttaggtggttgctgggntgtggttgttttttatttgttggtggttgttngggttttnnaggtngttgttggtggggtttagcttaggttgggtgtggttggttaacagggttggggggggggtggtggaggtggtgttatttatattggagtnggggaacnagaggactnggaggacagaggnaggttgggncagganctgggacaggtttnggacggncggnttttttaggntgttgttgcttatttgtnggttcagggganatctgttttggggtaggactgagttgaagtgggaggagcaggtgggtgtgaagctgtagggttttacccatagtgatttcagctggtagcnaggttctaggngggtctcagataggagtcgggcacctcatcccccagctcgttgccggccaggctgagctccttcaggctctccttggccctgaggacacggcacagatccccgcagcccttggnagtgatgccacactcccagatccacagggtcctgagcctggagctggggtggagagccctggggacagctccgccatgnccacatcacccagcttgttgntgcccaggggcagctcccgcagcgagggcttggagggcacaatgncgcacaggtcccgggagttgtttgatgtnacaacggagctctccagcttgagcgccttcagctgggag

SEQ ID NO: 567062 - DNA, 409 bp, Homo sapiens
aacactgaagctgccatgcacactatgggattacgtgcatgtaactcaaaagaagtgcacgggctataagcagcttttaccgttgcgtgtttcctcatgagtcatcgtatgcgtattaactctactaattaaaaaaggtaaatcaaaaagaaataacatgtaaatattagatatgtgctctcaatatattaggagccattaaaaaaatagggaagccaggcgtggtagcacatgactgtaatcccatcactttaggaggccaagacaagaagaaatcacttgaggtcaggagtacccaaagtgctgggattataggcatgaccacaaatgtgatgggccagaaaacataatccataatggtgacagcacaactgcttatagaaaagtccaggaacttttctatgtaggc

SEQ ID NO: 567063 - DNA, 147 bp, Homo sapiens
taagagagcatggagtttgctttagatatagctgggataccttgcatagtcaagccaatggctctgataaaattggcaggtataagtatgtcccatgcaatatatgggatgtagttacactaaatttttggtttgtttgtcagtttt

SEQ ID NO: 567064 - DNA, 235 bp, Homo sapiens
ggctcactctggtgtgtgtacactaggggcacacagatcgttccagtgctcgtgtttgtgatcgtgggattgggactgaagggccagttgacacaacagtggctataagatgagatgattcttcacgttcttactcactccggtgtatgcattcttctggtgattctgatagttagagactacaggcgatcagaatccgtccgaggagatacctgccagctggatatgagagctt

SEQ ID NO: 567065 - DNA, 148 bp, Homo sapiens
acacatggaggaagaacctgctcttcagaaaacctgaaacacacagaagagatttatgactgtcacttgggaaagaatgctcaccattgacggaaacaccgtcaatgctcaccagatggaggacacgataaccagtaaacagagcatg

SEQ ID NO: 567066 - DNA, 113 bp, Homo sapiens
tctagaggatcccgaatgggtgatgcggttgagctgtggaggcgacatcacacggctggcagggtgctggatgagctgaccctggcaggaccgactggagatgcagatcgaag

SEQ ID NO: 567067 - DNA, 451 bp, Homo sapiens
cctgctcgtgggtagatagtatgaacaccccatcttagccatgttatatgcttcatgttttaaaacctctagacttgtgatatcaagtcgccacatgtggctatttaaatttaaattaacttaaaataaataaaaatttaaaattcagttcctcagttgcactagccacatttcaagtgctcagtagtcacatgttgctgctcgttaccatattggaaaacacagacatagtaaatttccatcagtgcagaaagtcctttcttcgaaacagtcctgctctgtcacggaggctgaagtgcagtggcacgatctctttacactacaacctctgcctcacaggctcaagcaattctcatccctcagcttcccgagtaaataggactacaggtgtgtgccactgtgcccagctaattttcgtatgtttagtagagatgaggtttcgtcacattgg

SEQ ID NO: 567068 - DNA, 250 bp, Homo sapiens
tagaggatcccgacgtaatatgtaaccaaactttgtctgtgtcaaaagaatacaactgaagatgtcattatgaaacaaaccatggtgagaattttgactagtttacagaaaagatgcatgatgaaaaactcaatgaacttagaaaaggactaaactttctacagcattaatcatcgaatacaaataaaataagtgatgctgctgtgaaatcttactaagagctaatagaaaggctaggaccaaacctatt

SEQ ID NO: 567069 - DNA, 303 bp, Homo sapiens
  misc_feature (99)..(100): n is a, c, g, or t
  misc_feature (102)..(102): n is a, c, g, or t
  misc_feature (199)..(199): n is a, c, g, or t
  misc_feature (201)..(201): n is a, c, g, or t
ggaagtggtggtactggcgtccccaaccacggccttgaagccgtcgtctgacgcgatgatgagcacctcgaagggctgcccgcgctggaaaggaacgcnncncgccgcgctcctcgcggccccatgagccttgctccttgctgttgaagaccacctccgaacggtgtccaggccgggggttgaaattgcaggtgcggcnantgagccctgctcctcccctgcacagcaggtttacatggaacctgctggcattgggaggaaccaagccgcgaattctcagcacctgtgccatggcggatcgcc

SEQ ID NO: 567070 - DNA, 307 bp, Homo sapiens
attagtgaagaagctatctctatactcctagtgagagctcgtaggtcatgcactgaggggagatgtgggaattctgagacacagatggacaggaaagacactgtagaagtaaaatagatcagaatttaccatgctgctctatgtgggcccaaaggagaaattaaaaaatgaaatgtaaattgcagtcgaggtattaaatgcctagaaaactggcaagctaatggtaccattacatggcaatggacagagagaaacgtatataagctgtagacatctggaaaatacaagtaagttaaattctttccat

SEQ ID NO: 567071 - DNA, 616 bp, Homo sapiens
  misc_feature (24)..(24): n is a, c, g, or t
  misc_feature (35)..(35): n is a, c, g, or t
cttaacggtctgttaccgggtcancccattgcttnatgctcgccatgacaatgcgaagcgtttctttccaagttgtgagggcctgtgcagacaacaggttggactgtgtccgcgagtcgatatgtgtttttgcggcgtttataagagaaatttggctggcgttcacatctagtccttttggtgtgttgagacattcaaagtgactttatacgctaaatttcaaaaaaaaagctaagcagcaggctggtcgaatgcggcgtcggctctggcaccctaccccgtcaattcaagtgggagcgcttggcgccgcctagcggttgacggtcttacgctcgtatgatcttgcgaggatcgcactactgatcggtacatgtggagagaagctgcatgaggtagtaaaagggtgttactagccaatcgcacccgagttcgtgccagtggtggtacgaatgtggtacggatttttacttgttaccccagaagccttttattgcgcggatcaacgagctagttattccaatccatcatcggagcaacagagaaggcgacggagaaagcgatggcggttggttgctataggtgaggacattaggatcttgaatggatagggcgaatg

SEQ ID NO: 567072 - DNA, 381 bp, Homo sapiens
ctgttcttcctgagaactactattggcatcacagaatgattgactctctgtccctaaaagcggatggattcttctctcggtgttgataatgcagtggcttgtttgggcagtgctttctgagactttcccaccaagagtcacccctggatgaggcaccttcatgtccactgacgggtccccctgcagcattgcccactcatactggacgatggcgtgttcatctgtgctctcgcggccgtctagaaccaccccgtctgtgggcagatgcagaaccacatcctgcccagccttgctaagtggaggcgcatccttttcctgccggggcgaggcgcgcgcggtggccagtggcgcggtccggcgcgcggctgaggctgtagctgc

SEQ ID NO: 567073 - DNA, 319 bp, Homo sapiens
  misc_feature (33)..(33): n is a, c, g, or t
aaagtaaaagtgaattaacttaagaatacattntatcaccagggtcagtggctcatgcctataatctcagcactttgggactctgaggcaggaggatcgcttgagcctaagagttcaagaccaacctggccaacatggggagatctcatctctacaaaaaatacaaacattagccaggcatggtggcatgtgcctgtggtcccagctacttgggaggctgaggtaggaggattgcttgagcccgggaggtccaggctgctttgagccatgatcatgtcactgcattccagcatgggtgacagagtgagactccatctca

SEQ ID NO: 567074 - DNA, 224 bp, Homo sapiens
  misc_feature (69)..(69): n is a, c, g, or t
  misc_feature (97)..(97): n is a, c, g, or t
  misc_feature (121)..(122): n is a, c, g, or t
ttgtgttaccgtgacctataggttatgctacaccacagccagagcatgttggatccgagccgtgtctgnagctatataccacagctcacggaacgcnggatcgttaacccactgagcgagnncagggattgaatctgcatctcatggctcctagtcggattcatttccgatgctccacgacaggaactccctctttaagggtttatggtaacaccaacagtacg

SEQ ID NO: 567075 - DNA, 191 bp, Homo sapiens
  misc_feature (178)..(179): n is a, c, g, or t
cagaccatcagatcaaagaaggaagagctgttttgggtgttttgttttttttgttttaaaagcattttgctttttcttggaatgtaattttcttatggcatgttaattggtgcacttcgtgtaacctgtttggtgagcaccctccaattggaataagttttaggaacatgccataggnnttttcctttcca

SEQ ID NO: 567076 - DNA, 853 bp, Homo sapiens
  misc_feature (853)..(853): n is a, c, g, or t
agcaaataagcttcatttgggggcattattttgcggcattttatcacagtaatattcatctcttcaatatatagaaattaagctctagaaaatgttagtctgttagtgtattctttttctttctttctttcttttttttttgagatggagtctccctctgtcacccagtctggagtgcagtggcgcaatctcggctcactgcaagctccacctcccaggttcacgccattctcctgcctcagcctcctgagtatctgggactgcaggcgcctgccaccatgcccggataatttggttttgtatttttagtaaagacgggtttcaccgtgttagcaaggatggtcttgatctcctgacctcgtgatcatcctgccttggcctcccaaagtgctgggattacagtcgtgagccaccatgcctgacctgttagtgtattctttaaactcagtgaccacaagaagatgatgttgaccttgtacccgttttccatcactaaggataacagcagtagcctccttcagagaagagctgagctggcatgataagagaagttgggaggtgatgtgaatgataaactcttactccattttacttaaagcaagtggttttaattaaacacagtttatacctttatcgctgcacttggcaagtttggggaagttaaagacctgtggtactgctactccggacagttatcttgtagaaaacagccttaagtcttttcccaacaaaatatccttttaaaattgaagtgggtcccaattccaatttaaattccctcttaaatgaactggtgcaatttccactcttatgtgggtcgatccgggagtcaaaaaatccttagaattgccgn

SEQ ID NO: 567077 - DNA, 912 bp, Homo sapiens
gagagaaggcccggaggggttctgcggtctgtagtggcgctgcttggagcccgtggcgaatgtaagctgctggttttgcggctggaaagagcggcgagagggtcggcatttttctgtcgggatccccgtcgaagcgatgagtgctggcataagagtctcacccgtcatggtggtgaacgcgttcatggcctccctcgagtactgacgaatctggtgatctacgcaatttggcgaggcagccagactcgggtacatgaagcagagaaaacaaagagttcttgagacttatgggtgcggaaagaacgaacatactggccgtcttgtaataggaagatcacaaatcaaatctcattccgaaccggggaagaagaccacgacacattacatgaagaactggaggtctcaaatatcaggcaaagtatggaacagtaaattcatcaggaagatatcggcgacattgtggacttggcttcagtgaggtagaagaccatgatggagaaggtgatgtgggctggacactgactgatgatgaccgatgatgattcacctgatcctgaaagtccagatgattccttgaaagcgattcagagtcagagaagaagaatctgtggaagaaactccaaggctggtgaagcaccctgaataagttggggatcacaaacaaaaaagatgcacacgcattttacatgctgttggtcacaccacggggtctaaccccaagctagcttggttaaaggtaccttttgttcactcccggggcgatcgtttgacgcagacctttgttatattaaaagcctttatatacaaagtgcccacgaacggacccttggcaatacacttgacgaggtgaacacaagagacgtctattaaccaacacgagcatgtggttacacacaagggggcaactatcag

SEQ ID NO: 567078 - DNA, 1033 bp, Homo sapiens
gtagctgaggtggaggcaggctgcggcagacggcgacagtggcggcggctgccatggctagggctttgctatggatccctgtctgccttgagtgatcccgggcatgacagccagagagcacagcggctcagctcctggagagtgagggttgaagaaagcggagggcagccggctgcgccctggtggctcccattaggtcggttcctgcagcggtgcccggacagccttggtgaaggccctgtcccgtgcagagatcatgtattgccgtccagatggctgctgcccgtcctcctcatccccaagctccctcagaaccacagacctgatggattcaagacattcacatgttcatgggcttctacctgctcagcttcctcctggaacggacgccttgcacaatattgtgccttggttttacctggcagacacctgtatccttaatctgctatagctgcatgggagaaactgataaacctgtaccactgctccgattccccgcttccagaatcggcagcatgatcccggcgtagtgggcacctaacggactgccctgttagctttccaaggaagcagaagacgggaggggaggcattgacataggtcaataaagcatggaagatttcaaaatcacgagagactcgggggtgttaattactgacggaacctaaaaggaactgtgatgataaatcattacaaggtgaataaatggaattgaacgaggacataaaaaggaaaaggacaaataacaggaagaggacacatgaagaagacgagacgaaggccacaaaaaagaacaggggaggcaaagaacaaacagaagactaatcaggtaagagacaggaacaccacgaaaaagcaccaaaaacggacaaataaaagaaacaggcacacagccccacagaggaacaaaaacaaaaaaaaccaaaacaaaagagaacaaaacaacaaaaaggaaaggaacacaaaaaaaaaagagaaaaagaagaagacagcacgcgagaaaggcaaacacaagcgcaaaaaaaaaaaacaa

SEQ ID NO: 567079 - DNA, 295 bp, Homo sapiens
ggggcccccacccccgcgggggggggggttttttttaacggccccccccccctttttaaggagccttttttagggggggggggggggtctttccgcccccctccgggggtgaggggggttttttaaacccaaagggggcccccccccccccaaggtttttttatttttgggggggggttccccccggggttttttcccccctttttttcttcgggggtttattaaaaataatcggggggggggttttttttttgggggggccccccaaaaaaagggggagggggttcccccccca

SEQ ID NO: 567080 - DNA, 914 bp, Homo sapiens
  misc_feature (681)..(681): n is a, c, g, or t
gcgagaccgcaccaaggaagctcctgcccgtcctttgagactgaagccagatactcaccgttgtttatcatgccactcaaggcaatgttgaacagtgttcactagaccacatcctgaagtaagagtccgaacgtacccagcttccggcggtcgaagacacttgcgacatcctgggaacttagctccagacatatcctcgggatgcattcgactccgcgaggtagaaccaaggcttggaacactatgcctatcatgaacgctttccgttgtagcattgtggtctgctcatggactactgattagaagtaacaagaccaccttgtgttcattgtgcgagtgtataagggactctacaaggctgccatattaaactggctgtgaggatacttgtatgtgcattgatgtggccagccgggttccagcgaatcccttcgccatttcgtgggaacttagaataagggccagaacgaataaggacaaagcgcccattcttggttcctcctgggaagcatttcggggggccttctcttgtttgacctttttaaacggactttgcctttcttatagggggaatccggttattggccccaacaccctttaggagattttaaggagcgcaattcgaactcccttattaaactgtcggtaggattcccgcaattcggtcgtcgcgctgcaaanttccagtccgcagattaattcaattacttgcatacggtatggtatataggtccctttggtgtacattcgcccattttctttgacaaaccaaagacttttaattacccaaaggagcccctcggaagtttggttaatacccaagttgcgcagagtgtaccagaggacaggttgatgtgatacagaagacaaattgggaacgttgggtctctttaggaaactgattggcggttact

SEQ ID NO: 567081 - DNA, 109 bp, Homo sapiens
agctccgggtcccccactaagtagctcctttaaagagacggggaaaggtgttaagcaaatctagtttggtataataaaataagaaaatagcaataaacttctttgcagc

SEQ ID NO: 567082 - DNA, 181 bp, Homo sapiens
ggatgaagctctcgtatctcccagaagctgcccaaaccctaaaatccccgagaggcacctgtcccaatccacatccttgctagggtttctattctttgctttcgtttctttctattctttcgtttctattctttactttcttctcttatctttctattctattcttccttctcttttcgtt

SEQ ID NO: 567083 - DNA, 220 bp, Homo sapiens
ctggatcacgccactgcactccagcctgggtgacagagtgagactccgtctcaaaaaaaaaaagaaagttatgtaggataagggaataatcattttttaaaaagggcaagggaggtattctggactcttgggtaagatgggcttcttactggccactacattttctctgggttaattataacttttaaaacaactggtgactcactggggggggaagggg

SEQ ID NO: 567084 - DNA, 282 bp, Homo sapiens
agctcagctgtatccattcctcctagcacagtatgtgcccttcgggttagcctatatctgcgatagagtagtgtcgaatgtctccctacatgtgtcatatcatcacaactcgtggtgccttaggcatgaactagtccatattctgtgcaaatgaagtcagttcctttgaggagacattcagcactctcttttataaggcttgcttcttcccctggacaaaatttctgagccctggtgctgatgctgggggcagagacaatggtatgcttctgtgtgacaccc

SEQ ID NO: 567085 - DNA, 230 bp, Homo sapiens
cggagcgtgcttgcctagggcgtggtgtaatcatgccagtagctatctgcttcagagtcagcttccgcatcgtcatcgtcatcctcatcatctgcgtcatcctgatcgtcctcatcctctgaggcaggggcagcagctgctggtttcatcgctgcgggttcaatttcatcttcatcctcatcctcgtcctcgtcatcctcctcatcctcctcactgtcatcatccgcctc

SEQ ID NO: 567086 - DNA, 121 bp, Homo sapiens
tgagtttcccgacctccccgggcacatatccctagcttcttgtctgcggccagtatcctctgaagtcttgggtagcgaagcgagcaggagggtactcagcgacactgccgcctggggactc

SEQ ID NO: 567087 - DNA, 1099 bp, Homo sapiens
tctttgttgggtctcggtgcctctgctatgcttccttttctcctctgcgattttctctgctctgcgtggtcgctgtcgtattctcgttcggtgtggatgtgtttcttgtgtcccggtcttccgctccttgggtcttgccgtgccgccccgggtccgtgtttgtttgcgagtggccgggtgtgcgttggtccacgacttgctcatgtcccctcccgcgggcatgtgttcattggcggtgaattcgctttcccttggccccagtcgcggccatgcccctcgggggcccatacacggggggcccggacccgccttgtgcgaggtgtggcctgtgcattcctgctcggtctctcaaagtccttgagcttggtgtccctggccatttcgggcctgagcgccttgccttgcccgttgaggatttgggtccccttgtgctacccgttgggtccaccatgcaatcccgctggctcaacaacctgggcaacgtttgcatccactgtccgccagcccttcatcgtgtccgcctcttccttcgacgtgctacccctggttgagttctacctggaggaagggatcacctgatgaagacccctctccctcatcgacctggaggtgctgagaccccagcgggatgcaccagcccagctagagattcgccaaccaccagctccccagattctcgcggctaagtggagacccaggactccctcggagatgaggaccccgttccccagctaagctgagctttgacgccaggtggctccagagttctgtgccccgtggtggtgacccggctggttctgccgctccctgagcccccgggatgtcctcatccagcgatggcccccccccctgaggtggccatacttccgctccactgctgcctgacgcctcccttaccctgtgcccctcctgcttcccagatgttcccttcttgaggactatgagttgtctggtgcttccagcctggctgctgcccctactgcccccaggtgccaggatgaccctggccccatgacccgccatcctggggacggcctgccaccctctgccccccttggggtctgctgggctgtgaaggagaataaagagtttaactgta

SEQ ID NO: 567088 - DNA, 155 bp, Homo sapiens
gacattctctactaaccacaaagacattgcatcaccataactattattctgcgcatgaactgtcagtcctaggcacagcactaaacctccttattcgacccgatctgggccagcctggcgaccttctaggtaacgaccacatctacaacgttatc

SEQ ID NO: 567089 - DNA, 300 bp, Homo sapiens
gcatggtggcacacactgtcatcctagcacttgggaggcgaggcgggtggatcacttagaggctaggagatcaagaggcgggcgggcaacacagcaaaacaccatctgctactaaaaatacaaaaaaaaattagccagacatggcggcatgcacctgtaatcccagctactcgggaggctgaggcaggacaatcacttgagcccgggagatggaggttgaagtgagctgaggtcatgacattgcactccagcgtgggcaacagaacaaggctctgtctcaacaacaacaacaaaaggatg

SEQ ID NO: 567090 - DNA, 2174 bp, Homo sapiens
  misc_feature (156)..(156): n is a, c, g, or t
  misc_feature (577)..(577): n is a, c, g, or t
  misc_feature (1340)..(1340): n is a, c, g, or t
  misc_feature (1353)..(1353): n is a, c, g, or t
  misc_feature (1403)..(1403): n is a, c, g, or t
  misc_feature (1413)..(1413): n is a, c, g, or t
  misc_feature (1500)..(1500): n is a, c, g, or t
  misc_feature (1529)..(1529): n is a, c, g, or t
  misc_feature (1533)..(1533): n is a, c, g, or t
  misc_feature (1571)..(1571): n is a, c, g, or t
  misc_feature (1762)..(1762): n is a, c, g, or t
  misc_feature (2162)..(2162): n is a, c, g, or t
  misc_feature (2169)..(2169): n is a, c, g, or t
ggtccagtgacgagcattcgctgcggctcgtgccggggtggtggacctttcagagctcggtgtgggctctcgagggcagtcatggggggcctgtgtgacgaccgtcctacgtgggggcctgctcgactagactttaagacgacgcaggcgtgtggnctgacccccaccagtacacgtatggcctggcttggactataagatagaaccaccttgcggtacagtgaagacgagagagtagagacaggctattgcggatccgaccttagttccggttggcaacagagcagctatttcctcagattgtacagtttcctaggccagggtgcgttaggagggccacgcaattactgcatatggagggagggggctctcttggcatatagtgtattgcagcgcacgcgactacgttcggattgggaagtaaacttgtgaacctgactttcgggtgtaaagcgtaagtttctacgtaaacggagggaaaccgcacacatttggttcccactctgggaatggcgcacattgatgctccgtgagagcggcgtactcttatgctttacacgtaagcaatgccgagacntgtgagagtaacttgcgggcgcaaagtttgtgccactatgcgtatgcattcccatacgggcggcattccactatttaattcgaactgcccatggatggtacctacgtaccgacttggggatgtatggcacgagttccttcgtcaagagtcaaatgtccttcaacaggagcgccgttggggcgccattgcatggcgagtggtatggacgtccccaccacagagaggggggagggaaccattgtgaaggtccttcaaatatgaagaacctacacaaagagacgtggcgtacaacgcgaatgtaccccctgcgactttaccctaaacattggagaattaagcccacgattaacattttaatttttcccaaaaagggacacttgcggattccatttgttggaacacaccaaggcgtgaaccaaacggttattataggaggcagaaaattggcgttcgacagagagcagctttgtgacgggttcggtatggagaacggcccgatatacaccagttggctcgtatttatggatagcagcagacatagcggagcagctcggggcgcacgccgatatcccgcaaccgggtatccaccacagcaggacattccgtatcagatttattagtccacgcggtagagtatcattattggacgacaagtgggttgacagcacaacacggatcctacgttacatgttcgtattggcagcgaccagccgacaagcttggtatgtcatgcgccgaacgaggatggacgacgcccgcccantataaagagatgntaacatacgagagcgagcgtgtaacaccaacccagagacagcgcgcaagngatagagttnatcacccctttattaacatcttcggacccgcaggcgtctgtgtatttcacagcacttacagacggcggggccccccccggcgtgatncgagtattatcacttattcggaccagccnaggnagacgatgagtgaccggcatgctagagcatccacgtanagaacattgaggagcagatcccctacactattgagaatagttgagacgtacgcacggtggtagagatgtgcgtcccacgcaaacagaggcaagacattacgcacggtcaacaagctagggagaaaaggtatacaacgggcgctaacgccagagcgcgggcgcaaaacatacaaataagtacacgagcgagnacagccacaccaaaacgtttgagtgagtgtaggagtagatcagctggcgagcccgcccactaccgaccaataagagaacacacaccgtgacagtgagacgtaaagctatatcatagtgaggcagcgagtacggaccactcaaaagtagaacatcaccagactgagcatcaggtagtacagacgccagagtctggcctctatatcaacagcccagcaccagaccgcttagagagtcagacgatgacgcgactaaaatttgggtaggccacagacgggtcatacactatgtagcgaatcaacgtactgcgtgtcggatagtactaaccgaacaataagcgcgactgtagtcataccattcgattctttgtttcgtttgttctcctcgttctcttctctagtnggcgggncgagc

SEQ ID NO: 567091 - DNA, 406 bp, Homo sapiens
  misc_feature (38)..(38): n is a, c, g, or t
  misc_feature (62)..(62): n is a, c, g, or t
  misc_feature (70)..(70): n is a, c, g, or t
  misc_feature (98)..(98): n is a, c, g, or t
  misc_feature (121)..(121): n is a, c, g, or t
  misc_feature (143)..(143): n is a, c, g, or t
  misc_feature (146)..(146): n is a, c, g, or t
  misc_feature (201)..(201): n is a, c, g, or t
  misc_feature (204)..(204): n is a, c, g, or t
  misc_feature (237)..(237): n is a, c, g, or t
  misc_feature (242)..(242): n is a, c, g, or t
  misc_feature (369)..(369): n is a, c, g, or t
ttgtttttgggtttggtgaattttattttgtttatggncttggtcgtgtactagtggaggangggtttgnggtggaaaatgggggtgaattgtttggngatgtgtttgaggagtttctggntgggtgtgttgttgttgatganggngggggatatttttaggtgggggggggggatgttgcatacggtcgtttttatgttnttngggatttattttatgaagtagttgttgtttttnttttntacgttgagtatttttttgtttactttttttatggacatgtgggtcggaagatggtagctaccgttagtagcggacgtggcgcgggttgtaggtgggcatctatgttcttggagtcgaacatctgcngggtgagctcgggcacgtgagaacccggtactgctgg

SEQ ID NO: 567092 - DNA, 847 bp, Homo sapiens
agcggatttagagcggcgggggcgggcgggatcactgtctggtggcgccgcgggattataacagagaaccatggcggaccatagggaatggaccccgatggtgtcatcgagataggaagatggaatgatgatgggcgattaaactttgagtgatattgagagtttaacacggacgggtctgcggcttgcgtaggcaatctagtgctggtacgggtgtggatgaatgccttcagcgtattcaggccaggagacgctactgatcctacctgttatgaaacgaggatattggatcgtgattctggcttcgcaagcgatcagcgatcacgagtagcatagagcgcaaggagcactgcacgacgactatgagctatagtcatcgcgatttcgcgttgcatcccacggctagagacagatttggagggctctcacgaagggatgaacaccacgaatgccccataagataaattgaggccacaccagatcaagacggaaccttgggctgccacatcagactcgccacagacacggaggttaccattccctagggcagcatatgagcgagaagctcactaaattggtgaaagctcaagcactattgttgcaagttgacccgttggcaattaggcggtggcgaagagccaaagaaattggagttaccagcacacaattggagaaattgctagtacacgacacatgtgcaatggggacttgaacaagcaacgtgcaacaatgaacatggggaaaggaattgagcgcacatacccacaggcggcaggacaggaaggttacgcggtacacttggctaaaaaactcgatcgcaacggtaattaacccttatgcaacccaa

SEQ ID NO: 567093 - DNA, 410 bp, Homo sapiens
  misc_feature (410)..(410): n is a, c, g, or t
gaaaggaagcgattaactattttcttccctacacactttcttgaaggtcaggagctttatcatatgaaaaagttagtattatagttcttatgtaacctgtgtgaagcagcagtccagccttacagtagtccattcttgctaatggttagaacagtgaatactagtggaattgtttgggctgcttttagtttctcttaatcaaaattactagatgatagaattcaagaacttgttacatgtattacttggtgtatcgataatcatttaaaagtaaagactctgtcatgcatttttccccattctttttttttccctgtctccgtgacaaccagtggttcttcatttttgatcatgcgaaatgcactttgacccagatggtctgcagaacttcacttaggacaacgcgagtn

SEQ ID NO: 567094 - DNA, 616 bp, Homo sapiens
gagatcgcaccattgcactccagtctgggcaaccagagtgagatccgtctcaaaacaccacggacaccggcaaaacacacatagcattatacctcttccttgtctccaaccgccatgaaaattctgacacacctccaccaattcagtggaatacatccacaccacaccttttctcagttattcaacattacattataactgtctatatagataactagatatacttaaaaaaggcctcgggggctatataatcttcataaacagctacaatatcagtgggcagtacatttacccaacctattggtctctagatggacgacacaccttaggccatattacacctgctgtgttacgcctccaaggtgcctaaagcattgggatgcccaacaatacaagtatttgcgataaaacattaccacactagaacattggtgcacaacccatttcgttaatatggtatacaacttggcaccaaaatatttcaaaggccccgtggaataaactgtcaatattgggaactatatacatcttaactaagcattacaccagtacattgacagtgaatggatggtgacatagaacttaagtctcaatatttaaaaccctaaacactgat

SEQ ID NO: 567095 - DNA, 364 bp, Homo sapiens
ctgactatttgtggcacgtaggatgtcttggttggcttgtcagatgaactggctaaactggatgcatgagtagaaggagtggttaagaacagtagctcaatacatggctgatgtatgggagagatagcaaagacaaagttcaagagaatctgtaggctaatggagtggacttggttacttatataacaaggttccagtgggcacatggccaaatatccaatcaagcagtccctgcaaaaatatttctagaaataatagccaagggcagtacactcgagattgcatcaatgcaccgtgaactctcgcagcatctgctatacaataacctgcaaaggcaaatcttcagcaattgtggaacgaaaag

SEQ ID NO: 567096 - DNA, 109 bp, Homo sapiens
ctgctagcgtgggcttcctaagcgctgaagaggatccgcctatactgcttcatcttcagcgatgtggacctggtccccatggatgaccgcaacctataccgctccggca

SEQ ID NO: 567097 - DNA, 105 bp, Homo sapiens
gctgtgagcctcccgttccattcctggctgtatttcatcagcaaatctgctgattctatctcgccgtcttttgtttcccctattccctcaggtgtctcttgcctt

SEQ ID NO: 567098 - DNA, 347 bp, Homo sapiens
ttcaggagtaacttcagtaacaaccagagttggttccgcttagagtgccagtgaagcctccgtaatctcctgccgaagaattgtctctggcggaggaccttctggttgactgcaagcactcaattctctaaatctggtttgtacttctgccctcattttattcccttccagcgctctggcatgcgagataatccctctcttaaattccagacttcccaattgagatgaacgattattgggcttgggttggggtttataaccaatccgatcattgatcatttgttcccggctcttgggatcactgctaagcccactggctccttctccatcactaactccctaaacga

SEQ ID NO: 567099 - DNA, 785 bp, Homo sapiens
cagggaatttggtgactctgtacatgatgcttttgaacatttatcgaaaaccaagaaatacagtgatgctggctggttgcccccagcgtcactgagaaagtggtgaaaaggatgaactcagggattcgatgtctgggctgcagctctgcataaatgatctgagagtttcttagtgtgccctggatcagaatcttctctcctgtagccacagggttgaaattgtagaaaatcgagcaccagctctcacgcgattagctgagttaaaacgaaagctgagcttccaggcatgcagggcgtctgctgttaaagtgggggcacttaggccggatgccgtggttcacacctacaaccccagcatgtttgcaggccaaggtgggaggatcacttgagcctgggagtttgagaccagcctgggcaatgtagaaagactccatctctgtattacaagaaaaaaaaagtgaggacatgggtggcaaaggaagggatccttcaagttgggatggggacatgggaagcccatggccaggctggagacattgagttccaaatgatataaagttgagtcaggttgagtttagtagtgtgggcccactagcagagattatgcatttcatgttgcagtggtagagttaggaagggctctgagtctttgtttggttggtgaaacatggatcaaaaggtggccaccttaatagcgtggtggttcggctgtgatcccagcatttgggaggcgaggtgagtggatcgttgagcccaggagtcgagagaggctaagcaaatgtggg

SEQ ID NO: 567100 - DNA, 209 bp, Homo sapiens
gtagctggaggcttttcaccataagtgaagccacgtgctgtcaggtgacactgtgcagtgatgaggagatgcatggccattgaggataactgcagaatgaccaaggagcggccgcagaaggcagagaatgagcttaaggagctggaacagaagcactcgcagctgaccgaggagaagaacctgctacaggaacagcttgagacacgcga

SEQ ID NO: 567101 - DNA, 354 bp, Homo sapiens
  misc_feature (66)..(66): n is a, c, g, or t
  misc_feature (68)..(69): n is a, c, g, or t
  misc_feature (309)..(309): n is a, c, g, or t
  misc_feature (342)..(342): n is a, c, g, or t
accgtagtgctcgacaaggttccaataggtcataatcacgcacggagttccgtcccggccacggcntnngtggccaatagggtgtcgcgagtgcgtaccccgcgctctagagccccggtagtgacgtgctgaatgacggtgccgtccatcatcgggtcggagtaaggcattccgatcacgacgaggtcgacaccggtcccagtagtgcccgtagtcagtgccttcatagcatcgatcgagtgaggagctgacgggtgtccaccgggaagtaaccgacgagggccgggcggttctcttggtgggccctgnggtagacactggcgctaccggtcattccatacntcccgtgggggc

SEQ ID NO: 567102 - DNA, 111 bp, Homo sapiens
taaagatgtcaataccaaccagatggacctaggcgtggccgtgcttgccaatcttcgaagaagacatctcgacgatcttaacatggccggcctttgagcaccaccaataca

SEQ ID NO: 567103 - DNA, 148 bp, Homo sapiens
aggtcgtctagaggatcccgtagtcgatcaacgagatgacaaagagattcaacagatactgaggtagaggcctctaaagataaggaaaaagaaaagactcaaatgatcacaagttaacaagagatctgtataatggactttagtggta

SEQ ID NO: 567104 - DNA, 568 bp, Homo sapiens
  misc_feature (334)..(334): n is a, c, g, or t
  misc_feature (364)..(364): n is a, c, g, or t
  misc_feature (366)..(366): n is a, c, g, or t
  misc_feature (424)..(424): n is a, c, g, or t
tttcttattcatttttcatgttgcagttggtgcttcccgggcagcagttgaagcgggctttgttcccaataacaggcaagttggacagacgggaaaaatagaagcaccagaactttatatggctgttggaaaatctggagccatccaacatttagctgggatgaaagacagcaagacaattgggcaaattaataaagacatagaagctccaattttccaagtggcagattatggaatagttgcagatttatttaaggaggatcctgaaatgactgagaaattgaagaaaaaatgaatcaggatcatgccttaaaaagaaaacttttgttaaagnattccactgaaatcacagatatttgtgggnanaataacaatcattggaaagcatggagagctacatttcataatttgagggaaaatttcnaacagaagccagaatgcttgcccacaaaaaagctgtgtttcaaaaaaaaaaaatgtggttccaaacaattattgtttgaactttttaaattctggactaaaatctataaaaaagctttcccacagctttaaaaccaccaaaaaa

SEQ ID NO: 567105 - DNA, 134 bp, Homo sapiens
tacggtcagtggatctcacaaactctctgaggcttgcactgagggtggtgatgtgtcccatttatagtttcggttcttcagccccactgagctaaagattccattaggtttctcacaattttgtcttggtctgt

SEQ ID NO: 567106 - DNA, 829 bp, Homo sapiens
gggcgcgacctggcggcgggtctggcttgctgtttacttctcatcgggtctcacgcatgtccaggaacacagtctagaaatataatggtttgagtcttcaccctagggtagaggcatgattgaaggtatacaatggcttttggcgatcctatgctaactaattgatttgcgttctcacagacgactgagtgcctgagtgacgtacctgccaacctgacactttcgtactacgatggtgtcactgcacaagggttcacagccaattccatgaacgaactgatgtagtcatgccggcaccgcgagaaacctgtggcatagagaatgatttcttgctgaacaggaatcgactaggaggtagaaagcggtggtatcggcacgtacgcccatgctgaagtgactcttgaaaattattattccgagtaatctttggagcttggtctcccggctatcccgttgacgtggtcccgggccactcctacagcgcatcacatgcctcttcaagactactttgttctggcattcacgggatctaccatatgcaatgggcatatgtgtgagattaccccttcgcgccagaccaagatagagcttctgtgacgttctatgttggtgtggatatgggagttgacgtcttggctcagtggacgttacgaggttgctgaacaagtagatttgtagcctgtaaaggaagaatgcataggtaaactcaagacgatccagtgtggctttttgaatgaatttccggttacttctcagattttataattgaactactttgctttagaattattagggttagggaaggggcaaaggcagatggaacattaag

SEQ ID NO: 567107 - DNA, 152 bp, Homo sapiens
cccccggatattttctatgcgtgctaagataacatttatcctcgagtgagagagcttggcgtggtctgtttgatgagatttttgcttgctaagtaaatattgtaacatgttctcacagcttgcagtacagtcccttccatagaaaatctatg

SEQ ID NO: 567108 - DNA, 309 bp, Homo sapiens
ggcctttgcttaatgagcaagaggcttgtgtcctcccaagaacatgagggagttcacaagggagctatagctcacacacagaaacctgcccgctcaccccattcctcgtgactgggagcatgtctgcttagaattttttaacaggactttccctcttaaaaattcaatttgtgtccaaaatgtagtataacccttggataatgttattctttcatttccatctgttaatggacacagatgttttgctcacggatcaaaaacatcaaattccagcgcccagtggccatggtgttgcattaatctgtgcta

SEQ ID NO: 567109 - DNA, 860 bp, Homo sapiens
cccacgcgtacgctttcgaggaaggagtacttactcgccaatgatgatgaatggaaaaatacttttcagggatgaattgaaggggttcacaagtgttcaaactagtgcttgccgtagacaagggttcttctaaagacaagacagcgcaatctttgcaatgcttttcttacttgtttggtgaccgtaagtttatgtggaagattgttatttcattaggacttgagctagaaattgttgtctttctgatgtctaagacttattggtgaacaattgagctgtacagagtattcgttttgactttcaagtgtgggaacgattgggacagaacaaggaggtcttgactgtgcctgtacaatatagagacatatgaatagtcataacagtttatcaactgtgtccttggtttctgttaaagctactattgcctagaaacatagtttgaacaagctgggtcttgtgtgaggcttgtcagaattggccttcattggaacaaataatctacaagaagtatggtttaattgattgtcttacagtgactaattttcccgtggtaagcaacttgagtaagtgatatatcttatattcctaaatgtgcttacatacttgtgaaatagctctgacaaacttggaagtgtaccatttggcatattagtcttccttttatgcatgatggtaaaaatagaaagcatgtgtactggtagatttcttataaggcagcgttacccataatgtaatgcttgaatgacagtggtcatattagtaagaattatggaatcattaagtccttaatgcatcacagttcttaagggattacgatcattaagcttcttacggagtaaacaaagaaagaaacaacaaag

SEQ ID NO: 567110 - DNA, 573 bp, Homo sapiens
tggccaaacataccggggaataccttttatttttttttaacctgtggggtgatggttccaaaccataaatgtgattatagttaacacatgacccttctagcgtcccagccagtgtttttcctgacctctcttcttgggagaggaggatggaagggaggggtccggcatgctagctgggcatttggctgtgtcctgcagcccctttccgggacaccggggttcacacagcttttatagcttacataactgggtgcaagatttcctggtgtgggaagattgttggccttgaccagcctgggctgggactttaccaggcattgcaagaagcctggtaccaacacagactacagcacccaggaggtgcgatgtgtgggctggctcaggggttataacaggcctgactgctttggttcaccggattataatgagccaaaatgtttcccggggttggcgggttcagggaaggagtttgatatagcagattaaccaccctccttgtagctatgggggctaaagggttcccgggtgattcttaccaatccacaataaacatggcccatgggcatatctgcg

SEQ ID NO: 567111 - DNA, 777 bp, Homo sapiens
  misc_feature (195)..(195): n is a, c, g, or t
  misc_feature (202)..(202): n is a, c, g, or t
  misc_feature (206)..(206): n is a, c, g, or t
  misc_feature (208)..(208): n is a, c, g, or t
  misc_feature (347)..(347): n is a, c, g, or t
  misc_feature (417)..(417): n is a, c, g, or t
  misc_feature (432)..(432): n is a, c, g, or t
  misc_feature (454)..(454): n is a, c, g, or t
  misc_feature (586)..(586): n is a, c, g, or t
  misc_feature (616)..(616): n is a, c, g, or t
  misc_feature (621)..(622): n is a, c, g, or t
  misc_feature (624)..(624): n is a, c, g, or t
  misc_feature (626)..(626): n is a, c, g, or t
  misc_feature (640)..(640): n is a, c, g, or t
  misc_feature (648)..(648): n is a, c, g, or t
  misc_feature (707)..(707): n is a, c, g, or t
  misc_feature (750)..(750): n is a, c, g, or t
  misc_feature (770)..(770): n is a, c, g, or t
gaggagaattgtgtgcttgcatgagcagcagagtggagtgtgagagtgcaggatccagaggggggagaggcgggcggagtggggggctggaggtggggcctggttacttggtgacgtgcagagctctctgtggggggctgcagcgcatcttggggggagcaggactaagatgcacccgtagtgcaaaagcaacanccacatntcantnctcccggtgctttttgcggtattcctgcagcgctttctccgccacggtctccataaatttagggttcttcctggagacttctacagggaccgtgacagtgatgggatcagagtaaaagagcttgacgaccacctaagtnacaacggaaggaacgtccgagtaagaagtgtgggaagccaccgtggtgacccgcagatagtactggtctncgccttgcgtgaggnttgccagcggggacaaccagtnaaactgctcgtgcagctgcaccagcaaggaggaggtgttgagcatcttccactggtaggactttagcagcccgttgtattttctggtcaacctctcagcgacctggagggatttgtcgagctcccgccgcancttagcctgggaggggttgtaggtggaacngtccnnananaagatctcccggcnctagtaanactggtccttcaaccgcaggcagcccgtggagttgtggcggatctcccggcacaaagtncggtcatcgtcgccttctcgtatgaattctgttggcgggtgcnggaaggccgggctgtggaanttgatgt

SEQ ID NO: 567112 - DNA, 1475 bp, Homo sapiens
  misc_feature (142)..(142): n is a, c, g, or t
  misc_feature (263)..(264): n is a, c, g, or t
cttgcagtgagccgagattgcaccactgcactccagcctggccaacatagcaagactccgtctcaaaaaaaaaaaaaaaattacaaaatttagccgggcgttggtggcacattgccttgtaactcccagcttacctcagganggctgaggcaggcgacttctttgaaccctgggaaggcggagctttgcagttgacgccgagatttgcacccacttgcacttccagcccgtgggccgacagaaacgagaacctccattcttcnnaaaaaaaaaaaaacaaaatatattacaaatatttagcccgggccttgtgtgtgtggccccattgccctgtgttattctccccccttattctcggggaggccttgaggcagaggcgggaactctctttgaacacctgtggcggaggtgtggccctgttttgccagtgtgtgaagcccgagagatactccaccccctatttgggccctctcccaagctctgtggacacaaacaaggagacccgaaaacacctccggaacttccacacacaaacaccacacaaatatttccaacaccttattaagcgccaggggcgttggggggggatattcaccccctgtgttggctccccagggatatatttccgcgagagaggggctataggcgcgccaggagaaaaatcctccctttagaccccctggggcgaggggttgagagcgcgcttgcacgagagagcgcttggaaagaattcagtggcccaactgtgcacctctcacagcgctcttgtggggcaaacgagaagcgccacaatatctctccttcttctcttcaaaaaacataaaacacaaaagaggggggggggggagccggggcatactaaaaaaagatatactcccctcgaagagaaggggggcgccccaaggtgatttatagcggggggtataacccccgaggccttttctgttcgtgtgtcaccagagggtgggggccccctccttaaataggggggagagcccgcgattatattatataggcgcccttaggcggacgctgtggcggcggcggctgttttatcacccgacgcgccgttcgtcggccgcgggtcgcaacacccctcggttctgcgtcggtgggcgcactctttgtggggaggaggggacccccctcactcttccggggcggggtggcagacacatctgtgtggggcaccacattttcccctagcaggggagatttatttagggcgctctaggggcgagaaatctatacacaccttctccagcgctgctttctgtgggtgtgtaaccaacacggcgctatattgttggtcggcgtggagacaatgtcggcacccggggatgattttgagcataccggagccgcagtagtataatctcaataacgcgggctagtcaaggtgagcaggaccgagctagagcaatacagcgtgtcgttagctacgccgactccactatgacagcacgctgtcatat

SEQ ID NO: 567113 - DNA, 389 bp, Homo sapiens
actcaaaggacctggcggagcttcatatccctctaaaggagcctggtttgtactctataaacccctatcaacctcaccacgtttagctcaacctatataccgccatttccagcaaaccctgatgaaggctacgagttaaccacaagttcccacgaaaagacgttaggtcaaggcgtaacccatgaggtggcaccaaatggactccttttgctaccccggaaaactaccatagcccttataaaacttaggggtctaaggcggattcatcagtaaactgaaagtagagtgcttacttgatcagggccctgaagcgcgtacacaccgtaccgtcaccttcctcaagtatccttggaaggacatttaactaaaacccctgactcctgaaactg

SEQ ID NO: 567114 - DNA, 93 bp, Homo sapiens
cggcacgaggggatcacttgaccccaggaatttgaggttatagtgagctacgattgtaccattgcacttcagcctgggtgagaccttgtctca

SEQ ID NO: 567115 - DNA, 328 bp, Homo sapiens
ttggactactagtacggtaactttactaacaactcggggttacacctttgacaacaagtgacttattactggattctaaacctctgtagaccttaaaaaacttcctcagtagtcaatttactgacgtcttttcttcacatattctaccatttagtgtctagcttagaaaggcctcttactcaatgagattatagaggaattctcccatattttcttttactactttaacttcttttttttggcatttaaatctttaatccatctggaatttatttgggtttaaggagggaggtgaggatctagctttattttttaccagatggccagc

SEQ ID NO: 567116 - DNA, 164 bp, Homo sapiens
aggctccccaagcttttaccgctcacaacatagatcctgctgccactcaccctgtgaaatgctggatgtgacaccaccaattggagtgtacagacctgcagtctgggatcacctcaactcacaagcacagtgggttcctaatcttgaggtgccataaaacaaat

SEQ ID NO: 567117 - DNA, 212 bp, Homo sapiens
tactaccagacaaccttagccacaccctttacccaaataaagtataggcgatagaaattgaaacctcggcgcaatagatatagtaccccaaggaaagatgaaaaattataaccacgataatatagaacggcctaaccccctatacctcctccataatgaattactacgaaatacctctcgaacggagacccaccgttaagccccccgcaacc

SEQ ID NO: 567118 - DNA, 211 bp, Homo sapiens
aggttacagattctagagtttcagtctgcgactttagttgttcctggatagcaccatggaacaactgaaaagtagcaactgaaactctagacatttgtacccttcgcaataccagatgaatgcaagtgggcccatgcatggtacatgtgttccagcgtgtgcttaaagatcactattcactttacaatacatttggccagagactcacagc

SEQ ID NO: 567119 - DNA, 1126 bp, Homo sapiens
  misc_feature (32)..(32): n is a, c, g, or t
  misc_feature (66)..(66): n is a, c, g, or t
  misc_feature (68)..(68): n is a, c, g, or t
  misc_feature (574)..(574): n is a, c, g, or t
  misc_feature (785)..(785): n is a, c, g, or t
  misc_feature (836)..(837): n is a, c, g, or t
  misc_feature (862)..(862): n is a, c, g, or t
  misc_feature (865)..(865): n is a, c, g, or t
  misc_feature (898)..(898): n is a, c, g, or t
  misc_feature (909)..(909): n is a, c, g, or t
  misc_feature (1024)..(1025): n is a, c, g, or t
  misc_feature (1030)..(1031): n is a, c, g, or t
ccaccagtccttactgagcagcgatgatcaantttttatttatgagacagctggagtgctgatgtnantagtgaatatccggcagaaaggaaacaagccttaatgaggaatctgttgactccactaatggagaagtttaaaattctgttagaaaagttgatgctggcacaagatgaagaaaggcaagcctctctagcagactgtcttaaccatgctgttggatttgcaagtcgaaccagtaaagctttcagcaacaaacagactgtgaaacaatgtggctgttccgaagtttatctggactgtttacaggacattcttgccagccctcagttgtcccttacaaaaggatattctcagaagtggagtccgtactttccttcatcgaatgattatttgcctggaggaagaagttcttccgttcattccatctgcttcagaacatatgctcaaagattgtgaagcaaaagatctccaggagttcattcctcttatcaaccagattacggcaaattcaagatacaggtatccccgtttttacaacagatgttcatgcccctgcttcatgcaattcctngaagtgctgctccggccagcagaagaaaatgaccagtctgctgctttagagaagcagatgttgcggaggagttactttgctttcctgcaaacagtcacaggcagtgggatgagcgaagttatagcaaatcaaggtgcagagaatgtagaaagagtgttggttactgttatccaaggagcagttgaatatccagatccaattgcacagaaanacatgttttatcatcctctcaaaagttggtagaactctggggaggtaaagnntggaccagtgggatttgctgatttngtntataagcacattgtccccgcagtgtttcctagncaccttttaanacaaaccttgtgacctggctgatgcacaaacagtattggcttactctgagtgtgcagtgaccactgaaaacacttcatctcaaacggggccagcactgtgtcagaatcttcacannaatanntgcctccttgcaagttgactccagaaataattcacgagtttgccaacgcttacagcctgagcaagtttccaccattcttcaagggggcttccgaa

SEQ ID NO: 567120 - DNA, 824 bp, Homo sapiens
  misc_feature (32)..(32): n is a, c, g, or t
  misc_feature (66)..(66): n is a, c, g, or t
  misc_feature (68)..(68): n is a, c, g, or t
  misc_feature (574)..(574): n is a, c, g, or t
ccaccagtccttactgagcagcgatgatcaantttttatttatgagacagctggagtgctgatgtnantagtgaatatccggcagaaaggaaacaagccttaatgaggaatctgttgactccactaatggagaagtttaaaattctgttagaaaagttgatgctggcacaagatgaagaaaggcaagcctctctagcagactgtcttaaccatgctgttggatttgcaagtcgaaccagtaaagctttcagcaacaaacagactgtgaaacaatgtggctgttccgaagtttatctggactgtttacaggacattcttgccagccctcagttgtcccttacaaaaggatattctcagaagtggagtccgtactttccttcatcgaatgattatttgcctggaggaagaagttcttccgttcattccatctgcttcagaacatatgctcaaagattgtgaagcaaaagatctccaggagttcattcctcttatcaaccagattacggcaaattcaagatacaggtatccccgtttttacaacagatgttcatgcccctgcttcatgcaattcctngaagtgctgctccggccagcagaagaaaatgaccagtctgctgctttagagaagcagatgttgcggaggagttactttgctttcctgcaaacagtcacaggcagtgggatgagcgaagttatagcaaatcaaggtgcagagaatgtagaaagagtgttggttactgttatccaaggagcagttgaatatccagatccacccaaccagcagcaccaccagacagcagcaccaccaggacagcagaccacgc

SEQ ID NO: 567121 - DNA, 856 bp, Homo sapiens
tgggcagaaatttaaatctcgctatcttctctggctggctcaaccatggaaggaccccaattttgaaaaaaaaagctttgtgaaacacaaaacaggcggaaaaatgtgagggcccggctggcccccaagtcccccccacccgtgcattgccgcgagggcctccccagttactccccagcggaagccatcgctcatctcgccaaacaaaacagacggggctcctgcaattacaacaccgtggtccacggaatgttccacctctaactaaaaaaaagacatagcacgagtgactttttatattcacctctttcaaaaaacgtactaacttcaaaaaacaacaagaggcgccgaggagtggggcaaaaaacgtagaatgcgctatacactccatcaaagaggacaggtccagagaaggcatgagagggtaaaaaactagagccgcgcgcaagcggcccacgagcccgaccacataaggagacgtgcggcgactacccagaggcgtgacagcgggaacacggcacatcacatcgagggtgcgtgcaacacagaggccggagcaaaaccgagtacaacaagtgaaacccgtgaaccaaagggaactatggggagcccagtgacggatcgggacgctgtatcaaacgccccggaggggttaacaactcgaacccgaggagcctgctgacaaaacaggaaagccacaggggaacccgactcaagggccaatggagacatgcagctggaaacaatgcaaatactccggggaaaacaaaacattggccaaaaaccacaatgaacggataacgacgggcaaacgcccacatctagagcacgggacacccgacccaacgagaggcgc

SEQ ID NO: 567122 - DNA, 329 bp, Homo sapiens
  misc_feature (1)..(1): n is a, c, g, or t
nttgcaacaggtcagcatgaaagataaaaactattttgacgtcattattattggaggtagctatgctggcctttccgctgcgatggcattgggacgttcgctgcgaaatgttttaatcattgatagtggattgccatgcaaccggcaaacaccccattcccataatttcattactcaggatggcgaaaaacctgaggcaattgcggaaaaggccaaagcacaggttttaacctataatacggttgaatttttaagcgacctggcacttagcgctcagaaaaatggaagtacttttaccattaccgccctctcgaggggtaccgagctcg

SEQ ID NO: 567123 - DNA, 377 bp, Homo sapiens
ccctgcctgcatgtggctattgagatgtgctgtatgatacacaccagactttgaagactcagtgtgaaaaataaaaagaattttaagaggggtgggggtcgaggggaggcagagcagtaggacaaatagctaatgcacgcagggcttaaaacctagacaacaggttgatgggtgcagcaaaccaccatgacacatgtttatctatatagcacctacatgttctgcacttgtatcctggacaacaggttgatgggtgcagcaaaccaccatgacacatgtttatctatatagcacctacatgttctgcacttgtatcctggaacttaaaattaggaaaaaaaaaataataaaagccaacatggcattcattactgcca

SEQ ID NO: 567124 - DNA, 555 bp, Homo sapiens
gtacccttcgaccggttctcgttcactaaggtggtcctctagtgacaggtctgtactgcatggtagctcttttccaggattctacagccgtggagtaataagtcatgccaagctctctctgctatatcccaaagtctctgcgggttagcccccaagggccatgcagcttctgtctcccaacactaagttcacttcgtgtctctcacggcagagaggaaacttagtattccttggagacctgaagggatgcagtgagcttaagaattttcaagagcttatcaatcagtcagcccttgttcatccccgagtggatgtgtggtggtattgtggtggacctttactgggcactctgccaaataactagtgtggcacttgtgctttagtccatttggctatccctttcaccctggcatttcatcaaccaaaaaaaaaaagaaaaaggaaaaactcatgtcggccccagccctgaggctacctgaccttgacaaaactctttacactctgtgtccggaaagagacaaaattgcagttggagtttaacccaaatgtggggcc

SEQ ID NO: 567125 - DNA, 148 bp, Homo sapiens
tggcaaggcttctaccgtacaaggatataggcagatgtacagaactgaaattcgaagggcgaggatggcaagaaaagcgggcaacttctatgtaccggcagaaccttggggctcactccatggatacctcggattctgatgacaaagg

SEQ ID NO: 567126 - DNA, 673 bp, Homo sapiens
  misc_feature (549)..(549): n is a, c, g, or t
tgcttgtttttgttttattttaatatttggggggggggtgcacccattttctgctagaaaaaccccaaacccacgcaacccaccagggggaggtccgtccaaaccccccccccaccccgccgggaataaaaaagaggaggccaccccgcccctggaacccgggcgaagcccaacaaagaaacacacctcgccgggccccaaacaacacccaccttaaaaaaaaaaaaggagaggcccaaagtcgaaaacaaaaaaatggcacgcttgagaaatgggcggggggggggttcccgggagggggtatgtccaggcaccacctttaaaaacacaagccaaaacaaacccctccttttgcatgaaaaaaactgcccacctctgtttgatgggggccaccacccaaatgagaaaaaaaagactacgccaatttgaagggcgggggggcgcggaatttaaccgcccctaacgtcgccccgagccatgggccaaaaagacgccacttttacccggcgagggggggagccaacacagataacaggtttcaattcaccnggcagcgccaccctggccttcttttcttatccaacccggcctcacagcggacaaagcccgccccccccaaaaaaaaaaactaaattttaattgggtccggcgggctcctcttacaccccacccc

SEQ ID NO: 567127 - DNA, 194 bp, Homo sapiens
tatgccacacctggatccacccaagtgacatcaagccatcgtcggcacagggaatgccatatggctatcgaggaggctggaaagacagttggccccagaacacagcagctgggtgcaggagctggtggcccattgctagaccagcacccacgaaaacagtgtccccgggcactgccagatcagtcggtgcacgg

SEQ ID NO: 567128 - DNA, 284 bp, Homo sapiens
actcggaataaagggtactttctcaagcttgataaagaacatcagccgggctcggtggctcacgcctgtaatcccagcactttgggaggctgaggcgggcggatcacgaagtcaggagatcgagaccatcctggctaatatggtgaaaccccatctctactaaaaatacaaaaaattagccgggcgtggtggccagtgcctgtagtcccagctactcgggaggctgaggcaggagaatagcgtgaacccgggaggctgagcttgcagtaagctgagatcgcgcc

SEQ ID NO: 567129 - DNA, 461 bp, Homo sapiens
  misc_feature (377)..(377): n is a, c, g, or t
  misc_feature (382)..(382): n is a, c, g, or t
  misc_feature (424)..(424): n is a, c, g, or t
ccattctggacatttcacacagtgcaatattataatacagggccttctgtgtctgacttctttcacatagcataatgtattcaagggtcatccacgtcatagaatgttactagcacttcatttcttttttatggctgaataatattccattgtatggatatacaacattttgtttatctgttcatcagttgatggacatttgggttgtttctgctttgttggctattataagtaatgctactttgaacattcatgtacaagttttgtgtgtacatatgttttcaatactcttgggtatacctaggagtagaattgctgggttatatggtaaccctgtgtttaactttttgaggagttgtcaaactattttccatagncagcngtaaccattttgcatttcccaccagcatgtatgagggttccnatttcttttttatctttcccaacacttgttttgcctt

SEQ ID NO: 567130 - DNA, 1301 bp, Homo sapiens
  misc_feature (430)..(430): n is a, c, g, or t
agcggaggcgtcggggctgcgccggtacaaggttccggctgtgaagatggcggtttcctagtgagtcggaggctgatcttagaaggaggtatcaggcttacaggtagagtccgaaggggaggattctggggttcccgctgttccgagtaccatctagaccaccacaggaaaccatggaaaggtgggcgagagcgccgcaggcagcctcgcacatgaatgatggacggaggacggaaagaggagcactcgaagctgagcctcggacacggactcggctcgaagtcctagaacggggctaagagcgaaccgaggcatgtgaagcgaggactacacgagcctagacagtgaggcaggactccgcagctgagggggtagacgaggttgaagagctctgctctagtaagctgagattgatgtggggatagtcctncgtaacacctgtacaaggacgccggggcctgaaggtacctaggacaagggatgctcgccactgggcgaggaccccgtgggacggctcccgaaaagtggcggcgcagcgaacacgaacgggggtcagacgtggtgcgcaacggagaaaagaaggtggagttaagtgcttgggcgtgagagcacatgtgccaggaggggacaaattgatacgacctggtcccagagaggactggaacgttccgggtatgccaaaacggaggggtactcgaaaaatactcgaaagcgaccactcgaattgttcgtacccgagcaaaaggaatgactgtagaagtacttggtttacggttgcgggaaccaaaaagacacaaaggattcgaacaatagaagccaacgaggttttggcacatggatggttgggtgaaaccgaatggaccaccgggccctggctggtcatgggaccttggaaccctttccggaaacccccccgggagaaaggccttcctgattaaggcttgggcccttccttaattggaaattcctgggacagaacgggggccctttcccagtggtttgcacaacccattttacaaatttccttgggacaacgggacacttttcttcaagggcccttcatatcccaacggcctaagaaaaaacatcgttggaagcctttcacggggctccaccaaaggaacgaaaccggttggcaagaaccgggaattgtccccaagcagcccacttattggtgtgtggtcccggcacccaatcacttggggtcattacgacggctcggtcacaactctttatggcacaaggcacacaaagatttcctcccattggaacgggtgacgcccctatggataagagcacta

SEQ ID NO: 567131 - DNA, 879 bp, Homo sapiens
  misc_feature (456)..(456): n is a, c, g, or t
agactcgatcggcaggacttgtacaccttgaggagtactgcaacctgaattcggatcgcctttgcaggctcgaacgctagtgcacgatgagcctgatttccaggcatggactcacctagggactagagctctagacgcatgacgctagtgttgacccgcagaatagaagttcagtagggcaaatagatccactggaagagccttgcgcggcagaattaggataatagtagcgctacagggcatcgcatgatggattgatatcgacggcatggtatagctggacctcaatctggtattcctttcggtgcactcactgtacttgtcgtacgtactctaagcgaatagcgggaagtcagagctccccatgctagaaggacacccccgaaatcacgtggtgaggtgccctaaggacacgtcctaaaaggacgcacacccagctcatatggtagcgcatantagtgggcaggatccataagtgatagaggcggatcatacatattggtgaggcctatggaggggtaagcatgagcagtccagggatacaatgtcgtgaccgctattcagactggtacctattgtgccccccgagaaaccgtctgaagtccccttggtaaattggcacagctgctatgttccagttgatggatacacgaggtactctgcgttcactatgggaacctaatcttggcgtgggagtctggaatttaatcactccatagtaggccaagggtgcggtcacctttgaagtaaatacgttcaatgttcaaggagccaatactggagaaatcccaagtataatggactcctgacctgcgaatttggcagggatctttgccttttggaaaaccaatggggggtattcacctgtaccgaatgcgc

SEQ ID NO: 567132 - DNA, 526 bp, Homo sapiens
  misc_feature (251)..(251): n is a, c, g, or t
gctcctgcccctcctaagctgtagcccaagcgaaggcttttataggcccagaaggcacgtgttgaaaggtgtccccagcccccaaaagaagaagatccgcacgtcagcccccctttccggcggccgaagacaactgcgactccggagacagccccaatatcctcggagagagcgctccccggagaaacacagcttgacccctatgctatcatcaagtttctcgctgacccctgagtctgcccctgaagaangatagaagacacaccaacacacattgtgttccattgtgggatgttataagccccaccagcgacccagatttaaccggctgtgaagaagctgtatgaccattgatgtggcccaggtcccacaccctgattcggcctgatggagagaagaaggcatatgttcgactggctcctgattacgatgctttggatgttgcccaccaaattggggtcatctaaactgagtcccgctgcctaattctgaaaataaaaaaaaatatatcttttcacccaatata

SEQ ID NO: 567133 - DNA, 136 bp, Homo sapiens
  misc_feature (75)..(76): n is a, c, g, or t
  misc_feature (108)..(108): n is a, c, g, or t
caattacctcattaagccataaataaaattataacaaacctgagaacaaaatgaacgattatctgttgcttcatnnatgcccccgcaatcctaggcataccgccgcantactgatcattctatttccccctctatt

SEQ ID NO: 567134 - DNA, 319 bp, Homo sapiens
  misc_feature (18)..(18): n is a, c, g, or t
  misc_feature (229)..(229): n is a, c, g, or t
ggtccgggagttccaagncccagccctggcccaaccatggtgaaaccccccatcctcctacctaaaaatacaaacaattaactgagccatagtggtgggcaccctataatacccagctactccggaggctgaggcaggagaatcgcttgaacccaggaggcagaggttgcagtgagctgagatcgcgccactgcactctagccggagtgacagagtaagactctgtctnaaaaataaataaataaataaataaataaataaataaataaataaataaataaaaaataataatacaagttttcataagcacaaaaaaaaa

SEQ ID NO: 567135 - DNA, 148 bp, Homo sapiens
tcgcggtgctgctggcatgccagatcattcctcagttctacctggatattttaccctcacttctgcttagagtagcagcaaacgaaagccttgtagaggaaactgaatgtctataaaaagcatctatgggttaaacttcccctactgg

SEQ ID NO: 567136 - DNA, 125 bp, Homo sapiens
atgatattctattcgctacacattctccgatccgtcctacaactaggaggcgtccttgccttttctttccatctcacctgcatatcccatcctccttttccaacaacaaggctaattttggccct

SEQ ID NO: 567137 - DNA, 417 bp, Homo sapiens
ctgactctagagatctgtcacagctgcgatggtctgagatgcgcacgaggaggaattgttagtcacatcagagctctgactgtgtagctaacatgggatcgtcaccggggtgggggaatcgattccattctgctatttggaaattctgccgatggatgtcctctaacataatgccttctcctgatgtcatgaccagccttcggcccatactctctgtagtccacgggcttcacgtccatcacagtggccttaattcgagactcgtcgttgtaggtctccactttgaccctgactctgaatatgaaagatcggaagttggcatactggaaaacttcttcaaatgcctgttcattcttgtcttttaattccccaagataagcagcattttgtccaagtgatagctttcaggcagaactc

SEQ ID NO: 567138 - DNA, 853 bp, Homo sapiens
  misc_feature (3)..(4): n is a, c, g, or t
  misc_feature (6)..(6): n is a, c, g, or t
  misc_feature (82)..(82): n is a, c, g, or t
  misc_feature (123)..(123): n is a, c, g, or t
  misc_feature (409)..(409): n is a, c, g, or t
  misc_feature (731)..(731): n is a, c, g, or t
  misc_feature (777)..(777): n is a, c, g, or t
  misc_feature (815)..(815): n is a, c, g, or t
  misc_feature (853)..(853): n is a, c, g, or t
tcnncncgagagaacgtgagaacttcaatggtccccgctgcgctcgcgtacgtcgatcgcgagccacaggggcgcgcagagnggacgtagagaccatgacgcgacaggagacagccgagcgantaaagagagaagtgggagataggactcgtactgagccgagagtaacagagccgggaatgagttagtgatgtgtatcttagagcatcaatgcgccaacatcgatcgcagtagccggaacagcagaactgtacttcgaactacataatgaacccacaatacacctggacactacgatacatacctcgaacatgaaaatggaaataagaaagagagtatatagaagagagaacataagaaacgcaatgcatccgcgtcccacctttttctccccccgcccccgccgatnggtcgtgttgacaagaggtgagtctcatcacgtaacaccacatccgcagaaacccgaacaaacgacccctccgacccgcaccaacccgctactcccgcgcgctgacgcactggagctatgcacactacgacgtgatgtactcgacctgagtgtgtgcagcgctacaatccgggagcggtaagcgctcggagagtgatgatattatatagaaggagaagacatgacgatgaatgagtagtagaggtgaggataggagtgtgaaggttgagagagagagaaggggtactgtaaatatataatacgtatctaggtgaatggttantgatcgatataaatcagtatataatacgcgtccgtactaagcgcgnatgcgatgacagagcgcctcagctgtcccatctacacncacgcacgcacaccgaagacaccaggagaagatgaagn

SEQ ID NO: 567139 - DNA, 900 bp, Homo sapiens
aatggcagtgatgagtggagctcagacctccaccgtccacagctcaagagcaagatgacgttctcgatagttgattcagatgaatgtaagattctgtcccggtaatgccgacgatcagtgagagacatacgagaagccgcgaagaaggaaataagactgatgcatacagagcaatctcaggtgacatgagagggtccacgctactagtaacagtagaggcacaggagcttgcactgatgctcagtacgcgaggtaaggaatgtgatagcagtacatagtggcccctcgtaagagctagcagaacctctcaattagcgtaatctgtagatctatatgtcttggggctcatgtataccctaaggactgtgagttagtgggatcccatttctgatgttacgcggattgggggcgagagatgacacatttgtagctacacgggcgatgatctgtaccactcatgtagtgccaacacgttggaggtcgatcgatgacgcctacgacgcgagattctttggaataggaaagcccatcttgtccagtatcgtctcgtggccggtaccgaaatcagtggctgtaggtcacacatcaatttctggcctgatggctacgttcgccgagtggcgaatttatcggaacacaccgggtcaaggtgacctgtaacttaggcttcgttgtgtagaaaagacgacgtgccgccttgtctggaaccaagccaggaccatgggtggagtggataggtctaccctaaagtgcgccatgggctccaagtggcaaggcactttacgatgcaaaccaacacacagaacacagcttgccaacttggctttgagccccttatgtagtctagacagtggggttacagaacataacctcccccggattaggggggttatcttcaaa

SEQ ID NO: 567140 - DNA, 86 bp, Homo sapiens
gcttggcgaaaacccccccaaggctgggaatgtatgtttttataatttgtttttttaaatattaaaaataaaatgttaaactttca

SEQ ID NO: 567141 - DNA, 513 bp, Homo sapiens
ccgctaaacgtatagaacacagattatttattttttatcttatttttagaatgagtgttttttatttttattttttgagacagagtctggctctgtagcccaggctggaatgcagtggcgtaatctcagctctctgcaacctccacctcctgggctcaagccatcctcccacctcagcctcccaagtagctgggactacaggcatgcaccaccaccccggctaatttttgtatttttagtagagatggggtttctccatgttggtcaggctgatctcgaactgccagccacaggtgatctgcccgtcttggcctcccaaactgttgggattacaggcatgagccaccatgcccggcctatttttctaatttctactttgcattattgctggtctttttccctctgtatgaagtagattctattttcagagcccttcttcctttatctaaactgtttcatgtccaattcaatttttacctcctcaatgaaatttttgcattctgcacctcctgt

SEQ ID NO: 567142 - DNA, 98 bp, Homo sapiens
tcgagctcgcacccctaggtagactaacccatgtagacctccaggttaagccatgcagttacaaagtagttagaaatctctgaaggggtgtgagagtt

SEQ ID NO: 567143 - DNA, 594 bp, Homo sapiens
gggtggcaccaccctgagttgctggcagtgagtctgttccaagttccagtgagggaggcatccacccacttggggcttctgtccaaggtaaggagcacctgtgagtctaactgccaggctctgatgggggtctcgtctctgtgggactagaaagtcccaacaatctgaccaaggtaataagagtcagacaagaaaaagagttaaagaaacatgaggctgacaaagacagagaccagagtcagaatcagagctgtgctgtgagacagaaagataaaaaaaataaaatgctggccacaaaagtcaggaaaatcagaaaacttaaatagtacctggcaacaaaagaaagcttttggctgaagatcaatgtgttaaagagataacaaaaggggtgctaacacagaagctgagtccttaaaagagtccggtggcctacctgttgaagcagctaaaaaagagactgtgtttcatactcctccaccgaccagtgcaaaacaagctaaaaagttcctgggcactgcgggcttttgcagattgtggattccagttttgctgagttaaagagataaacagcccttcgtatagaagaaaaaaaaa

SEQ ID NO: 567144 - DNA, 1071 bp, Homo sapiens
ccttcattgacctcaactacatggtttacatgtaccaatatgattccacccatggcaaattccatggcaccgacaaggctgagaacgggaagcttgatcatcaactggaaatcacatcaccatcttccagagagcgagatcccatccaaaatcacgatggggcagatgctgacgctgagtacgtcgtggagtccaactggacgtctatacaacaccatggcagataggctggagagactccattatgacacgggagggagacacaacagcagggatcactcaatctctgcacacccatcatgcctgatgcacacaccatgattacgtccatgcggatgatgaaccaccatgagcacagtatgaccacaacagccctccacagcactcattgagacaactgccactaccatgcaacgacaacacaaaaacatgcatataagccaacccccctgagcccacaaggatacatcgcagatgaacaaagctataggctacttcgctgagaaaggcactccaatgcacccaacaaagactacaaatgtgcccaattcaatcagatgtcaccacccgcacagaaaaagtcaacatggctggagaaattgagaccacctattccatctggtaaacacactatgatatacgcacgattaaagctgagccacggcagagcagacgccatcacaatcacaacagcaatacaaacatcaacatcaccacagatgaaaccatcataagcattgtgacagaccatggacaccccaaaagagaagagttgactacagcgggaccaaaaaagacgatcaccagtaccaacactagtctaaagaccactggacatataccggggagaaaacaagaaacatacaaaacgtagggacacacattgagcacaccctaatcacacgaactgaatcacccacaccacaagtatggaccacaacacgaaactatataataaccaacgaatagcagcatcaggcgacaccacaatggcaaaccccgatggaaccccgagaccgtcaactgacactacgaaaaaacaccaattggaccccacaagaaaacatgcaa

SEQ ID NO: 567145 - DNA, 671 bp, Homo sapiens
  misc_feature (583)..(583): n is a, c, g, or t
gggttaaaggggccatcatacatttattaccaacaacccttttaactccaaaattgggcccagggattaaaaataaaaattcattgcccttcttagtaaagcatttctagtaactttcataaaaaatgtccaaactttgttaaaaatttatcaagccttcaaaagattgggttcccgatatttataatacatacatttaaaactatttgttaactgatccaatggaatatgatttgagaaaatgactcagcaaatgattccaaaaaacacccctgtgagctttcacaatctgaaacggcaaaatggggtcaccaaatgtcccaacagggggacaaacaaacaggtttttaatgaaaaggccccaagataatttgggaaaaattttttcacaaggggggtggtagatctcatttcaaaatattctaagaggccccaatttaaaaattttaacccaaaacattttagaaaggttttaaaacttaattgccttcaccatttcaaaatttgttcaaaaatttaggcgcggaaatcctatttgggaacttggtccctggggggcctattttttttaggggtcggggtntaaaaaacacccaagatggcacttttgcgcaaaaaacaacccggaacccccacaaaaccccccgttgggtttaaatggtaaacccctt

SEQ ID NO: 567146 - DNA, 163 bp, Homo sapiens
tttttttccattgaaggtattatttatttgcagctcatcttaagtgacaaaattccatacagaagactataacagaaataatttataataaatatactcaatacttcatatagagatactatggatactcgtagtcggtgtgaggacaacgaatgcactgata

SEQ ID NO: 567147 - DNA, 268 bp, Homo sapiens
gctctagaggatctgtacactgggttcgagttcaggagttcgggatcagctgacaacgtgttgtggccccgtctctactaaaaatacaaaaattagccgggcatggtggcgcgctgctgtagtgccagctattcagtgaggctgaggcggaagaatagtttgaacccgggaggcggagtgctgcagtgagcccgggatcggtgccacctgcactccagcctgtgcaaacagagtgagactccaatctccgaaacacccaatcagtagc

SEQ ID NO: 567148 - DNA, 438 bp, Homo sapiens
tgactagaccgtgtattccgtgaacgaccgatcgaaggactcgaaagaaggcaacatggtgtctcattgacctgacttatgatccccgctaacgcttatcaacggaaagcccccgcctcaggtagtccagtcataccggatcaaaccaacgtacatatagatgtctcatgtctccctaaagcgtatttaaaaaaagctgtaccccgatcaccttgggcacctgtcgtcaggacctcctgaggctgtgtcacagccgcgtccttagccttggcaaaatgagacctgtcagatattttgggttcacaatacccacattctttggtaaaaagaatcaatatttttttaatgtatacattcaaacaaatcaggtaacctatcagtttcatgtgtgtgtgtgtgtgtgtgtgtgtgtcaatagtctctggaacactgcgtcct

SEQ ID NO: 567149 - DNA, 1042 bp, Homo sapiens
agtgcctgagagctgacatgtccccgtgctgtgctcagtgctggagctgtgcctgtgtgctgctgtttttcttgatgtcctgggggtggcctgtgcagcctgtgcctgatggactgaggtgtctggctgtgggtgcttgccccctgtggtttgtgtgccctgctcatgctggtgagcctggtgcggttgagtggagacctgctgttgtgcgctcctgcgagctgcttgcgttgctttgctttgcttgcctgcctggctggatcctgtgggaccctggggctcggtgctgtagtgcctggcgttggcctggctgctgtgctgtgggtgcctggggcttgccctggatgagctgtcattttgtggctgggtcaaactgcctggggttgagagactggctgcatttgttgggaacctgttgccactgtggattcgcacttttcgctgcaaatgggacccccgttttgagaaaggtggccctgtgagttgggtggccgtgatggccacttcaggaagcttattgtgcatttgagaaccttgccaaactctcttgctgatatccaaaaccccttgaggtgagccagaattccgtgtaatacaaaaactggatgctggggtcacaacatgatgtgatgacctttttgggcatagcgaaaatgttggcccaatcaaacagatggacgggggtggactaacggttgcttgggtctattgaaaattttggcagaagggtcataaagttttggcaacaatggtcccaagcaaaaaagggtaatttgggaatgtagctgattttgaatttgtgccacggtctgttggttggaagtgaattggggatattctttggaatcgatgtttggggcattagcaaagcatccacgattgagattttaacttaattagcatcaagaacaggggcaagctggagtgtccagggggcaaggtgtcccaccttcactgggaaactctacgcattgagttggccaggggttccatacaaatcccaaggttttgacgtctagtatgctggcaaatggttctgaca

SEQ ID NO: 567150 - DNA, 276 bp, Homo sapiens
gggggaccccctgggggggggtggggcccccttgggggttttttcccccccggggccgggggggcggggggggattttttttacccccgttaatttttttttaacggtttttttggggccccggttttggggaacccccgcccccctttttttttgggtttgtgggaaaaattttttttttgggggggaattttgggggggggggggggggggggggggtttttttttttttttttttcctttggggccgggccccataattggccccccctttta

SEQ ID NO: 567151 - DNA, 631 bp, Homo sapiens
  misc_feature (455)..(455): n is a, c, g, or t
  misc_feature (470)..(470): n is a, c, g, or t
  misc_feature (474)..(474): n is a, c, g, or t
  misc_feature (476)..(476): n is a, c, g, or t
  misc_feature (486)..(486): n is a, c, g, or t
  misc_feature (494)..(494): n is a, c, g, or t
  misc_feature (499)..(499): n is a, c, g, or t
  misc_feature (503)..(503): n is a, c, g, or t
  misc_feature (505)..(505): n is a, c, g, or t
  misc_feature (513)..(513): n is a, c, g, or t
  misc_feature (533)..(533): n is a, c, g, or t
  misc_feature (537)..(537): n is a, c, g, or t
gggccgccccctacaacctggaggccggccagggcgactacgcgtgcgcccgccgcctacgactacttccccgccgcgcccccgccgcatcgctacccctacctcgtcacagggataaccagccctcatcccagggtctacaaaatccaaagccggaccgttcaccggcaacttgccacctctatcctggttgtaagaggctttcccctcctccagggttgggtgcttgcagaattgctccacctcctggggatcttcctggccatcatccttctccccctttggtgtcatttgctgttttgccttgaggaagcgacgatgccccaactgtggagccaccttcgcttaaagggaacaccaggcccggctttcctacacccagctctctttttctaatgtaaatgttgtgtacaatagttttatttgattaagcttcaggactgttttgtaaagcnaggtgggaccgatgnggcncncgccagctgnggtttccnggagngtgnanaggcaggnctgctgctcccgcccgaggntcangacaactcaataaagccctgcttttattttttgcagttttcaatttgaaaaaggtgagaaataatgttttcaataaatgagattcatcccctta

SEQ ID NO: 567152 - DNA, 155 bp, Homo sapiens
  misc_feature (41)..(41): n is a, c, g, or t
  misc_feature (46)..(46): n is a, c, g, or t
  misc_feature (154)..(154): n is a, c, g, or t
catgagcatagaggtaaaaatctgcaacaaaatattagcanattanatccaacaatgcacacaaaaaaattaaacactgtgaccatgtggaatttattccaggaatgaagggatggttcattatttgaaaatctatcaggataatccaccacant

SEQ ID NO: 567153 - DNA, 888 bp, Homo sapiens
  misc_feature (888)..(888): n is a, c, g, or t
gaatgtgtggtcggggaattcatgtggaggtcagagtggtaaagcaagtgtgtgagagggtcccagctacgacggaaatgtggctgccacatcgtgtttgaggtccattgatcaagtttggctggccttatgtgttgcaggaggcgtggtgaactctgccttatataatgtggatgctgggcgcacgagctgtcatctttgaccgattccagtggaggtgcgggacattgtgagtaaggggaagggactcatatttctcatcccgtgttgtacatgaaagcaagttatctttgactgcctgtctcgaccacgtttactgtggcagtcatcagtggtagcaccgatgaactagaatgtcaacatcacactgcgccttcctcttccggactgtgtctgccagccagtttcctcgcatctgcaccaggatcggagaggactatgatgagcgtgtgctgccgtcgattagaaactgagatcctcatgtcagtggtggctcgctatgatgcgtggagaatgttaattgacccagagtgaggtgttctccaggcatggtgagcgaggatcgttacagagggagcgtccacctttgggctcaatctggtgacgtgtccttgaagtctgacttcggagggtcacagtagggcggaggcatcaatggttccgctggaattagagggcagtcggttggactgtggggcctgaaagggcgagtcctggggggaccaggaggtgtgtggcacctggccagcggaggcgttgacggcccggagagaagcgacgcgccctcggcacggaaaaaacgcggggaacccgcctggcaccgccgggtggcacgcaaactccgcgccattttgtgggtcaaaagccccggggtggcggcccggcacn

SEQ ID NO: 567154 - DNA, 894 bp, Homo sapiens
atgtaagcaataatttttccgtgtcttatgagtatggctagcgatatatttattacatgctagatgggttctttgcatgtgggttccatataggtgcaggaaatttcctcagccactggagggatttcgacctatatttgtcatttggatgagctgttattagattgaaatctagacatcatttcattaaaaattgtgccttagaaaacgcaaagctgttgcgcatggcgatgaattatggatgcagtacatggaagagagatgaagtcacttgcaagtttgcaagacttctcatggaggtgtttgctgttttacaggaaaaaataaaaatagagaggaatgaaaggaagatgaaagttagaaagacaaattgtttgaaaagtgtacagatcaagtccaatatttgattatccaggcctgcatgtttgtattagatattttgatgatgtggatgtgtacacgttgcatgatatgagcagagtaccactagtaatggcaaaaggatgtacaatatggtcattcataagcgatttgatagaatactttttacatgtgcattccatccgttatgtaaggattacgtgaattttggcatcccttctggtttcacgaacccattatacatattcttagtgaaggctcatgtccatgtttggaggtgaatcgagtcagaaattaggcccatttccagggaagtgctttcctaatgaactagttcagcgatagtccacattctcaatctaatggacagtcattattggtttcctggggcggacagggtggcggaaactgtgtcaaggaagagggacctcaattggcgcaaaatcgccgattatttaaggggtgggcaattccacacaatgtcctcattacgtgtgcaaatactaccatccg

SEQ ID NO: 567155 - DNA, 437 bp, Homo sapiens
ggtctaaaaaccccggtgccaaagtccttcttaactgaggtaaaaccttaacaaatagggaatttggcagggaacacacctgggtaattcagaaccctatttatatccggttaaaatttaaggtcctgtagtttatataaaagtcggatgttaaaatattatatttcagtactagaagcttctttgcagtcattaacatgccaaattaagtaataaatataaaagtgattgtccataaattatcattgaatttttgtgtttatttggaagtgttcggtatttatctgccctttgggtatatatccccccatacatatgccaacatgtaaataacctcatgtttattcctaatttaaattgccccaatatttttaaggtatggttaccctgtgttttaaattcctttaaaaataaactttgtaagcagattttaattt

SEQ ID NO: 567156 - DNA, 243 bp, Homo sapiens
atcgaccagtgcactgacgatgccagtcacggggccacaaggtatgctgacctgtggtcctcacatgacaaagatgctggacaacccctcaaaggacagggatgtgaggttacaaaatcattaaacacggagagtaaccgagcagagggtaggataggagctgatgcctcggagaatcaacgccagccgagacagttaggaggccctaggctctgaattaaatacaatactcttgaggggtac

SEQ ID NO: 567157 - DNA, 241 bp, Homo sapiens
tgaattctgcatgtcgattcctagagtatccccgcgatggataccttcactatgtaatcccagcactttttgggaggcagaggccggttggatcacaaggtcatgacttcgagaaccctttgcgctaacatggcgaaaccccgtctctaaaaaataaaaaaattagccaggcgtggtggtgggtgcctgtagtcccagctactcgggaggctgaggtaggagaatggtgtgaacccacgag

SEQ ID NO: 567158 - DNA, 724 bp, Homo sapiens
cactctgttcttccgtcgctccgccgttcgcgtttctctgccggatcggaatggagagaagagatcgccgacgctggtcattgacaatggctccggcatgtgcaaagctggttttgctggggactgacgactccccgagcgcgtgtttccttccatcgtcgggcgccccagatcaaccaggggcgtcatggttgggctatgggcttcataaaggactcctacgtgggctgacgaggcaccagtagcaagcgtggctatccatgaccctgtaagtaccccattgagcatggctatcgtctaacaacttgggactgactatggagaagatctggcactacacctttctacaacgatgctgtcgcgtggatcccggaggagcatcccagtgctgctgaccgagggaccccctgaaccgccaaggacaacagagagaagatgactcatgattatgttctcgagaccttcaatcaacccgtgacatgttacgtggtccatcgcagtgccgtgctgtctctctacgtccatctgggcgcaccaacatggcattgtctatggtactctggagacggggtcatgcgcacatcggtgtcgccatctactgagggctacgcccatccccacacgccatcctgtcgtctggtagctggctgggcgggagctgaacgactaccgtcatgaagatcctcactgagcgaggctacagcgttcatctacacgagcgagc

SEQ ID NO: 567159 - DNA, 318 bp, Homo sapiens
caaactttccctcatctttctgtcttcttctgagccctccaaactgttccaacttctgcctgttacccagttccaaagttactttcacattttcagaaatatttatagcaattgcccactccctctaccaattttctgtattagtctgttctcacattgctatgaactaactgaaactgggtaatttatttaaaaaggcttaattggctcattgtactggggctgtacaagcttctgcttctgggtaagcctcaggaaacttacaatcatggttgaaggtgaaagggaaacaagtacatattcacatggccatcagga

SEQ ID NO: 567160 - DNA, 151 bp, Homo sapiens
gtgataggcctgccgtggcttagaggggcgctgtattccaggacgtcgagttagtcagcccaccctcctctgcctcaaggctgtcctggcttgcatcaccagtctccagcatgcgccaggtgttctgccagatgcaggaacttccacaact

SEQ ID NO: 567161 - DNA, 256 bp, Homo sapiens
gcgcaataacatgtcaacccgctgccgcatcgtgccgcggccggaggcgaccgccccgtgattttcctgcatggattgggagatactgggcacggatggccgaagcttttgcaggtatcagaggtgcacatatcaaatatatctgccgcatgcgcttgttaggcctgttacattaaatatgaacgtggctatccttcatggtttgatatatgggctttcacagatcacagaggataatctggattaacagcagcag

SEQ ID NO: 567162 - DNA, 268 bp, Homo sapiens
ggctctaacggcggcagattgaagacccagaggactagcttatcgtggctcgttgaagtcacactttgcaattcttgttgttgctgtcgcatactgggcctgtctcgggggacatttactctgtattgtccccgtctttcccatcgtctagcgtttggggaggaacaggcagagagcttcggggcgtctgtctccgtgctctcctgtctccaccgtcttggttttgcttcctgctggatgctgggctcctgttgcgacccgggctgtg

SEQ ID NO: 567163 - DNA, 179 bp, Homo sapiens
ctccacactacgggcctgtttgtgcctcatattactgatctactggagtgactgtggattctctgatgctacatagtgccttagcttcttcgtgctttagttccctctgtgtgcagacaaaaatctcatccctcacctcctgatttattaagttctccaggaatattttcctgatgtta

SEQ ID NO: 567164 - DNA, 959 bp, Homo sapiens
gggcccgggaaccgagtagaagaaagcatcaaaatcccccagtgatgtaaacatttctgctcaagcagctctattcaaattttataagtccagttagaacctgaagtatttaatagtttggttaagaatcatgaaagacgtccagaaaaatactgtgaaagttttatattcatgaagaagaagagagtgtgctctgtaaaggaaataaaggaatatcttatcaaattaggcaatacagaatgtcatcctgaacagtatttggaaagaagatcaaaattagataaactattgagttattattcaaaatgaagacattgcaggtttcattcacaagatacctggcttggtgactttaacagaagctcccctgtgttagttttgctggtgtcgatagcctggatgatgttaaaaatcatacatacaatgaattatttgtatctggaggttttatcgtatctgatgaatcaatgctaaacccagaggtggtcacagttgagaaccttaaaaattttgtgacattccttgaggaacttagtactccagaaggaacagatggcaatggaaagtccactgtaaatttcagaagaacataaaggaagtaggcagattgaatggctaaagctctaagtctgttgacgcttctgaatgtctaatcagcaagacaacatctggtcgacaatccgtcataccacaattgggattcccaaaactcgaaatgctccagaattggctcgccttatcagacttcagggtcagcacatacagcaacgacacagtagcctttaacagacggaagaactcgcggaaggccaccaggtatacggatcacggagaacggagttgacccggctggcgcccgccggcacaagcctcgaaacccgggggccatcccacctcccacgcaaaaaactcaccaaccagcgcacagcaaactgcgacaccgcaacgccacgacccac

SEQ ID NO: 567165 - DNA, 181 bp, Homo sapiens
  misc_feature (10)..(10): n is a, c, g, or t
  misc_feature (23)..(23): n is a, c, g, or t
  misc_feature (59)..(59): n is a, c, g, or t
  misc_feature (71)..(71): n is a, c, g, or t
agaaatgtgnattaatatatacnacttactgctataaaatataaacccctggaggaaanaaagttagcccncaggagttttcactttccccagcagttctagatattaaaagagggtttatggaacacgttttttgtgttttgttttgtttttttttttgagacagagcaagactctgtct

SEQ ID NO: 567166 - DNA, 257 bp, Homo sapiens
gatacacattctgggataaccctcagtacctgatcaagctggaggaggaggattaggacgaggaggatggggagagcggctgcaccttcctggttggggctcattcagaagcaccgagcggacggcagaggaagcatgggcgatgcacatgcacaccatcgtgctttggcatctatgtaggttccacgaggagttaagtggcgctgaccaacatccactctcagcaagtgacttcttcctgcacgagatcgcgccag

SEQ ID NO: 567167 - DNA, 1367 bp, Homo sapiens
tttgaaaataaagctgttatgggtgtcattcaggaaaaaaacaacaacaacaacaacaacaacaaaaaaaaaaaaaaaaaaaaaaaaaaacaacaacaaaaaaaaaacacagaccaacacaacaagcaacacacgaaaaacagaaaacacaaagaacgagaaaacagacacgacaacacaacaacccagaggaaacaacgacatgaagcgccacgggaaacacgaagtgagcagagaagacaaaaaaaaaaaccagccccacagacacgacacgcacaacacgcagacaccacagacagaaagaaggagaaaaggaaccacaccaccgaaagacgagagcggagccggccgggtggagacaaacggagggagaaggcgcgggagaccaaggcgaagagaggggccgagccgaccgcaagcacgaccgacgaagaagagaaaaaaaaggaaagaagggagcggcgggacagaacaagcggaagagcagaagaagggagagacaaaaacgcgcaggcgaagcagcggcacagagcacgaacggaagaccgcaaaacaacaacaggaggaacgaaaagaaacccacgaacacgagaaacaggcacgagaagcgaagaggagacacgaagagaagaacacagacgagaacaaaagcgagaagaaaagaaggagaagagaggacgaggggaagagaggcaagaggcaggacgaagaagggcagaacgcgcggaggagacggaagcacagcaccccgcaggtaccaaacgggaagccgagagcaagagagaggcacagagcacacgcacccaacaagacagctgcagcggagaggcgcacccggagcgcggagcaagaagggaggaggagggcaagaaaggccagaggaggcgaggcgcaagaggaggagagagacagcaaaagagcgcagagaagaccagaaagcgaagcggcgcgggcggagggcagggcaagagcgacacgacaggagggacggagcggcggaggcaggaaagcgacgagcaccggagcgagcgacagagaagggggcgagaacggggcagggacaacagcacgacacagcggaaggggcgagagcagggcgcgagcgagaggggcacggcgaggaacagcggccgaaagagacgcgtagacgagggagagcgagcggccagggacgaccaggagaagaggggcagaggaagaagacagaggcagccgagcgcgcacagcgagcacggcaggcggcggagcagaagaaagcgacgacacacgagaaacggaagacggccagaagggaagagacgcacacggagcgcacaacacgcacgccaaacagcacacgaacgagggcgagacagagaacagagcaa

SEQ ID NO: 567168 - DNA, 439 bp, Homo sapiens
ccaagggttctggaggtgcttgcgtaatacatgagtcattcttggctcaaacaaactccttgttttgtttggttttttttactagagacaaggtctctcactcacatcacccaggcgggaaggcaggggcatcatcacagctcacggcagcctcaacttcccaggtgcagggtgattctctcacctcagcctcccaagtagctggggacgacaggcatgcagaaccaggcccggctacttcttggtagagaccggatttgggcatgttgcccaggcggttcttgaactccggggctcaaatgatctgtccagcttggtctcccaaagggtggggatcccagatgtgacgccatggtgccggctccaactctttaatatttaactatccctaggtaaatctctaaaggatcctaaattctttcccctatattagacccca

SEQ ID NO: 567169 - DNA, 898 bp, Homo sapiens
cttgtagtggttgttcgtagaggatctgttcatttgttcggtccgtggggggctgagttgtcgtcctcgtggtgttgtatgcgcttgtcccccccgcgttgtccctcagttctcatctggctggcggtgggttggtttgactcccttgagtcgtcgctcgcagatgtgccagggggcagcgcgtttcgtcttctcgcgtgtcaccggggtgagtttctctcgtgcacccgccctcgtgggtgccggccttgcttctgtgcggagaagcctcgctgtggcgccctggggatgtgtcgcgcgccggttttgggtaacaacggccggtttgttcccctctgcacccatggggtgtccccccttttctgctctcccttttttgcggaggtgtgttcttcctcctgaggtgtcttgggctcccgagggggcgtcctttctcatgaacggttggccccaccgttggggcagtcgttttctgttagagagtaggtctgctgcttctcgcactgtctgctggtgaacagtctggtcgcgcccgccggagttggttctcgtcttctgctgcacacgcccgccaggtacatgatgtgggcgtcgcctcgctctcttgctgcagcaccggttggtgtcgctgtcgcctttcttcctcacaattgtgtaaatggtgccctatctccctgctcccgtggatttccgccccacccgcccttcgcttgttttaaccctaccgggccagtcgactctgtaagtgcggatctcacatatagcgcgcggtgacggtggctccacgccgacgctgagccgcgcgcggcgaactccagctggagacgctggagcgcggccgccactaaacattcgctattggcagacaccacccgagttcacaaaccaccatcatgca

SEQ ID NO: 567170 - DNA, 146 bp, Homo sapiens
  misc_feature (60)..(60): n is a, c, g, or t
aaaattatgctgagtgctacaacttctcagtgatggagacactgcagcactgagtccagntggcatggtgactgtcattgatggagacacgggggagaatgccaggtgcagctctcagtggagcaggacacacggtgacttctgtt

SEQ ID NO: 567171 - DNA, 111 bp, Homo sapiens
acacttgattttattctgtgacactgagttgctgaaacccccccatttcctgggcagaggagggcagaagggcccaccctccaggggggtctgcctcccagcaggactggg

SEQ ID NO: 567172 - DNA, 209 bp, Homo sapiens
caggtcgtgtactatcagcactttgggaggcaaggcaggcggatcacttgaggcaggagtttgagaacagcctagcaacaatacagaaatacaaaaattacgcaagcgtagtggtgcacgcctgtggtagaggatgacacatcgcttgtaacccaggaacctgggatgggtacccgagctcgaaattccgtcattccatgggtcatagc

SEQ ID NO: 567173 - DNA, 119 bp, Homo sapiens
gaggattcgttggctgccgtccccgctgctgtccattgggttaaaaacgacaccaacatcagccatttaaaatccaagttgcagcagtacttgcccaagcatcatcaattaaggtgtta

SEQ ID NO: 567174 - DNA, 339 bp, Homo sapiens
accatatccgctttcttctatctttgttaatctcttaagcaaaggtgtccctgtgctacatccttggttttctctcctgtgaatgcgctttccttccttactatattgcaaactatgagtttttcaagttgttctgctctattcctcttttctctagcagtttacaataagaaattagaagcaaccacacaacattctgagaactttgttatgtaaaatttcttctgccagatatcctagttcatcactcttaagtttggccttccacaaacccctcaggcatggtcacagttcagccaagttcttggccagtttatagcaaggatggcccttgcttcc

SEQ ID NO: 567175 - DNA, 806 bp, Homo sapiens
gagcggtgcgggcggttgggtcgtggtgggggcggcggccgcggaaggccaggccggtgccctgcggggacgcccagcgcagcccagccccgcgcagcccagccctgccctgccctgcccatgcgccatgaccctgcgcccggcggcgcgcccacctgcgccgcatccatgttctgacagcacacacccaaatctggccaggagacacagccaaagcagctccccagtcgtccgagaaaacggactgcagcatccatgccacccacagccgtgccccacactagagccaagagaccaaggcaccacttcggtggacggaacgggactcacgagtacggctccgtcatggacgacacgggtagggagtagccctggtgaccacgccaggcacaccgagacggcgctaggagcacgcccaggaaacattcactcacatgcacacacagaaacgaacagatcgcacgcagctgtgtacactgtactgcctgatgaccccgacgttagtacagccaagacggtaactgacggcactttcgcgcgaaacatgttccagcaggacctacccccgaagacacagacacgcctccattggtggcattactccctgacgacccatgtcagcgtgaagcatccctgctaccaggggcgcgacctcctaacactactcctgaagaacgttggactctagccttcctacagccagatacatcttcgcagctggagagaaccactgaatctccaatcccagatgaaaggacactggcatggtctgacgaaagggagcacgacaggcgcaagctgatcac

SEQ ID NO: 567176 - DNA, 273 bp, Homo sapiens
agtactgatatggggctagattatgtcatgtaagtcatcgtaggcctgcttgtagtgaaatgccttgggttacttctgggactcagaagtggaaaggtgagagtcctagttttatggctagggccaagggttattatggtaattgctactgggttgactattttggtaatggtcccattggccagcacatcatcaggcaggttaatgcatgcatggctattcattagtatcatggaggctgtggcttgtgttcggaacatatttggtggggtc

SEQ ID NO: 567177 - DNA, 925 bp, Homo sapiens
tcgcggtcgtggttccccttcggggggggttatttacggttttgtggcagcgtgtttgtttaccgggggcggccgcggttccagttgatggaagacacgggggtctgacagagcgaggggatgaggtctttagagtttagagggagtagctgttctctgtaatgcgggggcgccgtgggtgtcggggacgttggacagagaactgaaagtgtcaacgcctcagggtttgaaatctcggcgttcacagttttttggggggaaaggccggtttaccccacagccggtggggccccgagggatatttctggggcccgcccacatgtgattatgggcccccgctggttgttttttgtgagtctgtcgggatttattcgccataggccggatgttcccttccctccccaggggcccgcgatttgcgtatactgaggaagtgtccctttacccggggttggtaatcccggcggccaccttcgatcgccgccatatgtagcccaatttgtggaaaccaccggcccatttgggagagttctgttattttggagcaccgctgtttcgccccagcattatattcattaggttggactttgcagaatctaccaatgaggtcttgccaccgaactccccgcccttgtacactttttcccccaactttagccaagtagatatcttgagacccctaaacttcttgggctgttctttttaacatccccaagcggatatagaaaaccctttcagatttttcatctgaaatgttcttgcagcattgcttcttctatccaataccctattttaccctacagaaatttgttgcacaggcagataatccgttatttagtaccccttttatttccattcttttaaactgccaaacccatctgtttcatgtccccacgactttaaattaatttacaagtttttttga

SEQ ID NO: 567178 - DNA, 403 bp, Homo sapiens
gcagagtaagggctccccctcatcatagtacttatcacaccacattgtaattacccatttccctatctgtttcttcctctacatcaagtgcatctcagcgtcaaggaccacgttaggccgcttctgcattcctagcgtctagcacagtgcttggtgtgtgaaaatgcaccgagctatgcccttagggcgtgcacacattcctgtctgctgaatgagtgtggactgggcacggtgttgtcccgtggttgcggaggacatacaggggaagagggggccaggaggaccgacaggtgccactccttccactgctgccactccttccactgctggagcccccagtcctgttgccctgggtgcccctttccctccatcctctctgctaaggcgccccctaagtggcaga

SEQ ID NO: 567179 - DNA, 897 bp, Homo sapiens
gtagccacccaccaaaaggaataatggctgaaaaagcggtgtctacagttttcagcacgcatgtctggttccatagtccttctcctgatgggctgggctgtgggctgcatcataatgattgatagtttgtctgctctctgaggaaagggcaagaggaagatgatcatgatggagatacccatagtaggaacgaattgattgtagaagtattggaacgatgtactggatggatctatagattgtcctgcaggtatcaatagccgaatgtcgggatgttgtgaccatcgattggttacaaaacatgtgggtctataaaggggcacttgggtatgcatagaagaatttgtgtccaggacaagtaaggaaaatttatggagtgaatttcgtcattgatattctgagcgtggagagagagatggtttgagattggtggagtgaaacaatggcatgtccattgacaggaacaaggtttgtatagaagtgtttgatgcactgtttgactttgaatatattgatcgccgccgtgttccctctgtaataaagaggtaatagcagaaaggtgtggcgtgtagggctgtggcaagggtgggtgttcatggccttggtagtgcgcaggtaatttgtgaggatccctttgagcccgaggaaatgggggcgatcattgcctaggtgatagaagaggagaaacggattctctatgactgagatgcacttttgtcagaggtggtttggcgcaatcatgggttgagtaacgaaatgaggagttcgtggaaaagaatctgggttgtgagtttgctattgttcatggcttgtgtgcagggggggaggtgtgattcaaatggcggggggcattggggtcttttcagggggaagggtaggcgggggcaataataagaa

SEQ ID NO: 567180 - DNA, 1881 bp, Homo sapiens
ctacctgccttctgtgtcgctcgccaatcctatagccaccagtcgaactagacaagctgagactgacgttcatgtgcctcgtttgtctagcttgtcgtctgttcttctgcttttcttctgtgcttgcctgcctctgtaggcgttgcaccattgaggtgctgtgctgccgctgtgttgcgtggtggtgtgctcgtcccccagctctctcttctgtgtgtgggatgtgctttcgtctcctctatcggtctggttgacctaccttccttgttagattcacgctgttcttcgtgtcgggcagcctttctctcccagcgctcgtcctccagggggtgatcgctctctcgtgcgcctgctcgtaggcgtccgtccttcgttcgttcgctcctctattatgttggtgtgtcgtgggcgtccactctctcagtagagcgcggtgggtgcctcagcaaacctcggtgggtttttttctcgtgcgacgtactcaccgctaagtgttacccccggcgggcttggtcctcttgcacctagcgattctccctatgacgagggtttcgcttccccccccccttgggggcggcctcccgtgccctccttcgtgtgtgggttgctcctaggctttccttgctttctctcctcctcgccccctatggggcgtccccaactgtaagctcccgctcgtttgtgatcccgtgccgggggtctctcccacctatcgcactgggggggcgcctgcaccgccgtggggccccaccgcctgtgtccgcagcagcgcacaaatatgtgtggtgggttgtctcgtccactcctcaccgcggggttgttttccgtccccgaggtgcttctgaggggcccccccgttcgccactatcgggcccccccccggcccccaagaaatgcgcttgtttttttgaccggcgaggtctcccactgccaccggagatgtctgcgggtttgcccaattttgtgcgcctggccacaatggtggcggtttatatattgcgtaggtagaaataatagggaggattatttgtggcgtccccccactacgggcaccaaatatatcgcgcacagcacacacccctcgtcgtcacatgtggctactggcccgctctcatccggaggacaccttcttcgtgtagaaatcaatactgccgccccgtttcgtcgcagaaaatacaataaaacaatgttggcgtccctcctctgagagagcgctctgagtatattcgtcgaattatattgcacgcacactcttcgtgagattcgtgtaagaagacacatctcgtgtttgttgctcgagatgttgtggaaccccctcgatatatgtgagaaggtctaaaaacgtcgggttgtcccccacactgggtgatatgtagaacacgcgcggttatcacggggcgctcgtaagtatgtctttctcggcgagtttttctctttatagagaggctcggccccacagagatcccacactgtgtgtgttgttgtgtgtgtggcgggagtgtcttttgtcacagacgtcttgggagaaagttcctcactcgcccgctgttggacacccccactggtgtgtctctcttttgtgtatagctgtgagtgtttgtctctttgggcccgagacaacccgctggggctctgttaacttgcttttgagagttggagaacgcgtgttgcactttaacgcctcgtgtaatgtgagtgtgcacctattctgtgaaattataggtgaaaggtgtttttttggtgaaccgccatttcttcgagtttctttgaaagaagatagacccaccaattttggttttttactgttatgtgagacacctttaggcccccagccacacgtccttgtgtaagggaaaattaaagatgcttccgtaaccccaa

SEQ ID NO: 567181 - DNA, 198 bp, Homo sapiens
ccaagcattctgcaccacgtcaaggctcctgcaggcagggtccccagcgtcacctgttgcggagagaagaaaggcggttcagaggctggtactcccctacagctagccttgggtcattcggccctctaggagtgaccctagtgacttcccctgggagccgcattttcaatatctggaaaatgggctcaatgcaaaggt

SEQ ID NO: 567182 - DNA, 947 bp, Homo sapiens
ctcagctctctgatcctgctctttcttcatgatacttagtctgcaggcatattaagatcatcccagaggttcaggcagtcctgtcatctctgaaaaaactggggatatgaaatcttccccctacccacttaatgcgtcgcgatatgatcttttcaacagaatgcttcatgcccaaaataccagcctgtcttagcagtgtctacacttgtttgatctgcgggcactttgttgcattgcttggccccaatattcagggctccatgactaagactggtctcctcagatgccctgctttacacttcaggggccactctcatggctcccacaggggcgtcactgctcgcgccttgcagcaccctaacctcacttggaactccagagcagcgcaatccgttgcgaaaaaccaaagatgctaaactaccgcctaaagccccttattttcatgtcctgaagataaaccctggtcttcgatacccatatcctccagagacgaaacactatctctgcgcgcaaggaggcacgcaacatttgttcccttgcctcctcccaccccttggaagcacatggcagcacggccacacagcctcggccttgccatgtggccacgcgtcgcctcaggtccgtctgatggtgtcggcgccgggacatcaccgggttgctaccctccctccttgggagctctgattccgtgagtccgctggctccccgctctgccgtacggtgcccccggcactcgggtctcctttccgagccactcatccttccgcgcggcacacgtgtgtccggccgcacgagccactcctctttccgatatctcctcaccccgaacaggtttcttcgctcccccgtgtgtacgccctttcccgtgctcctgcacccgactctccctgcgagcgccccacaccgcgcgtagggtattctgcggccggggacggcccggcctgtag

SEQ ID NO: 567183 - DNA, 921 bp, Homo sapiens
tgcgtgttggcaagaacccaggacgttgttctgggtggttcccaggtacaacccccccaatgatggaggaaacccccgggggggcccaaaacaagcctgcccggcagggagcgcccaccccggcagggcggtcctggaccgcccgcagtttggcccccaacgcaggggagcccccatagctttgatgcccttggatgctgcggagaaaacagatgaccaagtggtgtgcgcacccgccgggaggaagcaagccgcagatcacgcaccaccccgtgggcacccccgcggcatgttgagccacccgggtggctttctctctccgccgaagagtggccactccgcggcgtcattgtttgggccaggacaccaaggagggctccgcacgcacgcacgcctatagcggagctcattccagcacgggagagcgcacacccaccgctgcaacacacgaccgcatagtgtggtggggagacacacagcagagccgccgcctggtgggtactcacccactaagaccgcctcctccagggcggtggggtgcagggccacaccagcggcgcctcgaacaggctacacgtagttctgcggagaatgtacgggaggagagaatacagtctctccggtgagagcatgacggggagatacgcacagagcgattcatcgcgctttacaccaacgcccccacggcgcgagccccgcacccgcgcggcaccgcacacccgcctgcagcgccgggtcagtgcagggacgcaccacaacgagtgctgtgggtgccaacacgcgcaggcccaccgcacggggggcgagctgggagggcggcgcgggagcaccacagggcgcacccgaccaagcaatgcttcatgggcgcgcgcggccttgccagaagaaaagaagaagagaaccggggagaatcaatgaaca

SEQ ID NO: 567184 - DNA, 154 bp, Homo sapiens
gacgttctctacaaaccacaacgacattgcatcaccataccaattattctgcgcttgagctgtattcctaggcacagcactatacttccttattcgagccgatctgggccagccaggcaaccttctaggtaacgaccacatctacaacgttatc

SEQ ID NO: 567185 - DNA, 631 bp, Homo sapiens
actacttatgtatctctgcctgtttacatggtgtttcggaaactccttccttcatttgttctttcactcatcaagtaattattgatctctgctatatgcctaggtattatactagatgcttccaagtttgcttagacctttctgtctccctctctccttcctgctcctccatggtttggtagctaaactggccctagagaaacaagatgctgtcacctacttgactaaaagtcttgtcactgctcagatactctgaatactgctgatggtatggaactgctcatagtatttatcttctttgatatgactactacctgggttggatccaagttaatgccatgtcttcaaacactcatctgtaagtagtggccattctctctgagtggcaacccttttccacattagtcacctggcttcttctagtcctgttacaatccctatttgtaaggcccacattaaactcccagtaagcagctgattatgaccattccattcatttctgaatctccatgtcattaccctcatcaaaacagggctgactacaaaaaggataaaaaagtctcacgtgaggttttgaaggcaaatttctgtactaaagcttctctacagtcttaaagtcccaatgcttaaa

SEQ ID NO: 567186 - DNA, 385 bp, Homo sapiens
  misc_feature (274)..(274): n is a, c, g, or t
  misc_feature (330)..(331): n is a, c, g, or t
tgagacagagtctcactttgcttcccaggctggagtgcagtggtgcgatctcagcttactgcagcctccgcttccggggttcaagcgattctcctgcctcagcctgccaagtagctgggactaccggcgcccaccaccacgcctggctaatttttgaatttttaagtagagagtgggtttcactatgttggccaggctggtctggaacgcctgacctcaagtgatccgtccgcctcggccttccaaagttctgggattacaggcgtgacaaccngccgcccggccctgagtgagtcttaatcccgtggccatctgcgttcctgcaggctnncatctggccctaatggtcccctggcatcatggctgccctcagattcctttgtga

SEQ ID NO: 567187 - DNA, 150 bp, Homo sapiens
  misc_feature (50)..(50): n is a, c, g, or t
tgtattctcaatagttggattggttggaaacaattgaaccattgacaggnctttatcatggcgaggtggctgtgcaaagagaaacaacaggcatactatgtttggtaatgaagtataaagtcgttgtaggggtactcgaagtctcgcaat

SEQ ID NO: 567188 - DNA, 270 bp, Homo sapiens
ctacacatctacagatatgcaatattccaatacgaatgtgggaattactcatgagacaacagaatatcttaattatgcagagtgctggttccagcaacatgatagatagatgctttaagttgcactctgacgaaagctggcctctgaaatcttaatgcagaattgggctgcaaccatggacgaccttacaagggtaaaagagaccctagataataattctgtgacttctccacttcaagctcttcaacagagaacatggctcattcagtg

SEQ ID NO: 567189 - DNA, 859 bp, Homo sapiens
ggcccccgccgagaccccgaccccggccccacgggcggacactcggccgggcagccgcgggccgagcgcagccgcctccgccaccgatgcgcctggtggccagactccaagtgggaccggcggacacgcagcctcgcgtgtcaggggaagctgatggagaatcgagctctggatccagggactcgggactcctatggtgccaccagccacctccccaacaagggggccctggcgaaggtcaagaacaacttcaaagacttgatgtccaaactgacggagggccagtatgtgctgtgccggtggacagatggcctgtactacctcgggaagatcaagagggtcagcagctctaagcaaagctgcctcgtgactttcgaagataattccaaatactgggtcctatggaaggacatacagcatgccggtgttccaggagaggagcccaagtgcaacatctgcctagggaagacatcagggccgctgaatgagatcctcatctgcgggaagtgtggcctgggttaccaccagcagtgccacatccccatagcgggcagtgctgaccagcccctgctcacaccttggttctgccgacgctgcatcttcgcactggctgtgcgggtgagccttccatcctccccagtccctgcctctcctgcctcctccagtggggcagaccagagactcccatcacagagtctgagctccaagcagaagggccacacctgggctttggagacagatagcgcctctgccactgtccttggccaggatttgtagactccctgagcctcagtttcctcaactgtaaagtggagatgggtttggtgtcgggaataacgggaccaataaatgatgcttt

SEQ ID NO: 567190 - DNA, 391 bp, Homo sapiens
  misc_feature (84)..(84): n is a, c, g, or t
  misc_feature (103)..(103): n is a, c, g, or t
  misc_feature (160)..(160): n is a, c, g, or t
aaaatatttttcataaatgaataaatctggtcatattccatcttctttctttaatgtagttctcttattattttttgtttgccntcctcttttcccactgctncctctctcctgcttattggcatcgcttctgcctatgtaatcatgctatagaccaaancatgtattcttttatactttgtatttaccctcagataatcatatacggatgtgaatgcatatacacatattaacatattggtgtataataaaatgttctaggccgggcgcggtggttcacacctgtaatcccagcactttgcggggcagaggcgggcggatcacgaggtcaggagatggagaccatcctggctaacatggtgaaaccccgtctctactaaaaatacaacaa

SEQ ID NO: 567191 - DNA, 1274 bp, Homo sapiens
cgcccggccaggtggaggcgggtgcggcgacctggccggctcctagaggcgcagcgggagaggaagtgtcagtttgtgaacctgcagcggcccctggcctggcccctggccgggcgggcggggacctcgcagcgccgggcgagccaggtggcagggagaggacaggcattcagaccgcatcccctgcccgggagcctgtgcgctctgcgctggagaaaaaggagatgggagtgggggtggagaaggtcgtggccacgccaccatctggggagccgagacccctgcagtgcctggctcgccccagggccccgcacatacttagcttcacacactccctggcacaatgccgtagacatcatcctgcccagtctcacaggagtacacacacgcaccacacagaaacaggcactggactctctccctgtgaacagatagtcacaacaccaggtgcccagcgccatggccacaaggaggagacccgagtaggcccgcggggaaagagagaggctgtgtgtggctgtagtggagagcatgtggagggacttggagccagtgtcaggggaagctgatggagaatcgagctctggatccagggactcgggactcctatggtgccaccagccacctccccaacaagggggccctggcgaaggtcaagaacaacttcaaagacttgatgtccaaactgacggagggccagtatgtgctgtgccggtggacagatggcctgtactacctcgggaagatcaagagggtcagcagctctaagcaaagctgcctcgtgactttcgaagataattccaaatactgggtcctatggaaggacatacagcatgccggtgttccaggagaggagcccaagtgcaacatctgcctagggaagacatcagggccgctgaatgagatcctcatctgcgggaagtgtggcctgggttaccaccagcagtgccacatccccatagcgggcagtgctgaccagcccctgctcacaccttggttctgccgacgctgcatcttcgcactggctgtgcgggtgagccttccatcctccccagtccctgcctctcctgcctcctccagtggggcagaccagagactcccatcacagagtctgagctccaagcagaagggccacacctgggctttggagacagatagcgcctctgccactgtccttggccaggatttgtagactccctgagcctcagtttcctcaactgtaaagtggagatgggtttggtgtcgggaataacgggaccaataaatgatgcttt

SEQ ID NO: 567192 - DNA, 1310 bp, Homo sapiens
ggcccccgccgagaccccgaccccggccccacgggcggacactcggccgggcagccgcgggccgagcgcagccgcctccgccaccgatgcgcctggtggccagactccaagtgggaccggcggacacgcagcctcgcgtgtcaggggaagctgatggagaatcgagctctggatccagggactcgggactcctatggtgccaccagccacctccccaacaagggggccctggcgaaggtcaagaacaacttcaaagacttgatgtccaaactgacggagggccagtatgtgctgtgccggtggacagatggcctgtactacctcgggaagatcaagagggtcagcagctctaagcaaagctgcctcgtgactttcgaagataattccaaatactgggtcctatggaaggacatacagcatgccggtgttccaggagaggagcccaagtgcaacatctgcctagggaagacatcagggccgctgaatgagatcctcatctgcgggaagtgtggcctgggttaccaccagcagtgccacatccccatagcgggcagtgctgaccagcccctgctcacaccttggttctgccgacgctgcatcttcgcactggctgtgcgggtgagccttccatcctccccagtccctgcctctcctgcctcctccagtggggcagaccagagactcccatcacagagtctgagctccaagcagaagggccacacctgggctttggagacagatagcgcctctgccactgtccttggccaggatttgtagactccctgagcctcagtttcctcaactgtaaagtggagatgggtttggtgtcgggaataacgggaccaataaatgatgctttactattaaaaaagaaaatccatgcaaaaaaaaaaaaaacaaaaaaaaaaaaaaaataggtggggcgcgcgcgcccgcgggcccctcggaagaagagcttttctcagagaacccactgcgcgtggtggggcgcgcgcggggcaccccagtgggtgtatagggtgacaagtggggccaaaacgcgcgggttccccaaagagagaagactccgggggccactggagacaaaagggcgcgggggagatctctccccccaatatataaaaaagagccccgcggggggggcaaaaacccgcagagagcgcgtctcccgtgaaacaaacactctccgagagagggggagttcgctggagggggcgctcaacatcgcagcggggagacctccatactcaaccaggaggagagtctccacagaggggaaagcccgcgaattacccaaaaattagagcgcc

SEQ ID NO: 567193 - DNA, 307 bp, Homo sapiens
ccgcaggctggggcttggcacgccatcccatcaccaacgctcacagtgctggaggaggatgaacagaagcctggtgccctgcgagtcccataacagctcagagacctgtggcctcccccctctggtccagacctatgtgctccccggggacccacgagcagtttccatccccgcccctatcccagtctggcaccagcgatcaggtcctttgtgggcggctccctgtgcagccccacgagcccgggcccagggcactatctccgctgtgactccgctctgcccctcttggcgggcctcaccccccgcc

SEQ ID NO: 567194 - DNA, 173 bp, Homo sapiens
ctaggttaccacacactactttttgattgggaatgctgaaccatttgagaggagatgttcggcttctgatttcgcaaaggcaaaaaaaaataggataggcttcccttgtgcagagggagaaatggctttgatcttgccaagcctttaaatggagccctgaggcatgagctatt

SEQ ID NO: 567195 - DNA, 299 bp, Homo sapiens
aatgtgttagaaaaatgttaagagcaactcacatttttatcattttctgtggttttagccaagatggcttttatgtttctgaagcatgtccacaaggtccaagattgaagtttttggaggcaagtgcactcaaggcactctggtagtcatcaggttatgtttcagagatatactccagtcacactgcttacccatatctacctttctgaaatttacctagttgaatcttcacacttctgaatctttccataacccccaagttcaggtgtggtgtagtattttttaaaaaggaacactaa

SEQ ID NO: 567196 - DNA, 1117 bp, Homo sapiens
ccacgcgtcggacagcacatggcggatggcaagaacaagcgcctacgaaaggcggcaaaaagggagccaagaagaaagtggttgatccattttctaagcaacagcattggtcatgcatgtgaacagcacctgctcatgttcaatcataagcaacatcattggacagcacgctcgtcaccaggcacccaaggaaccaaacattgcatctgcatggtctcatagggtcgtgtgtttgcaagtgcagtcttgctgcatttgccagcaatgcatgcacagtagccatttcagcacaacaattccaagctgcattcactgcaagcatgcttccagggtcaacacaacctgccatgactcacactttccatggacatggaatcttacccagtgacaaaactgtgattcaccatggctcaaaacaatggacagacacactgcattgaacagctcacgtatgcatgtcaagacgtaccgactggttaacttgccctcgatcctgatacatgactgataggaataatacatcacaacacacacggccaacaacactcaggaataacgagacagcagcaacctataatgacctcacgaagaaccacacaaggataccgcacaagaatccaggccagacagcttgcattggggaacacatcccagtgaacccccgaaagcacaggatgacaacgcaccaaccacgcaaccttgcgcacaaaagaacaagctgaggatcacattacaacatagggaaatctcccgagacacgcagatcactccggaggaacacaagcacccatcagccaaacgaacgaggccatcagcgccacagagacctagagtaacaagtcaccattcgatacataccggaacttgactccttcccggattcaggaacacaacagcgtacgacacgaatcggcccggaaacgcacaactcccccacaaggcatcctcacccaactggacgggcaccaagcctccaaacggccacgacagtcccaaaacgtagcggacaccgcggccacggcatgagaaaccaaggtggaacgcaccaggccgcgacctggggcgacacaacaacgcaacacggaagtgcgataaaaaaggtactgcacaacacgag

SEQ ID NO: 567197 - DNA, 192 bp, Homo sapiens
  misc_feature (20)..(20): n is a, c, g, or t
agtctaaaggatccccccgncccggtgttgcgctcacacaacacacacacgagcacacagcacacaaacgcacagcacacgcacacacatgcacacacagcacactagcacacagcacacacacaaagacacagcacacacatgcacacacagcacacacacgcgaacacagcacacacgagcgcaacaccg

SEQ ID NO: 567198 - DNA, 120 bp, Homo sapiens
ggactgcgttctaacacggacgaccagtgtcttcccatcaggccttgcgctgggcctcagtgaccctggagtctctggttcgagcccacagctgcacctcggaccgctaggtgtacccca

SEQ ID NO: 567199 - DNA, 239 bp, Homo sapiens
tttgacagaaagcgagacagtggaacgatctcggctcactgcatcctctgccacctaggatcaagcaattatcctgcctcagcctggggagaagctgggaatacaggcacatgccaccatgcctggctacttttttgtatttttaggagagatggcatttcaccatgttggacaggctggtcttgaactcctgaccaccacgcccggacaagaagcaaataattttggaatctgtagtc

SEQ ID NO: 567200 - DNA, 728 bp, Homo sapiens
ggcggcacagagcctgttgttgcgctcagtatgtcgtgggaatccgggccgggccaggtctaggttcccaggggatggatctcgatgtggagtgcgtggtacggaaagtgcgttaacagggcaagggtcgttgccactctcggaccacggcatcgtggtcgacatggctcaggagggccgagatgggagcaggtgacggttaatctgtaactgtgacgagcgcataaggttgcagcggtacgcgcttaaccgcatcacggtgtggaggagcatggtcaggcaagcgaactccctctgggcagttggcgtatctactagctagacctgatacgcgtgtcaagctcttggatgtaactggtaggcttgggcactgatgaacttagactgctctatggcatggcattggtcaggtttgtgaactcttatctcgagcagacgacagacaagaagttgccaaggtccccctccaaggtgtctggacatcaagagggtagactattccggacttggcattggtgaacctatggcacatgtgagtggaccaacaagggaaaatgggccccataatacattgcacggcggacaaaggagcgaaccttgtgccctggattgggctcccagaaagacctatttggcgccgacacctggagaaccgactgacagagcactggagagtagggaggagtacaggaaacgggaaagcggcagaggaccacaagggacaaaaa

SEQ ID NO: 567201 - DNA, 901 bp, Homo sapiens
ctctttgttcgcctttcgtttgtacttgtgcgggcctatgctatgcttgtttgtggaagtggttgcgcgtgttgccccccgggggacccccctgtggggtcccggtgtgttcgccgcccggcgctgtagtcgtgttatcgccgcgttccccttggagagtccccgggaacctgcgggccttgcggaaattttggacagggccgccctgtgtcccggggacctggggggagaagccccccctgcttgtttttttcgtaagcccccgtccttttactgaactaagccctgtggttacttgcagatccagtttcgagagttccccaaaaataaaggttgggaagaattgtccctatggcccctgaagcaccctgctttttttcaaaggagaatctttcccacgtccacagctatgggcagggcttccccccctgtctatatggtatgaaagacgaccgccgccccaccaacatgggtttttctcaacagagggcagccgtcctactagcgacatagttgattcaccgaaggccgtaacattattgaacaccaaatgggggggatcgtaagcagtacggaggaggccccaagaatattttacgggagcacatttgttacccgccgtctataaattcaaatttcaggggggtggtctttggagtccccaggtaaacacgccgttttcagcggttgtacacacggtccacaatgccctcggtgaatacaattctagggtcgaccaacgcttttctgttcaccccagcccaccgcctgtataagtcatattgtacaagcctccccacaagcggagacttaggaggtaatcggaggaaaaactgattattttgcggaggattagaaatacttttcaaagcaaaaaaaacgacaccccccccacaaaaca

SEQ ID NO: 567202 - DNA, 347 bp, Homo sapiens
gtcgacgtagaatattacctccctgttcttaaaaagtaactatgttctggccagtgcggtggctcacgcctgtaataccagcactttgggaggccgaggcgggtggatcacgaggtcaggagatcgagaccatcctggctaacacggtgaaaccccgtctctgctaaaaatacaaaaaattagccgggcgtggtggcagacgattgtagcgccagctactcgggaagctgaggcaggagaatggcatgaacctgggaggtggagcttgcagtgagccgagatcgcaccacggcactccagcctatgcgacagagcgagactgggtctcaaaaaaaaaaaagtcgacg

SEQ ID NO: 567203 - DNA, 120 bp, Homo sapiens
acacaagttggtcagtatgtgatttaacacgtctagagatttcttccttaaactgctggacggagctattctcgggcacggcgaattcctccttattcttcggggtcttcacggtgactt

SEQ ID NO: 567204 - DNA, 449 bp, Homo sapiens
gtttgcgggcctttccagaaataaagaaatcatacagtgacaacacagaagtacaatggatcatgagagactattatgaacaattatatgccaaaaactgaattacctagaagaaatggatatattcctacacacatacaacctgccaagactgaatcatgaagaaatagaaaatctgagcaaaccaataatgagtgaggaaattgaatcattaatacaaagtatctcaccaaagaaaagcccaggaacagatggcttcactgctgaattctaccaaacatttaaagaagaactaatatcagttctcctacaaactgtctccagaacaaaacacaaacaaacaaaaaaacgacagggagagaatactttcaaatcccttaccaggaccaggcattacccctaataccaaacgccacacaagccacatcacaagcaaacgcacaacctac

SEQ ID NO: 567205 - DNA, 1128 bp, Homo sapiens
agcgtgcgtgggtacttggaacaagcaaacgaggcagcgagctgaaggacgggagccgtgacctgggccccgtggaacgtccagcctgcggccatctacgtcacggcacagcgctctggctgctgcgaatccgcagcatattaacgaatattctgcgattttgaccttgcattaacggcacctttatcctagcactttaagcaatgccaaccgcacgcacgttgcggcaggtccaacgtctggcactacatcccaccgccaagactggtaggcctggcggcctgtggacaagctggcgtaactttggcacgccttctcattttcgcacttcgggacatttcattcttacttgcaattttccccaaaactcaactttactgggtcgtatctttccacaacgaccgacttcgcaaccgcgtcactaatctcgcagttgacccaacgcaacccatgccgcaacagctgctccactcggccttattccttcccactaaactggtccgccgcctggtccactggctacttgcgctcgacccagcggctcccctaatctccaggccacgcctcattcccctgggctggcgcaccttacccctttcctggcgcccccgcctcccgctcacttacgcttcacttggacctccggccgcgcgcgctggcacctggccttgcgcttccacggggccctggcttcggccctctcgccactttggccccggccgccttttccctcatcacccttgcgttacacacgcccgcccgcctcagcccggcgcaccgacttcctcgaccgcttccctggtccatctgcgcgccaggtctccccatcccgcgcccgcgggctccctctggagccggcccttctcgcaccctcttcccaacaccttgcgctcacactttctccaacgacccttccgtgcaaccccccagctggcacctcgggcgccaacacgcctcattctcctccgttaacccaagctcgaacggcgccggaaaccccgacttctgcgaccacccacacacgcgtccaccctatgggcaccccacatgacgcccacaaggacaaggacgcccatgtagatggctatctccgccatccgtgtgcgtaacccatccctgtgggaaacc

SEQ ID NO: 567206 - DNA, 242 bp, Homo sapiens
accccccaaaaaaaaaaagcccggggggttttttggccccttatgtttaaaacaaatttttagatttgggggagccccgcccttgtttttttttaaaaacccttttgaagggaccccttgggtttttaaaatggtttgggaatttttccgccaaacagggtttttggggggggtttgttttgtttaaaaataaaaaatttaggggtttttttttgctttaattaaaatgtcaagaatgccca

SEQ ID NO: 567207 - DNA, 137 bp, Homo sapiens
atgcacctatgcgcgatatttccagcagttcgcagtcgtatcgccgaaattaccaccctgatcaacggtattgccttccaaaccaatatcctggctgctcaacgccgcggtggaagcggcgcgcgccggcgaacagg

SEQ ID NO: 567208 - DNA, 358 bp, Homo sapiens
tcacgtagtgtgctctgcactatcaacatagggaagggaagccctatctcattattctacttaccagacattgtcctggcaatgccggggggcatgtttaccttaccctgccctgtgatgtcgccatgccgttgtcttctaatgcaagagtaaggtacgtcttcccatccagtcacgtctatttgatttgactttgcattacacggagggctgggctgggtcagtctgacctcggaatctagttgtcctcattccatgccatatggcatgtggtgaggacgcaggggaagagccaagccaaggggcgtcggctcagaatagagccaggtctacttcaatgatcttgatcttgtacctc

SEQ ID NO: 567209 - DNA, 277 bp, Homo sapiens
  misc_feature (42)..(42): n is a, c, g, or t
  misc_feature (97)..(97): n is a, c, g, or t
  misc_feature (99)..(99): n is a, c, g, or t
  misc_feature (145)..(145): n is a, c, g, or t
  misc_feature (159)..(160): n is a, c, g, or t
  misc_feature (187)..(187): n is a, c, g, or t
  misc_feature (189)..(189): n is a, c, g, or t
  misc_feature (264)..(264): n is a, c, g, or t
  misc_feature (269)..(269): n is a, c, g, or t
  misc_feature (276)..(276): n is a, c, g, or t
cgctggacagggccgcgcaggggcagaaggcgggggtggagncgcgccgctcagacggatcttgagttgcaggttgttggcgacaaagtgggtaagngntccgtggcggctcactgtgccttcgagctccaggggactggagatngtggcgctcgcgcnncgccggactcggcactccctgaggacncngcgccaccgcacgcctcgctcacccgtccaggctgcggctgtcctgaagacggctggagaactgtaggccggctnctctncccggtnc

SEQ ID NO: 567210 - DNA, 536 bp, Homo sapiens
tacaccccatcgtctactcaatacaaaaattagctgggcgtgatgcatacacctgtactcccagctactgaggaggctgagtcatgagacatgcttgaatccgggagtcaaaggttgcagtgagctgtgatcatgccactgcgctccagcctgggcgacagagcgagaccctgtctcgaaacaaccaagcaagcaaccagagaagctgaattgtgacgtttgaggcagcagtaagggcagcagaggtgacatgccatggaggcagctatatatggcacagagctagcctttgcttgggtctctttaagagaacaagggcatgacagatggttagactttgttgcctttcagacttttctacatctctgcttaaggtcaggcagccataagttggcgtatgagtaaaacttgtccattttcagctctgcacatgtgttctcttcatagtcatccggtactcacaggttgactgcagaggagacggaccaagctatacttgaccttaaagcagcaggatggtcggacttcagtgagag

SEQ ID NO: 567211 - DNA, 328 bp, Homo sapiens
gctcggtaccacagcatatactattaaaatacacattttagggaaaaaaaaacctagaaaatattaggaccttagaaaaagcaagtcatacacataaaaaacacggtagcagatgacagaaggagaagcatagtttacccacttacaggtttgaattaagacacagacagagaaaagtacacatacaaggacactatgcttcagtagggagcaaggtaaactgaagtgaacgagacttactggggtagatggtggtagaacaagaaagttaggactatagaaagaactgacttagactaagatagaggactgcaatagtttatgctgt

SEQ ID NO: 567212 - DNA, 220 bp, Homo sapiens
caatatcaaggtgtcagttgacctcagtgaattctgtgatgtttctgagatgcagaatcccgtgtagttctagattcctggtccatggatgacaccacccgcccatgcctcctcgaattagcgtttcctaccctgcagcgcctttaaacttccactacagcgattcttttctgcctcatctgcaaaacaaaaaaaacacaacacaaaaacaaaaaaacac

SEQ ID NO: 567213 - DNA, 386 bp, Homo sapiens
  misc_feature (350)..(350): n is a, c, g, or t
gggaagggtccttggtgactcccttcttccaggatcgcgtccctgccacttcgtgctgtgtgatctttggcgatcactgcctctctgggcctgtgtcttaggctctgcaagatcaaccgagcaaagcacacggcctgcagagaggcagcgctctgcccttactcggccccgttttcatcggagacctccggggagcggtgggggtggaggaatggtttctccccttttctgaactgaatactaagaccctttttttttctttgtcctttcctgacagcaaaaccaaagaagttatcttcagtgtggggtgagtgggggagatgggggaagggctcggtgggaagctttgnttgtttgggggtaacaggctggagccagaggtcatt

SEQ ID NO: 567214 - DNA, 120 bp, Homo sapiens
  misc_feature (51)..(51): n is a, c, g, or t
tgactctagagcgatctataacacgcactctccctaaatggattattttanaagaactgccttcaagttcagaaactcttctgcctgatctagtctattattagaagttctccattttat

SEQ ID NO: 567215 - DNA, 201 bp, Homo sapiens
tattatacacagctctagtttatttttatttttgtctttttagggccacacccacggtatatggaggttcccaggctaggggtcaaattggaactgtagcccccagcctacatcacagccacaacaatgccagatctgagctgtgtctgcaacctacaccacagctcacaacaatgctggatccttaacccactgagcgag

SEQ ID NO: 567216 - DNA, 638 bp, Homo sapiens
  misc_feature (228)..(228): n is a, c, g, or t
  misc_feature (238)..(238): n is a, c, g, or t
  misc_feature (240)..(240): n is a, c, g, or t
tatacccagctttccatattacatctcttttatataaaaatatgtgccccaatccgcgatatatatgtcttatatgtgatatagtaggcggaaatattatagagaatattatataacacgtcgttgcaaagatattttttgttctcttaaaatatgtagatatcttcttgttgtctctgggcccctcttgatatttttgatatcactcttaagagttatagagagatntatatatatntnttagaggagaatacactctttctctagacacacgcttgtgtgaagattttgtgggttgcctatatatataggagagagaaaaccacccgctttacataggatatatatactccccagagatatatataacaccaccctcgtgtttctttgagatagtgaatattatatttatttagcgttacaaaataaacaacaccaaactgctcttcacagagttggtcgccctgttaaccctaaaccatgaaatatatttattcaaccatcgccaaaatatttcgttagccccttttaacgccgtaatgttttatctgaatggatatttgtttctatatcctgataattatttaaattgttactttccatctggaagaaaaaataaacccttaatattgaaacta

SEQ ID NO: 567217 - DNA, 264 bp, Homo sapiens
cacacagcctgggcgacagagcgagacttcatctcaaaaaaaaaaaaaaaaaagggggaaggattattcttccttttcggggaaaggcaccgggagggcagaggttttgtatagcaaaacaattttggaggcttaagggggactttataatgtgggggctaattaagggggaaaaaacaaaaaacaagggttcataattgggaaaacatcaggttggtttggtaaagggaaaataaagtttttttaaaacacttgcaacccggg

SEQ ID NO: 567218 - DNA, 145 bp, Homo sapiens
caatcctttaccacttacactgttgcctttttcattttagccagttctatgttatgaagtgatttaatttagcatttcctgcaggacaaagtaggttgaacactttttaaatagtttattcatgattagggagcggtggaagctt

SEQ ID NO: 567219 - DNA, 342 bp, Homo sapiens
gcggccgcctactactactaaattcgcggccgcgtcgacgaacccagacaccccttgatcagtttctctgaggcgtgagcctcccaagaagccacctgtggacctgtgtgaagctgactctgaaagaggactgcggaggcctggatgccagttctcattgtccctgtcagcttgtcaccgtggagacgagaaccacgtcaggcagggacgcagcactcacagagtccgtcacatgctgtgtgacgtgcagtggagtgtcccgccatgagcggctgggccaacctacttatcacttccatatttgggataccttaaataatacaatcacagccgtcgacgcgg

SEQ ID NO: 567220 - DNA, 126 bp, Homo sapiens
gcagggtacattagcatgtttccaaccctgcctagcctctcatttccaaccactcaacttgactgttctgtatttttaggccaggatacactagggctaaatttctgtaactcaggatgcttcttg

SEQ ID NO: 567221 - DNA, 720 bp, Homo sapiens
gctgatctcgaactcctggcctcaagtgatccgcccgtgcttggcgctcccaaagtttctgggattacagttccgggagaacatcctaggaggatgtgctatctgcgctgaccagatccggtgatgactacttcctcctgcgctggctccgattgaaagagggccccaaggcccaccaaggggcatgcccagggcaatcaaggagccgtgtgatccagtgttccctggtgtctccgtgatatcatcagctctattgtggcttccctcgggtcaaagaacaaggcccatctggcctcagtgagctttgaccatgtcgagaaactcagaggagatgcttgagtgaaggtgaggttgacaccatcgcgcccatgcactagccctggtcactgtgtcgctagtcgcccagaagtctgaggcacaaaatgtattcagttgcgattcatccagtccagttcattcgattcatggaatgacccattcattgaaactggaaggtaaacctggtctgggtgctaggcgctggggagatctgccgtgatggcgatagagagcaacacaagaacactccaggaggcatgcacgagaagacaacgttcctgagaaatggacctgtaccagtgagaagcatggatactcagggaagcgagcggacagagtaggtccacggacagttcagaggcacgggacatgggatgtcccaaatgggaaccgaaggatagg

SEQ ID NO: 567222 - DNA, 213 bp, Homo sapiens
agaatggaccgataaatagcaggagtcaagaatcagattgggtacatggccagactctgtctcaagattggataatccatcctgaaggacccattatcgagcccagggagcaagtgtaggctcctcaggttcttggtcctcaggttcttggtcttcaggaatcgaatagaattcctgaggtgtactactgtctcattcaggagctcattgtcc

SEQ ID NO: 567223 - DNA, 776 bp, Homo sapiens
ggaaagaggtagatcgcggagggttcatcgagtccctccctgcctaaggaagctaaagagcatggcccgtggtggccctccctgcctcctagcgcgaggcgagtggagagggctacaaaggaggacaagatcctctcaggctgtcccaatgctcacaagagcttccaggagctcgtgacccacagtctccaagtcaggtggggtggagtcccagagctgcacagggtttggcccaagtaactaagggaggcacttcctccccgtacagcccatcagtgccagcccctgctggactaggtgcctgagcccctcagacagacccctgtcccctgcaggcctgccttctcacgggacttctgcgtgggcctgaggcaagccatggagtgagacccaaggagccggacgacttctcaggaaatggcttttcccaagccccagcccccaccggtggttcttcctgttctgtgactgtgtatagtgccacacagcttatggcatctcattgaggacaaagaaactgcacaataaaaccaagccgtcctggcaaatctgagaaaacacacaccacacaaaaacaccccggagggcctcaaagagacggcggatcgcgcacaaaagcgaggcacctccgaataggggacatggggcacatacggaggcccccagaccccgagatacacaaggaccaaccggggaaaacaccgagccggccccacatgcaccaaacacaacaatataaatatcgaaacgcggcgggctacacgcgaactaaccgc

SEQ ID NO: 567224 - DNA, 1009 bp, Homo sapiens
gcggaagcccacactggcggcctacggaacagagtccctcacccccaccacgctgtctctgaacggtctggatggatgcagaccgaacaagatcccgacttctgaggaacacataagccttgtgcctgcctgctcatctctctctctggtcctgttttatctctcagtgctctgagatcaatgacccttcatctgcctctactgtgaaatggttccagtggcattccacttggtctggtacccctagtcgcaactgagatgcaacccagggtgcgtggtgtatctgcgtggcagagtggcattgaccgtgggcttgtccaagagcaccatgcgctaaagagcccttttgggcgtcctcaagagcaggagcgagtgacatgctaggcacatcgcatcatggagatgcatgacgtagagaatttgggacagtagactgatcttgcctgtgatgagtaggaagagaagcgcgccatgccgccacaagataggacaccaggaacgacgcagattgatccggtaccattgattgttagaaccctatatcgaaattttgctctacacctgagcgtcacatttgggcgtcacaggggatgatgggagagccaggcatggattgggactttgcccatgagccacgggtagcactctgtacatgtcacccggactgaggatccaaggtcaagcctgaagataggccactcgaagactacatttctagggggcgcttcaataggtctcctgatttaactggcaaactgcgtctccttgtccatgtcgttagaatatccccgcaatttgcatgtctgtccgtagccccgtgcaagcaaaatggctggccgcccttacccagtatgtcccgtcccgtgtgtcctcccagtggattctcatgggaaccccatctgttctcccccctaattctggcgttaatcaggtgtcctcaagcaagggcttgggggggggctgggtcgtcctgctcttacgtccgctcctggggcctttggcccccttc

SEQ ID NO: 567225 - DNA, 1073 bp, Homo sapiens
gggggaggatcccccgcccttgggcgacgctttgcgggggtgcccgcccttctctcctgtaaagtgggtactttttgtcgccgcccgcccgtgtgattgtgtttgttcgtcccacagctgttgactcacaggttttcttgtgggcagcacagaagtcgacaagtggtgttgtgccacacaacggaaaataaggggggggaccaccttatttggtgttgatacgacgcaccttttggtccccccctgggggaaagacctggcgaatatctataattggggatgcggggtcttccataacagcgattatatgtaatgtaatccgctctcttgaatgtttgttctctccccagacgtatgccgttcgcccctctgctacaaagacgtctggtgaaacaatcttctgtcgagtccctttctttttctcccgaaaggccgcttggaagggggggacacacacaactgtttttgcggtggtggcaatcgaaactatccctctgtaacggtgcccctgttgtctttccctttctttccaaaggttgtgctggggaatgggaaggaggcgtattattctgggaaccctctcttcttaacaccacctcccttcggcgcgatagtaatctttttctgtctctcccctccgagttctgccctccctccaatgagcgtgggactcaattttcgggtcccgtttctaccttggggtccgaggaaccttgggggaaaaggaaaggaagtgcacattttttgggacactggcacttatactggagacctataatggttttaaccgccctttgaccacccacgcactccctgcctgctccgcccacggtgtaaatgtgagggtgtcttgtgtgaactggccactccagagctccagtgccacctcgaggagtcagactaccctgacatcgtagggaaagaggggagatttttttgtagcttttaaattgggcgtttgggagggggcgcgggaagttttttataaactgtatcattttttctgagggtggaatgtcccaacctttttatcaaggtgattgtgattttgactaataaaaaagaatttgtta

SEQ ID NO: 567226 - DNA, 841 bp, Homo sapiens
gcgtcctttgtttctttttttgagggtggagtctcgactcaggttgcccagaattcaagttgcaagggccacgtttgggctcactgcaacctcggcctcccaggttcaagcgatatctccctgtcctgggcctcccgaggtagctgggatctgacaggcgaactgccaaccacgcgcagctaatgtgtcgtatcttattagatagacacgggggtttcaccatgtgggccaggctggtttcaaactccgtgacattaggtgatccacctgcctcggctcccaaagtgctgggattacaggcatgagccaccgtgccaagccaagcgccttggctaatttttaaaaataattttttggcagagacagagtttcactatgttgcccaggcggtcttgaactcctgtggcctcaagtgatcctcccacctacagcctcccaaagcatgggggttacaggcgtgagccactgcaccgtggccctgtttcatggcttttatttcctttcatcccacacatttgtctgcagtactagacatgtttaacaaattcaacaagtttacacaagtatatgcagctgggtttggggggacaaggagacccaaagatatgcatattactagtgtggaattcgtgcctctaaaattgtgttcctaaggtctctaaggtgaccctttaatctacttcacgatggggccagagaaaggggcctggtttccagattattggggcctatgtccaacgtcccattttctcttacaaaataggggtctcctcttgtctggcttccgaaaaactcaacacaacaaggggggtaagatacccaggggccggtttgaaccctt

SEQ ID NO: 567227 - DNA, 225 bp, Homo sapiens
ttaacatctgaatacatctcaatcttactgacccctaccaccaccaccaatcctgcctcagcagagttgcggctaatctgtacctccacaaatggcagggtagatagaagtcaaatttcccaaactccatcccccagcaggaagaccaaaagtgcttgtattgcctatgagataaatcctgatatttgcacatgtctaatgaaacacctgtggaagaataccttt

SEQ ID NO: 567228 - DNA, 1213 bp, Homo sapiens
ggcctcgtgccccgatggacgccgctgttcctcctcgtcctcgggctgtatggcccagagcctctgcctgtcttatgtggggttcctgtgatggacgtgaggcccaccaccctgtaccccatgtgctgcctggtgcgcctgacctgagcctgcgtgctggaggtgcttgggtcatcccccctgatcagctgtatcctgagaaccacaatgctgtctcccactacccccctgtgttcagatcaatgtcggaccaacgcatgcatgcttggtgcatgctgtcaatctacatgcactccagtgtgaccctggctgttggacttgaaggatgcccctggaggcctgtcattactactatcagaaccaagttcaccagtggcaaggtcttcctcaaattgccattgcgtggcacctgcgcagaagcacttgcatctgctttccagtgctaaaagcagcgtctagcccttggaaccttggtgagagatccagaccttggactgtgaccacacactgcgacgcttgcgagaatttgtcacgtatgtgcgatcaagacatgacaaaacctgggcccaggccattcccttgcaaggagggctgtatcactgggccagccgttgctgagagtggtgcaggacccacaggcaaccatactgctgaacccaggggccacgacggccaacagactgccccgaacgacacccggagacaggaacaacggcagggccggagggacacaccatacctggcacccgcggcagaccccgacgctcctcacgacatcaacagaagctccacacggcagaagcataccgacaccaagaagacaagcatgcgaagcgtgggacccagagaacgggaggagaccgcgcagtgacaccaactacgtgaacacacgacaagaagagcggaacaacaaacggaggacggcactacgaacccacggacgcggcccaccacccaacccgatcatgaccccgcgcaaaaggacccgacgacccaggacagcaaaccacggagccaacgaaggcgaagcgaaaagccacgaagcccagcaagacgaagaaccgaaacagaaacagagaagcacaaaagaaagaaaagaaaaaaaagcgccaaacaagaagaaaaaagaagaagaaaaaaaaacagcgagaacagaagaagcgaacaaacagaaaaaagaagacaaaaaaacaacaaacgcgcaaggaaatgc

SEQ ID NO: 567229 - DNA, 931 bp, Homo sapiens
  misc_feature (291)..(291): n is a, c, g, or t
cgtcttatatttggtgtgggcttcgttctcatatttattaacgggggggggtctcctcttcttcttttgtgttggtggcggtcgtcctctcctcctccccccccgctgcttgtgtgtgtgttgttcctgctgtttgttattgtgcgattttttttgtgacgtgtcccttcccacaacacggatattttgggttgtttgtttatgtcttcccccccccgctccggcttttgttgtttttactcattgacgcgcggacgcgcgcgtgggtgtgttgctcgacaacctgttgtnttctggtcgcgtcggagatgctaatcaatcggtgatatgttattttttcgttcgcaataatggtttgttcactccccggctggctagtattgtagctgatggatgtctaggtattgttgtataacaaaaaaaaatagcatgcacgcgcaggcttgttgttgtttgttcgttcctcacgacagaaaacgtgtacttgtataaagatagtatatttgtgagagagagagactgtctttctctctccccttatatatatgtatttagttagtgctgtgtgcgccgtcggcgtcggccacctcgctcggctgtgtattgttttcattcctcgtcagagatttttgttaatcattttttctctcctccccccccaccatgacccagccgcgtttttttaaaaaaaaagcgggggggatactgccatagttgtttgtcagtcagctcgcaccgcagctggtggtgtgattattatgtttttggtgatacgatgttgttagatgaagtcgcaccagcagacttttttatatataatatgcgggcggggggggattttttttttttagataaataattttggtgtttttttttaggcgcaggagaagttttgtttttttttggtgagaacccccccctttttttatga

SEQ ID NO: 567230 - DNA, 258 bp, Homo sapiens
gcctgtgacctctctcaggtacagaacctgtgttgttttcaagtgctctcagtttttatggtgaggtttttaccatcacaagtgatgattcaatccgggttgggcctttgcgcccatttttcgcaaagctattcccactcctagctccttcatgtattcatcaaagcctttgctgtccaccaggcgccatcttccttccagctgctgaactgtggccatggtgggtgcgggcgggctggcgtgcagagagggtccagg

SEQ ID NO: 567231 - DNA, 268 bp, Homo sapiens
ctggcatttgttgctaacagagaagagtgggagtgctgtgcacacacttaggctgactgttttatcctgaagatttcagtgactgaaagtcagacatcacttggtatttatcattagaaacttaagacttgatagcaagtgagtagtttcaatatggatcttaagtattagggaggcaattgcatagtgcaggcctgtacgtgtctggcttgctgcttctcaatttcgtcgcctacaactagagctctgcctatacttatctatcaca

SEQ ID NO: 567232 - DNA, 470 bp, Homo sapiens
atgtgtacttttcacattttatctatgagacaggtttgctctctcacctaggctggagtgctgtggtgttaacacggctcactgcgacctctgtctcccgggtttaagcgattctcctggcctcttactctgtcactcaggctggagtgcagtggcgcgatctcggcacgctgcaacctccacctcctgggttcaagtgatgatcctgcctcagtctccctagtagctgggattacaagtgcatgccaacacgcccggctaagttttgttgttgttttcattgtcattgttgttttctgagacagcgttttgctctattgcccaggctggagtgcagtagcatgatcttggctcactgcaacctctgtctcccaggctggtctcaaacgcctgacctcgggtgatccacctgcctcggcctcccaaggtgctgggattacaggcatgagccaccgttcccggctggttgt

SEQ ID NO: 567233 - DNA, 559 bp, Homo sapiens
agcgggtctgtctgcctggtctccgtactgtcccagacggtgctgttgtgggcttgggatcctcctggtgaccatctcccgtctaaggtcactcagccactctagccgacaagatgtggccgtgcggctggccgtgatacccacctgcgccacgacggcaagaatggggagcgcgaatgaaccacatggaaggagaaggaactgcgatgagctgactgaagcgagtggtggctatggatggaccacagagctgtccttggatgagctgggcctggaatataccaagtggacctgtccagatgtcctcaccaagcagcgggtctcagtgacagtactgaggatcgagatgggcccaatgcccgtcagaagactagccatccccactaacactccatggagtgtgggtcagagttctgaccgagcaagtttgatccgggccggttcatccattccttgctgctggagttggtggtctactccttcttgcattgctggcactaacggtagttcattgactgccaatggcacggatgaaccaatctcaaggacaatctatatc

SEQ ID NO: 567234 - DNA, 287 bp, Homo sapiens
tgaagaacagatctggagctctctacagctggacagtgggcctgcccgaggaggtgacaatcgcagaggcctaccagatgctaaagaagcaggggattgtaaagtccgaccccaagcttccagatgacactaccttccccttcctcctccacggccaacctgaaagaatgtgatctttgaagatgaggagaaatcctaagatgctggcccgcctgctgaaaaaagagctcccatcccgaagacctccgcgcagccaataagctcattcaaagagatggtgcaggagg

SEQ ID NO: 567235 - DNA, 113 bp, Homo sapiens
gctgtagtgtggtgcggcaggctgggccgtgaccggggtctcctcactcacctccaagctgatccgttcgcacccaaccactgcccccccccaacggtgaccggcgacttcgc

SEQ ID NO: 567236 - DNA, 399 bp, Homo sapiens
gatgcattcttaaaagatttcactgactgttcaatttccatgtaacccctgttttcttccaaggtgtcatcagactcgtcgtcgtccctggggcccgtggtccagtcatagtctggttctccataatcgccattgtctagagtgtctttggctgtggatggagaactgttcagcatgcgaagatcctcctcctctatactaggatcttcattgttatcagcttcctcttgagacagaggagtagccgcgggatgagggaccacagatgctcctcttcttttgttggtactcctcctgggcgggggggtcgtgctgatttgagaggtagaacatttcgtctggttctcggtatgttacaacgttcagatttgggatacacatctctgagatggggaaaag

SEQ ID NO: 567237 - DNA, 215 bp, Homo sapiens
ccggtccaattcagcgtaacaaagatctatctcatatgaacagaatctgtgattaattttccttagtaaaattcaatgctttttgtttttttgtttttgagacggagtcactcttgtctcctgggctggcatgacctcggctcactgcaacctccgcctcccaggttcaagtgattcttgtgcctcagcctcctgagtacgctggaatggaattg

SEQ ID NO: 567238 - DNA, 118 bp, Homo sapiens
catacagttccccacagatgtcacgtcctatttttgctcttatgagcttagtcctgcagctaaataatgctggcatgggaatctctgtagcatgttgatgcaagtactctacgcagtg

SEQ ID NO: 567239 - DNA, 705 bp, Homo sapiens
cgggagcctgcgagccgctggtgggaccctgatgctgcactgcagtgtgctgcggcgacggctgtgggtgctagtctgtggctgcgtgagtgctggccgtcgggagtgcggagcgcctcggacgaggtgtccaaccgccggcaggcaccatgagggcacggctggctcgtgcactgggagtgggcccggctgctcgctagcccccctactgcccagagaggatgcggtgcgccctgagagcctgggtagcctcggatagcggcgctgcgtacgcgatgatggatgagccgtggtgggaagggcgcgtcgcctcggacgtccactgcaccctgcgcgagaaggaactgaagctgcccaccttccgagcccactccccactcctgaagagccgccggttcttcgtggacatcctgacactgcttgagcagccagctgccagctctgccctgcatcccggcacctggccgtctacctgcgtggaccacttcatggatccgctacaactgtcaacacctccaagcagctctacacctgtgtgcccgtctccttgccttccttgcttgcaaagcggagtttcggctctttatcggcccaggcttgacagttgcaagtgggcattgatcttcagcatcatttgcaacccttccaccttcccaaggattccaagcaaatttcttccttgctatcaagcgccccaaaatccca

SEQ ID NO: 567240 - DNA, 381 bp, Homo sapiens
ccgttactgggcgtatggtgagaggcaagcatgaccatggatccatgagggccaacgggaacagcatgggcctcaccgtcttctgatgagtttctttctttgcaccaaagacatcagtcgtcgcaacatgtttctgtggcagttgtttgattcagccataaatctcccaggtgacaatgatcgcaatagttttttactatctcttaggtggctctgggaagtgggacgaggggtatgatgtacaggggtagtaatgttttaggaaccaggcgtatctgagatgaagctgtatgattgattgtcattatgtttgtatgcgaagattaaatgtgtcattggaagacattccttctgttagatttcatactgcccaggtgagcg

SEQ ID NO: 567241 - DNA, 866 bp, Homo sapiens
  misc_feature (26)..(27): n is a, c, g, or t
  misc_feature (31)..(31): n is a, c, g, or t
  misc_feature (33)..(33): n is a, c, g, or t
  misc_feature (64)..(65): n is a, c, g, or t
  misc_feature (67)..(67): n is a, c, g, or t
  misc_feature (70)..(70): n is a, c, g, or t
  misc_feature (72)..(72): n is a, c, g, or t
  misc_feature (77)..(77): n is a, c, g, or t
  misc_feature (79)..(79): n is a, c, g, or t
  misc_feature (86)..(86): n is a, c, g, or t
  misc_feature (88)..(88): n is a, c, g, or t
  misc_feature (90)..(90): n is a, c, g, or t
  misc_feature (116)..(116): n is a, c, g, or t
  misc_feature (140)..(140): n is a, c, g, or t
  misc_feature (142)..(142): n is a, c, g, or t
  misc_feature (156)..(156): n is a, c, g, or t
  misc_feature (184)..(184): n is a, c, g, or t
  misc_feature (188)..(188): n is a, c, g, or t
  misc_feature (203)..(203): n is a, c, g, or t
  misc_feature (214)..(214): n is a, c, g, or t
  misc_feature (218)..(218): n is a, c, g, or t
  misc_feature (221)..(221): n is a, c, g, or t
  misc_feature (227)..(227): n is a, c, g, or t
  misc_feature (230)..(230): n is a, c, g, or t
  misc_feature (261)..(261): n is a, c, g, or t
  misc_feature (276)..(276): n is a, c, g, or t
  misc_feature (278)..(278): n is a, c, g, or t
  misc_feature (297)..(297): n is a, c, g, or t
  misc_feature (312)..(312): n is a, c, g, or t
  misc_feature (322)..(322): n is a, c, g, or t
  misc_feature (347)..(347): n is a, c, g, or t
  misc_feature (350)..(350): n is a, c, g, or t
  misc_feature (356)..(356): n is a, c, g, or t
  misc_feature (391)..(391): n is a, c, g, or t
  misc_feature (405)..(405): n is a, c, g, or t
  misc_feature (408)..(408): n is a, c, g, or t
  misc_feature (416)..(416): n is a, c, g, or t
  misc_feature (429)..(429): n is a, c, g, or t
  misc_feature (444)..(444): n is a, c, g, or t
  misc_feature (449)..(449): n is a, c, g, or t
  misc_feature (452)..(452): n is a, c, g, or t
  misc_feature (456)..(456): n is a, c, g, or t
  misc_feature (458)..(458): n is a, c, g, or t
  misc_feature (466)..(466): n is a, c, g, or t
  misc_feature (495)..(495): n is a, c, g, or t
  misc_feature (498)..(498): n is a, c, g, or t
  misc_feature (556)..(556): n is a, c, g, or t
  misc_feature (560)..(560): n is a, c, g, or t
  misc_feature (588)..(588): n is a, c, g, or t
  misc_feature (610)..(610): n is a, c, g, or t
  misc_feature (620)..(620): n is a, c, g, or t
  misc_feature (627)..(627): n is a, c, g, or t
  misc_feature (647)..(647): n is a, c, g, or t
  misc_feature (668)..(668): n is a, c, g, or t
  misc_feature (671)..(671): n is a, c, g, or t
  misc_feature (757)..(757): n is a, c, g, or t
  misc_feature (761)..(761): n is a, c, g, or t
  misc_feature (773)..(773): n is a, c, g, or t
  misc_feature (787)..(787): n is a, c, g, or t
  misc_feature (803)..(803): n is a, c, g, or t
  misc_feature (862)..(862): n is a, c, g, or t
tgcaagaaaaaaatttttatttttcnncatnancaaacagcattaaagaaaaaaaaacccgtcnngnggntncaaancngagaaancnanggcaagtttaaaaaaagtacattgancaagggacaatttttaacattaananacacatcccaaaancccacccatttaacattaacacaggccntggntggggttattttttnccccccacaanattnccngacccnggnggacagggggccccagggggggggggacccngtcccccaggggcancnggcaacacccggcaaaacngggggggtcacaggngagggacgcngcccaccaccccgcaatgcacagcncanaccccnccacagggggtttacccagcccaaatgtcaacagngtaaagtttaagcnacncttaccgngggggacccaatncccattttatgaacnccccngtncccncnggaattcngaaaacacagactttgccaacggggaaanacnatttacaagaagattcaacctaatcaatatcacttatcaaaagcagtggctgactgtnagtntcaacatgtttccagaatgaataaaccncacaatcaactcagaatgatanaaattagggnccatatnatttaatttcccttgaaccngccctgctagtttaatctgcnaanatgaaagttaattaagactgttttgaaggggcgagaaaatagtttcctttgcacatttttctgaactatgagaaaaatttaatganacanaaagcacctggnaaatagcaagtccnctgcaagtgccccggnaatgtttatcacagcctactaaaaacacagagtttcactcatttgttcaaatttcccanaagt

SEQ ID NO: 567242 - DNA, 212 bp, Homo sapiens
gcgcacgaggctgggccgaggtgcactacacagaaggcgcggagtcttgtggactcggtgctggacgttgtgagaaaggaggctgagagctgtcactgcctgtcgtgattcccagtcttacccactccctgcggtgtgggtgactggtgtctgtggatgggtacccttcctcattcagcgagacccgggcaggatgtacccagacagcgtat

SEQ ID NO: 567243 - DNA, 136 bp, Homo sapiens
ctagaggatccccattccatttgcctgaaaatgcgcttgagacaattctcgtgaacgtttagctaggtcaaccgaagtagtctggcttgctcctcccatggccgcagctactgaaaaggctgcgcagccttttcag

SEQ ID NO: 567244 - DNA, 448 bp, Homo sapiens
gtatatttagaaatgatagtcatatatgtaacagcattatatataacctcacagatttatcagtaagcttattgaacacctctaatatacaagggctatgataagatctatggcgatagagggtaaaaaaaaagaataggacacagatatagaactgtgatcatgagatggtatgtgaggaagatcctgttctgaggccatacagtaattaggatttgtaaggactaaatacaggtacctagaggggacgagaggatgtataatgtggaaaaaatagccatggggcttttgaacaatagaggtgaactatttatttaataaccttcgtatctatcttccaaagcatctctaaaaatacattatataggcttgcaatataaatttactgcaggtctcaattacagttacacaaacaaagagcagtaatgtgctcagtgtatactgtaat

SEQ ID NO: 567245 - DNA, 423 bp, Homo sapiens
tcgatctagaggatcagcacactgggttcgagtcctgacggctctcatttgaaagactccaatttatttccttacgtgttagtcgtctgttttcccctaccttctttgttcggttgttgatttaaatactgtgaggactaagggagaagactaagtcaaggacgatcccccaagtttctggtttgggcaactgggtggaagatagtgccattcactgagatggggaacagatttgggactgacagagggaagatgatgagctctgttcagggtacctacctgatgtaaggtacctgtggggcattgagaaagagatattagtaaatgactggatgcgaaggaagcactgctctggattggtgacttgtagagagggtaactgaagccacagggttcatactaaagaaagtagagaacaagaag

SEQ ID NO: 567246 - DNA, 1420 bp, Homo sapiens
tggtggtgatcccatttatatgaaatgtccaaaacagggaaaacctattttaaacacacagagacccaaagctcgactcagcagtggccaggggaggaggaagacgggaggggaaagtgatggctctcacagggggagtgacagaagtgtcccggaacggtgacacgagggtgggtgccatacacaacttccgtgggagtggtactcataaatgtggccgctgtgcatgtgtgcgtctcactttctcacagtgttatgtgtgatgttctttaggcggtatactgtgtgaattttctcatctcctctacattatacaacacacacccacaacactagcggctaacactgtggctctccgcgcgcccagctctctcgagccccccgcgcgagctcgagacagcggtgcgccagctcacgcgtgtgtgagagagcgagtgctgtgagagccccccccccgcgcagctcctctctctctctcgcgcgcgcgcccctttctcccgtgggagactcttctctctctctgctctctgtgtgtgccccctctgttatacatctcccccactctctgtgggcgcccgaggtcctcactgttgctgcccctgtgtgtgttgtctacatctcgcctctaacgctgtgggcccccggcaactcgtctctctctcttctgctccacactctcatgtgtcctccctgttggggggggtgcaaaacacccatcttccctataaaaggagacgggacacaagctgtattacccatcttctacgaagagacaaaaaatattctccagccatattatttctctcacacctcctctctaatttatgagcgccccgctcataacacacccgcggtgggccctcccatctttcttaaggggaaaaaggcccccaatgtgctgctgtctccaacaccccacgaaggtgcgcggcaagacacccggggaatgtagctcctcctgtggggtgacccccgcgtgctgttctcccacagcggggcataattacaacgccgggggtgtgggccccaaggtgtgtcccctgaaggcgagccagacgcttataacaccccaaaatactacaagcccgcgcccgagtgtgggtagacactcaacaaacggggggcacctccaggcgacaaaacaacgccggcatcggcgccagccacacggtctgggcgccccaagccgcgcttggtcaccagagcgccccccagggtcatcccgcgagaaaacccgtcgaccccccaaagggagcggcactcacccggggaaccttttcccacctttccgtgagggcccccccggggctacccttggggaccggcgaccaacagagacagcgcttccacagacaagggctcacacacgcggcgcgggacagaaaccacccccccagagaaaacccacaccttggcccac

SEQ ID NO: 567247 - DNA, 408 bp, Homo sapiens
gtcctatccataggggctgtatttgccctcataggagggttcattccctgatttcccctattttcagggtaccccctaggccaaacctacgccaaaatccctttccctatcatatttatggggggaaatttaacttttttcccccaaccctttttcggcctatccggaatgccccggggttactcgggataccccgatggaaaccccccatggaacatcctatcatttgtagggtcattcatttctttaacagcaggaatattaataattttcatggtttgggaagccttcgctttgaagcgaaaagtccttatagtagaagaaccccccctaaacctgggggggctatatgggtgcccccccccctcccccccatttgaagaacccggttacataaaattttggcca

SEQ ID NO: 567248 - DNA, 493 bp, Homo sapiens
  misc_feature (469)..(469): n is a, c, g, or t
taactgcagatgacacattctattcacagctcatggaattttctccaagatagaccatatgataggccataaagcgagcctcaataaatttaagaaaattgaaattatatcaagcactctctctggccacaatggaataaaactggaaatcaactccaaaagggaccttcaaaaccatgcaaatacaagaaaatttgaataacctgctcctgaatgagcattgggtcaaaaatgaaatcaagatggaaattttaaaattctttgaactgaatgaccataatgacacaacctatcaaaacctctgggatacagcaaaggcagtgctaagaggaaagttcatagcctacatcaaaaagactgaaagagcacaaactgacactctaaggtcacacctcaaggaactagagaagcaagaacaaaccaaacccaaacccagcagaagaaaggaaataacaaagatcagaccagnactaaatgagccgggtcctctaag

SEQ ID NO: 567249 - DNA, 186 bp, Homo sapiens
tcgagctcggtacctaatggactttcttcaataggagctgtatttgccaatcataggaggcttcatatcactgtatttcccgatattctcaggctacgccctagtaccaaacctacgccaatatccatgtcatctatcatattcatcgggcgcttatctaactttcttcccacaatactttctcgg

SEQ ID NO: 567250 - DNA, 690 bp, Homo sapiens
  misc_feature (290)..(290): n is a, c, g, or t
ggataacgctttataatacaaattctgggggaccttagtgaagtccctcgttaaacccgttttctttgggtatacaccagaaaccaacacatggtaaaatatttgtcgacccgcggcctcgggttaccaagccacccgccatcttataagtgttttaatataaaagtcccccacaatgggtatatatgctttactgcgacaaaatgtgagttttggtaactatataatgatatgttctcttcaaatgttagattaatacaaattgttgcaaccagttcctcccacaagangatttgcccccttttgtttgtaaagtggtatatcagtattaaatcttccccccatatccctgtccccgcggaccccaccataatttggaataattgtgccctttacataataccaccaccctttgttttatcccccccttttctggcctttttgcctcacatagttactttccctgcgttattcccctgattactagtggataaccgtaattatcctccttacgccgaaataaaatcgacggccagatagatttctggtaaatagcgatctccccctactagagagcagactaagtcttctccacaagtccggatacgaacacgaggcccaacaggtcgattcagacagaggaacgaccgcatcaacatagaatagcatacattatacgaaaattaatca

SEQ ID NO: 567251 - DNA, 147 bp, Homo sapiens
ctacctcggcctcccaaatttctggtatcacaggcatgagccaccacacccagccctgatggtggagtcatgataccattctctgcctaaaattttcataacactaacagagccatctagtagcacaacgaggtactccttgtctcc

SEQ ID NO: 567252 - DNA, 453 bp, Homo sapiens
gggcgtcatggcacacgaatgtaatcccagctactcgggagtcccagacaggaggatcgcttgaacctgggagttggaggctacagcgagccaagattgcaccactgcactctgctctgggcaacagagtaagagtccatctgaaaaaaaagaagcactccagactgggcaacagagcgagactccatctcaaaaaaaaaaaaaaaaaaagaccagcctgtcgaaaccccatcagtactaaatatacaaagaaattagctgagcgtggtggcacacgattgtaatcccagctactcgggaggcccaggcaggaggatcgcttgaacccgggagttagaggctgcagccagccaagattgcaccactgcactgaaccctggacaacagagtgacactccatctgaaaaaaaagaagaactccaaccagggcaatggagcgagactccatatcag

SEQ ID NO: 567253 - DNA, 935 bp, Homo sapiens
  misc_feature (62)..(62): n is a, c, g, or t
  misc_feature (724)..(724): n is a, c, g, or t
  misc_feature (804)..(805): n is a, c, g, or t
  misc_feature (808)..(808): n is a, c, g, or t
gggagtgtgggaagtctggcggttggaggggtgggtggggggcagtgggggctggggggggnagttctggggtaggaagtggtcccgggagattttggatggaaaagtcaggaggattgacagcagacttgcagaattacatagagaaattaggaacccccaaatttcatgtcaattgatctattccccctcttgtttcttggggcatttttccttttttttttttttttgtggttttttttttataccccttcctttagcttatagtgcgcctcagaaaaccaaatttaaaccccccccccatgtgtaacagggggggcagtggacaaaaggcaaagaacggcacgaagccagcctgggagagaccaccaggttccgtgccccccgccattatatcgcccgtgattgggatttggggttttcccatctgctcccgtgtgcgctgggggttggagcttgagggtgggacgccctccgtggggggcactgggccaggtgagcccccttgggagaagttcaagaggggattggagaagaaggccatcttgtccggccgggctttctgggggacaggtggctgtgtccccagaattcctgagggcggaggggggggtggggcagggtctcctcggtgtcaggagggtgctcgggaggccacaggagggggctccgtggctggcctgaggcttgcccggaggggaaggggctacccggttttgtaacnccggagggttccatcaggctggggcagggggtggccgccttccgcacatcttgggggaagcctcccctctccctggggannttntggcccgccctgcaagcctggctgttctcggaggtctgaagtctgtggggacttgggggacagggggtaaggcgggaaggaccagcgggtctgaccaaagaactggcgtttcaccgtttggccggca

SEQ ID NO: 567254 - DNA, 315 bp, Homo sapiens
  misc_feature (20)..(20): n is a, c, g, or t
atccacctacgacctcaggncatcagaccgaccagcccaagaaacatctcaccaatttcaaatctggcacccactggaaatcagactgcccagctcgcccgacagccactcctggagcccctaaagctctagcccaaggctctctgactccttcccagatctattcggcttagcgactgaagattgacgctgcccgatcgcctcggaagtcccctgggcccatcacagaagccgagcttcggggtaactcttcacagtgggaggggtaagtccatcccctgttttaatcgatacggggggcttacccactttcca

SEQ ID NO: 567255 - DNA, 145 bp, Homo sapiens
ctctagaggatcttactgggtgcatgcatgtggtccaggtacttaggaggcgaggtgggagatttgttgagcccagaaggttgagactacggtgtgctgtgatcgtgcactccatcctgggggacagagtcaggccctgtctcag

SEQ ID NO: 567256 - DNA, 131 bp, Homo sapiens
ccaccacctgagtcatacagaggtgtgctctcaaatgcacacacacatacacacacacacacacacacacacacacacatatatattgtgaagtatgtgagggggatcttatgcaggactcaggtggtgtg

SEQ ID NO: 567257 - DNA, 424 bp, Homo sapiens
tccgcttaaacattggaaggtgggcccggggcaaaaagtaggtattgtaggtataggcggcttggggcacatgggtattaaaattgcgagagcgatgggcgctcatgttgttgtttttactacgtctcttgccaaaacagaagatgctaaacgtttaggtgcggatgaagttgttttatctactgatcctgaacaaatgaatagacatgcgaaaagtttgcattttattttggattgtgtatctgcacaacataatatagatgcttatttaaacctgcttagggtagacggtacattgacacttgttggtgcaccaatggatccgctgccggttacttctttcagccttattttaggaagaagaaattttgccggttccccaatcggcggtattgcggtcgacgcggccgcgaatttagtagta

SEQ ID NO: 567258 - DNA, 490 bp, Homo sapiens
  misc_feature (355)..(355): n is a, c, g, or t
atactttgtatgatttctatgaattttgtcaagatactatttttattatggtaaaaaaaaagtggataacacaaaatttaccatcttaagcatttttaagcttaccattctgggttttttttgttttttgggttggtttgtttttgtttttgagacagggtcttgctctgttatccaagctgtagtgaagtggcatgatctcggctcactgcaacctccacctcccaagttcaagcgattctcctgtctcagcctcctgagtagctgggattacaggcatgcgccaccatgcctggctaatttttatatctttagtagagacggggtttcaccatgttggtcaggctggtctcgnactccttaacctctacttctacctacgcctaatctactccacctcaatcacactactccccatatctaacaacgtattcacaaaaaacaatagcctcatcatccccaccatcatagccaccatcaccctccttaa

SEQ ID NO: 567259 - DNA, 1009 bp, Homo sapiens
gccagcttcggtagctcagtggttctggtggtatggcaacaaggaaaagataccgcaagtatgtggaatttatgaacagataattaccctcctaaatttcagacatatgaagaatcttggaccactatttacagcaaaatattttactgccgaaccatgtgggacagatatttcttcagcgcactctgagtgccaaagtacagttggtcttaacgttgccaagacatcatgaaggctttaccttgtgggggtcagaatattcgtggaactggaatgccataaatgagcggccgtccacagagggaccattgtcaaccgacatcgttgaggtagccattagcgaacaggaactgacctgcagtacggactgtactataccctttttgaatggtttcatccgctctctccttgtaggatgaatccacctctcaattaccgatatagcggtaattctccagtttctaagacattgccagagctctatgaattagtagaaacaactatgcagtcctgacggttctggagcctcgtaatggtgacggatgactctcggatcaacttagtgcgtagcagtccaggacttctttgagtctggctcatataactgaatggtcagtctctgtgccccgacaagtcacacaatgatctggagggagagctggtagctaatactgtcaagcatcgaggtatctgatgctgcagtgatcgttataacccaggacatccttttgccacattagagtgggaaaactgcctgggcaatagacaagcctggtcctgggggctatagcgagggggaagtggactcctctggactattttcaatggaaggaatggggaacgcactgtaaagacaggctcctgttgaggaaaccttgggaactggcccactgaaaggccttgtctttggggaggtggggtggctttcgcgtctggaattataacagggagccaaattcacacttggaacccaaaatctctagcgaagttgcaactgcaaattcgcgat

SEQ ID NO: 567260 - DNA, 143 bp, Homo sapiens
  misc_feature (28)..(28): n is a, c, g, or t
  misc_feature (33)..(33): n is a, c, g, or t
  misc_feature (52)..(53): n is a, c, g, or t
gtcagttatcgagtgtgaccgccgccgnccagngttctctctgtggcaaganngtcctccgtgccagtagcgcaacatgtctcagatactctacttcaggcagctctcggatgactactcgcaaaattgctgcgagcttgcct

SEQ ID NO: 567261 - DNA, 1087 bp, Homo sapiens
ggggcggctccggcgccgtctgtccgccgattctgaactcgctcgctccccgtgtctggagtcgggcatcatggatgtactcgcagaagcaaatggaacctttgccttaaaccttttgagaacgctgggtaaagacaactcgaagaatgtgttctgctcagccatgagcatgtcctgtgtgcctgtgccattgtgtctagcatggagggcacaatgggacaacatgcgtcctgcacaagatggtccagatagctttctttcaataaaagtggcgtgtggtggagacatccactcagaggcgatccagtctcttcatcgacccgaaagatgaacacagactgggccacgcaggacttgccttaaggattgcgccaacagggcttcctgttgcgggaaggacgtcgttgtagagtattctcatcctccatcgtttgtgagagattcccttgccaataaattctactcagtggcatgatgatggaaggacgcttggaggtttgagtcaagcgccgtaagagagatgtccacgaaaatactatcatttaacatacccttgggggtatgcactgaaccaggacgagagaaggttaacatagttgcgggagggttgcgtacgtcgtaccgaggcctcaaggtgggggatccccaatatggtacgaacatggtccttgtgcgcaccgtgggggttgggaacgctgtcgtgatcctaggctaatcgaggacgaggaaagagcgtaggggaaatgcacaccggggttgctgcaccaaacgggaaggagacagcccgaaggggagcaggaccttgtatcataaagacggctcaggcacaaatggatactggagaggaaatgacacaccgccatggttgaccgatagtgcaattgcttagcaaaggacacactgtgagcgttttccaaagggaaagggaaaccgctaattagttaggaggaaggacaacaataatttttcaccctcaggagagtcttatggagtgcataacgcgattatttgttctggggcaaaccgggacacttggtacatactcggagtcaatacatggaggtttcctgagaactaaagtacccag

SEQ ID NO: 567262 - DNA, 250 bp, Homo sapiens
  misc_feature (3)..(3): n is a, c, g, or t
  misc_feature (204)..(204): n is a, c, g, or t
  misc_feature (218)..(218): n is a, c, g, or t
ccnagcgtccggcagacgtcgctgggtgcgaagaatcaaattggaaattatggaatttgtgaatttcctgaagaatcccaagcagtatcaggacttaggagcaaaaattccaaagggagccatgctcactggtcctcctggtaccggttttacccttcttgccaaagcttctggaggggaggccactgttttttttttcactgngaacgggtctgagntcctggaaatgggggggggggttgggccaccc

SEQ ID NO: 567263 - DNA, 837 bp, Homo sapiens
cgcatggtgacacaccatggagaattcgtacgcgaggtgggggagccagccgaccgagaagtcgttgcgttccctgagtagagacgtttcgctggatttgacgccgcccctgtgggtgggcaccctctttcctccagcgtgttacggggcgctgcagggtaaacatgccgcttactctaccgcacgcgcgggggttcgctctagcaggcgcatctcggttgtcccaacgcccccctcttctgcaggggcccccccctggatagtgttttgccattggctcgtgcgaggcctcaccgcctcgctgtttattaaagggaaacggtcattggctcccccgcacggaggtgaggttataataaatagaaaaggggcccgtcatgttaagcgcgcgtagccacactcggtaggttaggcctctctatggaggcaccacttatcggtagttgctcccccccactactgtggggtacacaaaaaattgcacgatgctacgctcacggtattatgtgttcacacatcacggctcggcgcttgtccgggtactaaccaacacgccctaagcacactgggctagtacgggcaccccctggggcgcggacaaacgcacgttggacctgagcccctgacgcgtgttatagagacgctatgggaggggagtgaatcatgtcgacacgtgagccacttcggtctcctaggcgcactaccacgagcgccgtaaaaattgacgtttctggacgacgaatatttttacgtagctccctcacctagcgacgctggtgaaacgcctcgttttactagcccactgccccccgaagggttatccccgcggacaagaca

SEQ ID NO: 567264 - DNA, 1794 bp, Homo sapiens
  misc_feature (1)..(1): n is a, c, g, or t
  misc_feature (200)..(200): n is a, c, g, or t
  misc_feature (454)..(454): n is a, c, g, or t
  misc_feature (461)..(461): n is a, c, g, or t
  misc_feature (795)..(795): n is a, c, g, or t
ngaaacaccacgggggcgccgcctcgggtggaataccccccccccacgacgaggggtgtatcacaaaaagaagggtggacaccagtcctccctcggtggccagcaaaccgctcctcgacttaatataaccccgtggtggcacgaagagaagaaggcggcgtggcgaatgaatctataataggaaacgcgtcttcacgacngccgtgtacaccacccacacatcacgaagaaaggggggggagaatgttgctccccccccccccgtcccgctcacaaatagtagactttagacacacccgcgtgtgtgcttctgcacacgagaagaaaccacttcgtccgcgagcacagagggagggcgacaataggtgcgttacccaatcaccacgctgcttcctgcttccctccctcgccgcgcgtcccatgataggagaatgctgtttggtgcctccgcgcncaagagnaagttcttctcctgacacatctgttgtttacgataggatcgcccgtcccctccctctctatgagcgctggttttatgaagtcgtccctccgccccgccccgcacggagaaccaccatgttgggtgtaagaccgggagtgcttatccatccaattggtggacacaccagccccccgcttgtttctgttttactttcactaaagaccagcgggtttgtgtcgttcgccgccctgtgtccacagcgtggccgtgttggtggcaacgccacaacaattttgtccccgcccgccgacctctttttgtataagtcgtcaaaacacctcctcttcttcttnttggggaagaagaattattttccttcctctggggcgaagaataaaaattaaaaacgcccactataattgttcctccgggagtagtggaggattattaattataaccccccaccaacagggcgccacacactttttgtggaggaaaggaatagttgaagaccttttcttttgttggggggagaaaattattccgcccgcggaagaaagagtatcccgcagacccctccttccctacagagaggacatctctcaccaactcggcgcctgctgagtagtatgagtagttacttttttgcaaccaccacacagcacttgtgtgcttctcctgctgctgggttggggggctcctccgccgttgcgttgtctctggttttcttcttctctcaacgctggtggtctgcggggtgaccaacagacgacaacaaaccggcttctgtcaacacacagaagagagacaccgacatgtggcctctgagagaggcgccacacacagcacccgctcatagagagtgtctcttataacgacgagagagacacagaggagggcttgttcacacacacgacccgacacaaaatagtgtgtgtgtgagattgggggagatatagtgagacactctctatataagaatgtgataatacacctcattgaaagagagttataatgggcgccacacacactcgtataggccacacacatataattgttatacaaatttcacagagatatattgcacatttatatacccaccactctgttttatatatataggtgaaatttttagtcaccacaaaccacgtgaccacctcttcctcgagaaatcaaagcctcggtgaaacaccctcgaatgtttaataatgagatatattcacgtaaggaacttttatccctatctgagattttactggagggcttttgaaagtttgtttttataataaattatataaaattagtaatgaatgtaaaaaaagtatttgataccctccaagtttaataattga

SEQ ID NO: 567265 - DNA, 1124 bp, Homo sapiens
gctcctcctctccaattcgcctccccccacttgtgagcgggcagctgtgaactgtgccaccccgcgccttcctaatgtgctcgcctgctggtagcctggcctgactgctgccagcattcccctggtgcgcctgctatgctccgaatcctgggcagccgacggggagcaggagccacgcgcctcagagtccccgagcccgccgctggcttctcgcctattcccgagacaccatgccccctgccccgggccctgcagtatgaatctcctggaccccttcatgaagatgacctgactgagcaggagaagggcctgtcctggcgccccacagccccaccatgtccgaggactccgcagggctcgaccatgcccgtcgggctccgtgctcggacaccgagaacacgcggacccaggagaacacgttccccaagggcgagcccgatctgaagaaggagagcgaggacggacaagtatccccgtgtgcatccgcgaggcggtcagacaggtgctcaaaggctacgacgtggacgctggtgcccatgcctggtagcgtgtcaactggtccagaaagaacaagcctgacgtcaagcggcccatgaacgccttcatggtgtgggcgcaggcggagcgcacgacgctcgcggaccagtacccggacttgcacaacgccgagctcagccagacgctgggcaagctctggcgactactgaacgagagcgacgagcgggccttcgtgagcgcagcggccggatgagcggtggctggtcaccatgaagtgacacaacccgggattaaacgctaccagaccgcgataggtaggaacagctgtctcaaaatcgtggacacataggccggtcacactgataggacacagtgtatgcagagatggagaagtttatcgccacacaaggacacattacaacagtagctggaaacgcagactcaggccagaactaccatcctcccggaattgcaccaggcgctattacccgtgagaactccctggagccaagcagcggcccgcccagaacacaaacaaagcacacgaaagccaatgtactccatcgacgggaaataccaacgaactccacaatcagcagcgaaccaccctaatccccagacgtact

SEQ ID NO: 567266 - DNA, 559 bp, Homo sapiens
ttcgacggtgtctgaacttttcgcgtgcaacaggttcatcaggtggacctttggccccttctgcagagaaaagccagatgatctgctgggctggaagcgctggctgttaacagacacctgaggatctggtgggcctggaagcgctggctgttaacagacacctgagcaggccatttgctgtcctctccggattgacaggagtcaaaacatgagatcggtttagcttcagtttcgtcatggattaaccacctccaaggtgtcaactccaaaatgtcaagaattggtcacagtctcacttgcagattcctgctctgcagctgggcagcttggactgcgcccacagtccaaaaaaaggaaagactttctcatcattgagattctcctcattccagtagattgtttaataactggtatgtcagaagcacaaacatggtttctccaaaagggctggccgagactaacttcaacatgatggctcgaggagcttcactgaccttctcagagagtaatgagcagtcccaaaacgccatttagagagacttaggaaatggtgctatgg

SEQ ID NO: 567267 - DNA, 126 bp, Homo sapiens
agcgtatgcagcccactatgagtgtggaccataatgcaggccaccatctatggcatactgagggagggaagctcagcaaagtgaacacctactgtgaggaggaaggttagttaaggttgctggagc

SEQ ID NO: 567268 - DNA, 1082 bp, Homo sapiens
agcgggccacactcgctccgggggtcgcatggcggctctgaagacgccggcgcccgccgccttgaggagccgctgctcgcccgccttcccgtaatatggggcgaacaactgaccactaggcgataagatccctcttgcgtcgaccaggtttgcgtgtgtcccatgtgttgcagggacgctcctcgacgtcagagaattcgggaggaggagactgccaggcatatggctccagtgagataagaggatgtccatgcgaggagactgagccagtaacaacgaatcatcaattcagtgggtacgacatgtggatacgcagggacatagagtggacagactaaaggcattgaagtacgggacgcaaagtttgcctgtcttccacgtggggagaccctgtgtgccgctaaccctttagagaatgtgacagtgaggttacctcgttgtagcgctaaagagggaagcaccgcaggtcaccgccaggggtaacccacgccaggtaaaaaggggcaatgcacgcaagtcccttaggccaggtaattactcactttggcagaacctagttaacctagccatttacagcggcttctccgtgaggaaaggcccaacggttgggcacaggcggatttgcaggcacgcaacggatggaaactcactttcggaccaacgtgaattttggagcgagaaagagaaccgcctcggatcagaccaacgcgttgatcttgggataggaaacgccgtcgaacagagtgcacgagcgacgggccagtgtcaccgaccgttccataataagagtcccttcggtcgtgtcgcaatctattaccagcgccaatctttggatcggtatatcacccagcaattccaagcaccaatatgtgggagagaacgaaattcgcaacagcaccgtggactgatatattgattggctcccgttgtatatatgctcgcctgttggcacaattccctcatagagctacggagaaatgtgcactcgctctgagagactgtgataaaaggagtacatcgagcggaatcgaacacctccgttaggtcgcttcgcaatataaggcatacagttatacgccacg

SEQ ID NO: 567269 - DNA, 792 bp, Homo sapiens
gcaaagattacgagcgcggcactctggttttgtaaatttcaattgacgggggctggcgctttcgatgctagattactggtccttggttttacaattcaacacgcgactcttcgatagaaccgcagctaggccagcctagtgccgtggagaacatcgacaaaaacactgcagacgccatcaccgcggagggcttcaccgacattgacctggacacgctaggtaggctgtacctaggagcgcgacacactgggcatccgtgaggtagcggctgtatcaatagccgttagtccgctggtccgaggccgagtgtcagcggcagcagctgcaggtgacgccagagaacaggcggaaggtatctagggcaaggccctagggcctacatatacgcttacccgctacatagaccatcgaggagtatacagctagcaggtacccgcacagtacgggcatacctaggtggacccgcgaggtaggtacagcctacttacctagcactatacaccgtacaaccccaagccacgagtaggagtaacatatgaccggccccgctagctgcctagcgtaggggaaggagtgcagcatcaaccgcttccagcaggtggagagtcgctggggctaacagcgggaccagtgaccgcatcaggttctcagtacaacaagcgcatcttcgaggtgggatttgggctgtatggatccatccacgggcccaccgactaccaaggtgaacatccagattatacacaccgatagcaacaccgtcttgggccaaaacgacccgggctacagctgcga

SEQ ID NO: 567270 - DNA, 174 bp, Homo sapiens
cccctccaggccccaggttaggaaaattggtgggagaaagggaaaagggttgggcctccccgctcccagcaattaaaaggacaaccctttttggagcccccccctgaaaggggggcaggcatgggggggacccaaactgattttttttttggtcaaaaaaactgtttagcccca

SEQ ID NO: 567271 - DNA, 1204 bp, Homo sapiens
  misc_feature (331)..(331): n is a, c, g, or t
  misc_feature (386)..(386): n is a, c, g, or t
  misc_feature (399)..(399): n is a, c, g, or t
  misc_feature (632)..(632): n is a, c, g, or t
  misc_feature (1051)..(1051): n is a, c, g, or t
gcaggtcgccgatcgctatggcgtggctcaccgtgaaggcgctaccttactgggacaaggaggacagcggggcgtcgagattcgccggttcagctactgctgcagccccaaggcctggaaggcgtgatagaccgcaggcatgtcggcgcggtccgcgtgactccctaagctggagactggctgactgagctcggcgcgtggccggactcgcttgtgtccgcgacgcgcattgcgtgccatggccgagatatctctagcgcgacaacttgacctgcggaagtgaaggcacgggggacttagtgttggacctttatccaagtgtgactgaggnaacttgaggaagtgggaggcatgtacgctacgctagaagaggatagagcattctntaccgatagtctnatctatataagacggagtagagaagacagagtgtcctggacgtggactcgacacgggcacactcggatgtggcttcagggaggtcgacccacgcaatagcatggttgtccaccacccaactgtggtgaactctgccgagaatgagatggtgaccagatagggcgatgcgtgctgtggttgaaggacaaaccgcggattaaccagagattgcagagtcgtgtgctgtgtgcccnagtgagctaagcgaaagctttgcgtgagtagtcggatcggtgggccgaattgggcgcaccaggggggcgtatcgcccaccacaggtggggtgtctcaccacttcaaaaggaacatacttgcgcaattttgcgcacgcaaagttcccctcgtgttcagaggtctaacctctgggtactttagaacggaggcctttgcttacaggccaagcgaggcccatggccttggcgtttcactgcggaaggtgtttgaaagaactagcgggggcaaccaccatttcctgggcggttggggccctgatgcggcacatagggggcgaaagcaggtggggtggtatcccctaagcgcccaatggaggcaaaagagcgcatttggggcacaggcccgccgaacgcgaggttaactccctacttcctgtcgngattttggcaccacctgagggggtggacagagggcgccccggattcggcttttgggggtgtcgcgccccaagctgggcggccaaggaaaaaaattcctaaagggcttttaaccttgggttctccaatttgcggcggaaacggagaattcccgg

SEQ ID NO: 567272 - DNA, 268 bp, Homo sapiens; identical to SEQ ID NO: 511833
  misc_feature (172)..(172): n is a, c, g, or t

SEQ ID NO: 567273 - DNA, 117 bp, Homo sapiens
cccggggggggttttttttccgccccttttttggggggggggcgggtttttttttttcccccccccaaaaggttttgggggccttttgggggccccctttttttttcccccccccca

SEQ ID NO: 567274 - DNA, 624 bp, Homo sapiens
  misc_feature (624)..(624): n is a, c, g, or t
gactagttctagatcgcgagcggcgcccttttttttttttcagatggaaaaattaaaataaatcctactatctaaaaaaaaaaaaaaaaaaaaaaaaaaaaaaaaaaaaaaaaaaaaaaaaaaaaaaaaaaaaaaaaaaaaaaaaaaaaaaagggggggggggcaaccgggggcccaatcaacagcagccaccccccacttttgattgtaaaaaggcgggcccccataatggcggaggccgagtaaataaaaaacagacagccagcgggcggcgctgtacaaaaaacacacgcggcgcgagcgggaggagaaaaagccggcgcacgggagggatcatcctgtgtgggggaaagagcaccccccaacctgctggcgggggggcggcacccactagggcggggcacacacacactccccatccaagagattatattaagcgctcctgcgagggagcaaacctataaaaccccgctggagggcgcgtagtcatgggggcggtaaccaccccacgcccagtattatgttcgtctgcgcggacaggaaaaagttgcgtccacaggtcagttattatttgtgaagcaacaattatttacccgcgggaggttatataaataataaacgggn

SEQ ID NO: 567275 - DNA, 222 bp, Homo sapiens
  misc_feature (12)..(12): n is a, c, g, or t
gtgaggtgttangttttcattgagagtgcacctaaaagatttgctaactgttgtctataagattgagcacagagcctggcgttggatggtacgcctttaatcccagcactcgggaggcagaggcaggcagatttctcagttcgaggccaggccagcctggtctacagagtgagttccaggacagccagagctccctatctcgaaaaacaaaaacaaaaacaa

SEQ ID NO: 567276 - DNA, 188 bp, Homo sapiens
tgtctgctggtggctcccgcttggtcgtccccgtcactcttgggactctgaggcgtgtgtggctcattctgaggtcatgcgttcgagctcctccctggctaagcgaggttcgcccctgtctcttctactctctccacgccttagctgtccgctgtgctatccagtgtcccgcgctctgaattcgtaat

SEQ ID NO: 567277 - DNA, 380 bp, Homo sapiens
  misc_feature (1)..(1): n is a, c, g, or t
nattgtcatctttacctgaatatttcctttctattgatcccaagtctttagataaactcaaccaattgtcaaccagaaaatgtttaaatttacctatagcctggaagcccctgctttgagttgtcccacctttctgaaccaaaccaatgtatttgattgatgtctcatgcctccctaaaatacatataccaagctgtaccccaaccaccttgggcacatgttctgaggaccctcctaagggctgtgtcatgggccacagccactcatatttagctcagaataaatctcttcaaatattttacaaagtctgactcttttcatcaacagaggctattttctagatcttataggtgtacttcattattttttttttgtgtctc

SEQ ID NO: 567278 - DNA, 140 bp, Homo sapiens
ccatgtttggtctcggaggcagaagcacaacatagttctcgccgtctcatgagcagtggggggaaatggaacgaacagggactggccaagggaaactgtctggattaggattgtcgacggttttcgcttttgtaaagctt

SEQ ID NO: 567279 - DNA, 135 bp, Homo sapiens
ccggagacgatcatgggttgctgctgttggtgcgagaagcggacacagacacccactctgaggtggttctcatcctgtacggtgtgtttgcacacccccctgaggttattccatagtcgcgtaatcttttatctc

SEQ ID NO: 567280 - DNA, 786 bp, Homo sapiens
agcggaaaagaaatcaagctgcatttttaagtataggagtcaatttaaaaccaacaggaaactcgcaattcttccctattacggcacaattgaaaacactgattaataaatattactgtgctgtatcctgtcacaaaggtcgtgttgaaggcactgtaccgtttggcgtagtaaggttccacagcaaccctcacgcaggcacagcctcccccgctagaacgaacaaacccaacgaccagcaagcaatcgaacaaaggcgtagcgaagataaataggaagaaaacagccacaaaacctcaggaaaaagacacgagtcgttgcacagtgagagtgcaggaccgaggaggcgacacggtgacgtgaacaccccaaccgcatacaccgatcaggaggggaacatcacacgagcaacagcgagccgccctaaaaggagggacagacacacgagaagacgcacccgtcggaaccaggcatacacaaatcaagcaaagcaccccaatggacattcgccacaacgacacgagacgcaaagtggacgccgcaacaagtcgaccgaccgacagaaaccaccacacagcaaggaccaaacggcccaacagacaacacaggatacgaggccacacaaaagttgcatccgcaacgtgaaggaccaggatgacaagataccagaggagcaagcagcaggcacgcacgcacacgaacgcgacatgacacacgcaacacaacatcgaccacgcgacgaggtccgatgccgcgagagcagatagccaaggatctgaagcacta

SEQ ID NO: 567281 - DNA, 828 bp, Homo sapiens
tgcccaggctggtcgcgaactcctgagctcaggcaatccacctgccttggcctccccaagtgccgggattacaggcatggaccatcgcacctggcctattcttcttactaataatttttctttttctttttcttttcttttttttttttgagacagttgggctcttgttgcccaggctggagtgcaatggtgcaatctcggctcaccgcaatctcggctcaccggaacctccgcctccgtgggttcaagtgattctcctgactcagcctcccaagtagctgggattacaggcatgcgccaccacactgtggctaattttttttaagtagagacagggtttctgcatgtggtcaggagggtctcaaactcccgacctcaggtgatccacccgccttggcctcccaaagtgctgggattacaggcgtgagccaccatgcctcgccaatttttctttttaagaattaaatttacctggtatatttagctgtcataaaagttgtttttcaattaaacatgtaaagtttaaaaaacaaaaaaaaaaaaaaaaaaaaaaaaaaggggggggggtcaaaaaaattttccctcggggggcccagttttcgcttccccggtttttttgtaacagaggtgcccccaatggaagcggtataaaaagcaaagaccggggccgcggttaacacgctctgccttggaaactcgctccctggctcctttggcgagggaccttcttcggtggtggacttttgccaccccctcagatattaaagctcaggtaattaactcaggtttatgtttacaaccgatttgcgctgaattgtccgttgtgaa

SEQ ID NO: 567282 - DNA, 107 bp, Homo sapiens
gtgatcagaatgtcacccggcagacgcacgatctacatcttacacatcgtaagcgaggtgctgcgatagaggagaaactgaatttcaccttcatcttataccttgga

SEQ ID NO: 567283 - DNA, 617 bp, Homo sapiens
tgaacatgttaagaaacccaaggctttaatatccttcaatatattttaaaaaatagaaagtgatgaaaaaagccttttcagaggagaaaaccctcaagccataaacagctgcaagatgctcagactcatcagtgatcaattcgctcatcaataaaaaaggctgatgctgctaaatattgcaaggccatgaatcagtggggaatgtccctacccatttggtggaagtgcaaaattgcacagccatttggaaagcagtttgggagatctgttttaaaatgtaaaattaagatactctgtggcccaggaatttaacttctgggggtctgacctttctcatgtgcacatagagacacataaaaagatgtttgcttcagtagtctaatgtcaaaaaaaagaaagacattaataagaatgcttatgattaaataaagtctagtacctccataatatggaatactatggcagcaattaagaaaaatgaggtagatgtatatatactaatatggaagtactccagagcatattgatatgtggaaaaagcaaaatccatgaaatatacaaaagttggttccttgggattaataaaattgataaatgcctggatacctgataagaaa

SEQ ID NO: 567284 - DNA, 627 bp, Homo sapiens
  misc_feature (92)..(92): n is a, c, g, or t
ttgcttaatgagccatactcgtcgtggtcaagtttagcgagcttcggaatctagcatagcatagtcaaggagtttcggggcataaacgtagnaatgtcattgtcaatgacataggaaggcaaactctgcctgccgctcagagttcatgcaacccagagtgtatcccgtcgacattatgcgtcaggttcacgtactcatgtgagtccagataggccttgagcatggaccggtcacttaggcgcgcttcatatgctgagagcaggtcaaacgcatccagatagccaggggctagaacctcatgtatgagcagctagtccaccaggttgtagtcagagaagtagatctggtctcccacaatgatggtctcgcatccatggttctgggacagcagggtctcaataggcttcagttgcctgatcagtgcctgcacatagtcatccttgctggcctcatagttggtgtagatgagggagatgaatttccactgcaggtcctttacgccgtcaatcaccatgtctactgtgggtgcctcgtggtggtccttcccatagagcccaagggttcgacacaggtgacacaggatggtattgtactggtacagggtcaggtcaccgttctggaacttag

SEQ ID NO: 567285 - DNA, 393 bp, Homo sapiens
agtaggacagtgttcttccctcaacctgatctttttgatagggaagggtgagtgagggagtagagtgaagggaggttcacttggcagagtggaagattcttcaagagtagagctgggggagatgacagggagatataatgctgacacttccttgaagctgagatgggcaatggacatacttagaaattttagtgactttaaatagcctggatttccctctccaaaacttttagaatggaaaatcccatcccccatcttttctttactcccaaaataagaattgacaccccgtgactctggacgtggtgtatacttggcacatcgagtgtttgaagtcagtcccccagagggagaggggaaacccatcctccatacttttgttggaacaatctc

SEQ ID NO: 567286 - DNA, 130 bp, Homo sapiens
cgttctcctgcttcatcttgggcttctctgtcgagtatgccacacagtacccgagtgcagttggcagcccgtggctccaggtcttgggatcacaaggtggctcagaagactgctctccaggtggccccgg

SEQ ID NO: 567287 - DNA, 156 bp, Homo sapiens
tcttgctgttgtcttctttctcctgagggagtagtactctccgtatatcgggtagatgtttgccttgtcactgccgcggaatatttcctgagggctggcgtataattggtcagtctttattgaggcagtgtggctcttctggagtgtaagatgggc

SEQ ID NO: 567288 - DNA, 260 bp, Homo sapiens
  misc_feature (50)..(50): n is a, c, g, or t
  misc_feature (56)..(56): n is a, c, g, or t
gtgttgcttccttgacagcctgcgtcggttccttgacgctgttgcgacangcgctngtgtcctgtggagaacgcggtgcacgaagtagcgtctccgagcaggcgcttgatgtagtggaagtgagtgacagatgcaggcgaggtgcccactgtatgccgactggacgtaaagtcatatttgtagccatagatgaagggcactcggaagtagaagagcaggtagatgaaaaggggccccgcgtactctgcaaggaacccacg

SEQ ID NO: 567289 - DNA, 169 bp, Homo sapiens
gttcatcaattgtctgtatatctctatattttatccatgtactcttttgatgtatagaagtagtttgaactcattgtttccttgtggtaagtacccagatgctgccacaagacctagacacttatgaatggtctatattggcttcacatgctccttgcgaggtagctct

SEQ ID NO: 567290 - DNA, 662 bp, Homo sapiens
ggggacgacggctcatgcctgtattcggagaaattggccagactctacgagtcgcctgcatcgagatcggcatgttaggccatgacaggctgacagggataatctcgtactttcttaacagaacactcacgtagtacctattagcgaacgtcgccagcacgacagacgaatctatagcagtcgcgggagtagtctgactaccacgacagactgatacacgaggccttaaatttaatgtcatgctactctttgttctgagacagcgtcaacgtagttcacgtactactgtgagacaaagccatgacaagcgacttcgtactacgctccctagacgtgaacatggtcaacgcgtacttttactacacacgcaaagacatcctcggatcaatgctcttgcgttccacccacaatacatttaaagtagaaggccatgaccttttcggtagcgcagtgactttatacagtaatcaaagtataagacattcctgctacagacggcctgaagtgggctcataatgctgcaacgtcttcagcacgacctagacaatagcagtgcatggatttaataggcctggtcaccagaagccttccataaccaatgtagggtagttggcaaggcccccagcttaaggcactaattagacgtcatcaaccgcgggcct

SEQ ID NO: 567291 - DNA, 334 bp, Homo sapiens
gtatgaggcaatccatagcccttcccaaaaaccacacaccgcagcactaatacccccaaaccaaacgccccatacctataagcggcggggagctccgctaccaaggagcgcgcaacccacagcttagccggcccctcctcgatcgtatccgcctctacagcagcaaaacgtcacgtgtacccacattccgtacaagcttctacctcattatgccaatttctcagtcgacaacgttatcaatcgggggaccccacccacaagggtctcagaatgagccacctatattagtactactccaatcaatacctcgtcagccagcgtagtcccctccgtg

SEQ ID NO: 567292 - DNA, 172 bp, Homo sapiens
  misc_feature (50)..(50): n is a, c, g, or t
ggtgtcacggacctgatgaacttctacatatgaaccacagactttctgangtctaaatgtagcctttcatggcacatttcagtgatcagaatagatatccttttacacgcacaaaagcaatagattcattcagtggacaagttcctgtgtttaacatacacgagctataagt

SEQ ID NO: 567293 - DNA, 150 bp, Homo sapiens
  misc_feature (128)..(128): n is a, c, g, or t
gtgtatctagaggatcccgccacggtagattcacggtagattatagcaaatttttttctttttgtatttcctatgtttctcacttttttttttttcttgagagagtctcattctggtcacccaggctngaatgcaggtgggccatctcgg

SEQ ID NO: 567294 - DNA, 948 bp, Homo sapiens
ctgattgcccatctgtattacctattcgctcaactctagcttctacctgtaaattaccagtaccacctgctaatggctccatttggatgctattcaggatagtatcacggtcatcctagaggcatacccgaaattcgccaattggagtgcatagaatgagaaaagtgaaaagttgaatttggacctagttaagctacaagttatgcatgatactcagtcgaatcagagcagataatacaaactggatatcaacttagaatggagtcagagtaacagatacgtttacagatcaagaaaagcaacattactggatacaactacagaagttacaaaaaaggatactcataatccttatagtattatttcagagaccagtgaatgaagattgacgctcgaggattgctgtccttagacaacactgatggatatctatacagaacttgagacgaattcgttatcttgcagcttcagtgttttacgttgcctggcaactagcattgggattcttatagattctggaacgctagtattaagtgctcatcctgctgtggactgttggcttctgatgaacatccacaaccgggagagactttactttgcacattgtcagttgcagcaaaaatgttactacacaagattattcgaagtgtatacggactaaatagaggaagtgttttgagaatgagatagagatagctgtgtctttattcgtgtcgtgtgtgatgtgcaggtgtgtgtctttattatattgatcagctgtcactcagacctggtttgagatagaagagcattgttgtccttgttgatagttaatagaaatgtgtcacagagttttcgttatgtttgcttgaacagttgtgtaaatatacaggattttgtgggtattggttgaatagtttgtaaaccattccgtagcctacatatttaaaactgaagaactgtcctgat

SEQ ID NO: 567295 - DNA, 282 bp, Homo sapiens
tcaaagagccggagtcgagacagcctggcagctgaggcatgagaattgcttgcgcccccaggaggtgggggttgcagtgagccgagatcacaccagtatactccagcctgggtgacagagcaaaacttgtctcaaaaaaaaaaaaaaaaaaaaaaaaaaaaaaaaattaaaggatcggatttggggaatgggggaaaatttgggtttggacaatttggggcgcctcttctgggattgaggggggatctcttaataaagctgagcaccgtgagggatttgaag

SEQ ID NO: 567296 - DNA, 210 bp, Homo sapiens
acgttccttgggctaccccgatgcagcacaccacatgtaacctgctatgatacgcagctcattcagtgttctctaacagcagtaatattaataattttcatgatttgagaagccttgctccgaagcgaaaagtcctaatagcagatgatccctccatagacatagagtagactatatgcatgccccccaccctaccacacattcaacgaa

SEQ ID NO: 567297 - DNA, 379 bp, Homo sapiens
gaataggttcaccgcaattgacgatgtataagcttaactcacaggcctaactgtaatgtttaagtactgctactgactgagcacggactagagacagttatcagcgaaccactgtaccgaactcacacactctctggcagaacctgggtgtgaaacttgcccaccgtcagcacaaactagaacgggctctgttggtccttagtcatttccagcatgccttaaaggaactaatgagttggctgactcataccgaagagttgtaatgattgctcagagaccaatgtgtggagacccaatagtcattgacgttgagctctgcatcagtcacatgtcctaaaatgatgttttggttcatcatgccgcgttggcacactcttct

SEQ ID NO: 567298 - DNA, 1002 bp, Homo sapiens
ggcccccccctttaggtggtttataatgggggtgggtggcgccacccccctcccccatttcgttggtcggacacagaccccccttggttgctaccacccccaataatgaaattattatctattggggggggggagacccccccctctggtgggtgatgtgtcctcaacaaatagtggggcagacaccccctttgcttcgcgttggtgtggggcagacccactttttttgcggcaaccccccaaaaggttgtctctcctcccctggggtggggagacacgcctctctttgttgtaaatattcaggtagagagagtagtgggagagtgaccgccccctgtgtggacagtaaattacatacgctctcctcttcttgtcgacaacttacacggcgggagacacacaccagggggtggtgaatcacaccccctctataacgcaccacacacaaatagtgtgggagacacacacctctttaagaaatacacaccatctctcacaccccctattagactgctacggtctgtgggacgacacacacagagaggagagtggtgatacatcccacctgaagagagattgtgcgtgagaggatgattgtgagggataaatctttttgctatgtctggggccacaaccacctgttgtgcacaccctcgggggcatttataatcgtgggtggtgataaccttctctcacacatagtgtggaagtaatatttgcccgggctggttatttcttcatggttagaatagaatgataagaaatagtagcctgcatcctccacaacatcagaagaatatatccgcttgtgcagataagtatgaatgatgcggtgttgaaaccccccaacactaggtcttattcgggggcccaccccaacaaaaaggggggcaccattttttttttgggggcccccccccccccccgctttttttggggggcgcctttttttttgttgggtgttggtgggcccaagaagaaaaaaccccggggcccccctca

SEQ ID NO: 567299 - DNA, 941 bp, Homo sapiens
  misc_feature (242)..(242): n is a, c, g, or t
gggctagggacgcatgcgaggctgcaggaccgtgtcctccaccgagcgtgaccccgatagtggaatcagctcacccaaagctcaggcttctgaggcccgggcgggggactcgaaaacgtgctgcttcttggtagaaaacgggtgctaaatggctgttcgagtgctgaggtcttgatgtggagtgcaaggtccctgttcgcagaggacgagtgagccagtgcgtgagcgggtgggcagcaggngccctgtagcctctgggttggactcgtcagggtgaaggtcaggcgtgactcgcattaacataaagagcgggaacagcagattacctaaaacctcgggcagaagaggagaggaggatagcagcagaagagaagaagcaagacatgatgaactcgaaacgggagttgccagcgcgaattggcagacgatgacagccctattcacggtgccgtgacccatgtgacctgactcttttggtagtcagcatcggctgagtcatatgcttcctgtgtcgttgtgacaacttgggacacggtaaaactgtgtactagacaagaaacttgcggggatacaacggggggtgcgggaaaaacatctattgctggggggcacctgagcatagacagggctgggcgggacccggatcataatgatccctgtggggaaaaaatgagcggcacccccccgtaaatacgtgcgggacgagcatgtatgcgctcaagacgggggtcacgcccgactatatggtaacgcggggcacaacaaagccggagacaaacaaccggccacgagcaagaagagacgggaggggacgcaagaggcacacaacaacggacgagcacaacagacaaaaccaagacgggccacaaaaagacacgcggcaacacagaccaacaacaaagaaccagcgcaaccgcaacgccgcagaaagaggaagacac

SEQ ID NO: 567300 - DNA, 328 bp, Homo sapiens
tggtaaaaatttcaatggagaaaaagcatcaagagggacagagaaggctgggcacggtggctcacacctgtaatcccagcactttgggaggccgaggcgggcagatcacgaggtcaggagattgagaccatcctggctaacatggtgaaaccccatctctgctaaaaatacaaaaaaattagctgggtgtggtgttgggcgcctgtagtcccagctacttggaaggctgaggcaggagaatggcgtggacccgggaggcggagcttgcagtgagccgaaagcgggccactgcactccagcctgggcgacagagcgagactccatctca

SEQ ID NO: 567301 - DNA, 424 bp, Homo sapiens
  misc_feature (7)..(7): n is a, c, g, or t
  misc_feature (55)..(55): n is a, c, g, or t
  misc_feature (91)..(91): n is a, c, g, or t
  misc_feature (186)..(186): n is a, c, g, or t
  misc_feature (201)..(201): n is a, c, g, or t
  misc_feature (278)..(278): n is a, c, g, or t
acccccnccccgaaaatatatataatccaaaaaccccccagtacccccaaaccancccccttaagccgttccagattgtaaagtgtgtccnttaaatccgccgggagggcccactgtccagccaggccagtgacccccccgtgcccccagtttgaagccacagtgtgtggagtatttgatgtaccnacagtacccatagcnattttggtctgttaagtaagttgcaatttgtgatgaaatgaagtggaaagtagtacctcataatgaacaaatttccntggttacatggtttttcttgtaaaacttaaagaaaaaaaaagaaaacttgaaattttatatatttggattttgtagtttttttttttttatttaatgcaacacaaggtaccaaaatcattaaataaagtacactgtggtcatttta

SEQ ID NO: 567302 - DNA, 316 bp, Homo sapiens
gctcggccccatagtgcactcttctatatctacatgtcatgggttttggttgtggtcttggctgttctgaaacaggctagtaaacgaaacgaatgtcagtgcgggacgaaagagatggtgaaataaggtcccacgagttagacaagagacaatgggattaatggcacagaggccatgattcgtttatgaagagaggaattcctccttctctgaacaaggtgtgcattggtgcagttcactatgattaattagagattgtgccaaggatctggcctacaaaggctctttgtggtagatattgaagagtgcacttttg

SEQ ID NO: 567303 - DNA, 118 bp, Homo sapiens
aggatctcctgtctttgggacggcgagcgggcggatacaggtcaggagatcacgacagtctgcgaacattgtgaaccctgttttactaaaaacacaaaactagcttagtgttgttgcc

SEQ ID NO: 567304 - DNA, 1286 bp, Homo sapiens
  misc_feature (333)..(333): n is a, c, g, or t
gaactggactgtgctctgacgaaagtgtgactcgtgattgtttagaattcctaagatacgaggaatcctgtgaatgctttgtaccattattactaggttagtcggagcgtgcaattgcactaactcaatcgtatgttagtcacgagacagtgatatagtgtcatcggttgtcatgtactagaaaagctatggaaaagctgtagcaactaggagatatcgtctggagcgttacaggcgtaatgtccgagctaagatattcacggcataaatgcggatagatctcttaatttccacataccatttcatatgacactaatgctctctcgtttgctnctagttgcttgttattgtgcattgatttttgccttttagaaggttgagtatctttgaatgaactagatatgaacgtgtcatgaggcatcacccaagatccatttagagtgaagcttgtattacacgctaatctatgtgatatctatatatcacagaacgattctggcgctatataatatccagaagaacgttctagagcaattgtttccctttctattcattcaaacggtacgacgttgcgtgaattacgaaagactgattgattggtctgtacgccaaatcttgtgtgcagactctcataagtcgcgttccgcccaaattcttgaatatctcggatgacaaggaaactctggtagaatttgtcaatttagaccctacgttgctccattacgtagaaaacttaattggaagaaaagccagcaatttagtgtggaacgttcaaaacttccaacttctccttcctaatggggaactgttccagatcaattattcccccttgcttaatatttccccaagggaaaacagacaatgcacattcccttgttacacccttgttatgaagagcaaaaatttatttagaggacaacccacactcactacaacttcacatgcttacctgtatagtaataaaccgaagtgcatttcatgggagcaaacctagaaccccaaagggcaccttaaggtccagaccctaaaaaaaaccttccaattatttctggacaatttcctcacacacacaggctgtcgagcgcattgtaattactttgtcgtgtagagttaccgcaagggcaaagtgaaccgaacaagctgtcgttcagaaatttcaacacaaatctgctctgttgtgaaacacacaacgttatttataccctcccccgaatttctataaatatggcacggcttcaagagacactttggcccagctcacacgaagtctgcacacttgcacactc

SEQ ID NO: 567305 - DNA, 129 bp, Homo sapiens
acctaacctaaccctactcgaatgcttaaaactaatcgtcccaacaattatattcctaccactgacatgacttttccagaaaacacacattatttgaatcaacacaactcacccacagactaattatta

SEQ ID NO: 567306 - DNA, 12620 bp, Homo sapiens
  misc_feature (603)..(603): n is a, c, g, or t
  misc_feature (618)..(618): n is a, c, g, or t
  misc_feature (676)..(676): n is a, c, g, or t
  misc_feature (685)..(685): n is a, c, g, or t
  misc_feature (1078)..(1078): n is a, c, g, or t
  misc_feature (1116)..(1116): n is a, c, g, or t
ttttttttttatagtgcatgcaggaaattgcaattttatttatgtttgtattgatacatatttgtacatatttatggggtgtggtagtttgatatatgcatacaatgtgtaatgatcaaatcagggtgtttaggatatctatcacctcaaacatttatcatttttgtgtttggaacatttctaatctcctagttattttgaaatatataacatattgttaactatagtcaccctactgtgctatcaaacacttgaacttattccttctatctacgtttgtacccattaaccaatctcttccctccctcccccaactccaccttcccagcctctggtacttatctctactccatgagatcaactttttaagctcccacatgagtgagaccatgggatatttgtctttctgtgccagacttatttcacttagaataatgacctccagttccgtaagatgggcagccaggaaaggccttacttagctgatgtttgaattgtgaagttatgtaatcattaagatgagtatacatacaatgggccagctgagtgcacagcaagattcaataaattcaaactaacattactcttattgccaagagagtncctgaaatgacagcncattggaaactggctactttccttccctttccttaggggtttaaggaaagcatgagtnatttcagtnttttgctggagctcctcactgacactcattgcagagcctgagccctcaactctcaatctttgcttaggtcctggcttaggctccactttgtaagaggcaccttcctagtattcactactctctctctcacaatcatgtccttacagacattgctgatcctctttcatactgacaccgggttctagtccgagttccatcactaagtcgctgtttgactttgggcaagttacttctgtggttaattatttttcatcaacaaaatcaaaaggtgaaactagacgaacaactaagaggctccagtattttttcaatctaagagtcccatatcccccactcccttctcacagctcattcaacaatcctaatggcagcgggtgcccgcagtctcaagtntctgccgaagcccaagccgctgtctcggtcagtcacanccgacgaagaggaggaattggaggaagccagcataaccacctcacactgagaacatctgacctttcccagaacgcccgcccactcgacacttcctgtccctccccagatcttgttccggggcacctactcgggtctaatcactcccctcattcactctttagggtccattgctgtttctttgaggaagcggagcatcttctgtcgttgattggtttccgtcattgttgataggttggtaacaaacaaggtgtgcctggtctcctggtaacgtcctgccgatagtcctgattggtcggtgtcttaatcccatcttccgtcccaactgctagtggctgagtccctggcggggcgcggcggtggaaggtgtcgcgtacgggcttcccgagctgacgtggcttgaattgggaggggggcagctggagcctcaggcggcagcgcttctagaaatgctgagccgattatcaggattagcaaatgttgttttgcatgaattatcaggagatgatgacactgatcagaatatgagggctcccctagaccctgaattacaccaagaatctgacatggaatttaataatactacacaagaagatgttcaggagcgcctggcttatgcagagcaattggtggtggagctaaaagatattattagacagaaggatgttcaactgcagcagaaagatgaagctctacaggaagagagaaaagctgctgataacaaaattaaaaaactaaaacttcatgcgaaggccaaattaacttctttgaataaatacatagaagaaatgaaagcacaaggagggactgttctgcctacagaacctcagtcagaggagcaactttccaagcatgacaagagttctacagaggaagagatggaaatagaaaagataaaacataagctccaggagaaggaggaactaatcagcactttgcaagcccagcttactcaggcacaggcagaacaacctgcacagagttctacagagatggaagaatttgtaatgatgaagcaacagctccaggagaaggaagaattcattagcactttacaagcccagctcagccagacacaggcagagcaagctgcacagcaggtggtccgagagaaagatgcccgctttgaaacacaagttcgtcttcatgaagatgagcttcttcagttagtaacccaggcagatgtggaaacagagatgcaacagaaattgagggtgctgcaaaggaagcttgaggaacacgaagaatccttggtgggccgtgctcaggtcgttgacttgctgcaacaggagctgactgctgctgagcagagaaaccagattctctctcagcagttacagcagatggaagctgagcataatactttgaggaacactgtggaaacagaaagagaggagtccaagattctactggaaaagatggaacttgaagtggcagagagaaaattatccttccataatctgcaggaagaaatgcatcatcttttagaacagtttgagcaagcaggccaagcccaggctgaactagagtctcggtatagtgctttggagcagaagcacaaagcagaaatggaagagaagacctctcatattttgagtcttcaaaagactggacaagagctgcagtctgcctgtgatgctctaaaggatcaaaattcaaagcttctccaagataagaatgaacaggcagttcagtcagcccagaccattcagcaactggaagatcagctccagcaaaaatccaaagaaattagccaatttctaaatagactgcccttgcaacaacatgaaacagcatctcagacttctttcccagatgtttataatgagggcacacaggcagtcactgaggagaatattgcttctttgcagaagagagtggtagaactagagaatgaaaagggagccttgctccttagttctatagagctggaggagctgaaagctgagaatgaaaaactgtcttctcagattactctcctagaggctcagaatagaactggggaggcagacagagaagtcagtgagatcagcattgttgatattgccaacaagaggagctcttctgctgaggaaagtggacaagatgttctagaaaacacattttctcagaaacataaagaattatcagttttattgttggaaatgaaagaagctcaagaggaaattgcatttcttaaattacagctccagggaaaaagggctgaggaagcagatcatgaggtccttgaccagaaagaaatgaaacagatggagggtgagggaatagctccaattaaaatgaaagtatttcttgaagatacagggcaagattttcccttaatgccaaatgaagagagcagtcttccagcagttgaaaaagaacaggcgagcactgaacatcaaagtagaacatctgaggaaatatctttaaatgatgctggagtagaattgaaatcaacaaagcaggatggtgataaatccctttctgctgtaccagatattggtcagtgtcatcaggatgagttggaaaggttaaaaagtcaaattttggagctcgagctaaactttcataaagcacaagaaatctatgagaaaaatttagatgagaaagctaaggaaattagcaacctaaaccagttgattgaggagtttaagaaaaatgctgacaacaacagcagtgcattcactgctttgtctgaagaaagagaccagcttctctctcaggtgaaggaacttagcatggtaacagaattgagggctcaggtaaagcaactggaaatgaaccttgcagaagcagaaaggcaaagaagacttgattatgaaagccaaactgcccatgacaacctgctcactgaacagatccatagtctcagcatagaagccaaatctaaagatgtgaaaattgaagttttacagaatgaactggatgatgtgcagcttcagttttctgagcagagtaccctgataagaagcctgcaaagccagctgcaaaataaggaaagtgaagtgcttgagggggcagaacgtgtaaggcatatctcaagtaaagtggaagaactgtcccaggctctttcacagaaggaacttgaaataacaaaaatggatcagctcttactagagaaaaagagagatgtggaaaccctccaacaaaccatcgaggagaaggatcaacaagtgacagaaatcagctttagtatgactgagaaaatggttcagcttaatgaagagaagttttctcttggggttgaaattaagactcttaaagaacagctaaatttattatccagagctgaggaagcaaaaaaagagcaggtggaagaagataatgaagtttcttctggccttaaacaaaattatgatgagatgagcccagcaggacaaataagtaaggaagaacttcagcatgaatttgaccttctgaagaaagaaaatgagcagagaaagagaaagctccaggcagctcttattaacagaaaggagcttctgcaaagagtcagtagattggaagaagaattagccaacttgaaagatgaatctaagaaagaaatcccactcagtgagactgagaggggagaagtggaagaagataaagaaaacaaagaatactcagaaaaatgtgtgacttctaagtgccaagaaatagaaatttatttaaaacagacaatatctgagaaagaagtggaactacagcatataaggaaggatttggaagaaaagctggcagctgaagagcaattccaggctctggtcaaacagatgaatcagaccttgcaagataaaacaaaccaaatagatttgctccaagcagaaatcagtgaaaaccaagcaattatccagaagttaatcacaagtaacacggatgcaagtgatggggactccgtagcacttgtaaaggaaacagtggtgataagtccaccttgtacaggtagtagtgaacactggaaaccagaactagaagaaaagatactggcccttgaaaaagaaaaggagcaacttcaaaagaagctacaggaagccttaacctcccgcaaggcaattcttaaaaaggcacaggagaaagaaagacatctcagggaggagctaaagcaacagaaagatgactataatcgcttgcaagaacagtttgatgagcaaagcaaggaaaatgagaatattggagaccagctaaggcaactccagattcaagtaagggaatccatagacggaaaactcccaagcacagaccagcaggaatcgtgttcttccactccaggtttagaagaacctttattcaaagccacagaacagcatcacactcaacctgttttagagtccaacttgtgcccagactggccttctcattctgaagatgcgagtgctctgcagggcggaacttctgttgcccagattaaggcccagctgaaggaaatagaggctgagaaagtagagttagaattgaaagttagttctacaacaagtgagcttactaaaaaatcagaagaggtatttcagttacaagagcagataaataaacagggtttagaaatcgagagtctaaagacagtatcccatgaagctgaagtccatgccgaaagcctgcagcagaaattggaaagcagccaactacaaattgctggcctagaacatctaagagaattgcaacctaaactggatgaactgcaaaaactcataagcaaaaaggaagaagacgttagctacctttctggacaacttagtgagaaagaagcagctctcactaaaatacagacagagataatagaacaagaagatttaattaaggctctgcatacacagctagaaatgcaagccaaagagcatgatgagaggataaagcagctacaggtggaactttgtgaaatgaagcaaaaaccagaagagattggagaagaaagtagagcaaagcaacaaatacaaaggaaactgcaagctgcccttatttcccgaaaagaagcactaaaagaaaacaaaagtctccaagaggaattgtctttggccagaggtaccattgaacgtctcaccaagtctctggcagatgtggaaagccaagtttctgctcaaaataaagaaaaagatacggtcttaggaaggttagctcttcttcaagaagaaagagacaaactcattacagaaatggacaggtctttattggaaaatcagagtctcagcagctcctgtgaaagtctaaaactagctctagagggtcttactgaagacaaggaaaagttagtgaaggaaattgaatctttgaaatcttctaagattgcagaaagtactgagtggcaagagaaacacaaggagctacaaaaagagtatgaaattcttctgcagtcctatgagaatgttagtaatgaagcagaaaggattcagcatgtggtggaagctgtgaggcaagagaaacaagaactgtatggcaagttaagaagcacagaggcaaacaagaaggagacagaaaagcagttgcaggaagctgagcaagaaatggaggaaatgaaagaaaagatgagaaagtttgctaaatctaaacagcagaaaatcctagagctggaagaagagaatgaccggcttagggcagaggtgcaccctgcaggagatacagctaaagagtgtatggaaacacttctttcttccaatgccagcatgaaggaagaacttgaaagggtcaaaatggagtatgaaaccctttctaagaagtttcagtctttaatgtctgagaaagactctctaagtgaagaggttcaagatttaaagcatcagatagaagataatgtatctaaacaagctaacctagaggccaccgagaaacatgataaccaaacgaatgtcactgaagagggaacacagtctataccaggtgagactgaagagcaagactctctgagtatgagcacaagacctacatgttcagaatcggttccatcagcgaagagtgccaaccctgctgtaagtaaggatttcagctcacatgatgaaattaataactacctacagcagattgatcagctcaaagaaagaattgctggattagaggaggagaagcagaaaaacaaggaatttagccagactttagaaaatgagaaaaataccttactgagtcagatatcaacaaaggatggtgaactaaaaatgcttcaggaggaagtaaccaaaatgaacctgttaaatcagcaaatccaagaagaactctccagagttaccaaactaaaggagacagcagaagaagagaaagatgatttggaagagaggcttatgaatcaattagcagaacttaatggaagcattgggaattactgtcaggatgttacagatgcccaaataaaaaatgagctattggaatctgaaatgaagaaccttaaaaagtgtgtgagtgaattggaagaagaaaagcagcagttagtcaaggaaaaaactaaggtggaatcagaaatacgaaaggaatatttggagaaaatacaaggtgctcagaaagaacccggaaataaaagccatgcaaaggaacttcaggaactgttaaaagaaaaacaacaagaagtaaagcagctacagaaggactgcatcaggtatcaagagaaaattagtgctctggagagaactgttaaagctctagaatttgttcaaactgaatctcaaaaagatttggaaataaccaaagaaaatctggctcaagcagttgaacaccgcaaaaaggcacaagcagaattagctagcttcaaagtcctgctagatgacactcaaagtgaagcagcaagggtcctagcagacaatctcaagttgaaaaaggaacttcagtcaaataaagaatcagttaaaagccagatgaaacaaaaggatgaagatcttgagcgaagactggaacaggcagaagagaagcacctgaaagagaagaagaatatgcaagagaaactggatgctttgcgcagagaaaaagtccacttggaagagacaattggagagattcaggttactttgaacaagaaagacaaggaagttcagcaacttcaggaaaacttggacagtactgtgacccagcttgcagcctttactaagagcatgtcttccctccaggatgatcgtgacagggtgatagatgaagctaagaaatgggagaggaagtttagtgatgcgattcaaagcaaagaagaagaaattagactcaaagaagataattgcagtgttctaaaggatcaacttagacagatgtccatccatatggaagaattaaagattaacatttccaggcttgaacatgacaagcagatttgggagtccaaggcccagacagaggtccagcttcagcagaaggtctgtgatactctacagggggaaaacaaagaacttttgtcccagctagaagagacacgccacctataccacagttctcagaatgaattagctaagttggaatcagaacttaagagtctcaaagaccagttgactgatttaagtaactctttagaaaaatgtaaggaacaaaaaggaaacttggaagggatcataaggcagcaagaggctgatattcaaaattctaagttcagttatgaacaactggagactgatcttcaggcctccagagaactgaccagtaggctgcatgaagaaataaatatgaaagagcaaaagattataagcctgctttctggcaaggaagaggcaatccaagtagctattgctgaactgcgtcagcaacatgataaagaaattaaagagctggaaaacctgctgtcccaggaggaagaggagaatattgttttagaagaggagaacaaaaaggctgttgataaaaccaatcagcttatggaaacactgaaaaccatcaaaaaggaaaacattcagcaaaaggcacagttggattcctttgttaaatccatgtcttctctccaaaatgatcgagaccgcatagtgggtgactatcaacagctggaagagcgacatctctctataatcttggaaaaagaccaactcatccaagaggctgctgcagagaataataagcttaaagaagaaatacgaggcttgagaagtcatatggatgatctcaattctgagaatgccaagctagatgcagaactgatccaatatagagaagacctgaaccaagtgataacaataaaggacagccaacaaaagcagcttcttgaagttcaacttcagcaaaataaggagctggaaaataaatatgctaaattagaagaaaagctgaaggaatctgaggaagcaaatgaggatctgcggaggtcctttaatgccctacaagaagagaaacaagatttatctaaagagattgagagtttgaaagtatctatatcccagctaacaagacaagtaacagccttgcaagaagaaggtactttaggactctatcatgcccagttaaaagtaaaagaagaagaggtacacaggttaagtgctttgttttcctcctctcaaaagagaattgcagaactggaagaagaattggtttgtgttcaaaaggaagctgccaagaaggtaggtgaaattgaagataaactgaagaaagaattaaagcatcttcatcatgatgcagggataatgagaaatgaaactgaaacagcagaagagagagtggcagagctagcaagagatttggtggagatggaacagaaattactcatggtcaccaaagaaaataaaggtctcacagcacaaattcagtcttttggaaggtctatgagttccttgcaaaatagtagagatcatgccaatgaggaacttgatgaactgaaaaggaaatatgatgccagtctgaaggaattggcacagttgaaagaacagggactcttaaacagagagagagatgctcttctttctgaaaccgccttttcaatgaactccactgaggagaatagcttgtctcaccttgagaaacttaaccaacagctcctatccaaagatgagcaattgcttcacttgtcctcacaactagaagattcttataaccaagtgcagtccttttccaaggctatggccagtctgcagaatgagagagatcacctgtggaatgagctggagaaatttcgaaagtcagaggaagggaagcagaggtctgcagctcagccttccaccagcccagctgaagtacagagtttaaaaaaagctatgtcttcactccaaaatgacagagacagactactgaaggaattgaagaatctgcagcagcaatacttacagattaatcaagagatcactgagttacatccactgaaggctcaacttcaggagtatcaagataagacaaaagcatttcagattatgcaagaagagctcaggcaggaaaacctctcctggcagcatgagctgcatcagctcaggatggagaagagttcctgggaaatacatgagaggagaatgaaggaacagtaccttatggctatctcagataaagatcagcagctcagtcatctgcagaatcttataagggaattgaggtcttcttcctcccagactcagcctctcaaagtgcaataccaaagacaggcatccccagagacatcagcttccccagatgggtcacaaaatctggtttatgagacagaacttctcaggacccagctcaatgacagcttaaaggaaattcaccaaaaggagttaagaattcagcaactgaacagcaacttctctcagctactggaagagaaaaacaccctttccattcagctctgcgataccagtcagagtcttcgtgagaaccagcagcactatggtgaccttttaaatcactgtgcagtcttggagaagcaggttcaagagctgcaggcggggccactaaatatagatgttgctccaggagctccccaggaaaagaatggagttcacagaaagagtgaccctgaggaactaagggaaccgcagcaaagcttttctgaagctcagcagcagctatgcaacaccagacaggaagtgaatgaattaaggaagctgctggaagaagaacgagaccaaagagtggctgctgagaatgctctctctgtggccgaggagcagatcagacggttagagcacagtgaatgggactcttcccggactcctatcattggctcctgtggcactcaggagcaggcactgttaatagatcttacaagcaacagttgtcgaaggacccggagtggcgttggatggaagcgagtcctgcgttcactctgtcattcacggacccgagtgccacttctagcagccatctactttctaatgattcatgtcctgctcattctgtgttttacgggccatctatagacttagttgttactctttggaccactcccctcaaaacttggaattctctcacctctaacatcagaacatcaattccagtggaacagtcttcccatttacaggtcttctctccaactcttcacggaaagtgcctgcaaaaacagaggtggatacgaggacaggttggagctgcagggactggcgagtctgctttcttctactgccctgagcctgaacgcttctgcttaatctgagaatcacatttggtttgttgagcctaatatttgttgagattttgcaggaccctgatcttttgtggtcctgtaaaagatactgaggaatgtctttcagccaagccaagaggatggtttcaataaacctaataatctgaagttcagtatcattttgattgataactttctttgccttgtttgcctgtattttctcctgtttcagggggaaggtggctctgcataaacagagttcagggaaatgaacatgtcacctcataggacatctgatttaggtctcttgcagaatagggtggtgaaagctgaaggaactccctaggggttttagctgttagatcacatgggaggacagcatcttcttccctgccaatttcagatataattggagggagaatttcaggtcttagactataaggatagaatccctttgcttttgcccttgatcacatgtatactaaggtattaagtggcccaagtctttcctttcaccaaagggcagggagaagtgtctatggacagcagggttccaattcttgtcattccaggaatatctgaatattcctggaatgtggaccctgagacagtgctcaggggccactgggagccaatattaggcattgactctcagccaggagtctgactggtctaacaccacactgcaactcctgacctcttgaagtactaagctactttgctgttagtgacagttattacagtttctcagccccattgtctctgccctctgtggcaatggaaggagaatatagagaagacaaaattaaatatagatagacctgagaaggacagccaggatagaattccatttgtgcctattccctgcctcccctcccctcccccatcctaccagttggttattttctcattgcatacgtgatgtgttcactgcctagcctctccctaaagaagagagaagacaagtgggctgactgatctgctctaaatctactgtggtgattaaatcttggttacaacatcctgggaagtttcctgaacaactgtaaaataataaaattattttcagaatga

SEQ ID NO: 567307 - DNA, 12730 bp, Homo sapiens
  misc_feature (603)..(603): n is a, c, g, or t
  misc_feature (618)..(618): n is a, c, g, or t
  misc_feature (676)..(676): n is a, c, g, or t
  misc_feature (685)..(685): n is a, c, g, or t
  misc_feature (1078)..(1078): n is a, c, g, or t
  misc_feature (1116)..(1116): n is a, c, g, or t
ttttttttttatagtgcatgcaggaaattgcaattttatttatgtttgtattgatacatatttgtacatatttatggggtgtggtagtttgatatatgcatacaatgtgtaatgatcaaatcagggtgtttaggatatctatcacctcaaacatttatcatttttgtgtttggaacatttctaatctcctagttattttgaaatatataacatattgttaactatagtcaccctactgtgctatcaaacacttgaacttattccttctatctacgtttgtacccattaaccaatctcttccctccctcccccaactccaccttcccagcctctggtacttatctctactccatgagatcaactttttaagctcccacatgagtgagaccatgggatatttgtctttctgtgccagacttatttcacttagaataatgacctccagttccgtaagatgggcagccaggaaaggccttacttagctgatgtttgaattgtgaagttatgtaatcattaagatgagtatacatacaatgggccagctgagtgcacagcaagattcaataaattcaaactaacattactcttattgccaagagagtncctgaaatgacagcncattggaaactggctactttccttccctttccttaggggtttaaggaaagcatgagtnatttcagtnttttgctggagctcctcactgacactcattgcagagcctgagccctcaactctcaatctttgcttaggtcctggcttaggctccactttgtaagaggcaccttcctagtattcactactctctctctcacaatcatgtccttacagacattgctgatcctctttcatactgacaccgggttctagtccgagttccatcactaagtcgctgtttgactttgggcaagttacttctgtggttaattatttttcatcaacaaaatcaaaaggtgaaactagacgaacaactaagaggctccagtattttttcaatctaagagtcccatatcccccactcccttctcacagctcattcaacaatcctaatggcagcgggtgcccgcagtctcaagtntctgccgaagcccaagccgctgtctcggtcagtcacanccgacgaagaggaggaattggaggaagccagcataaccacctcacactgagaacatctgacctttcccagaacgcccgcccactcgacacttcctgtccctccccagatcttgttccggggcacctactcgggtctaatcactcccctcattcactctttagggtccattgctgtttctttgaggaagcggagcatcttctgtcgttgattggtttccgtcattgttgataggttggtaacaaacaaggtgtgcctggtctcctggtaacgtcctgccgatagtcctgattggtcggtgtcttaatcccatcttccgtcccaactgctagtggctgagtccctggcggggcgcggcggtggaaggtgtcgcgtacgggcttcccgagctgacgtggcttgaattgggaggggggcagctggagcctcaggcggcagcgcttctagaaatgctgagccgattatcaggattagcaaatgttgttttgcatgaattatcaggagatgatgacactgatcagaatatgagggctcccctagaccctgaattacaccaagaatctgacatggaatttaataatactacacaagaagatgttcaggagcgcctggcttatgcagagcaattggtggtggagctaaaagatattattagacagaaggatgttcaactgcagcagaaagatgaagctctacaggaagagagaaaagctgctgataacaaaattaaaaaactaaaacttcatgcgaaggccaaattaacttctttgaataaatacatagaagaaatgaaagcacaaggagggactgttctgcctacagaacctcagtcagaggagcaactttccaagcatgacaagagttctacagaggaagagatggaaatagaaaagataaaacataagctccaggagaaggaggaactaatcagcactttgcaagcccagcttactcaggcacaggcagaacaacctgcacagagttctacagagatggaagaatttgtaatgatgaagcaacagctccaggagaaggaagaattcattagcactttacaagcccagctcagccagacacaggcagagcaagctgcacagcaggtggtccgagagaaagatgcccgctttgaaacacaagttcgtcttcatgaagatgagcttcttcagttagtaacccaggcagatgtggaaacagagatgcaacagaaattgagggtgctgcaaaggaagcttgaggaacacgaagaatccttggtgggccgtgctcaggtcgttgacttgctgcaacaggagctgactgctgctgagcagagaaaccagattctctctcagcagttacagcagatggaagctgagcataatactttgaggaacactgtggaaacagaaagagaggagtccaagattctactggaaaagatggaacttgaagtggcagagagaaaattatccttccataatctgcaggaagaaatgcatcatcttttagaacagtttgagcaagcaggccaagcccaggctgaactagagtctcggtatagtgctttggagcagaagcacaaagcagaaatggaagagaagacctctcatattttgagtcttcaaaagactggacaagagctgcagtctgcctgtgatgctctaaaggatcaaaattcaaagcttctccaagataagaatgaacaggcagttcagtcagcccagaccattcagcaactggaagatcagctccagcaaaaatccaaagaaattagccaatttctaaatagactgcccttgcaacaacatgaaacagcatctcagacttctttcccagatgtttataatgagggcacacaggcagtcactgaggagaatattgcttctttgcagaagagagtggtagaactagagaatgaaaagggagccttgctccttagttctatagagctggaggagctgaaagctgagaatgaaaaactgtcttctcagattactctcctagaggctcagaatagaactggggaggcagacagagaagtcagtgagatcagcattgttgatattgccaacaagaggagctcttctgctgaggaaagtggacaagatgttctagaaaacacattttctcagaaacataaagaattatcagttttattgttggaaatgaaagaagctcaagaggaaattgcatttcttaaattacagctccagggaaaaagggctgaggaagcagatcatgaggtccttgaccagaaagaaatgaaacagatggagggtgagggaatagctccaattaaaatgaaagtatttcttgaagatacagggcaagattttcccttaatgccaaatgaagagagcagtcttccagcagttgaaaaagaacaggcgagcactgaacatcaaagtagaacatctgaggaaatatctttaaatgatgctggagtagaattgaaatcaacaaagcaggatggtgataaatccctttctgctgtaccagatattggtcagtgtcatcaggatgagttggaaaggttaaaaagtcaaattttggagctcgagctaaactttcataaagcacaagaaatctatgagaaaaatttagatgagaaagctaaggaaattagcaacctaaaccagttgattgaggagtttaagaaaaatgctgacaacaacagcagtgcattcactgctttgtctgaagaaagagaccagcttctctctcaggtgaaggaacttagcatggtaacagaattgagggctcaggtaaagcaactggaaatgaaccttgcagaagcagaaaggcaaagaagacttgattatgaaagccaaactgcccatgacaacctgctcactgaacagatccatagtctcagcatagaagccaaatctaaagatgtgaaaattgaagttttacagaatgaactggatgatgtgcagcttcagttttctgagcagagtaccctgataagaagcctgcaaagccagctgcaaaataaggaaagtgaagtgcttgagggggcagaacgtgtaaggcatatctcaagtaaagtggaagaactgtcccaggctctttcacagaaggaacttgaaataacaaaaatggatcagctcttactagagaaaaagagagatgtggaaaccctccaacaaaccatcgaggagaaggatcaacaagtgacagaaatcagctttagtatgactgagaaaatggttcagcttaatgaagagaagttttctcttggggttgaaattaagactcttaaagaacagctaaatttattatccagagctgaggaagcaaaaaaagagcaggtggaagaagataatgaagtttcttctggccttaaacaaaattatgatgagatgagcccagcaggacaaataagtaaggaagaacttcagcatgaatttgaccttctgaagaaagaaaatgagcagagaaagagaaagctccaggcagctcttattaacagaaaggagcttctgcaaagagtcagtagattggaagaagaattagccaacttgaaagatgaatctaagaaagaaatcccactcagtgagactgagaggggagaagtggaagaagataaagaaaacaaagaatactcagaaaaatgtgtgacttctaagtgccaagaaatagaaatttatttaaaacagacaatatctgagaaagaagtggaactacagcatataaggaaggatttggaagaaaagctggcagctgaagagcaattccaggctctggtcaaacagatgaatcagaccttgcaagataaaacaaaccaaatagatttgctccaagcagaaatcagtgaaaaccaagcaattatccagaagttaatcacaagtaacacggatgcaagtgatggggactccgtagcacttgtaaaggaaacagtggtgataagtccaccttgtacaggtagtagtgaacactggaaaccagaactagaagaaaagatactggcccttgaaaaagaaaaggagcaacttcaaaagaagctacaggaagccttaacctcccgcaaggcaattcttaaaaaggcacaggagaaagaaagacatctcagggaggagctaaagcaacagaaagatgactataatcgcttgcaagaacagtttgatgagcaaagcaaggaaaatgagaatattggagaccagctaaggcaactccagattcaagtaagggaatccatagacggaaaactcccaagcacagaccagcaggaatcgtgttcttccactccaggtttagaagaacctttattcaaagccacagaacagcatcacactcaacctgttttagagtccaacttgtgcccagactggccttctcattctgaagatgcgagtgctctgcagggcggaacttctgttgcccagattaaggcccagctgaaggaaatagaggctgagaaagtagagttagaattgaaagttagttctacaacaagtgagcttactaaaaaatcagaagaggtatttcagttacaagagcagataaataaacagggtttagaaatcgagagtctaaagacagtatcccatgaagctgaagtccatgccgaaagcctgcagcagaaattggaaagcagccaactacaaattgctggcctagaacatctaagagaattgcaacctaaactggatgaactgcaaaaactcataagcaaaaaggaagaagacgttagctacctttctggacaacttagtgagaaagaagcagctctcactaaaatacagacagagataatagaacaagaagatttaattaaggctctgcatacacagctagaaatgcaagccaaagagcatgatgagaggataaagcagctacaggtggaactttgtgaaatgaagcaaaaaccagaagagattggagaagaaagtagagcaaagcaacaaatacaaaggaaactgcaagctgcccttatttcccgaaaagaagcactaaaagaaaacaaaagtctccaagaggaattgtctttggccagaggtaccattgaacgtctcaccaagtctctggcagatgtggaaagccaagtttctgctcaaaataaagaaaaagatacggtcttaggaaggttagctcttcttcaagaagaaagagacaaactcattacagaaatggacaggtctttattggaaaatcagagtctcagcagctcctgtgaaagtctaaaactagctctagagggtcttactgaagacaaggaaaagttagtgaaggaaattgaatctttgaaatcttctaagattgcagaaagtactgagtggcaagagaaacacaaggagctacaaaaagagtatgaaattcttctgcagtcctatgagaatgttagtaatgaagcagaaaggattcagcatgtggtggaagctgtgaggcaagagaaacaagaactgtatggcaagttaagaagcacagaggcaaacaagaaggagacagaaaagcagttgcaggaagctgagcaagaaatggaggaaatgaaagaaaagatgagaaagtttgctaaatctaaacagcagaaaatcctagagctggaagaagagaatgaccggcttagggcagaggtgcaccctgcaggagatacagctaaagagtgtatggaaacacttctttcttccaatgccagcatgaaggaagaacttgaaagggtcaaaatggagtatgaaaccctttctaagaagtttcagtctttaatgtctgagaaagactctctaagtgaagaggttcaagatttaaagcatcagatagaagataatgtatctaaacaagctaacctagaggccaccgagaaacatgataaccaaacgaatgtcactgaagagggaacacagtctataccaggtgagactgaagagcaagactctctgagtatgagcacaagacctacatgttcagaatcggttccatcagcgaagagtgccaaccctgctgtaagtaaggatttcagctcacatgatgaaattaataactacctacagcagattgatcagctcaaagaaagaattgctggattagaggaggagaagcagaaaaacaaggaatttagccagactttagaaaatgagaaaaataccttactgagtcagatatcaacaaaggatggtgaactaaaaatgcttcaggaggaagtaaccaaaatgaacctgttaaatcagcaaatccaagaagaactctccagagttaccaaactaaaggagacagcagaagaagagaaagatgatttggaagagaggcttatgaatcaattagcagaacttaatggaagcattgggaattactgtcaggatgttacagatgcccaaataaaaaatgagctattggaatctgaaatgaagaaccttaaaaagtgtgtgagtgaattggaagaagaaaagcagcagttagtcaaggaaaaaactaaggtggaatcagaaatacgaaaggaatatttggagaaaatacaaggtgctcagaaagaacccggaaataaaagccatgcaaaggaacttcaggaactgttaaaagaaaaacaacaagaagtaaagcagctacagaaggactgcatcaggtatcaagagaaaattagtgctctggagagaactgttaaagctctagaatttgttcaaactgaatctcaaaaagatttggaaataaccaaagaaaatctggctcaagcagttgaacaccgcaaaaaggcacaagcagaattagctagcttcaaagtcctgctagatgacactcaaagtgaagcagcaagggtcctagcagacaatctcaagttgaaaaaggaacttcagtcaaataaagaatcagttaaaagccagatgaaacaaaaggatgaagatcttgagcgaagactggaacaggcagaagagaagcacctgaaagagaagaagaatatgcaagagaaactggatgctttgcgcagagaaaaagtccacttggaagagacaattggagagattcaggttactttgaacaagaaagacaaggaagttcagcaacttcaggaaaacttggacagtactgtgacccagcttgcagcctttactaagagcatgtcttccctccaggatgatcgtgacagggtgatagatgaagctaagaaatgggagaggaagtttagtgatgcgattcaaagcaaagaagaagaaattagactcaaagaagataattgcagtgttctaaaggatcaacttagacagatgtccatccatatggaagaattaaagattaacatttccaggcttgaacatgacaagcagatttgggagtccaaggcccagacagaggtccagcttcagcagaaggtctgtgatactctacagggggaaaacaaagaacttttgtcccagctagaagagacacgccacctataccacagttctcagaatgaattagctaagttggaatcagaacttaagagtctcaaagaccagttgactgatttaagtaactctttagaaaaatgtaaggaacaaaaaggaaacttggaagggatcataaggcagcaagaggctgatattcaaaattctaagttcagttatgaacaactggagactgatcttcaggcctccagagaactgaccagtaggctgcatgaagaaataaatatgaaagagcaaaagattataagcctgctttctggcaaggaagaggcaatccaagtagctattgctgaactgcgtcagcaacatgataaagaaattaaagagctggaaaacctgctgtcccaggaggaagaggagaatattgttttagaagaggagaacaaaaaggctgttgataaaaccaatcagcttatggaaacactgaaaaccatcaaaaaggaaaacattcagcaaaaggcacagttggattcctttgttaaatccatgtcttctctccaaaatgatcgagaccgcatagtgggtgactatcaacagctggaagagcgacatctctctataatcttggaaaaagaccaactcatccaagaggctgctgcagagaataataagcttaaagaagaaatacgaggcttgagaagtcatatggatgatctcaattctgagaatgccaagctagatgcagaactgatccaatatagagaagacctgaaccaagtgataacaataaaggacagccaacaaaagcagcttcttgaagttcaacttcagcaaaataaggagctggaaaataaatatgctaaattagaagaaaagctgaaggaatctgaggaagcaaatgaggatctgcggaggtcctttaatgccctacaagaagagaaacaagatttatctaaagagattgagagtttgaaagtatctatatcccagctaacaagacaagtaacagccttgcaagaagaaggtactttaggactctatcatgcccagttaaaagtaaaagaagaagaggtacacaggttaagtgctttgttttcctcctctcaaaagagaattgcagaactggaagaagaattggtttgtgttcaaaaggaagctgccaagaaggtaggtgaaattgaagataaactgaagaaagaattaaagcatcttcatcatgatgcagggataatgagaaatgaaactgaaacagcagaagagagagtggcagagctagcaagagatttggtggagatggaacagaaattactcatggtcaccaaagaaaataaaggtctcacagcacaaattcagtcttttggaaggtctatgagttccttgcaaaatagtagagatcatgccaatgaggaacttgatgaactgaaaaggaaatatgatgccagtctgaaggaattggcacagttgaaagaacagggactcttaaacagagagagagatgctcttctttctgaaaccgccttttcaatgaactccactgaggagaatagcttgtctcaccttgagaaacttaaccaacagctcctatccaaagatgagcaattgcttcacttgtcctcacaactagaagattcttataaccaagtgcagtccttttccaaggctatggccagtctgcagaatgagagagatcacctgtggaatgagctggagaaatttcgaaagtcagaggaagggaagcagaggtctgcagctcagccttccaccagcccagctgaagtacagagtttaaaaaaagctatgtcttcactccaaaatgacagagacagactactgaaggaattgaagaatctgcagcagcaatacttacagattaatcaagagatcactgagttacatccactgaaggctcaacttcaggagtatcaagataagacaaaagcatttcagattatgcaagaagagctcaggcaggaaaacctctcctggcagcatgagctgcatcagctcaggatggagaagagttcctgggaaatacatgagaggagaatgaaggaacagtaccttatggctatctcagataaagatcagcagctcagtcatctgcagaatcttataagggaattgaggtcttcttcctcccagactcagcctctcaaagtgcaataccaaagacaggcatccccagagacatcagcttccccagatgggtcacaaaatctggtttatgagacagaacttctcaggacccagctcaatgacagcttaaaggaaattcaccaaaaggagttaagaattcagcaactgaacagcaacttctctcagctactggaagagaaaaacaccctttccattcagctctgcgataccagtcagagtcttcgtgagaaccagcagcactatggtgaccttttaaatcactgtgcagtcttggagaagcaggttcaagagctgcaggcggggccactaaatatagatgttgctccaggagctccccaggaaaagaatggagttcacagaaagagtgaccctgaggaactaagggaaccgcagcaaagcttttctgaagctcagcagcagctatgcaacaccagacaggaagtgaatgaattaaggaagctgctggaagaagaacgagaccaaagagtggctgctgagaatgctctctctgtggccgaggagcagatcagacggttagagcacagtgaatgggactcttcccggactcctatcattggctcctgtggcactcaggagcaggcactgttaatagatcttacaagcaacagttgtcgaaggacccggagtggcgttggatggaagcgagtcctgcgttcactctgtcattcacggacccgagtgccacttctagcagccatctactttctaatgattcatgtcctgctcattctgtgttttacgggccatctatagacttagttgttactctttggaccactcccctcaaaacttggaattctctcacctctaacatcagaacatcaattccagtggaacagtcttcccatttacaggtcttctctccaactcttcacggaaagtgcctgcaaaaacagaggtggatacgaggacaggttggagctgcagggactggcgagtctgctttcttctactgccctgagcctgaacgcttctgcttaatctgagaatcacatttggtttgttgagcctaatatttgttgagattttgcaggaccctgatcttttgtggtcctgtaaaagatactgaggaatgtctttcagccaagccaagaggatggtttcaataaacctaataatctgaagttcagtatcattttgattgataactttctttgccttgtttgcctgtattttctcctgtttcagggggaaggtggctctgcataaacagagttcagggaaatgaacatgtcacctcataggacatctgatttaggtctcttgcagaatagggtggtgaaagctgaaggaactccctaggggttttagctgttagatcacatgggaggacagcatcttcttccctgccaatttcagatataattggagggagaatttcaggtcttagactataaggatagaatccctttgcttttgcccttgatcacatgtatactaaggtattaagtggcccaagtctttcctttcaccaaagggcagggagaagtgtctatggacagcagggttccaattcttgtcattccaggaatatctgaatattcctggaatgtggaccctgagacagtgctcaggggccactgggagccaatattaggcattgactctcagccaggagtctgactggtctaacaccacactgcaactcctgacctcttgaagtactaagctactttgctgttagtgacagttattacagtttctcagccccattgtctctgccctctgtggcaatggaaggagaatatagagaagacaaaattaaatatagatagacctgagaaggacagccaggatagaattccatttgtgcctattccctgcctcccctcccctcccccatcctaccagttggttattttctcattgcatacgtgatgtgttcactgcctagcctctccctaaagaagagagaagacaagtgggctgactgatctgctctaaatctactgtggtgattaaatcttggttacaacatcctgggaagtttcctgaacaactgtaaaataataaaattattttcagaatgaaaaaaaaaaaaaccccgggcttatgtccggggggaacaaggttgaagggcctggccagtggtccgaccactcttgaaaggggaaccggggcccaaagggcgataataaac

SEQ ID NO: 567308 - DNA, 475 bp, Homo sapiens
  misc_feature (39)..(39): n is a, c, g, or t
ctctgggcccttttcgaggatcccccccagaaaaaccgntacattttggcccttttttccaagcggaaagccctcagcagagaactctatgaatattgtattaaagaaggctatgccgcccaaaccctggttgcaaaatggaaaaagcaaggatattagaacttgtgctgcctgcggggcattcaaacccgggaccccaacttcgggacgaactgcattttccgggggcccaaaaacaagctggaagtgggccgcatcatcgagggccccccctggggctgttgtggctgctttggcttaggctggcgcgcccccccctggactttggactttgcaggtttctgcctgtcccccccccccctttctgggagcaacgagcagtgccccaggcccgagttggagcccggtttttatggggaaggcttccctgtttatcagctgtgatttgtaaaaataaaatctttccatctctcga

SEQ ID NO: 567309 - DNA, 11975 bp, Homo sapiens
  misc_feature (603)..(603): n is a, c, g, or t
  misc_feature (618)..(618): n is a, c, g, or t
  misc_feature (676)..(676): n is a, c, g, or t
  misc_feature (685)..(685): n is a, c, g, or t
  misc_feature (1078)..(1078): n is a, c, g, or t
  misc_feature (1116)..(1116): n is a, c, g, or t
ttttttttttatagtgcatgcaggaaattgcaattttatttatgtttgtattgatacatatttgtacatatttatggggtgtggtagtttgatatatgcatacaatgtgtaatgatcaaatcagggtgtttaggatatctatcacctcaaacatttatcatttttgtgtttggaacatttctaatctcctagttattttgaaatatataacatattgttaactatagtcaccctactgtgctatcaaacacttgaacttattccttctatctacgtttgtacccattaaccaatctcttccctccctcccccaactccaccttcccagcctctggtacttatctctactccatgagatcaactttttaagctcccacatgagtgagaccatgggatatttgtctttctgtgccagacttatttcacttagaataatgacctccagttccgtaagatgggcagccaggaaaggccttacttagctgatgtttgaattgtgaagttatgtaatcattaagatgagtatacatacaatgggccagctgagtgcacagcaagattcaataaattcaaactaacattactcttattgccaagagagtncctgaaatgacagcncattggaaactggctactttccttccctttccttaggggtttaaggaaagcatgagtnatttcagtnttttgctggagctcctcactgacactcattgcagagcctgagccctcaactctcaatctttgcttaggtcctggcttaggctccactttgtaagaggcaccttcctagtattcactactctctctctcacaatcatgtccttacagacattgctgatcctctttcatactgacaccgggttctagtccgagttccatcactaagtcgctgtttgactttgggcaagttacttctgtggttaattatttttcatcaacaaaatcaaaaggtgaaactagacgaacaactaagaggctccagtattttttcaatctaagagtcccatatcccccactcccttctcacagctcattcaacaatcctaatggcagcgggtgcccgcagtctcaagtntctgccgaagcccaagccgctgtctcggtcagtcacanccgacgaagaggaggaattggaggaagccagcataaccacctcacactgagaacatctgacctttcccagaacgcccgcccactcgacacttcctgtccctccccagatcttgttccggggcacctactcgggtctaatcactcccctcattcactctttagggtccattgctgtttctttgaggaagcggagcatcttctgtcgttgattggtttccgtcattgttgataggttggtaacaaacaaggtgtgcctggtctcctggtaacgtcctgccgatagtcctgattggtcggtgtcttaatcccatcttccgtcccaactgctagtggctgagtccctggcggggcgcggcggtggaaggtgtcgcgtacgggcttcccgagctgacgtggcttgaattgggaggggggcagctggagcctcaggcggcagcgcttctagaaatgctgagccgattatcaggattagcaaatgttgttttgcatgaattatcaggagatgatgacactgatcagaatatgagggctcccctagaccctgaattacaccaagaatctgacatggaatttaataatactacacaagaagatgttcaggagcgcctggcttatgcagagcaattggtggtggagctaaaagatattattagacagaaggatgttcaactgcagcagaaagatgaagctctacaggaagagagaaaagctgctgataacaaaattaaaaaactaaaacttcatgcgaaggccaaattaacttctttgaataaatacatagaagaaatgaaagcacaaggagggactgttctgcctacagaacctcagtcagaggagcaactttccaagcatgacaagagttctacagaggaagagatggaaatagaaaagataaaacataagctccaggagaaggaggaactaatcagcactttgcaagcccagcttactcaggcacaggcagaacaacctgcacagagttctacagagatggaagaatttgtaatgatgaagcaacagctccaggagaaggaagaattcattagcactttacaagcccagctcagccagacacaggcagagcaagctgcacagcaggtggtccgagagaaagatgcccgctttgaaacacaagttcgtcttcatgaagatgagcttcttcagttagtaacccaggcagatgtggaaacagagatgcaacagaaattgagggtgctgcaaaggaagcttgaggaacacgaagaatccttggtgggccgtgctcaggtcgttgacttgctgcaacaggagctgactgctgctgagcagagaaaccagattctctctcagcagttacagcagatggaagctgagcataatactttgaggaacactgtggaaacagaaagagaggagtccaagattctactggaaaagatggaacttgaagtggcagagagaaaattatccttccataatctgcaggaagaaatgcatcatcttttagaacagtttgagcaagcaggccaagcccaggctgaactagagtctcggtatagtgctttggagcagaagcacaaagcagaaatggaagagaagacctctcatattttgagtcttcaaaagactggacaagagctgcagtctgcctgtgatgctctaaaggatcaaaattcaaagcttctccaagataagaatgaacaggcagttcagtcagcccagaccattcagcaactggaagatcagctccagcaaaaatccaaagaaattagccaatttctaaatagactgcccttgcaacaacatgaaacagcatctcagacttctttcccagatgtttataatgagggcacacaggcagtcactgaggagaatattgcttctttgcagaagagagtggtagaactagagaatgaaaagggagccttgctccttagttctatagagctggaggagctgaaagctgagaatgaaaaactgtcttctcagattactctcctagaggctcagaatagaactggggaggcagacagagaagtcagtgagatcagcattgttgatattgccaacaagaggagctcttctgctgaggaaagtggacaagatgttctagaaaacacattttctcagaaacataaagaattatcagttttattgttggaaatgaaagaagctcaagaggaaattgcatttcttaaattacagctccagggaaaaagggctgaggaagcagatcatgaggtccttgaccagaaagaaatgaaacagatggagggtgagggaatagctccaattaaaatgaaagtatttcttgaagatacagggcaagattttcccttaatgccaaatgaagagagcagtcttccagcagttgaaaaagaacaggcgagcactgaacatcaaagtagaacatctgaggaaatatctttaaatgatgctggagtagaattgaaatcaacaaagcaggatggtgataaatccctttctgctgtaccagatattggtcagtgtcatcaggatgagttggaaaggttaaaaagtcaaattttggagctcgagctaaactttcataaagcacaagaaatctatgagaaaaatttagatgagaaagctaaggaaattagcaacctaaaccagttgattgaggagtttaagaaaaatgctgacaacaacagcagtgcattcactgctttgtctgaagaaagagaccagcttctctctcaggtgaaggaacttagcatggtaacagaattgagggctcaggtaaagcaactggaaatgaaccttgcagaagcagaaaggcaaagaagacttgattatgaaagccaaactgcccatgacaacctgctcactgaacagatccatagtctcagcatagaagccaaatctaaagatgtgaaaattgaagttttacagaatgaactggatgatgtgcagcttcagttttctgagcagagtaccctgataagaagcctgcaaagccagctgcaaaataaggaaagtgaagtgcttgagggggcagaacgtgtaaggcatatctcaagtaaagtggaagaactgtcccaggctctttcacagaaggaacttgaaataacaaaaatggatcagctcttactagagaaaaagagagatgtggaaaccctccaacaaaccatcgaggagaaggatcaacaagtgacagaaatcagctttagtatgactgagaaaatggttcagcttaatgaagagaagttttctcttggggttgaaattaagactcttaaagaacagctaaatttattatccagagctgaggaagcaaaaaaagagcaggtggaagaagataatgaagtttcttctggccttaaacaaaattatgatgagatgagcccagcaggacaaataagtaaggaagaacttcagcatgaatttgaccttctgaagaaagaaaatgagcagagaaagagaaagctccaggcagctcttattaacagaaaggagcttctgcaaagagtcagtagattggaagaagaattagccaacttgaaagatgaatctaagaaagaaatcccactcagtgagactgagaggggagaagtggaagaagataaagaaaacaaagaatactcagaaaaatgtgtgacttctaagtgccaagaaatagaaatttatttaaaacagacaatatctgagaaagaagtggaactacagcatataaggaaggatttggaagaaaagctggcagctgaagagcaattccaggctctggtcaaacagatgaatcagaccttgcaagataaaacaaaccaaatagatttgctccaagcagaaatcagtgaaaaccaagcaattatccagaagttaatcacaagtaacacggatgcaagtgatggggactccgtagcacttgtaaaggaaacagtggtgataagtccaccttgtacaggtagtagtgaacactggaaaccagaactagaagaaaagatactggcccttgaaaaagaaaaggagcaacttcaaaagaagctacaggaagccttaacctcccgcaaggcaattcttaaaaaggcacaggagaaagaaagacatctcagggaggagctaaagcaacagaaagatgactataatcgcttgcaagaacagtttgatgagcaaagcaaggaaaatgagaatattggagaccagctaaggcaactccagattcaagtaagggaatccatagacggaaaactcccaagcacagaccagcaggaatcgtgttcttccactccaggtttagaagaacctttattcaaagccacagaacagcatcacactcaacctgttttagagtccaacttgtgcccagactggccttctcattctgaagatgcgagtgctctgcagggcggaacttctgttgcccagattaaggcccagctgaaggaaatagaggctgagaaagtagagttagaattgaaagttagttctacaacaagtgagcttactaaaaaatcagaagaggtatttcagttacaagagcagataaataaacagggtttagaaatcgagagtctaaagacagtatcccatgaagctgaagtccatgccgaaagcctgcagcagaaattggaaagcagccaactacaaattgctggcctagaacatctaagagaattgcaacctaaactggatgaactgcaaaaactcataagcaaaaaggaagaagacgttagctacctttctggacaacttagtgagaaagaagcagctctcactaaaatacagacagagataatagaacaagaagatttaattaaggctctgcatacacagctagaaatgcaagccaaagagcatgatgagaggataaagcagctacaggtggaactttgtgaaatgaagcaaaaaccagaagagattggagaagaaagtagagcaaagcaacaaatacaaaggaaactgcaagctgcccttatttcccgaaaagaagcactaaaagaaaacaaaagtctccaagaggaattgtctttggccagaggtaccattgaacgtctcaccaagtctctggcagatgtggaaagccaagtttctgctcaaaataaagaaaaagatacggtcttaggaaggttagctcttcttcaagaagaaagagacaaactcattacagaaatggacaggtctttattggaaaatcagagtctcagcagctcctgtgaaagtctaaaactagctctagagggtcttactgaagacaaggaaaagttagtgaaggaaattgaatctttgaaatcttctaagattgcagaaagtactgagtggcaagagaaacacaaggagctacaaaaagagtatgaaattcttctgcagtcctatgagaatgttagtaatgaagcagaaaggattcagcatgtggtggaagctgtgaggcaagagaaacaagaactgtatggcaagttaagaagcacagaggcaaacaagaaggagacagaaaagcagttgcaggaagctgagcaagaaatggaggaaatgaaagaaaagatgagaaagtttgctaaatctaaacagcagaaaatcctagagctggaagaagagaatgaccggcttagggcagaggtgcaccctgcaggagatacagctaaagagtgtatggaaacacttctttcttccaatgccagcatgaaggaagaacttgaaagggtcaaaatggagtatgaaaccctttctaagaagtttcagtctttaatgtctgagaaagactctctaagtgaagaggttcaagatttaaagcatcagatagaagataatgtatctaaacaagctaacctagaggccaccgagaaacatgataaccaaacgaatgtcactgaagagggaacacagtctataccaggtgagactgaagagcaagactctctgagtatgagcacaagacctacatgttcagaatcggttccatcagcgaagagtgccaaccctgctgtaagtaaggatttcagctcacatgatgaaattaataactacctacagcagattgatcagctcaaagaaagaattgctggattagaggaggagaagcagaaaaacaaggaatttagccagactttagaaaatgagaaaaataccttactgagtcagatatcaacaaaggatggtgaactaaaaatgcttcaggaggaagtaaccaaaatgaacctgttaaatcagcaaatccaagaagaactctccagagttaccaaactaaaggagacagcagaagaagagaaagatgatttggaagagaggcttatgaatcaattagcagaacttaatggaagcattgggaattactgtcaggatgttacagatgcccaaataaaaaatgagctattggaatctgaaatgaagaaccttaaaaagtgtgtgagtgaattggaagaagaaaagcagcagttagtcaaggaaaaaactaaggtggaatcagaaatacgaaaggaatatttggagaaaatacaaggtgctcagaaagaacccggaaataaaagccatgcaaaggaacttcaggaactgttaaaagaaaaacaacaagaagtaaagcagctacagaaggactgcatcaggtatcaagagaaaattagtgctctggagagaactgttaaagctctagaatttgttcaaactgaatctcaaaaagatttggaaataaccaaagaaaatctggctcaagcagttgaacaccgcaaaaaggcacaagcagaattagctagcttcaaagtcctgctagatgacactcaaagtgaagcagcaagggtcctagcagacaatctcaagttgaaaaaggaacttcagtcaaataaagaatcagttaaaagccagatgaaacaaaaggatgaagatcttgagcgaagactggaacaggcagaagagaagcacctgaaagagaagaagaatatgcaagagaaactggatgctttgcgcagagaaaaagtccacttggaagagacaattggagagattcaggttactttgaacaagaaagacaaggaagttcagcaacttcaggaaaacttggacagtactgtgacccagcttgcagcctttactaagagcatgtcttccctccaggatgatcgtgacagggtgatagatgaagctaagaaatgggagaggaagtttagtgatgcgattcaaagcaaagaagaagaaattagactcaaagaagataattgcagtgttctaaaggatcaacttagacagatgtccatccatatggaagaattaaagattaacatttccaggcttgaacatgacaagcagatttgggagtccaaggcccagacagaggtccagcttcagcagaaggtctgtgatactctacagggggaaaacaaagaacttttgtcccagctagaagagacacgccacctataccacagttctcagaatgaattagctaagttggaatcagaacttaagagtctcaaagaccagttgactgatttaagtaactctttagaaaaatgtaaggaacaaaaaggaaacttggaagggatcataaggcagcaagaggctgatattcaaaattctaagttcagttatgaacaactggagactgatcttcaggcctccagagaactgaccagtaggctgcatgaagaaataaatatgaaagagcaaaagattataagcctgctttctggcaaggaagaggcaatccaagtagctattgctgaactgcgtcagcaacatgataaagaaattaaagagctggaaaacctgctgtcccaggaggaagaggagaatattgttttagaagaggagaacaaaaaggctgttgataaaaccaatcagcttatggaaacactgaaaaccatcaaaaaggaaaacattcagcaaaaggcacagttggattcctttgttaaatccatgtcttctctccaaaatgatcgagaccgcatagtgggtgactatcaacagctggaagagcgacatctctctataatcttggaaaaagaccaactcatccaagaggctgctgcagagaataataagcttaaagaagaaatacgaggcttgagaagtcatatggatgatctcaattctgagaatgccaagctagatgcagaactgatccaatatagagaagacctgaaccaagtgataacaataaaggacagccaacaaaagcagcttcttgaagttcaacttcagcaaaataaggagctggaaaataaatatgctaaattagaagaaaagctgaaggaatctgaggaagcaaatgaggatctgcggaggtcctttaatgccctacaagaagagaaacaagatttatctaaagagattgagagtttgaaagtatctatatcccagctaacaagacaagtaacagccttgcaagaagaaggtactttaggactctatcatgcccagttaaaagtaaaagaagaagaggtacacaggttaagtgctttgttttcctcctctcaaaagagaattgcagaactggaagaagaattggtttgtgttcaaaaggaagctgccaagaaggtaggtgaaattgaagataaactgaagaaagaattaaagcatcttcatcatgatgcagggataatgagaaatgaaactgaaacagcagaagagagagtggcagagctagcaagagatttggtggagatggaacagaaattactcatggtcaccaaagaaaataaaggtctcacagcacaaattcagtcttttggaaggtctatgagttccttgcaaaatagtagagatcatgccaatgaggaacttgatgaactgaaaaggaaatatgatgccagtctgaaggaattggcacagttgaaagaacagggactcttaaacagagagagagatgctcttctttctgaaaccgccttttcaatgaactccactgaggagaatagcttgtctcaccttgagaaacttaaccaacagctcctatccaaagatgagcaattgcttcacttgtcctcacaactagaagattcttataaccaagtgcagtccttttccaaggctatggccagtctgcagaatgagagagatcacctgtggaatgagctggagaaatttcgaaagtcagaggaagggaagcagaggtctgcagctcagccttccaccagcccagctgaagtacagagtttaaaaaaagctatgtcttcactccaaaatgacagagacagactactgaaggaattgaagaatctgcagcagcaatacttacagattaatcaagagatcactgagttacatccactgaaggctcaacttcaggagtatcaagataagacaaaagcatttcagattatgcaagaagagctcaggcaggaaaacctctcctggcagcatgagctgcatcagctcaggatggagaagagttcctgggaaatacatgagaggagaatgaaggaacagtaccttatggctatctcagataaagatcagcagctcagtcatctgcagaatcttataagggaattgaggtcttcttcctcccagactcagcctctcaaagtgcaataccaaagacaggcatccccagagacatcagcttccccagatgggtcacaaaatctggtttatgagacagaacttctcaggacccagctcaatgacagcttaaaggaaattcaccaaaaggagttaagaattcagcaactgaacagcaacttctctcagctactggaagagaaaaacaccctttccattcagctctgcgataccagtcagagtcttcgtgagaaccagcagcactatggtgaccttttaaatcactgtgcagtcttggagaagcaggttcaagagctgcaggcggggccactaaatatagatgttgctccaggagctccccaggaaaagaatggagttcacagaaagagtgaccctgaggaactaagggaaccgcagcaaagcttttctgaagctcagcagcagctatgcaacaccagacaggaagtgaatgaattaaggaagctgctggaagaagaacgagaccaaagagtggctgctgagaatgctctctctgtggccgaggagcagatcagacggttagagcacagtgaatgggactcttcccggactcctatcattggctcctgtggcactcaggagcaggcactgttaatagatcttacaagcaacagttgtcgaaggacccggagtggcgttggatggaagcgagtcctgcgttcactctgtcattcacggacccgagtgccacttctagcagccatctactttctaatgattcatgtcctgctcattctgtgttttacgggccatctatagacttagttgttactctttggaccactcccctcaaaacttggaattctctcacctctaacatcagaacatcaattccagtggaacagtcttcccatttacaggtcttctctccaactcttcacggaaagtgcctgcaaaaacagaggtggatacgaggacaggttggagctgcagggactggcgagtctgctttcttctactgccctgagcctgaacgcttctgcttaatctgagaatcacatttggtttgttgagcctaatatttgttgagattttgcaggaccctgatcttttgtggtcctgtaaaagatactgaggaatgtctttcagccaagccaagaggatggtttcaataaacctaataatctgaagttcagtatcattttgattgataactttctttgccttgtttgcctgtattttctcctgtttcagggggaaggtggctctgcataaacagagttcagggaaatgaacatgtcacctcataggacatctgatttaggtctcttgcagaatagggtggtgaaagctgatctgctctaaatctactgtggtgattaaatcttggttacaacatcctgggaagtttcctgaacaactgtaaaataataaaattattttcagaatga

SEQ ID NO: 567310 - DNA, 1171 bp, Homo sapiens
ggttagaaaggagatgcggtgttgctgctggaccgtgattgggggtgctgtctgcagtgttcctgggcctccagtcttgtccctggaggcctctgtaggaagtggatgcttgatgccctgtcctgtgcctccccgaggctctgcgagcagggcgaacgtagccatggcagcgtgagcatggtatgcaccattgggggcacgcgctgttgccggtattgtgcatgctggagccgtggcttgcatgctgctggttggcgcaacttgtgtactaaggcaggggtcaggttcggccatggctatcctgcatggccagttgtaccggggactcggacgagggcccgccatagaatgacttgccgagacttccgtacgctgagagattgcatggcgcgcgtacgctcttgccgtgggcacgtggcgtcctattgactcgtcacttgcaagaatgctcaactctttagactgacaaaggttagacgtacctatgacgccgtgccaagcaagatcgagtggatagaagagaccctcaaaggtccccgatcacggagaccctctttccgaaataagagcaagaagtgtacgcgctcacaagtctaagaggctagcgccccttacctttgagggagcaaccattggcacacacgaagtcggactacttggacacggaagagggaaagatcctttgaccacttggccatgatacaccccttgaccgagggagaagacgaatcccggattcaaagggtgtcccggacatgataccaaggctttggccaaggggccaaaatcgcgccaaagcgtacaccccaatgaccaaaataccccggcgagattagggcccttcttacaaccgcggaagttggaggaacacaaagtggagccccttcattccaaattgtggggacggaagggaaaaaacccccgggaacaattttaggagaacgcaggcccacttttcccgtagggccatattggccagtacagccagagtcctagaggccacagcattgggcgaaacgattccttacaggacgttgaatgatgggggaaaaggaacagcctaggtttgagattagaccaccctataccagagacaacaccccagagccggagagaccaacccatatataaaccgaccctttagtcaccgttgggggtataggaaagtata

SEQ ID NO: 567311 - DNA, 254 bp, Homo sapiens
aggcacttgagtgtagcccatgtcagcacgtggtgccacaggaatttctcgtgcagtccgagacctctgtttgtcggaatgttcccaacatgacggcctgtctcctcaccacctctgcaacaccccaaccctgggggctgtgagactgtactgttcatatgctgactacctcacacacgctgcaccacatacgtctgcacgggtcagaacctggccgacctctctggctctcgtgaacgacggcccccccacca

SEQ ID NO: 567312 - DNA, 11895 bp, Homo sapiens
  misc_feature (603)..(603): n is a, c, g, or t
  misc_feature (618)..(618): n is a, c, g, or t
  misc_feature (676)..(676): n is a, c, g, or t
  misc_feature (685)..(685): n is a, c, g, or t
  misc_feature (1078)..(1078): n is a, c, g, or t
  misc_feature (1116)..(1116): n is a, c, g, or t
ttttttttttatagtgcatgcaggaaattgcaattttatttatgtttgtattgatacatatttgtacatatttatggggtgtggtagtttgatatatgcatacaatgtgtaatgatcaaatcagggtgtttaggatatctatcacctcaaacatttatcatttttgtgtttggaacatttctaatctcctagttattttgaaatatataacatattgttaactatagtcaccctactgtgctatcaaacacttgaacttattccttctatctacgtttgtacccattaaccaatctcttccctccctcccccaactccaccttcccagcctctggtacttatctctactccatgagatcaactttttaagctcccacatgagtgagaccatgggatatttgtctttctgtgccagacttatttcacttagaataatgacctccagttccgtaagatgggcagccaggaaaggccttacttagctgatgtttgaattgtgaagttatgtaatcattaagatgagtatacatacaatgggccagctgagtgcacagcaagattcaataaattcaaactaacattactcttattgccaagagagtncctgaaatgacagcncattggaaactggctactttccttccctttccttaggggtttaaggaaagcatgagtnatttcagtnttttgctggagctcctcactgacactcattgcagagcctgagccctcaactctcaatctttgcttaggtcctggcttaggctccactttgtaagaggcaccttcctagtattcactactctctctctcacaatcatgtccttacagacattgctgatcctctttcatactgacaccgggttctagtccgagttccatcactaagtcgctgtttgactttgggcaagttacttctgtggttaattatttttcatcaacaaaatcaaaaggtgaaactagacgaacaactaagaggctccagtattttttcaatctaagagtcccatatcccccactcccttctcacagctcattcaacaatcctaatggcagcgggtgcccgcagtctcaagtntctgccgaagcccaagccgctgtctcggtcagtcacanccgacgaagaggaggaattggaggaagccagcataaccacctcacactgagaacatctgacctttcccagaacgcccgcccactcgacacttcctgtccctccccagatcttgttccggggcacctactcgggtctaatcactcccctcattcactctttagggtccattgctgtttctttgaggaagcggagcatcttctgtcgttgattggtttccgtcattgttgataggttggtaacaaacaaggtgtgcctggtctcctggtaacgtcctgccgatagtcctgattggtcggtgtcttaatcccatcttccgtcccaactgctagtggctgagtccctggcggggcgcggcggtggaaggtgtcgcgtacgggcttcccgagctgacgtggcttgaattgggaggggggcagctggagcctcaggcggcagcgcttctagaaatgctgagccgattatcaggattagcaaatgttgttttgcatgaattatcaggagatgatgacactgatcagaatatgagggctcccctagaccctgaattacaccaagaatctgacatggaatttaataatactacacaagaagatgttcaggagcgcctggcttatgcagagcaattggtggtggagctaaaagatattattagacagaaggatgttcaactgcagcagaaagatgaagctctacaggaagagagaaaagctgctgataacaaaattaaaaaactaaaacttcatgcgaaggccaaattaacttctttgaataaatacatagaagaaatgaaagcacaaggagggactgttctgcctacagaacctcagtcagaggagcaactttccaagcatgacaagagttctacagaggaagagatggaaatagaaaagataaaacataagctccaggagaaggaggaactaatcagcactttgcaagcccagcttactcaggcacaggcagaacaacctgcacagagttctacagagatggaagaatttgtaatgatgaagcaacagctccaggagaaggaagaattcattagcactttacaagcccagctcagccagacacaggcagagcaagctgcacagcaggtggtccgagagaaagatgcccgctttgaaacacaagttcgtcttcatgaagatgagcttcttcagttagtaacccaggcagatgtggaaacagagatgcaacagaaattgagggtgctgcaaaggaagcttgaggaacacgaagaatccttggtgggccgtgctcaggtcgttgacttgctgcaacaggagctgactgctgctgagcagagaaaccagattctctctcagcagttacagcagatggaagctgagcataatactttgaggaacactgtggaaacagaaagagaggagtccaagattctactggaaaagatggaacttgaagtggcagagagaaaattatccttccataatctgcaggaagaaatgcatcatcttttagaacagtttgagcaagcaggccaagcccaggctgaactagagtctcggtatagtgctttggagcagaagcacaaagcagaaatggaagagaagacctctcatattttgagtcttcaaaagactggacaagagctgcagtctgcctgtgatgctctaaaggatcaaaattcaaagcttctccaagataagaatgaacaggcagttcagtcagcccagaccattcagcaactggaagatcagctccagcaaaaatccaaagaaattagccaatttctaaatagactgcccttgcaacaacatgaaacagcatctcagacttctttcccagatgtttataatgagggcacacaggcagtcactgaggagaatattgcttctttgcagaagagagtggtagaactagagaatgaaaagggagccttgctccttagttctatagagctggaggagctgaaagctgagaatgaaaaactgtcttctcagattactctcctagaggctcagaatagaactggggaggcagacagagaagtcagtgagatcagcattgttgatattgccaacaagaggagctcttctgctgaggaaagtggacaagatgttctagaaaacacattttctcagaaacataaagaattatcagttttattgttggaaatgaaagaagctcaagaggaaattgcatttcttaaattacagctccagggaaaaagggctgaggaagcagatcatgaggtccttgaccagaaagaaatgaaacagatggagggtgagggaatagctccaattaaaatgaaagtatttcttgaagatacagggcaagattttcccttaatgccaaatgaagagagcagtcttccagcagttgaaaaagaacaggcgagcactgaacatcaaagtagaacatctgaggaaatatctttaaatgatgctggagtagaattgaaatcaacaaagcaggatggtgataaatccctttctgctgtaccagatattggtcagtgtcatcaggatgagttggaaaggttaaaaagtcaaattttggagctcgagctaaactttcataaagcacaagaaatctatgagaaaaatttagatgagaaagctaaggaaattagcaacctaaaccagttgattgaggagtttaagaaaaatgctgacaacaacagcagtgcattcactgctttgtctgaagaaagagaccagcttctctctcaggtgaaggaacttagcatggtaacagaattgagggctcaggtaaagcaactggaaatgaaccttgcagaagcagaaaggcaaagaagacttgattatgaaagccaaactgcccatgacaacctgctcactgaacagatccatagtctcagcatagaagccaaatctaaagatgtgaaaattgaagttttacagaatgaactggatgatgtgcagcttcagttttctgagcagagtaccctgataagaagcctgcaaagccagctgcaaaataaggaaagtgaagtgcttgagggggcagaacgtgtaaggcatatctcaagtaaagtggaagaactgtcccaggctctttcacagaaggaacttgaaataacaaaaatggatcagctcttactagagaaaaagagagatgtggaaaccctccaacaaaccatcgaggagaaggatcaacaagtgacagaaatcagctttagtatgactgagaaaatggttcagcttaatgaagagaagttttctcttggggttgaaattaagactcttaaagaacagctaaatttattatccagagctgaggaagcaaaaaaagagcaggtggaagaagataatgaagtttcttctggccttaaacaaaattatgatgagatgagcccagcaggacaaataagtaaggaagaacttcagcatgaatttgaccttctgaagaaagaaaatgagcagagaaagagaaagctccaggcagctcttattaacagaaaggagcttctgcaaagagtcagtagattggaagaagaattagccaacttgaaagatgaatctaagaaagaaatcccactcagtgagactgagaggggagaagtggaagaagataaagaaaacaaagaatactcagaaaaatgtgtgacttctaagtgccaagaaatagaaatttatttaaaacagacaatatctgagaaagaagtggaactacagcatataaggaaggatttggaagaaaagctggcagctgaagagcaattccaggctctggtcaaacagatgaatcagaccttgcaagataaaacaaaccaaatagatttgctccaagcagaaatcagtgaaaaccaagcaattatccagaagttaatcacaagtaacacggatgcaagtgatggggactccgtagcacttgtaaaggaaacagtggtgataagtccaccttgtacaggtagtagtgaacactggaaaccagaactagaagaaaagatactggcccttgaaaaagaaaaggagcaacttcaaaagaagctacaggaagccttaacctcccgcaaggcaattcttaaaaaggcacaggagaaagaaagacatctcagggaggagctaaagcaacagaaagatgactataatcgcttgcaagaacagtttgatgagcaaagcaaggaaaatgagaatattggagaccagctaaggcaactccagattcaagtaagggaatccatagacggaaaactcccaagcacagaccagcaggaatcgtgttcttccactccaggtttagaagaacctttattcaaagccacagaacagcatcacactcaacctgttttagagtccaacttgtgcccagactggccttctcattctgaagatgcgagtgctctgcagggcggaacttctgttgcccagattaaggcccagctgaaggaaatagaggctgagaaagtagagttagaattgaaagttagttctacaacaagtgagcttactaaaaaatcagaagaggtatttcagttacaagagcagataaataaacagggtttagaaatcgagagtctaaagacagtatcccatgaagctgaagtccatgccgaaagcctgcagcagaaattggaaagcagccaactacaaattgctggcctagaacatctaagagaattgcaacctaaactggatgaactgcaaaaactcataagcaaaaaggaagaagacgttagctacctttctggacaacttagtgagaaagaagcagctctcactaaaatacagacagagataatagaacaagaagatttaattaaggctctgcatacacagctagaaatgcaagccaaagagcatgatgagaggataaagcagctacaggtggaactttgtgaaatgaagcaaaaaccagaagagattggagaagaaagtagagcaaagcaacaaatacaaaggaaactgcaagctgcccttatttcccgaaaagaagcactaaaagaaaacaaaagtctccaagaggaattgtctttggccagaggtaccattgaacgtctcaccaagtctctggcagatgtggaaagccaagtttctgctcaaaataaagaaaaagatacggtcttaggaaggttagctcttcttcaagaagaaagagacaaactcattacagaaatggacaggtctttattggaaaatcagagtctcagcagctcctgtgaaagtctaaaactagctctagagggtcttactgaagacaaggaaaagttagtgaaggaaattgaatctttgaaatcttctaagattgcagaaagtactgagtggcaagagaaacacaaggagctacaaaaagagtatgaaattcttctgcagtcctatgagaatgttagtaatgaagcagaaaggattcagcatgtggtggaagctgtgaggcaagagaaacaagaactgtatggcaagttaagaagcacagaggcaaacaagaaggagacagaaaagcagttgcaggaagctgagcaagaaatggaggaaatgaaagaaaagatgagaaagtttgctaaatctaaacagcagaaaatcctagagctggaagaagagaatgaccggcttagggcagaggtgcaccctgcaggagatacagctaaagagtgtatggaaacacttctttcttccaatgccagcatgaaggaagaacttgaaagggtcaaaatggagtatgaaaccctttctaagaagtttcagtctttaatgtctgagaaagactctctaagtgaagaggttcaagatttaaagcatcagatagaagataatgtatctaaacaagctaacctagaggccaccgagaaacatgataaccaaacgaatgtcactgaagagggaacacagtctataccaggtgagactgaagagcaagactctctgagtatgagcacaagacctacatgttcagaatcggttccatcagcgaagagtgccaaccctgctgtaagtaaggatttcagctcacatgatgaaattaataactacctacagcagattgatcagctcaaagaaagaattgctggattagaggaggagaagcagaaaaacaaggaatttagccagactttagaaaatgagaaaaataccttactgagtcagatatcaacaaaggatggtgaactaaaaatgcttcaggaggaagtaaccaaaatgaacctgttaaatcagcaaatccaagaagaactctccagagttaccaaactaaaggagacagcagaagaagagaaagatgatttggaagagaggcttatgaatcaattagcagaacttaatggaagcattgggaattactgtcaggatgttacagatgcccaaataaaaaatgagctattggaatctgaaatgaagaaccttaaaaagtgtgtgagtgaattggaagaagaaaagcagcagttagtcaaggaaaaaactaaggtggaatcagaaatacgaaaggaatatttggagaaaatacaaggtgctcagaaagaacccggaaataaaagccatgcaaaggaacttcaggaactgttaaaagaaaaacaacaagaagtaaagcagctacagaaggactgcatcaggtatcaagagaaaattagtgctctggagagaactgttaaagctctagaatttgttcaaactgaatctcaaaaagatttggaaataaccaaagaaaatctggctcaagcagttgaacaccgcaaaaaggcacaagcagaattagctagcttcaaagtcctgctagatgacactcaaagtgaagcagcaagggtcctagcagacaatctcaagttgaaaaaggaacttcagtcaaataaagaatcagttaaaagccagatgaaacaaaaggatgaagatcttgagcgaagactggaacaggcagaagagaagcacctgaaagagaagaagaatatgcaagagaaactggatgctttgcgcagagaaaaagtccacttggaagagacaattggagagattcaggttactttgaacaagaaagacaaggaagttcagcaacttcaggaaaacttggacagtactgtgacccagcttgcagcctttactaagagcatgtcttccctccaggatgatcgtgacagggtgatagatgaagctaagaaatgggagaggaagtttagtgatgcgattcaaagcaaagaagaagaaattagactcaaagaagataattgcagtgttctaaaggatcaacttagacagatgtccatccatatggaagaattaaagattaacatttccaggcttgaacatgacaagcagatttgggagtccaaggcccagacagaggtccagcttcagcagaaggtctgtgatactctacagggggaaaacaaagaacttttgtcccagctagaagagacacgccacctataccacagttctcagaatgaattagctaagttggaatcagaacttaagagtctcaaagaccagttgactgatttaagtaactctttagaaaaatgtaaggaacaaaaaggaaacttggaagggatcataaggcagcaagaggctgatattcaaaattctaagttcagttatgaacaactggagactgatcttcaggcctccagagaactgaccagtaggctgcatgaagaaataaatatgaaagagcaaaagattataagcctgctttctggcaaggaagaggcaatccaagtagctattgctgaactgcgtcagcaacatgataaagaaattaaagagctggaaaacctgctgtcccaggaggaagaggagaatattgttttagaagaggagaacaaaaaggctgttgataaaaccaatcagcttatggaaacactgaaaaccatcaaaaaggaaaacattcagcaaaaggcacagttggattcctttgttaaatccatgtcttctctccaaaatgatcgagaccgcatagtgggtgactatcaacagctggaagagcgacatctctctataatcttggaaaaagaccaactcatccaagaggctgctgcagagaataataagcttaaagaagaaatacgaggcttgagaagtcatatggatgatctcaattctgagaatgccaagctagatgcagaactgatccaatatagagaagacctgaaccaagtgataacaataaaggacagccaacaaaagcagcttcttgaagttcaacttcagcaaaataaggagctggaaaataaatatgctaaattagaagaaaagctgaaggaatctgaggaagcaaatgaggatctgcggaggtcctttaatgccctacaagaagagaaacaagatttatctaaagagattgagagtttgaaagtatctatatcccagctaacaagacaagtaacagccttgcaagaagaaggtactttaggactctatcatgcccagttaaaagtaaaagaagaagaggtacacaggttaagtgctttgttttcctcctctcaaaagagaattgcagaactggaagaagaattggtttgtgttcaaaaggaagctgccaagaaggtaggtgaaattgaagataaactgaagaaagaattaaagcatcttcatcatgatgcagggataatgagaaatgaaactgaaacagcagaagagagagtggcagagctagcaagagatttggtggagatggaacagaaattactcatggtcaccaaagaaaataaaggtctcacagcacaaattcagtcttttggaaggtctatgagttccttgcaaaatagtagagatcatgccaatgaggaacttgatgaactgaaaaggaaatatgatgccagtctgaaggaattggcacagttgaaagaacagggactcttaaacagagagagagatgctcttctttctgaaaccgccttttcaatgaactccactgaggagaatagcttgtctcaccttgagaaacttaaccaacagctcctatccaaagatgagcaattgcttcacttgtcctcacaactagaagattcttataaccaagtgcagtccttttccaaggctatggccagtctgcagaatgagagagatcacctgtggaatgagctggagaaatttcgaaagtcagaggaagggaagcagaggtctgcagctcagccttccaccagcccagctgaagtacagagtttaaaaaaagctatgtcttcactccaaaatgacagagacagactactgaaggaattgaagaatctgcagcagcaatacttacagattaatcaagagatcactgagttacatccactgaaggctcaacttcaggagtatcaagataagacaaaagcatttcagattatgcaagaagagctcaggcaggaaaacctctcctggcagcatgagctgcatcagctcaggatggagaagagttcctgggaaatacatgagaggagaatgaaggaacagtaccttatggctatctcagataaagatcagcagctcagtcatctgcagaatcttataagggaattgaggtcttcttcctcccagactcagcctctcaaagtgcaataccaaagacaggcatccccagagacatcagcttccccagatgggtcacaaaatctggtttatgagacagaacttctcaggacccagctcaatgacagcttaaaggaaattcaccaaaaggagttaagaattcagcaactgaacagcaacttctctcagctactggaagagaaaaacaccctttccattcagctctgcgataccagtcagagtcttcgtgagaaccagcagcactatggtgaccttttaaatcactgtgcagtcttggagaagcaggttcaagagctgcaggcggggccactaaatatagatgttgctccaggagctccccaggaaaagaatggagttcacagaaagagtgaccctgaggaactaagggaaccgcagcaaagcttttctgaagctcagcagcagctatgcaacaccagacaggaagtgaatgaattaaggaagctgctggaagaagaacgagaccaaagagtggctgctgagaatgctctctctgtggccgaggagcagatcagacggttagagcacagtgaatgggactcttcccggactcctatcattggctcctgtggcactcaggagcaggcactgttaatagatcttacaagcaacagttgtcgaaggacccggagtggcgttggatggaagcgagtcctgcgttcactctgtcattcacggacccgagtgccacttctagcagccatctactttctaatgattcatgtcctgctcattctgtgttttacggccactgggagccaatattaggcattgactctcagccaggagtctgactggtctaacaccacactgcaactcctgacctcttgaagtactaagctactttgctgttagtgacagttattacagtttctcagccccattgtctctgccctctgtggcaatggaaggagaatatagagaagacaaaattaaatatagatagacctgagaaggacagccaggatagaattccatttgtgcctattccctgcctcccctcccctcccccatcctaccagttggttattttctcattgcatacgtgatgtgttcactgcctagcctctccctaaagaagagagaagacaagtgggctgactgatctgctctaaatctactgtggtgattaaatcttggttacaacatcctgggaagtttcctgaacaactgtaaaataataaaattattttcagaatgaaaaaaaaaaaaaccccgggcttatgtccggggggaacaaggttgaagggcctggccagtggtccgaccactcttgaaaggggaaccggggcccaaagggcgataataaac

SEQ ID NO: 567313 - DNA, 11457 bp, Homo sapiens
  misc_feature (603)..(603): n is a, c, g, or t
  misc_feature (618)..(618): n is a, c, g, or t
  misc_feature (676)..(676): n is a, c, g, or t
  misc_feature (685)..(685): n is a, c, g, or t
  misc_feature (1078)..(1078): n is a, c, g, or t
  misc_feature (1116)..(1116): n is a, c, g, or t
ttttttttttatagtgcatgcaggaaattgcaattttatttatgtttgtattgatacatatttgtacatatttatggggtgtggtagtttgatatatgcatacaatgtgtaatgatcaaatcagggtgtttaggatatctatcacctcaaacatttatcatttttgtgtttggaacatttctaatctcctagttattttgaaatatataacatattgttaactatagtcaccctactgtgctatcaaacacttgaacttattccttctatctacgtttgtacccattaaccaatctcttccctccctcccccaactccaccttcccagcctctggtacttatctctactccatgagatcaactttttaagctcccacatgagtgagaccatgggatatttgtctttctgtgccagacttatttcacttagaataatgacctccagttccgtaagatgggcagccaggaaaggccttacttagctgatgtttgaattgtgaagttatgtaatcattaagatgagtatacatacaatgggccagctgagtgcacagcaagattcaataaattcaaactaacattactcttattgccaagagagtncctgaaatgacagcncattggaaactggctactttccttccctttccttaggggtttaaggaaagcatgagtnatttcagtnttttgctggagctcctcactgacactcattgcagagcctgagccctcaactctcaatctttgcttaggtcctggcttaggctccactttgtaagaggcaccttcctagtattcactactctctctctcacaatcatgtccttacagacattgctgatcctctttcatactgacaccgggttctagtccgagttccatcactaagtcgctgtttgactttgggcaagttacttctgtggttaattatttttcatcaacaaaatcaaaaggtgaaactagacgaacaactaagaggctccagtattttttcaatctaagagtcccatatcccccactcccttctcacagctcattcaacaatcctaatggcagcgggtgcccgcagtctcaagtntctgccgaagcccaagccgctgtctcggtcagtcacanccgacgaagaggaggaattggaggaagccagcataaccacctcacactgagaacatctgacctttcccagaacgcccgcccactcgacacttcctgtccctccccagatcttgttccggggcacctactcgggtctaatcactcccctcattcactctttagggtccattgctgtttctttgaggaagcggagcatcttctgtcgttgattggtttccgtcattgttgataggttggtaacaaacaaggtgtgcctggtctcctggtaacgtcctgccgatagtcctgattggtcggtgtcttaatcccatcttccgtcccaactgctagtggctgagtccctggcggggcgcggcggtggaaggtgtcgcgtacgggcttcccgagctgacgtggcttgaattgggaggggggcagctggagcctcaggcggcagcgcttctagaaatgctgagccgattatcaggattagcaaatgttgttttgcatgaattatcaggagatgatgacactgatcagaatatgagggctcccctagaccctgaattacaccaagaatctgacatggaatttaataatactacacaagaagatgttcaggagcgcctggcttatgcagagcaattggtggtggagctaaaagatattattagacagaaggatgttcaactgcagcagaaagatgaagctctacaggaagagagaaaagctgctgataacaaaattaaaaaactaaaacttcatgcgaaggccaaattaacttctttgaataaatacatagaagaaatgaaagcacaaggagggactgttctgcctacagaacctcagtcagaggagcaactttccaagcatgacaagagttctacagaggaagagatggaaatagaaaagataaaacataagctccaggagaaggaggaactaatcagcactttgcaagcccagcttactcaggcacaggcagaacaacctgcacagagttctacagagatggaagaatttgtaatgatgaagcaacagctccaggagaaggaagaattcattagcactttacaagcccagctcagccagacacaggcagagcaagctgcacagcaggtggtccgagagaaagatgcccgctttgaaacacaagttcgtcttcatgaagatgagcttcttcagttagtaacccaggcagatgtggaaacagagatgcaacagaaattgagggtgctgcaaaggaagcttgaggaacacgaagaatccttggtgggccgtgctcaggtcgttgacttgctgcaacaggagctgactgctgctgagcagagaaaccagattctctctcagcagttacagcagatggaagctgagcataatactttgaggaacactgtggaaacagaaagagaggagtccaagattctactggaaaagatggaacttgaagtggcagagagaaaattatccttccataatctgcaggaagaaatgcatcatcttttagaacagtttgagcaagcaggccaagcccaggctgaactagagtctcggtatagtgctttggagcagaagcacaaagcagaaatggaagagaagacctctcatattttgagtcttcaaaagactggacaagagctgcagtctgcctgtgatgctctaaaggatcaaaattcaaagcttctccaagataagaatgaacaggcagttcagtcagcccagaccattcagcaactggaagatcagctccagcaaaaatccaaagaaattagccaatttctaaatagactgcccttgcaacaacatgaaacagcatctcagacttctttcccagatgtttataatgagggcacacaggcagtcactgaggagaatattgcttctttgcagaagagagtggtagaactagagaatgaaaagggagccttgctccttagttctatagagctggaggagctgaaagctgagaatgaaaaactgtcttctcagattactctcctagaggctcagaatagaactggggaggcagacagagaagtcagtgagatcagcattgttgatattgccaacaagaggagctcttctgctgaggaaagtggacaagatgttctagaaaacacattttctcagaaacataaagaattatcagttttattgttggaaatgaaagaagctcaagaggaaattgcatttcttaaattacagctccagggaaaaagggctgaggaagcagatcatgaggtccttgaccagaaagaaatgaaacagatggagggtgagggaatagctccaattaaaatgaaagtatttcttgaagatacagggcaagattttcccttaatgccaaatgaagagagcagtcttccagcagttgaaaaagaacaggcgagcactgaacatcaaagtagaacatctgaggaaatatctttaaatgatgctggagtagaattgaaatcaacaaagcaggatggtgataaatccctttctgctgtaccagatattggtcagtgtcatcaggatgagttggaaaggttaaaaagtcaaattttggagctcgagctaaactttcataaagcacaagaaatctatgagaaaaatttagatgagaaagctaaggaaattagcaacctaaaccagttgattgaggagtttaagaaaaatgctgacaacaacagcagtgcattcactgctttgtctgaagaaagagaccagcttctctctcaggtgaaggaacttagcatggtaacagaattgagggctcaggtaaagcaactggaaatgaaccttgcagaagcagaaaggcaaagaagacttgattatgaaagccaaactgcccatgacaacctgctcactgaacagatccatagtctcagcatagaagccaaatctaaagatgtgaaaattgaagttttacagaatgaactggatgatgtgcagcttcagttttctgagcagagtaccctgataagaagcctgcaaagccagctgcaaaataaggaaagtgaagtgcttgagggggcagaacgtgtaaggcatatctcaagtaaagtggaagaactgtcccaggctctttcacagaaggaacttgaaataacaaaaatggatcagctcttactagagaaaaagagagatgtggaaaccctccaacaaaccatcgaggagaaggatcaacaagtgacagaaatcagctttagtatgactgagaaaatggttcagcttaatgaagagaagttttctcttggggttgaaattaagactcttaaagaacagctaaatttattatccagagctgaggaagcaaaaaaagagcaggtggaagaagataatgaagtttcttctggccttaaacaaaattatgatgagatgagcccagcaggacaaataagtaaggaagaacttcagcatgaatttgaccttctgaagaaagaaaatgagcagagaaagagaaagctccaggcagctcttattaacagaaaggagcttctgcaaagagtcagtagattggaagaagaattagccaacttgaaagatgaatctaagaaagaaatcccactcagtgagactgagaggggagaagtggaagaagataaagaaaacaaagaatactcagaaaaatgtgtgacttctaagtgccaagaaatagaaatttatttaaaacagacaatatctgagaaagaagtggaactacagcatataaggaaggatttggaagaaaagctggcagctgaagagcaattccaggctctggtcaaacagatgaatcagaccttgcaagataaaacaaaccaaatagatttgctccaagcagaaatcagtgaaaaccaagcaattatccagaagttaatcacaagtaacacggatgcaagtgatggggactccgtagcacttgtaaaggaaacagtggtgataagtccaccttgtacaggtagtagtgaacactggaaaccagaactagaagaaaagatactggcccttgaaaaagaaaaggagcaacttcaaaagaagctacaggaagccttaacctcccgcaaggcaattcttaaaaaggcacaggagaaagaaagacatctcagggaggagctaaagcaacagaaagatgactataatcgcttgcaagaacagtttgatgagcaaagcaaggaaaatgagaatattggagaccagctaaggcaactccagattcaagtaagggaatccatagacggaaaactcccaagcacagaccagcaggaatcgtgttcttccactccaggtttagaagaacctttattcaaagccacagaacagcatcacactcaacctgttttagagtccaacttgtgcccagactggccttctcattctgaagatgcgagtgctctgcagggcggaacttctgttgcccagattaaggcccagctgaaggaaatagaggctgagaaagtagagttagaattgaaagttagttctacaacaagtgagcttactaaaaaatcagaagaggtatttcagttacaagagcagataaataaacagggtttagaaatcgagagtctaaagacagtatcccatgaagctgaagtccatgccgaaagcctgcagcagaaattggaaagcagccaactacaaattgctggcctagaacatctaagagaattgcaacctaaactggatgaactgcaaaaactcataagcaaaaaggaagaagacgttagctacctttctggacaacttagtgagaaagaagcagctctcactaaaatacagacagagataatagaacaagaagatttaattaaggctctgcatacacagctagaaatgcaagccaaagagcatgatgagaggataaagcagctacaggtggaactttgtgaaatgaagcaaaaaccagaagagattggagaagaaagtagagcaaagcaacaaatacaaaggaaactgcaagctgcccttatttcccgaaaagaagcactaaaagaaaacaaaagtctccaagaggaattgtctttggccagaggtaccattgaacgtctcaccaagtctctggcagatgtggaaagccaagtttctgctcaaaataaagaaaaagatacggtcttaggaaggttagctcttcttcaagaagaaagagacaaactcattacagaaatggacaggtctttattggaaaatcagagtctcagcagctcctgtgaaagtctaaaactagctctagagggtcttactgaagacaaggaaaagttagtgaaggaaattgaatctttgaaatcttctaagattgcagaaagtactgagtggcaagagaaacacaaggagctacaaaaagagtatgaaattcttctgcagtcctatgagaatgttagtaatgaagcagaaaggattcagcatgtggtggaagctgtgaggcaagagaaacaagaactgtatggcaagttaagaagcacagaggcaaacaagaaggagacagaaaagcagttgcaggaagctgagcaagaaatggaggaaatgaaagaaaagatgagaaagtttgctaaatctaaacagcagaaaatcctagagctggaagaagagaatgaccggcttagggcagaggtgcaccctgcaggagatacagctaaagagtgtatggaaacacttctttcttccaatgccagcatgaaggaagaacttgaaagggtcaaaatggagtatgaaaccctttctaagaagtttcagtctttaatgtctgagaaagactctctaagtgaagaggttcaagatttaaagcatcagatagaagataatgtatctaaacaagctaacctagaggccaccgagaaacatgataaccaaacgaatgtcactgaagagggaacacagtctataccaggtgagactgaagagcaagactctctgagtatgagcacaagacctacatgttcagaatcggttccatcagcgaagagtgccaaccctgctgtaagtaaggatttcagctcacatgatgaaattaataactacctacagcagattgatcagctcaaagaaagaattgctggattagaggaggagaagcagaaaaacaaggaatttagccagactttagaaaatgagaaaaataccttactgagtcagatatcaacaaaggatggtgaactaaaaatgcttcaggaggaagtaaccaaaatgaacctgttaaatcagcaaatccaagaagaactctccagagttaccaaactaaaggagacagcagaagaagagaaagatgatttggaagagaggcttatgaatcaattagcagaacttaatggaagcattgggaattactgtcaggatgttacagatgcccaaataaaaaatgagctattggaatctgaaatgaagaaccttaaaaagtgtgtgagtgaattggaagaagaaaagcagcagttagtcaaggaaaaaactaaggtggaatcagaaatacgaaaggaatatttggagaaaatacaaggtgctcagaaagaacccggaaataaaagccatgcaaaggaacttcaggaactgttaaaagaaaaacaacaagaagtaaagcagctacagaaggactgcatcaggtatcaagagaaaattagtgctctggagagaactgttaaagctctagaatttgttcaaactgaatctcaaaaagatttggaaataaccaaagaaaatctggctcaagcagttgaacaccgcaaaaaggcacaagcagaattagctagcttcaaagtcctgctagatgacactcaaagtgaagcagcaagggtcctagcagacaatctcaagttgaaaaaggaacttcagtcaaataaagaatcagttaaaagccagatgaaacaaaaggatgaagatcttgagcgaagactggaacaggcagaagagaagcacctgaaagagaagaagaatatgcaagagaaactggatgctttgcgcagagaaaaagtccacttggaagagacaattggagagattcaggttactttgaacaagaaagacaaggaagttcagcaacttcaggaaaacttggacagtactgtgacccagcttgcagcctttactaagagcatgtcttccctccaggatgatcgtgacagggtgatagatgaagctaagaaatgggagaggaagtttagtgatgcgattcaaagcaaagaagaagaaattagactcaaagaagataattgcagtgttctaaaggatcaacttagacagatgtccatccatatggaagaattaaagattaacatttccaggcttgaacatgacaagcagatttgggagtccaaggcccagacagaggtccagcttcagcagaaggtctgtgatactctacagggggaaaacaaagaacttttgtcccagctagaagagacacgccacctataccacagttctcagaatgaattagctaagttggaatcagaacttaagagtctcaaagaccagttgactgatttaagtaactctttagaaaaatgtaaggaacaaaaaggaaacttggaagggatcataaggcagcaagaggctgatattcaaaattctaagttcagttatgaacaactggagactgatcttcaggcctccagagaactgaccagtaggctgcatgaagaaataaatatgaaagagcaaaagattataagcctgctttctggcaaggaagaggcaatccaagtagctattgctgaactgcgtcagcaacatgataaagaaattaaagagctggaaaacctgctgtcccaggaggaagaggagaatattgttttagaagaggagaacaaaaaggctgttgataaaaccaatcagcttatggaaacactgaaaaccatcaaaaaggaaaacattcagcaaaaggcacagttggattcctttgttaaatccatgtcttctctccaaaatgatcgagaccgcatagtgggtgactatcaacagctggaagagcgacatctctctataatcttggaaaaagaccaactcatccaagaggctgctgcagagaataataagcttaaagaagaaatacgaggcttgagaagtcatatggatgatctcaattctgagaatgccaagctagatgcagaactgatccaatatagagaagacctgaaccaagtgataacaataaaggacagccaacaaaagcagcttcttgaagttcaacttcagcaaaataaggagctggaaaataaatatgctaaattagaagaaaagctgaaggaatctgaggaagcaaatgaggatctgcggaggtcctttaatgccctacaagaagagaaacaagatttatctaaagagattgagagtttgaaagtatctatatcccagctaacaagacaagtaacagccttgcaagaagaaggtactttaggactctatcatgcccagttaaaagtaaaagaagaagaggtacacaggttaagtgctttgttttcctcctctcaaaagagaattgcagaactggaagaagaattggtttgtgttcaaaaggaagctgccaagaaggtaggtgaaattgaagataaactgaagaaagaattaaagcatcttcatcatgatgcagggataatgagaaatgaaactgaaacagcagaagagagagtggcagagctagcaagagatttggtggagatggaacagaaattactcatggtcaccaaagaaaataaaggtctcacagcacaaattcagtcttttggaaggtctatgagttccttgcaaaatagtagagatcatgccaatgaggaacttgatgaactgaaaaggaaatatgatgccagtctgaaggaattggcacagttgaaagaacagggactcttaaacagagagagagatgctcttctttctgaaaccgccttttcaatgaactccactgaggagaatagcttgtctcaccttgagaaacttaaccaacagctcctatccaaagatgagcaattgcttcacttgtcctcacaactagaagattcttataaccaagtgcagtccttttccaaggctatggccagtctgcagaatgagagagatcacctgtggaatgagctggagaaatttcgaaagtcagaggaagggaagcagaggtctgcagctcagccttccaccagcccagctgaagtacagagtttaaaaaaagctatgtcttcactccaaaatgacagagacagactactgaaggaattgaagaatctgcagcagcaatacttacaggtcttctctccaactcttcacggaaagtgcctgcaaaaacagaggtggatacgaggacaggttggagctgcagggactggcgagtctgctttcttctactgccctgagcctgaacgcttctgcttaatctgagaatcacatttggtttgttgagcctaatatttgttgagattttgcaggaccctgatcttttgtggtcctgtaaaagatactgaggaatgtctttcagccaagccaagaggatggtttcaataaacctaataatctgaagttcagtatcattttgattgataactttctttgccttgtttgcctgtattttctcctgtttcagggggaaggtggctctgcataaacagagttcagggaaatgaacatgtcacctcataggacatctgatttaggtctcttgcagaatagggtggtgaaagctgaaggaactccctaggggttttagctgttagatcacatgggaggacagcatcttcttccctgccaatttcagatataattggagggagaatttcaggtcttagactataaggatagaatccctttgcttttgcccttgatcacatgtatactaaggtattaagtggcccaagtctttcctttcaccaaagggcagggagaagtgtctatggacagcagggttccaattcttgtcattccaggaatatctgaatattcctggaatgtggaccctgagacagtgctcaggggccactgggagccaatattaggcattgactctcagccaggagtctgactggtctaacaccacactgcaactcctgacctcttgaagtactaagctactttgctgttagtgacagttattacagtttctcagccccattgtctctgccctctgtggcaatggaaggagaatatagagaagacaaaattaaatatagatagacctgagaaggacagccaggatagaattccatttgtgcctattccctgcctcccctcccctcccccatcctaccagttggttattttctcattgcatacgtgatgtgttcactgcctagcctctccctaaagaagagagaagacaagtgggctgactgatctgctctaaatctactgtggtgattaaatcttggttacaacatcctgggaagtttcctgaacaactgtaaaataataaaattattttcagaatga
